United States Patent Application Publication US 2020/0040061 A1 - sequence listing, part 2

SEQ ID NO: 6541 - DNA, 20 bp, Artificial Sequence
  Description of Artificial Sequence: Synthetic oligonucleotide
  Target: SCNA; (-) strand; PAM type: NNAGAAW; PAM sequence: AAAGAAA
gactatgccagtgtcttttg

SEQ ID NO: 6542 - DNA, 20 bp, Artificial Sequence
  Description of Artificial Sequence: Synthetic oligonucleotide
  Target: SCNA; (-) strand; PAM type: NNAGAAW; PAM sequence: CTAGAAA
actttatactctcaaattat

SEQ ID NO: 6543 - DNA, 20 bp, Artificial Sequence
  Description of Artificial Sequence: Synthetic oligonucleotide
  Target: SCNA; (-) strand; PAM type: NNAGAAW; PAM sequence: GAAGAAA
ttattcttggaagacaaaaa

SEQ ID NO: 6544 - DNA, 20 bp, Artificial Sequence
  Description of Artificial Sequence: Synthetic oligonucleotide
  Target: SCNA; (-) strand; PAM type: NNAGAAW; PAM sequence: AAAGAAT
tagtaatatttaacatatat

SEQ ID NO: 6545 - DNA, 20 bp, Artificial Sequence
  Description of Artificial Sequence: Synthetic oligonucleotide
  Target: SCNA; (-) strand; PAM type: NNAGAAW; PAM sequence: AAAGAAT
taaatagaaatggactcaga

SEQ ID NO: 6546 - DNA, 20 bp, Artificial Sequence
  Description of Artificial Sequence: Synthetic oligonucleotide
  Target: SCNA; (-) strand; PAM type: NNAGAAW; PAM sequence: TCAGAAA
taatttaaatagaaatggac

SEQ ID NO: 6547 - DNA, 20 bp, Artificial Sequence
  Description of Artificial Sequence: Synthetic oligonucleotide
  Target: SCNA; (-) strand; PAM type: NNAGAAW; PAM sequence: ATAGAAA
gaaatttaaggataatttaa

SEQ ID NO: 6548 - DNA, 20 bp, Artificial Sequence
  Description of Artificial Sequence: Synthetic oligonucleotide
  Target: SCNA; (+) strand; PAM type: NNAGAAW; PAM sequence: TTAGAAT
ggattgtgttggactccttc

SEQ ID NO: 6549 - DNA, 20 bp, Artificial Sequence
  Description of Artificial Sequence: Synthetic oligonucleotide
  Target: SCNA; (+) strand; PAM type: NNAGAAW; PAM sequence: TCAGAAT
attgctgtgataatcagagc

SEQ ID NO: 6550 - DNA, 20 bp, Artificial Sequence
  Description of Artificial Sequence: Synthetic oligonucleotide
  Target: SCNA; (+) strand; PAM type: NNAGAAW; PAM sequence: CAAGAAA
tcttttgctttagatgagat

SEQ ID NO: 6551 - DNA, 20 bp, Artificial Sequence
  Description of Artificial Sequence: Synthetic oligonucleotide
  Target: SCNA; (+) strand; PAM type: NNAGAAW; PAM sequence: AGAGAAA
gagactcaccaaagacatga

SEQ ID NO: 6552 - DNA, 20 bp, Artificial Sequence
  Description of Artificial Sequence: Synthetic oligonucleotide
  Target: SCNA; (+) strand; PAM type: NNAGAAW; PAM sequence: GTAGAAA
atttgttgttctggcataaa

SEQ ID NO: 6553 - DNA, 20 bp, Artificial Sequence
  Description of Artificial Sequence: Synthetic oligonucleotide
  Target: SCNA; (+) strand; PAM type: NNAGAAW; PAM sequence: AAAGAAA
attgcttccttttggatcaa

SEQ ID NO: 6554 - DNA, 20 bp, Artificial Sequence
  Description of Artificial Sequence: Synthetic oligonucleotide
  Target: SCNA; (+) strand; PAM type: NNAGAAW; PAM sequence: TGAGAAA
aatgggaaataaatgagatt

SEQ ID NO: 6555 - DNA, 20 bp, Artificial Sequence
  Description of Artificial Sequence: Synthetic oligonucleotide
  Target: SCNA; (+) strand; PAM type: NNAGAAW; PAM sequence: ATAGAAA
ccatatcttgctgtgttgcc

SEQ ID NO: 6556 - DNA, 20 bp, Artificial Sequence
  Description of Artificial Sequence: Synthetic oligonucleotide
  Target: SCNA; (+) strand; PAM type: NNAGAAW; PAM sequence: AAAGAAA
gtagtagcagcaaaaacatt

SEQ ID NO: 6557 - DNA, 20 bp, Artificial Sequence
  Description of Artificial Sequence: Synthetic oligonucleotide
  Target: SCNA; (+) strand; PAM type: NNAGAAW; PAM sequence: CTAGAAA
actgcatcaatcaactacac

SEQ ID NO: 6558 - DNA, 20 bp, Artificial Sequence
  Description of Artificial Sequence: Synthetic oligonucleotide
  Target: SCNA; (+) strand; PAM type: NNAGAAW; PAM sequence: ACAGAAA
tacccatgccatgattcaac

SEQ ID NO: 6559 - DNA, 20 bp, Artificial Sequence
  Description of Artificial Sequence: Synthetic oligonucleotide
  Target: SCNA; (+) strand; PAM type: NNAGAAW; PAM sequence: TTAGAAT
ctatcaggtgctaatttctc

SEQ ID NO: 6560 - DNA, 20 bp, Artificial Sequence
  Description of Artificial Sequence: Synthetic oligonucleotide
  Target: SCNA; (+) strand; PAM type: NNAGAAW; PAM sequence: TTAGAAA
ggtgctaatttctcttagaa

SEQ ID NO: 6561 - DNA, 20 bp, Artificial Sequence
  Description of Artificial Sequence: Synthetic oligonucleotide
  Target: SCNA; (+) strand; PAM type: NNAGAAW; PAM sequence: GGAGAAT
ctactcgagaggctgaggca

SEQ ID NO: 6562 - DNA, 20 bp, Artificial Sequence
  Description of Artificial Sequence: Synthetic oligonucleotide
  Target: SCNA; (+) strand; PAM type: NNAGAAW; PAM sequence: AAAGAAA
tccatctcaaaaaaaaaaaa

SEQ ID NO: 6563 - DNA, 20 bp, Artificial Sequence
  Description of Artificial Sequence: Synthetic oligonucleotide
  Target: SCNA; (+) strand; PAM type: NNAGAAW; PAM sequence: GAAGAAA
atgtttgtcttcaggcacct

SEQ ID NO: 6564 - DNA, 20 bp, Artificial Sequence
  Description of Artificial Sequence: Synthetic oligonucleotide
  Target: SCNA; (+) strand; PAM type: NNAGAAW; PAM sequence: GAAGAAA
taaattttctttaggtacct

SEQ ID NO: 6565 - DNA, 20 bp, Artificial Sequence
  Description of Artificial Sequence: Synthetic oligonucleotide
  Target: SCNA; (+) strand; PAM type: NNAGAAW; PAM sequence: CTAGAAA
caaatatctaattattatac

SEQ ID NO: 6566 - DNA, 20 bp, Artificial Sequence
  Description of Artificial Sequence: Synthetic oligonucleotide
  Target: SCNA; (+) strand; PAM type: NNAGAAW; PAM sequence: TTAGAAT
cctttggcttatgtgtaaaa

SEQ ID NO: 6567 - DNA, 20 bp, Artificial Sequence
  Description of Artificial Sequence: Synthetic oligonucleotide
  Target: SCNA; (+) strand; PAM type: NNAGAAW; PAM sequence: TGAGAAT
ggaacctattaaggttgttt

SEQ ID NO: 6568 - DNA, 20 bp, Artificial Sequence
  Description of Artificial Sequence: Synthetic oligonucleotide
  Target: SCNA; (+) strand; PAM type: NNAGAAW; PAM sequence: ACAGAAA
gcactcttgccctgcccaag

SEQ ID NO: 6569 - DNA, 20 bp, Artificial Sequence
  Description of Artificial Sequence: Synthetic oligonucleotide
  Target: SCNA; (+) strand; PAM type: NNAGAAW; PAM sequence: AAAGAAA
tgtcaggtttacagatttga

SEQ ID NO: 6570 - DNA, 20 bp, Artificial Sequence
  Description of Artificial Sequence: Synthetic oligonucleotide
  Target: SCNA; (+) strand; PAM type: NNAGAAW; PAM sequence: TGAGAAT
gatttagacagcactgtctt

SEQ ID NO: 6571 - DNA, 20 bp, Artificial Sequence
  Description of Artificial Sequence: Synthetic oligonucleotide
  Target: SCNA; (+) strand; PAM type: NNAGAAW; PAM sequence: TCAGAAA
ccagggactaaggagctctg

SEQ ID NO: 6572 - DNA, 20 bp, Artificial Sequence
  Description of Artificial Sequence: Synthetic oligonucleotide
  Target: SCNA; (+) strand; PAM type: NNAGAAW; PAM sequence: GCAGAAA
gctctttgtaagaactggag

SEQ ID NO: 6573 - DNA, 20 bp, Artificial Sequence
  Description of Artificial Sequence: Synthetic oligonucleotide
  Target: SCNA; (+) strand; PAM type: NNAGAAW; PAM sequence: CCAGAAA
atagctacatactggataag

SEQ ID NO: 6574 - DNA, 20 bp, Artificial Sequence
  Description of Artificial Sequence: Synthetic oligonucleotide
  Target: SCNA; (+) strand; PAM type: NNAGAAW; PAM sequence: GGAGAAT
atatgaggctgaataacttg

SEQ ID NO: 6575 - DNA, 20 bp, Artificial Sequence
  Description of Artificial Sequence: Synthetic oligonucleotide
  Target: SCNA; (+) strand; PAM type: NNAGAAW; PAM sequence: GAAGAAA
ccgtcagataaatattaagg

SEQ ID NO: 6576 - DNA, 20 bp, Artificial Sequence
  Description of Artificial Sequence: Synthetic oligonucleotide
  Target: SCNA; (+) strand; PAM type: NNAGAAW; PAM sequence: GGAGAAT
aagggaagaaacactttaaa

SEQ ID NO: 6577 - DNA, 20 bp, Artificial Sequence
  Description of Artificial Sequence: Synthetic oligonucleotide
  Target: SCNA; (+) strand; PAM type: NNAGAAW; PAM sequence: CAAGAAA
taaacataacttaaataaaa

SEQ ID NO: 6578 - DNA, 20 bp, Artificial Sequence
  Description of Artificial Sequence: Synthetic oligonucleotide
  Target: SCNA; (+) strand; PAM type: NNAGAAW; PAM sequence: CTAGAAT
catataaactgctagcatgt

SEQ ID NO: 6579 - DNA, 20 bp, Artificial Sequence
  Description of Artificial Sequence: Synthetic oligonucleotide
  Target: SCNA; (+) strand; PAM type: NNAGAAW; PAM sequence: TTAGAAA
atactttctactagtgactt

SEQ ID NO: 6580 - DNA, 20 bp, Artificial Sequence
  Description of Artificial Sequence: Synthetic oligonucleotide
  Target: SCNA; (+) strand; PAM type: NNAGAAW; PAM sequence: CCAGAAT
cttttagaaatgactatgcc

SEQ ID NO: 6581 - DNA, 20 bp, Artificial Sequence
  Description of Artificial Sequence: Synthetic oligonucleotide
  Target: SCNA; (+) strand; PAM type: NNAGAAW; PAM sequence: AGAGAAA
atgccccagaataattaaaa

SEQ ID NO: 6582 - DNA, 20 bp, Artificial Sequence
  Description of Artificial Sequence: Synthetic oligonucleotide
  Target: SCNA; (+) strand; PAM type: NNAGAAW; PAM sequence: AGAGAAA
gttaatagatcttccctgaa

SEQ ID NO: 6583 - DNA, 20 bp, Artificial Sequence
  Description of Artificial Sequence: Synthetic oligonucleotide
  Target: SCNA; (+) strand; PAM type: NNAGAAW; PAM sequence: CTAGAAT
acctttcctaaggaaaaatc

SEQ ID NO: 6584 - DNA, 20 bp, Artificial Sequence
  Description of Artificial Sequence: Synthetic oligonucleotide
  Target: SCNA; (+) strand; PAM type: NNAGAAW; PAM sequence: AGAGAAT
catgaaatttttatcagtct

SEQ ID NO: 6585 - DNA, 20 bp, Artificial Sequence
  Description of Artificial Sequence: Synthetic oligonucleotide
  Target: SCNA; (+) strand; PAM type: NNAGAAW; PAM sequence: AGAGAAA
aaaaaaaaaaaaagagagcg

SEQ ID NO: 6586 - DNA, 20 bp, Artificial Sequence
  Description of Artificial Sequence: Synthetic oligonucleotide
  Target: SCNA; (+) strand; PAM type: NNAGAAW; PAM sequence: AGAGAAT
agaaaaagagagagagagag

SEQ ID NO: 6587 - DNA, 20 bp, Artificial Sequence
  Description of Artificial Sequence: Synthetic oligonucleotide
  Target: SCNA; (+) strand; PAM type: NNAGAAW; PAM sequence: TCAGAAA
tggtcgaatattatttattg

SEQ ID NO: 6588 - DNA, 20 bp, Artificial Sequence
  Description of Artificial Sequence: Synthetic oligonucleotide
  Target: SCNA; (+) strand; PAM type: NNAGAAW; PAM sequence: GGAGAAA
aaacattgacaggattgaag

SEQ ID NO: 6589 - DNA, 20 bp, Artificial Sequence
  Description of Artificial Sequence: Synthetic oligonucleotide
  Target: SCNA; (+) strand; PAM type: NNAGAAW; PAM sequence: TTAGAAA
aacaaaaaaatagtgaggat

SEQ ID NO: 6590 - DNA, 20 bp, Artificial Sequence
  Description of Artificial Sequence: Synthetic oligonucleotide
  Target: SCNA; (+) strand; PAM type: NNAGAAW; PAM sequence: TGAGAAA
gagatacactgtaaaaactt

SEQ ID NO: 6591 - DNA, 20 bp, Artificial Sequence
  Description of Artificial Sequence: Synthetic oligonucleotide
  Target: SCNA; (+) strand; PAM type: NNAGAAW; PAM sequence: CAAGAAA
gaacatctgtcagcagatct

SEQ ID NO: 6592 - DNA, 20 bp, Artificial Sequence
  Description of Artificial Sequence: Synthetic oligonucleotide
  Target: SCNA; (+) strand; PAM type: NNAGAAW; PAM sequence: TTAGAAA
tcttgatacccttcctaata

SEQ ID NO: 6593 - DNA, 20 bp, Artificial Sequence
  Description of Artificial Sequence: Synthetic oligonucleotide
  Target: SCNA; (+) strand; PAM type: NNAGAAW; PAM sequence: ATAGAAT
taactcaagttgttttctga

SEQ ID NO: 6594 - DNA, 20 bp, Artificial Sequence
  Description of Artificial Sequence: Synthetic oligonucleotide
  Target: SCNA; (+) strand; PAM type: NNAGAAW; PAM sequence: CCAGAAT
gcttctgatattcccttgtg

SEQ ID NO: 6595 - DNA, 20 bp, Artificial Sequence
  Description of Artificial Sequence: Synthetic oligonucleotide
  Target: SCNA; (+) strand; PAM type: NNAGAAW; PAM sequence: GAAGAAA
tttgttaaaggaatcataat

SEQ ID NO: 6596 - DNA, 20 bp, Artificial Sequence
  Description of Artificial Sequence: Synthetic oligonucleotide
  Target: SCNA; (+) strand; PAM type: NNAGAAW; PAM sequence: GTAGAAT
aattcctctttaaatgtttg

SEQ ID NO: 6597 - DNA, 20 bp, Artificial Sequence
  Description of Artificial Sequence: Synthetic oligonucleotide
  Target: SCNA; (+) strand; PAM type: NNAGAAW; PAM sequence: TTAGAAA
tgatttccctaactttccat

SEQ ID NO: 6598 - DNA, 20 bp, Artificial Sequence
  Description of Artificial Sequence: Synthetic oligonucleotide
  Target: SCNA; (+) strand; PAM type: NNAGAAW; PAM sequence: TTAGAAT
tttccatttagaaatttatt

SEQ ID NO: 6599 - DNA, 20 bp, Artificial Sequence
  Description of Artificial Sequence: Synthetic oligonucleotide
  Target: SCNA; (+) strand; PAM type: NNAGAAW; PAM sequence: AGAGAAA
tctcactaagcactaatgaa

SEQ ID NO: 6600 - DNA, 20 bp, Artificial Sequence
  Description of Artificial Sequence: Synthetic oligonucleotide
  Target: SCNA; (+) strand; PAM type: NNAGAAW; PAM sequence: TTAGAAA
aggtttttggtactgtcttg

SEQ ID NO: 6601 - DNA, 20 bp, Artificial Sequence
  Description of Artificial Sequence: Synthetic oligonucleotide
  Target: SCNA; (+) strand; PAM type: NNAGAAW; PAM sequence: CCAGAAT
aggatccacaggcatatctt

SEQ ID NO: 6602 - DNA, 20 bp, Artificial Sequence
  Description of Artificial Sequence: Synthetic oligonucleotide
  Target: SCNA; (+) strand; PAM type: NNAGAAW; PAM sequence: TTAGAAT
gacagcaggaaacaaaattt

SEQ ID NO: 6603 - DNA, 20 bp, Artificial Sequence
  Description of Artificial Sequence: Synthetic oligonucleotide
  Target: SCNA; (+) strand; PAM type: NNAGAAW; PAM sequence: TGAGAAT
agacctgtattactattacc

SEQ ID NO: 6604 - DNA, 20 bp, Artificial Sequence
  Description of Artificial Sequence: Synthetic oligonucleotide
  Target: SCNA; (+) strand; PAM type: NNAGAAW; PAM sequence: ACAGAAT
atattatagatacaacctac

SEQ ID NO: 6605 - DNA, 20 bp, Artificial Sequence
  Description of Artificial Sequence: Synthetic oligonucleotide
  Target: SCNA; (+) strand; PAM type: NNAGAAW; PAM sequence: GAAGAAA
acgcaaaggtaaaaagtttg

SEQ ID NO: 6606 - DNA, 20 bp, Artificial Sequence
  Description of Artificial Sequence: Synthetic oligonucleotide
  Target: SCNA; (+) strand; PAM type: NNAGAAW; PAM sequence: GAAGAAA
cattaattttaaatgacaat

SEQ ID NO: 6607 - DNA, 20 bp, Artificial Sequence
  Description of Artificial Sequence: Synthetic oligonucleotide
  Target: SCNA; (+) strand; PAM type: NNAGAAW; PAM sequence: TCAGAAA
gaaaataatcaaatacatgg

SEQ ID NO: 6608 - DNA, 20 bp, Artificial Sequence
  Description of Artificial Sequence: Synthetic oligonucleotide
  Target: SCNA; (+) strand; PAM type: NNAGAAW; PAM sequence: AAAGAAT
ctaggtatctcttcctagac

SEQ ID NO: 6609 - DNA, 20 bp, Artificial Sequence
  Description of Artificial Sequence: Synthetic oligonucleotide
  Target: SCNA; (+) strand; PAM type: NNAGAAW; PAM sequence: GGAGAAA
atgtgagcctaaagggactt

SEQ ID NO: 6610 - DNA, 20 bp, Artificial Sequence
  Description of Artificial Sequence: Synthetic oligonucleotide
  Target: SCNA; (+) strand; PAM type: NNAGAAW; PAM sequence: TAAGAAA
ctgacagggacgcagaagta

SEQ ID NO: 6611 - DNA, 20 bp, Artificial Sequence
  Description of Artificial Sequence: Synthetic oligonucleotide
  Target: SCNA; (+) strand; PAM type: NNAGAAW; PAM sequence: TAAGAAA
tataagaaaatggctaacag

SEQ ID NO: 6612 - DNA, 20 bp, Artificial Sequence
  Description of Artificial Sequence: Synthetic oligonucleotide
  Target: SCNA; (+) strand; PAM type: NNAGAAW; PAM sequence: TTAGAAA
tgattttctaatataatttg

SEQ ID NO: 6613 - DNA, 20 bp, Artificial Sequence
  Description of Artificial Sequence: Synthetic oligonucleotide
  Target: SCNA; (+) strand; PAM type: NNAGAAW; PAM sequence: CCAGAAA
gtttgatggtgtttttgtgt

SEQ ID NO: 6614 - DNA, 20 bp, Artificial Sequence
  Description of Artificial Sequence: Synthetic oligonucleotide
  Target: SCNA; (+) strand; PAM type: NNAGAAW; PAM sequence: CCAGAAA
tttgcttcaagtcacagttt

SEQ ID NO: 6615 - DNA, 20 bp, Artificial Sequence
  Description of Artificial Sequence: Synthetic oligonucleotide
  Target: SCNA; (+) strand; PAM type: NNAGAAW; PAM sequence: ATAGAAA
ataaataaataaatatataa

SEQ ID NO: 6616 - DNA, 20 bp, Artificial Sequence
  Description of Artificial Sequence: Synthetic oligonucleotide
  Target: SCNA; (+) strand; PAM type: NNAGAAW; PAM sequence: AAAGAAA
aaataaatatataaatagaa

SEQ ID NO: 6617 - DNA, 20 bp, Artificial Sequence
  Description of Artificial Sequence: Synthetic oligonucleotide
  Target: SCNA; (+) strand; PAM type: NNAGAAW; PAM sequence: AAAGAAA
aatagaaaaagaaaacaaaa

SEQ ID NO: 6618 - DNA, 20 bp, Artificial Sequence
  Description of Artificial Sequence: Synthetic oligonucleotide
  Target: SCNA; (+) strand; PAM type: NNAGAAW; PAM sequence: TGAGAAA
aatcagcaaattttgcactg

SEQ ID NO: 6619 - DNA, 20 bp, Artificial Sequence
  Description of Artificial Sequence: Synthetic oligonucleotide
  Target: SCNA; (+) strand; PAM type: NNAGAAW; PAM sequence: AAAGAAT
tgtgagaaactacacaagac

SEQ ID NO: 6620 - DNA, 20 bp, Artificial Sequence
  Description of Artificial Sequence: Synthetic oligonucleotide
  Target: SCNA; (+) strand; PAM type: NNAGAAW; PAM sequence: TAAGAAT
ttgaacactgacttgatatt

SEQ ID NO: 6621 - DNA, 20 bp, Artificial Sequence
  Description of Artificial Sequence: Synthetic oligonucleotide
  Target: SCNA; (+) strand; PAM type: NNAGAAW; PAM sequence: GAAGAAA
ggggaaatgggtgggatata

SEQ ID NO: 6622 - DNA, 20 bp, Artificial Sequence
  Description of Artificial Sequence: Synthetic oligonucleotide
  Target: SCNA; (+) strand; PAM type: NNAGAAW; PAM sequence: AGAGAAA
agagacagagagagagggaa

SEQ ID NO: 6623 - DNA, 20 bp, Artificial Sequence
  Description of Artificial Sequence: Synthetic oligonucleotide
  Target: SCNA; (+) strand; PAM type: NNAGAAW; PAM sequence: TCAGAAT
caggtgtcctagtgggggtt

SEQ ID NO: 6624 - DNA, 20 bp, Artificial Sequence
  Description of Artificial Sequence: Synthetic oligonucleotide
  Target: SCNA; (+) strand; PAM type: NNAGAAW; PAM sequence: GGAGAAT
atatttggcagctattccaa

SEQ ID NO: 6625 - DNA, 20 bp, Artificial Sequence
  Description of Artificial Sequence: Synthetic oligonucleotide
  Target: SCNA; (+) strand; PAM type: NNAGAAW; PAM sequence: AAAGAAA
ctaaaaacattgttatctat

SEQ ID NO: 6626 - DNA, 20 bp, Artificial Sequence
  Description of Artificial Sequence: Synthetic oligonucleotide
  Target: SCNA; (+) strand; PAM type: NNAGAAW; PAM sequence: CAAGAAA
ctatttatttttaccacaaa

SEQ ID NO: 6627 - DNA, 20 bp, Artificial Sequence
  Description of Artificial Sequence: Synthetic oligonucleotide
  Target: SCNA; (+) strand; PAM type: NNAGAAW; PAM sequence: CCAGAAT
cattatgatattatattaac

SEQ ID NO: 6628 - DNA, 20 bp, Artificial Sequence
  Description of Artificial Sequence: Synthetic oligonucleotide
  Target: SCNA; (+) strand; PAM type: NNAGAAW; PAM sequence: TGAGAAA
tgttagggcaataaaataaa

SEQ ID NO: 6629 - DNA, 20 bp, Artificial Sequence
  Description of Artificial Sequence: Synthetic oligonucleotide
  Target: SCNA; (+) strand; PAM type: NNAGAAW; PAM sequence: TAAGAAA
ggtaggatatagagacatag

SEQ ID NO: 6630 - DNA, 20 bp, Artificial Sequence
  Description of Artificial Sequence: Synthetic oligonucleotide
  Target: SCNA; (+) strand; PAM type: NNAGAAW; PAM sequence: ACAGAAA
cttatatctgcatttgacac

SEQ ID NO: 6631 - DNA, 20 bp, Artificial Sequence
  Description of Artificial Sequence: Synthetic oligonucleotide
  Target: SCNA; (+) strand; PAM type: NNAGAAW; PAM sequence: AAAGAAA
tatctgcatttgacacacag

SEQ ID NO: 6632 - DNA, 20 bp, Artificial Sequence
  Description of Artificial Sequence: Synthetic oligonucleotide
  Target: SCNA; (+) strand; PAM type: NNAGAAW; PAM sequence: ACAGAAA
cttaaaagctatattaggaa

SEQ ID NO: 6633 - DNA, 20 bp, Artificial Sequence
  Description of Artificial Sequence: Synthetic oligonucleotide
  Target: SCNA; (+) strand; PAM type: NNAGAAW; PAM sequence: ACAGAAT
ctgtctttaggaatacaact

SEQ ID NO: 6634 - DNA, 20 bp, Artificial Sequence
  Description of Artificial Sequence: Synthetic oligonucleotide
  Target: SCNA; (+) strand; PAM type: NNAGAAW; PAM sequence: CTAGAAT
gctttccaaaccacactctt

SEQ ID NO: 6635 - DNA, 20 bp, Artificial Sequence
  Description of Artificial Sequence: Synthetic oligonucleotide
  Target: SCNA; (+) strand; PAM type: NNAGAAW; PAM sequence: TTAGAAA
gtatctatgctttgtcaaag

SEQ ID NO: 6636 - DNA, 20 bp, Artificial Sequence
  Description of Artificial Sequence: Synthetic oligonucleotide
  Target: SCNA; (+) strand; PAM type: NNAGAAW; PAM sequence: GAAGAAA
aaattaaaacttttatgtgg

SEQ ID NO: 6637 - DNA, 20 bp, Artificial Sequence
  Description of Artificial Sequence: Synthetic oligonucleotide
  Target: SCNA; (+) strand; PAM type: NNAGAAW; PAM sequence: AGAGAAA
ggttggaggtgttctgaaaa

SEQ ID NO: 6638 - DNA, 20 bp, Artificial Sequence
  Description of Artificial Sequence: Synthetic oligonucleotide
  Target: SCNA; (+) strand; PAM type: NNAGAAW; PAM sequence: TGAGAAA
aaatgatacacgctgctctt

SEQ ID NO: 6639 - DNA, 20 bp, Artificial Sequence
  Description of Artificial Sequence: Synthetic oligonucleotide
  Target: SCNA; (+) strand; PAM type: NNAGAAW; PAM sequence: CTAGAAA
tttgagaaagttcattggca

SEQ ID NO: 6640 - DNA, 20 bp, Artificial Sequence
  Description of Artificial Sequence: Synthetic oligonucleotide
  Target: SCNA; (+) strand; PAM type: NNAGAAW; PAM sequence: ACAGAAA
agcaagttttttcagcagtt

SEQ ID NO: 6641 - DNA, 20 bp, Artificial Sequence
  Description of Artificial Sequence: Synthetic oligonucleotide
  Target: SCNA; (+) strand; PAM type: NNAGAAW; PAM sequence: GTAGAAA
cagcctcagcatgcggactt

SEQ ID NO: 6642 - DNA, 20 bp, Artificial Sequence
  Description of Artificial Sequence: Synthetic oligonucleotide
  Target: SCNA; (+) strand; PAM type: NNAGAAW; PAM sequence: CAAGAAT
attgttttagttgggtataa

SEQ ID NO: 6643 - DNA, 20 bp, Artificial Sequence
  Description of Artificial Sequence: Synthetic oligonucleotide
  Target: SCNA; (+) strand; PAM type: NNAGAAW; PAM sequence: GAAGAAA
tagtagccaaaaagataaaa

SEQ ID NO: 6644 - DNA, 20 bp, Artificial Sequence
  Description of Artificial Sequence: Synthetic oligonucleotide
  Target: SCNA; (+) strand; PAM type: NNAGAAW; PAM sequence: AGAGAAT
gtagatagtatatttcacta

SEQ ID NO: 6645 - DNA, 20 bp, Artificial Sequence
  Description of Artificial Sequence: Synthetic oligonucleotide
  Target: SCNA; (+) strand; PAM type: NNAGAAW; PAM sequence: TCAGAAA
agcaaaacaatatgcatatt

SEQ ID NO: 6646 - DNA, 20 bp, Artificial Sequence
  Description of Artificial Sequence: Synthetic oligonucleotide
  Target: SCNA; (+) strand; PAM type: NNAGAAW; PAM sequence: TAAGAAA
ttcagtcttactattatgca

SEQ ID NO: 6647 - DNA, 20 bp, Artificial Sequence
  Description of Artificial Sequence: Synthetic oligonucleotide
  Target: SCNA; (+) strand; PAM type: NNAGAAW; PAM sequence: ATAGAAA
attctgtcacatgagaagcc

SEQ ID NO: 6648 - DNA, 20 bp, Artificial Sequence
  Description of Artificial Sequence: Synthetic oligonucleotide
  Target: SCNA; (+) strand; PAM type: NNAGAAW; PAM sequence: GTAGAAA
agttatggcttagatctaag

SEQ ID NO: 6649 - DNA, 20 bp, Artificial Sequence
  Description of Artificial Sequence: Synthetic oligonucleotide
  Target: SCNA; (+) strand; PAM type: NNAGAAW; PAM sequence: TTAGAAA
gcatttaacattctataact

SEQ ID NO: 6650 - DNA, 20 bp, Artificial Sequence
  Description of Artificial Sequence: Synthetic oligonucleotide
  Target: SCNA; (+) strand; PAM type: NNAGAAW; PAM sequence: TTAGAAA
acatgataaattataatata

SEQ ID NO: 6651 - DNA, 20 bp, Artificial Sequence
  Description of Artificial Sequence: Synthetic oligonucleotide
  Target: SCNA; (+) strand; PAM type: NNAGAAW; PAM sequence: TTAGAAT
taacctgtaaaagacatgcc

SEQ ID NO: 6652 - DNA, 20 bp, Artificial Sequence
  Description of Artificial Sequence: Synthetic oligonucleotide
  Target: SCNA; (+) strand; PAM type: NNAGAAW; PAM sequence: TGAGAAT
cataatccatacctacagat

SEQ ID NO: 6653 - DNA, 20 bp, Artificial Sequence
  Description of Artificial Sequence: Synthetic oligonucleotide
  Target: SCNA; (+) strand; PAM type: NNAGAAW; PAM sequence: AGAGAAA
ttggcaatcaccttagagag

SEQ ID NO: 6654 - DNA, 20 bp, Artificial Sequence
  Description of Artificial Sequence: Synthetic oligonucleotide
  Target: SCNA; (+) strand; PAM type: NNAGAAW; PAM sequence: AGAGAAA
caccttagagagagagaaaa

SEQ ID NO: 6655 - DNA, 20 bp, Artificial Sequence
  Description of Artificial Sequence: Synthetic oligonucleotide
  Target: SCNA; (+) strand; PAM type: NNAGAAW; PAM sequence: GAAGAAA
tggtgcaaaatcatttttaa

SEQ ID NO: 6656 - DNA, 20 bp, Artificial Sequence
  Description of Artificial Sequence: Synthetic oligonucleotide
  Target: SCNA; (+) strand; PAM type: NNAGAAW; PAM sequence: CTAGAAA
taagggctgatcctcctctt

SEQ ID NO: 6657 - DNA, 20 bp, Artificial Sequence
  Description of Artificial Sequence: Synthetic oligonucleotide
  Target: SCNA; (+) strand; PAM type: NNAGAAW; PAM sequence: TTAGAAT
ctattttaagctttcatgga

SEQ ID NO: 6658 - DNA, 20 bp, Artificial Sequence
  Description of Artificial Sequence: Synthetic oligonucleotide
  Target: SCNA; (+) strand; PAM type: NNAGAAW; PAM sequence: TGAGAAA
gatgtgaagatgggtcaagc

SEQ ID NO: 6659 - DNA, 20 bp, Artificial Sequence
  Description of Artificial Sequence: Synthetic oligonucleotide
  Target: SCNA; (+) strand; PAM type: NNAGAAW; PAM sequence: TCAGAAT
ggtttgctcttgtgctgagc

SEQ ID NO: 6660 - DNA, 20 bp, Artificial Sequence
  Description of Artificial Sequence: Synthetic oligonucleotide
  Target: SCNA; (+) strand; PAM type: NNAGAAW; PAM sequence: TGAGAAA
tcttaaaactagcaactggg

SEQ ID NO: 6661 - DNA, 20 bp, Artificial Sequence
  Description of Artificial Sequence: Synthetic oligonucleotide
  Target: SCNA; (+) strand; PAM type: NNAGAAW; PAM sequence: TTAGAAA
aaagagtctgctttcatatt

SEQ ID NO: 6662 - DNA, 20 bp, Artificial Sequence
  Description of Artificial Sequence: Synthetic oligonucleotide
  Target: SCNA; (+) strand; PAM type: NNAGAAW; PAM sequence: GAAGAAA
gctgaaaagcccataggaaa

SEQ ID NO: 6663 - DNA, 20 bp, Artificial Sequence
  Description of Artificial Sequence: Synthetic oligonucleotide
  Target: SCNA; (+) strand; PAM type: NNAGAAW; PAM sequence: TGAGAAA
agtttgctctcaaaaacaga

SEQ ID NO: 6664 - DNA, 20 bp, Artificial Sequence
  Description of Artificial Sequence: Synthetic oligonucleotide
  Target: SCNA; (+) strand; PAM type: NNAGAAW; PAM sequence: GGAGAAA
ctggacttaaaatctgactg

SEQ ID NO: 6665 - DNA, 20 bp, Artificial Sequence
  Description of Artificial Sequence: Synthetic oligonucleotide
  Target: SCNA; (+) strand; PAM type: NNAGAAW; PAM sequence: TAAGAAA
ttctctaaaagataaaagat

SEQ ID NO: 6666 - DNA, 20 bp, Artificial Sequence
  Description of Artificial Sequence: Synthetic oligonucleotide
  Target: SCNA; (+) strand; PAM type: NNAGAAW; PAM sequence: ATAGAAA
ttccagaagtttccatacta

SEQ ID NO: 6667 - DNA, 20 bp, Artificial Sequence
  Description of Artificial Sequence: Synthetic oligonucleotide
  Target: SCNA; (+) strand; PAM type: NNAGAAW; PAM sequence: ATAGAAA
gaggggccctcacaatctgg

SEQ ID NO: 6668 - DNA, 20 bp, Artificial Sequence
  Description of Artificial Sequence: Synthetic oligonucleotide
  Target: SCNA; (+) strand; PAM type: NNAGAAW; PAM sequence: CTAGAAA
tgctactttctttcagttac

SEQ ID NO: 6669 - DNA, 20 bp, Artificial Sequence
  Description of Artificial Sequence: Synthetic oligonucleotide
  Target: SCNA; (+) strand; PAM type: NNAGAAW; PAM sequence: CAAGAAA
gaatcatcttacaagattat

SEQ ID NO: 6670 - DNA, 20 bp, Artificial Sequence
  Description of Artificial Sequence: Synthetic oligonucleotide
  Target: SCNA; (+) strand; PAM type: NNAGAAW; PAM sequence: TCAGAAA
gaacaaagactatgaggttg

SEQ ID NO: 6671 - DNA, 20 bp, Artificial Sequence
  Description of Artificial Sequence: Synthetic oligonucleotide
  Target: SCNA; (+) strand; PAM type: NNAGAAW; PAM sequence: TTAGAAT
tgtttgcttgtttgtttgtt

SEQ ID NO: 6672 - DNA, 20 bp, Artificial Sequence
  Description of Artificial Sequence: Synthetic oligonucleotide
  Target: SCNA; (+) strand; PAM type: NNAGAAW; PAM sequence: CAAGAAA
cttcaaaccttttgaccaac

SEQ ID NO: 6673 - DNA, 20 bp, Artificial Sequence
  Description of Artificial Sequence: Synthetic oligonucleotide
  Target: SCNA; (+) strand; PAM type: NNAGAAW; PAM sequence: AGAGAAT
ataaccatgccttattccac

SEQ ID NO: 6674 - DNA, 20 bp, Artificial Sequence
  Description of Artificial Sequence: Synthetic oligonucleotide
  Target: SCNA; (+) strand; PAM type: NNAGAAW; PAM sequence: GTAGAAA
ctccctttgctgtttattga

SEQ ID NO: 6675 - DNA, 20 bp, Artificial Sequence
  Description of Artificial Sequence: Synthetic oligonucleotide
  Target: SCNA; (+) strand; PAM type: NNAGAAW; PAM sequence: ACAGAAT
ggagaacaaacaaacaacac

SEQ ID NO: 6676 - DNA, 20 bp, Artificial Sequence
  Description of Artificial Sequence: Synthetic oligonucleotide
  Target: SCNA; (+) strand; PAM type: NNAGAAW; PAM sequence: GAAGAAT
gtatgtgtgtgtgtgtgttg

SEQ ID NO: 6677 - DNA, 20 bp, Artificial Sequence
  Description of Artificial Sequence: Synthetic oligonucleotide
  Target: SCNA; (+) strand; PAM type: NNAGAAW; PAM sequence: GGAGAAA
cactatttgttggaagctca

SEQ ID NO: 6678 - DNA, 20 bp, Artificial Sequence
  Description of Artificial Sequence: Synthetic oligonucleotide
  Target: SCNA; (+) strand; PAM type: NNAGAAW; PAM sequence: TAAGAAA
tattgctaattttatttttt

SEQ ID NO: 6679 - DNA, 20 bp, Artificial Sequence
  Description of Artificial Sequence: Synthetic oligonucleotide
  Target: SCNA; (+) strand; PAM type: NNAGAAW; PAM sequence: AAAGAAT
ttaagaaaacctttttttgg

SEQ ID NO: 6680 - DNA, 20 bp, Artificial Sequence
  Description of Artificial Sequence: Synthetic oligonucleotide
  Target: SCNA; (+) strand; PAM type: NNAGAAW; PAM sequence: GAAGAAT
ctactcgggaggctgaggca

SEQ ID NO: 6681 - DNA, 20 bp, Artificial Sequence
  Description of Artificial Sequence: Synthetic oligonucleotide
  Target: SCNA; (+) strand; PAM type: NNAGAAW; PAM sequence: ACAGAAA
ttcctcaagccgcaattccc

SEQ ID NO: 6682 - DNA, 20 bp, Artificial Sequence
  Description of Artificial Sequence: Synthetic oligonucleotide
  Target: SCNA; (+) strand; PAM type: NNAGAAW; PAM sequence: TTAGAAA
tacatgctcagtgggttgca

SEQ ID NO: 6683 - DNA, 20 bp, Artificial Sequence
  Description of Artificial Sequence: Synthetic oligonucleotide
  Target: SCNA; (+) strand; PAM type: NNAGAAW; PAM sequence: TTAGAAA
agtaaagatgtccctttgct

SEQ ID NO: 6684 - DNA, 20 bp, Artificial Sequence
  Description of Artificial Sequence: Synthetic oligonucleotide
  Target: SCNA; (+) strand; PAM type: NNAGAAW; PAM sequence: GGAGAAA
acctgccttttgttttagaa

SEQ ID NO: 6685 - DNA, 20 bp, Artificial Sequence
  Description of Artificial Sequence: Synthetic oligonucleotide
  Target: SCNA; (+) strand; PAM type: NNAGAAW; PAM sequence: GCAGAAA
ctgacttgcttgaaaaatgt

SEQ ID NO: 6686 - DNA, 20 bp, Artificial Sequence
  Description of Artificial Sequence: Synthetic oligonucleotide
  Target: SCNA; (+) strand; PAM type: NNAGAAW; PAM sequence: AGAGAAA
ggaagataattattagcagt

SEQ ID NO: 6687 - DNA, 20 bp, Artificial Sequence
  Description of Artificial Sequence: Synthetic oligonucleotide
  Target: SCNA; (+) strand; PAM type: NNAGAAW; PAM sequence: TCAGAAA
atgagattggagttgagact

SEQ ID NO: 6688 - DNA, 20 bp, Artificial Sequence
  Description of Artificial Sequence: Synthetic oligonucleotide
  Target: SCNA; (+) strand; PAM type: NNAGAAW; PAM sequence: TGAGAAA
cagagttcataaaattaaag

SEQ ID NO: 6689 - DNA, 20 bp, Artificial Sequence
  Description of Artificial Sequence: Synthetic oligonucleotide
  Target: SCNA; (+) strand; PAM type: NNAGAAW; PAM sequence: GAAGAAA
agtgagaaaaagaggcaagt

SEQ ID NO: 6690 - DNA, 20 bp, Artificial Sequence
  Description of Artificial Sequence: Synthetic oligonucleotide
  Target: SCNA; (+) strand; PAM type: NNAGAAW; PAM sequence: TCAGAAA
aaaaggaaaataacaatatt

SEQ ID NO: 6691 - DNA, 20 bp, Artificial Sequence
  Description of Artificial Sequence: Synthetic oligonucleotide
  Target: SCNA; (+) strand; PAM type: NNAGAAW; PAM sequence: CCAGAAA
ctcaaagtgtgttgaatagt

SEQ ID NO: 6692 - DNA, 20 bp, Artificial Sequence
  Description of Artificial Sequence: Synthetic oligonucleotide
  Target: SCNA; (+) strand; PAM type: NNAGAAW; PAM sequence: CCAGAAA
gacttcaggagataaaggaa

SEQ ID NO: 6693 - DNA, 20 bp, Artificial Sequence
  Description of Artificial Sequence: Synthetic oligonucleotide
  Target: SCNA; (+) strand; PAM type: NNAGAAW; PAM sequence: GTAGAAA
gatcattgaaggctgtgatg

SEQ ID NO: 6694 - DNA, 20 bp, Artificial Sequence
  Description of Artificial Sequence: Synthetic oligonucleotide
  Target: SCNA; (+) strand; PAM type: NNAGAAW; PAM sequence: TGAGAAA
tttgacaaagagttgtgcaa

SEQ ID NO: 6695 - DNA, 20 bp, Artificial Sequence
  Description of Artificial Sequence: Synthetic oligonucleotide
  Target: SCNA; (+) strand; PAM type: NNAGAAW; PAM sequence: AAAGAAA
aattgttttgtcttcttttt

SEQ ID NO: 6696 - DNA, 20 bp, Artificial Sequence
  Description of Artificial Sequence: Synthetic oligonucleotide
  Target: SCNA; (+) strand; PAM type: NNAGAAW; PAM sequence: AAAGAAT
cagagagggtgttggttgat

SEQ ID NO: 6697 - DNA, 20 bp, Artificial Sequence
  Description of Artificial Sequence: Synthetic oligonucleotide
  Target: SCNA; (+) strand; PAM type: NNAGAAW; PAM sequence: AAAGAAT
aattgtctcaaatgagagga

SEQ ID NO: 6698 - DNA, 20 bp, Artificial Sequence
  Description of Artificial Sequence: Synthetic oligonucleotide
  Target: SCNA; (+) strand; PAM type: NNAGAAW; PAM sequence: GAAGAAA
ggcatgcagatgctgaagat

SEQ ID NO: 6699 - DNA, 20 bp, Artificial Sequence
  Description of Artificial Sequence: Synthetic oligonucleotide
  Target: SCNA; (+) strand; PAM type: NNAGAAW; PAM sequence: TTAGAAA
tctgaaaaataaaatatcaa

SEQ ID NO: 6700 - DNA, 20 bp, Artificial Sequence
  Description of Artificial Sequence: Synthetic oligonucleotide
  Target: SCNA; (+) strand; PAM type: NNAGAAW; PAM sequence: AAAGAAA
aaaaataaaatatcaattag

SEQ ID NO: 6701 - DNA, 20 bp, Artificial Sequence
  Description of Artificial Sequence: Synthetic oligonucleotide
  Target: SCNA; (+) strand; PAM type: NNAGAAW; PAM sequence: GCAGAAT
ctgagaagcagtgaatccaa

SEQ ID NO: 6702 - DNA, 20 bp, Artificial Sequence
  Description of Artificial Sequence: Synthetic oligonucleotide
  Target: SCNA; (+) strand; PAM type: NNAGAAW; PAM sequence: AAAGAAT
ctgatttttctttaacaggc

SEQ ID NO: 6703 - DNA, 20 bp, Artificial Sequence
  Description of Artificial Sequence: Synthetic oligonucleotide
  Target: SCNA; (+) strand; PAM type: NNAGAAW; PAM sequence: CAAGAAA
aaaataactgtatttggaaa

SEQ ID NO: 6704 - DNA, 20 bp, Artificial Sequence
  Description of Artificial Sequence: Synthetic oligonucleotide
  Target: SCNA; (+) strand; PAM type: NNAGAAW; PAM sequence: AGAGAAT
tatctctgaatttaaagtct

SEQ ID NO: 6705 - DNA, 20 bp, Artificial Sequence
  Description of Artificial Sequence: Synthetic oligonucleotide
  Target: SCNA; (+) strand; PAM type: NNAGAAW; PAM sequence: TCAGAAT
ttattagaacgtccactaga

SEQ ID NO: 6706 - DNA, 20 bp, Artificial Sequence
  Description of Artificial Sequence: Synthetic oligonucleotide
  Target: SCNA; (+) strand; PAM type: NNAGAAW; PAM sequence: AGAGAAT
ctcaccaaatttaacctgga

SEQ ID NO: 6707 - DNA, 20 bp, Artificial Sequence
  Description of Artificial Sequence: Synthetic oligonucleotide
  Target: SCNA; (+) strand; PAM type: NNAGAAW; PAM sequence: CCAGAAA
ttgttctcatgtgtttatgc

SEQ ID NO: 6708 - DNA, 20 bp, Artificial Sequence
  Description of Artificial Sequence: Synthetic oligonucleotide
  Target: SCNA; (+) strand; PAM type: NNAGAAW; PAM sequence: AAAGAAA
attcctttaaaataaatgga

SEQ ID NO: 6709 - DNA, 20 bp, Artificial Sequence
  Description of Artificial Sequence: Synthetic oligonucleotide
  Target: SCNA; (+) strand; PAM type: NNAGAAW; PAM sequence: AAAGAAA
ctaaatgaatgcttacatct

SEQ ID NO: 6710 - DNA, 20 bp, Artificial Sequence
  Description of Artificial Sequence: Synthetic oligonucleotide
  Target: SCNA; (+) strand; PAM type: NNAGAAW; PAM sequence: TAAGAAA
cataatggtatatcactgat

SEQ ID NO: 6711 - DNA, 20 bp, Artificial Sequence
  Description of Artificial Sequence: Synthetic oligonucleotide
  Target: SCNA; (+) strand; PAM type: NNAGAAW; PAM sequence: GAAGAAT
ttactcaggtggctgaggca

SEQ ID NO: 6712 - DNA, 20 bp, Artificial Sequence
  Description of Artificial Sequence: Synthetic oligonucleotide
  Target: SCNA; (+) strand; PAM type: NNAGAAW; PAM sequence: ACAGAAA
taattgcaatcatatacaga

SEQ ID NO: 6713 - DNA, 20 bp, Artificial Sequence
  Description of Artificial Sequence: Synthetic oligonucleotide
  Target: SCNA; (+) strand; PAM type: NNAGAAW; PAM sequence: AGAGAAA
tgtggatcacaaggcacctg

SEQ ID NO: 6714 - DNA, 20 bp, Artificial Sequence
  Description of Artificial Sequence: Synthetic oligonucleotide
  Target: SCNA; (+) strand; PAM type: NNAGAAW; PAM sequence: TCAGAAA
gccgaaagcaggaaaataac

SEQ ID NO: 6715 - DNA, 20 bp, Artificial Sequence
  Description of Artificial Sequence: Synthetic oligonucleotide
  Target: SCNA; (+) strand; PAM type: NNAGAAW; PAM sequence: AAAGAAA
gcaggaaaataactcagaaa

SEQ ID NO: 6716 - DNA, 20 bp, Artificial Sequence
  Description of Artificial Sequence: Synthetic oligonucleotide
  Target: SCNA; (+) strand; PAM type: NNAGAAW; PAM sequence: AAAGAAA
ctaatttatgtcagtcatta

SEQ ID NO: 6717 - DNA, 20 bp, Artificial Sequence
  Description of Artificial Sequence: Synthetic oligonucleotide
  Target: SCNA; (+) strand; PAM type: NNAGAAW; PAM sequence: TTAGAAA
attaaaagaaaataaggtgt

SEQ ID NO: 6718 - DNA, 20 bp, Artificial Sequence
  Description of Artificial Sequence: Synthetic oligonucleotide
  Target: SCNA; (+) strand; PAM type: NNAGAAW; PAM sequence: TTAGAAT
gctctcatggagagtgcaat

SEQ ID NO: 6719 - DNA, 20 bp, Artificial Sequence
  Description of Artificial Sequence: Synthetic oligonucleotide
  Target: SCNA; (+) strand; PAM type: NNAGAAW; PAM sequence: TTAGAAA
aggagattgagtttaccagt

SEQ ID NO: 6720 - DNA, 20 bp, Artificial Sequence
  Description of Artificial Sequence: Synthetic oligonucleotide
  Target: SCNA; (+) strand; PAM type: NNAGAAW; PAM sequence: GGAGAAA
cctttattttttattgcaat

SEQ ID NO: 6721 - DNA, 20 bp, Artificial Sequence
  Description of Artificial Sequence: Synthetic oligonucleotide
  Target: SCNA; (+) strand; PAM type: NNAGAAW; PAM sequence: AAAGAAA
caagcataaacatcaacatt

SEQ ID NO: 6722 - DNA, 20 bp, Artificial Sequence
  Description of Artificial Sequence: Synthetic oligonucleotide
  Target: SCNA; (+) strand; PAM type: NNAGAAW; PAM sequence: TAAGAAA
tcaacattaaagaaaatatt

SEQ ID NO: 6723 - DNA, 20 bp, Artificial Sequence
  Description of Artificial Sequence: Synthetic oligonucleotide
  Target: SCNA; (+) strand; PAM type: NNAGAAW; PAM sequence: AGAGAAA
tttagtactttattttcaaa

SEQ ID NO: 6724 - DNA, 20 bp, Artificial Sequence
  Description of Artificial Sequence: Synthetic oligonucleotide
  Target: SCNA; (+) strand; PAM type: NNAGAAW; PAM sequence: GGAGAAA
cccaggttaatgcaattatg

SEQ ID NO: 6725 - DNA, 20 bp, Artificial Sequence
  Description of Artificial Sequence: Synthetic oligonucleotide
  Target: SCNA; (+) strand; PAM type: NNAGAAW; PAM sequence: ACAGAAA
aaagatcctggctcctggct

SEQ ID NO: 6726 - DNA, 20 bp, Artificial Sequence
  Description of Artificial Sequence: Synthetic oligonucleotide
  Target: SCNA; (+) strand; PAM type: NNAGAAW; PAM sequence: GAAGAAA
gccagtctgcatgtccacta

SEQ ID NO: 6727 - DNA, 20 bp, Artificial Sequence
  Description of Artificial Sequence: Synthetic oligonucleotide
  Target: SCNA; (+) strand; PAM type: NNAGAAW; PAM sequence: TAAGAAT
atgaatgactgtacctttcc

SEQ ID NO: 6728 - DNA, 20 bp, Artificial Sequence
  Description of Artificial Sequence: Synthetic oligonucleotide
  Target: SCNA; (+) strand; PAM type: NNAGAAW; PAM sequence: CGAGAAT
gaatgtcctctcctgagttg

SEQ ID NO: 6729 - DNA, 20 bp, Artificial Sequence
  Description of Artificial Sequence: Synthetic oligonucleotide
  Target: SCNA; (+) strand; PAM type: NNAGAAW; PAM sequence: ACAGAAA
taagatgccaatggaaaaaa

SEQ ID NO: 6730 - DNA, 20 bp, Artificial Sequence
  Description of Artificial Sequence: Synthetic oligonucleotide
  Target: SCNA; (+) strand; PAM type: NNAGAAW; PAM sequence: TAAGAAT
tccatttaattgttttagac

SEQ ID NO: 6731 - DNA, 20 bp, Artificial Sequence
  Description of Artificial Sequence: Synthetic oligonucleotide
  Target: SCNA; (+) strand; PAM type: NNAGAAW; PAM sequence: AAAGAAA
taactgctttaatatataac

SEQ ID NO: 6732 - DNA, 20 bp, Artificial Sequence
  Description of Artificial Sequence: Synthetic oligonucleotide
  Target: SCNA; (+) strand; PAM type: NNAGAAW; PAM sequence: TTAGAAT
aatgttgttttatctgctgt

SEQ ID NO: 6733 - DNA, 20 bp, Artificial Sequence
  Description of Artificial Sequence: Synthetic oligonucleotide
  Target: SCNA; (+) strand; PAM type: NNAGAAW; PAM sequence: GGAGAAA
tgacaaaaaggcttttctct

SEQ ID NO: 6734 - DNA, 20 bp, Artificial Sequence
  Description of Artificial Sequence: Synthetic oligonucleotide
  Target: SCNA; (+) strand; PAM type: NNAGAAW; PAM sequence: TCAGAAT
tatttttaaaaagtggtctt

SEQ ID NO: 6735 - DNA, 20 bp, Artificial Sequence
  Description of Artificial Sequence: Synthetic oligonucleotide
  Target: SCNA; (+) strand; PAM type: NNAGAAW; PAM sequence: CCAGAAA
ttacattaatggctggaatt

SEQ ID NO: 6736 - DNA, 20 bp, Artificial Sequence
  Description of Artificial Sequence: Synthetic oligonucleotide
  Target: SCNA; (+) strand; PAM type: NNAGAAW; PAM sequence: TAAGAAA
tggctggaattccagaaaaa

SEQ ID NO: 6737 - DNA, 20 bp, Artificial Sequence
  Description of Artificial Sequence: Synthetic oligonucleotide
  Target: SCNA; (+) strand; PAM type: NNAGAAW; PAM sequence: CAAGAAA
gtatgatttgaacacaagta

SEQ ID NO: 6738 - DNA, 20 bp, Artificial Sequence
  Description of Artificial Sequence: Synthetic oligonucleotide
  Target: SCNA; (+) strand; PAM type: NNAGAAW; PAM sequence: AGAGAAT
ctaatttttgtatttttggt

SEQ ID NO: 6739 - DNA, 20 bp, Artificial Sequence
  Description of Artificial Sequence: Synthetic oligonucleotide
  Target: SCNA; (+) strand; PAM type: NNAGAAW; PAM sequence: AAAGAAT
tattcaagtttacacaggaa

SEQ ID NO: 6740 - DNA, 20 bp, Artificial Sequence
  Description of Artificial Sequence: Synthetic oligonucleotide
  Target: SCNA; (+) strand; PAM type: NNAGAAW; PAM sequence: CCAGAAA
tgtaaatctcaacacatttc

SEQ ID NO: 6741 - DNA, 20 bp, Artificial Sequence
  Description of Artificial Sequence: Synthetic oligonucleotide
  Target: SCNA; (+) strand; PAM type: NNAGAAW; PAM sequence: AAAGAAA
cttctattaaaaattcagac

SEQ ID NO: 6742 - DNA, 20 bp, Artificial Sequence
  Description of Artificial Sequence: Synthetic oligonucleotide
  Target: SCNA; (+) strand; PAM type: NNAGAAW; PAM sequence: ATAGAAT
tatatgctttcttgcaggtg

SEQ ID NO: 6743 - DNA, 20 bp, Artificial Sequence
  Description of Artificial Sequence: Synthetic oligonucleotide
  Target: SCNA; (+) strand; PAM type: NNAGAAW; PAM sequence: TGAGAAA
tttcttagcactcattctca

SEQ ID NO: 6744 - DNA, 20 bp, Artificial Sequence
  Description of Artificial Sequence: Synthetic oligonucleotide
  Target: SCNA; (+) strand; PAM type: NNAGAAW; PAM sequence: AAAGAAA
attgctgaaaacttggcaat

SEQ ID NO: 6745 - DNA, 20 bp, Artificial Sequence
  Description of Artificial Sequence: Synthetic oligonucleotide
  Target: SCNA; (+) strand; PAM type: NNAGAAW; PAM sequence: ACAGAAT
gaaaacttggcaataaagaa

SEQ ID NO: 6746 - DNA, 20 bp, Artificial Sequence
  Description of Artificial Sequence: Synthetic oligonucleotide
  Target: SCNA; (+) strand; PAM type: NNAGAAW; PAM sequence: GTAGAAA
ttcatgctcatttatgctca

SEQ ID NO: 6747 - DNA, 20 bp, Artificial Sequence
  Description of Artificial Sequence: Synthetic oligonucleotide
  Target: SCNA; (+) strand; PAM type: NNAGAAW; PAM sequence: TTAGAAT
tatctattagtcaattctct

SEQ ID NO: 6748 - DNA, 20 bp, Artificial Sequence
  Description of Artificial Sequence: Synthetic oligonucleotide
  Target: SCNA; (+) strand; PAM type: NNAGAAW; PAM sequence: TCAGAAA
aatctaaattattttaaaac

SEQ ID NO: 6749 - DNA, 20 bp, Artificial Sequence
  Description of Artificial Sequence: Synthetic oligonucleotide
  Target: SCNA; (+) strand; PAM type: NNAGAAW; PAM sequence: TGAGAAA
ttatatactttggtgatctt

SEQ ID NO: 6750 - DNA, 20 bp, Artificial Sequence
  Description of Artificial Sequence: Synthetic oligonucleotide
  Target: SCNA; (+) strand; PAM type: NNAGAAW; PAM sequence: AAAGAAA
gactttattgctcaaagcca

SEQ ID NO: 6751 - DNA, 20 bp, Artificial Sequence
  Description of Artificial Sequence: Synthetic oligonucleotide
  Target: SCNA; (+) strand; PAM type: NNAGAAW; PAM sequence: ATAGAAA
tgttatcttaagaggcttat

SEQ ID NO: 6752 - DNA, 20 bp, Artificial Sequence
  Description of Artificial Sequence: Synthetic oligonucleotide
  Target: SCNA; (+) strand; PAM type: NNAGAAW; PAM sequence: TGAGAAT
atcaaacaaattgcctggta

SEQ ID NO: 6753 - DNA, 20 bp, Artificial Sequence
  Description of Artificial Sequence: Synthetic oligonucleotide
  Target: SCNA; (+) strand; PAM type: NNAGAAW; PAM sequence: ACAGAAT
ttgcctggtatgagaattta

SEQ ID NO: 6754 - DNA, 20 bp, Artificial Sequence
  Description of Artificial Sequence: Synthetic oligonucleotide
  Target: SCNA; (+) strand; PAM type: NNAGAAW; PAM sequence: GAAGAAA
gaaacatcgcctcagtcaat

SEQ ID NO: 6755 - DNA, 20 bp, Artificial Sequence
  Description of Artificial Sequence: Synthetic oligonucleotide
  Target: SCNA; (+) strand; PAM type: NNAGAAW; PAM sequence: ACAGAAT
ccaagtatttttattcactc

SEQ ID NO: 6756 - DNA, 20 bp, Artificial Sequence
  Description of Artificial Sequence: Synthetic oligonucleotide
  Target: SCNA; (+) strand; PAM type: NNAGAAW; PAM sequence: AAAGAAA
ggcacaaatacgcaaatgca

SEQ ID NO: 6757 - DNA, 20 bp, Artificial Sequence
  Description of Artificial Sequence: Synthetic oligonucleotide
  Target: SCNA; (+) strand; PAM type: NNAGAAW; PAM sequence: AAAGAAT
tgtcctgaacataagtttta

SEQ ID NO: 6758 - DNA, 20 bp, Artificial Sequence
  Description of Artificial Sequence: Synthetic oligonucleotide
  Target: SCNA; (+) strand; PAM type: NNAGAAW; PAM sequence: AAAGAAT
ccttttaatttaatattttc

SEQ ID NO: 6759 - DNA, 20 bp, Artificial Sequence
  Description of Artificial Sequence: Synthetic oligonucleotide
  Target: SCNA; (+) strand; PAM type: NNAGAAW; PAM sequence: AGAGAAA
ttaatattttcaaagaatta

SEQ ID NO: 6760 - DNA, 20 bp, Artificial Sequence
  Description of Artificial Sequence: Synthetic oligonucleotide
  Target: SCNA; (+) strand; PAM type: NNAGAAW; PAM sequence: GAAGAAT
ttgcaaacctaggcttataa

SEQ ID NO: 6761 - DNA, 20 bp, Artificial Sequence
  Description of Artificial Sequence: Synthetic oligonucleotide
  Target: SCNA; (+) strand; PAM type: NNAGAAW; PAM sequence: CTAGAAT
tttcgctcatgttgcctagg

SEQ ID NO: 6762 - DNA, 20 bp, Artificial Sequence
  Description of Artificial Sequence: Synthetic oligonucleotide
  Target: SCNA; (+) strand; PAM type: NNAGAAW; PAM sequence: ATAGAAA
gtacaaaatctgcatatata

SEQ ID NO: 6763 - DNA, 20 bp, Artificial Sequence
  Description of Artificial Sequence: Synthetic oligonucleotide
  Target: SCNA; (+) strand; PAM type: NNAGAAW; PAM sequence: ACAGAAT
ctctgcatacaatatttttg

SEQ ID NO: 6764 - DNA, 20 bp, Artificial Sequence
  Description of Artificial Sequence: Synthetic oligonucleotide
  Target: SCNA; (+) strand; PAM type: NNAGAAW; PAM sequence: TAAGAAA
ttataaaaattctatgacta

SEQ ID NO: 6765 - DNA, 20 bp, Artificial Sequence
  Description of Artificial Sequence: Synthetic oligonucleotide
  Target: SCNA; (+) strand; PAM type: NNAGAAW; PAM sequence: CAAGAAA
gctatgtaatttataaacta

SEQ ID NO: 6766 - DNA, 20 bp, Artificial Sequence
  Description of Artificial Sequence: Synthetic oligonucleotide
  Target: SCNA; (+) strand; PAM type: NNAGAAW; PAM sequence: TCAGAAA
tgatattatcaattacatag

SEQ ID NO: 6767 - DNA, 20 bp, Artificial Sequence
  Description of Artificial Sequence: Synthetic oligonucleotide
  Target: SCNA; (+) strand; PAM type: NNAGAAW; PAM sequence: ACAGAAT
ctcgaattctctcaagtgtg

SEQ ID NO: 6768 - DNA, 20 bp, Artificial Sequence
  Description of Artificial Sequence: Synthetic oligonucleotide
  Target: SCNA; (+) strand; PAM type: NNAGAAW; PAM sequence: TAAGAAT
gtgtctagctgtactctatc

SEQ ID NO: 6769 - DNA, 20 bp, Artificial Sequence
  Description of Artificial Sequence: Synthetic oligonucleotide
  Target: SCNA; (+) strand; PAM type: NNAGAAW; PAM sequence: CAAGAAA
agagaggacaaacatttatc

SEQ ID NO: 6770 - DNA, 20 bp, Artificial Sequence
  Description of Artificial Sequence: Synthetic oligonucleotide
  Target: SCNA; (+) strand; PAM type: NNAGAAW; PAM sequence: ATAGAAT
caccgcgcctggcccttatt

SEQ ID NO: 6771 - DNA, 20 bp, Artificial Sequence
  Description of Artificial Sequence: Synthetic oligonucleotide
  Target: SCNA; (+) strand; PAM type: NNAGAAW; PAM sequence: GCAGAAA
atacaatctatcagcattag

SEQ ID NO: 6772 - DNA, 20 bp, Artificial Sequence
  Description of Artificial Sequence: Synthetic oligonucleotide
  Target: SCNA; (+) strand; PAM type: NNAGAAW; PAM sequence: CGAGAAA
gagatatcaaattcttttgc

SEQ ID NO: 6773 - DNA, 20 bp, Artificial Sequence
  Description of Artificial Sequence: Synthetic oligonucleotide
  Target: SCNA; (+) strand; PAM type: NNAGAAW; PAM sequence: CTAGAAA
tcgtcctcataacactttac

SEQ ID NO: 6774 - DNA, 20 bp, Artificial Sequence
  Description of Artificial Sequence: Synthetic oligonucleotide
  Target: SCNA; (+) strand; PAM type: NNAGAAW; PAM sequence: TCAGAAT
gctttatatcctaggtacca

SEQ ID NO: 6775 - DNA, 20 bp, Artificial Sequence
  Description of Artificial Sequence: Synthetic oligonucleotide
  Target: SCNA; (+) strand; PAM type: NNAGAAW; PAM sequence: TCAGAAA
taccatcagaatttcaaagc

SEQ ID NO: 6776 - DNA, 20 bp, Artificial Sequence
  Description of Artificial Sequence: Synthetic oligonucleotide
  Target: SCNA; (+) strand; PAM type: NNAGAAW; PAM sequence: TGAGAAT
aaagctcagaaaatcactaa

SEQ ID NO: 6777 - DNA, 20 bp, Artificial Sequence
  Description of Artificial Sequence: Synthetic oligonucleotide
  Target: SCNA; (+) strand; PAM type: NNAGAAW; PAM sequence: AAAGAAA
gtgataactttatgccttgc

SEQ ID NO: 6778 - DNA, 20 bp, Artificial Sequence
  Description of Artificial Sequence: Synthetic oligonucleotide
  Target: SCNA; (+) strand; PAM type: NNAGAAW; PAM sequence: AAAGAAA
taaatttcatattattcatt

SEQ ID NO: 6779 - DNA, 20 bp, Artificial Sequence
  Description of Artificial Sequence: Synthetic oligonucleotide
  Target: SCNA; (+) strand; PAM type: NNAGAAW; PAM sequence: TAAGAAA
aacactttttagtaattttt

SEQ ID NO: 6780 - DNA, 20 bp, Artificial Sequence
  Description of Artificial Sequence: Synthetic oligonucleotide
  Target: SCNA; (+) strand; PAM type: NNAGAAW; PAM sequence: CAAGAAA
aaattcatatagtactccta

SEQ ID NO: 6781 - DNA, 20 bp, Artificial Sequence
  Description of Artificial Sequence: Synthetic oligonucleotide
  Target: SCNA; (+) strand; PAM type: NNAGAAW; PAM sequence: AAAGAAA
agagcatcccattgaggaaa

SEQ ID NO: 6782 - DNA, 20 bp, Artificial Sequence
  Description of Artificial Sequence: Synthetic oligonucleotide
  Target: SCNA; (+) strand; PAM type: NNAGAAW; PAM sequence: ATAGAAA
cccattgaggaaaaaagaaa

SEQ ID NO: 6783 - DNA, 20 bp, Artificial Sequence
  Description of Artificial Sequence: Synthetic oligonucleotide
  Target: SCNA; (+) strand; PAM type: NNAGAAW; PAM sequence: ATAGAAT
gcatttctgtatataatgac

SEQ ID NO: 6784 - DNA, 20 bp, Artificial Sequence
  Description of Artificial Sequence: Synthetic oligonucleotide
  Target: SCNA; (+) strand; PAM type: NNAGAAW; PAM sequence: TAAGAAT
ttatagattctttttaggga

SEQ ID NO: 6785 - DNA, 20 bp, Artificial Sequence
  Description of Artificial Sequence: Synthetic oligonucleotide
  Target: SCNA; (+) strand; PAM type: NNAGAAW; PAM sequence: CTAGAAT
aattatgttaaaaccagatg

SEQ ID NO: 6786 - DNA, 20 bp, Artificial Sequence
  Description of Artificial Sequence: Synthetic oligonucleotide
  Target: SCNA; (+) strand; PAM type: NNAGAAW; PAM sequence: GTAGAAA
aactgctggaaaattagtct

SEQ ID NO: 6787 - DNA, 20 bp, Artificial Sequence
  Description of Artificial Sequence: Synthetic oligonucleotide
  Target: SCNA; (+) strand; PAM type: NNAGAAW; PAM sequence: GCAGAAT
agggttgtaacagggaatgt

SEQ ID NO: 6788 - DNA, 20 bp, Artificial Sequence
  Description of Artificial Sequence: Synthetic oligonucleotide
  Target: SCNA; (+) strand; PAM type: NNAGAAW; PAM sequence: ACAGAAT
tggcaagcttgaagggaggg

SEQ ID NO: 6789 - DNA, 20 bp, Artificial Sequence
  Description of Artificial Sequence: Synthetic oligonucleotide
  Target: SCNA; (+) strand; PAM type: NNAGAAW; PAM sequence: TCAGAAA
gcttgaagggagggacagaa

SEQ ID NO: 6790 - DNA, 20 bp, Artificial Sequence
  Description of Artificial Sequence: Synthetic oligonucleotide
  Target: SCNA; (+) strand; PAM type: NNAGAAW; PAM sequence: TCAGAAA
aaagtgattttgaagagagg

SEQ ID NO: 6791 - DNA, 20 bp, Artificial Sequence
  Description of Artificial Sequence: Synthetic oligonucleotide
  Target: SCNA; (+) strand; PAM type: NNAGAAW; PAM sequence: TAAGAAT
tacacaaaatcccctggact

SEQ ID NO: 6792 - DNA, 20 bp, Artificial Sequence
  Description of Artificial Sequence: Synthetic oligonucleotide
  Target: SCNA; (+) strand; PAM type: NNAGAAW; PAM sequence: TAAGAAT
aagaatatctccacaagtta

SEQ ID NO: 6793 - DNA, 20 bp, Artificial Sequence
  Description of Artificial Sequence: Synthetic oligonucleotide
  Target: SCNA; (+) strand; PAM type: NNAGAAW; PAM sequence: CCAGAAA
gtggagagtgtctacctcct

SEQ ID NO: 6794 - DNA, 20 bp, Artificial Sequence
  Description of Artificial Sequence: Synthetic oligonucleotide
  Target: SCNA; (+) strand; PAM type: NNAGAAW; PAM sequence: CAAGAAA
tatttgtcttaagatgggga

SEQ ID NO: 6795 - DNA, 20 bp, Artificial Sequence
  Description of Artificial Sequence: Synthetic oligonucleotide
  Target: SCNA; (+) strand; PAM type: NNAGAAW; PAM sequence: CTAGAAA
taaaaacatatgcccagact

SEQ ID NO: 6796 - DNA, 20 bp, Artificial Sequence
  Description of Artificial Sequence: Synthetic oligonucleotide
  Target: SCNA; (+) strand; PAM type: NNAGAAW; PAM sequence: TGAGAAT
attttagggacatataactt

SEQ ID NO: 6797 - DNA, 20 bp, Artificial Sequence
  Description of Artificial Sequence: Synthetic oligonucleotide
  Target: SCNA; (+) strand; PAM type: NNAGAAW; PAM sequence: TAAGAAA
gtgtttaataaatgccccac

SEQ ID NO: 6798 - DNA, 20 bp, Artificial Sequence
  Description of Artificial Sequence: Synthetic oligonucleotide
  Target: SCNA; (+) strand; PAM type: NNAGAAW; PAM sequence: GAAGAAA
ctattaatttgatacaggca

SEQ ID NO: 6799 - DNA, 20 bp, Artificial Sequence
  Description of Artificial Sequence: Synthetic oligonucleotide
  Target: SCNA; (+) strand; PAM type: NNAGAAW; PAM sequence: AAAGAAT
agaagaaatctaaaaacagc

SEQ ID NO: 6800 - DNA, 20 bp, Artificial Sequence
  Description of Artificial Sequence: Synthetic oligonucleotide
  Target: SCNA; (+) strand; PAM type: NNAGAAW; PAM sequence: TCAGAAT
atattcgattcaagaacata

SEQ ID NO: 6801 - DNA, 20 bp, Artificial Sequence
  Description of Artificial Sequence: Synthetic oligonucleotide
  Target: SCNA; (+) strand; PAM type: NNAGAAW; PAM sequence: GCAGAAA
cagcagcatagctgttgtct

SEQ ID NO: 6802 - DNA, 20 bp, Artificial Sequence
  Description of Artificial Sequence: Synthetic oligonucleotide
  Target: SCNA; (+) strand; PAM type: NNAGAAW; PAM sequence: TAAGAAT
gagggaaggacctgctgatc

SEQ ID NO: 6803 - DNA, 20 bp, Artificial Sequence
  Description of Artificial Sequence: Synthetic oligonucleotide
  Target: SCNA; (+) strand; PAM type: NNAGAAW; PAM sequence: GCAGAAT
gtgagccaccacgcctggct

SEQ ID NO: 6804 - DNA, 20 bp, Artificial Sequence
  Description of Artificial Sequence: Synthetic oligonucleotide
  Target: SCNA; (+) strand; PAM type: NNAGAAW; PAM sequence: TGAGAAT
agagctatttttgaaatgga

SEQ ID NO: 6805 - DNA, 20 bp, Artificial Sequence
  Description of Artificial Sequence: Synthetic oligonucleotide
  Target: SCNA; (+) strand; PAM type: NNAGAAW; PAM sequence: GAAGAAT
gatgcttacaattgatgaag

SEQ ID NO: 6806 - DNA, 20 bp, Artificial Sequence
  Description of Artificial Sequence: Synthetic oligonucleotide
  Target: SCNA; (+) strand; PAM type: NNAGAAW; PAM sequence: ACAGAAA
tatttgctgaaagcacttaa

SEQ ID NO: 6807 - DNA, 20 bp, Artificial Sequence
  Description of Artificial Sequence: Synthetic oligonucleotide
  Target: SCNA; (+) strand; PAM type: NNAGAAW; PAM sequence: TAAGAAT
aaaatattggctagtgagat

SEQ ID NO: 6808 - DNA, 20 bp, Artificial Sequence
  Description of Artificial Sequence: Synthetic oligonucleotide
  Target: SCNA; (+) strand; PAM type: NNAGAAW; PAM sequence: TAAGAAT
tggcaaaaccccatctctac

SEQ ID NO: 6809 - DNA, 20 bp, Artificial Sequence
  Description of Artificial Sequence: Synthetic oligonucleotide
  Target: SCNA; (+) strand; PAM type: NNAGAAW; PAM sequence: GGAGAAT
ctactcaagaggctgaggca

SEQ ID NO: 6810 - DNA, 20 bp, Artificial Sequence
  Description of Artificial Sequence: Synthetic oligonucleotide
  Target: SCNA; (+) strand; PAM type: NNAGAAW; PAM sequence: AAAGAAA
agcaagactctgtctcaaaa

SEQ ID NO: 6811 - DNA, 20 bp, Artificial Sequence
  Description of Artificial Sequence: Synthetic oligonucleotide
  Target: SCNA; (+) strand; PAM type: NNAGAAW; PAM sequence: TAAGAAT
aagaaagtttatcagtctat

SEQ ID NO: 6812 - DNA, 20 bp, Artificial Sequence
  Description of Artificial Sequence: Synthetic oligonucleotide
  Target: SCNA; (+) strand; PAM type: NNAGAAW; PAM sequence: GAAGAAT
aatatacttgatttttacaa

SEQ ID NO: 6813 - DNA, 20 bp, Artificial Sequence
  Description of Artificial Sequence: Synthetic oligonucleotide
  Target: SCNA; (+) strand; PAM type: NNAGAAW; PAM sequence: ACAGAAA
aaaaatatttgctcagagac

SEQ ID NO: 6814 - DNA, 20 bp, Artificial Sequence
  Description of Artificial Sequence: Synthetic oligonucleotide
  Target: SCNA; (+) strand; PAM type: NNAGAAW; PAM sequence: AGAGAAT
caaaggagagcaatgtcagg

SEQ ID NO: 6815 - DNA, 20 bp, Artificial Sequence
  Description of Artificial Sequence: Synthetic oligonucleotide
  Target: SCNA; (+) strand; PAM type: NNAGAAW; PAM sequence: TCAGAAA
ttacaaggtttgtactactt

SEQ ID NO: 6816 - DNA, 20 bp, Artificial Sequence
  Description of Artificial Sequence: Synthetic oligonucleotide
  Target: SCNA; (+) strand; PAM type: NNAGAAW; PAM sequence: TAAGAAA
atggttttcctaccattgac

SEQ ID NO: 6817 - DNA, 20 bp, Artificial Sequence
  Description of Artificial Sequence: Synthetic oligonucleotide
  Target: SCNA; (+) strand; PAM type: NNAGAAW; PAM sequence: CTAGAAT
gagcatttctggcatttggt

SEQ ID NO: 6818 - DNA, 20 bp, Artificial Sequence
  Description of Artificial Sequence: Synthetic oligonucleotide
  Target: SCNA; (+) strand; PAM type: NNAGAAW; PAM sequence: TTAGAAA
aggagtaactgttccatatc

SEQ ID NO: 6819 - DNA, 20 bp, Artificial Sequence
  Description of Artificial Sequence: Synthetic oligonucleotide
  Target: SCNA; (+) strand; PAM type: NNAGAAW; PAM sequence: TGAGAAT
ctggcatataacagttgtgt

SEQ ID NO: 6820 - DNA, 20 bp, Artificial Sequence
  Description of Artificial Sequence: Synthetic oligonucleotide
  Target: SCNA; (+) strand; PAM type: NNAGAAW; PAM sequence: GGAGAAA
caatgaacacttgtattggt

SEQ ID NO: 6821 - DNA, 20 bp, Artificial Sequence
  Description of Artificial Sequence: Synthetic oligonucleotide
  Target: SCNA; (+) strand; PAM type: NNAGAAW; PAM sequence: GTAGAAA
ggctaatttttgtactttta

SEQ ID NO: 6822 - DNA, 20 bp, Artificial Sequence
  Description of Artificial Sequence: Synthetic oligonucleotide
  Target: SCNA; (+) strand; PAM type: NNAGAAW; PAM sequence: ATAGAAT
atagtataaaaactatttac

SEQ ID NO: 6823 - DNA, 20 bp, Artificial Sequence
  Description of Artificial Sequence: Synthetic oligonucleotide
  Target: SCNA; (+) strand; PAM type: NNAGAAW; PAM sequence: GAAGAAA
caccagggactggttttctg

SEQ ID NO: 6824 - DNA, 20 bp, Artificial Sequence
  Description of Artificial Sequence: Synthetic oligonucleotide
  Target: SCNA; (+) strand; PAM type: NNAGAAW; PAM sequence: ACAGAAA
acaactgtgtatcattctta

SEQ ID NO: 6825 - DNA, 20 bp, Artificial Sequence
  Description of Artificial Sequence: Synthetic oligonucleotide
  Target: SCNA; (+) strand; PAM type: NNAGAAW; PAM sequence: TTAGAAA
catttcactctggaatttag

SEQ ID NO: 6826 - DNA, 20 bp, Artificial Sequence
  Description of Artificial Sequence: Synthetic oligonucleotide
  Target: SCNA; (+) strand; PAM type: NNAGAAW; PAM sequence: ACAGAAA
tcctggtctttctcacaatc

SEQ ID NO: 6827 - DNA, 20 bp, Artificial Sequence
  Description of Artificial Sequence: Synthetic oligonucleotide
  Target: SCNA; (+) strand; PAM type: NNAGAAW; PAM sequence: AGAGAAA
gtgaggtgttaagactaaca

SEQ ID NO: 6828 - DNA, 20 bp, Artificial Sequence
  Description of Artificial Sequence: Synthetic oligonucleotide
  Target: SCNA; (+) strand; PAM type: NNAGAAW; PAM sequence: CTAGAAA
aaggcattattcttatctgg

SEQ ID NO: 6829 - DNA, 20 bp, Artificial Sequence
  Description of Artificial Sequence: Synthetic oligonucleotide
  Target: SCNA; (+) strand; PAM type: NNAGAAW; PAM sequence: AAAGAAA
cattattcttatctggctag

SEQ ID NO: 6830 - DNA, 20 bp, Artificial Sequence
  Description of Artificial Sequence: Synthetic oligonucleotide
  Target: SCNA; (+) strand; PAM type: NNAGAAW; PAM sequence: TCAGAAA
tagattgaggcaatgaaaac

SEQ ID NO: 6831 - DNA, 20 bp, Artificial Sequence
  Description of Artificial Sequence: Synthetic oligonucleotide
  Target: SCNA; (+) strand; PAM type: NNAGAAW; PAM sequence: AGAGAAT
tgtatttttaaaattgccat

SEQ ID NO: 6832 - DNA, 20 bp, Artificial Sequence
  Description of Artificial Sequence: Synthetic oligonucleotide
  Target: SCNA; (+) strand; PAM type: NNAGAAW; PAM sequence: TCAGAAA
ttgaaccaagtttttcccct

SEQ ID NO: 6833 - DNA, 20 bp, Artificial Sequence
  Description of Artificial Sequence: Synthetic oligonucleotide
  Target: SCNA; (+) strand; PAM type: NNAGAAW; PAM sequence: AAAGAAA
aagggtttccttgtttcatc

SEQ ID NO: 6834 - DNA, 20 bp, Artificial Sequence
  Description of Artificial Sequence: Synthetic oligonucleotide
  Target: SCNA; (+) strand; PAM type: NNAGAAW; PAM sequence: GCAGAAT
aaagaaataagtatgaatga

SEQ ID NO: 6835 - DNA, 20 bp, Artificial Sequence
  Description of Artificial Sequence: Synthetic oligonucleotide
  Target: SCNA; (+) strand; PAM type: NNAGAAW; PAM sequence: GCAGAAT
caaagtaagaggagatttct

SEQ ID NO: 6836 - DNA, 20 bp, Artificial Sequence
  Description of Artificial Sequence: Synthetic oligonucleotide
  Target: SCNA; (+) strand; PAM type: NNAGAAW; PAM sequence: CCAGAAA
ttgtccttcaggctgataat

SEQ ID NO: 6837 - DNA, 20 bp, Artificial Sequence
  Description of Artificial Sequence: Synthetic oligonucleotide
  Target: SCNA; (+) strand; PAM type: NNAGAAW; PAM sequence: AGAGAAT
cacaatgcttgagaaggtgc

SEQ ID NO: 6838 - DNA, 20 bp, Artificial Sequence
  Description of Artificial Sequence: Synthetic oligonucleotide
  Target: SCNA; (+) strand; PAM type: NNAGAAW; PAM sequence: ATAGAAA
cttctcttatataatttatt

SEQ ID NO: 6839 - DNA, 20 bp, Artificial Sequence
  Description of Artificial Sequence: Synthetic oligonucleotide
  Target: SCNA; (+) strand; PAM type: NNAGAAW; PAM sequence: GCAGAAT
gtgacagctcaaaactattt

SEQ ID NO: 6840 - DNA, 20 bp, Artificial Sequence
  Description of Artificial Sequence: Synthetic oligonucleotide
  Target: SCNA; (+) strand; PAM type: NNAGAAW; PAM sequence: AAAGAAA
tcaaaactatttgcagaatg

SEQ ID NO: 6841 - DNA, 20 bp, Artificial Sequence
  Description of Artificial Sequence: Synthetic oligonucleotide
  Target: SCNA; (+) strand; PAM type: NNAGAAW; PAM sequence: GAAGAAA
taacttctaggaggtgtgag

SEQ ID NO: 6842 - DNA, 20 bp, Artificial Sequence
  Description of Artificial Sequence: Synthetic oligonucleotide
  Target: SCNA; (+) strand; PAM type: NNAGAAW; PAM sequence: AAAGAAA
ttctaggaggtgtgaggaag

SEQ ID NO: 6843 - DNA, 20 bp, Artificial Sequence
  Description of Artificial Sequence: Synthetic oligonucleotide
  Target: SCNA; (+) strand; PAM type: NNAGAAW; PAM sequence: AGAGAAA
gaggggaaagcatagtctaa

SEQ ID NO: 6844 - DNA, 20 bp, Artificial Sequence
  Description of Artificial Sequence: Synthetic oligonucleotide
  Target: SCNA; (+) strand; PAM type: NNAGAAW; PAM sequence: GGAGAAA
agtatgttttactaaagttt

SEQ ID NO: 6845 - DNA, 20 bp, Artificial Sequence
  Description of Artificial Sequence: Synthetic oligonucleotide
  Target: SCNA; (+) strand; PAM type: NNAGAAW; PAM sequence: TTAGAAA
aaattataccaatagcatta

SEQ ID NO: 6846 - DNA, 20 bp, Artificial Sequence
  Description of Artificial Sequence: Synthetic oligonucleotide
  Target: SCNA; (+) strand; PAM type: NNAGAAW; PAM sequence: AAAGAAA
ttttaagtgactaaactact

SEQ ID NO: 6847 - DNA, 20 bp, Artificial Sequence
  Description of Artificial Sequence: Synthetic oligonucleotide
  Target: SCNA; (+) strand; PAM type: NNAGAAW; PAM sequence: AGAGAAA
catcataaaattttcaactt

SEQ ID NO: 6848 - DNA, 20 bp, Artificial Sequence
  Description of Artificial Sequence: Synthetic oligonucleotide
  Target: SCNA; (+) strand; PAM type: NNAGAAW; PAM sequence: TTAGAAA
tcccacactttgacacatga

SEQ ID NO: 6849 - DNA, 20 bp, Artificial Sequence
  Description of Artificial Sequence: Synthetic oligonucleotide
  Target: SCNA; (+) strand; PAM type: NNAGAAW; PAM sequence: ACAGAAT
aaaggcagtaagattttcat

SEQ ID NO: 6850 - DNA, 20 bp, Artificial Sequence
  Description of Artificial Sequence: Synthetic oligonucleotide
  Target: SCNA; (+) strand; PAM type: NNAGAAW; PAM sequence: GTAGAAT
atacagaattctggggttaa

SEQ ID NO: 6851 - DNA, 20 bp, Artificial Sequence
  Description of Artificial Sequence: Synthetic oligonucleotide
  Target: SCNA; (+) strand; PAM type: NNAGAAW; PAM sequence: TGAGAAT
acacggaagaggttataacg

SEQ ID NO: 6852 - DNA, 20 bp, Artificial Sequence
  Description of Artificial Sequence: Synthetic oligonucleotide
  Target: SCNA; (+) strand; PAM type: NNAGAAW; PAM sequence: TCAGAAT
gggtattctttctcttgcct

SEQ ID NO: 6853 - DNA, 20 bp, Artificial Sequence
  Description of Artificial Sequence: Synthetic oligonucleotide
  Target: SCNA; (+) strand; PAM type: NNAGAAW; PAM sequence: TCAGAAA
tactggaggatgaattgccc

SEQ ID NO: 6854 - DNA, 20 bp, Artificial Sequence
  Description of Artificial Sequence: Synthetic oligonucleotide
  Target: SCNA; (+) strand; PAM type: NNAGAAW; PAM sequence: GCAGAAA
gtaacagttggttaagagaa

SEQ ID NO: 6855 - DNA, 20 bp, Artificial Sequence
  Description of Artificial Sequence: Synthetic oligonucleotide
  Target: SCNA; (+) strand; PAM type: NNAGAAW; PAM sequence: TAAGAAA
agcagcacagggtgccaaaa

SEQ ID NO: 6856 - DNA, 20 bp, Artificial Sequence
  Description of Artificial Sequence: Synthetic oligonucleotide
  Target: SCNA; (+) strand; PAM type: NNAGAAW; PAM sequence: AGAGAAA
aagcctgggtaatactgcca

SEQ ID NO: 6857 - DNA, 20 bp, Artificial Sequence
  Description of Artificial Sequence: Synthetic oligonucleotide
  Target: SCNA; (+) strand; PAM type: NNAGAAW; PAM sequence: CTAGAAA
caccatcattcttcacagaa

SEQ ID NO: 6858 - DNA, 20 bp, Artificial Sequence
  Description of Artificial Sequence: Synthetic oligonucleotide
  Target: SCNA; (+) strand; PAM type: NNAGAAW; PAM sequence: AAAGAAA
gccaaagcaagattaagcaa

SEQ ID NO: 6859 - DNA, 20 bp, Artificial Sequence
  Description of Artificial Sequence: Synthetic oligonucleotide
  Target: SCNA; (+) strand; PAM type: NNAGAAW; PAM sequence: ACAGAAT
taggcacacagaccaataaa

SEQ ID NO: 6860 - DNA, 20 bp, Artificial Sequence
  Description of Artificial Sequence: Synthetic oligonucleotide
  Target: SCNA; (+) strand; PAM type: NNAGAAW; PAM sequence: CTAGAAA
aataaaacagaatagagaac

SEQ ID NO: 6861 - DNA, 20 bp, Artificial Sequence
  Description of Artificial Sequence: Synthetic oligonucleotide
  Target: SCNA; (+) strand; PAM type: NNAGAAW; PAM sequence: ATAGAAT
ttagtagtggagcctggtgc

SEQ ID NO: 6862 - DNA, 20 bp, Artificial Sequence
  Description of Artificial Sequence: Synthetic oligonucleotide
  Target: SCNA; (+) strand; PAM type: NNAGAAW; PAM sequence: TTAGAAA
ttcatgtgctttgctacctg

SEQ ID NO: 6863 - DNA, 20 bp, Artificial Sequence
  Description of Artificial Sequence: Synthetic oligonucleotide
  Target: SCNA; (+) strand; PAM type: NNAGAAW; PAM sequence: ACAGAAT
ctgaagagttttcaggacac

SEQ ID NO: 6864 - DNA, 20 bp, Artificial Sequence
  Description of Artificial Sequence: Synthetic oligonucleotide
  Target: SCNA; (+) strand; PAM type: NNAGAAW; PAM sequence: CAAGAAA
gacttatttgagggaataat

SEQ ID NO: 6865 - DNA, 20 bp, Artificial Sequence
  Description of Artificial Sequence: Synthetic oligonucleotide
  Target: SCNA; (+) strand; PAM type: NNAGAAW; PAM sequence: AAAGAAT
gtctaaagtcaagatgaagg

SEQ ID NO: 6866 - DNA, 20 bp, Artificial Sequence
  Description of Artificial Sequence: Synthetic oligonucleotide
  Target: SCNA; (+) strand; PAM type: NNAGAAW; PAM sequence: AAAGAAA
aaagcatcaggtatcctata

SEQ ID NO: 6867 - DNA, 20 bp, Artificial Sequence
  Description of Artificial Sequence: Synthetic oligonucleotide
  Target: SCNA; (+) strand; PAM type: NNAGAAW; PAM sequence: CAAGAAT
taaacaaaataattatcagc

SEQ ID NO: 6868 - DNA, 20 bp, Artificial Sequence
  Description of Artificial Sequence: Synthetic oligonucleotide
  Target: SCNA; (+) strand; PAM type: NNAGAAW; PAM sequence: TGAGAAA
tgccactaccaagccagcac

SEQ ID NO: 6869 - DNA, 20 bp, Artificial Sequence
  Description of Artificial Sequence: Synthetic oligonucleotide
  Target: SCNA; (+) strand; PAM type: NNAGAAW; PAM sequence: ACAGAAT
aaatgctccacttaaaagat

SEQ ID NO: 6870 - DNA, 20 bp, Artificial Sequence
  Description of Artificial Sequence: Synthetic oligonucleotide
  Target: SCNA; (+) strand; PAM type: NNAGAAW; PAM sequence: GCAGAAT
cacttaaaagatacagaatg

SEQ ID NO: 6871 - DNA, 20 bp, Artificial Sequence
  Description of Artificial Sequence: Synthetic oligonucleotide
  Target: SCNA; (+) strand; PAM type: NNAGAAW; PAM sequence: TGAGAAA
atgcaaatggaaactcaaag

SEQ ID NO: 6872 - DNA, 20 bp, Artificial Sequence
  Description of Artificial Sequence: Synthetic oligonucleotide
  Target: SCNA; (+) strand; PAM type: NNAGAAW; PAM sequence: AAAGAAT
aaatggaaactcaaagtgag

SEQ ID NO: 6873 - DNA, 20 bp, Artificial Sequence
  Description of Artificial Sequence: Synthetic oligonucleotide
  Target: SCNA; (+) strand; PAM type: NNAGAAW; PAM sequence: ACAGAAA
gcactagacaggtcatcaag

SEQ ID NO: 6874 - DNA, 20 bp, Artificial Sequence
  Description of Artificial Sequence: Synthetic oligonucleotide
  Target: SCNA; (+) strand; PAM type: NNAGAAW; PAM sequence: AAAGAAA
catcaagacagaaagtcaac

SEQ ID NO: 6875 - DNA, 20 bp, Artificial Sequence
  Description of Artificial Sequence: Synthetic oligonucleotide
  Target: SCNA; (+) strand; PAM type: NNAGAAW; PAM sequence: TAAGAAA
tgaacaagtctcaataaatt

SEQ ID NO: 6876 - DNA, 20 bp, Artificial Sequence
  Description of Artificial Sequence: Synthetic oligonucleotide
  Target: SCNA; (+) strand; PAM type: NNAGAAW; PAM sequence: AAAGAAA
aaaattaaaaattaactcca

SEQ ID NO: 6877 - DNA, 20 bp, Artificial Sequence
  Description of Artificial Sequence: Synthetic oligonucleotide
  Target: SCNA; (+) strand; PAM type: NNAGAAW; PAM sequence: CAAGAAA
ctttgggtcaacaatgaaat

SEQ ID NO: 6878 - DNA, 20 bp, Artificial Sequence
  Description of Artificial Sequence: Synthetic oligonucleotide
  Target: SCNA; (+) strand; PAM type: NNAGAAW; PAM sequence: GAAGAAA
aagcaaacccaaacccagca

SEQ ID NO: 6879 - DNA, 20 bp, Artificial Sequence
  Description of Artificial Sequence: Synthetic oligonucleotide
  Target: SCNA; (+) strand; PAM type: NNAGAAW; PAM sequence: AAAGAAA
aacccaaacccagcagaaga

SEQ ID NO: 6880 - DNA, 20 bp, Artificial Sequence
  Description of Artificial Sequence: Synthetic oligonucleotide
  Target: SCNA; (+) strand; PAM type: NNAGAAW; PAM sequence: TCAGAAT
aagaaaagaaataacaaaga

SEQ ID NO: 6881 - DNA, 20 bp, Artificial Sequence
  Description of Artificial Sequence: Synthetic oligonucleotide
  Target: SCNA; (+) strand; PAM type: NNAGAAW; PAM sequence: ATAGAAA
aagaaataacaaagatcaga

SEQ ID NO: 6882 - DNA, 20 bp, Artificial Sequence
  Description of Artificial Sequence: Synthetic oligonucleotide
  Target: SCNA; (+) strand; PAM type: NNAGAAW; PAM sequence: AGAGAAT
ctactcgggcagctgaggca

SEQ ID NO: 6883 - DNA, 20 bp, Artificial Sequence
  Description of Artificial Sequence: Synthetic oligonucleotide
  Target: SCNA; (+) strand; PAM type: NNAGAAW; PAM sequence: CAAGAAA
agaccattggcaagattaac

SEQ ID NO: 6884 - DNA, 20 bp, Artificial Sequence
  Description of Artificial Sequence: Synthetic oligonucleotide
  Target: SCNA; (+) strand; PAM type: NNAGAAW; PAM sequence: CAAGAAA
ggcaagattaaccaagaaaa

SEQ ID NO: 6885 - DNA, 20 bp, Artificial Sequence
  Description of Artificial Sequence: Synthetic oligonucleotide
  Target: SCNA; (+) strand; PAM type: NNAGAAW; PAM sequence: TTAGAAA
aaagatctaaacaagctcaa

SEQ ID NO: 6886 - DNA, 20 bp, Artificial Sequence
  Description of Artificial Sequence: Synthetic oligonucleotide
  Target: SCNA; (+) strand; PAM type: NNAGAAW; PAM sequence: ACAGAAA
gagatactacaactgatacc

SEQ ID NO: 6887 - DNA, 20 bp, Artificial Sequence
  Description of Artificial Sequence: Synthetic oligonucleotide
  Target: SCNA; (+) strand; PAM type: NNAGAAW; PAM sequence: CTAGAAA
aacacatttacgtacacaaa

SEQ ID NO: 6888 - DNA, 20 bp, Artificial Sequence
  Description of Artificial Sequence: Synthetic oligonucleotide
  Target: SCNA; (+) strand; PAM type: NNAGAAW; PAM sequence: GAAGAAA
aacctcctagattaaaacag

SEQ ID NO: 6889 - DNA, 20 bp, Artificial Sequence
  Description of Artificial Sequence: Synthetic oligonucleotide
  Target: SCNA; (+) strand; PAM type: NNAGAAW; PAM sequence: ATAGAAA
ctagattaaaacaggaagaa

SEQ ID NO: 6890 - DNA, 20 bp, Artificial Sequence
  Description of Artificial Sequence: Synthetic oligonucleotide
  Target: SCNA; (+) strand; PAM type: NNAGAAW; PAM sequence: ATAGAAA
atagtgagagtgaaacaata

SEQ ID NO: 6891 - DNA, 20 bp, Artificial Sequence
  Description of Artificial Sequence: Synthetic oligonucleotide
  Target: SCNA; (+) strand; PAM type: NNAGAAW; PAM sequence: TCAGAAA
ggattcacaggtgaatgcta

SEQ ID NO: 6892 - DNA, 20 bp, Artificial Sequence
  Description of Artificial Sequence: Synthetic oligonucleotide
  Target: SCNA; (+) strand; PAM type: NNAGAAW; PAM sequence: AAAGAAA
gtgaatgctatcagaaattc

SEQ ID NO: 6893 - DNA, 20 bp, Artificial Sequence
  Description of Artificial Sequence: Synthetic oligonucleotide
  Target: SCNA; (+) strand; PAM type: NNAGAAW; PAM sequence: CCAGAAA
gtattaccctaatatcaaaa

SEQ ID NO: 6894 - DNA, 20 bp, Artificial Sequence
  Description of Artificial Sequence: Synthetic oligonucleotide
  Target: SCNA; (+) strand; PAM type: NNAGAAW; PAM sequence: AAAGAAA
cagaaaaggacataacaaaa

SEQ ID NO: 6895 - DNA, 20 bp, Artificial Sequence
  Description of Artificial Sequence: Synthetic oligonucleotide
  Target: SCNA; (+) strand; PAM type: NNAGAAW; PAM sequence: GCAGAAA
atatgataaactcaatagat

SEQ ID NO: 6896 - DNA, 20 bp, Artificial Sequence
  Description of Artificial Sequence: Synthetic oligonucleotide
  Target: SCNA; (+) strand; PAM type: NNAGAAW; PAM sequence: CAAGAAT
ccccgagaactggaataaga

SEQ ID NO: 6897 - DNA, 20 bp, Artificial Sequence
  Description of Artificial Sequence: Synthetic oligonucleotide
  Target: SCNA; (+) strand; PAM type: NNAGAAW; PAM sequence: AGAGAAA
ctagccagagcaatcagaca

SEQ ID NO: 6898 - DNA, 20 bp, Artificial Sequence
  Description of Artificial Sequence: Synthetic oligonucleotide
  Target: SCNA; (+) strand; PAM type: NNAGAAW; PAM sequence: AAAGAAA
ccagagcaatcagacaagag

SEQ ID NO: 6899 - DNA, 20 bp, Artificial Sequence
  Description of Artificial Sequence: Synthetic oligonucleotide
  Target: SCNA; (+) strand; PAM type: NNAGAAW; PAM sequence: CTAGAAA
ccgatgatatgtttgtatac

SEQ ID NO: 6900 - DNA, 20 bp, Artificial Sequence
  Description of Artificial Sequence: Synthetic oligonucleotide
  Target: SCNA; (+) strand; PAM type: NNAGAAW; PAM sequence: TGAGAAT
tacaccaacagcaacaaaac

SEQ ID NO: 6901 - DNA, 20 bp, Artificial Sequence
  Description of Artificial Sequence: Synthetic oligonucleotide
  Target: SCNA; (+) strand; PAM type: NNAGAAW; PAM sequence: AAAGAAA
aaaactacaaaatattgctg

SEQ ID NO: 6902 - DNA, 20 bp, Artificial Sequence
  Description of Artificial Sequence: Synthetic oligonucleotide
  Target: SCNA; (+) strand; PAM type: NNAGAAW; PAM sequence: ACAGAAA
gctgaaagaaatcacagaca

SEQ ID NO: 6903 - DNA, 20 bp, Artificial Sequence
  Description of Artificial Sequence: Synthetic oligonucleotide
  Target: SCNA; (+) strand; PAM type: NNAGAAW; PAM sequence: GCAGAAT
catcccttattcatggattg

SEQ ID NO: 6904 - DNA, 20 bp, Artificial Sequence
  Description of Artificial Sequence: Synthetic oligonucleotide
  Target: SCNA; (+) strand; PAM type: NNAGAAW; PAM sequence: CAAGAAA
caccatcattcttcaaagaa

SEQ ID NO: 6905 - DNA, 20 bp, Artificial Sequence
  Description of Artificial Sequence: Synthetic oligonucleotide
  Target: SCNA; (+) strand; PAM type: NNAGAAW; PAM sequence: GCAGAAT
tagacatgtagatcaatgga

SEQ ID NO: 6906 - DNA, 20 bp, Artificial Sequence
  Description of Artificial Sequence: Synthetic oligonucleotide
  Target: SCNA; (+) strand; PAM type: NNAGAAW; PAM sequence: ATAGAAA
atgtagatcaatggagcaga

SEQ ID NO: 6907 - DNA, 20 bp, Artificial Sequence
  Description of Artificial Sequence: Synthetic oligonucleotide
  Target: SCNA; (+) strand; PAM type: NNAGAAW; PAM sequence: CCAGAAA
aatggagcagaatagaaaat

SEQ ID NO: 6908 - DNA, 20 bp, Artificial Sequence
  Description of Artificial Sequence: Synthetic oligonucleotide
  Target: SCNA; (+) strand; PAM type: NNAGAAW; PAM sequence: GAAGAAT
taattggcaagccacatgta

SEQ ID NO: 6909 - DNA, 20 bp, Artificial Sequence
  Description of Artificial Sequence: Synthetic oligonucleotide
  Target: SCNA; (+) strand; PAM type: NNAGAAW; PAM sequence: CAAGAAA
ttaagcaaagagttcatgac

SEQ ID NO: 6910 - DNA, 20 bp, Artificial Sequence
  Description of Artificial Sequence: Synthetic oligonucleotide
  Target: SCNA; (+) strand; PAM type: NNAGAAW; PAM sequence: AAAGAAA
tataaagcttctgcacagca

SEQ ID NO: 6911 - DNA, 20 bp, Artificial Sequence
  Description of Artificial Sequence: Synthetic oligonucleotide
  Target: SCNA; (+) strand; PAM type: NNAGAAW; PAM sequence: ACAGAAT
tcagagtaaacagacaaccc

SEQ ID NO: 6912 - DNA, 20 bp, Artificial Sequence
  Description of Artificial Sequence: Synthetic oligonucleotide
  Target: SCNA; (+) strand; PAM type: NNAGAAW; PAM sequence: GGAGAAA
aacagacaacccacagaatg

SEQ ID NO: 6913 - DNA, 20 bp, Artificial Sequence
  Description of Artificial Sequence: Synthetic oligonucleotide
  Target: SCNA; (+) strand; PAM type: NNAGAAW; PAM sequence: CCAGAAT
atctgacaaaggactaatat

SEQ ID NO: 6914 - DNA, 20 bp, Artificial Sequence
  Description of Artificial Sequence: Synthetic oligonucleotide
  Target: SCNA; (+) strand; PAM type: NNAGAAW; PAM sequence: TAAGAAA
aaggaactcaaacaaatcag

SEQ ID NO: 6915 - DNA, 20 bp, Artificial Sequence
  Description of Artificial Sequence: Synthetic oligonucleotide
  Target: SCNA; (+) strand; PAM type: NNAGAAW; PAM sequence: CAAGAAT
gtgataccaccttactcctg

SEQ ID NO: 6916 - DNA, 20 bp, Artificial Sequence
  Description of Artificial Sequence: Synthetic oligonucleotide
  Target: SCNA; (+) strand; PAM type: NNAGAAW; PAM sequence: AAAGAAA
ccatcaaccaatgagtggat

SEQ ID NO: 6917 - DNA, 20 bp, Artificial Sequence
  Description of Artificial Sequence: Synthetic oligonucleotide
  Target: SCNA; (+) strand; PAM type: NNAGAAW; PAM sequence: TAAGAAT
aactaaaggatgcaaaggca

SEQ ID NO: 6918 - DNA, 20 bp, Artificial Sequence
  Description of Artificial Sequence: Synthetic oligonucleotide
  Target: SCNA; (+) strand; PAM type: NNAGAAW; PAM sequence: TCAGAAA
gttatgagtgtaccaaaatc

SEQ ID NO: 6919 - DNA, 20 bp, Artificial Sequence
  Description of Artificial Sequence: Synthetic oligonucleotide
  Target: SCNA; (+) strand; PAM type: NNAGAAW; PAM sequence: TCAGAAA
aataataataataaagttaa

SEQ ID NO: 6920 - DNA, 20 bp, Artificial Sequence
  Description of Artificial Sequence: Synthetic oligonucleotide
  Target: SCNA; (+) strand; PAM type: NNAGAAW; PAM sequence: ATAGAAA
actgaattatacttcattat

SEQ ID NO: 6921 - DNA, 20 bp, Artificial Sequence
  Description of Artificial Sequence: Synthetic oligonucleotide
  Target: SCNA; (+) strand; PAM type: NNAGAAW; PAM sequence: TAAGAAT
atatacccttacacaaaata

SEQ ID NO: 6922 - DNA, 20 bp, Artificial Sequence
  Description of Artificial Sequence: Synthetic oligonucleotide
  Target: SCNA; (+) strand; PAM type: NNAGAAW; PAM sequence: GCAGAAT
aactaagtgtccaaatgagt

SEQ ID NO: 6923 - DNA, 20 bp, Artificial Sequence
  Description of Artificial Sequence: Synthetic oligonucleotide
  Target: SCNA; (+) strand; PAM type: NNAGAAW; PAM sequence: TAAGAAT
ttttatatttcatttctaaa

SEQ ID NO: 6924 - DNA, 20 bp, Artificial Sequence
  Description of Artificial Sequence: Synthetic oligonucleotide
  Target: SCNA; (+) strand; PAM type: NNAGAAW; PAM sequence: CCAGAAA
tttgtcttttatgtacatgg

SEQ ID NO: 6925 - DNA, 20 bp, Artificial Sequence
  Description of Artificial Sequence: Synthetic oligonucleotide
  Target: SCNA; (+) strand; PAM type: NNAGAAW; PAM sequence: TGAGAAT
tatagtgaaattgagcaatg

SEQ ID NO: 6926 - DNA, 20 bp, Artificial Sequence
  Description of Artificial Sequence: Synthetic oligonucleotide
  Target: SCNA; (+) strand; PAM type: NNAGAAW; PAM sequence: CTAGAAA
aatgtgagaataaatgtgat

SEQ ID NO: 6927 - DNA, 20 bp, Artificial Sequence
  Description of Artificial Sequence: Synthetic oligonucleotide
  Target: SCNA; (+) strand; PAM type: NNAGAAW; PAM sequence: AAAGAAA
gagaataaatgtgatctaga

SEQ ID NO: 6928 - DNA, 20 bp, Artificial Sequence
  Description of Artificial Sequence: Synthetic oligonucleotide
  Target: SCNA; (+) strand; PAM type: NNAGAAW; PAM sequence: GTAGAAT
tgtctgaagtacaaattgtt

SEQ ID NO: 6929 - DNA, 20 bp, Artificial Sequence
  Description of Artificial Sequence: Synthetic oligonucleotide
  Target: SCNA; (+) strand; PAM type: NNAGAAW; PAM sequence: GAAGAAT
gtcctatcactttggtgtga

SEQ ID NO: 6930 - DNA, 20 bp, Artificial Sequence
  Description of Artificial Sequence: Synthetic oligonucleotide
  Target: SCNA; (+) strand; PAM type: NNAGAAW; PAM sequence: ATAGAAT
taggcttgcaccagttatca

SEQ ID NO: 6931 - DNA, 20 bp, Artificial Sequence
  Description of Artificial Sequence: Synthetic oligonucleotide
  Target: SCNA; (+) strand; PAM type: NNAGAAW; PAM sequence: TAAGAAA
accagttatcaatagaatat

SEQ ID NO: 6932 - DNA, 20 bp, Artificial Sequence
  Description of Artificial Sequence: Synthetic oligonucleotide
  Target: SCNA; (+) strand; PAM type: NNAGAAW; PAM sequence: GGAGAAT
ttaagaaagatttttaagaa

SEQ ID NO: 6933 - DNA, 20 bp, Artificial Sequence
  Description of Artificial Sequence: Synthetic oligonucleotide
  Target: SCNA; (+) strand; PAM type: NNAGAAW; PAM sequence: CCAGAAA
cacatatttgatacttttca

SEQ ID NO: 6934 - DNA, 20 bp, Artificial Sequence
  Description of Artificial Sequence: Synthetic oligonucleotide
  Target: SCNA; (+) strand; PAM type: NNAGAAW; PAM sequence: TGAGAAA
gtatttttacagagatgact

SEQ ID NO: 6935 - DNA, 20 bp, Artificial Sequence
  Description of Artificial Sequence: Synthetic oligonucleotide
  Target: SCNA; (+) strand; PAM type: NNAGAAW; PAM sequence: GTAGAAA
acagacacggcttttcaata

SEQ ID NO: 6936 - DNA, 20 bp, Artificial Sequence
  Description of Artificial Sequence: Synthetic oligonucleotide
  Target: SCNA; (+) strand; PAM type: NNAGAAW; PAM sequence: GAAGAAA
aattttaaaatatttctttt

SEQ ID NO: 6937 - DNA, 20 bp, Artificial Sequence
  Description of Artificial Sequence: Synthetic oligonucleotide
  Target: SCNA; (+) strand; PAM type: NNAGAAW; PAM sequence: TGAGAAA
tgtgggcttataaactctat

SEQ ID NO: 6938 - DNA, 20 bp, Artificial Sequence
  Description of Artificial Sequence: Synthetic oligonucleotide
  Target: SCNA; (+) strand; PAM type: NNAGAAW; PAM sequence: GGAGAAT
gatttttaaaacactggcct

SEQ ID NO: 6939 - DNA, 20 bp, Artificial Sequence
  Description of Artificial Sequence: Synthetic oligonucleotide
  Target: SCNA; (+) strand; PAM type: NNAGAAW; PAM sequence: AGAGAAT
gtgaacaagcaaagtgacca

SEQ ID NO: 6940 - DNA, 20 bp, Artificial Sequence
  Description of Artificial Sequence: Synthetic oligonucleotide
  Target: SCNA; (+) strand; PAM type: NNAGAAW; PAM sequence: CCAGAAA
ccaagagaatgatctatgat

SEQ ID NO: 6941 - DNA, 20 bp, Artificial Sequence
  Description of Artificial Sequence: Synthetic oligonucleotide
  Target: SCNA; (+) strand; PAM type: NNAGAAW; PAM sequence: GCAGAAA
actaaatatactaagaaggt

SEQ ID NO: 6942 - DNA, 20 bp, Artificial Sequence
  Description of Artificial Sequence: Synthetic oligonucleotide
  Target: SCNA; (+) strand; PAM type: NNAGAAW; PAM sequence: ACAGAAA
tatttccccatggcagaagg

SEQ ID NO: 6943 - DNA, 20 bp, Artificial Sequence
  Description of Artificial Sequence: Synthetic oligonucleotide
  Target: SCNA; (+) strand; PAM type: NNAGAAW; PAM sequence: GAAGAAA
gggaaacaaagctccctgtt

SEQ ID NO: 6944 - DNA, 20 bp, Artificial Sequence
  Description of Artificial Sequence: Synthetic oligonucleotide
  Target: SCNA; (+) strand; PAM type: NNAGAAW; PAM sequence: AGAGAAA
caatatttctactaatgaac

SEQ ID NO: 6945 - DNA, 20 bp, Artificial Sequence
  Description of Artificial Sequence: Synthetic oligonucleotide
  Target: SCNA; (+) strand; PAM type: NNAGAAW; PAM sequence: ATAGAAA
tgtatttccattgcttaaaa

SEQ ID NO: 6946 - DNA, 20 bp, Artificial Sequence
  Description of Artificial Sequence: Synthetic oligonucleotide
  Target: SCNA; (+) strand; PAM type: NNAGAAW; PAM sequence: GAAGAAA
cttaaaaatagaaaacagat

SEQ ID NO: 6947 - DNA, 20 bp, Artificial Sequence
  Description of Artificial Sequence: Synthetic oligonucleotide
  Target: SCNA; (+) strand; PAM type: NNAGAAW; PAM sequence: TAAGAAA
aatacggaggctaaaactct

SEQ ID NO: 6948 - DNA, 20 bp, Artificial Sequence
  Description of Artificial Sequence: Synthetic oligonucleotide
  Target: SCNA; (+) strand; PAM type: NNAGAAW; PAM sequence: TGAGAAA
ttctagtgcccaacctacca

SEQ ID NO: 6949 - DNA, 20 bp, Artificial Sequence
  Description of Artificial Sequence: Synthetic oligonucleotide
  Target: SCNA; (+) strand; PAM type: NNAGAAW; PAM sequence: TTAGAAA
tagtgaaagctgagcagatc

SEQ ID NO: 6950 - DNA, 20 bp, Artificial Sequence
  Description of Artificial Sequence: Synthetic oligonucleotide
  Target: SCNA; (+) strand; PAM type: NNAGAAW; PAM sequence: TTAGAAT
agcagatcttagaaattcat

SEQ ID NO: 6951 - DNA, 20 bp, Artificial Sequence
  Description of Artificial Sequence: Synthetic oligonucleotide
  Target: SCNA; (+) strand; PAM type: NNAGAAW; PAM sequence: TAAGAAT
ttacacttgactataacact

SEQ ID NO: 6952 - DNA, 20 bp, Artificial Sequence
  Description of Artificial Sequence: Synthetic oligonucleotide
  Target: SCNA; (+) strand; PAM type: NNAGAAW; PAM sequence: AGAGAAA
tcttctaatatagtgtggga

SEQ ID NO: 6953 - DNA, 20 bp, Artificial Sequence
  Description of Artificial Sequence: Synthetic oligonucleotide
  Target: SCNA; (+) strand; PAM type: NNAGAAW; PAM sequence: GTAGAAT
caatcaactgcatccagaag

SEQ ID NO: 6954 - DNA, 20 bp, Artificial Sequence
  Description of Artificial Sequence: Synthetic oligonucleotide
  Target: SCNA; (+) strand; PAM type: NNAGAAW; PAM sequence: GCAGAAT
aatgccaagtgatactttcg

SEQ ID NO: 6955 - DNA, 20 bp, Artificial Sequence
  Description of Artificial Sequence: Synthetic oligonucleotide
  Target: SCNA; (+) strand; PAM type: NNAGAAW; PAM sequence: GGAGAAA
agtagtcaatatatttatta

SEQ ID NO: 6956 - DNA, 20 bp, Artificial Sequence
  Description of Artificial Sequence: Synthetic oligonucleotide
  Target: SCNA; (+) strand; PAM type: NNAGAAW; PAM sequence: TAAGAAA
aatactttattcactaatct

SEQ ID NO: 6957 - DNA, 20 bp, Artificial Sequence
  Description of Artificial Sequence: Synthetic oligonucleotide
  Target: SCNA; (+) strand; PAM type: NNAGAAW; PAM sequence: AAAGAAT
ttacttctccaatctttcca

SEQ ID NO: 6958 - DNA, 20 bp, Artificial Sequence
  Description of Artificial Sequence: Synthetic oligonucleotide
  Target: SCNA; (+) strand; PAM type: NNAGAAW; PAM sequence: ACAGAAA
cattataagaagcaaaaatt

SEQ ID NO: 6959 - DNA, 20 bp, Artificial Sequence
  Description of Artificial Sequence: Synthetic oligonucleotide
  Target: SCNA; (+) strand; PAM type: NNAGAAW; PAM sequence: AAAGAAA
atcattatccttttaaattg

SEQ ID NO: 6960 - DNA, 20 bp, Artificial Sequence
  Description of Artificial Sequence: Synthetic oligonucleotide
  Target: SCNA; (+) strand; PAM type: NNAGAAW; PAM sequence: GCAGAAA
caatgttgtatgatgctctg

SEQ ID NO: 6961 - DNA, 20 bp, Artificial Sequence
  Description of Artificial Sequence: Synthetic oligonucleotide
  Target: SCNA; (+) strand; PAM type: NNAGAAW; PAM sequence: GTAGAAT
agaaactaaaaactatgctt

SEQ ID NO: 6962 - DNA, 20 bp, Artificial Sequence
  Description of Artificial Sequence: Synthetic oligonucleotide
  Target: SCNA; (+) strand; PAM type: NNAGAAW; PAM sequence: TGAGAAT
aatgtctaaatatatttcca

SEQ ID NO: 6963 - DNA, 20 bp, Artificial Sequence
  Description of Artificial Sequence: Synthetic oligonucleotide
  Target: SCNA; (+) strand; PAM type: NNAGAAW; PAM sequence: CAAGAAT
acataaaaaataagactaaa

SEQ ID NO: 6964 - DNA, 20 bp, Artificial Sequence
  Description of Artificial Sequence: Synthetic oligonucleotide
  Target: SCNA; (+) strand; PAM type: NNAGAAW; PAM sequence: TGAGAAA
gtggctggtatccaaaggaa

SEQ ID NO: 6965 - DNA, 20 bp, Artificial Sequence
  Description of Artificial Sequence: Synthetic oligonucleotide
  Target: SCNA; (+) strand; PAM type: NNAGAAW; PAM sequence: GGAGAAA
ggttcctcaatctccctaag

SEQ ID NO: 6966 - DNA, 20 bp, Artificial Sequence
  Description of Artificial Sequence: Synthetic oligonucleotide
  Target: SCNA; (+) strand; PAM type: NNAGAAW; PAM sequence: TGAGAAT
ctaccatggacttatgtgaa

SEQ ID NO: 6967 - DNA, 20 bp, Artificial Sequence
  Description of Artificial Sequence: Synthetic oligonucleotide
  Target: SCNA; (+) strand; PAM type: NNAGAAW; PAM sequence: GAAGAAT
tttttgtagtttgattttct

SEQ ID NO: 6968 - DNA, 20 bp, Artificial Sequence
  Description of Artificial Sequence: Synthetic oligonucleotide
  Target: SCNA; (+) strand; PAM type: NNAGAAW; PAM sequence: CCAGAAT
agtccctctatccacttcac

SEQ ID NO: 6969 - DNA, 20 bp, Artificial Sequence
  Description of Artificial Sequence: Synthetic oligonucleotide
  Target: SCNA; (+) strand; PAM type: NNAGAAW; PAM sequence: AAAGAAA
tttaatataatgctacgtga

SEQ ID NO: 6970 - DNA, 20 bp, Artificial Sequence
  Description of Artificial Sequence: Synthetic oligonucleotide
  Target: SCNA; (+) strand; PAM type: NNAGAAW; PAM sequence: CCAGAAA
atgctacgtgaaaagaaatg

SEQ ID NO: 6971 - DNA, 20 bp, Artificial Sequence
  Description of Artificial Sequence: Synthetic oligonucleotide
  Target: SCNA; (+) strand; PAM type: NNAGAAW; PAM sequence: TAAGAAA
ttcattaaaaattctgagtt

SEQ ID NO: 6972 - DNA, 20 bp, Artificial Sequence
  Description of Artificial Sequence: Synthetic oligonucleotide
  Target: SCNA; (+) strand; PAM type: NNAGAAW; PAM sequence: TGAGAAA
taagaaaacagctaagaggt

SEQ ID NO: 6973 - DNA, 20 bp, Artificial Sequence
  Description of Artificial Sequence: Synthetic oligonucleotide
  Target: SCNA; (+) strand; PAM type: NNAGAAW; PAM sequence: GAAGAAA
ttctccaaaatatagctaca

SEQ ID NO: 6974 - DNA, 20 bp, Artificial Sequence
  Description of Artificial Sequence: Synthetic oligonucleotide
  Target: SCNA; (+) strand; PAM type: NNAGAAW; PAM sequence: TCAGAAA
aacaagtgtatagtacacat

SEQ ID NO: 6975 - DNA, 20 bp, Artificial Sequence
  Description of Artificial Sequence: Synthetic oligonucleotide
  Target: SCNA; (+) strand; PAM type: NNAGAAW; PAM sequence: TAAGAAA
ccaagacaaatgaagatata

SEQ ID NO: 6976 - DNA, 20 bp, Artificial Sequence
  Description of Artificial Sequence: Synthetic oligonucleotide
  Target: SCNA; (+) strand; PAM type: NNAGAAW; PAM sequence: ACAGAAA
agctaaaaggagggtgtcct

SEQ ID NO: 6977 - DNA, 20 bp, Artificial Sequence
  Description of Artificial Sequence: Synthetic oligonucleotide
  Target: SCNA; (+) strand; PAM type: NNAGAAW; PAM sequence: AAAGAAA
tatgagtgatgactaaggac

SEQ ID NO: 6978 - DNA, 20 bp, Artificial Sequence
  Description of Artificial Sequence: Synthetic oligonucleotide
  Target: SCNA; (+) strand; PAM type: NNAGAAW; PAM sequence: TGAGAAT
agcatgctctctgacattag

SEQ ID NO: 6979 - DNA, 20 bp, Artificial Sequence
  Description of Artificial Sequence: Synthetic oligonucleotide
  Target: SCNA; (+) strand; PAM type: NNAGAAW; PAM sequence: GAAGAAT
gtggcttttttcttgtctca

SEQ ID NO: 6980 - DNA, 20 bp, Artificial Sequence
  Description of Artificial Sequence: Synthetic oligonucleotide
  Target: SCNA; (+) strand; PAM type: NNAGAAW; PAM sequence: AAAGAAA
ttttttttttttttttttat

SEQ ID NO: 6981 - DNA, 20 bp, Artificial Sequence
  Description of Artificial Sequence: Synthetic oligonucleotide
  Target: SCNA; (+) strand; PAM type: NNAGAAW; PAM sequence: GGAGAAA
aaggcacacctcacatggca

SEQ ID NO: 6982 - DNA, 20 bp, Artificial Sequence
  Description of Artificial Sequence: Synthetic oligonucleotide
  Target: SCNA; (+) strand; PAM type: NNAGAAW; PAM sequence: GGAGAAA
cactatcatgagaacagcat

SEQ ID NO: 6983 - DNA, 20 bp, Artificial Sequence
  Description of Artificial Sequence: Synthetic oligonucleotide
  Target: SCNA; (+) strand; PAM type: NNAGAAW; PAM sequence: GAAGAAA
ctttcacttgaaaaaaaaaa

SEQ ID NO: 6984 - DNA, 20 bp, Artificial Sequence
  Description of Artificial Sequence: Synthetic oligonucleotide
  Target: SCNA; (+) strand; PAM type: NNAGAAW; PAM sequence: AGAGAAA
tgtattttggatgcttctga

SEQ ID NO: 6985 - DNA, 20 bp, Artificial Sequence
  Description of Artificial Sequence: Synthetic oligonucleotide
  Target: SCNA; (+) strand; PAM type: NNAGAAW; PAM sequence: ATAGAAT
ctgaagagaaacaaagacat

SEQ ID NO: 6986 - DNA, 20 bp, Artificial Sequence
  Description of Artificial Sequence: Synthetic oligonucleotide
  Target: SCNA; (+) strand; PAM type: NNAGAAW; PAM sequence: GTAGAAT
aacattatctgtgtttattt

SEQ ID NO: 6987 - DNA, 20 bp, Artificial Sequence
  Description of Artificial Sequence: Synthetic oligonucleotide
  Target: SCNA; (+) strand; PAM type: NNAGAAW; PAM sequence: TTAGAAT
atgtctgatatctcatacat

SEQ ID NO: 6988 - DNA, 20 bp, Artificial Sequence
  Description of Artificial Sequence: Synthetic oligonucleotide
  Target: SCNA; (+) strand; PAM type: NNAGAAW; PAM sequence: ATAGAAT
atacatttagaatatttgta

SEQ ID NO: 6989 - DNA, 20 bp, Artificial Sequence
  Description of Artificial Sequence: Synthetic oligonucleotide
  Target: SCNA; (+) strand; PAM type: NNAGAAW; PAM sequence: AAAGAAT
ctatgcaatttaacaactgc

SEQ ID NO: 6990 - DNA, 20 bp, Artificial Sequence
  Description of Artificial Sequence: Synthetic oligonucleotide
  Target: SCNA; (+) strand; PAM type: NNAGAAW; PAM sequence: TGAGAAT
caatagcccaacgtctagta

SEQ ID NO: 6991 - DNA, 20 bp, Artificial Sequence
  Description of Artificial Sequence: Synthetic oligonucleotide
  Target: SCNA; (+) strand; PAM type: NNAGAAW; PAM sequence: GGAGAAA
gttctgttttggagactcta

SEQ ID NO: 6992 - DNA, 20 bp, Artificial Sequence
  Description of Artificial Sequence: Synthetic oligonucleotide
  Target: SCNA; (+) strand; PAM type: NNAGAAW; PAM sequence: CTAGAAT
tgcctctatgtctttagtac

SEQ ID NO: 6993 - DNA, 20 bp, Artificial Sequence
  Description of Artificial Sequence: Synthetic oligonucleotide
  Target: SCNA; (+) strand; PAM type: NNAGAAW; PAM sequence: AGAGAAA
aacaggaatatgctataggg

SEQ ID NO: 6994 - DNA, 20 bp, Artificial Sequence
  Description of Artificial Sequence: Synthetic oligonucleotide
  Target: SCNA; (+) strand; PAM type: NNAGAAW; PAM sequence: AGAGAAA
ctttgtgtattttttactta

SEQ ID NO: 6995 - DNA, 20 bp, Artificial Sequence
  Description of Artificial Sequence: Synthetic oligonucleotide
  Target: SCNA; (+) strand; PAM type: NNAGAAW; PAM sequence: GGAGAAA
aatagtaataatattcgcta

SEQ ID NO: 6996 - DNA, 20 bp, Artificial Sequence
  Description of Artificial Sequence: Synthetic oligonucleotide
  Target: SCNA; (+) strand; PAM type: NNAGAAW; PAM sequence: GAAGAAA
ttcgctaggagaaacacttt

SEQ ID NO: 6997 - DNA, 20 bp, Artificial Sequence
  Description of Artificial Sequence: Synthetic oligonucleotide
  Target: SCNA; (+) strand; PAM type: NNAGAAW; PAM sequence: AAAGAAA
ctaggagaaacactttgaag

SEQ ID NO: 6998 - DNA, 20 bp, Artificial Sequence
  Description of Artificial Sequence: Synthetic oligonucleotide
  Target: SCNA; (+) strand; PAM type: NNAGAAW; PAM sequence: TTAGAAA
ttacttctattgctagggtg

SEQ ID NO: 6999 - DNA, 20 bp, Artificial Sequence
  Description of Artificial Sequence: Synthetic oligonucleotide
  Target: SCNA; (+) strand; PAM type: NNAGAAW; PAM sequence: CAAGAAA
ttctccttcaattaatattc

SEQ ID NO: 7000 - DNA, 20 bp, Artificial Sequence
  Description of Artificial Sequence: Synthetic oligonucleotide
  Target: SCNA; (+) strand; PAM type: NNAGAAW; PAM sequence: AAAGAAA
cttcaattaatattccaaga

SEQ ID NO: 7001 - DNA, 20 bp, Artificial Sequence
  Description of Artificial Sequence: Synthetic oligonucleotide
  Target: SCNA; (+) strand; PAM type: NNAGAAW; PAM sequence: ATAGAAA
tgaaagtcatttaaattcga

SEQ ID NO: 7002 - DNA, 20 bp, Artificial Sequence
  Description of Artificial Sequence: Synthetic oligonucleotide
  Target: SCNA; (+) strand; PAM type: NNAGAAW; PAM sequence: TGAGAAT
tctgcccttatgaaaagtgg

SEQ ID NO: 7003 - DNA, 20 bp, Artificial Sequence
  Description of Artificial Sequence: Synthetic oligonucleotide
  Target: SCNA; (+) strand; PAM type: NNAGAAW; PAM sequence: ATAGAAA
gaaaaatatttaggaagatt

SEQ ID NO: 7004 - DNA, 20 bp, Artificial Sequence
  Description of Artificial Sequence: Synthetic oligonucleotide
  Target: SCNA; (+) strand; PAM type: NNAGAAW; PAM sequence: AAAGAAA
aatatttaggaagattatag

SEQ ID NO: 7005 - DNA, 20 bp, Artificial Sequence
  Description of Artificial Sequence: Synthetic oligonucleotide
  Target: SCNA; (+) strand; PAM type: NNAGAAW; PAM sequence: CGAGAAT
gcatgagccaccatgccagg

SEQ ID NO: 7006 - DNA, 20 bp, Artificial Sequence
  Description of Artificial Sequence: Synthetic oligonucleotide
  Target: SCNA; (+) strand; PAM type: NNAGAAW; PAM sequence: TGAGAAA
ggcgagaatttgcttttaaa

SEQ ID NO: 7007 - DNA, 20 bp, Artificial Sequence
  Description of Artificial Sequence: Synthetic oligonucleotide
  Target: SCNA; (+) strand; PAM type: NNAGAAW; PAM sequence: TTAGAAA
ggaaagttccctgtcaaatt

SEQ ID NO: 7008 - DNA, 20 bp, Artificial Sequence
  Description of Artificial Sequence: Synthetic oligonucleotide
  Target: SCNA; (+) strand; PAM type: NNAGAAW; PAM sequence: AGAGAAA
gaggcaagaggtgatatgag

SEQ ID NO: 7009 - DNA, 20 bp, Artificial Sequence
  Description of Artificial Sequence: Synthetic oligonucleotide
  Target: SCNA; (+) strand; PAM type: NNAGAAW; PAM sequence: AGAGAAA
gaatttggaaggctgctggg

SEQ ID NO: 7010 - DNA, 20 bp, Artificial Sequence
  Description of Artificial Sequence: Synthetic oligonucleotide
  Target: SCNA; (+) strand; PAM type: NNAGAAW; PAM sequence: GGAGAAT
ctactcaggaggctgaacta

SEQ ID NO: 7011 - DNA, 20 bp, Artificial Sequence
  Description of Artificial Sequence: Synthetic oligonucleotide
  Target: SCNA; (+) strand; PAM type: NNAGAAW; PAM sequence: CCAGAAA
ttgaagtctagagatgaatt

SEQ ID NO: 7012 - DNA, 20 bp, Artificial Sequence
  Description of Artificial Sequence: Synthetic oligonucleotide
  Target: SCNA; (+) strand; PAM type: NNAGAAW; PAM sequence: ACAGAAA
gaattccagaaataaggtat

SEQ ID NO: 7013 - DNA, 20 bp, Artificial Sequence
  Description of Artificial Sequence: Synthetic oligonucleotide
  Target: SCNA; (+) strand; PAM type: NNAGAAW; PAM sequence: AAAGAAA
tatgttcatgcattaaatat

SEQ ID NO: 7014 - DNA, 20 bp, Artificial Sequence
  Description of Artificial Sequence: Synthetic oligonucleotide
  Target: SCNA; (+) strand; PAM type: NNAGAAW; PAM sequence: TGAGAAA
catgtaacgaccaccacaat

SEQ ID NO: 7015 - DNA, 20 bp, Artificial Sequence
  Description of Artificial Sequence: Synthetic oligonucleotide
  Target: SCNA; (+) strand; PAM type: NNAGAAW; PAM sequence: GAAGAAA
taggggtagaacttacagat

SEQ ID NO: 7016 - DNA, 20 bp, Artificial Sequence
  Description of Artificial Sequence: Synthetic oligonucleotide
  Target: SCNA; (+) strand; PAM type: NNAGAAW; PAM sequence: GAAGAAA
tgccgtattgttcttcatgg

SEQ ID NO: 7017 - DNA, 20 bp, Artificial Sequence
  Description of Artificial Sequence: Synthetic oligonucleotide
  Target: SCNA; (+) strand; PAM type: NNAGAAW; PAM sequence: GAAGAAT
gccaggtgtttggaaaagta

SEQ ID NO: 7018 - DNA, 20 bp, Artificial Sequence
  Description of Artificial Sequence: Synthetic oligonucleotide
  Target: SCNA; (+) strand; PAM type: NNAGAAW; PAM sequence: GTAGAAT
aaactgtgcaatagttacat

SEQ ID NO: 7019 - DNA, 20 bp, Artificial Sequence
  Description of Artificial Sequence: Synthetic oligonucleotide
  Target: SCNA; (+) strand; PAM type: NNAGAAW; PAM sequence: ATAGAAA
agtgctatgaaaagataatc

SEQ ID NO: 7020 - DNA, 20 bp, Artificial Sequence
  Description of Artificial Sequence: Synthetic oligonucleotide
  Target: SCNA; (+) strand; PAM type: NNAGAAW; PAM sequence: TAAGAAA
tgaataccacatactcattt

SEQ ID NO: 7021 - DNA, 20 bp, Artificial Sequence
  Description of Artificial Sequence: Synthetic oligonucleotide
  Target: SCNA; (+) strand; PAM type: NNAGAAW; PAM sequence: AGAGAAA
tttaagaaaaattttcactg

SEQ ID NO: 7022 - DNA, 20 bp, Artificial Sequence
  Description of Artificial Sequence: Synthetic oligonucleotide
  Target: SCNA; (+) strand; PAM type: NNAGAAW; PAM sequence: GAAGAAT
ttccctgggccatatttgaa

SEQ ID NO: 7023 - DNA, 20 bp, Artificial Sequence
  Description of Artificial Sequence: Synthetic oligonucleotide
  Target: SCNA; (+) strand; PAM type: NNAGAAW; PAM sequence: TGAGAAA
ctaacactcatgatagctga

SEQ ID NO: 7024 - DNA, 20 bp, Artificial Sequence
  Description of Artificial Sequence: Synthetic oligonucleotide
  Target: SCNA; (+) strand; PAM type: NNAGAAW; PAM sequence: TGAGAAA
gtaatctataaaaaaattac

SEQ ID NO: 7025 - DNA, 20 bp, Artificial Sequence
  Description of Artificial Sequence: Synthetic oligonucleotide
  Target: SCNA; (+) strand; PAM type: NNAGAAW; PAM sequence: TAAGAAA
acatttattgagtacctata

SEQ ID NO: 7026 - DNA, 20 bp, Artificial Sequence
  Description of Artificial Sequence: Synthetic oligonucleotide
  Target: SCNA; (+) strand; PAM type: NNAGAAW; PAM sequence: AAAGAAA
ctagataccagggaaaccaa

SEQ ID NO: 7027 - DNA, 20 bp, Artificial Sequence
  Description of Artificial Sequence: Synthetic oligonucleotide
  Target: SCNA; (+) strand; PAM type: NNAGAAW; PAM sequence: TAAGAAA
tatcttaggaatttaagatt

SEQ ID NO: 7028 - DNA, 20 bp, Artificial Sequence
  Description of Artificial Sequence: Synthetic oligonucleotide
  Target: SCNA; (+) strand; PAM type: NNAGAAW; PAM sequence: AAAGAAT
ttaggaatttaagatttaag

SEQ ID NO: 7029 - DNA, 20 bp, Artificial Sequence
  Description of Artificial Sequence: Synthetic oligonucleotide
  Target: SCNA; (+) strand; PAM type: NNAGAAW; PAM sequence: AGAGAAT
acaatggatcaaccagtatt

SEQ ID NO: 7030 - DNA, 20 bp, Artificial Sequence
  Description of Artificial Sequence: Synthetic oligonucleotide
  Target: SCNA; (+) strand; PAM type: NNAGAAW; PAM sequence: GGAGAAA
tacaacattagaacgaggat

SEQ ID NO: 7031 - DNA, 20 bp, Artificial Sequence
  Description of Artificial Sequence: Synthetic oligonucleotide
  Target: SCNA; (+) strand; PAM type: NNAGAAW; PAM sequence: AGAGAAA
ggcagttaaagttaaccagg

SEQ ID NO: 7032 - DNA, 20 bp, Artificial Sequence
  Description of Artificial Sequence: Synthetic oligonucleotide
  Target: SCNA; (+) strand; PAM type: NNAGAAW; PAM sequence: AGAGAAT
cataatggaagagatggggg

SEQ ID NO: 7033 - DNA, 20 bp, Artificial Sequence
  Description of Artificial Sequence: Synthetic oligonucleotide
  Target: SCNA; (+) strand; PAM type: NNAGAAW; PAM sequence: TAAGAAA
ttgtaggtcatgggaagtca

SEQ ID NO: 7034 - DNA, 20 bp, Artificial Sequence
  Description of Artificial Sequence: Synthetic oligonucleotide
  Target: SCNA; (+) strand; PAM type: NNAGAAW; PAM sequence: AGAGAAA
taaaaatgtgtagcgtgcaa

SEQ ID NO: 7035 - DNA, 20 bp, Artificial Sequence
  Description of Artificial Sequence: Synthetic oligonucleotide
  Target: SCNA; (+) strand; PAM type: NNAGAAW; PAM sequence: CTAGAAA
gtatcaggcaagagatctgg

SEQ ID NO: 7036 - DNA, 20 bp, Artificial Sequence
  Description of Artificial Sequence: Synthetic oligonucleotide
  Target: SCNA; (+) strand; PAM type: NNAGAAW; PAM sequence: GGAGAAT
ggagggaagaggaaaagctt

SEQ ID NO: 7037 - DNA, 20 bp, Artificial Sequence
  Description of Artificial Sequence: Synthetic oligonucleotide
  Target: SCNA; (+) strand; PAM type: NNAGAAW; PAM sequence: TCAGAAA
ggaaaagcttggagaatgag

SEQ ID NO: 7038 - DNA, 20 bp, Artificial Sequence
  Description of Artificial Sequence: Synthetic oligonucleotide
  Target: SCNA; (+) strand; PAM type: NNAGAAW; PAM sequence: TGAGAAA
tagattaaagatttaagttg

SEQ ID NO: 7039 - DNA, 20 bp, Artificial Sequence
  Description of Artificial Sequence: Synthetic oligonucleotide
  Target: SCNA; (+) strand; PAM type: NNAGAAW; PAM sequence: AAAGAAT
gaataaattagagattaata

SEQ ID NO: 7040 - DNA, 20 bp, Artificial Sequence
  Description of Artificial Sequence: Synthetic oligonucleotide
  Target: SCNA; (+) strand; PAM type: NNAGAAW; PAM sequence: GTAGAAA
aagaataaaaaatcaaccag

SEQ ID NO: 7041 - DNA, 20 bp, Artificial Sequence
  Description of Artificial Sequence: Synthetic oligonucleotide
  Target: SCNA; (+) strand; PAM type: NNAGAAW; PAM sequence: ACAGAAA
aagtacatatcaaagtattt

SEQ ID NO: 7042 - DNA, 20 bp, Artificial Sequence
  Description of Artificial Sequence: Synthetic oligonucleotide
  Target: SCNA; (+) strand; PAM type: NNAGAAW; PAM sequence: GAAGAAT
ataacattatactcaaaaaa

SEQ ID NO: 7043 - DNA, 20 bp, Artificial Sequence
  Description of Artificial Sequence: Synthetic oligonucleotide
  Target: SCNA; (+) strand; PAM type: NNAGAAW; PAM sequence: AAAGAAA
aaaagaagaatagagattgt

SEQ ID NO: 7044 - DNA, 20 bp, Artificial Sequence
  Description of Artificial Sequence: Synthetic oligonucleotide
  Target: SCNA; (+) strand; PAM type: NNAGAAW; PAM sequence: GAAGAAT
ataaaatgtcttaatctgag

SEQ ID NO: 7045 - DNA, 20 bp, Artificial Sequence
  Description of Artificial Sequence: Synthetic oligonucleotide
  Target: SCNA; (+) strand; PAM type: NNAGAAW; PAM sequence: GAAGAAA
aatgtaattaaatgaaattt

SEQ ID NO: 7046 - DNA, 20 bp, Artificial Sequence
  Description of Artificial Sequence: Synthetic oligonucleotide
  Target: SCNA; (+) strand; PAM type: NNAGAAW; PAM sequence: GCAGAAA
ttaaatgaaatttgaagaaa

SEQ ID NO: 7047 - DNA, 20 bp, Artificial Sequence
  Description of Artificial Sequence: Synthetic oligonucleotide
  Target: SCNA; (+) strand; PAM type: NNAGAAW; PAM sequence: TTAGAAT
acaatgctatgtggaagtta

SEQ ID NO: 7048 - DNA, 20 bp, Artificial Sequence
  Description of Artificial Sequence: Synthetic oligonucleotide
  Target: SCNA; (+) strand; PAM type: NNAGAAW; PAM sequence: TTAGAAT
actaaagtccatagtttata

SEQ ID NO: 7049 - DNA, 20 bp, Artificial Sequence
  Description of Artificial Sequence: Synthetic oligonucleotide
  Target: SCNA; (+) strand; PAM type: NNAGAAW; PAM sequence: AGAGAAT
atccaccatgacagtatcat

SEQ ID NO: 7050 - DNA, 20 bp, Artificial Sequence
  Description of Artificial Sequence: Synthetic oligonucleotide
  Target: SCNA; (+) strand; PAM type: NNAGAAW; PAM sequence: CCAGAAT
cactgatctttttactgtct

SEQ ID NO: 7051 - DNA, 20 bp, Artificial Sequence
  Description of Artificial Sequence: Synthetic oligonucleotide
  Target: SCNA; (+) strand; PAM type: NNAGAAW; PAM sequence: TCAGAAT
tctccagaattttgtctctt

SEQ ID NO: 7052 - DNA, 20 bp, Artificial Sequence
  Description of Artificial Sequence: Synthetic oligonucleotide
  Target: SCNA; (+) strand; PAM type: NNAGAAW; PAM sequence: ATAGAAT
atgtcatatattggaatcat

SEQ ID NO: 7053 - DNA, 20 bp, Artificial Sequence
  Description of Artificial Sequence: Synthetic oligonucleotide
  Target: SCNA; (+) strand; PAM type: NNAGAAW; PAM sequence: TAAGAAA
ttaagtatagtttagcttcg

SEQ ID NO: 7054 - DNA, 20 bp, Artificial Sequence
  Description of Artificial Sequence: Synthetic oligonucleotide
  Target: SCNA; (+) strand; PAM type: NNAGAAW; PAM sequence: TGAGAAT
ttctaccgaaggaaatatgt

SEQ ID NO: 7055 - DNA, 20 bp, Artificial Sequence
  Description of Artificial Sequence: Synthetic oligonucleotide
  Target: SCNA; (+) strand; PAM type: NNAGAAW; PAM sequence: CAAGAAT
gatatgtatgaatatataga

SEQ ID NO: 7056 - DNA, 20 bp, Artificial Sequence
  Description of Artificial Sequence: Synthetic oligonucleotide
  Target: SCNA; (+) strand; PAM type: NNAGAAW; PAM sequence: GGAGAAA
aaacttcctttagagtatac

SEQ ID NO: 7057 - DNA, 20 bp, Artificial Sequence
  Description of Artificial Sequence: Synthetic oligonucleotide
  Target: SCNA; (+) strand; PAM type: NNAGAAW; PAM sequence: ATAGAAA
atagtattttcctattcctc

SEQ ID NO: 7058 - DNA, 20 bp, Artificial Sequence
  Description of Artificial Sequence: Synthetic oligonucleotide
  Target: SCNA; (+) strand; PAM type: NNAGAAW; PAM sequence: CTAGAAA
cttaactacagggaccattt

SEQ ID NO: 7059 - DNA, 20 bp, Artificial Sequence
  Description of Artificial Sequence: Synthetic oligonucleotide
  Target: SCNA; (+) strand; PAM type: NNAGAAW; PAM sequence: CTAGAAT
catttctagaaatcaaattt

SEQ ID NO: 7060 - DNA, 20 bp, Artificial Sequence
  Description of Artificial Sequence: Synthetic oligonucleotide
  Target: SCNA; (+) strand; PAM type: NNAGAAW; PAM sequence: CTAGAAT
atagagatccttaaattgtg

SEQ ID NO: 7061 - DNA, 20 bp, Artificial Sequence
  Description of Artificial Sequence: Synthetic oligonucleotide
  Target: SCNA; (+) strand; PAM type: NNAGAAW; PAM sequence: AGAGAAT
gcatagagatcctctcgcat

SEQ ID NO: 7062 - DNA, 20 bp, Artificial Sequence
  Description of Artificial Sequence: Synthetic oligonucleotide
  Target: SCNA; (+) strand; PAM type: NNAGAAW; PAM sequence: CAAGAAT
catagagaattcctgctact

SEQ ID NO: 7063 - DNA, 20 bp, Artificial Sequence
  Description of Artificial Sequence: Synthetic oligonucleotide
  Target: SCNA; (+) strand; PAM type: NNAGAAW; PAM sequence: ATAGAAT
tcagtaccaagtaagactgg

SEQ ID NO: 7064 - DNA, 20 bp, Artificial Sequence
  Description of Artificial Sequence: Synthetic oligonucleotide
  Target: SCNA; (+) strand; PAM type: NNAGAAW; PAM sequence: CTAGAAT
ttctcactcattcttctatc

SEQ ID NO: 7065 - DNA, 20 bp, Artificial Sequence
  Description of Artificial Sequence: Synthetic oligonucleotide
  Target: SCNA; (+) strand; PAM type: NNAGAAW; PAM sequence: ACAGAAA
ataatggtatatggcactgc

SEQ ID NO: 7066 - DNA, 20 bp, Artificial Sequence
  Description of Artificial Sequence: Synthetic oligonucleotide
  Target: SCNA; (+) strand; PAM type: NNAGAAW; PAM sequence: GGAGAAT
actgttgggaggccgaggca

SEQ ID NO: 7067 - DNA, 20 bp, Artificial Sequence
  Description of Artificial Sequence: Synthetic oligonucleotide
  Target: SCNA; (+) strand; PAM type: NNAGAAW; PAM sequence: TCAGAAA
gaaatcagacaatggtgttc

SEQ ID NO: 7068 - DNA, 20 bp, Artificial Sequence
  Description of Artificial Sequence: Synthetic oligonucleotide
  Target: SCNA; (+) strand; PAM type: NNAGAAW; PAM sequence: CTAGAAA
cttctctcccaataaaatgc

SEQ ID NO: 7069 - DNA, 20 bp, Artificial Sequence
  Description of Artificial Sequence: Synthetic oligonucleotide
  Target: SCNA; (+) strand; PAM type: NNAGAAW; PAM sequence: CAAGAAA
agaaaacaatgtatctctaa

SEQ ID NO: 7070 - DNA, 20 bp, Artificial Sequence
  Description of Artificial Sequence: Synthetic oligonucleotide
  Target: SCNA; (+) strand; PAM type: NNAGAAW; PAM sequence: CCAGAAA
ctaataaatcttttaataat

SEQ ID NO: 7071 - DNA, 20 bp, Artificial Sequence
  Description of Artificial Sequence: Synthetic oligonucleotide
  Target: SCNA; (+) strand; PAM type: NNAGAAW; PAM sequence: AAAGAAA
taaatcttttaataatccag

SEQ ID NO: 7072 - DNA, 20 bp, Artificial Sequence
  Description of Artificial Sequence: Synthetic oligonucleotide
  Target: SCNA; (+) strand; PAM type: NNAGAAW; PAM sequence: TAAGAAA
aagaaacatttagaagacat

SEQ ID NO: 7073 - DNA, 20 bp, Artificial Sequence
  Description of Artificial Sequence: Synthetic oligonucleotide
  Target: SCNA; (+) strand; PAM type: NNAGAAW; PAM sequence: TCAGAAT
agacattaagaaagacatat

SEQ ID NO: 7074 - DNA, 20 bp, Artificial Sequence
  Description of Artificial Sequence: Synthetic oligonucleotide
  Target: SCNA; (+) strand; PAM type: NNAGAAW; PAM sequence: CAAGAAA
aggttaaaaatcaatttcta

SEQ ID NO: 7075 - DNA, 20 bp, Artificial Sequence
  Description of Artificial Sequence: Synthetic oligonucleotide
  Target: SCNA; (+) strand; PAM type: NNAGAAW; PAM sequence: GAAGAAT
tttaaaagttaactttaaaa

SEQ ID NO: 7076 - DNA, 20 bp, Artificial Sequence
  Description of Artificial Sequence: Synthetic oligonucleotide
  Target: SCNA; (+) strand; PAM type: NNAGAAW; PAM sequence: TAAGAAA
taatatccaaatttgtctgg

SEQ ID NO: 7077 - DNA, 20 bp, Artificial Sequence
  Description of Artificial Sequence: Synthetic oligonucleotide
  Target: SCNA; (+) strand; PAM type: NNAGAAW; PAM sequence: GCAGAAT
attacttctacttttgtgag

SEQ ID NO: 7078 - DNA, 20 bp, Artificial Sequence
  Description of Artificial Sequence: Synthetic oligonucleotide
  Target: SCNA; (+) strand; PAM type: NNAGAAW; PAM sequence: GAAGAAA
tcttttttgctgaagtttct

SEQ ID NO: 7079 - DNA, 20 bp, Artificial Sequence
  Description of Artificial Sequence: Synthetic oligonucleotide
  Target: SCNA; (+) strand; PAM type: NNAGAAW; PAM sequence: TGAGAAA
tttttatatatcaataacca

SEQ ID NO: 7080 - DNA, 20 bp, Artificial Sequence
  Description of Artificial Sequence: Synthetic oligonucleotide
  Target: SCNA; (+) strand; PAM type: NNAGAAW; PAM sequence: TAAGAAA
ttctaaattatgtggtttac

SEQ ID NO: 7081 - DNA, 20 bp, Artificial Sequence
  Description of Artificial Sequence: Synthetic oligonucleotide
  Target: SCNA; (+) strand; PAM type: NNAGAAW; PAM sequence: GGAGAAA
aatggttgctttgttcttaa

SEQ ID NO: 7082 - DNA, 20 bp, Artificial Sequence
  Description of Artificial Sequence: Synthetic oligonucleotide
  Target: SCNA; (+) strand; PAM type: NNAGAAW; PAM sequence: TAAGAAA
gtagtgctgttataaacata

SEQ ID NO: 7083 - DNA, 20 bp, Artificial Sequence
  Description of Artificial Sequence: Synthetic oligonucleotide
  Target: SCNA; (+) strand; PAM type: NNAGAAW; PAM sequence: TTAGAAT
acagcatagagttaagttta

SEQ ID NO: 7084 - DNA, 20 bp, Artificial Sequence
  Description of Artificial Sequence: Synthetic oligonucleotide
  Target: SCNA; (+) strand; PAM type: NNAGAAW; PAM sequence: ATAGAAT
ctaacgtgcagtgaaatcat

SEQ ID NO: 7085 - DNA, 20 bp, Artificial Sequence
  Description of Artificial Sequence: Synthetic oligonucleotide
  Target: SCNA; (+) strand; PAM type: NNAGAAW; PAM sequence: GGAGAAA
agttggagggtggcatacaa

SEQ ID NO: 7086 - DNA, 20 bp, Artificial Sequence
  Description of Artificial Sequence: Synthetic oligonucleotide
  Target: SCNA; (+) strand; PAM type: NNAGAAW; PAM sequence: AAAGAAT
gtgatctggtttctttctta

SEQ ID NO: 7087 - DNA, 20 bp, Artificial Sequence
  Description of Artificial Sequence: Synthetic oligonucleotide
  Target: SCNA; (+) strand; PAM type: NNAGAAW; PAM sequence: CAAGAAT
aaagaattattccgactgct

SEQ ID NO: 7088 - DNA, 20 bp, Artificial Sequence
  Description of Artificial Sequence: Synthetic oligonucleotide
  Target: SCNA; (+) strand; PAM type: NNAGAAW; PAM sequence: TGAGAAA
ggttagggaaggagtccagg

SEQ ID NO: 7089 - DNA, 20 bp, Artificial Sequence
  Description of Artificial Sequence: Synthetic oligonucleotide
  Target: SCNA; (+) strand; PAM type: NNAGAAW; PAM sequence: CTAGAAT
ttttgaagatacttgtctac

SEQ ID NO: 7090 - DNA, 20 bp, Artificial Sequence
  Description of Artificial Sequence: Synthetic oligonucleotide
  Target: SCNA; (+) strand; PAM type: NNAGAAW; PAM sequence: GAAGAAT
gatacttgtctacctagaat

SEQ ID NO: 7091 - DNA, 20 bp, Artificial Sequence
  Description of Artificial Sequence: Synthetic oligonucleotide
  Target: SCNA; (+) strand; PAM type: NNAGAAW; PAM sequence: AAAGAAA
tttgagagctatatggctga

SEQ ID NO: 7092 - DNA, 20 bp, Artificial Sequence
  Description of Artificial Sequence: Synthetic oligonucleotide
  Target: SCNA; (+) strand; PAM type: NNAGAAW; PAM sequence: CTAGAAA
attttttgtaactaatctgg

SEQ ID NO: 7093 - DNA, 20 bp, Artificial Sequence
  Description of Artificial Sequence: Synthetic oligonucleotide
  Target: SCNA; (+) strand; PAM type: NNAGAAW; PAM sequence: TAAGAAA
aggcaccaattagtttctaa

SEQ ID NO: 7094 - DNA, 20 bp, Artificial Sequence
  Description of Artificial Sequence: Synthetic oligonucleotide
  Target: SCNA; (+) strand; PAM type: NNAGAAW; PAM sequence: AAAGAAA
caattagtttctaataagaa

SEQ ID NO: 7095 - DNA, 20 bp, Artificial Sequence
  Description of Artificial Sequence: Synthetic oligonucleotide
  Target: SCNA; (+) strand; PAM type: NNAGAAW; PAM sequence: GAAGAAA
aaagaaatgtgtaaagaaga

SEQ ID NO: 7096 - DNA, 20 bp, Artificial Sequence
  Description of Artificial Sequence: Synthetic oligonucleotide
  Target: SCNA; (+) strand; PAM type: NNAGAAW; PAM sequence: GAAGAAT
agaaatttcattctctccat

SEQ ID NO: 7097 - DNA, 20 bp, Artificial Sequence
  Description of Artificial Sequence: Synthetic oligonucleotide
  Target: SCNA; (+) strand; PAM type: NNAGAAW; PAM sequence: TAAGAAT
tcaggcatgctagttactat

SEQ ID NO: 7098 - DNA, 20 bp, Artificial Sequence
  Description of Artificial Sequence: Synthetic oligonucleotide
  Target: SCNA; (+) strand; PAM type: NNAGAAW; PAM sequence: TGAGAAA
gtggataaagtacattaaaa

SEQ ID NO: 7099 - DNA, 20 bp, Artificial Sequence
  Description of Artificial Sequence: Synthetic oligonucleotide
  Target: SCNA; (+) strand; PAM type: NNAGAAW; PAM sequence: TGAGAAA
gttcccagcctccagagcta

SEQ ID NO: 7100 - DNA, 20 bp, Artificial Sequence
  Description of Artificial Sequence: Synthetic oligonucleotide
  Target: SCNA; (+) strand; PAM type: NNAGAAW; PAM sequence: TAAGAAT
gcccaaaacatttataatag

SEQ ID NO: 7101 - DNA, 20 bp, Artificial Sequence
  Description of Artificial Sequence: Synthetic oligonucleotide
  Target: SCNA; (+) strand; PAM type: NNAGAAW; PAM sequence: AAAGAAA
gggaacaaaggggataaagg

SEQ ID NO: 7102 - DNA, 20 bp, Artificial Sequence
  Description of Artificial Sequence: Synthetic oligonucleotide
  Target: SCNA; (+) strand; PAM type: NNAGAAW; PAM sequence: TCAGAAA
tatgtactatgatacttcac

SEQ ID NO: 7103 - DNA, 20 bp, Artificial Sequence
  Description of Artificial Sequence: Synthetic oligonucleotide
  Target: SCNA; (+) strand; PAM type: NNAGAAW; PAM sequence: AGAGAAA
tcacttcaaacttaatggga

SEQ ID NO: 7104 - DNA, 20 bp, Artificial Sequence
  Description of Artificial Sequence: Synthetic oligonucleotide
  Target: SCNA; (+) strand; PAM type: NNAGAAW; PAM sequence: AAAGAAT
ggtggacaaatggataattg

SEQ ID NO: 7105 - DNA, 20 bp, Artificial Sequence
  Description of Artificial Sequence: Synthetic oligonucleotide
  Target: SCNA; (+) strand; PAM type: NNAGAAW; PAM sequence: GCAGAAA
gataattgaaagaataaata

SEQ ID NO: 7106 - DNA, 20 bp, Artificial Sequence
  Description of Artificial Sequence: Synthetic oligonucleotide
  Target: SCNA; (+) strand; PAM type: NNAGAAW; PAM sequence: TAAGAAA
gtacgtgggaactgggaact

SEQ ID NO: 7107 - DNA, 20 bp, Artificial Sequence
  Description of Artificial Sequence: Synthetic oligonucleotide
  Target: SCNA; (+) strand; PAM type: NNAGAAW; PAM sequence: GCAGAAT
ttgcaattgtggctaaagca

SEQ ID NO: 7108 - DNA, 20 bp, Artificial Sequence
  Description of Artificial Sequence: Synthetic oligonucleotide
  Target: SCNA; (+) strand; PAM type: NNAGAAW; PAM sequence: GGAGAAA
catgcttattaaagggaatt

SEQ ID NO: 7109 - DNA, 20 bp, Artificial Sequence
  Description of Artificial Sequence: Synthetic oligonucleotide
  Target: SCNA; (+) strand; PAM type: NNAGAAW; PAM sequence: TAAGAAA
ggaattggagaaaataaaaa

SEQ ID NO: 7110 - DNA, 20 bp, Artificial Sequence
  Description of Artificial Sequence: Synthetic oligonucleotide
  Target: SCNA; (+) strand; PAM type: NNAGAAW; PAM sequence: GAAGAAT
gaatgagagttctccacagc

SEQ ID NO: 7111 - DNA, 20 bp, Artificial Sequence
  Description of Artificial Sequence: Synthetic oligonucleotide
  Target: SCNA; (+) strand; PAM type: NNAGAAW; PAM sequence: TGAGAAA
aaatgcaaaatgggcttcac

SEQ ID NO: 7112 - DNA, 20 bp, Artificial Sequence
  Description of Artificial Sequence: Synthetic oligonucleotide
  Target: SCNA; (+) strand; PAM type: NNAGAAW; PAM sequence: AAAGAAA
ctttcattagcgaagtataa

SEQ ID NO: 7113 - DNA, 20 bp, Artificial Sequence
  Description of Artificial Sequence: Synthetic oligonucleotide
  Target: SCNA; (+) strand; PAM type: NNAGAAW; PAM sequence: GGAGAAT
gggggctgacatatcaagtt

SEQ ID NO: 7114 - DNA, 20 bp, Artificial Sequence
  Description of Artificial Sequence: Synthetic oligonucleotide
  Target: SCNA; (+) strand; PAM type: NNAGAAW; PAM sequence: CAAGAAA
tcatttctttggtgttgtcc

SEQ ID NO: 7115 - DNA, 20 bp, Artificial Sequence
  Description of Artificial Sequence: Synthetic oligonucleotide
  Target: SCNA; (+) strand; PAM type: NNAGAAW; PAM sequence: ACAGAAA
gtgttgtcccaagaaatgta

SEQ ID NO: 7116 - DNA, 20 bp, Artificial Sequence
  Description of Artificial Sequence: Synthetic oligonucleotide
  Target: SCNA; (+) strand; PAM type: NNAGAAW; PAM sequence: AAAGAAT
tgtaacagaaaatgactata

SEQ ID NO: 7117 - DNA, 20 bp, Artificial Sequence
  Description of Artificial Sequence: Synthetic oligonucleotide
  Target: SCNA; (+) strand; PAM type: NNAGAAW; PAM sequence: TAAGAAA
gacctgcaatcagccattat

SEQ ID NO: 7118 - DNA, 20 bp, Artificial Sequence
  Description of Artificial Sequence: Synthetic oligonucleotide
  Target: SCNA; (+) strand; PAM type: NNAGAAW; PAM sequence: AGAGAAA
atcagccattattaagaaaa

SEQ ID NO: 7119 - DNA, 20 bp, Artificial Sequence
  Description of Artificial Sequence: Synthetic oligonucleotide
  Target: SCNA; (+) strand; PAM type: NNAGAAW; PAM sequence: AGAGAAT
tttcccaaaattatttgagc

SEQ ID NO: 7120 - DNA, 20 bp, Artificial Sequence
  Description of Artificial Sequence: Synthetic oligonucleotide
  Target: SCNA; (+) strand; PAM type: NNAGAAW; PAM sequence: AGAGAAA
catgtatcgacacacttctt

SEQ ID NO: 7121 - DNA, 20 bp, Artificial Sequence
  Description of Artificial Sequence: Synthetic oligonucleotide
  Target: SCNA; (+) strand; PAM type: NNAGAAW; PAM sequence: TTAGAAA
tacagatgagtagctatggt

SEQ ID NO: 7122 - DNA, 20 bp, Artificial Sequence
  Description of Artificial Sequence: Synthetic oligonucleotide
  Target: SCNA; (+) strand; PAM type: NNAGAAW; PAM sequence: TAAGAAA
caacatttttatttcacaga

SEQ ID NO: 7123 - DNA, 20 bp, Artificial Sequence
  Description of Artificial Sequence: Synthetic oligonucleotide
  Target: SCNA; (+) strand; PAM type: NNAGAAW; PAM sequence: TTAGAAA
actttagatatgtcataata

SEQ ID NO: 7124 - DNA, 20 bp, Artificial Sequence
  Description of Artificial Sequence: Synthetic oligonucleotide
  Target: SCNA; (+) strand; PAM type: NNAGAAW; PAM sequence: TCAGAAA
gcaaagctgtatgtacaacc

SEQ ID NO: 7125 - DNA, 20 bp, Artificial Sequence
  Description of Artificial Sequence: Synthetic oligonucleotide
  Target: SCNA; (+) strand; PAM type: NNAGAAW; PAM sequence: ATAGAAA
tgaggattcccaatagccaa

SEQ ID NO: 7126 - DNA, 20 bp, Artificial Sequence
  Description of Artificial Sequence: Synthetic oligonucleotide
  Target: SCNA; (+) strand; PAM type: NNAGAAW; PAM sequence: AGAGAAA
atattgttgttgtgaacacc

SEQ ID NO: 7127 - DNA, 20 bp, Artificial Sequence
  Description of Artificial Sequence: Synthetic oligonucleotide
  Target: SCNA; (+) strand; PAM type: NNAGAAW; PAM sequence: TAAGAAT
agtattcactatgacattaa

SEQ ID NO: 7128 - DNA, 20 bp, Artificial Sequence
  Description of Artificial Sequence: Synthetic oligonucleotide
  Target: SCNA; (+) strand; PAM type: NNAGAAW; PAM sequence: CCAGAAT
caagtaactgcttagtgatt

SEQ ID NO: 7129 - DNA, 20 bp, Artificial Sequence
  Description of Artificial Sequence: Synthetic oligonucleotide
  Target: SCNA; (+) strand; PAM type: NNAGAAW; PAM sequence: GCAGAAA
aacagcctatgcttgaaggg

SEQ ID NO: 7130 - DNA, 20 bp, Artificial Sequence
  Description of Artificial Sequence: Synthetic oligonucleotide
  Target: SCNA; (+) strand; PAM type: NNAGAAW; PAM sequence: CAAGAAA
agtgcatactggtaattttt

SEQ ID NO: 7131 - DNA, 20 bp, Artificial Sequence
  Description of Artificial Sequence: Synthetic oligonucleotide
  Target: SCNA; (+) strand; PAM type: NNAGAAW; PAM sequence: ACAGAAT
ttgctctcacgttgcagtcc

SEQ ID NO: 7132 - DNA, 20 bp, Artificial Sequence
  Description of Artificial Sequence: Synthetic oligonucleotide
  Target: SCNA; (+) strand; PAM type: NNAGAAW; PAM sequence: TTAGAAT
ccttacaggattaagggtca

SEQ ID NO: 7133 - DNA, 20 bp, Artificial Sequence
  Description of Artificial Sequence: Synthetic oligonucleotide
  Target: SCNA; (+) strand; PAM type: NNAGAAW; PAM sequence: AAAGAAA
agtgaaattttgtcagatac

SEQ ID NO: 7134 - DNA, 20 bp, Artificial Sequence
  Description of Artificial Sequence: Synthetic oligonucleotide
  Target: SCNA; (+) strand; PAM type: NNAGAAW; PAM sequence: TGAGAAA
ttagtgggctctcatatgag

SEQ ID NO: 7135 - DNA, 20 bp, Artificial Sequence
  Description of Artificial Sequence: Synthetic oligonucleotide
  Target: SCNA; (+) strand; PAM type: NNAGAAW; PAM sequence: TTAGAAA
aatgtcactgttacatacct

SEQ ID NO: 7136 - DNA, 20 bp, Artificial Sequence
  Description of Artificial Sequence: Synthetic oligonucleotide
  Target: SCNA; (+) strand; PAM type: NNAGAAW; PAM sequence: AAAGAAA
tgacctgtgtgtgcttcttc

SEQ ID NO: 7137 - DNA, 20 bp, Artificial Sequence
  Description of Artificial Sequence: Synthetic oligonucleotide
  Target: SCNA; (+) strand; PAM type: NNAGAAW; PAM sequence: ACAGAAT
tgaattaagtcaggattatt

SEQ ID NO: 7138 - DNA, 20 bp, Artificial Sequence
  Description of Artificial Sequence: Synthetic oligonucleotide
  Target: SCNA; (+) strand; PAM type: NNAGAAW; PAM sequence: CCAGAAA
gacttttgctctctaaaact

SEQ ID NO: 7139 - DNA, 20 bp, Artificial Sequence
  Description of Artificial Sequence: Synthetic oligonucleotide
  Target: SCNA; (+) strand; PAM type: NNAGAAW; PAM sequence: ACAGAAT
actgcacgcatagtagcatt

SEQ ID NO: 7140 - DNA, 20 bp, Artificial Sequence
  Description of Artificial Sequence: Synthetic oligonucleotide
  Target: SCNA; (+) strand; PAM type: NNAGAAW; PAM sequence: CAAGAAA
ccaatgaaaggtatgaactt

SEQ ID NO: 7141 - DNA, 20 bp, Artificial Sequence
  Description of Artificial Sequence: Synthetic oligonucleotide
  Target: SCNA; (+) strand; PAM type: NNAGAAW; PAM sequence: TTAGAAA
tcctttaactagtcttatac

SEQ ID NO: 7142 - DNA, 20 bp, Artificial Sequence
  Description of Artificial Sequence: Synthetic oligonucleotide
  Target: SCNA; (+) strand; PAM type: NNAGAAW; PAM sequence: TCAGAAT
actctcgatttattggttgt

SEQ ID NO: 7143 - DNA, 20 bp, Artificial Sequence
  Description of Artificial Sequence: Synthetic oligonucleotide
  Target: SCNA; (+) strand; PAM type: NNAGAAW; PAM sequence: ATAGAAA
agagtattctttgaattatt

SEQ ID NO: 7144 - DNA, 20 bp, Artificial Sequence
  Description of Artificial Sequence: Synthetic oligonucleotide
  Target: SCNA; (+) strand; PAM type: NNAGAAW; PAM sequence: TGAGAAA
agtagagcttcctcatttta

SEQ ID NO: 7145 - DNA, 20 bp, Artificial Sequence
  Description of Artificial Sequence: Synthetic oligonucleotide
  Target: SCNA; (+) strand; PAM type: NNAGAAW; PAM sequence: TTAGAAA
tctatggcttcattttcata

SEQ ID NO: 7146 - DNA, 20 bp, Artificial Sequence
  Description of Artificial Sequence: Synthetic oligonucleotide
  Target: SCNA; (+) strand; PAM type: NNAGAAW; PAM sequence: TAAGAAA
attttcatattagaaatcag

SEQ ID NO: 7147 - DNA, 20 bp, Artificial Sequence
  Description of Artificial Sequence: Synthetic oligonucleotide
  Target: SCNA; (+) strand; PAM type: NNAGAAW; PAM sequence: ATAGAAT
gaaatcttacgaagctataa

SEQ ID NO: 7148 - DNA, 20 bp, Artificial Sequence
  Description of Artificial Sequence: Synthetic oligonucleotide
  Target: SCNA; (+) strand; PAM type: NNAGAAW; PAM sequence: CCAGAAT
ttacatgaagtggaaacaac

SEQ ID NO: 7149 - DNA, 20 bp, Artificial Sequence
  Description of Artificial Sequence: Synthetic oligonucleotide
  Target: SCNA; (+) strand; PAM type: NNAGAAW; PAM sequence: CCAGAAA
agcatatgattataaaagac

SEQ ID NO: 7150 - DNA, 20 bp, Artificial Sequence
  Description of Artificial Sequence: Synthetic oligonucleotide
  Target: SCNA; (+) strand; PAM type: NNAGAAW; PAM sequence: GGAGAAA
tggtgcctacattctagaag

SEQ ID NO: 7151 - DNA, 20 bp, Artificial Sequence
  Description of Artificial Sequence: Synthetic oligonucleotide
  Target: SCNA; (+) strand; PAM type: NNAGAAW; PAM sequence: AAAGAAA
aaggtgaataacactttggc

SEQ ID NO: 7152 - DNA, 20 bp, Artificial Sequence
  Description of Artificial Sequence: Synthetic oligonucleotide
  Target: SCNA; (+) strand; PAM type: NNAGAAW; PAM sequence: AAAGAAA
cactttggcaaagaaaggaa

SEQ ID NO: 7153 - DNA, 20 bp, Artificial Sequence
  Description of Artificial Sequence: Synthetic oligonucleotide
  Target: SCNA; (+) strand; PAM type: NNAGAAW; PAM sequence: AAAGAAA
ttggcaaagaaaggaaaaag

SEQ ID NO: 7154 - DNA, 20 bp, Artificial Sequence
  Description of Artificial Sequence: Synthetic oligonucleotide
  Target: SCNA; (+) strand; PAM type: NNAGAAW; PAM sequence: CAAGAAA
gaaagaaggaaggaaggaag

SEQ ID NO: 7155 - DNA, 20 bp, Artificial Sequence
  Description of Artificial Sequence: Synthetic oligonucleotide
  Target: SCNA; (+) strand; PAM type: NNAGAAW; PAM sequence: AAAGAAA
gaaggaaggaaggaagcaag

SEQ ID NO: 7156 - DNA, 20 bp, Artificial Sequence
  Description of Artificial Sequence: Synthetic oligonucleotide
  Target: SCNA; (+) strand; PAM type: NNAGAAW; PAM sequence: AGAGAAA
aaggaagcaagaaagaaaaa

SEQ ID NO: 7157 - DNA, 20 bp, Artificial Sequence
  Description of Artificial Sequence: Synthetic oligonucleotide
  Target: SCNA; (+) strand; PAM type: NNAGAAW; PAM sequence: AAAGAAA
aagcaagaaagaaaaaagag

SEQ ID NO: 7158 - DNA, 20 bp, Artificial Sequence
  Description of Artificial Sequence: Synthetic oligonucleotide
  Target: SCNA; (+) strand; PAM type: NNAGAAW; PAM sequence: AAAGAAA
aagaaagaaaaaagagaaag

SEQ ID NO: 7159 - DNA, 20 bp, Artificial Sequence
  Description of Artificial Sequence: Synthetic oligonucleotide
  Target: SCNA; (+) strand; PAM type: NNAGAAW; PAM sequence: GGAGAAA
agagggaggaaggaaggaag

SEQ ID NO: 7160 - DNA, 20 bp, Artificial Sequence
  Description of Artificial Sequence: Synthetic oligonucleotide
  Target: SCNA; (+) strand; PAM type: NNAGAAW; PAM sequence: AAAGAAA
gaaaggaaggaaggaaggga

SEQ ID NO: 7161 - DNA, 20 bp, Artificial Sequence
  Description of Artificial Sequence: Synthetic oligonucleotide
  Target: SCNA; (+) strand; PAM type: NNAGAAW; PAM sequence: AAAGAAA
ggaaggaaggaagggaaaag

SEQ ID NO: 7162 - DNA, 20 bp, Artificial Sequence
  Description of Artificial Sequence: Synthetic oligonucleotide
  Target: SCNA; (+) strand; PAM type: NNAGAAW; PAM sequence: AGAGAAA
ggaaaagaaagaaaggaaag

SEQ ID NO: 7163 - DNA, 20 bp, Artificial Sequence
  Description of Artificial Sequence: Synthetic oligonucleotide
  Target: SCNA; (+) strand; PAM type: NNAGAAW; PAM sequence: AAAGAAA
aaggaaagagagaaagaagg

SEQ ID NO: 7164 - DNA, 20 bp, Artificial Sequence
  Description of Artificial Sequence: Synthetic oligonucleotide
  Target: SCNA; (+) strand; PAM type: NNAGAAW; PAM sequence: AAAGAAA
aaagagagaaagaaggaaag

SEQ ID NO: 7165 - DNA, 20 bp, Artificial Sequence
  Description of Artificial Sequence: Synthetic oligonucleotide
  Target: SCNA; (+) strand; PAM type: NNAGAAW; PAM sequence: AAAGAAA
agagaaagaaggaaagaaag

SEQ ID NO: 7166 - DNA, 20 bp, Artificial Sequence
  Description of Artificial Sequence: Synthetic oligonucleotide
  Target: SCNA; (+) strand; PAM type: NNAGAAW; PAM sequence: AAAGAAA
agaaggaaagaaagaaagaa

SEQ ID NO: 7167 - DNA, 20 bp, Artificial Sequence
  Description of Artificial Sequence: Synthetic oligonucleotide
  Target: SCNA; (+) strand; PAM type: NNAGAAW; PAM sequence: AAAGAAA
aaagaaagaaagaaaaagaa

SEQ ID NO: 7168 - DNA, 20 bp, Artificial Sequence
  Description of Artificial Sequence: Synthetic oligonucleotide
  Target: SCNA; (+) strand; PAM type: NNAGAAW; PAM sequence: AAAGAAA
aaagaaagaaaaagaaaaag

SEQ ID NO: 7169 - DNA, 20 bp, Artificial Sequence
  Description of Artificial Sequence: Synthetic oligonucleotide
  Target: SCNA; (+) strand; PAM type: NNAGAAW; PAM sequence: GAAGAAT
actgggaataccagaggtga

SEQ ID NO: 7170 - DNA, 20 bp, Artificial Sequence
  Description of Artificial Sequence: Synthetic oligonucleotide
  Target: SCNA; (+) strand; PAM type: NNAGAAW; PAM sequence: CAAGAAA
aagggtatgcttgatttatt

SEQ ID NO: 7171 - DNA, 20 bp, Artificial Sequence
  Description of Artificial Sequence: Synthetic oligonucleotide
  Target: SCNA; (+) strand; PAM type: NNAGAAW; PAM sequence: TCAGAAT
aaattcagtcaaaattcttc

SEQ ID NO: 7172 - DNA, 20 bp, Artificial Sequence
  Description of Artificial Sequence: Synthetic oligonucleotide
  Target: SCNA; (+) strand; PAM type: NNAGAAW; PAM sequence: AAAGAAA
ataagagatgatgtcactat

SEQ ID NO: 7173 - DNA, 20 bp, Artificial Sequence
  Description of Artificial Sequence: Synthetic oligonucleotide
  Target: SCNA; (+) strand; PAM type: NNAGAAW; PAM sequence: AGAGAAA
gggatttgttactccaagga

SEQ ID NO: 7174 - DNA, 20 bp, Artificial Sequence
  Description of Artificial Sequence: Synthetic oligonucleotide
  Target: SCNA; (+) strand; PAM type: NNAGAAW; PAM sequence: CCAGAAA
tttgtttcattaactttctt

SEQ ID NO: 7175 - DNA, 20 bp, Artificial Sequence
  Description of Artificial Sequence: Synthetic oligonucleotide
  Target: SCNA; (+) strand; PAM type: NNAGAAW; PAM sequence: GTAGAAT
caacaacagattaaagggtg

SEQ ID NO: 7176 - DNA, 20 bp, Artificial Sequence
  Description of Artificial Sequence: Synthetic oligonucleotide
  Target: SCNA; (+) strand; PAM type: NNAGAAW; PAM sequence: GAAGAAA
catagataactgagtggtca

SEQ ID NO: 7177 - DNA, 20 bp, Artificial Sequence
  Description of Artificial Sequence: Synthetic oligonucleotide
  Target: SCNA; (+) strand; PAM type: NNAGAAW; PAM sequence: ACAGAAA
gtttatactatggaaagttt

SEQ ID NO: 7178 - DNA, 20 bp, Artificial Sequence
  Description of Artificial Sequence: Synthetic oligonucleotide
  Target: SCNA; (+) strand; PAM type: NNAGAAW; PAM sequence: GTAGAAA
tattattatttgtattttta

SEQ ID NO: 7179 - DNA, 20 bp, Artificial Sequence
  Description of Artificial Sequence: Synthetic oligonucleotide
  Target: SCNA; (+) strand; PAM type: NNAGAAW; PAM sequence: TAAGAAA
catatgtacgaataacagca

SEQ ID NO: 7180 - DNA, 20 bp, Artificial Sequence
  Description of Artificial Sequence: Synthetic oligonucleotide
  Target: SCNA; (+) strand; PAM type: NNAGAAW; PAM sequence: CCAGAAA
ttcttgttcagttaaataag

SEQ ID NO: 7181 - DNA, 20 bp, Artificial Sequence
  Description of Artificial Sequence: Synthetic oligonucleotide
  Target: SCNA; (+) strand; PAM type: NNAGAAW; PAM sequence: ACAGAAA
ttcagttaaataagccagaa

SEQ ID NO: 7182 - DNA, 20 bp, Artificial Sequence
  Description of Artificial Sequence: Synthetic oligonucleotide
  Target: SCNA; (+) strand; PAM type: NNAGAAW; PAM sequence: AAAGAAA
atctcactcatgtggaatct

SEQ ID NO: 7183 - DNA, 20 bp, Artificial Sequence
  Description of Artificial Sequence: Synthetic oligonucleotide
  Target: SCNA; (+) strand; PAM type: NNAGAAW; PAM sequence: AAAGAAA
ctcatgtggaatctaaagaa

SEQ ID NO: 7184 - DNA, 20 bp, Artificial Sequence
  Description of Artificial Sequence: Synthetic oligonucleotide
  Target: SCNA; (+) strand; PAM type: NNAGAAW; PAM sequence: CCAGAAA
catagccacacagcccaaga

SEQ ID NO: 7185 - DNA, 20 bp, Artificial Sequence
  Description of Artificial Sequence: Synthetic oligonucleotide
  Target: SCNA; (+) strand; PAM type: NNAGAAW; PAM sequence: CTAGAAT
ctccctatttgtcttttagg

SEQ ID NO: 7186 - DNA, 20 bp, Artificial Sequence
  Description of Artificial Sequence: Synthetic oligonucleotide
  Target: SCNA; (+) strand; PAM type: NNAGAAW; PAM sequence: TTAGAAT
catagtagataataaataat

SEQ ID NO: 7187 - DNA, 20 bp, Artificial Sequence
  Description of Artificial Sequence: Synthetic oligonucleotide
  Target: SCNA; (+) strand; PAM type: NNAGAAW; PAM sequence: TTAGAAT
aggaaatgtgataccaactt

SEQ ID NO: 7188 - DNA, 20 bp, Artificial Sequence
  Description of Artificial Sequence: Synthetic oligonucleotide
  Target: SCNA; (+) strand; PAM type: NNAGAAW; PAM sequence: AAAGAAA
acatatgtaaatatggattt

SEQ ID NO: 7189 - DNA, 20 bp, Artificial Sequence
  Description of Artificial Sequence: Synthetic oligonucleotide
  Target: SCNA; (+) strand; PAM type: NNAGAAW; PAM sequence: TAAGAAT
attatgatgtaataaattta

SEQ ID NO: 7190 - DNA, 20 bp, Artificial Sequence
  Description of Artificial Sequence: Synthetic oligonucleotide
  Target: SCNA; (+) strand; PAM type: NNAGAAW; PAM sequence: TCAGAAA
atttataagaatcaaaacct

SEQ ID NO: 7191 - DNA, 20 bp, Artificial Sequence
  Description of Artificial Sequence: Synthetic oligonucleotide
  Target: SCNA; (+) strand; PAM type: NNAGAAW; PAM sequence: TTAGAAA
ccttcagaaaatctccagtg

SEQ ID NO: 7192 - DNA, 20 bp, Artificial Sequence
  Description of Artificial Sequence: Synthetic oligonucleotide
  Target: SCNA; (+) strand; PAM type: NNAGAAW; PAM sequence: GTAGAAA
attttatttgaactttgtag

SEQ ID NO: 7193 - DNA, 20 bp, Artificial Sequence
  Description of Artificial Sequence: Synthetic oligonucleotide
  Target: SCNA; (+) strand; PAM type: NNAGAAW; PAM sequence: GAAGAAA
attcaaccctagtaactaat

SEQ ID NO: 7194 - DNA, 20 bp, Artificial Sequence
  Description of Artificial Sequence: Synthetic oligonucleotide
  Target: SCNA; (+) strand; PAM type: NNAGAAW; PAM sequence: AGAGAAA
cagattccttaatacgctaa

SEQ ID NO: 7195 - DNA, 20 bp, Artificial Sequence
  Description of Artificial Sequence: Synthetic oligonucleotide
  Target: SCNA; (+) strand; PAM type: NNAGAAW; PAM sequence: TTAGAAA
tctcccaacattgtacaatg

SEQ ID NO: 7196 - DNA, 20 bp, Artificial Sequence
  Description of Artificial Sequence: Synthetic oligonucleotide
  Target: SCNA; (+) strand; PAM type: NNAGAAW; PAM sequence: TCAGAAA
agattgtgagccactgtcct

SEQ ID NO: 7197 - DNA, 20 bp, Artificial Sequence
  Description of Artificial Sequence: Synthetic oligonucleotide
  Target: SCNA; (+) strand; PAM type: NNAGAAW; PAM sequence: AAAGAAA
taaatcaaaagtattcattt

SEQ ID NO: 7198 - DNA, 20 bp, Artificial Sequence
  Description of Artificial Sequence: Synthetic oligonucleotide
  Target: SCNA; (+) strand; PAM type: NNAGAAW; PAM sequence: CAAGAAA
ctagttgtaaaaatgttgca

SEQ ID NO: 7199 - DNA, 20 bp, Artificial Sequence
  Description of Artificial Sequence: Synthetic oligonucleotide
  Target: SCNA; (+) strand; PAM type: NNAGAAW; PAM sequence: GAAGAAT
aagctaaatcacacagaggt

SEQ ID NO: 7200 - DNA, 20 bp, Artificial Sequence
  Description of Artificial Sequence: Synthetic oligonucleotide
  Target: SCNA; (+) strand; PAM type: NNAGAAW; PAM sequence: ACAGAAA
ggaaacgtggagtacttaca

SEQ ID NO: 7201 - DNA, 20 bp, Artificial Sequence
  Description of Artificial Sequence: Synthetic oligonucleotide
  Target: SCNA; (+) strand; PAM type: NNAGAAW; PAM sequence: TCAGAAA
aggccaaatgaataatataa

SEQ ID NO: 7202 - DNA, 20 bp, Artificial Sequence
  Description of Artificial Sequence: Synthetic oligonucleotide
  Target: SCNA; (+) strand; PAM type: NNAGAAW; PAM sequence: ACAGAAA
aaaatattttactgtaatca

SEQ ID NO: 7203 - DNA, 20 bp, Artificial Sequence
  Description of Artificial Sequence: Synthetic oligonucleotide
  Target: SCNA; (+) strand; PAM type: NNAGAAW; PAM sequence: TCAGAAT
gtttgtcaatacatttttgg

SEQ ID NO: 7204 - DNA, 20 bp, Artificial Sequence
  Description of Artificial Sequence: Synthetic oligonucleotide
  Target: SCNA; (+) strand; PAM type: NNAGAAW; PAM sequence: AAAGAAT
cctatttaaaaatactttat

SEQ ID NO: 7205 - DNA, 20 bp, Artificial Sequence
  Description of Artificial Sequence: Synthetic oligonucleotide
  Target: SCNA; (+) strand; PAM type: NNAGAAW; PAM sequence: TTAGAAT
tcaataagactgatatgttc

SEQ ID NO: 7206 - DNA, 20 bp, Artificial Sequence
  Description of Artificial Sequence: Synthetic oligonucleotide
  Target: SCNA; (+) strand; PAM type: NNAGAAW; PAM sequence: AAAGAAA
atattattatatcttcaggg

SEQ ID NO: 7207 - DNA, 20 bp, Artificial Sequence
  Description of Artificial Sequence: Synthetic oligonucleotide
  Target: SCNA; (+) strand; PAM type: NNAGAAW; PAM sequence: GAAGAAA
agtaaccaccacaataaata

SEQ ID NO: 7208 - DNA, 20 bp, Artificial Sequence
  Description of Artificial Sequence: Synthetic oligonucleotide
  Target: SCNA; (+) strand; PAM type: NNAGAAW; PAM sequence: GGAGAAA
atcacatgtcaacttacaga

SEQ ID NO: 7209 - DNA, 20 bp, Artificial Sequence
  Description of Artificial Sequence: Synthetic oligonucleotide
  Target: SCNA; (+) strand; PAM type: NNAGAAW; PAM sequence: AAAGAAT
gtcaacttacagaggagaaa

SEQ ID NO: 7210 - DNA, 20 bp, Artificial Sequence
  Description of Artificial Sequence: Synthetic oligonucleotide
  Target: SCNA; (+) strand; PAM type: NNAGAAW; PAM sequence: GGAGAAT
acttgggaggggctgaggca

SEQ ID NO: 7211 - DNA, 20 bp, Artificial Sequence
  Description of Artificial Sequence: Synthetic oligonucleotide
  Target: SCNA; (+) strand; PAM type: NNAGAAW; PAM sequence: TCAGAAT
actagggtctctacacagga

SEQ ID NO: 7212 - DNA, 20 bp, Artificial Sequence
  Description of Artificial Sequence: Synthetic oligonucleotide
  Target: SCNA; (+) strand; PAM type: NNAGAAW; PAM sequence: ACAGAAT
cggcatgatttttatgtttt

SEQ ID NO: 7213 - DNA, 20 bp, Artificial Sequence
  Description of Artificial Sequence: Synthetic oligonucleotide
  Target: SCNA; (+) strand; PAM type: NNAGAAW; PAM sequence: CCAGAAT
gtttgattcaaattttactt

SEQ ID NO: 7214 - DNA, 20 bp, Artificial Sequence
  Description of Artificial Sequence: Synthetic oligonucleotide
  Target: SCNA; (+) strand; PAM type: NNAGAAW; PAM sequence: ACAGAAA
actttcggtatactgtggta

SEQ ID NO: 7215 - DNA, 20 bp, Artificial Sequence
  Description of Artificial Sequence: Synthetic oligonucleotide
  Target: SCNA; (+) strand; PAM type: NNAGAAW; PAM sequence: AGAGAAT
gtgagaacagctgatattta

SEQ ID NO: 7216 - DNA, 20 bp, Artificial Sequence
  Description of Artificial Sequence: Synthetic oligonucleotide
  Target: SCNA; (+) strand; PAM type: NNAGAAW; PAM sequence: TAAGAAA
gtcttaaaaatgactagtag

SEQ ID NO: 7217 - DNA, 20 bp, Artificial Sequence
  Description of Artificial Sequence: Synthetic oligonucleotide
  Target: SCNA; (+) strand; PAM type: NNAGAAW; PAM sequence: TAAGAAT
ttctttgccttagcagtacc

SEQ ID NO: 7218 - DNA, 20 bp, Artificial Sequence
  Description of Artificial Sequence: Synthetic oligonucleotide
  Target: SCNA; (+) strand; PAM type: NNAGAAW; PAM sequence: GTAGAAT
caatgagatagaagtagaga

SEQ ID NO: 7219 - DNA, 20 bp, Artificial Sequence
  Description of Artificial Sequence: Synthetic oligonucleotide
  Target: SCNA; (+) strand; PAM type: NNAGAAW; PAM sequence: AAAGAAT
aggatatggagaggttggtt

SEQ ID NO: 7220 - DNA, 20 bp, Artificial Sequence
  Description of Artificial Sequence: Synthetic oligonucleotide
  Target: SCNA; (+) strand; PAM type: NNAGAAW; PAM sequence: AGAGAAT
tatgttcaaaaatctagaag

SEQ ID NO: 7221 - DNA, 20 bp, Artificial Sequence
  Description of Artificial Sequence: Synthetic oligonucleotide
  Target: SCNA; (+) strand; PAM type: NNAGAAW; PAM sequence: AAAGAAA
ttacatattcactaaaaata

SEQ ID NO: 7222 - DNA, 20 bp, Artificial Sequence
  Description of Artificial Sequence: Synthetic oligonucleotide
  Target: SCNA; (+) strand; PAM type: NNAGAAW; PAM sequence: CAAGAAA
ctcttctgggtgtagatcca

SEQ ID NO: 7223 - DNA, 20 bp, Artificial Sequence
  Description of Artificial Sequence: Synthetic oligonucleotide
  Target: SCNA; (+) strand; PAM type: NNAGAAW; PAM sequence: CCAGAAT
atatttatttatttagcaaa

SEQ ID NO: 7224 - DNA, 20 bp, Artificial Sequence
  Description of Artificial Sequence: Synthetic oligonucleotide
  Target: SCNA; (+) strand; PAM type: NNAGAAW; PAM sequence: TTAGAAA
gcaaaccagaatttaaaaca

SEQ ID NO: 7225 - DNA, 20 bp, Artificial Sequence
  Description of Artificial Sequence: Synthetic oligonucleotide
  Target: SCNA; (+) strand; PAM type: NNAGAAW; PAM sequence: ACAGAAT
ggacatgttttttatatttt

SEQ ID NO: 7226 - DNA, 20 bp, Artificial Sequence
  Description of Artificial Sequence: Synthetic oligonucleotide
  Target: SCNA; (+) strand; PAM type: NNAGAAW; PAM sequence: AAAGAAA
agcaagaccctgtctccaaa

SEQ ID NO: 7227 - DNA, 20 bp, Artificial Sequence
  Description of Artificial Sequence: Synthetic oligonucleotide
  Target: SCNA; (+) strand; PAM type: NNAGAAW; PAM sequence: AAAGAAA
cctgtctccaaaaaagaaaa

SEQ ID NO: 7228 - DNA, 20 bp, Artificial Sequence
  Description of Artificial Sequence: Synthetic oligonucleotide
  Target: SCNA; (+) strand; PAM type: NNAGAAW; PAM sequence: ACAGAAA
ctaagtgaaataagccaaac

SEQ ID NO: 7229 - DNA, 20 bp, Artificial Sequence
  Description of Artificial Sequence: Synthetic oligonucleotide
  Target: SCNA; (+) strand; PAM type: NNAGAAW; PAM sequence: AAAGAAA
gtgaaataagccaaacacag

SEQ ID NO: 7230 - DNA, 20 bp, Artificial Sequence
  Description of Artificial Sequence: Synthetic oligonucleotide
  Target: SCNA; (+) strand; PAM type: NNAGAAW; PAM sequence: GTAGAAA
taataggggtggaaaagtag

SEQ ID NO: 7231 - DNA, 20 bp, Artificial Sequence
  Description of Artificial Sequence: Synthetic oligonucleotide
  Target: SCNA; (+) strand; PAM type: NNAGAAW; PAM sequence: AAAGAAT
caattaaatttatttttaaa

SEQ ID NO: 7232 - DNA, 20 bp, Artificial Sequence
  Description of Artificial Sequence: Synthetic oligonucleotide
  Target: SCNA; (+) strand; PAM type: NNAGAAW; PAM sequence: GGAGAAT
ctactcaggaggctgagtca

SEQ ID NO: 7233 - DNA, 20 bp, Artificial Sequence
  Description of Artificial Sequence: Synthetic oligonucleotide
  Target: SCNA; (+) strand; PAM type: NNAGAAW; PAM sequence: TCAGAAA
tgacagattgagaccctatc

SEQ ID NO: 7234 - DNA, 20 bp, Artificial Sequence
  Description of Artificial Sequence: Synthetic oligonucleotide
  Target: SCNA; (+) strand; PAM type: NNAGAAW; PAM sequence: AAAGAAA
tgagaccctatctcagaaaa

SEQ ID NO: 7235 - DNA, 20 bp, Artificial Sequence
  Description of Artificial Sequence: Synthetic oligonucleotide
  Target: SCNA; (+) strand; PAM type: NNAGAAW; PAM sequence: AAAGAAT
ctcagaaaaaaagaaaaaaa

SEQ ID NO: 7236 - DNA, 20 bp, Artificial Sequence
  Description of Artificial Sequence: Synthetic oligonucleotide
  Target: SCNA; (+) strand; PAM type: NNAGAAW; PAM sequence: TGAGAAT
aggtgaagcacattttgact

SEQ ID NO: 7237 - DNA, 20 bp, Artificial Sequence
  Description of Artificial Sequence: Synthetic oligonucleotide
  Target: SCNA; (+) strand; PAM type: NNAGAAW; PAM sequence: GAAGAAA
aattaatttctgagtcattt

SEQ ID NO: 7238 - DNA, 20 bp, Artificial Sequence
  Description of Artificial Sequence: Synthetic oligonucleotide
  Target: SCNA; (+) strand; PAM type: NNAGAAW; PAM sequence: AAAGAAT
tagttatgtaatgaaggata

SEQ ID NO: 7239 - DNA, 20 bp, Artificial Sequence
  Description of Artificial Sequence: Synthetic oligonucleotide
  Target: SCNA; (+) strand; PAM type: NNAGAAW; PAM sequence: GCAGAAT
actaccttcacacttcaaca

SEQ ID NO: 7240 - DNA, 20 bp, Artificial Sequence
  Description of Artificial Sequence: Synthetic oligonucleotide
  Target: SCNA; (+) strand; PAM type: NNAGAAW; PAM sequence: TCAGAAT
gttcaactctcaattagaac

SEQ ID NO: 7241 - DNA, 20 bp, Artificial Sequence
  Description of Artificial Sequence: Synthetic oligonucleotide
  Target: SCNA; (+) strand; PAM type: NNAGAAW; PAM sequence: ATAGAAT
atgtaaccaataaaaaattt

SEQ ID NO: 7242 - DNA, 20 bp, Artificial Sequence
  Description of Artificial Sequence: Synthetic oligonucleotide
  Target: SCNA; (+) strand; PAM type: NNAGAAW; PAM sequence: AAAGAAA
agttaaaaggtaactaagtc

SEQ ID NO: 7243 - DNA, 20 bp, Artificial Sequence
  Description of Artificial Sequence: Synthetic oligonucleotide
  Target: SCNA; (+) strand; PAM type: NNAGAAW; PAM sequence: GTAGAAA
ttctgaaaatatgttttaag

SEQ ID NO: 7244 - DNA, 20 bp, Artificial Sequence
  Description of Artificial Sequence: Synthetic oligonucleotide
  Target: SCNA; (+) strand; PAM type: NNAGAAW; PAM sequence: TAAGAAA
gtgggaagattaagtcaaca

SEQ ID NO: 7245 - DNA, 20 bp, Artificial Sequence
  Description of Artificial Sequence: Synthetic oligonucleotide
  Target: SCNA; (+) strand; PAM type: NNAGAAW; PAM sequence: AGAGAAT
ttactgctatagttgccacc

SEQ ID NO: 7246 - DNA, 20 bp, Artificial Sequence
  Description of Artificial Sequence: Synthetic oligonucleotide
  Target: SCNA; (+) strand; PAM type: NNAGAAW; PAM sequence: GGAGAAA
agaatgtgaaaaagctcaga

SEQ ID NO: 7247 - DNA, 20 bp, Artificial Sequence
  Description of Artificial Sequence: Synthetic oligonucleotide
  Target: SCNA; (+) strand; PAM type: NNAGAAW; PAM sequence: GAAGAAT
tcagaggagaaagaagagag

SEQ ID NO: 7248 - DNA, 20 bp, Artificial Sequence
  Description of Artificial Sequence: Synthetic oligonucleotide
  Target: SCNA; (+) strand; PAM type: NNAGAAW; PAM sequence: ACAGAAA
aattgaatacagttcaagtt

SEQ ID NO: 7249 - DNA, 20 bp, Artificial Sequence
  Description of Artificial Sequence: Synthetic oligonucleotide
  Target: SCNA; (+) strand; PAM type: NNAGAAW; PAM sequence: TCAGAAT
tcaaagtcatattttaaaaa

SEQ ID NO: 7250 - DNA, 20 bp, Artificial Sequence
  Description of Artificial Sequence: Synthetic oligonucleotide
  Target: SCNA; (+) strand; PAM type: NNAGAAW; PAM sequence: AAAGAAA
aaacatttttcatgatggta

SEQ ID NO: 7251 - DNA, 20 bp, Artificial Sequence
  Description of Artificial Sequence: Synthetic oligonucleotide
  Target: SCNA; (+) strand; PAM type: NNAGAAW; PAM sequence: TAAGAAT
ccatcaatgattttgattct

SEQ ID NO: 7252 - DNA, 20 bp, Artificial Sequence
  Description of Artificial Sequence: Synthetic oligonucleotide
  Target: SCNA; (+) strand; PAM type: NNAGAAW; PAM sequence: ATAGAAT
ttttaaaactgttctctgaa

SEQ ID NO: 7253 - DNA, 20 bp, Artificial Sequence
  Description of Artificial Sequence: Synthetic oligonucleotide
  Target: SCNA; (+) strand; PAM type: NNAGAAW; PAM sequence: ACAGAAA
tgaaatagaattatgtaggt

SEQ ID NO: 7254 - DNA, 20 bp, Artificial Sequence
  Description of Artificial Sequence: Synthetic oligonucleotide
  Target: SCNA; (+) strand; PAM type: NNAGAAW; PAM sequence: TGAGAAA
caaaaaacactgaaaaatca

SEQ ID NO: 7255 - DNA, 20 bp, Artificial Sequence
  Description of Artificial Sequence: Synthetic oligonucleotide
  Target: SCNA; (+) strand; PAM type: NNAGAAW; PAM sequence: AGAGAAA
acgcagcttgcttactttac

SEQ ID NO: 7256 - DNA, 20 bp, Artificial Sequence
  Description of Artificial Sequence: Synthetic oligonucleotide
  Target: SCNA; (+) strand; PAM type: NNAGAAW; PAM sequence: AGAGAAA
gggcagacagattttatgtg

SEQ ID NO: 7257 - DNA, 20 bp, Artificial Sequence
  Description of Artificial Sequence: Synthetic oligonucleotide
  Target: SCNA; (+) strand; PAM type: NNAGAAW; PAM sequence: CTAGAAA
cggtcctaaggcttttcgct

SEQ ID NO: 7258 - DNA, 20 bp, Artificial Sequence
  Description of Artificial Sequence: Synthetic oligonucleotide
  Target: SCNA; (+) strand; PAM type: NNAGAAW; PAM sequence: TCAGAAT
acttctgattctcgttgccc

SEQ ID NO: 7259 - DNA, 20 bp, Artificial Sequence
  Description of Artificial Sequence: Synthetic oligonucleotide
  Target: SCNA; (+) strand; PAM type: NNAGAAW; PAM sequence: CCAGAAT
acagctgttcctggatcaca

SEQ ID NO: 7260 - DNA, 20 bp, Artificial Sequence
  Description of Artificial Sequence: Synthetic oligonucleotide
  Target: SCNA; (+) strand; PAM type: NNAGAAW; PAM sequence: GCAGAAA
gaagcaagctcctcccacta

SEQ ID NO: 7261 - DNA, 20 bp, Artificial Sequence
  Description of Artificial Sequence: Synthetic oligonucleotide
  Target: SCNA; (+) strand; PAM type: NNAGAAW; PAM sequence: ATAGAAA
ttttaattgtttttatattt

SEQ ID NO: 7262 - DNA, 20 bp, Artificial Sequence
  Description of Artificial Sequence: Synthetic oligonucleotide
  Target: SCNA; (+) strand; PAM type: NNAGAAW; PAM sequence: ATAGAAA
gcatatgtgttcagtggaaa

SEQ ID NO: 7263 - DNA, 20 bp, Artificial Sequence
  Description of Artificial Sequence: Synthetic oligonucleotide
  Target: SCNA; (+) strand; PAM type: NNAGAAW; PAM sequence: ACAGAAT
tcaaacatatgcaaaagtag

SEQ ID NO: 7264 - DNA, 20 bp, Artificial Sequence
  Description of Artificial Sequence: Synthetic oligonucleotide
  Target: SCNA; (+) strand; PAM type: NNAGAAW; PAM sequence: CTAGAAT
tgtaccttcatgtgcatatt

SEQ ID NO: 7265 - DNA, 20 bp, Artificial Sequence
  Description of Artificial Sequence: Synthetic oligonucleotide
  Target: SCNA; (+) strand; PAM type: NNAGAAW; PAM sequence: AGAGAAT
cattacaacagaccaatgtg

SEQ ID NO: 7266 - DNA, 20 bp, Artificial Sequence
  Description of Artificial Sequence: Synthetic oligonucleotide
  Target: SCNA; (+) strand; PAM type: NNAGAAW; PAM sequence: AGAGAAA
tttatgtaacttttatagac

SEQ ID NO: 7267 - DNA, 20 bp, Artificial Sequence
  Description of Artificial Sequence: Synthetic oligonucleotide
  Target: SCNA; (+) strand; PAM type: NNAGAAW; PAM sequence: GCAGAAA
ggcagagctgagacaattta

SEQ ID NO: 7268 - DNA, 20 bp, Artificial Sequence
  Description of Artificial Sequence: Synthetic oligonucleotide
  Target: SCNA; (+) strand; PAM type: NNAGAAW; PAM sequence: TTAGAAA
aaaggtagaacccagctgtg

SEQ ID NO: 7269 - DNA, 20 bp, Artificial Sequence
  Description of Artificial Sequence: Synthetic oligonucleotide
  Target: SCNA; (+) strand; PAM type: NNAGAAW; PAM sequence: AAAGAAA
atttcttactacctacaaaa

SEQ ID NO: 7270 - DNA, 20 bp, Artificial Sequence
  Description of Artificial Sequence: Synthetic oligonucleotide
  Target: SCNA; (+) strand; PAM type: NNAGAAW; PAM sequence: TAAGAAA
attgaatggcttgtacctca

SEQ ID NO: 7271 - DNA, 20 bp, Artificial Sequence
  Description of Artificial Sequence: Synthetic oligonucleotide
  Target: SCNA; (+) strand; PAM type: NNAGAAW; PAM sequence: GTAGAAT
gctatagcaaagacagcaga

SEQ ID NO: 7272 - DNA, 20 bp, Artificial Sequence
  Description of Artificial Sequence: Synthetic oligonucleotide
  Target: SCNA; (+) strand; PAM type: NNAGAAW; PAM sequence: TAAGAAA
ctgatttaatgtgtttaagt

SEQ ID NO: 7273 - DNA, 20 bp, Artificial Sequence
  Description of Artificial Sequence: Synthetic oligonucleotide
  Target: SCNA; (+) strand; PAM type: NNAGAAW; PAM sequence: AGAGAAA
aatttcatagtgggtagagt

SEQ ID NO: 7274 - DNA, 20 bp, Artificial Sequence
  Description of Artificial Sequence: Synthetic oligonucleotide
  Target: SCNA; (+) strand; PAM type: NNAGAAW; PAM sequence: GAAGAAA
tgggggaatagggttactct

SEQ ID NO: 7275 - DNA, 20 bp, Artificial Sequence
  Description of Artificial Sequence: Synthetic oligonucleotide
  Target: SCNA; (+) strand; PAM type: NNAGAAW; PAM sequence: TAAGAAT
ttcctgtggtttcgtggtcc

SEQ ID NO: 7276 - DNA, 20 bp, Artificial Sequence
  Description of Artificial Sequence: Synthetic oligonucleotide
  Target: SCNA; (+) strand; PAM type: NNAGAAW; PAM sequence: ATAGAAA
attaaagatgttaaagccag

SEQ ID NO: 7277 - DNA, 20 bp, Artificial Sequence
  Description of Artificial Sequence: Synthetic oligonucleotide
  Target: SCNA; (+) strand; PAM type: NNAGAAW; PAM sequence: TTAGAAA
aagttcaaatgactttagtt

SEQ ID NO: 7278 - DNA, 20 bp, Artificial Sequence
  Description of Artificial Sequence: Synthetic oligonucleotide
  Target: SCNA; (+) strand; PAM type: NNAGAAW; PAM sequence: AAAGAAA
tcaaatgactttagttttag

SEQ ID NO: 7279 - DNA, 20 bp, Artificial Sequence
  Description of Artificial Sequence: Synthetic oligonucleotide
  Target: SCNA; (+) strand; PAM type: NNAGAAW; PAM sequence: CAAGAAA
aaaaaacacattaatgagcc

SEQ ID NO: 7280 - DNA, 20 bp, Artificial Sequence
  Description of Artificial Sequence: Synthetic oligonucleotide
  Target: SCNA; (+) strand; PAM type: NNAGAAW; PAM sequence: GAAGAAA
gcagtttgcagccacagctt

SEQ ID NO: 7281 - DNA, 20 bp, Artificial Sequence
  Description of Artificial Sequence: Synthetic oligonucleotide
  Target: SCNA; (+) strand; PAM type: NNAGAAW; PAM sequence: ACAGAAT
gaagaaatacagtaacaatg

SEQ ID NO: 7282 - DNA, 20 bp, Artificial Sequence
  Description of Artificial Sequence: Synthetic oligonucleotide
  Target: SCNA; (+) strand; PAM type: NNAGAAW; PAM sequence: AGAGAAA
tgaattatgtggatttgcca

SEQ ID NO: 7283 - DNA, 20 bp, Artificial Sequence
  Description of Artificial Sequence: Synthetic oligonucleotide
  Target: SCNA; (+) strand; PAM type: NNAGAAW; PAM sequence: TCAGAAT
gccagtggctctgaaaggct

SEQ ID NO: 7284 - DNA, 20 bp, Artificial Sequence
  Description of Artificial Sequence: Synthetic oligonucleotide
  Target: SCNA; (+) strand; PAM type: NNAGAAW; PAM sequence: TCAGAAA
cttcagaatgaatatccaat

SEQ ID NO: 7285 - DNA, 20 bp, Artificial Sequence
  Description of Artificial Sequence: Synthetic oligonucleotide
  Target: SCNA; (+) strand; PAM type: NNAGAAW; PAM sequence: GAAGAAT
ccctaatatttcagattagt

SEQ ID NO: 7286 - DNA, 20 bp, Artificial Sequence
  Description of Artificial Sequence: Synthetic oligonucleotide
  Target: SCNA; (+) strand; PAM type: NNAGAAW; PAM sequence: TCAGAAA
agactgaacagcatttgtat

SEQ ID NO: 7287 - DNA, 20 bp, Artificial Sequence
  Description of Artificial Sequence: Synthetic oligonucleotide
  Target: SCNA; (+) strand; PAM type: NNAGAAW; PAM sequence: GAAGAAA
cagcatttgtattcagaaag

SEQ ID NO: 7288 - DNA, 20 bp, Artificial Sequence
  Description of Artificial Sequence: Synthetic oligonucleotide
  Target: SCNA; (+) strand; PAM type: NNAGAAW; PAM sequence: TAAGAAA
tgagagtataaagtgacgtt

SEQ ID NO: 7289 - DNA, 20 bp, Artificial Sequence
  Description of Artificial Sequence: Synthetic oligonucleotide
  Target: SCNA; (+) strand; PAM type: NNAGAAW; PAM sequence: GGAGAAT
ctacttggggggctgaggca

SEQ ID NO: 7290 - DNA, 20 bp, Artificial Sequence
  Description of Artificial Sequence: Synthetic oligonucleotide
  Target: SCNA; (+) strand; PAM type: NNAGAAW; PAM sequence: AAAGAAA
aagactccatcttgggggaa

SEQ ID NO: 7291 - DNA, 20 bp, Artificial Sequence
  Description of Artificial Sequence: Synthetic oligonucleotide
  Target: SCNA; (+) strand; PAM type: NNAGAAW; PAM sequence: AAAGAAA
catcttgggggaaaaagaaa

SEQ ID NO: 7292 - DNA, 20 bp, Artificial Sequence
  Description of Artificial Sequence: Synthetic oligonucleotide
  Target: SCNA; (+) strand; PAM type: NNAGAAW; PAM sequence: AAAGAAA
ttgggggaaaaagaaaaaag

SEQ ID NO: 7293 - DNA, 20 bp, Artificial Sequence
  Description of Artificial Sequence: Synthetic oligonucleotide
  Target: SCNA; (+) strand; PAM type: NNAGAAW; PAM sequence: AAAGAAA
gggaaaaagaaaaaagaaag

SEQ ID NO: 7294 - DNA, 20 bp, Artificial Sequence
  Description of Artificial Sequence: Synthetic oligonucleotide
  Target: SCNA; (+) strand; PAM type: NNAGAAW; PAM sequence: TAAGAAA
aagctggaaatttatgtagt

SEQ ID NO: 7295 - DNA, 20 bp, Artificial Sequence
  Description of Artificial Sequence: Synthetic oligonucleotide
  Target: SCNA; (+) strand; PAM type: NNAGAAW; PAM sequence: TTAGAAA
aatttatgtagttaagaaat

SEQ ID NO: 7296 - DNA, 20 bp, Artificial Sequence
  Description of Artificial Sequence: Synthetic oligonucleotide
  Target: SCNA; (+) strand; PAM type: NNAGAAW; PAM sequence: CAAGAAT
tttttcttctttttgtcttc

SEQ ID NO: 7297 - DNA, 20 bp, Artificial Sequence
  Description of Artificial Sequence: Synthetic oligonucleotide
  Target: SCNA; (-) strand; PAM type: NNGRRT; PAM sequence: GAGAAT
gtgttttcactgcccatggt

SEQ ID NO: 7298 - DNA, 20 bp, Artificial Sequence
  Description of Artificial Sequence: Synthetic oligonucleotide
  Target: SCNA; (-) strand; PAM type: NNGRRT; PAM sequence: TGGAGT
agctctgtacatcaatatta

SEQ ID NO: 7299 - DNA, 20 bp, Artificial Sequence
  Description of Artificial Sequence: Synthetic oligonucleotide
  Target: SCNA; (-) strand; PAM type: NNGRRT; PAM sequence: AGGAGT
tacttggtgccattctaaga

SEQ ID NO: 7300 - DNA, 20 bp, Artificial Sequence
  Description of Artificial Sequence: Synthetic oligonucleotide
  Target: SCNA; (-) strand; PAM type: NNGRRT; PAM sequence: GTGAAT
tatcacagcaatgtttggag

SEQ ID NO: 7301 - DNA, 20 bp, Artificial Sequence
  Description of Artificial Sequence: Synthetic oligonucleotide
  Target: SCNA; (-) strand; PAM type: NNGRRT; PAM sequence: AAGGGT
tgtcttagatcgatgggcaa

SEQ ID NO: 7302 - DNA, 20 bp, Artificial Sequence
  Description of Artificial Sequence: Synthetic oligonucleotide
  Target: SCNA; (-) strand; PAM type: NNGRRT; PAM sequence: TTGAAT
ttgaagatggagtgtccatg

SEQ ID NO: 7303 - DNA, 20 bp, Artificial Sequence
  Description of Artificial Sequence: Synthetic oligonucleotide
  Target: SCNA; (-) strand; PAM type: NNGRRT; PAM sequence: TGGAGT
ctgactcctgctgttgaaga

SEQ ID NO: 7304 - DNA, 20 bp, Artificial Sequence
  Description of Artificial Sequence: Synthetic oligonucleotide
  Target: SCNA; (-) strand; PAM type: NNGRRT; PAM sequence: TTGAAT
agagtagcagaaaattattg

SEQ ID NO: 7305 - DNA, 20 bp, Artificial Sequence
  Description of Artificial Sequence: Synthetic oligonucleotide
  Target: SCNA; (-) strand; PAM type: NNGRRT; PAM sequence: GAGAGT
tgtacgactacctaggaatt

SEQ ID NO: 7306 - DNA, 20 bp, Artificial Sequence
  Description of Artificial Sequence: Synthetic oligonucleotide
  Target: SCNA; (-) strand; PAM type: NNGRRT; PAM sequence: AGGAAT
tggacactgtacgactacct

SEQ ID NO: 7307 - DNA, 20 bp, Artificial Sequence
  Description of Artificial Sequence: Synthetic oligonucleotide
  Target: SCNA; (-) strand; PAM type: NNGRRT; PAM sequence: TAGGAT
tttggtgagtctctcggaat

SEQ ID NO: 7308 - DNA, 20 bp, Artificial Sequence
  Description of Artificial Sequence: Synthetic oligonucleotide
  Target: SCNA; (-) strand; PAM type: NNGRRT; PAM sequence: CGGAAT
catgtctttggtgagtctct

SEQ ID NO: 7309 - DNA, 20 bp, Artificial Sequence
  Description of Artificial Sequence: Synthetic oligonucleotide
  Target: SCNA; (-) strand; PAM type: NNGRRT; PAM sequence: GTGAGT
gttttctcttcatgtctttg

SEQ ID NO: 7310 - DNA, 20 bp, Artificial Sequence
  Description of Artificial Sequence: Synthetic oligonucleotide
  Target: SCNA; (-) strand; PAM type: NNGRRT; PAM sequence: CAGAGT
taaaactcactgatttaaaa

SEQ ID NO: 7311 - DNA, 20 bp, Artificial Sequence
  Description of Artificial Sequence: Synthetic oligonucleotide
  Target: SCNA; (-) strand; PAM type: NNGRRT; PAM sequence: CTGAGT
accatatattcataagttca

SEQ ID NO: 7312 - DNA, 20 bp, Artificial Sequence
  Description of Artificial Sequence: Synthetic oligonucleotide
  Target: SCNA; (-) strand; PAM type: NNGRRT; PAM sequence: TGGGAT
cacatatcttctcatccaag

SEQ ID NO: 7313 - DNA, 20 bp, Artificial Sequence
  Description of Artificial Sequence: Synthetic oligonucleotide
  Target: SCNA; (-) strand; PAM type: NNGRRT; PAM sequence: GTGAAT
aaagtgtaacttactgagaa

SEQ ID NO: 7314 - DNA, 20 bp, Artificial Sequence
  Description of Artificial Sequence: Synthetic oligonucleotide
  Target: SCNA; (-) strand; PAM type: NNGRRT; PAM sequence: CAGAAT
ctatacttatgtgtacttag

SEQ ID NO: 7315 - DNA, 20 bp, Artificial Sequence
  Description of Artificial Sequence: Synthetic oligonucleotide
  Target: SCNA; (-) strand; PAM type: NNGRRT; PAM sequence: CAGGAT
tataaaatagcaatcaagat

SEQ ID NO: 7316 - DNA, 20 bp, Artificial Sequence
  Description of Artificial Sequence: Synthetic oligonucleotide
  Target: SCNA; (-) strand; PAM type: NNGRRT; PAM sequence: ATGAGT
tggctgatagtaagtgatct

SEQ ID NO: 7317 - DNA, 20 bp, Artificial Sequence
  Description of Artificial Sequence: Synthetic oligonucleotide
  Target: SCNA; (-) strand; PAM type: NNGRRT; PAM sequence: TGGAAT
attaagtgagttaatgtaag

SEQ ID NO: 7318 - DNA, 20 bp, Artificial Sequence
  Description of Artificial Sequence: Synthetic oligonucleotide
  Target: SCNA; (-) strand; PAM type: NNGRRT; PAM sequence: GTGAGT
agcattgttgcatgcattaa

SEQ ID NO: 7319 - DNA, 20 bp, Artificial Sequence
  Description of Artificial Sequence: Synthetic oligonucleotide
  Target: SCNA; (-) strand; PAM type: NNGRRT; PAM sequence: TAGAGT
tgctgcttaatgaggtaggt

SEQ ID NO: 7320 - DNA, 20 bp, Artificial Sequence
  Description of Artificial Sequence: Synthetic oligonucleotide
  Target: SCNA; (-) strand; PAM type: NNGRRT; PAM sequence: AAGGAT
actctttacctagaatagtc

SEQ ID NO: 7321 - DNA, 20 bp, Artificial Sequence
  Description of Artificial Sequence: Synthetic oligonucleotide
  Target: SCNA; (-) strand; PAM type: NNGRRT; PAM sequence: TAGAAT
agaatacaatactctttacc

SEQ ID NO: 7322 - DNA, 20 bp, Artificial Sequence
  Description of Artificial Sequence: Synthetic oligonucleotide
  Target: SCNA; (-) strand; PAM type: NNGRRT; PAM sequence: AAGAAT
gtcatgtttttatcttagaa

SEQ ID NO: 7323 - DNA, 20 bp, Artificial Sequence
  Description of Artificial Sequence: Synthetic oligonucleotide
  Target: SCNA; (-) strand; PAM type: NNGRRT; PAM sequence: CTGAAT
taagctgtgttccagtaaag

SEQ ID NO: 7324 - DNA, 20 bp, Artificial Sequence
  Description of Artificial Sequence: Synthetic oligonucleotide
  Target: SCNA; (-) strand; PAM type: NNGRRT; PAM sequence: TAGGAT
gcaactataggttaacatac

SEQ ID NO: 7325 - DNA, 20 bp, Artificial Sequence
  Description of Artificial Sequence: Synthetic oligonucleotide
  Target: SCNA; (-) strand; PAM type: NNGRRT; PAM sequence: GGGAAT
aaattggctagaattgcata

SEQ ID NO: 7326 - DNA, 20 bp, Artificial Sequence
  Description of Artificial Sequence: Synthetic oligonucleotide
  Target: SCNA; (-) strand; PAM type: NNGRRT; PAM sequence: TAGAAT
aatttggttttaaaattggc

SEQ ID NO: 7327 - DNA, 20 bp, Artificial Sequence
  Description of Artificial Sequence: Synthetic oligonucleotide
  Target: SCNA; (-) strand; PAM type: NNGRRT; PAM sequence: TAGAAT
ttgaagaacccaaaatgcaa

SEQ ID NO: 7328 - DNA, 20 bp, Artificial Sequence
  Description of Artificial Sequence: Synthetic oligonucleotide
  Target: SCNA; (-) strand; PAM type: NNGRRT; PAM sequence: TAGAAT
ttttatcctttgagtaagcc

SEQ ID NO: 7329 - DNA, 20 bp, Artificial Sequence
  Description of Artificial Sequence: Synthetic oligonucleotide
  Target: SCNA; (-) strand; PAM type: NNGRRT; PAM sequence: TTGAGT
agtaatgttcgttttatcct

SEQ ID NO: 7330 - DNA, 20 bp, Artificial Sequence
  Description of Artificial Sequence: Synthetic oligonucleotide
  Target: SCNA; (-) strand; PAM type: NNGRRT; PAM sequence: AAGAAT
gatagtaaagggcatgaatt

SEQ ID NO: 7331 - DNA, 20 bp, Artificial Sequence
  Description of Artificial Sequence: Synthetic oligonucleotide
  Target: SCNA; (-) strand; PAM type: NNGRRT; PAM sequence: ATGAAT
ataaatagatagtaaagggc

SEQ ID NO: 7332 - DNA, 20 bp, Artificial Sequence
  Description of Artificial Sequence: Synthetic oligonucleotide
  Target: SCNA; (-) strand; PAM type: NNGRRT; PAM sequence: ATGAAT
catatttagtaatggaatga

SEQ ID NO: 7333 - DNA, 20 bp, Artificial Sequence
  Description of Artificial Sequence: Synthetic oligonucleotide
  Target: SCNA; (-) strand; PAM type: NNGRRT; PAM sequence: ATGAAT
tatacatatttagtaatgga

SEQ ID NO: 7334 - DNA, 20 bp, Artificial Sequence
  Description of Artificial Sequence: Synthetic oligonucleotide
  Target: SCNA; (-) strand; PAM type: NNGRRT; PAM sequence: TGGAAT
caattatacatatttagtaa

SEQ ID NO: 7335 - DNA, 20 bp, Artificial Sequence
  Description of Artificial Sequence: Synthetic oligonucleotide
  Target: SCNA; (-) strand; PAM type: NNGRRT; PAM sequence: TGGGAT
aatataaattaaggtataac

SEQ ID NO: 7336 - DNA, 20 bp, Artificial Sequence
  Description of Artificial Sequence: Synthetic oligonucleotide
  Target: SCNA; (-) strand; PAM type: NNGRRT; PAM sequence: ATGGGT
tttctgtgttgaatcatggc

SEQ ID NO: 7337 - DNA, 20 bp, Artificial Sequence
  Description of Artificial Sequence: Synthetic oligonucleotide
  Target: SCNA; (-) strand; PAM type: NNGRRT; PAM sequence: TTGAAT
gggctttgtaattttctgtg

SEQ ID NO: 7338 - DNA, 20 bp, Artificial Sequence
  Description of Artificial Sequence: Synthetic oligonucleotide
  Target: SCNA; (-) strand; PAM type: NNGRRT; PAM sequence: ACGAAT
aattattttccgtggaagat

SEQ ID NO: 7339 - DNA, 20 bp, Artificial Sequence
  Description of Artificial Sequence: Synthetic oligonucleotide
  Target: SCNA; (-) strand; PAM type: NNGRRT; PAM sequence: TGGGAT
acctcggcctcccaaagtgc

SEQ ID NO: 7340 - DNA, 20 bp, Artificial Sequence
  Description of Artificial Sequence: Synthetic oligonucleotide
  Target: SCNA; (-) strand; PAM type: NNGRRT; PAM sequence: CAGGGT
ttttgtatttttagtagaga

SEQ ID NO: 7341 - DNA, 20 bp, Artificial Sequence
  Description of Artificial Sequence: Synthetic oligonucleotide
  Target: SCNA; (-) strand; PAM type: NNGRRT; PAM sequence: TGGGAT
gcctcagcctctcgagtagg

SEQ ID NO: 7342 - DNA, 20 bp, Artificial Sequence
  Description of Artificial Sequence: Synthetic oligonucleotide
  Target: SCNA; (-) strand; PAM type: NNGRRT; PAM sequence: TCGAGT
gattctcctgcctcagcctc

SEQ ID NO: 7343 - DNA, 20 bp, Artificial Sequence
  Description of Artificial Sequence: Synthetic oligonucleotide
  Target: SCNA; (-) strand; PAM type: NNGRRT; PAM sequence: TGGAGT
cttgctcttgccacctaggc

SEQ ID NO: 7344 - DNA, 20 bp, Artificial Sequence
  Description of Artificial Sequence: Synthetic oligonucleotide
  Target: SCNA; (-) strand; PAM type: NNGRRT; PAM sequence: TGGAGT
ctttttttttttttttgaga

SEQ ID NO: 7345 - DNA, 20 bp, Artificial Sequence
  Description of Artificial Sequence: Synthetic oligonucleotide
  Target: SCNA; (-) strand; PAM type: NNGRRT; PAM sequence: TAGAGT
ggtacctaaagaaaatttac

SEQ ID NO: 7346 - DNA, 20 bp, Artificial Sequence
  Description of Artificial Sequence: Synthetic oligonucleotide
  Target: SCNA; (-) strand; PAM type: NNGRRT; PAM sequence: TGGGGT
acttccagaagtctaggaaa

SEQ ID NO: 7347 - DNA, 20 bp, Artificial Sequence
  Description of Artificial Sequence: Synthetic oligonucleotide
  Target: SCNA; (-) strand; PAM type: NNGRRT; PAM sequence: CAGAGT
gccccttggccacatagtgt

SEQ ID NO: 7348 - DNA, 20 bp, Artificial Sequence
  Description of Artificial Sequence: Synthetic oligonucleotide
  Target: SCNA; (-) strand; PAM type: NNGRRT; PAM sequence: AAGAGT
ctttctgtcttgggcagggc

SEQ ID NO: 7349 - DNA, 20 bp, Artificial Sequence
  Description of Artificial Sequence: Synthetic oligonucleotide
  Target: SCNA; (-) strand; PAM type: NNGRRT; PAM sequence: GTGAGT
ggaaatattgagtgttgtga

SEQ ID NO: 7350 - DNA, 20 bp, Artificial Sequence
  Description of Artificial Sequence: Synthetic oligonucleotide
  Target: SCNA; (-) strand; PAM type: NNGRRT; PAM sequence: GTGAGT
ttccggaaatattgagtgtt

SEQ ID NO: 7351 - DNA, 20 bp, Artificial Sequence
  Description of Artificial Sequence: Synthetic oligonucleotide
  Target: SCNA; (-) strand; PAM type: NNGRRT; PAM sequence: TTGAGT
aatattgtgttccggaaata

SEQ ID NO: 7352 - DNA, 20 bp, Artificial Sequence
  Description of Artificial Sequence: Synthetic oligonucleotide
  Target: SCNA; (-) strand; PAM type: NNGRRT; PAM sequence: GAGAAT
ttggtagccacaaagaatgg

SEQ ID NO: 7353 - DNA, 20 bp, Artificial Sequence
  Description of Artificial Sequence: Synthetic oligonucleotide
  Target: SCNA; (-) strand; PAM type: NNGRRT; PAM sequence: AAGAAT
acacccagttggtagccaca

SEQ ID NO: 7354 - DNA, 20 bp, Artificial Sequence
  Description of Artificial Sequence: Synthetic oligonucleotide
  Target: SCNA; (-) strand; PAM type: NNGRRT; PAM sequence: TTGAAT
ccaggtagatagtgtccgat

SEQ ID NO: 7355 - DNA, 20 bp, Artificial Sequence
  Description of Artificial Sequence: Synthetic oligonucleotide
  Target: SCNA; (-) strand; PAM type: NNGRRT; PAM sequence: GTGGGT
taaaactgagtccttaacct

SEQ ID NO: 7356 - DNA, 20 bp, Artificial Sequence
  Description of Artificial Sequence: Synthetic oligonucleotide
  Target: SCNA; (-) strand; PAM type: NNGRRT; PAM sequence: CTGAGT
aggggaaaaatcttgtaaaa

SEQ ID NO: 7357 - DNA, 20 bp, Artificial Sequence
  Description of Artificial Sequence: Synthetic oligonucleotide
  Target: SCNA; (-) strand; PAM type: NNGRRT; PAM sequence: ATGAGT
agacaagtcaaacagaagct

SEQ ID NO: 7358 - DNA, 20 bp, Artificial Sequence
  Description of Artificial Sequence: Synthetic oligonucleotide
  Target: SCNA; (-) strand; PAM type: NNGRRT; PAM sequence: TTGGAT
aggagagggccgtggagacc

SEQ ID NO: 7359 - DNA, 20 bp, Artificial Sequence
  Description of Artificial Sequence: Synthetic oligonucleotide
  Target: SCNA; (-) strand; PAM type: NNGRRT; PAM sequence: GTGAAT
aaactgttttcctgaagtct

SEQ ID NO: 7360 - DNA, 20 bp, Artificial Sequence
  Description of Artificial Sequence: Synthetic oligonucleotide
  Target: SCNA; (-) strand; PAM type: NNGRRT; PAM sequence: CTGAGT
tctcttccatctggctgttc

SEQ ID NO: 7361 - DNA, 20 bp, Artificial Sequence
  Description of Artificial Sequence: Synthetic oligonucleotide
  Target: SCNA; (-) strand; PAM type: NNGRRT; PAM sequence: GGGAAT
ggtgaacatgcagaggtgct

SEQ ID NO: 7362 - DNA, 20 bp, Artificial Sequence
  Description of Artificial Sequence: Synthetic oligonucleotide
  Target: SCNA; (-) strand; PAM type: NNGRRT; PAM sequence: CAGAGT
aatccctaaaagacaggatt

SEQ ID NO: 7363 - DNA, 20 bp, Artificial Sequence
  Description of Artificial Sequence: Synthetic oligonucleotide
  Target: SCNA; (-) strand; PAM type: NNGRRT; PAM sequence: CAGGAT
ccataaaaatccctaaaaga

SEQ ID NO: 7364 - DNA, 20 bp, Artificial Sequence
  Description of Artificial Sequence: Synthetic oligonucleotide
  Target: SCNA; (-) strand; PAM type: NNGRRT; PAM sequence: TTGAGT
gagagaagaggagctggaga

SEQ ID NO: 7365 - DNA, 20 bp, Artificial Sequence
  Description of Artificial Sequence: Synthetic oligonucleotide
  Target: SCNA; (-) strand; PAM type: NNGRRT; PAM sequence: CTGGAT
aagtgactcttgctgggttc

SEQ ID NO: 7366 - DNA, 20 bp, Artificial Sequence
  Description of Artificial Sequence: Synthetic oligonucleotide
  Target: SCNA; (-) strand; PAM type: NNGRRT; PAM sequence: CTGGGT
ttctaatgaagtgactcttg

SEQ ID NO: 7367 - DNA, 20 bp, Artificial Sequence
  Description of Artificial Sequence: Synthetic oligonucleotide
  Target: SCNA; (-) strand; PAM type: NNGRRT; PAM sequence: GAGAGT
gagctccttagtccctgggt

SEQ ID NO: 7368 - DNA, 20 bp, Artificial Sequence
  Description of Artificial Sequence: Synthetic oligonucleotide
  Target: SCNA; (-) strand; PAM type: NNGRRT; PAM sequence: CTGGGT
ctgacagagctccttagtcc

SEQ ID NO: 7369 - DNA, 20 bp, Artificial Sequence
  Description of Artificial Sequence: Synthetic oligonucleotide
  Target: SCNA; (-) strand; PAM type: NNGRRT; PAM sequence: TAGGGT
ttcctgagtagtaggggtgc

SEQ ID NO: 7370 - DNA, 20 bp, Artificial Sequence
  Description of Artificial Sequence: Synthetic oligonucleotide
  Target: SCNA; (-) strand; PAM type: NNGRRT; PAM sequence: AGGGGT
cttgtaatttcctgagtagt

SEQ ID NO: 7371 - DNA, 20 bp, Artificial Sequence
  Description of Artificial Sequence: Synthetic oligonucleotide
  Target: SCNA; (-) strand; PAM type: NNGRRT; PAM sequence: CTGAGT
cctaaaacccttgtaatttc

SEQ ID NO: 7372 - DNA, 20 bp, Artificial Sequence
  Description of Artificial Sequence: Synthetic oligonucleotide
  Target: SCNA; (-) strand; PAM type: NNGRRT; PAM sequence: CAGAAT
attccaagtggggtcttttt

SEQ ID NO: 7373 - DNA, 20 bp, Artificial Sequence
  Description of Artificial Sequence: Synthetic oligonucleotide
  Target: SCNA; (-) strand; PAM type: NNGRRT; PAM sequence: TGGGGT
gtgtggtttggtattccaag

SEQ ID NO: 7374 - DNA, 20 bp, Artificial Sequence
  Description of Artificial Sequence: Synthetic oligonucleotide
  Target: SCNA; (-) strand; PAM type: NNGRRT; PAM sequence: CAGAGT
tcggctttaccaaaacagtt

SEQ ID NO: 7375 - DNA, 20 bp, Artificial Sequence
  Description of Artificial Sequence: Synthetic oligonucleotide
  Target: SCNA; (-) strand; PAM type: NNGRRT; PAM sequence: GAGGAT
attcacctgccaagtggcct

SEQ ID NO: 7376 - DNA, 20 bp, Artificial Sequence
  Description of Artificial Sequence: Synthetic oligonucleotide
  Target: SCNA; (-) strand; PAM type: NNGRRT; PAM sequence: GTGAAT
ctgacggtaatttttgagca

SEQ ID NO: 7377 - DNA, 20 bp, Artificial Sequence
  Description of Artificial Sequence: Synthetic oligonucleotide
  Target: SCNA; (-) strand; PAM type: NNGRRT; PAM sequence: GTGGAT
ccatgaatttaaggatttat

SEQ ID NO: 7378 - DNA, 20 bp, Artificial Sequence
  Description of Artificial Sequence: Synthetic oligonucleotide
  Target: SCNA; (-) strand; PAM type: NNGRRT; PAM sequence: AAGGAT
aaagttgtgaccatgaattt

SEQ ID NO: 7379 - DNA, 20 bp, Artificial Sequence
  Description of Artificial Sequence: Synthetic oligonucleotide
  Target: SCNA; (-) strand; PAM type: NNGRRT; PAM sequence: ATGAAT
agattaggaaagttgtgacc

SEQ ID NO: 7380 - DNA, 20 bp, Artificial Sequence
  Description of Artificial Sequence: Synthetic oligonucleotide
  Target: SCNA; (-) strand; PAM type: NNGRRT; PAM sequence: TAGGAT
gaaggttagaaagtggcggt

SEQ ID NO: 7381 - DNA, 20 bp, Artificial Sequence
  Description of Artificial Sequence: Synthetic oligonucleotide
  Target: SCNA; (-) strand; PAM type: NNGRRT; PAM sequence: AAGGAT
aagttatgtttaagcaagga

SEQ ID NO: 7382 - DNA, 20 bp, Artificial Sequence
  Description of Artificial Sequence: Synthetic oligonucleotide
  Target: SCNA; (-) strand; PAM type: NNGRRT; PAM sequence: CAGAGT
taattgaagagagactacta

SEQ ID NO: 7383 - DNA, 20 bp, Artificial Sequence
  Description of Artificial Sequence: Synthetic oligonucleotide
  Target: SCNA; (-) strand; PAM type: NNGRRT; PAM sequence: AAGGAT
aaggaggaatgagtgactat

SEQ ID NO: 7384 - DNA, 20 bp, Artificial Sequence
  Description of Artificial Sequence: Synthetic oligonucleotide
  Target: SCNA; (-) strand; PAM type: NNGRRT; PAM sequence: ATGAGT
tggtgaggaaggaaggagga

SEQ ID NO: 7385 - DNA, 20 bp, Artificial Sequence
  Description of Artificial Sequence: Synthetic oligonucleotide
  Target: SCNA; (-) strand; PAM type: NNGRRT; PAM sequence: AGGAAT
gcgctggtgaggaaggaagg

SEQ ID NO: 7386 - DNA, 20 bp, Artificial Sequence
  Description of Artificial Sequence: Synthetic oligonucleotide
  Target: SCNA; (-) strand; PAM type: NNGRRT; PAM sequence: ATGAGT
ctagcagtttatatgtattc

SEQ ID NO: 7387 - DNA, 20 bp, Artificial Sequence
  Description of Artificial Sequence: Synthetic oligonucleotide
  Target: SCNA; (-) strand; PAM type: NNGRRT; PAM sequence: CAGAAT
tagaaagtataatttcaaga

SEQ ID NO: 7388 - DNA, 20 bp, Artificial Sequence
  Description of Artificial Sequence: Synthetic oligonucleotide
  Target: SCNA; (-) strand; PAM type: NNGRRT; PAM sequence: ATGGGT
ggaagatctattaactcccc

SEQ ID NO: 7389 - DNA, 20 bp, Artificial Sequence
  Description of Artificial Sequence: Synthetic oligonucleotide
  Target: SCNA; (-) strand; PAM type: NNGRRT; PAM sequence: TAGGAT
gttgccaaatatatgaattc

SEQ ID NO: 7390 - DNA, 20 bp, Artificial Sequence
  Description of Artificial Sequence: Synthetic oligonucleotide
  Target: SCNA; (-) strand; PAM type: NNGRRT; PAM sequence: ATGAAT
ctttaaatgttgccaaatat

SEQ ID NO: 7391 - DNA, 20 bp, Artificial Sequence
  Description of Artificial Sequence: Synthetic oligonucleotide
  Target: SCNA; (-) strand; PAM type: NNGRRT; PAM sequence: CAGAGT
ttaaacatcgttggaactac

SEQ ID NO: 7392 - DNA, 20 bp, Artificial Sequence
  Description of Artificial Sequence: Synthetic oligonucleotide
  Target: SCNA; (-) strand; PAM type: NNGRRT; PAM sequence: GAGAAT
tagcacattcaaggctctga

SEQ ID NO: 7393 - DNA, 20 bp, Artificial Sequence
  Description of Artificial Sequence: Synthetic oligonucleotide
  Target: SCNA; (-) strand; PAM type: NNGRRT; PAM sequence: GTGGGT
tgaataaaaaaaaaaaaaaa

SEQ ID NO: 7394 - DNA, 20 bp, Artificial Sequence
  Description of Artificial Sequence: Synthetic oligonucleotide
  Target: SCNA; (-) strand; PAM type: NNGRRT; PAM sequence: ATGAAT
acaataaataatattcgacc

SEQ ID NO: 7395 - DNA, 20 bp, Artificial Sequence
  Description of Artificial Sequence: Synthetic oligonucleotide
  Target: SCNA; (-) strand; PAM type: NNGRRT; PAM sequence: GTGAAT
ctattttgtctgatattggt

SEQ ID NO: 7396 - DNA, 20 bp, Artificial Sequence
  Description of Artificial Sequence: Synthetic oligonucleotide
  Target: SCNA; (-) strand; PAM type: NNGRRT; PAM sequence: TAGAGT
gaagaccccaactactattg

SEQ ID NO: 7397 - DNA, 20 bp, Artificial Sequence
  Description of Artificial Sequence: Synthetic oligonucleotide
  Target: SCNA; (-) strand; PAM type: NNGRRT; PAM sequence: TGGGGT
ctgtgattaattattgaaag

SEQ ID NO: 7398 - DNA, 20 bp, Artificial Sequence
  Description of Artificial Sequence: Synthetic oligonucleotide
  Target: SCNA; (-) strand; PAM type: NNGRRT; PAM sequence: CGGAAT
tggaacattaaccctacact

SEQ ID NO: 7399 - DNA, 20 bp, Artificial Sequence
  Description of Artificial Sequence: Synthetic oligonucleotide
  Target: SCNA; (-) strand; PAM type: NNGRRT; PAM sequence: AGGAAT
taatagccatttgaagaagg

SEQ ID NO: 7400 - DNA, 20 bp, Artificial Sequence
  Description of Artificial Sequence: Synthetic oligonucleotide
  Target: SCNA; (-) strand; PAM type: NNGRRT; PAM sequence: ATGAAT
aaatcatgcttataagcaac

SEQ ID NO: 7401 - DNA, 20 bp, Artificial Sequence
  Description of Artificial Sequence: Synthetic oligonucleotide
  Target: SCNA; (-) strand; PAM type: NNGRRT; PAM sequence: GAGAAT
tgtgtttgtatataaatggt

SEQ ID NO: 7402 - DNA, 20 bp, Artificial Sequence
  Description of Artificial Sequence: Synthetic oligonucleotide
  Target: SCNA; (-) strand; PAM type: NNGRRT; PAM sequence: AAGAAT
gtcttttaatgatactgtct

SEQ ID NO: 7403 - DNA, 20 bp, Artificial Sequence
  Description of Artificial Sequence: Synthetic oligonucleotide
  Target: SCNA; (-) strand; PAM type: NNGRRT; PAM sequence: GTGGAT
tagcagggtctttgtgtgct

SEQ ID NO: 7404 - DNA, 20 bp, Artificial Sequence
  Description of Artificial Sequence: Synthetic oligonucleotide
  Target: SCNA; (-) strand; PAM type: NNGRRT; PAM sequence: CAGGGT
ctgaagtgaatacatggtag

SEQ ID NO: 7405 - DNA, 20 bp, Artificial Sequence
  Description of Artificial Sequence: Synthetic oligonucleotide
  Target: SCNA; (-) strand; PAM type: NNGRRT; PAM sequence: GTGAAT
ggtgcttccctttcactgaa

SEQ ID NO: 7406 - DNA, 20 bp, Artificial Sequence
  Description of Artificial Sequence: Synthetic oligonucleotide
  Target: SCNA; (-) strand; PAM type: NNGRRT; PAM sequence: AAGGGT
ttgatttttctaatattagg

SEQ ID NO: 7407 - DNA, 20 bp, Artificial Sequence
  Description of Artificial Sequence: Synthetic oligonucleotide
  Target: SCNA; (-) strand; PAM type: NNGRRT; PAM sequence: CAGAAT
aaataagataatatttgctg

SEQ ID NO: 7408 - DNA, 20 bp, Artificial Sequence
  Description of Artificial Sequence: Synthetic oligonucleotide
  Target: SCNA; (-) strand; PAM type: NNGRRT; PAM sequence: CCGGAT
atgatcattaaatggtgcat

SEQ ID NO: 7409 - DNA, 20 bp, Artificial Sequence
  Description of Artificial Sequence: Synthetic oligonucleotide
  Target: SCNA; (-) strand; PAM type: NNGRRT; PAM sequence: GAGAAT
aaacatcttaatttccttct

SEQ ID NO: 7410 - DNA, 20 bp, Artificial Sequence
  Description of Artificial Sequence: Synthetic oligonucleotide
  Target: SCNA; (-) strand; PAM type: NNGRRT; PAM sequence: GAGAGT
aagacgaaattttcaactgg

SEQ ID NO: 7411 - DNA, 20 bp, Artificial Sequence
  Description of Artificial Sequence: Synthetic oligonucleotide
  Target: SCNA; (-) strand; PAM type: NNGRRT; PAM sequence: GTGGAT
aatccattaatatttgtgtt

SEQ ID NO: 7412 - DNA, 20 bp, Artificial Sequence
  Description of Artificial Sequence: Synthetic oligonucleotide
  Target: SCNA; (-) strand; PAM type: NNGRRT; PAM sequence: AGGAAT
tattagagttgctctttagg

SEQ ID NO: 7413 - DNA, 20 bp, Artificial Sequence
  Description of Artificial Sequence: Synthetic oligonucleotide
  Target: SCNA; (-) strand; PAM type: NNGRRT; PAM sequence: TAGAGT
aagcagaatcctgatattat

SEQ ID NO: 7414 - DNA, 20 bp, Artificial Sequence
  Description of Artificial Sequence: Synthetic oligonucleotide
  Target: SCNA; (-) strand; PAM type: NNGRRT; PAM sequence: CAGAAT
cttatttgtttgtttttaag

SEQ ID NO: 7415 - DNA, 20 bp, Artificial Sequence
  Description of Artificial Sequence: Synthetic oligonucleotide
  Target: SCNA; (-) strand; PAM type: NNGRRT; PAM sequence: TTGAGT
tattctattcagaaaacaac

SEQ ID NO: 7416 - DNA, 20 bp, Artificial Sequence
  Description of Artificial Sequence: Synthetic oligonucleotide
  Target: SCNA; (-) strand; PAM type: NNGRRT; PAM sequence: TAGGAT
aaagacaagttatagagtat

SEQ ID NO: 7417 - DNA, 20 bp, Artificial Sequence
  Description of Artificial Sequence: Synthetic oligonucleotide
  Target: SCNA; (-) strand; PAM type: NNGRRT; PAM sequence: TAGAGT
tatgggtcaaagacaagtta

SEQ ID NO: 7418 - DNA, 20 bp, Artificial Sequence
  Description of Artificial Sequence: Synthetic oligonucleotide
  Target: SCNA; (-) strand; PAM type: NNGRRT; PAM sequence: ATGGGT
gatagattgaatttgcagct

SEQ ID NO: 7419 - DNA, 20 bp, Artificial Sequence
  Description of Artificial Sequence: Synthetic oligonucleotide
  Target: SCNA; (-) strand; PAM type: NNGRRT; PAM sequence: TTGAAT
acaaggaaaatggtgataga

SEQ ID NO: 7420 - DNA, 20 bp, Artificial Sequence
  Description of Artificial Sequence: Synthetic oligonucleotide
  Target: SCNA; (-) strand; PAM type: NNGRRT; PAM sequence: GTGAAT
aatggatatgtctgagaaca

SEQ ID NO: 7421 - DNA, 20 bp, Artificial Sequence
  Description of Artificial Sequence: Synthetic oligonucleotide
  Target: SCNA; (-) strand; PAM type: NNGRRT; PAM sequence: ATGGAT
atgtatgtctgagcatgcaa

SEQ ID NO: 7422 - DNA, 20 bp, Artificial Sequence
  Description of Artificial Sequence: Synthetic oligonucleotide
  Target: SCNA; (-) strand; PAM type: NNGRRT; PAM sequence: GGGAAT
cagaggacattctggcacaa

SEQ ID NO: 7423 - DNA, 20 bp, Artificial Sequence
  Description of Artificial Sequence: Synthetic oligonucleotide
  Target: SCNA; (-) strand; PAM type: NNGRRT; PAM sequence: CTGGGT
attgaggaggtaatgttgat

SEQ ID NO: 7424 - DNA, 20 bp, Artificial Sequence
  Description of Artificial Sequence: Synthetic oligonucleotide
  Target: SCNA; (-) strand; PAM type: NNGRRT; PAM sequence: AGGAGT
attgacattaccaggacata

SEQ ID NO: 7425 - DNA, 20 bp, Artificial Sequence
  Description of Artificial Sequence: Synthetic oligonucleotide
  Target: SCNA; (-) strand; PAM type: NNGRRT; PAM sequence: TAGAGT
ctaaacacaatggaaaacta

SEQ ID NO: 7426 - DNA, 20 bp, Artificial Sequence
  Description of Artificial Sequence: Synthetic oligonucleotide
  Target: SCNA; (-) strand; PAM type: NNGRRT; PAM sequence: TGGGGT
aataagaatttccaatattt

SEQ ID NO: 7427 - DNA, 20 bp, Artificial Sequence
  Description of Artificial Sequence: Synthetic oligonucleotide
  Target: SCNA; (-) strand; PAM type: NNGRRT; PAM sequence: AAGAAT
aaattgtttgtttgcctaat

SEQ ID NO: 7428 - DNA, 20 bp, Artificial Sequence
  Description of Artificial Sequence: Synthetic oligonucleotide
  Target: SCNA; (-) strand; PAM type: NNGRRT; PAM sequence: GAGAGT
tacttgggaggctgaggcat

SEQ ID NO: 7429 - DNA, 20 bp, Artificial Sequence
  Description of Artificial Sequence: Synthetic oligonucleotide
  Target: SCNA; (-) strand; PAM type: NNGRRT; PAM sequence: AGGAGT
tggccaggttacttgaggcc

SEQ ID NO: 7430 - DNA, 20 bp, Artificial Sequence
  Description of Artificial Sequence: Synthetic oligonucleotide
  Target: SCNA; (-) strand; PAM type: NNGRRT; PAM sequence: GAGGAT
gcattattaaaaggcatgtc

SEQ ID NO: 7431 - DNA, 20 bp, Artificial Sequence
  Description of Artificial Sequence: Synthetic oligonucleotide
  Target: SCNA; (-) strand; PAM type: NNGRRT; PAM sequence: TTGAGT
tataatggctccattaaaaa

SEQ ID NO: 7432 - DNA, 20 bp, Artificial Sequence
  Description of Artificial Sequence: Synthetic oligonucleotide
  Target: SCNA; (-) strand; PAM type: NNGRRT; PAM sequence: AGGAAT
attctaccaaacatttaaag

SEQ ID NO: 7433 - DNA, 20 bp, Artificial Sequence
  Description of Artificial Sequence: Synthetic oligonucleotide
  Target: SCNA; (-) strand; PAM type: NNGRRT; PAM sequence: GCGAAT
ctgaatagatttgtaacaca

SEQ ID NO: 7434 - DNA, 20 bp, Artificial Sequence
  Description of Artificial Sequence: Synthetic oligonucleotide
  Target: SCNA; (-) strand; PAM type: NNGRRT; PAM sequence: CTGAAT
cccaagaagaaacagtaaat

SEQ ID NO: 7435 - DNA, 20 bp, Artificial Sequence
  Description of Artificial Sequence: Synthetic oligonucleotide
  Target: SCNA; (-) strand; PAM type: NNGRRT; PAM sequence: ATGAAT
aaattagaaaatactgttag

SEQ ID NO: 7436 - DNA, 20 bp, Artificial Sequence
  Description of Artificial Sequence: Synthetic oligonucleotide
  Target: SCNA; (-) strand; PAM type: NNGRRT; PAM sequence: TAGAAT
aaagttacccacacaagtta

SEQ ID NO: 7437 - DNA, 20 bp, Artificial Sequence
  Description of Artificial Sequence: Synthetic oligonucleotide
  Target: SCNA; (-) strand; PAM type: NNGRRT; PAM sequence: TGGGAT
tttttgccatacatgtccaa

SEQ ID NO: 7438 - DNA, 20 bp, Artificial Sequence
  Description of Artificial Sequence: Synthetic oligonucleotide
  Target: SCNA; (-) strand; PAM type: NNGRRT; PAM sequence: TGGAAT
tggaaagttagggaaatcaa

SEQ ID NO: 7439 - DNA, 20 bp, Artificial Sequence
  Description of Artificial Sequence: Synthetic oligonucleotide
  Target: SCNA; (-) strand; PAM type: NNGRRT; PAM sequence: GAGAAT
gtttactaacccctgcatta

SEQ ID NO: 7440 - DNA, 20 bp, Artificial Sequence
  Description of Artificial Sequence: Synthetic oligonucleotide
  Target: SCNA; (-) strand; PAM type: NNGRRT; PAM sequence: AAGGAT
gaagatgaagaagaggaaga

SEQ ID NO: 7441 - DNA, 20 bp, Artificial Sequence
  Description of Artificial Sequence: Synthetic oligonucleotide
  Target: SCNA; (-) strand; PAM type: NNGRRT; PAM sequence: AAGGGT
gaatagtttttacattttta

SEQ ID NO: 7442 - DNA, 20 bp, Artificial Sequence
  Description of Artificial Sequence: Synthetic oligonucleotide
  Target: SCNA; (-) strand; PAM type: NNGRRT; PAM sequence: AAGAAT
acgtggacaacttgcaagtt

SEQ ID NO: 7443 - DNA, 20 bp, Artificial Sequence
  Description of Artificial Sequence: Synthetic oligonucleotide
  Target: SCNA; (-) strand; PAM type: NNGRRT; PAM sequence: GAGAAT
ctctttcattagtgcttagt

SEQ ID NO: 7444 - DNA, 20 bp, Artificial Sequence
  Description of Artificial Sequence: Synthetic oligonucleotide
  Target: SCNA; (-) strand; PAM type: NNGRRT; PAM sequence: CTGAAT
ttctgaggtaggagtccaag

SEQ ID NO: 7445 - DNA, 20 bp, Artificial Sequence
  Description of Artificial Sequence: Synthetic oligonucleotide
  Target: SCNA; (-) strand; PAM type: NNGRRT; PAM sequence: AGGAGT
tatgaaatgccttctgaggt

SEQ ID NO: 7446 - DNA, 20 bp, Artificial Sequence
  Description of Artificial Sequence: Synthetic oligonucleotide
  Target: SCNA; (-) strand; PAM type: NNGRRT; PAM sequence: GTGGAT
gaattctggaagatatgcct

SEQ ID NO: 7447 - DNA, 20 bp, Artificial Sequence
  Description of Artificial Sequence: Synthetic oligonucleotide
  Target: SCNA; (-) strand; PAM type: NNGRRT; PAM sequence: AGGAAT
gaagaaggagccccacagga

SEQ ID NO: 7448 - DNA, 20 bp, Artificial Sequence
  Description of Artificial Sequence: Synthetic oligonucleotide
  Target: SCNA; (-) strand; PAM type: NNGRRT; PAM sequence: TAGAAT
gtgcttcttactttaaatat

SEQ ID NO: 7449 - DNA, 20 bp, Artificial Sequence
  Description of Artificial Sequence: Synthetic oligonucleotide
  Target: SCNA; (-) strand; PAM type: NNGRRT; PAM sequence: TAGAAT
cccggaggcattgtggagtt

SEQ ID NO: 7450 - DNA, 20 bp, Artificial Sequence
  Description of Artificial Sequence: Synthetic oligonucleotide
  Target: SCNA; (-) strand; PAM type: NNGRRT; PAM sequence: TGGAGT
atgtttccccggaggcattg

SEQ ID NO: 7451 - DNA, 20 bp, Artificial Sequence
  Description of Artificial Sequence: Synthetic oligonucleotide
  Target: SCNA; (-) strand; PAM type: NNGRRT; PAM sequence: GAGGGT
gcaaaaagtttacatacttt

SEQ ID NO: 7452 - DNA, 20 bp, Artificial Sequence
  Description of Artificial Sequence: Synthetic oligonucleotide
  Target: SCNA; (-) strand; PAM type: NNGRRT; PAM sequence: GTGGAT
aatatctttggactatagct

SEQ ID NO: 7453 - DNA, 20 bp, Artificial Sequence
  Description of Artificial Sequence: Synthetic oligonucleotide
  Target: SCNA; (-) strand; PAM type: NNGRRT; PAM sequence: AGGAGT
tcccaaagtgctgaaatcac

SEQ ID NO: 7454 - DNA, 20 bp, Artificial Sequence
  Description of Artificial Sequence: Synthetic oligonucleotide
  Target: SCNA; (-) strand; PAM type: NNGRRT; PAM sequence: TGGGGT
atttgtatttttagtagaga

SEQ ID NO: 7455 - DNA, 20 bp, Artificial Sequence
  Description of Artificial Sequence: Synthetic oligonucleotide
  Target: SCNA; (-) strand; PAM type: NNGRRT; PAM sequence: TAGAAT
tctccctctgtcacccaggc

SEQ ID NO: 7456 - DNA, 20 bp, Artificial Sequence
  Description of Artificial Sequence: Synthetic oligonucleotide
  Target: SCNA; (-) strand; PAM type: NNGRRT; PAM sequence: TTGAAT
tatcataatctactgagtag

SEQ ID NO: 7457 - DNA, 20 bp, Artificial Sequence
  Description of Artificial Sequence: Synthetic oligonucleotide
  Target: SCNA; (-) strand; PAM type: NNGRRT; PAM sequence: CTGAGT
caggtctttatcataatcta

SEQ ID NO: 7458 - DNA, 20 bp, Artificial Sequence
  Description of Artificial Sequence: Synthetic oligonucleotide
  Target: SCNA; (-) strand; PAM type: NNGRRT; PAM sequence: CTGAAT
caaactttttacctttgcgt

SEQ ID NO: 7459 - DNA, 20 bp, Artificial Sequence
  Description of Artificial Sequence: Synthetic oligonucleotide
  Target: SCNA; (-) strand; PAM type: NNGRRT; PAM sequence: AAGAAT
tcagtcttcaaatttcagaa

SEQ ID NO: 7460 - DNA, 20 bp, Artificial Sequence
  Description of Artificial Sequence: Synthetic oligonucleotide
  Target: SCNA; (-) strand; PAM type: NNGRRT; PAM sequence: CTGAGT
aaagccatgaccatttcagg

SEQ ID NO: 7461 - DNA, 20 bp, Artificial Sequence
  Description of Artificial Sequence: Synthetic oligonucleotide
  Target: SCNA; (-) strand; PAM type: NNGRRT; PAM sequence: AAGAAT
gcaacaaaaggtatttagtg

SEQ ID NO: 7462 - DNA, 20 bp, Artificial Sequence
  Description of Artificial Sequence: Synthetic oligonucleotide
  Target: SCNA; (-) strand; PAM type: NNGRRT; PAM sequence: TTGAAT
tcacattgcctctctgttct

SEQ ID NO: 7463 - DNA, 20 bp, Artificial Sequence
  Description of Artificial Sequence: Synthetic oligonucleotide
  Target: SCNA; (-) strand; PAM type: NNGRRT; PAM sequence: AGGGAT
aaaatcagccgcgttggctg

SEQ ID NO: 7464 - DNA, 20 bp, Artificial Sequence
  Description of Artificial Sequence: Synthetic oligonucleotide
  Target: SCNA; (-) strand; PAM type: NNGRRT; PAM sequence: CAGAAT
aaaaagggcattggcaaggg

SEQ ID NO: 7465 - DNA, 20 bp, Artificial Sequence
  Description of Artificial Sequence: Synthetic oligonucleotide
  Target: SCNA; (-) strand; PAM type: NNGRRT; PAM sequence: TTGGAT
ttatttaatttatatattat

SEQ ID NO: 7466 - DNA, 20 bp, Artificial Sequence
  Description of Artificial Sequence: Synthetic oligonucleotide
  Target: SCNA; (-) strand; PAM type: NNGRRT; PAM sequence: TGGGGT
cattttaaagtgaggtagtt

SEQ ID NO: 7467 - DNA, 20 bp, Artificial Sequence
  Description of Artificial Sequence: Synthetic oligonucleotide
  Target: SCNA; (-) strand; PAM type: NNGRRT; PAM sequence: TTGGAT
ttgccttatttcccttatac

SEQ ID NO: 7468 - DNA, 20 bp, Artificial Sequence
  Description of Artificial Sequence: Synthetic oligonucleotide
  Target: SCNA; (-) strand; PAM type: NNGRRT; PAM sequence: CAGGGT
tttgatcatcaaacaacaaa

SEQ ID NO: 7469 - DNA, 20 bp, Artificial Sequence
  Description of Artificial Sequence: Synthetic oligonucleotide
  Target: SCNA; (-) strand; PAM type: NNGRRT; PAM sequence: CAGGGT
aggacgctgttccattactg

SEQ ID NO: 7470 - DNA, 20 bp, Artificial Sequence
  Description of Artificial Sequence: Synthetic oligonucleotide
  Target: SCNA; (-) strand; PAM type: NNGRRT; PAM sequence: AAGAAT
attggctaattgatataagc

SEQ ID NO: 7471 - DNA, 20 bp, Artificial Sequence
  Description of Artificial Sequence: Synthetic oligonucleotide
  Target: SCNA; (-) strand; PAM type: NNGRRT; PAM sequence: TTGGAT
gttcccacttgatgaagtta

SEQ ID NO: 7472 - DNA, 20 bp, Artificial Sequence
  Description of Artificial Sequence: Synthetic oligonucleotide
  Target: SCNA; (-) strand; PAM type: NNGRRT; PAM sequence: TAGGAT
tgtcgatttggactctagaa

SEQ ID NO: 7473 - DNA, 20 bp, Artificial Sequence
  Description of Artificial Sequence: Synthetic oligonucleotide
  Target: SCNA; (-) strand; PAM type: NNGRRT; PAM sequence: TAGAAT
cctattgtcgatttggactc

SEQ ID NO: 7474 - DNA, 20 bp, Artificial Sequence
  Description of Artificial Sequence: Synthetic oligonucleotide
  Target: SCNA; (-) strand; PAM type: NNGRRT; PAM sequence: TAGGAT
tttaatagcagttacaccat

SEQ ID NO: 7475 - DNA, 20 bp, Artificial Sequence
  Description of Artificial Sequence: Synthetic oligonucleotide
  Target: SCNA; (-) strand; PAM type: NNGRRT; PAM sequence: CAGGAT
tggggtttcaccatgttggc

SEQ ID NO: 7476 - DNA, 20 bp, Artificial Sequence
  Description of Artificial Sequence: Synthetic oligonucleotide
  Target: SCNA; (-) strand; PAM type: NNGRRT; PAM sequence: TGGGGT
tttttgtattttagtagaga

SEQ ID NO: 7477 - DNA, 20 bp, Artificial Sequence
  Description of Artificial Sequence: Synthetic oligonucleotide
  Target: SCNA; (-) strand; PAM type: NNGRRT; PAM sequence: CCGAGT
gattcccctggctcagtctc

SEQ ID NO: 7478 - DNA, 20 bp, Artificial Sequence
  Description of Artificial Sequence: Synthetic oligonucleotide
  Target: SCNA; (-) strand; PAM type: NNGRRT; PAM sequence: CCGGGT
ctcactgcaatctccacctc

SEQ ID NO: 7479 - DNA, 20 bp, Artificial Sequence
  Description of Artificial Sequence: Synthetic oligonucleotide
  Target: SCNA; (-) strand; PAM type: NNGRRT; PAM sequence: TGGAGT
gtctcactccgtcaccaggc

SEQ ID NO: 7480 - DNA, 20 bp, Artificial Sequence
  Description of Artificial Sequence: Synthetic oligonucleotide
  Target: SCNA; (-) strand; PAM type: NNGRRT; PAM sequence: CGGAGT
tttatttatttattttgaga

SEQ ID NO: 7481 - DNA, 20 bp, Artificial Sequence
  Description of Artificial Sequence: Synthetic oligonucleotide
  Target: SCNA; (-) strand; PAM type: NNGRRT; PAM sequence: TCGGAT
aatgttaatcaaattcaaat

SEQ ID NO: 7482 - DNA, 20 bp, Artificial Sequence
  Description of Artificial Sequence: Synthetic oligonucleotide
  Target: SCNA; (-) strand; PAM type: NNGRRT; PAM sequence: GAGAAT
gcttatgtagggttcccaat

SEQ ID NO: 7483 - DNA, 20 bp, Artificial Sequence
  Description of Artificial Sequence: Synthetic oligonucleotide
  Target: SCNA; (-) strand; PAM type: NNGRRT; PAM sequence: TAGGGT
gtgttttccatttgcttatg

SEQ ID NO: 7484 - DNA, 20 bp, Artificial Sequence
  Description of Artificial Sequence: Synthetic oligonucleotide
  Target: SCNA; (-) strand; PAM type: NNGRRT; PAM sequence: ACGGAT
aaaccatggaaaacaaaacc

SEQ ID NO: 7485 - DNA, 20 bp, Artificial Sequence
  Description of Artificial Sequence: Synthetic oligonucleotide
  Target: SCNA; (-) strand; PAM type: NNGRRT; PAM sequence: TGGGGT
ctctaaatatcttagtattt

SEQ ID NO: 7486 - DNA, 20 bp, Artificial Sequence
  Description of Artificial Sequence: Synthetic oligonucleotide
  Target: SCNA; (-) strand; PAM type: NNGRRT; PAM sequence: GTGGGT
tatactgtaataaaagttat

SEQ ID NO: 7487 - DNA, 20 bp, Artificial Sequence
  Description of Artificial Sequence: Synthetic oligonucleotide
  Target: SCNA; (-) strand; PAM type: NNGRRT; PAM sequence: GCGGAT
ccactaggacacctgaaatt

SEQ ID NO: 7488 - DNA, 20 bp, Artificial Sequence
  Description of Artificial Sequence: Synthetic oligonucleotide
  Target: SCNA; (-) strand; PAM type: NNGRRT; PAM sequence: AGGGAT
agcagtcttcctttatctac

SEQ ID NO: 7489 - DNA, 20 bp, Artificial Sequence
  Description of Artificial Sequence: Synthetic oligonucleotide
  Target: SCNA; (-) strand; PAM type: NNGRRT; PAM sequence: TAGAGT
cttaaaatctacgaatgtga

SEQ ID NO: 7490 - DNA, 20 bp, Artificial Sequence
  Description of Artificial Sequence: Synthetic oligonucleotide
  Target: SCNA; (-) strand; PAM type: NNGRRT; PAM sequence: ACGAAT
ttttagtatgcttaaaatct

SEQ ID NO: 7491 - DNA, 20 bp, Artificial Sequence
  Description of Artificial Sequence: Synthetic oligonucleotide
  Target: SCNA; (-) strand; PAM type: NNGRRT; PAM sequence: TGGAAT
gtttgttgttatattctcct

SEQ ID NO: 7492 - DNA, 20 bp, Artificial Sequence
  Description of Artificial Sequence: Synthetic oligonucleotide
  Target: SCNA; (-) strand; PAM type: NNGRRT; PAM sequence: AGGGAT
aacagtaaatatacaggtat

SEQ ID NO: 7493 - DNA, 20 bp, Artificial Sequence
  Description of Artificial Sequence: Synthetic oligonucleotide
  Target: SCNA; (-) strand; PAM type: NNGRRT; PAM sequence: TGGAGT
tattaggcacagttgtaaat

SEQ ID NO: 7494 - DNA, 20 bp, Artificial Sequence
  Description of Artificial Sequence: Synthetic oligonucleotide
  Target: SCNA; (-) strand; PAM type: NNGRRT; PAM sequence: ATGAAT
ttatattttgaaaacaagtc

SEQ ID NO: 7495 - DNA, 20 bp, Artificial Sequence
  Description of Artificial Sequence: Synthetic oligonucleotide
  Target: SCNA; (-) strand; PAM type: NNGRRT; PAM sequence: CTGGGT
ttttattgccctaacatatt

SEQ ID NO: 7496 - DNA, 20 bp, Artificial Sequence
  Description of Artificial Sequence: Synthetic oligonucleotide
  Target: SCNA; (-) strand; PAM type: NNGRRT; PAM sequence: GAGAAT
gggatagggcctagtagaga

SEQ ID NO: 7497 - DNA, 20 bp, Artificial Sequence
  Description of Artificial Sequence: Synthetic oligonucleotide
  Target: SCNA; (-) strand; PAM type: NNGRRT; PAM sequence: AGGGAT
aaaaagtctacagctattcc

SEQ ID NO: 7498 - DNA, 20 bp, Artificial Sequence
  Description of Artificial Sequence: Synthetic oligonucleotide
  Target: SCNA; (-) strand; PAM type: NNGRRT; PAM sequence: CTGAGT
tgcagatataagatactgaa

SEQ ID NO: 7499 - DNA, 20 bp, Artificial Sequence
  Description of Artificial Sequence: Synthetic oligonucleotide
  Target: SCNA; (-) strand; PAM type: NNGRRT; PAM sequence: GAGGGT
agtctttccttattagcaat

SEQ ID NO: 7500 - DNA, 20 bp, Artificial Sequence
  Description of Artificial Sequence: Synthetic oligonucleotide
  Target: SCNA; (-) strand; PAM type: NNGRRT; PAM sequence: TTGAAT
caggtttatttaaaaagaac

SEQ ID NO: 7501 - DNA, 20 bp, Artificial Sequence
  Description of Artificial Sequence: Synthetic oligonucleotide
  Target: SCNA; (-) strand; PAM type: NNGRRT; PAM sequence: ACGAGT
tatagagcacttcagctggg

SEQ ID NO: 7502 - DNA, 20 bp, Artificial Sequence
  Description of Artificial Sequence: Synthetic oligonucleotide
  Target: SCNA; (-) strand; PAM type: NNGRRT; PAM sequence: TGGAAT
ttccttcactttcacttccc

SEQ ID NO: 7503 - DNA, 20 bp, Artificial Sequence
  Description of Artificial Sequence: Synthetic oligonucleotide
  Target: SCNA; (-) strand; PAM type: NNGRRT; PAM sequence: TTGAAT
taaagttataagtcatagaa

SEQ ID NO: 7504 - DNA, 20 bp, Artificial Sequence
  Description of Artificial Sequence: Synthetic oligonucleotide
  Target: SCNA; (-) strand; PAM type: NNGRRT; PAM sequence: TAGAAT
aaaattaaagttataagtca

SEQ ID NO: 7505 - DNA, 20 bp, Artificial Sequence
  Description of Artificial Sequence: Synthetic oligonucleotide
  Target: SCNA; (-) strand; PAM type: NNGRRT; PAM sequence: AAGAGT
agggccctagatgattctag

SEQ ID NO: 7506 - DNA, 20 bp, Artificial Sequence
  Description of Artificial Sequence: Synthetic oligonucleotide
  Target: SCNA; (-) strand; PAM type: NNGRRT; PAM sequence: CAGGGT
ctctatattaaattatacca

SEQ ID NO: 7507 - DNA, 20 bp, Artificial Sequence
  Description of Artificial Sequence: Synthetic oligonucleotide
  Target: SCNA; (-) strand; PAM type: NNGRRT; PAM sequence: ATGGAT
ttgctattttaacgatcacc

SEQ ID NO: 7508 - DNA, 20 bp, Artificial Sequence
  Description of Artificial Sequence: Synthetic oligonucleotide
  Target: SCNA; (-) strand; PAM type: NNGRRT; PAM sequence: TTGAAT
ataccaaagaccaaccagcc

SEQ ID NO: 7509 - DNA, 20 bp, Artificial Sequence
  Description of Artificial Sequence: Synthetic oligonucleotide
  Target: SCNA; (-) strand; PAM type: NNGRRT; PAM sequence: TTGGGT
tccaacctcctctttgttct

SEQ ID NO: 7510 - DNA, 20 bp, Artificial Sequence
  Description of Artificial Sequence: Synthetic oligonucleotide
  Target: SCNA; (-) strand; PAM type: NNGRRT; PAM sequence: TTGGGT
gtgaaagttgatcacacaaa

SEQ ID NO: 7511 - DNA, 20 bp, Artificial Sequence
  Description of Artificial Sequence: Synthetic oligonucleotide
  Target: SCNA; (-) strand; PAM type: NNGRRT; PAM sequence: TTGAAT
gaaagtgcgcttctgctgct

SEQ ID NO: 7512 - DNA, 20 bp, Artificial Sequence
  Description of Artificial Sequence: Synthetic oligonucleotide
  Target: SCNA; (-) strand; PAM type: NNGRRT; PAM sequence: TTGAGT
catcctcctggtgtgagttg

SEQ ID NO: 7513 - DNA, 20 bp, Artificial Sequence
  Description of Artificial Sequence: Synthetic oligonucleotide
  Target: SCNA; (-) strand; PAM type: NNGRRT; PAM sequence: GTGAGT
ctctccttcatcctcctggt

SEQ ID NO: 7514 - DNA, 20 bp, Artificial Sequence
  Description of Artificial Sequence: Synthetic oligonucleotide
  Target: SCNA; (-) strand; PAM type: NNGRRT; PAM sequence: ACGGGT
gcttgatttcattttggaac

SEQ ID NO: 7515 - DNA, 20 bp, Artificial Sequence
  Description of Artificial Sequence: Synthetic oligonucleotide
  Target: SCNA; (-) strand; PAM type: NNGRRT; PAM sequence: ACGAGT
tatgctatttttatttaaat

SEQ ID NO: 7516 - DNA, 20 bp, Artificial Sequence
  Description of Artificial Sequence: Synthetic oligonucleotide
  Target: SCNA; (-) strand; PAM type: NNGRRT; PAM sequence: GAGAAT
ctgtctgaggtagagaagta

SEQ ID NO: 7517 - DNA, 20 bp, Artificial Sequence
  Description of Artificial Sequence: Synthetic oligonucleotide
  Target: SCNA; (-) strand; PAM type: NNGRRT; PAM sequence: AGGAAT
aatggcattatgagcagact

SEQ ID NO: 7518 - DNA, 20 bp, Artificial Sequence
  Description of Artificial Sequence: Synthetic oligonucleotide
  Target: SCNA; (-) strand; PAM type: NNGRRT; PAM sequence: TTGAAT
aaattgagattagtttgatt

SEQ ID NO: 7519 - DNA, 20 bp, Artificial Sequence
  Description of Artificial Sequence: Synthetic oligonucleotide
  Target: SCNA; (-) strand; PAM type: NNGRRT; PAM sequence: CAGAGT
tttatgacctcaagagaaat

SEQ ID NO: 7520 - DNA, 20 bp, Artificial Sequence
  Description of Artificial Sequence: Synthetic oligonucleotide
  Target: SCNA; (-) strand; PAM type: NNGRRT; PAM sequence: GAGGAT
atagatctcttaaaaaggca

SEQ ID NO: 7521 - DNA, 20 bp, Artificial Sequence
  Description of Artificial Sequence: Synthetic oligonucleotide
  Target: SCNA; (-) strand; PAM type: NNGRRT; PAM sequence: CAGAGT
tcaataattcgtttaagacc

SEQ ID NO: 7522 - DNA, 20 bp, Artificial Sequence
  Description of Artificial Sequence: Synthetic oligonucleotide
  Target: SCNA; (-) strand; PAM type: NNGRRT; PAM sequence: CAGAGT
ggatgcaattaaatactcct

SEQ ID NO: 7523 - DNA, 20 bp, Artificial Sequence
  Description of Artificial Sequence: Synthetic oligonucleotide
  Target: SCNA; (-) strand; PAM type: NNGRRT; PAM sequence: TAGGAT
atgtgacagaatatacttac

SEQ ID NO: 7524 - DNA, 20 bp, Artificial Sequence
  Description of Artificial Sequence: Synthetic oligonucleotide
  Target: SCNA; (-) strand; PAM type: NNGRRT; PAM sequence: CAGAAT
ttctatggcttctcatgtga

SEQ ID NO: 7525 - DNA, 20 bp, Artificial Sequence
  Description of Artificial Sequence: Synthetic oligonucleotide
  Target: SCNA; (-) strand; PAM type: NNGRRT; PAM sequence: TTGGAT
gctttattatcctttgggca

SEQ ID NO: 7526 - DNA, 20 bp, Artificial Sequence
  Description of Artificial Sequence: Synthetic oligonucleotide
  Target: SCNA; (-) strand; PAM type: NNGRRT; PAM sequence: TTGGGT
tatataattggaaaaggagg

SEQ ID NO: 7527 - DNA, 20 bp, Artificial Sequence
  Description of Artificial Sequence: Synthetic oligonucleotide
  Target: SCNA; (-) strand; PAM type: NNGRRT; PAM sequence: TTGAAT
actttcccaaaaattaaagt

SEQ ID NO: 7528 - DNA, 20 bp, Artificial Sequence
  Description of Artificial Sequence: Synthetic oligonucleotide
  Target: SCNA; (-) strand; PAM type: NNGRRT; PAM sequence: TAGAAT
ttgatgcatttctaaagtta

SEQ ID NO: 7529 - DNA, 20 bp, Artificial Sequence
  Description of Artificial Sequence: Synthetic oligonucleotide
  Target: SCNA; (-) strand; PAM type: NNGRRT; PAM sequence: ATGGAT
tattgcctcagaaagaacag

SEQ ID NO: 7530 - DNA, 20 bp, Artificial Sequence
  Description of Artificial Sequence: Synthetic oligonucleotide
  Target: SCNA; (-) strand; PAM type: NNGRRT; PAM sequence: TGGAAT
gtcactacattgttaaaact

SEQ ID NO: 7531 - DNA, 20 bp, Artificial Sequence
  Description of Artificial Sequence: Synthetic oligonucleotide
  Target: SCNA; (-) strand; PAM type: NNGRRT; PAM sequence: GTGAGT
tacttcgtgtgtatgtgtct

SEQ ID NO: 7532 - DNA, 20 bp, Artificial Sequence
  Description of Artificial Sequence: Synthetic oligonucleotide
  Target: SCNA; (-) strand; PAM type: NNGRRT; PAM sequence: CTGAGT
tacatttgctgagacctgat

SEQ ID NO: 7533 - DNA, 20 bp, Artificial Sequence
  Description of Artificial Sequence: Synthetic oligonucleotide
  Target: SCNA; (-) strand; PAM type: NNGRRT; PAM sequence: ATGGAT
tgcattctcaatctgtaggt

SEQ ID NO: 7534 - DNA, 20 bp, Artificial Sequence
  Description of Artificial Sequence: Synthetic oligonucleotide
  Target: SCNA; (-) strand; PAM type: NNGRRT; PAM sequence: CTGGGT
tatgttatttatgtgtaaga

SEQ ID NO: 7535 - DNA, 20 bp, Artificial Sequence
  Description of Artificial Sequence: Synthetic oligonucleotide
  Target: SCNA; (-) strand; PAM type: NNGRRT; PAM sequence: AGGAGT
ctggaggatcacttgggccc

SEQ ID NO: 7536 - DNA, 20 bp, Artificial Sequence
  Description of Artificial Sequence: Synthetic oligonucleotide
  Target: SCNA; (-) strand; PAM type: NNGRRT; PAM sequence: GAGGAT
tatttgggaggctgaggctg

SEQ ID NO: 7537 - DNA, 20 bp, Artificial Sequence
  Description of Artificial Sequence: Synthetic oligonucleotide
  Target: SCNA; (-) strand; PAM type: NNGRRT; PAM sequence: AGGAGT
caggaggatcacttgagtcc

SEQ ID NO: 7538 - DNA, 20 bp, Artificial Sequence
  Description of Artificial Sequence: Synthetic oligonucleotide
  Target: SCNA; (-) strand; PAM type: NNGRRT; PAM sequence: TTGAGT
ggctgacgcaggaggatcac

SEQ ID NO: 7539 - DNA, 20 bp, Artificial Sequence
  Description of Artificial Sequence: Synthetic oligonucleotide
  Target: SCNA; (-) strand; PAM type: NNGRRT; PAM sequence: GAGGAT
actttcggaggctgacgcag

SEQ ID NO: 7540 - DNA, 20 bp, Artificial Sequence
  Description of Artificial Sequence: Synthetic oligonucleotide
  Target: SCNA; (-) strand; PAM type: NNGRRT; PAM sequence: CTGAAT
atggttgaatgtatttaaac

SEQ ID NO: 7541 - DNA, 20 bp, Artificial Sequence
  Description of Artificial Sequence: Synthetic oligonucleotide
  Target: SCNA; (-) strand; PAM type: NNGRRT; PAM sequence: TTGAAT
aattattttttaatttatgg

SEQ ID NO: 7542 - DNA, 20 bp, Artificial Sequence
  Description of Artificial Sequence: Synthetic oligonucleotide
  Target: SCNA; (-) strand; PAM type: NNGRRT; PAM sequence: AAGGAT
ttaggcttgccaaggaaaat

SEQ ID NO: 7543 - DNA, 20 bp, Artificial Sequence
  Description of Artificial Sequence: Synthetic oligonucleotide
  Target: SCNA; (-) strand; PAM type: NNGRRT; PAM sequence: GTGAGT
gcgctgtgaagtcttattag

SEQ ID NO: 7544 - DNA, 20 bp, Artificial Sequence
  Description of Artificial Sequence: Synthetic oligonucleotide
  Target: SCNA; (-) strand; PAM type: NNGRRT; PAM sequence: CCGAGT
ttgtgcattagtatattcaa

SEQ ID NO: 7545 - DNA, 20 bp, Artificial Sequence
  Description of Artificial Sequence: Synthetic oligonucleotide
  Target: SCNA; (-) strand; PAM type: NNGRRT; PAM sequence: GAGGAT
aaattttatttctagaagag

SEQ ID NO: 7546 - DNA, 20 bp, Artificial Sequence
  Description of Artificial Sequence: Synthetic oligonucleotide
  Target: SCNA; (-) strand; PAM type: NNGRRT; PAM sequence: TTGAAT
gcttaaaatagtaaacaaat

SEQ ID NO: 7547 - DNA, 20 bp, Artificial Sequence
  Description of Artificial Sequence: Synthetic oligonucleotide
  Target: SCNA; (-) strand; PAM type: NNGRRT; PAM sequence: GAGAAT
tactcgggaggctgaagcag

SEQ ID NO: 7548 - DNA, 20 bp, Artificial Sequence
  Description of Artificial Sequence: Synthetic oligonucleotide
  Target: SCNA; (-) strand; PAM type: NNGRRT; PAM sequence: GTGGAT
actttgggaggccaaggtag

SEQ ID NO: 7549 - DNA, 20 bp, Artificial Sequence
  Description of Artificial Sequence: Synthetic oligonucleotide
  Target: SCNA; (-) strand; PAM type: NNGRRT; PAM sequence: CTGGGT
tatgggcttttcagcattcc

SEQ ID NO: 7550 - DNA, 20 bp, Artificial Sequence
  Description of Artificial Sequence: Synthetic oligonucleotide
  Target: SCNA; (-) strand; PAM type: NNGRRT; PAM sequence: ATGAGT
cagagcccatccttttgtat

SEQ ID NO: 7551 - DNA, 20 bp, Artificial Sequence
  Description of Artificial Sequence: Synthetic oligonucleotide
  Target: SCNA; (-) strand; PAM type: NNGRRT; PAM sequence: AAGAGT
tgaaggttgagatctacttg

SEQ ID NO: 7552 - DNA, 20 bp, Artificial Sequence
  Description of Artificial Sequence: Synthetic oligonucleotide
  Target: SCNA; (-) strand; PAM type: NNGRRT; PAM sequence: TGGGAT
aaccactatggtcctctggc

SEQ ID NO: 7553 - DNA, 20 bp, Artificial Sequence
  Description of Artificial Sequence: Synthetic oligonucleotide
  Target: SCNA; (-) strand; PAM type: NNGRRT; PAM sequence: TAGAAT
caatgagagaatttacaaga

SEQ ID NO: 7554 - DNA, 20 bp, Artificial Sequence
  Description of Artificial Sequence: Synthetic oligonucleotide
  Target: SCNA; (-) strand; PAM type: NNGRRT; PAM sequence: GAGAAT
gtgacaaaacttaacaatga

SEQ ID NO: 7555 - DNA, 20 bp, Artificial Sequence
  Description of Artificial Sequence: Synthetic oligonucleotide
  Target: SCNA; (-) strand; PAM type: NNGRRT; PAM sequence: ATGGAT
tatctccgatctgttgaggc

SEQ ID NO: 7556 - DNA, 20 bp, Artificial Sequence
  Description of Artificial Sequence: Synthetic oligonucleotide
  Target: SCNA; (-) strand; PAM type: NNGRRT; PAM sequence: AAGGAT
tttcatttgaatgacctttt

SEQ ID NO: 7557 - DNA, 20 bp, Artificial Sequence
  Description of Artificial Sequence: Synthetic oligonucleotide
  Target: SCNA; (-) strand; PAM type: NNGRRT; PAM sequence: TTGAAT
taagaattttaatatttcat

SEQ ID NO: 7558 - DNA, 20 bp, Artificial Sequence
  Description of Artificial Sequence: Synthetic oligonucleotide
  Target: SCNA; (-) strand; PAM type: NNGRRT; PAM sequence: AAGAAT
tccgaataacacagaaaagt

SEQ ID NO: 7559 - DNA, 20 bp, Artificial Sequence
  Description of Artificial Sequence: Synthetic oligonucleotide
  Target: SCNA; (-) strand; PAM type: NNGRRT; PAM sequence: CCGAAT
ctgttattgttattccatgt

SEQ ID NO: 7560 - DNA, 20 bp, Artificial Sequence
  Description of Artificial Sequence: Synthetic oligonucleotide
  Target: SCNA; (-) strand; PAM type: NNGRRT; PAM sequence: CAGAGT
tcttgaaatggtaccaaata

SEQ ID NO: 7561 - DNA, 20 bp, Artificial Sequence
  Description of Artificial Sequence: Synthetic oligonucleotide
  Target: SCNA; (-) strand; PAM type: NNGRRT; PAM sequence: AAGAGT
agacagtagtaacttcctca

SEQ ID NO: 7562 - DNA, 20 bp, Artificial Sequence
  Description of Artificial Sequence: Synthetic oligonucleotide
  Target: SCNA; (-) strand; PAM type: NNGRRT; PAM sequence: AAGAGT
actaatattgcataatagtt

SEQ ID NO: 7563 - DNA, 20 bp, Artificial Sequence
  Description of Artificial Sequence: Synthetic oligonucleotide
  Target: SCNA; (-) strand; PAM type: NNGRRT; PAM sequence: AAGGAT
tagttaacattgcatttgga

SEQ ID NO: 7564 - DNA, 20 bp, Artificial Sequence
  Description of Artificial Sequence: Synthetic oligonucleotide
  Target: SCNA; (-) strand; PAM type: NNGRRT; PAM sequence: ATGAAT
gatagttctgatatttcatc

SEQ ID NO: 7565 - DNA, 20 bp, Artificial Sequence
  Description of Artificial Sequence: Synthetic oligonucleotide
  Target: SCNA; (-) strand; PAM type: NNGRRT; PAM sequence: TTGAAT
aaaccagaaaatgctatgca

SEQ ID NO: 7566 - DNA, 20 bp, Artificial Sequence
  Description of Artificial Sequence: Synthetic oligonucleotide
  Target: SCNA; (-) strand; PAM type: NNGRRT; PAM sequence: AGGGAT
atcataatgaaattgttggg

SEQ ID NO: 7567 - DNA, 20 bp, Artificial Sequence
  Description of Artificial Sequence: Synthetic oligonucleotide
  Target: SCNA; (-) strand; PAM type: NNGRRT; PAM sequence: ATGGAT
acatctgccccatggactta

SEQ ID NO: 7568 - DNA, 20 bp, Artificial Sequence
  Description of Artificial Sequence: Synthetic oligonucleotide
  Target: SCNA; (-) strand; PAM type: NNGRRT; PAM sequence: TGGAAT
attcctctttaaattctctg

SEQ ID NO: 7569 - DNA, 20 bp, Artificial Sequence
  Description of Artificial Sequence: Synthetic oligonucleotide
  Target: SCNA; (-) strand; PAM type: NNGRRT; PAM sequence: AAGAAT
gatgccttaaaagtaattaa

SEQ ID NO: 7570 - DNA, 20 bp, Artificial Sequence
  Description of Artificial Sequence: Synthetic oligonucleotide
  Target: SCNA; (-) strand; PAM type: NNGRRT; PAM sequence: ATGGAT
agtaatgtaatccagaaata

SEQ ID NO: 7571 - DNA, 20 bp, Artificial Sequence
  Description of Artificial Sequence: Synthetic oligonucleotide
  Target: SCNA; (-) strand; PAM type: NNGRRT; PAM sequence: GAGAGT
gaactatgtattgatttatt

SEQ ID NO: 7572 - DNA, 20 bp, Artificial Sequence
  Description of Artificial Sequence: Synthetic oligonucleotide
  Target: SCNA; (-) strand; PAM type: NNGRRT; PAM sequence: CAGAAT
tctccctttgctacaaaaat

SEQ ID NO: 7573 - DNA, 20 bp, Artificial Sequence
  Description of Artificial Sequence: Synthetic oligonucleotide
  Target: SCNA; (-) strand; PAM type: NNGRRT; PAM sequence: CAGAAT
gacaattgcagcattaaata

SEQ ID NO: 7574 - DNA, 20 bp, Artificial Sequence
  Description of Artificial Sequence: Synthetic oligonucleotide
  Target: SCNA; (-) strand; PAM type: NNGRRT; PAM sequence: TTGAAT
cacaaataccacaagcccac

SEQ ID NO: 7575 - DNA, 20 bp, Artificial Sequence
  Description of Artificial Sequence: Synthetic oligonucleotide
  Target: SCNA; (-) strand; PAM type: NNGRRT; PAM sequence: AGGAAT
ctcaacaaagtgataaaatt

SEQ ID NO: 7576 - DNA, 20 bp, Artificial Sequence
  Description of Artificial Sequence: Synthetic oligonucleotide
  Target: SCNA; (-) strand; PAM type: NNGRRT; PAM sequence: GTGAAT
tgtgagacaaaatatttaga

SEQ ID NO: 7577 - DNA, 20 bp, Artificial Sequence
  Description of Artificial Sequence: Synthetic oligonucleotide
  Target: SCNA; (-) strand; PAM type: NNGRRT; PAM sequence: TAGAGT
ggactgtgagacaaaatatt

SEQ ID NO: 7578 - DNA, 20 bp, Artificial Sequence
  Description of Artificial Sequence: Synthetic oligonucleotide
  Target: SCNA; (-) strand; PAM type: NNGRRT; PAM sequence: ATGGGT
atttgatattatgactgtgc

SEQ ID NO: 7579 - DNA, 20 bp, Artificial Sequence
  Description of Artificial Sequence: Synthetic oligonucleotide
  Target: SCNA; (-) strand; PAM type: NNGRRT; PAM sequence: TTGGGT
agtttccattttttaaatag

SEQ ID NO: 7580 - DNA, 20 bp, Artificial Sequence
  Description of Artificial Sequence: Synthetic oligonucleotide
  Target: SCNA; (-) strand; PAM type: NNGRRT; PAM sequence: CAGGAT
cggagtttcaccacgttggc

SEQ ID NO: 7581 - DNA, 20 bp, Artificial Sequence
  Description of Artificial Sequence: Synthetic oligonucleotide
  Target: SCNA; (-) strand; PAM type: NNGRRT; PAM sequence: CGGAGT
ttttgtatttttagtagaga

SEQ ID NO: 7582 - DNA, 20 bp, Artificial Sequence
  Description of Artificial Sequence: Synthetic oligonucleotide
  Target: SCNA; (-) strand; PAM type: NNGRRT; PAM sequence: CCGAGT
gattcttctgcctcagcctc

SEQ ID NO: 7583 - DNA, 20 bp, Artificial Sequence
  Description of Artificial Sequence: Synthetic oligonucleotide
  Target: SCNA; (-) strand; PAM type: NNGRRT; PAM sequence: CTGGGT
ctcactgcaacctccgcctc

SEQ ID NO: 7584 - DNA, 20 bp, Artificial Sequence
  Description of Artificial Sequence: Synthetic oligonucleotide
  Target: SCNA; (-) strand; PAM type: NNGRRT; PAM sequence: TGGAGT
gtctcactctgtcgccagtc

SEQ ID NO: 7585 - DNA, 20 bp, Artificial Sequence
  Description of Artificial Sequence: Synthetic oligonucleotide
  Target: SCNA; (-) strand; PAM type: NNGRRT; PAM sequence: TGGAGT
tccttttttttttttttaga

SEQ ID NO: 7586 - DNA, 20 bp, Artificial Sequence
  Description of Artificial Sequence: Synthetic oligonucleotide
  Target: SCNA; (-) strand; PAM type: NNGRRT; PAM sequence: TTGAAT
caccgagcttaattgcagac

SEQ ID NO: 7587 - DNA, 20 bp, Artificial Sequence
  Description of Artificial Sequence: Synthetic oligonucleotide
  Target: SCNA; (-) strand; PAM type: NNGRRT; PAM sequence: TAGGAT
ttgcttcttatctatgtcac

SEQ ID NO: 7588 - DNA, 20 bp, Artificial Sequence
  Description of Artificial Sequence: Synthetic oligonucleotide
  Target: SCNA; (-) strand; PAM type: NNGRRT; PAM sequence: GTGAGT
ctcttgctaatgctattaat

SEQ ID NO: 7589 - DNA, 20 bp, Artificial Sequence
  Description of Artificial Sequence: Synthetic oligonucleotide
  Target: SCNA; (-) strand; PAM type: NNGRRT; PAM sequence: AGGAAT
tctgtgggaattgcggcttg

SEQ ID NO: 7590 - DNA, 20 bp, Artificial Sequence
  Description of Artificial Sequence: Synthetic oligonucleotide
  Target: SCNA; (-) strand; PAM type: NNGRRT; PAM sequence: GGGAAT
tgtcacctgagcttttctgt

SEQ ID NO: 7591 - DNA, 20 bp, Artificial Sequence
  Description of Artificial Sequence: Synthetic oligonucleotide
  Target: SCNA; (-) strand; PAM type: NNGRRT; PAM sequence: TTGGAT
aggcaggtgtgcttgcagcc

SEQ ID NO: 7592 - DNA, 20 bp, Artificial Sequence
  Description of Artificial Sequence: Synthetic oligonucleotide
  Target: SCNA; (-) strand; PAM type: NNGRRT; PAM sequence: AGGGGT
atgtcttatcgtcagtaaaa

SEQ ID NO: 7593 - DNA, 20 bp, Artificial Sequence
  Description of Artificial Sequence: Synthetic oligonucleotide
  Target: SCNA; (-) strand; PAM type: NNGRRT; PAM sequence: TCGAAT
ttttaaacccagcttgacta

SEQ ID NO: 7594 - DNA, 20 bp, Artificial Sequence
  Description of Artificial Sequence: Synthetic oligonucleotide
  Target: SCNA; (-) strand; PAM type: NNGRRT; PAM sequence: TTGGAT
tgatgatactcagattctgc

SEQ ID NO: 7595 - DNA, 20 bp, Artificial Sequence
  Description of Artificial Sequence: Synthetic oligonucleotide
  Target: SCNA; (-) strand; PAM type: NNGRRT; PAM sequence: CAGGAT
tttgcctgttaaagaaaaat

SEQ ID NO: 7596 - DNA, 20 bp, Artificial Sequence
  Description of Artificial Sequence: Synthetic oligonucleotide
  Target: SCNA; (-) strand; PAM type: NNGRRT; PAM sequence: TTGGAT
tgttattgttatctatagga

SEQ ID NO: 7597 - DNA, 20 bp, Artificial Sequence
  Description of Artificial Sequence: Synthetic oligonucleotide
  Target: SCNA; (-) strand; PAM type: NNGRRT; PAM sequence: TAGGAT
agctttgttattgttatcta

SEQ ID NO: 7598 - DNA, 20 bp, Artificial Sequence
  Description of Artificial Sequence: Synthetic oligonucleotide
  Target: SCNA; (-) strand; PAM type: NNGRRT; PAM sequence: CTGAGT
atgtaacatgacagggccac

SEQ ID NO: 7599 - DNA, 20 bp, Artificial Sequence
  Description of Artificial Sequence: Synthetic oligonucleotide
  Target: SCNA; (-) strand; PAM type: NNGRRT; PAM sequence: AGGAAT
aaaatttaattgtatgattt

SEQ ID NO: 7600 - DNA, 20 bp, Artificial Sequence
  Description of Artificial Sequence: Synthetic oligonucleotide
  Target: SCNA; (-) strand; PAM type: NNGRRT; PAM sequence: TTGGGT
gtctcctttatatacatcag

SEQ ID NO: 7601 - DNA, 20 bp, Artificial Sequence
  Description of Artificial Sequence: Synthetic oligonucleotide
  Target: SCNA; (-) strand; PAM type: NNGRRT; PAM sequence: GAGGGT
aatataagtttgtatagcaa

SEQ ID NO: 7602 - DNA, 20 bp, Artificial Sequence
  Description of Artificial Sequence: Synthetic oligonucleotide
  Target: SCNA; (-) strand; PAM type: NNGRRT; PAM sequence: GAGGGT
aagtaggaggaataaaaaaa

SEQ ID NO: 7603 - DNA, 20 bp, Artificial Sequence
  Description of Artificial Sequence: Synthetic oligonucleotide
  Target: SCNA; (-) strand; PAM type: NNGRRT; PAM sequence: AGGAAT
caaaattaagaaaaagtagg

SEQ ID NO: 7604 - DNA, 20 bp, Artificial Sequence
  Description of Artificial Sequence: Synthetic oligonucleotide
  Target: SCNA; (-) strand; PAM type: NNGRRT; PAM sequence: ATGAAT
aaaagatagaactagtgaag

SEQ ID NO: 7605 - DNA, 20 bp, Artificial Sequence
  Description of Artificial Sequence: Synthetic oligonucleotide
  Target: SCNA; (-) strand; PAM type: NNGRRT; PAM sequence: TGGGAT
atagtttgagatctcaaaaa

SEQ ID NO: 7606 - DNA, 20 bp, Artificial Sequence
  Description of Artificial Sequence: Synthetic oligonucleotide
  Target: SCNA; (-) strand; PAM type: NNGRRT; PAM sequence: CTGGGT
tcactttaaagataagatac

SEQ ID NO: 7607 - DNA, 20 bp, Artificial Sequence
  Description of Artificial Sequence: Synthetic oligonucleotide
  Target: SCNA; (-) strand; PAM type: NNGRRT; PAM sequence: GTGAGT
tctcttccaggttaaatttg

SEQ ID NO: 7608 - DNA, 20 bp, Artificial Sequence
  Description of Artificial Sequence: Synthetic oligonucleotide
  Target: SCNA; (-) strand; PAM type: NNGRRT; PAM sequence: CAGAGT
atttgcctaagaaaattcaa

SEQ ID NO: 7609 - DNA, 20 bp, Artificial Sequence
  Description of Artificial Sequence: Synthetic oligonucleotide
  Target: SCNA; (-) strand; PAM type: NNGRRT; PAM sequence: CTGAAT
caataacacagttctgttat

SEQ ID NO: 7610 - DNA, 20 bp, Artificial Sequence
  Description of Artificial Sequence: Synthetic oligonucleotide
  Target: SCNA; (-) strand; PAM type: NNGRRT; PAM sequence: TGGAAT
ttagatagtcaaatctgggc

SEQ ID NO: 7611 - DNA, 20 bp, Artificial Sequence
  Description of Artificial Sequence: Synthetic oligonucleotide
  Target: SCNA; (-) strand; PAM type: NNGRRT; PAM sequence: ATGAGT
aaggaattttttttaactta

SEQ ID NO: 7612 - DNA, 20 bp, Artificial Sequence
  Description of Artificial Sequence: Synthetic oligonucleotide
  Target: SCNA; (-) strand; PAM type: NNGRRT; PAM sequence: AGGAAT
ttcttttccatttattttaa

SEQ ID NO: 7613 - DNA, 20 bp, Artificial Sequence
  Description of Artificial Sequence: Synthetic oligonucleotide
  Target: SCNA; (-) strand; PAM type: NNGRRT; PAM sequence: AGGAAT
ggagaaagggagtggtgagc

SEQ ID NO: 7614 - DNA, 20 bp, Artificial Sequence
  Description of Artificial Sequence: Synthetic oligonucleotide
  Target: SCNA; (-) strand; PAM type: NNGRRT; PAM sequence: GGGAGT
tctcctgccccagggagaaa

SEQ ID NO: 7615 - DNA, 20 bp, Artificial Sequence
  Description of Artificial Sequence: Synthetic oligonucleotide
  Target: SCNA; (-) strand; PAM type: NNGRRT; PAM sequence: ATGAGT
acacttactccaagaacgct

SEQ ID NO: 7616 - DNA, 20 bp, Artificial Sequence
  Description of Artificial Sequence: Synthetic oligonucleotide
  Target: SCNA; (-) strand; PAM type: NNGRRT; PAM sequence: AGGAAT
aatacctgactgtaactggc

SEQ ID NO: 7617 - DNA, 20 bp, Artificial Sequence
  Description of Artificial Sequence: Synthetic oligonucleotide
  Target: SCNA; (-) strand; PAM type: NNGRRT; PAM sequence: TGGGAT
gtcttggcctcccaaggtgc

SEQ ID NO: 7618 - DNA, 20 bp, Artificial Sequence
  Description of Artificial Sequence: Synthetic oligonucleotide
  Target: SCNA; (-) strand; PAM type: NNGRRT; PAM sequence: TGGGGT
ttttgtatttttagtagaga

SEQ ID NO: 7619 - DNA, 20 bp, Artificial Sequence
  Description of Artificial Sequence: Synthetic oligonucleotide
  Target: SCNA; (-) strand; PAM type: NNGRRT; PAM sequence: CTGAGT
gattcttctgcctcagccac

SEQ ID NO: 7620 - DNA, 20 bp, Artificial Sequence
  Description of Artificial Sequence: Synthetic oligonucleotide
  Target: SCNA; (-) strand; PAM type: NNGRRT; PAM sequence: CAGGAT
cccaggctggagtgcagtgg

SEQ ID NO: 7621 - DNA, 20 bp, Artificial Sequence
  Description of Artificial Sequence: Synthetic oligonucleotide
  Target: SCNA; (-) strand; PAM type: NNGRRT; PAM sequence: TGGAGT
tctcactctcttgcccaggc

SEQ ID NO: 7622 - DNA, 20 bp, Artificial Sequence
  Description of Artificial Sequence: Synthetic oligonucleotide
  Target: SCNA; (-) strand; PAM type: NNGRRT; PAM sequence: TGGAGT
agttctttatttttttgaga

SEQ ID NO: 7623 - DNA, 20 bp, Artificial Sequence
  Description of Artificial Sequence: Synthetic oligonucleotide
  Target: SCNA; (-) strand; PAM type: NNGRRT; PAM sequence: TGGAGT
tgccatgaagaaaataaaat

SEQ ID NO: 7624 - DNA, 20 bp, Artificial Sequence
  Description of Artificial Sequence: Synthetic oligonucleotide
  Target: SCNA; (-) strand; PAM type: NNGRRT; PAM sequence: CTGAGT
tgtgtttttttttctttttt

SEQ ID NO: 7625 - DNA, 20 bp, Artificial Sequence
  Description of Artificial Sequence: Synthetic oligonucleotide
  Target: SCNA; (-) strand; PAM type: NNGRRT; PAM sequence: AAGAAT
cactctccatgagagcaagc

SEQ ID NO: 7626 - DNA, 20 bp, Artificial Sequence
  Description of Artificial Sequence: Synthetic oligonucleotide
  Target: SCNA; (-) strand; PAM type: NNGRRT; PAM sequence: TAGAGT
ctccttggtgtgcctcaaga

SEQ ID NO: 7627 - DNA, 20 bp, Artificial Sequence
  Description of Artificial Sequence: Synthetic oligonucleotide
  Target: SCNA; (-) strand; PAM type: NNGRRT; PAM sequence: TTGAAT
ccatcagccctctccctgac

SEQ ID NO: 7628 - DNA, 20 bp, Artificial Sequence
  Description of Artificial Sequence: Synthetic oligonucleotide
  Target: SCNA; (-) strand; PAM type: NNGRRT; PAM sequence: CTGAAT
ctacagtgagaataacagga

SEQ ID NO: 7629 - DNA, 20 bp, Artificial Sequence
  Description of Artificial Sequence: Synthetic oligonucleotide
  Target: SCNA; (-) strand; PAM type: NNGRRT; PAM sequence: GAGAAT
gcttttaaaaatcctacagt

SEQ ID NO: 7630 - DNA, 20 bp, Artificial Sequence
  Description of Artificial Sequence: Synthetic oligonucleotide
  Target: SCNA; (-) strand; PAM type: NNGRRT; PAM sequence: AAGGAT
cattgctgaattcacagttg

SEQ ID NO: 7631 - DNA, 20 bp, Artificial Sequence
  Description of Artificial Sequence: Synthetic oligonucleotide
  Target: SCNA; (-) strand; PAM type: NNGRRT; PAM sequence: CTGAAT
ccctggaactcaaaacattg

SEQ ID NO: 7632 - DNA, 20 bp, Artificial Sequence
  Description of Artificial Sequence: Synthetic oligonucleotide
  Target: SCNA; (-) strand; PAM type: NNGRRT; PAM sequence: ATGAAT
caaggtcagcctaatgccag

SEQ ID NO: 7633 - DNA, 20 bp, Artificial Sequence
  Description of Artificial Sequence: Synthetic oligonucleotide
  Target: SCNA; (-) strand; PAM type: NNGRRT; PAM sequence: GAGAAT
tgtgtgtgtgcttgtctttt

SEQ ID NO: 7634 - DNA, 20 bp, Artificial Sequence
  Description of Artificial Sequence: Synthetic oligonucleotide
  Target: SCNA; (-) strand; PAM type: NNGRRT; PAM sequence: GGGGGT
aggcacattccagagccttg

SEQ ID NO: 7635 - DNA, 20 bp, Artificial Sequence
  Description of Artificial Sequence: Synthetic oligonucleotide
  Target: SCNA; (-) strand; PAM type: NNGRRT; PAM sequence: CAGGAT
gcatttctgtagccaggagc

SEQ ID NO: 7636 - DNA, 20 bp, Artificial Sequence
  Description of Artificial Sequence: Synthetic oligonucleotide
  Target: SCNA; (-) strand; PAM type: NNGRRT; PAM sequence: GTGGAT
cctccaaagtgaaggatggg

SEQ ID NO: 7637 - DNA, 20 bp, Artificial Sequence
  Description of Artificial Sequence: Synthetic oligonucleotide
  Target: SCNA; (-) strand; PAM type: NNGRRT; PAM sequence: TGGGGT
gcatcctccaaagtgaagga

SEQ ID NO: 7638 - DNA, 20 bp, Artificial Sequence
  Description of Artificial Sequence: Synthetic oligonucleotide
  Target: SCNA; (-) strand; PAM type: NNGRRT; PAM sequence: AAGGAT
ttaacgcatcctccaaagtg

SEQ ID NO: 7639 - DNA, 20 bp, Artificial Sequence
  Description of Artificial Sequence: Synthetic oligonucleotide
  Target: SCNA; (-) strand; PAM type: NNGRRT; PAM sequence: CTGAGT
ctggaaaatggataaggaaa

SEQ ID NO: 7640 - DNA, 20 bp, Artificial Sequence
  Description of Artificial Sequence: Synthetic oligonucleotide
  Target: SCNA; (-) strand; PAM type: NNGRRT; PAM sequence: ATGGAT
aaaaaaaaggtaactggaaa

SEQ ID NO: 7641 - DNA, 20 bp, Artificial Sequence
  Description of Artificial Sequence: Synthetic oligonucleotide
  Target: SCNA; (-) strand; PAM type: NNGRRT; PAM sequence: AAGGAT
gcatatgtgcactaagatct

SEQ ID NO: 7642 - DNA, 20 bp, Artificial Sequence
  Description of Artificial Sequence: Synthetic oligonucleotide
  Target: SCNA; (-) strand; PAM type: NNGRRT; PAM sequence: TTGAAT
aggaaaggtacagtcattca

SEQ ID NO: 7643 - DNA, 20 bp, Artificial Sequence
  Description of Artificial Sequence: Synthetic oligonucleotide
  Target: SCNA; (-) strand; PAM type: NNGRRT; PAM sequence: AAGAAT
ctgttgaaggataatcaacg

SEQ ID NO: 7644 - DNA, 20 bp, Artificial Sequence
  Description of Artificial Sequence: Synthetic oligonucleotide
  Target: SCNA; (-) strand; PAM type: NNGRRT; PAM sequence: AAGGAT
gagagaagttagctctgttg

SEQ ID NO: 7645 - DNA, 20 bp, Artificial Sequence
  Description of Artificial Sequence: Synthetic oligonucleotide
  Target: SCNA; (-) strand; PAM type: NNGRRT; PAM sequence: TGGAGT
cttagtctaaaacaattaaa

SEQ ID NO: 7646 - DNA, 20 bp, Artificial Sequence
  Description of Artificial Sequence: Synthetic oligonucleotide
  Target: SCNA; (-) strand; PAM type: NNGRRT; PAM sequence: AGGGAT
attttggctaggtatcactg

SEQ ID NO: 7647 - DNA, 20 bp, Artificial Sequence
  Description of Artificial Sequence: Synthetic oligonucleotide
  Target: SCNA; (-) strand; PAM type: NNGRRT; PAM sequence: CTGAAT
cagtatcttttattttggat

SEQ ID NO: 7648 - DNA, 20 bp, Artificial Sequence
  Description of Artificial Sequence: Synthetic oligonucleotide
  Target: SCNA; (-) strand; PAM type: NNGRRT; PAM sequence: TTGGAT
gggcaacagtatcttttatt

SEQ ID NO: 7649 - DNA, 20 bp, Artificial Sequence
  Description of Artificial Sequence: Synthetic oligonucleotide
  Target: SCNA; (-) strand; PAM type: NNGRRT; PAM sequence: TTGAAT
tgtggtataacagtttagta

SEQ ID NO: 7650 - DNA, 20 bp, Artificial Sequence
  Description of Artificial Sequence: Synthetic oligonucleotide
  Target: SCNA; (-) strand; PAM type: NNGRRT; PAM sequence: GTGAAT
aagagacaaagcctaggaat

SEQ ID NO: 7651 - DNA, 20 bp, Artificial Sequence
  Description of Artificial Sequence: Synthetic oligonucleotide
  Target: SCNA; (-) strand; PAM type: NNGRRT; PAM sequence: AGGAAT
gtagttaagagacaaagcct

SEQ ID NO: 7652 - DNA, 20 bp, Artificial Sequence
  Description of Artificial Sequence: Synthetic oligonucleotide
  Target: SCNA; (-) strand; PAM type: NNGRRT; PAM sequence: GAGAAT
gcagttatctttagatgcat

SEQ ID NO: 7653 - DNA, 20 bp, Artificial Sequence
  Description of Artificial Sequence: Synthetic oligonucleotide
  Target: SCNA; (-) strand; PAM type: NNGRRT; PAM sequence: TTGGGT
aaatcctcaagtgtccctct

SEQ ID NO: 7654 - DNA, 20 bp, Artificial Sequence
  Description of Artificial Sequence: Synthetic oligonucleotide
  Target: SCNA; (-) strand; PAM type: NNGRRT; PAM sequence: ATGGAT
tcactctgtcttagagtcat

SEQ ID NO: 7655 - DNA, 20 bp, Artificial Sequence
  Description of Artificial Sequence: Synthetic oligonucleotide
  Target: SCNA; (-) strand; PAM type: NNGRRT; PAM sequence: TAGAGT
aggtggaaatcactctgtct

SEQ ID NO: 7656 - DNA, 20 bp, Artificial Sequence
  Description of Artificial Sequence: Synthetic oligonucleotide
  Target: SCNA; (-) strand; PAM type: NNGRRT; PAM sequence: TGGAAT
caaatattttcttatttttc

SEQ ID NO: 7657 - DNA, 20 bp, Artificial Sequence
  Description of Artificial Sequence: Synthetic oligonucleotide
  Target: SCNA; (-) strand; PAM type: NNGRRT; PAM sequence: ATGAGT
agagatgatacagactatta

SEQ ID NO: 7658 - DNA, 20 bp, Artificial Sequence
  Description of Artificial Sequence: Synthetic oligonucleotide
  Target: SCNA; (-) strand; PAM type: NNGRRT; PAM sequence: TTGAAT
aaaaaaaagaaaagaaaacc

SEQ ID NO: 7659 - DNA, 20 bp, Artificial Sequence
  Description of Artificial Sequence: Synthetic oligonucleotide
  Target: SCNA; (-) strand; PAM type: NNGRRT; PAM sequence: AAGAGT
tgcactatagctacggcgat

SEQ ID NO: 7660 - DNA, 20 bp, Artificial Sequence
  Description of Artificial Sequence: Synthetic oligonucleotide
  Target: SCNA; (-) strand; PAM type: NNGRRT; PAM sequence: GAGAAT
tactacggaggctgaggcag

SEQ ID NO: 7661 - DNA, 20 bp, Artificial Sequence
  Description of Artificial Sequence: Synthetic oligonucleotide
  Target: SCNA; (-) strand; PAM type: NNGRRT; PAM sequence: CAGGAT
aaaattagtgggtgtggtgg

SEQ ID NO: 7662 - DNA, 20 bp, Artificial Sequence
  Description of Artificial Sequence: Synthetic oligonucleotide
  Target: SCNA; (-) strand; PAM type: NNGRRT; PAM sequence: GTGGGT
taccaaaaatacaaaaatta

SEQ ID NO: 7663 - DNA, 20 bp, Artificial Sequence
  Description of Artificial Sequence: Synthetic oligonucleotide
  Target: SCNA; (-) strand; PAM type: NNGRRT; PAM sequence: AGGAGT
cgggtggatcgactgaggtc

SEQ ID NO: 7664 - DNA, 20 bp, Artificial Sequence
  Description of Artificial Sequence: Synthetic oligonucleotide
  Target: SCNA; (-) strand; PAM type: NNGRRT; PAM sequence: GTGGAT
actttgggaggccaaggcgg

SEQ ID NO: 7665 - DNA, 20 bp, Artificial Sequence
  Description of Artificial Sequence: Synthetic oligonucleotide
  Target: SCNA; (-) strand; PAM type: NNGRRT; PAM sequence: GCGGGT
cagcactttgggaggccaag

SEQ ID NO: 7666 - DNA, 20 bp, Artificial Sequence
  Description of Artificial Sequence: Synthetic oligonucleotide
  Target: SCNA; (-) strand; PAM type: NNGRRT; PAM sequence: TTGAAT
attctttttcctgtgtaaac

SEQ ID NO: 7667 - DNA, 20 bp, Artificial Sequence
  Description of Artificial Sequence: Synthetic oligonucleotide
  Target: SCNA; (-) strand; PAM type: NNGRRT; PAM sequence: ATGAGT
ccagagagaactagaggctt

SEQ ID NO: 7668 - DNA, 20 bp, Artificial Sequence
  Description of Artificial Sequence: Synthetic oligonucleotide
  Target: SCNA; (-) strand; PAM type: NNGRRT; PAM sequence: CTGAAT
tattcagtttttttctttgt

SEQ ID NO: 7669 - DNA, 20 bp, Artificial Sequence
  Description of Artificial Sequence: Synthetic oligonucleotide
  Target: SCNA; (-) strand; PAM type: NNGRRT; PAM sequence: GAGAAT
gctgtagagagagagaatgg

SEQ ID NO: 7670 - DNA, 20 bp, Artificial Sequence
  Description of Artificial Sequence: Synthetic oligonucleotide
  Target: SCNA; (-) strand; PAM type: NNGRRT; PAM sequence: GAGAAT
ggtgatatgctgtagagaga

SEQ ID NO: 7671 - DNA, 20 bp, Artificial Sequence
  Description of Artificial Sequence: Synthetic oligonucleotide
  Target: SCNA; (-) strand; PAM type: NNGRRT; PAM sequence: AGGAGT
tttttaactaaaaatgtgct

SEQ ID NO: 7672 - DNA, 20 bp, Artificial Sequence
  Description of Artificial Sequence: Synthetic oligonucleotide
  Target: SCNA; (-) strand; PAM type: NNGRRT; PAM sequence: GAGAGT
tactctggaggctgaggcac

SEQ ID NO: 7673 - DNA, 20 bp, Artificial Sequence
  Description of Artificial Sequence: Synthetic oligonucleotide
  Target: SCNA; (-) strand; PAM type: NNGRRT; PAM sequence: TGGGAT
aatacaaaaaaaaaaaaaag

SEQ ID NO: 7674 - DNA, 20 bp, Artificial Sequence
  Description of Artificial Sequence: Synthetic oligonucleotide
  Target: SCNA; (-) strand; PAM type: NNGRRT; PAM sequence: ATGAGT
cagcaatttttctcatgaga

SEQ ID NO: 7675 - DNA, 20 bp, Artificial Sequence
  Description of Artificial Sequence: Synthetic oligonucleotide
  Target: SCNA; (-) strand; PAM type: NNGRRT; PAM sequence: GAGAAT
ttttcagcaatttttctcat

SEQ ID NO: 7676 - DNA, 20 bp, Artificial Sequence
  Description of Artificial Sequence: Synthetic oligonucleotide
  Target: SCNA; (-) strand; PAM type: NNGRRT; PAM sequence: GTGGAT
aacttcatctctataggaga

SEQ ID NO: 7677 - DNA, 20 bp, Artificial Sequence
  Description of Artificial Sequence: Synthetic oligonucleotide
  Target: SCNA; (-) strand; PAM type: NNGRRT; PAM sequence: GAGAGT
agttaacttcatctctatag

SEQ ID NO: 7678 - DNA, 20 bp, Artificial Sequence
  Description of Artificial Sequence: Synthetic oligonucleotide
  Target: SCNA; (-) strand; PAM type: NNGRRT; PAM sequence: GGGAGT
ggacaagtgatagttgtcaa

SEQ ID NO: 7679 - DNA, 20 bp, Artificial Sequence
  Description of Artificial Sequence: Synthetic oligonucleotide
  Target: SCNA; (-) strand; PAM type: NNGRRT; PAM sequence: GGGGAT
tgtatgtcaagtggaagggt

SEQ ID NO: 7680 - DNA, 20 bp, Artificial Sequence
  Description of Artificial Sequence: Synthetic oligonucleotide
  Target: SCNA; (-) strand; PAM type: NNGRRT; PAM sequence: AAGGGT
tgggtttgtatgtcaagtgg

SEQ ID NO: 7681 - DNA, 20 bp, Artificial Sequence
  Description of Artificial Sequence: Synthetic oligonucleotide
  Target: SCNA; (-) strand; PAM type: NNGRRT; PAM sequence: TTGGGT
ataaatgagcatgaatctct

SEQ ID NO: 7682 - DNA, 20 bp, Artificial Sequence
  Description of Artificial Sequence: Synthetic oligonucleotide
  Target: SCNA; (-) strand; PAM type: NNGRRT; PAM sequence: ATGAAT
tctactgagcataaatgagc

SEQ ID NO: 7683 - DNA, 20 bp, Artificial Sequence
  Description of Artificial Sequence: Synthetic oligonucleotide
  Target: SCNA; (-) strand; PAM type: NNGRRT; PAM sequence: TGGAAT
ttaataatagcagtaaccta

SEQ ID NO: 7684 - DNA, 20 bp, Artificial Sequence
  Description of Artificial Sequence: Synthetic oligonucleotide
  Target: SCNA; (-) strand; PAM type: NNGRRT; PAM sequence: GAGAAT
acagtcaaagaaattctaaa

SEQ ID NO: 7685 - DNA, 20 bp, Artificial Sequence
  Description of Artificial Sequence: Synthetic oligonucleotide
  Target: SCNA; (-) strand; PAM type: NNGRRT; PAM sequence: AGGAAT
ctggtttaaaggaatatctg

SEQ ID NO: 7686 - DNA, 20 bp, Artificial Sequence
  Description of Artificial Sequence: Synthetic oligonucleotide
  Target: SCNA; (-) strand; PAM type: NNGRRT; PAM sequence: AGGAAT
agctggtaagactggtttaa

SEQ ID NO: 7687 - DNA, 20 bp, Artificial Sequence
  Description of Artificial Sequence: Synthetic oligonucleotide
  Target: SCNA; (-) strand; PAM type: NNGRRT; PAM sequence: TAGAAT
ttaaaataatttagattgtg

SEQ ID NO: 7688 - DNA, 20 bp, Artificial Sequence
  Description of Artificial Sequence: Synthetic oligonucleotide
  Target: SCNA; (-) strand; PAM type: NNGRRT; PAM sequence: CTGAGT
atatgagcttaaagcatttt

SEQ ID NO: 7689 - DNA, 20 bp, Artificial Sequence
  Description of Artificial Sequence: Synthetic oligonucleotide
  Target: SCNA; (-) strand; PAM type: NNGRRT; PAM sequence: TTGAAT
cctattcaggattcattata

SEQ ID NO: 7690 - DNA, 20 bp, Artificial Sequence
  Description of Artificial Sequence: Synthetic oligonucleotide
  Target: SCNA; (-) strand; PAM type: NNGRRT; PAM sequence: CAGGAT
cttttcattgaactcctatt

SEQ ID NO: 7691 - DNA, 20 bp, Artificial Sequence
  Description of Artificial Sequence: Synthetic oligonucleotide
  Target: SCNA; (-) strand; PAM type: NNGRRT; PAM sequence: ATGGGT
acagcaggatcccatgggat

SEQ ID NO: 7692 - DNA, 20 bp, Artificial Sequence
  Description of Artificial Sequence: Synthetic oligonucleotide
  Target: SCNA; (-) strand; PAM type: NNGRRT; PAM sequence: TGGGAT
taccttacagcaggatccca

SEQ ID NO: 7693 - DNA, 20 bp, Artificial Sequence
  Description of Artificial Sequence: Synthetic oligonucleotide
  Target: SCNA; (-) strand; PAM type: NNGRRT; PAM sequence: CAGGAT
tttataaaagtaccttacag

SEQ ID NO: 7694 - DNA, 20 bp, Artificial Sequence
  Description of Artificial Sequence: Synthetic oligonucleotide
  Target: SCNA; (-) strand; PAM type: NNGRRT; PAM sequence: GTGGAT
ttcggaggccaccagattgg

SEQ ID NO: 7695 - DNA, 20 bp, Artificial Sequence
  Description of Artificial Sequence: Synthetic oligonucleotide
  Target: SCNA; (-) strand; PAM type: NNGRRT; PAM sequence: TTGGGT
gtccttcggaggccaccaga

SEQ ID NO: 7696 - DNA, 20 bp, Artificial Sequence
  Description of Artificial Sequence: Synthetic oligonucleotide
  Target: SCNA; (-) strand; PAM type: NNGRRT; PAM sequence: GTGGAT
aacttcatctctataggaga

SEQ ID NO: 7697 - DNA, 20 bp, Artificial Sequence
  Description of Artificial Sequence: Synthetic oligonucleotide
  Target: SCNA; (-) strand; PAM type: NNGRRT; PAM sequence: GAGAGT
agttaacttcatctctatag

SEQ ID NO: 7698 - DNA, 20 bp, Artificial Sequence
  Description of Artificial Sequence: Synthetic oligonucleotide
  Target: SCNA; (-) strand; PAM type: NNGRRT; PAM sequence: GGGAGT
ggacaggtgatagttgtcta

SEQ ID NO: 7699 - DNA, 20 bp, Artificial Sequence
  Description of Artificial Sequence: Synthetic oligonucleotide
  Target: SCNA; (-) strand; PAM type: NNGRRT; PAM sequence: GGGGAT
tgtatgtcaagtggaggggt

SEQ ID NO: 7700 - DNA, 20 bp, Artificial Sequence
  Description of Artificial Sequence: Synthetic oligonucleotide
  Target: SCNA; (-) strand; PAM type: NNGRRT; PAM sequence: AGGGGT
tgggtttgtatgtcaagtgg

SEQ ID NO: 7701 - DNA, 20 bp, Artificial Sequence
  Description of Artificial Sequence: Synthetic oligonucleotide
  Target: SCNA; (-) strand; PAM type: NNGRRT; PAM sequence: TTGGGT
acaaatgttaattaatctct

SEQ ID NO: 7702 - DNA, 20 bp, Artificial Sequence
  Description of Artificial Sequence: Synthetic oligonucleotide
  Target: SCNA; (-) strand; PAM type: NNGRRT; PAM sequence: TCGGAT
cacgaaggaatattccaata

SEQ ID NO: 7703 - DNA, 20 bp, Artificial Sequence
  Description of Artificial Sequence: Synthetic oligonucleotide
  Target: SCNA; (-) strand; PAM type: NNGRRT; PAM sequence: AGGAAT
agttttatatttattcacga

SEQ ID NO: 7704 - DNA, 20 bp, Artificial Sequence
  Description of Artificial Sequence: Synthetic oligonucleotide
  Target: SCNA; (-) strand; PAM type: NNGRRT; PAM sequence: GAGGGT
tagcatgaaaactatttgtt

SEQ ID NO: 7705 - DNA, 20 bp, Artificial Sequence
  Description of Artificial Sequence: Synthetic oligonucleotide
  Target: SCNA; (-) strand; PAM type: NNGRRT; PAM sequence: AAGAAT
atttatactacagttaaaaa

SEQ ID NO: 7706 - DNA, 20 bp, Artificial Sequence
  Description of Artificial Sequence: Synthetic oligonucleotide
  Target: SCNA; (-) strand; PAM type: NNGRRT; PAM sequence: TAGAAT
aaattgtgaagtgtctatct

SEQ ID NO: 7707 - DNA, 20 bp, Artificial Sequence
  Description of Artificial Sequence: Synthetic oligonucleotide
  Target: SCNA; (-) strand; PAM type: NNGRRT; PAM sequence: TTGAAT
tcttcaagaaacaaggagtc

SEQ ID NO: 7708 - DNA, 20 bp, Artificial Sequence
  Description of Artificial Sequence: Synthetic oligonucleotide
  Target: SCNA; (-) strand; PAM type: NNGRRT; PAM sequence: AGGAGT
atagatgtcttcaagaaaca

SEQ ID NO: 7709 - DNA, 20 bp, Artificial Sequence
  Description of Artificial Sequence: Synthetic oligonucleotide
  Target: SCNA; (-) strand; PAM type: NNGRRT; PAM sequence: CGGAAT
tgaatgtggaatctgctaat

SEQ ID NO: 7710 - DNA, 20 bp, Artificial Sequence
  Description of Artificial Sequence: Synthetic oligonucleotide
  Target: SCNA; (-) strand; PAM type: NNGRRT; PAM sequence: TGGAAT
tcatggctcaaaagtgaatg

SEQ ID NO: 7711 - DNA, 20 bp, Artificial Sequence
  Description of Artificial Sequence: Synthetic oligonucleotide
  Target: SCNA; (-) strand; PAM type: NNGRRT; PAM sequence: GTGAAT
ttctaagtcatggctcaaaa

SEQ ID NO: 7712 - DNA, 20 bp, Artificial Sequence
  Description of Artificial Sequence: Synthetic oligonucleotide
  Target: SCNA; (-) strand; PAM type: NNGRRT; PAM sequence: TGGAAT
catgcacatttttattttcc

SEQ ID NO: 7713 - DNA, 20 bp, Artificial Sequence
  Description of Artificial Sequence: Synthetic oligonucleotide
  Target: SCNA; (-) strand; PAM type: NNGRRT; PAM sequence: TTGAGT
gggaaacatctgaataccta

SEQ ID NO: 7714 - DNA, 20 bp, Artificial Sequence
  Description of Artificial Sequence: Synthetic oligonucleotide
  Target: SCNA; (-) strand; PAM type: NNGRRT; PAM sequence: CTGAAT
aacttactaatgggaaacat

SEQ ID NO: 7715 - DNA, 20 bp, Artificial Sequence
  Description of Artificial Sequence: Synthetic oligonucleotide
  Target: SCNA; (-) strand; PAM type: NNGRRT; PAM sequence: GGGAAT
acaaatcttgaagtttattg

SEQ ID NO: 7716 - DNA, 20 bp, Artificial Sequence
  Description of Artificial Sequence: Synthetic oligonucleotide
  Target: SCNA; (-) strand; PAM type: NNGRRT; PAM sequence: GTGGGT
tttcaaattttaacataaat

SEQ ID NO: 7717 - DNA, 20 bp, Artificial Sequence
  Description of Artificial Sequence: Synthetic oligonucleotide
  Target: SCNA; (-) strand; PAM type: NNGRRT; PAM sequence: TTGGAT
tatagacttgtgggaagcca

SEQ ID NO: 7718 - DNA, 20 bp, Artificial Sequence
  Description of Artificial Sequence: Synthetic oligonucleotide
  Target: SCNA; (-) strand; PAM type: NNGRRT; PAM sequence: ATGAAT
tcctgattagctagaatatg

SEQ ID NO: 7719 - DNA, 20 bp, Artificial Sequence
  Description of Artificial Sequence: Synthetic oligonucleotide
  Target: SCNA; (-) strand; PAM type: NNGRRT; PAM sequence: TAGAAT
ataaaagagtcctgattagc

SEQ ID NO: 7720 - DNA, 20 bp, Artificial Sequence
  Description of Artificial Sequence: Synthetic oligonucleotide
  Target: SCNA; (-) strand; PAM type: NNGRRT; PAM sequence: AAGAGT
tagcatattttatgacataa

SEQ ID NO: 7721 - DNA, 20 bp, Artificial Sequence
  Description of Artificial Sequence: Synthetic oligonucleotide
  Target: SCNA; (-) strand; PAM type: NNGRRT; PAM sequence: AAGGGT
aactcgtatatgaaggcttt

SEQ ID NO: 7722 - DNA, 20 bp, Artificial Sequence
  Description of Artificial Sequence: Synthetic oligonucleotide
  Target: SCNA; (-) strand; PAM type: NNGRRT; PAM sequence: GGGAAT
tgatgagagagagaatgttc

SEQ ID NO: 7723 - DNA, 20 bp, Artificial Sequence
  Description of Artificial Sequence: Synthetic oligonucleotide
  Target: SCNA; (-) strand; PAM type: NNGRRT; PAM sequence: GAGAAT
tccagctgtgtgatgagaga

SEQ ID NO: 7724 - DNA, 20 bp, Artificial Sequence
  Description of Artificial Sequence: Synthetic oligonucleotide
  Target: SCNA; (-) strand; PAM type: NNGRRT; PAM sequence: AAGGGT
aattgagatcaggagggtga

SEQ ID NO: 7725 - DNA, 20 bp, Artificial Sequence
  Description of Artificial Sequence: Synthetic oligonucleotide
  Target: SCNA; (-) strand; PAM type: NNGRRT; PAM sequence: GAGGGT
cacatttcaattgagatcag

SEQ ID NO: 7726 - DNA, 20 bp, Artificial Sequence
  Description of Artificial Sequence: Synthetic oligonucleotide
  Target: SCNA; (-) strand; PAM type: NNGRRT; PAM sequence: TTGGGT
aaagaaaatccattagccat

SEQ ID NO: 7727 - DNA, 20 bp, Artificial Sequence
  Description of Artificial Sequence: Synthetic oligonucleotide
  Target: SCNA; (-) strand; PAM type: NNGRRT; PAM sequence: GTGGAT
gttactgcagtgctctctct

SEQ ID NO: 7728 - DNA, 20 bp, Artificial Sequence
  Description of Artificial Sequence: Synthetic oligonucleotide
  Target: SCNA; (-) strand; PAM type: NNGRRT; PAM sequence: AGGAAT
tgctttaaaattactaaggg

SEQ ID NO: 7729 - DNA, 20 bp, Artificial Sequence
  Description of Artificial Sequence: Synthetic oligonucleotide
  Target: SCNA; (-) strand; PAM type: NNGRRT; PAM sequence: AAGGGT
agtgatttattggcatctcc

SEQ ID NO: 7730 - DNA, 20 bp, Artificial Sequence
  Description of Artificial Sequence: Synthetic oligonucleotide
  Target: SCNA; (-) strand; PAM type: NNGRRT; PAM sequence: GAGGAT
tatttcagacctgacagccc

SEQ ID NO: 7731 - DNA, 20 bp, Artificial Sequence
  Description of Artificial Sequence: Synthetic oligonucleotide
  Target: SCNA; (-) strand; PAM type: NNGRRT; PAM sequence: ATGGAT
ttatctgttttggcatagag

SEQ ID NO: 7732 - DNA, 20 bp, Artificial Sequence
  Description of Artificial Sequence: Synthetic oligonucleotide
  Target: SCNA; (-) strand; PAM type: NNGRRT; PAM sequence: CTGGAT
tttgtgactttggataattc

SEQ ID NO: 7733 - DNA, 20 bp, Artificial Sequence
  Description of Artificial Sequence: Synthetic oligonucleotide
  Target: SCNA; (-) strand; PAM type: NNGRRT; PAM sequence: TTGGAT
actgacactgatttgtgact

SEQ ID NO: 7734 - DNA, 20 bp, Artificial Sequence
  Description of Artificial Sequence: Synthetic oligonucleotide
  Target: SCNA; (-) strand; PAM type: NNGRRT; PAM sequence: GTGAGT
aagggaaaagcactacgtgg

SEQ ID NO: 7735 - DNA, 20 bp, Artificial Sequence
  Description of Artificial Sequence: Synthetic oligonucleotide
  Target: SCNA; (-) strand; PAM type: NNGRRT; PAM sequence: GTGGGT
gaggaagggaaaagcactac

SEQ ID NO: 7736 - DNA, 20 bp, Artificial Sequence
  Description of Artificial Sequence: Synthetic oligonucleotide
  Target: SCNA; (-) strand; PAM type: NNGRRT; PAM sequence: CGGAGT
tgcttagatgtatgagtcat

SEQ ID NO: 7737 - DNA, 20 bp, Artificial Sequence
  Description of Artificial Sequence: Synthetic oligonucleotide
  Target: SCNA; (-) strand; PAM type: NNGRRT; PAM sequence: ATGAGT
taaatgaaatgcttagatgt

SEQ ID NO: 7738 - DNA, 20 bp, Artificial Sequence
  Description of Artificial Sequence: Synthetic oligonucleotide
  Target: SCNA; (-) strand; PAM type: NNGRRT; PAM sequence: TGGAAT
attcatattgccaaatcagt

SEQ ID NO: 7739 - DNA, 20 bp, Artificial Sequence
  Description of Artificial Sequence: Synthetic oligonucleotide
  Target: SCNA; (-) strand; PAM type: NNGRRT; PAM sequence: CCGGAT
ttatttgctttaacttattt

SEQ ID NO: 7740 - DNA, 20 bp, Artificial Sequence
  Description of Artificial Sequence: Synthetic oligonucleotide
  Target: SCNA; (-) strand; PAM type: NNGRRT; PAM sequence: AGGAAT
taaaaatcctaatcatgttc

SEQ ID NO: 7741 - DNA, 20 bp, Artificial Sequence
  Description of Artificial Sequence: Synthetic oligonucleotide
  Target: SCNA; (-) strand; PAM type: NNGRRT; PAM sequence: GTGAAT
ttgacattttgattctgtga

SEQ ID NO: 7742 - DNA, 20 bp, Artificial Sequence
  Description of Artificial Sequence: Synthetic oligonucleotide
  Target: SCNA; (-) strand; PAM type: NNGRRT; PAM sequence: GTGAGT
agccttgacattttgattct

SEQ ID NO: 7743 - DNA, 20 bp, Artificial Sequence
  Description of Artificial Sequence: Synthetic oligonucleotide
  Target: SCNA; (-) strand; PAM type: NNGRRT; PAM sequence: TGGAAT
aaatattttaatggtttcgt

SEQ ID NO: 7744 - DNA, 20 bp, Artificial Sequence
  Description of Artificial Sequence: Synthetic oligonucleotide
  Target: SCNA; (-) strand; PAM type: NNGRRT; PAM sequence: GAGAGT
tacacaatatggccacacaa

SEQ ID NO: 7745 - DNA, 20 bp, Artificial Sequence
  Description of Artificial Sequence: Synthetic oligonucleotide
  Target: SCNA; (-) strand; PAM type: NNGRRT; PAM sequence: CTGAAT
attggagtctaaatggatga

SEQ ID NO: 7746 - DNA, 20 bp, Artificial Sequence
  Description of Artificial Sequence: Synthetic oligonucleotide
  Target: SCNA; (-) strand; PAM type: NNGRRT; PAM sequence: ATGGAT
gagctccaattggagtctaa

SEQ ID NO: 7747 - DNA, 20 bp, Artificial Sequence
  Description of Artificial Sequence: Synthetic oligonucleotide
  Target: SCNA; (-) strand; PAM type: NNGRRT; PAM sequence: TGGAGT
gaagttgcctgagctccaat

SEQ ID NO: 7748 - DNA, 20 bp, Artificial Sequence
  Description of Artificial Sequence: Synthetic oligonucleotide
  Target: SCNA; (-) strand; PAM type: NNGRRT; PAM sequence: ATGAAT
gaaacgttcaagattttcca

SEQ ID NO: 7749 - DNA, 20 bp, Artificial Sequence
  Description of Artificial Sequence: Synthetic oligonucleotide
  Target: SCNA; (-) strand; PAM type: NNGRRT; PAM sequence: GGGGGT
tatacttaatggagttttgg

SEQ ID NO: 7750 - DNA, 20 bp, Artificial Sequence
  Description of Artificial Sequence: Synthetic oligonucleotide
  Target: SCNA; (-) strand; PAM type: NNGRRT; PAM sequence: TGGAGT
ggtcatatagatatacttaa

SEQ ID NO: 7751 - DNA, 20 bp, Artificial Sequence
  Description of Artificial Sequence: Synthetic oligonucleotide
  Target: SCNA; (-) strand; PAM type: NNGRRT; PAM sequence: GAGAAT
aagtctcacaaagcatttag

SEQ ID NO: 7752 - DNA, 20 bp, Artificial Sequence
  Description of Artificial Sequence: Synthetic oligonucleotide
  Target: SCNA; (-) strand; PAM type: NNGRRT; PAM sequence: AGGAGT
ctttactgcccccctttgtc

SEQ ID NO: 7753 - DNA, 20 bp, Artificial Sequence
  Description of Artificial Sequence: Synthetic oligonucleotide
  Target: SCNA; (-) strand; PAM type: NNGRRT; PAM sequence: GGGAAT
catttactgtttagaaaata

SEQ ID NO: 7754 - DNA, 20 bp, Artificial Sequence
  Description of Artificial Sequence: Synthetic oligonucleotide
  Target: SCNA; (-) strand; PAM type: NNGRRT; PAM sequence: GGGGGT
ttgaaaatattaaattaaaa

SEQ ID NO: 7755 - DNA, 20 bp, Artificial Sequence
  Description of Artificial Sequence: Synthetic oligonucleotide
  Target: SCNA; (-) strand; PAM type: NNGRRT; PAM sequence: TTGAGT
gcaataacattcatttagaa

SEQ ID NO: 7756 - DNA, 20 bp, Artificial Sequence
  Description of Artificial Sequence: Synthetic oligonucleotide
  Target: SCNA; (-) strand; PAM type: NNGRRT; PAM sequence: TAGAAT
ggtttgcaataacattcatt

SEQ ID NO: 7757 - DNA, 20 bp, Artificial Sequence
  Description of Artificial Sequence: Synthetic oligonucleotide
  Target: SCNA; (-) strand; PAM type: NNGRRT; PAM sequence: AAGAAT
tactggggaggctgaggcag

SEQ ID NO: 7758 - DNA, 20 bp, Artificial Sequence
  Description of Artificial Sequence: Synthetic oligonucleotide
  Target: SCNA; (-) strand; PAM type: NNGRRT; PAM sequence: GGGAGT
cgggtggatcacctgaggtc

SEQ ID NO: 7759 - DNA, 20 bp, Artificial Sequence
  Description of Artificial Sequence: Synthetic oligonucleotide
  Target: SCNA; (-) strand; PAM type: NNGRRT; PAM sequence: GTGGAT
actttgggaggccaaggcgg

SEQ ID NO: 7760 - DNA, 20 bp, Artificial Sequence
  Description of Artificial Sequence: Synthetic oligonucleotide
  Target: SCNA; (-) strand; PAM type: NNGRRT; PAM sequence: GCGGGT
cagcactttgggaggccaag

SEQ ID NO: 7761 - DNA, 20 bp, Artificial Sequence
  Description of Artificial Sequence: Synthetic oligonucleotide
  Target: SCNA; (-) strand; PAM type: NNGRRT; PAM sequence: GGGAAT
ataaaatttgtcaaacgggg

SEQ ID NO: 7762 - DNA, 20 bp, Artificial Sequence
  Description of Artificial Sequence: Synthetic oligonucleotide
  Target: SCNA; (-) strand; PAM type: NNGRRT; PAM sequence: TTGAAT
aggatgacagtagctattag

SEQ ID NO: 7763 - DNA, 20 bp, Artificial Sequence
  Description of Artificial Sequence: Synthetic oligonucleotide
  Target: SCNA; (-) strand; PAM type: NNGRRT; PAM sequence: AAGGAT
ttgagttgttaataacctct

SEQ ID NO: 7764 - DNA, 20 bp, Artificial Sequence
  Description of Artificial Sequence: Synthetic oligonucleotide
  Target: SCNA; (-) strand; PAM type: NNGRRT; PAM sequence: TTGAGT
gttggatgtaattcactact

SEQ ID NO: 7765 - DNA, 20 bp, Artificial Sequence
  Description of Artificial Sequence: Synthetic oligonucleotide
  Target: SCNA; (-) strand; PAM type: NNGRRT; PAM sequence: TTGGAT
tatacaaaagcaccctttag

SEQ ID NO: 7766 - DNA, 20 bp, Artificial Sequence
  Description of Artificial Sequence: Synthetic oligonucleotide
  Target: SCNA; (-) strand; PAM type: NNGRRT; PAM sequence: AAGAAT
tggtgcctaaaagatatttg

SEQ ID NO: 7767 - DNA, 20 bp, Artificial Sequence
  Description of Artificial Sequence: Synthetic oligonucleotide
  Target: SCNA; (-) strand; PAM type: NNGRRT; PAM sequence: TTGAAT
gtactatataccttctttta

SEQ ID NO: 7768 - DNA, 20 bp, Artificial Sequence
  Description of Artificial Sequence: Synthetic oligonucleotide
  Target: SCNA; (-) strand; PAM type: NNGRRT; PAM sequence: GAGAAT
aatttatgtgctttgggctt

SEQ ID NO: 7769 - DNA, 20 bp, Artificial Sequence
  Description of Artificial Sequence: Synthetic oligonucleotide
  Target: SCNA; (-) strand; PAM type: NNGRRT; PAM sequence: CAGAAT
agaatttttataaaccattt

SEQ ID NO: 7770 - DNA, 20 bp, Artificial Sequence
  Description of Artificial Sequence: Synthetic oligonucleotide
  Target: SCNA; (-) strand; PAM type: NNGRRT; PAM sequence: TAGAAT
tcatgaatttcttatagtca

SEQ ID NO: 7771 - DNA, 20 bp, Artificial Sequence
  Description of Artificial Sequence: Synthetic oligonucleotide
  Target: SCNA; (-) strand; PAM type: NNGRRT; PAM sequence: ATGAAT
cctgatatattgcattcctc

SEQ ID NO: 7772 - DNA, 20 bp, Artificial Sequence
  Description of Artificial Sequence: Synthetic oligonucleotide
  Target: SCNA; (-) strand; PAM type: NNGRRT; PAM sequence: GTGAAT
tcaaatcaaagctgtcagct

SEQ ID NO: 7773 - DNA, 20 bp, Artificial Sequence
  Description of Artificial Sequence: Synthetic oligonucleotide
  Target: SCNA; (-) strand; PAM type: NNGRRT; PAM sequence: TAGAAT
agctccaacaagcttttggt

SEQ ID NO: 7774 - DNA, 20 bp, Artificial Sequence
  Description of Artificial Sequence: Synthetic oligonucleotide
  Target: SCNA; (-) strand; PAM type: NNGRRT; PAM sequence: TTGAAT
ccattcctcccatgaacatc

SEQ ID NO: 7775 - DNA, 20 bp, Artificial Sequence
  Description of Artificial Sequence: Synthetic oligonucleotide
  Target: SCNA; (-) strand; PAM type: NNGRRT; PAM sequence: CAGAGT
tcatctgctagtcacattgg

SEQ ID NO: 7776 - DNA, 20 bp, Artificial Sequence
  Description of Artificial Sequence: Synthetic oligonucleotide
  Target: SCNA; (-) strand; PAM type: NNGRRT; PAM sequence: ATGAAT
tcgagtccctgaagatttat

SEQ ID NO: 7777 - DNA, 20 bp, Artificial Sequence
  Description of Artificial Sequence: Synthetic oligonucleotide
  Target: SCNA; (-) strand; PAM type: NNGRRT; PAM sequence: TCGAGT
tctgtcacacttgagagaat

SEQ ID NO: 7778 - DNA, 20 bp, Artificial Sequence
  Description of Artificial Sequence: Synthetic oligonucleotide
  Target: SCNA; (-) strand; PAM type: NNGRRT; PAM sequence: GAGAAT
gagtattctgtcacacttga

SEQ ID NO: 7779 - DNA, 20 bp, Artificial Sequence
  Description of Artificial Sequence: Synthetic oligonucleotide
  Target: SCNA; (-) strand; PAM type: NNGRRT; PAM sequence: AGGAGT
caggagcgctggcagttgag

SEQ ID NO: 7780 - DNA, 20 bp, Artificial Sequence
  Description of Artificial Sequence: Synthetic oligonucleotide
  Target: SCNA; (-) strand; PAM type: NNGRRT; PAM sequence: AGGAGT
tcaggtagacaaaatttaaa

SEQ ID NO: 7781 - DNA, 20 bp, Artificial Sequence
  Description of Artificial Sequence: Synthetic oligonucleotide
  Target: SCNA; (-) strand; PAM type: NNGRRT; PAM sequence: TAGAGT
ttttaaagatcattcttaga

SEQ ID NO: 7782 - DNA, 20 bp, Artificial Sequence
  Description of Artificial Sequence: Synthetic oligonucleotide
  Target: SCNA; (-) strand; PAM type: NNGRRT; PAM sequence: CTGAAT
tagatatctctctcataatc

SEQ ID NO: 7783 - DNA, 20 bp, Artificial Sequence
  Description of Artificial Sequence: Synthetic oligonucleotide
  Target: SCNA; (-) strand; PAM type: NNGRRT; PAM sequence: TTGAAT
taatggtgtacagaacagca

SEQ ID NO: 7784 - DNA, 20 bp, Artificial Sequence
  Description of Artificial Sequence: Synthetic oligonucleotide
  Target: SCNA; (-) strand; PAM type: NNGRRT; PAM sequence: TTGGAT
gctatgtaatagtctctttc

SEQ ID NO: 7785 - DNA, 20 bp, Artificial Sequence
  Description of Artificial Sequence: Synthetic oligonucleotide
  Target: SCNA; (-) strand; PAM type: NNGRRT; PAM sequence: TTGGGT
tcaattgtgctgaatccata

SEQ ID NO: 7786 - DNA, 20 bp, Artificial Sequence
  Description of Artificial Sequence: Synthetic oligonucleotide
  Target: SCNA; (-) strand; PAM type: NNGRRT; PAM sequence: CTGAAT
acatgtattgctcaattgtg

SEQ ID NO: 7787 - DNA, 20 bp, Artificial Sequence
  Description of Artificial Sequence: Synthetic oligonucleotide
  Target: SCNA; (-) strand; PAM type: NNGRRT; PAM sequence: GAGAAT
gtgatgggaaggaattgagg

SEQ ID NO: 7788 - DNA, 20 bp, Artificial Sequence
  Description of Artificial Sequence: Synthetic oligonucleotide
  Target: SCNA; (-) strand; PAM type: NNGRRT; PAM sequence: AGGAAT
aaacaaattaggtgatggga

SEQ ID NO: 7789 - DNA, 20 bp, Artificial Sequence
  Description of Artificial Sequence: Synthetic oligonucleotide
  Target: SCNA; (-) strand; PAM type: NNGRRT; PAM sequence: CAGAGT
aatggcatgaacccaggagg

SEQ ID NO: 7790 - DNA, 20 bp, Artificial Sequence
  Description of Artificial Sequence: Synthetic oligonucleotide
  Target: SCNA; (-) strand; PAM type: NNGRRT; PAM sequence: GAGAAT
tactcgggaggctgaggcag

SEQ ID NO: 7791 - DNA, 20 bp, Artificial Sequence
  Description of Artificial Sequence: Synthetic oligonucleotide
  Target: SCNA; (-) strand; PAM type: NNGRRT; PAM sequence: CGGGAT
aattggcccagacgtggtgg

SEQ ID NO: 7792 - DNA, 20 bp, Artificial Sequence
  Description of Artificial Sequence: Synthetic oligonucleotide
  Target: SCNA; (-) strand; PAM type: NNGRRT; PAM sequence: AGGGAT
accaatgtgaaattgtactc

SEQ ID NO: 7793 - DNA, 20 bp, Artificial Sequence
  Description of Artificial Sequence: Synthetic oligonucleotide
  Target: SCNA; (-) strand; PAM type: NNGRRT; PAM sequence: AAGAAT
actactacctttctcggcaa

SEQ ID NO: 7794 - DNA, 20 bp, Artificial Sequence
  Description of Artificial Sequence: Synthetic oligonucleotide
  Target: SCNA; (-) strand; PAM type: NNGRRT; PAM sequence: GTGAAT
gattccatatcgtggctatt

SEQ ID NO: 7795 - DNA, 20 bp, Artificial Sequence
  Description of Artificial Sequence: Synthetic oligonucleotide
  Target: SCNA; (-) strand; PAM type: NNGRRT; PAM sequence: ACGAAT
ctaggtaaagtgttatgagg

SEQ ID NO: 7796 - DNA, 20 bp, Artificial Sequence
  Description of Artificial Sequence: Synthetic oligonucleotide
  Target: SCNA; (-) strand; PAM type: NNGRRT; PAM sequence: GGGGGT
ttgaccttacgatagtgact

SEQ ID NO: 7797 - DNA, 20 bp, Artificial Sequence
  Description of Artificial Sequence: Synthetic oligonucleotide
  Target: SCNA; (-) strand; PAM type: NNGRRT; PAM sequence: AGGAAT
gaatggtatgtaaatacagt

SEQ ID NO: 7798 - DNA, 20 bp, Artificial Sequence
  Description of Artificial Sequence: Synthetic oligonucleotide
  Target: SCNA; (-) strand; PAM type: NNGRRT; PAM sequence: ATGAAT
ttggaagagctctcttagga

SEQ ID NO: 7799 - DNA, 20 bp, Artificial Sequence
  Description of Artificial Sequence: Synthetic oligonucleotide
  Target: SCNA; (-) strand; PAM type: NNGRRT; PAM sequence: AGGAAT
ttttttggaagagctctctt

SEQ ID NO: 7800 - DNA, 20 bp, Artificial Sequence
  Description of Artificial Sequence: Synthetic oligonucleotide
  Target: SCNA; (-) strand; PAM type: NNGRRT; PAM sequence: TGGAGT
ctttgggcttgagaaagaaa

SEQ ID NO: 7801 - DNA, 20 bp, Artificial Sequence
  Description of Artificial Sequence: Synthetic oligonucleotide
  Target: SCNA; (-) strand; PAM type: NNGRRT; PAM sequence: TGGGAT
attgtagcagagaatgaatg

SEQ ID NO: 7802 - DNA, 20 bp, Artificial Sequence
  Description of Artificial Sequence: Synthetic oligonucleotide
  Target: SCNA; (-) strand; PAM type: NNGRRT; PAM sequence: ATGAAT
tcactttattgtagcagaga

SEQ ID NO: 7803 - DNA, 20 bp, Artificial Sequence
  Description of Artificial Sequence: Synthetic oligonucleotide
  Target: SCNA; (-) strand; PAM type: NNGRRT; PAM sequence: GAGAAT
tttgtcactttattgtagca

SEQ ID NO: 7804 - DNA, 20 bp, Artificial Sequence
  Description of Artificial Sequence: Synthetic oligonucleotide
  Target: SCNA; (-) strand; PAM type: NNGRRT; PAM sequence: ATGAAT
aattagatgtaacataaaat

SEQ ID NO: 7805 - DNA, 20 bp, Artificial Sequence
  Description of Artificial Sequence: Synthetic oligonucleotide
  Target: SCNA; (-) strand; PAM type: NNGRRT; PAM sequence: TAGGAT
tttgaaattctgatggtacc

SEQ ID NO: 7806 - DNA, 20 bp, Artificial Sequence
  Description of Artificial Sequence: Synthetic oligonucleotide
  Target: SCNA; (-) strand; PAM type: NNGRRT; PAM sequence: TAGGAT
aacagtagatatttcacatt

SEQ ID NO: 7807 - DNA, 20 bp, Artificial Sequence
  Description of Artificial Sequence: Synthetic oligonucleotide
  Target: SCNA; (-) strand; PAM type: NNGRRT; PAM sequence: AAGGGT
aaaaggtgtgaggaaagata

SEQ ID NO: 7808 - DNA, 20 bp, Artificial Sequence
  Description of Artificial Sequence: Synthetic oligonucleotide
  Target: SCNA; (-) strand; PAM type: NNGRRT; PAM sequence: TGGGAT
aggcagtgtgagttatcata

SEQ ID NO: 7809 - DNA, 20 bp, Artificial Sequence
  Description of Artificial Sequence: Synthetic oligonucleotide
  Target: SCNA; (-) strand; PAM type: NNGRRT; PAM sequence: GTGAGT
ttgtactgaagctaggcagt

SEQ ID NO: 7810 - DNA, 20 bp, Artificial Sequence
  Description of Artificial Sequence: Synthetic oligonucleotide
  Target: SCNA; (-) strand; PAM type: NNGRRT; PAM sequence: GTGAGT
cattcattaaacaaatgttt

SEQ ID NO: 7811 - DNA, 20 bp, Artificial Sequence
  Description of Artificial Sequence: Synthetic oligonucleotide
  Target: SCNA; (-) strand; PAM type: NNGRRT; PAM sequence: ATGAAT
tccaacactgcctttcttta

SEQ ID NO: 7812 - DNA, 20 bp, Artificial Sequence
  Description of Artificial Sequence: Synthetic oligonucleotide
  Target: SCNA; (-) strand; PAM type: NNGRRT; PAM sequence: CTGAGT
atgctagaaaaacatgatgt

SEQ ID NO: 7813 - DNA, 20 bp, Artificial Sequence
  Description of Artificial Sequence: Synthetic oligonucleotide
  Target: SCNA; (-) strand; PAM type: NNGRRT; PAM sequence: GAGAGT
tgttaaaactttaaatgttg

SEQ ID NO: 7814 - DNA, 20 bp, Artificial Sequence
  Description of Artificial Sequence: Synthetic oligonucleotide
  Target: SCNA; (-) strand; PAM type: NNGRRT; PAM sequence: CTGAAT
ctatatgaatttatgttgca

SEQ ID NO: 7815 - DNA, 20 bp, Artificial Sequence
  Description of Artificial Sequence: Synthetic oligonucleotide
  Target: SCNA; (-) strand; PAM type: NNGRRT; PAM sequence: ATGAAT
atttcttgtaggagtactat

SEQ ID NO: 7816 - DNA, 20 bp, Artificial Sequence
  Description of Artificial Sequence: Synthetic oligonucleotide
  Target: SCNA; (-) strand; PAM type: NNGRRT; PAM sequence: AGGAGT
tactcctatagatttcttgt

SEQ ID NO: 7817 - DNA, 20 bp, Artificial Sequence
  Description of Artificial Sequence: Synthetic oligonucleotide
  Target: SCNA; (-) strand; PAM type: NNGRRT; PAM sequence: TTGAAT
acacagtgggatgttaaagg

SEQ ID NO: 7818 - DNA, 20 bp, Artificial Sequence
  Description of Artificial Sequence: Synthetic oligonucleotide
  Target: SCNA; (-) strand; PAM type: NNGRRT; PAM sequence: TGGGAT
tcccatttgattttacacag

SEQ ID NO: 7819 - DNA, 20 bp, Artificial Sequence
  Description of Artificial Sequence: Synthetic oligonucleotide
  Target: SCNA; (-) strand; PAM type: NNGRRT; PAM sequence: AGGGGT
attatttagctaaagttaaa

SEQ ID NO: 7820 - DNA, 20 bp, Artificial Sequence
  Description of Artificial Sequence: Synthetic oligonucleotide
  Target: SCNA; (-) strand; PAM type: NNGRRT; PAM sequence: TGGGAT
ctattttcttttttcctcaa

SEQ ID NO: 7821 - DNA, 20 bp, Artificial Sequence
  Description of Artificial Sequence: Synthetic oligonucleotide
  Target: SCNA; (-) strand; PAM type: NNGRRT; PAM sequence: GGGAAT
gtcagtaaaactgaactaca

SEQ ID NO: 7822 - DNA, 20 bp, Artificial Sequence
  Description of Artificial Sequence: Synthetic oligonucleotide
  Target: SCNA; (-) strand; PAM type: NNGRRT; PAM sequence: GGGGGT
aaaaaggataaagcctacta

SEQ ID NO: 7823 - DNA, 20 bp, Artificial Sequence
  Description of Artificial Sequence: Synthetic oligonucleotide
  Target: SCNA; (-) strand; PAM type: NNGRRT; PAM sequence: AAGGAT
caaatctgagacaagtgaaa

SEQ ID NO: 7824 - DNA, 20 bp, Artificial Sequence
  Description of Artificial Sequence: Synthetic oligonucleotide
  Target: SCNA; (-) strand; PAM type: NNGRRT; PAM sequence: ATGAGT
aaattttcaacctaaaagaa

SEQ ID NO: 7825 - DNA, 20 bp, Artificial Sequence
  Description of Artificial Sequence: Synthetic oligonucleotide
  Target: SCNA; (-) strand; PAM type: NNGRRT; PAM sequence: GTGGGT
tcccaaaatgacaggcagcc

SEQ ID NO: 7826 - DNA, 20 bp, Artificial Sequence
  Description of Artificial Sequence: Synthetic oligonucleotide
  Target: SCNA; (-) strand; PAM type: NNGRRT; PAM sequence: AAGAAT
acataattcttatccctaaa

SEQ ID NO: 7827 - DNA, 20 bp, Artificial Sequence
  Description of Artificial Sequence: Synthetic oligonucleotide
  Target: SCNA; (-) strand; PAM type: NNGRRT; PAM sequence: GGGAAT
aaaatggaaatgagaaactg

SEQ ID NO: 7828 - DNA, 20 bp, Artificial Sequence
  Description of Artificial Sequence: Synthetic oligonucleotide
  Target: SCNA; (-) strand; PAM type: NNGRRT; PAM sequence: AAGAAT
tgtaaacctgcaataacaga

SEQ ID NO: 7829 - DNA, 20 bp, Artificial Sequence
  Description of Artificial Sequence: Synthetic oligonucleotide
  Target: SCNA; (-) strand; PAM type: NNGRRT; PAM sequence: AAGAAT
atgattgaagatagtgatac

SEQ ID NO: 7830 - DNA, 20 bp, Artificial Sequence
  Description of Artificial Sequence: Synthetic oligonucleotide
  Target: SCNA; (-) strand; PAM type: NNGRRT; PAM sequence: AAGAAT
aggtttgagaatgacctgga

SEQ ID NO: 7831 - DNA, 20 bp, Artificial Sequence
  Description of Artificial Sequence: Synthetic oligonucleotide
  Target: SCNA; (-) strand; PAM type: NNGRRT; PAM sequence: GAGAAT
tagctttgatatggaggttt

SEQ ID NO: 7832 - DNA, 20 bp, Artificial Sequence
  Description of Artificial Sequence: Synthetic oligonucleotide
  Target: SCNA; (-) strand; PAM type: NNGRRT; PAM sequence: GAGAAT
ctcaagttctcatgtgagat

SEQ ID NO: 7833 - DNA, 20 bp, Artificial Sequence
  Description of Artificial Sequence: Synthetic oligonucleotide
  Target: SCNA; (-) strand; PAM type: NNGRRT; PAM sequence: GTGGAT
tccaggggattttgtgtatg

SEQ ID NO: 7834 - DNA, 20 bp, Artificial Sequence
  Description of Artificial Sequence: Synthetic oligonucleotide
  Target: SCNA; (-) strand; PAM type: NNGRRT; PAM sequence: GGGGAT
tggagatattcttaagtcca

SEQ ID NO: 7835 - DNA, 20 bp, Artificial Sequence
  Description of Artificial Sequence: Synthetic oligonucleotide
  Target: SCNA; (-) strand; PAM type: NNGRRT; PAM sequence: CTGAGT
atgcagctgaggatgactgg

SEQ ID NO: 7836 - DNA, 20 bp, Artificial Sequence
  Description of Artificial Sequence: Synthetic oligonucleotide
  Target: SCNA; (-) strand; PAM type: NNGRRT; PAM sequence: GAGGAT
gttttgagactcatgcagct

SEQ ID NO: 7837 - DNA, 20 bp, Artificial Sequence
  Description of Artificial Sequence: Synthetic oligonucleotide
  Target: SCNA; (-) strand; PAM type: NNGRRT; PAM sequence: CTGGGT
gcacgtctgtgtccttactc

SEQ ID NO: 7838 - DNA, 20 bp, Artificial Sequence
  Description of Artificial Sequence: Synthetic oligonucleotide
  Target: SCNA; (-) strand; PAM type: NNGRRT; PAM sequence: TAGAGT
tctgtctaagagagcttttc

SEQ ID NO: 7839 - DNA, 20 bp, Artificial Sequence
  Description of Artificial Sequence: Synthetic oligonucleotide
  Target: SCNA; (-) strand; PAM type: NNGRRT; PAM sequence: TGGAAT
tacctctgaaagctgcagaa

SEQ ID NO: 7840 - DNA, 20 bp, Artificial Sequence
  Description of Artificial Sequence: Synthetic oligonucleotide
  Target: SCNA; (-) strand; PAM type: NNGRRT; PAM sequence: CAGAAT
tgtattacctctgaaagctg

SEQ ID NO: 7841 - DNA, 20 bp, Artificial Sequence
  Description of Artificial Sequence: Synthetic oligonucleotide
  Target: SCNA; (-) strand; PAM type: NNGRRT; PAM sequence: TTGGAT
ccataagcccactatgagta

SEQ ID NO: 7842 - DNA, 20 bp, Artificial Sequence
  Description of Artificial Sequence: Synthetic oligonucleotide
  Target: SCNA; (-) strand; PAM type: NNGRRT; PAM sequence: ATGAGT
gggtacaccataagcccact

SEQ ID NO: 7843 - DNA, 20 bp, Artificial Sequence
  Description of Artificial Sequence: Synthetic oligonucleotide
  Target: SCNA; (-) strand; PAM type: NNGRRT; PAM sequence: CCGGGT
gtagaatgtttggaaaagtg

SEQ ID NO: 7844 - DNA, 20 bp, Artificial Sequence
  Description of Artificial Sequence: Synthetic oligonucleotide
  Target: SCNA; (-) strand; PAM type: NNGRRT; PAM sequence: TAGAAT
attaaagaagctataacaag

SEQ ID NO: 7845 - DNA, 20 bp, Artificial Sequence
  Description of Artificial Sequence: Synthetic oligonucleotide
  Target: SCNA; (-) strand; PAM type: NNGRRT; PAM sequence: AAGAAT
tctcccaaatggagaatgat

SEQ ID NO: 7846 - DNA, 20 bp, Artificial Sequence
  Description of Artificial Sequence: Synthetic oligonucleotide
  Target: SCNA; (-) strand; PAM type: NNGRRT; PAM sequence: GAGAAT
tctctcaaatctcccaaatg

SEQ ID NO: 7847 - DNA, 20 bp, Artificial Sequence
  Description of Artificial Sequence: Synthetic oligonucleotide
  Target: SCNA; (-) strand; PAM type: NNGRRT; PAM sequence: CAGGGT
acacattaaaacaatagtct

SEQ ID NO: 7848 - DNA, 20 bp, Artificial Sequence
  Description of Artificial Sequence: Synthetic oligonucleotide
  Target: SCNA; (-) strand; PAM type: NNGRRT; PAM sequence: TAGAGT
tgtcctataactacttaaaa

SEQ ID NO: 7849 - DNA, 20 bp, Artificial Sequence
  Description of Artificial Sequence: Synthetic oligonucleotide
  Target: SCNA; (-) strand; PAM type: NNGRRT; PAM sequence: CTGAAT
tacccataggcctttggtgt

SEQ ID NO: 7850 - DNA, 20 bp, Artificial Sequence
  Description of Artificial Sequence: Synthetic oligonucleotide
  Target: SCNA; (-) strand; PAM type: NNGRRT; PAM sequence: TCGGAT
aatatccaataataagatat

SEQ ID NO: 7851 - DNA, 20 bp, Artificial Sequence
  Description of Artificial Sequence: Synthetic oligonucleotide
  Target: SCNA; (-) strand; PAM type: NNGRRT; PAM sequence: TCGAAT
tattctgatatgttcttgaa

SEQ ID NO: 7852 - DNA, 20 bp, Artificial Sequence
  Description of Artificial Sequence: Synthetic oligonucleotide
  Target: SCNA; (-) strand; PAM type: NNGRRT; PAM sequence: TTGAAT
attactattctgatatgttc

SEQ ID NO: 7853 - DNA, 20 bp, Artificial Sequence
  Description of Artificial Sequence: Synthetic oligonucleotide
  Target: SCNA; (-) strand; PAM type: NNGRRT; PAM sequence: CTGAAT
ttgcccttcaatctcagcca

SEQ ID NO: 7854 - DNA, 20 bp, Artificial Sequence
  Description of Artificial Sequence: Synthetic oligonucleotide
  Target: SCNA; (-) strand; PAM type: NNGRRT; PAM sequence: GAGGAT
tagggtaaaggaaagctttg

SEQ ID NO: 7855 - DNA, 20 bp, Artificial Sequence
  Description of Artificial Sequence: Synthetic oligonucleotide
  Target: SCNA; (-) strand; PAM type: NNGRRT; PAM sequence: TAGGGT
ttaaaaaagatgtaacaaga

SEQ ID NO: 7856 - DNA, 20 bp, Artificial Sequence
  Description of Artificial Sequence: Synthetic oligonucleotide
  Target: SCNA; (-) strand; PAM type: NNGRRT; PAM sequence: AAGAAT
tgtttgctgaggagttgaat

SEQ ID NO: 7857 - DNA, 20 bp, Artificial Sequence
  Description of Artificial Sequence: Synthetic oligonucleotide
  Target: SCNA; (-) strand; PAM type: NNGRRT; PAM sequence: TTGAAT
agaagatgtttgctgaggag

SEQ ID NO: 7858 - DNA, 20 bp, Artificial Sequence
  Description of Artificial Sequence: Synthetic oligonucleotide
  Target: SCNA; (-) strand; PAM type: NNGRRT; PAM sequence: AGGAGT
cacatagaagatgtttgctg

SEQ ID NO: 7859 - DNA, 20 bp, Artificial Sequence
  Description of Artificial Sequence: Synthetic oligonucleotide
  Target: SCNA; (-) strand; PAM type: NNGRRT; PAM sequence: CAGAAT
cctgcatctccagcacctct

SEQ ID NO: 7860 - DNA, 20 bp, Artificial Sequence
  Description of Artificial Sequence: Synthetic oligonucleotide
  Target: SCNA; (-) strand; PAM type: NNGRRT; PAM sequence: CTGAAT
tgcagacaacagctatgctg

SEQ ID NO: 7861 - DNA, 20 bp, Artificial Sequence
  Description of Artificial Sequence: Synthetic oligonucleotide
  Target: SCNA; (-) strand; PAM type: NNGRRT; PAM sequence: TTGGAT
ctctgtattatttccaaccc

SEQ ID NO: 7862 - DNA, 20 bp, Artificial Sequence
  Description of Artificial Sequence: Synthetic oligonucleotide
  Target: SCNA; (-) strand; PAM type: NNGRRT; PAM sequence: ATGAAT
gcaacaagagaactcttcaa

SEQ ID NO: 7863 - DNA, 20 bp, Artificial Sequence
  Description of Artificial Sequence: Synthetic oligonucleotide
  Target: SCNA; (-) strand; PAM type: NNGRRT; PAM sequence: GGGGAT
atcaatatcttcaagactaa

SEQ ID NO: 7864 - DNA, 20 bp, Artificial Sequence
  Description of Artificial Sequence: Synthetic oligonucleotide
  Target: SCNA; (-) strand; PAM type: NNGRRT; PAM sequence: GGGAAT
cacagagagtctgggaggca

SEQ ID NO: 7865 - DNA, 20 bp, Artificial Sequence
  Description of Artificial Sequence: Synthetic oligonucleotide
  Target: SCNA; (-) strand; PAM type: NNGRRT; PAM sequence: GAGAGT
ttatgcacatgaggctcaca

SEQ ID NO: 7866 - DNA, 20 bp, Artificial Sequence
  Description of Artificial Sequence: Synthetic oligonucleotide
  Target: SCNA; (-) strand; PAM type: NNGRRT; PAM sequence: AGGGGT
ccatttacttctttgacact

SEQ ID NO: 7867 - DNA, 20 bp, Artificial Sequence
  Description of Artificial Sequence: Synthetic oligonucleotide
  Target: SCNA; (-) strand; PAM type: NNGRRT; PAM sequence: AGGGGT
gctctgtgctcaccagcaga

SEQ ID NO: 7868 - DNA, 20 bp, Artificial Sequence
  Description of Artificial Sequence: Synthetic oligonucleotide
  Target: SCNA; (-) strand; PAM type: NNGRRT; PAM sequence: CTGGGT
ttgcaccactgcactccagc

SEQ ID NO: 7869 - DNA, 20 bp, Artificial Sequence
  Description of Artificial Sequence: Synthetic oligonucleotide
  Target: SCNA; (-) strand; PAM type: NNGRRT; PAM sequence: GAGAAT
tgctcgggaggctaaggcag

SEQ ID NO: 7870 - DNA, 20 bp, Artificial Sequence
  Description of Artificial Sequence: Synthetic oligonucleotide
  Target: SCNA; (-) strand; PAM type: NNGRRT; PAM sequence: AAGAAT
cttttttcagattttgttag

SEQ ID NO: 7871 - DNA, 20 bp, Artificial Sequence
  Description of Artificial Sequence: Synthetic oligonucleotide
  Target: SCNA; (-) strand; PAM type: NNGRRT; PAM sequence: AAGAAT
gccagttattcatggaggag

SEQ ID NO: 7872 - DNA, 20 bp, Artificial Sequence
  Description of Artificial Sequence: Synthetic oligonucleotide
  Target: SCNA; (-) strand; PAM type: NNGRRT; PAM sequence: CAGAAT
aacctaatatacaatagaaa

SEQ ID NO: 7873 - DNA, 20 bp, Artificial Sequence
  Description of Artificial Sequence: Synthetic oligonucleotide
  Target: SCNA; (-) strand; PAM type: NNGRRT; PAM sequence: TGGGGT
ttttgtattcttagtagaga

SEQ ID NO: 7874 - DNA, 20 bp, Artificial Sequence
  Description of Artificial Sequence: Synthetic oligonucleotide
  Target: SCNA; (-) strand; PAM type: NNGRRT; PAM sequence: TTGAGT
aattctcctgcctcagcctc

SEQ ID NO: 7875 - DNA, 20 bp, Artificial Sequence
  Description of Artificial Sequence: Synthetic oligonucleotide
  Target: SCNA; (-) strand; PAM type: NNGRRT; PAM sequence: CTGGGT
ctgcaacctacctctgcctc

SEQ ID NO: 7876 - DNA, 20 bp, Artificial Sequence
  Description of Artificial Sequence: Synthetic oligonucleotide
  Target: SCNA; (-) strand; PAM type: NNGRRT; PAM sequence: TGGAAT
tcttgctctattgcccaggc

SEQ ID NO: 7877 - DNA, 20 bp, Artificial Sequence
  Description of Artificial Sequence: Synthetic oligonucleotide
  Target: SCNA; (-) strand; PAM type: NNGRRT; PAM sequence: CAGAGT
taaactttctttttttgaga

SEQ ID NO: 7878 - DNA, 20 bp, Artificial Sequence
  Description of Artificial Sequence: Synthetic oligonucleotide
  Target: SCNA; (-) strand; PAM type: NNGRRT; PAM sequence: GTGAAT
gtctctgagcaaatattttt

SEQ ID NO: 7879 - DNA, 20 bp, Artificial Sequence
  Description of Artificial Sequence: Synthetic oligonucleotide
  Target: SCNA; (-) strand; PAM type: NNGRRT; PAM sequence: ATGAGT
gataaaaataaatcttgaag

SEQ ID NO: 7880 - DNA, 20 bp, Artificial Sequence
  Description of Artificial Sequence: Synthetic oligonucleotide
  Target: SCNA; (-) strand; PAM type: NNGRRT; PAM sequence: GGGAGT
tcaagtagatgtgggaaaaa

SEQ ID NO: 7881 - DNA, 20 bp, Artificial Sequence
  Description of Artificial Sequence: Synthetic oligonucleotide
  Target: SCNA; (-) strand; PAM type: NNGRRT; PAM sequence: GAGAAT
gacgcattttttaaacactg

SEQ ID NO: 7882 - DNA, 20 bp, Artificial Sequence
  Description of Artificial Sequence: Synthetic oligonucleotide
  Target: SCNA; (-) strand; PAM type: NNGRRT; PAM sequence: CAGAGT
aaatgctctggttctgacta

SEQ ID NO: 7883 - DNA, 20 bp, Artificial Sequence
  Description of Artificial Sequence: Synthetic oligonucleotide
  Target: SCNA; (-) strand; PAM type: NNGRRT; PAM sequence: CAGAAT
acagcaccaggcttgccctt

SEQ ID NO: 7884 - DNA, 20 bp, Artificial Sequence
  Description of Artificial Sequence: Synthetic oligonucleotide
  Target: SCNA; (-) strand; PAM type: NNGRRT; PAM sequence: GAGAGT
ctcaagcaatactgggctct

SEQ ID NO: 7885 - DNA, 20 bp, Artificial Sequence
  Description of Artificial Sequence: Synthetic oligonucleotide
  Target: SCNA; (-) strand; PAM type: NNGRRT; PAM sequence: TAGGAT
ttgatagcaataacttgaaa

SEQ ID NO: 7886 - DNA, 20 bp, Artificial Sequence
  Description of Artificial Sequence: Synthetic oligonucleotide
  Target: SCNA; (-) strand; PAM type: NNGRRT; PAM sequence: TGGGAT
tatggatttagtgtaagtct

SEQ ID NO: 7887 - DNA, 20 bp, Artificial Sequence
  Description of Artificial Sequence: Synthetic oligonucleotide
  Target: SCNA; (-) strand; PAM type: NNGRRT; PAM sequence: ATGGAT
taattcaggacagaaattgt

SEQ ID NO: 7888 - DNA, 20 bp, Artificial Sequence
  Description of Artificial Sequence: Synthetic oligonucleotide
  Target: SCNA; (-) strand; PAM type: NNGRRT; PAM sequence: TGGAGT
aacaaaatacttctctaact

SEQ ID NO: 7889 - DNA, 20 bp, Artificial Sequence
  Description of Artificial Sequence: Synthetic oligonucleotide
  Target: SCNA; (-) strand; PAM type: NNGRRT; PAM sequence: AAGAAT
acttccttttaatttttttt

SEQ ID NO: 7890 - DNA, 20 bp, Artificial Sequence
  Description of Artificial Sequence: Synthetic oligonucleotide
  Target: SCNA; (-) strand; PAM type: NNGRRT; PAM sequence: CTGAAT
gaaaccaaagaaagaaaaga

SEQ ID NO: 7891 - DNA, 20 bp, Artificial Sequence
  Description of Artificial Sequence: Synthetic oligonucleotide
  Target: SCNA; (-) strand; PAM type: NNGRRT; PAM sequence: ATGGAT
tgctgaagaaattcagctac

SEQ ID NO: 7892 - DNA, 20 bp, Artificial Sequence
  Description of Artificial Sequence: Synthetic oligonucleotide
  Target: SCNA; (-) strand; PAM type: NNGRRT; PAM sequence: GTGGAT
aagtgttcattgattcagag

SEQ ID NO: 7893 - DNA, 20 bp, Artificial Sequence
  Description of Artificial Sequence: Synthetic oligonucleotide
  Target: SCNA; (-) strand; PAM type: NNGRRT; PAM sequence: AAGGAT
ccacacagaaagtctgtctg

SEQ ID NO: 7894 - DNA, 20 bp, Artificial Sequence
  Description of Artificial Sequence: Synthetic oligonucleotide
  Target: SCNA; (-) strand; PAM type: NNGRRT; PAM sequence: GTGAAT
tgatgatttgtgaaaataga

SEQ ID NO: 7895 - DNA, 20 bp, Artificial Sequence
  Description of Artificial Sequence: Synthetic oligonucleotide
  Target: SCNA; (-) strand; PAM type: NNGRRT; PAM sequence: TAGAGT
gatttgatgatttgtgaaaa

SEQ ID NO: 7896 - DNA, 20 bp, Artificial Sequence
  Description of Artificial Sequence: Synthetic oligonucleotide
  Target: SCNA; (-) strand; PAM type: NNGRRT; PAM sequence: CTGAGT
taaaatttatttttaaatat

SEQ ID NO: 7897 - DNA, 20 bp, Artificial Sequence
  Description of Artificial Sequence: Synthetic oligonucleotide
  Target: SCNA; (-) strand; PAM type: NNGRRT; PAM sequence: ATGGAT
gtaactacgtgagatagaca

SEQ ID NO: 7898 - DNA, 20 bp, Artificial Sequence
  Description of Artificial Sequence: Synthetic oligonucleotide
  Target: SCNA; (-) strand; PAM type: NNGRRT; PAM sequence: GTGGGT
ctcttgccacaggggaaaaa

SEQ ID NO: 7899 - DNA, 20 bp, Artificial Sequence
  Description of Artificial Sequence: Synthetic oligonucleotide
  Target: SCNA; (-) strand; PAM type: NNGRRT; PAM sequence: TTGAGT
gtattcaggatttttgctaa

SEQ ID NO: 7900 - DNA, 20 bp, Artificial Sequence
  Description of Artificial Sequence: Synthetic oligonucleotide
  Target: SCNA; (-) strand; PAM type: NNGRRT; PAM sequence: CAGGAT
tagtaatagtgtattgtatt

SEQ ID NO: 7901 - DNA, 20 bp, Artificial Sequence
  Description of Artificial Sequence: Synthetic oligonucleotide
  Target: SCNA; (-) strand; PAM type: NNGRRT; PAM sequence: CAGGAT
ggaactaaaaagctgacatg

SEQ ID NO: 7902 - DNA, 20 bp, Artificial Sequence
  Description of Artificial Sequence: Synthetic oligonucleotide
  Target: SCNA; (-) strand; PAM type: NNGRRT; PAM sequence: AAGGAT
agattgggagatgtagatct

SEQ ID NO: 7903 - DNA, 20 bp, Artificial Sequence
  Description of Artificial Sequence: Synthetic oligonucleotide
  Target: SCNA; (-) strand; PAM type: NNGRRT; PAM sequence: ATGAGT
cagtccacacactggttacc

SEQ ID NO: 7904 - DNA, 20 bp, Artificial Sequence
  Description of Artificial Sequence: Synthetic oligonucleotide
  Target: SCNA; (-) strand; PAM type: NNGRRT; PAM sequence: GAGAAT
tactcaggcagttgagaaag

SEQ ID NO: 7905 - DNA, 20 bp, Artificial Sequence
  Description of Artificial Sequence: Synthetic oligonucleotide
  Target: SCNA; (-) strand; PAM type: NNGRRT; PAM sequence: AGGAGT
tgggtgaatcacctgaggtc

SEQ ID NO: 7906 - DNA, 20 bp, Artificial Sequence
  Description of Artificial Sequence: Synthetic oligonucleotide
  Target: SCNA; (-) strand; PAM type: NNGRRT; PAM sequence: GTGAAT
cctttgggaagccgaggtgg

SEQ ID NO: 7907 - DNA, 20 bp, Artificial Sequence
  Description of Artificial Sequence: Synthetic oligonucleotide
  Target: SCNA; (-) strand; PAM type: NNGRRT; PAM sequence: GTGGGT
tagccctttgggaagccgag

SEQ ID NO: 7908 - DNA, 20 bp, Artificial Sequence
  Description of Artificial Sequence: Synthetic oligonucleotide
  Target: SCNA; (-) strand; PAM type: NNGRRT; PAM sequence: CCGGAT
aataaaacagtggttaccgg

SEQ ID NO: 7909 - DNA, 20 bp, Artificial Sequence
  Description of Artificial Sequence: Synthetic oligonucleotide
  Target: SCNA; (-) strand; PAM type: NNGRRT; PAM sequence: TAGAAT
aaaaagttcaaatataaagt

SEQ ID NO: 7910 - DNA, 20 bp, Artificial Sequence
  Description of Artificial Sequence: Synthetic oligonucleotide
  Target: SCNA; (-) strand; PAM type: NNGRRT; PAM sequence: TGGAAT
tgcataatctcacttatatg

SEQ ID NO: 7911 - DNA, 20 bp, Artificial Sequence
  Description of Artificial Sequence: Synthetic oligonucleotide
  Target: SCNA; (-) strand; PAM type: NNGRRT; PAM sequence: GAGGAT
ccacaacatgcatggacctg

SEQ ID NO: 7912 - DNA, 20 bp, Artificial Sequence
  Description of Artificial Sequence: Synthetic oligonucleotide
  Target: SCNA; (-) strand; PAM type: NNGRRT; PAM sequence: TGGAAT
tgtggtatatgtatatacaa

SEQ ID NO: 7913 - DNA, 20 bp, Artificial Sequence
  Description of Artificial Sequence: Synthetic oligonucleotide
  Target: SCNA; (-) strand; PAM type: NNGRRT; PAM sequence: ATGGAT
aggtatgtgttggtgcatga

SEQ ID NO: 7914 - DNA, 20 bp, Artificial Sequence
  Description of Artificial Sequence: Synthetic oligonucleotide
  Target: SCNA; (-) strand; PAM type: NNGRRT; PAM sequence: ATGAAT
acctaggtatgtgttggtgc

SEQ ID NO: 7915 - DNA, 20 bp, Artificial Sequence
  Description of Artificial Sequence: Synthetic oligonucleotide
  Target: SCNA; (-) strand; PAM type: NNGRRT; PAM sequence: CTGGAT
aagacccagcaatccctcct

SEQ ID NO: 7916 - DNA, 20 bp, Artificial Sequence
  Description of Artificial Sequence: Synthetic oligonucleotide
  Target: SCNA; (-) strand; PAM type: NNGRRT; PAM sequence: TAGAAT
gttcctaaagaaattaaaat

SEQ ID NO: 7917 - DNA, 20 bp, Artificial Sequence
  Description of Artificial Sequence: Synthetic oligonucleotide
  Target: SCNA; (-) strand; PAM type: NNGRRT; PAM sequence: GAGAAT
tttttatactatattgttta

SEQ ID NO: 7918 - DNA, 20 bp, Artificial Sequence
  Description of Artificial Sequence: Synthetic oligonucleotide
  Target: SCNA; (-) strand; PAM type: NNGRRT; PAM sequence: TTGAAT
taatgataaatgtaatgtgc

SEQ ID NO: 7919 - DNA, 20 bp, Artificial Sequence
  Description of Artificial Sequence: Synthetic oligonucleotide
  Target: SCNA; (-) strand; PAM type: NNGRRT; PAM sequence: GAGAAT
ctaggttgtgcgctccttat

SEQ ID NO: 7920 - DNA, 20 bp, Artificial Sequence
  Description of Artificial Sequence: Synthetic oligonucleotide
  Target: SCNA; (-) strand; PAM type: NNGRRT; PAM sequence: AGGGAT
tattgtgaactgcacatgtg

SEQ ID NO: 7921 - DNA, 20 bp, Artificial Sequence
  Description of Artificial Sequence: Synthetic oligonucleotide
  Target: SCNA; (-) strand; PAM type: NNGRRT; PAM sequence: AGGGGT
cctctcatatactttcaatc

SEQ ID NO: 7922 - DNA, 20 bp, Artificial Sequence
  Description of Artificial Sequence: Synthetic oligonucleotide
  Target: SCNA; (-) strand; PAM type: NNGRRT; PAM sequence: TTGGGT
gattggtttcaggacctccc

SEQ ID NO: 7923 - DNA, 20 bp, Artificial Sequence
  Description of Artificial Sequence: Synthetic oligonucleotide
  Target: SCNA; (-) strand; PAM type: NNGRRT; PAM sequence: GGGGAT
gttgtccttcagtagccata

SEQ ID NO: 7924 - DNA, 20 bp, Artificial Sequence
  Description of Artificial Sequence: Synthetic oligonucleotide
  Target: SCNA; (-) strand; PAM type: NNGRRT; PAM sequence: AAGAAT
agattttgtttttttctgtt

SEQ ID NO: 7925 - DNA, 20 bp, Artificial Sequence
  Description of Artificial Sequence: Synthetic oligonucleotide
  Target: SCNA; (-) strand; PAM type: NNGRRT; PAM sequence: CAGAGT
cttaatttctaactaaattc

SEQ ID NO: 7926 - DNA, 20 bp, Artificial Sequence
  Description of Artificial Sequence: Synthetic oligonucleotide
  Target: SCNA; (-) strand; PAM type: NNGRRT; PAM sequence: TGGAAT
cagtcattatttaatattat

SEQ ID NO: 7927 - DNA, 20 bp, Artificial Sequence
  Description of Artificial Sequence: Synthetic oligonucleotide
  Target: SCNA; (-) strand; PAM type: NNGRRT; PAM sequence: AGGAGT
ctgtgattgtgagaaagacc

SEQ ID NO: 7928 - DNA, 20 bp, Artificial Sequence
  Description of Artificial Sequence: Synthetic oligonucleotide
  Target: SCNA; (-) strand; PAM type: NNGRRT; PAM sequence: AGGAAT
tgttaagataaaaggtacag

SEQ ID NO: 7929 - DNA, 20 bp, Artificial Sequence
  Description of Artificial Sequence: Synthetic oligonucleotide
  Target: SCNA; (-) strand; PAM type: NNGRRT; PAM sequence: CTGGGT
atcgcgcactgcactccaga

SEQ ID NO: 7930 - DNA, 20 bp, Artificial Sequence
  Description of Artificial Sequence: Synthetic oligonucleotide
  Target: SCNA; (-) strand; PAM type: NNGRRT; PAM sequence: GAGAAT
tactcaagaaactgaagcag

SEQ ID NO: 7931 - DNA, 20 bp, Artificial Sequence
  Description of Artificial Sequence: Synthetic oligonucleotide
  Target: SCNA; (-) strand; PAM type: NNGRRT; PAM sequence: CTGGGT
actaaaaatacagaaattag

SEQ ID NO: 7932 - DNA, 20 bp, Artificial Sequence
  Description of Artificial Sequence: Synthetic oligonucleotide
  Target: SCNA; (-) strand; PAM type: NNGRRT; PAM sequence: GGGGAT
gcagggatcacttgaggaca

SEQ ID NO: 7933 - DNA, 20 bp, Artificial Sequence
  Description of Artificial Sequence: Synthetic oligonucleotide
  Target: SCNA; (-) strand; PAM type: NNGRRT; PAM sequence: AGGGAT
acttttggaggtcaagttgc

SEQ ID NO: 7934 - DNA, 20 bp, Artificial Sequence
  Description of Artificial Sequence: Synthetic oligonucleotide
  Target: SCNA; (-) strand; PAM type: NNGRRT; PAM sequence: TAGAGT
gaaagtggcatagtgattat

SEQ ID NO: 7935 - DNA, 20 bp, Artificial Sequence
  Description of Artificial Sequence: Synthetic oligonucleotide
  Target: SCNA; (-) strand; PAM type: NNGRRT; PAM sequence: AAGAAT
atacaaagaagaagtgccta

SEQ ID NO: 7936 - DNA, 20 bp, Artificial Sequence
  Description of Artificial Sequence: Synthetic oligonucleotide
  Target: SCNA; (-) strand; PAM type: NNGRRT; PAM sequence: TAGAAT
aaatcctttatcacttcatg

SEQ ID NO: 7937 - DNA, 20 bp, Artificial Sequence
  Description of Artificial Sequence: Synthetic oligonucleotide
  Target: SCNA; (-) strand; PAM type: NNGRRT; PAM sequence: AGGGAT
ggcagacttttcataatttc

SEQ ID NO: 7938 - DNA, 20 bp, Artificial Sequence
  Description of Artificial Sequence: Synthetic oligonucleotide
  Target: SCNA; (-) strand; PAM type: NNGRRT; PAM sequence: GGGAAT
cacaggtggcttaggggttg

SEQ ID NO: 7939 - DNA, 20 bp, Artificial Sequence
  Description of Artificial Sequence: Synthetic oligonucleotide
  Target: SCNA; (-) strand; PAM type: NNGRRT; PAM sequence: AGGGGT
ggtatggacacaggtggctt

SEQ ID NO: 7940 - DNA, 20 bp, Artificial Sequence
  Description of Artificial Sequence: Synthetic oligonucleotide
  Target: SCNA; (-) strand; PAM type: NNGRRT; PAM sequence: AAGAAT
tgttttctttctagccagat

SEQ ID NO: 7941 - DNA, 20 bp, Artificial Sequence
  Description of Artificial Sequence: Synthetic oligonucleotide
  Target: SCNA; (-) strand; PAM type: NNGRRT; PAM sequence: TAGAGT
ggaatatcttgaaaatatag

SEQ ID NO: 7942 - DNA, 20 bp, Artificial Sequence
  Description of Artificial Sequence: Synthetic oligonucleotide
  Target: SCNA; (-) strand; PAM type: NNGRRT; PAM sequence: TGGAAT
gaaagggtctgttgcagttt

SEQ ID NO: 7943 - DNA, 20 bp, Artificial Sequence
  Description of Artificial Sequence: Synthetic oligonucleotide
  Target: SCNA; (-) strand; PAM type: NNGRRT; PAM sequence: AAGGGT
gatgaaagtaaaataattga

SEQ ID NO: 7944 - DNA, 20 bp, Artificial Sequence
  Description of Artificial Sequence: Synthetic oligonucleotide
  Target: SCNA; (-) strand; PAM type: NNGRRT; PAM sequence: CTGAGT
aggtcattccaaaaaagttt

SEQ ID NO: 7945 - DNA, 20 bp, Artificial Sequence
  Description of Artificial Sequence: Synthetic oligonucleotide
  Target: SCNA; (-) strand; PAM type: NNGRRT; PAM sequence: AAGAAT
tccctaaatgaatatagaga

SEQ ID NO: 7946 - DNA, 20 bp, Artificial Sequence
  Description of Artificial Sequence: Synthetic oligonucleotide
  Target: SCNA; (-) strand; PAM type: NNGRRT; PAM sequence: ATGAAT
tcagaatcaaatttccctaa

SEQ ID NO: 7947 - DNA, 20 bp, Artificial Sequence
  Description of Artificial Sequence: Synthetic oligonucleotide
  Target: SCNA; (-) strand; PAM type: NNGRRT; PAM sequence: CAGAAT
aggaagctatttgtattttt

SEQ ID NO: 7948 - DNA, 20 bp, Artificial Sequence
  Description of Artificial Sequence: Synthetic oligonucleotide
  Target: SCNA; (-) strand; PAM type: NNGRRT; PAM sequence: TGGAAT
tagactcatgttttgctagc

SEQ ID NO: 7949 - DNA, 20 bp, Artificial Sequence
  Description of Artificial Sequence: Synthetic oligonucleotide
  Target: SCNA; (-) strand; PAM type: NNGRRT; PAM sequence: GTGAAT
ccttgtatagttataaacgt

SEQ ID NO: 7950 - DNA, 20 bp, Artificial Sequence
  Description of Artificial Sequence: Synthetic oligonucleotide
  Target: SCNA; (-) strand; PAM type: NNGRRT; PAM sequence: GTGAAT
cttattcctttgttccgagt

SEQ ID NO: 7951 - DNA, 20 bp, Artificial Sequence
  Description of Artificial Sequence: Synthetic oligonucleotide
  Target: SCNA; (-) strand; PAM type: NNGRRT; PAM sequence: CCGAGT
ttcctacttattcctttgtt

SEQ ID NO: 7952 - DNA, 20 bp, Artificial Sequence
  Description of Artificial Sequence: Synthetic oligonucleotide
  Target: SCNA; (-) strand; PAM type: NNGRRT; PAM sequence: AAGAAT
caaacgagagggatggggaa

SEQ ID NO: 7953 - DNA, 20 bp, Artificial Sequence
  Description of Artificial Sequence: Synthetic oligonucleotide
  Target: SCNA; (-) strand; PAM type: NNGRRT; PAM sequence: AGGGAT
actgattggagacaaacgag

SEQ ID NO: 7954 - DNA, 20 bp, Artificial Sequence
  Description of Artificial Sequence: Synthetic oligonucleotide
  Target: SCNA; (-) strand; PAM type: NNGRRT; PAM sequence: AAGGAT
tacttatgatatatcattaa

SEQ ID NO: 7955 - DNA, 20 bp, Artificial Sequence
  Description of Artificial Sequence: Synthetic oligonucleotide
  Target: SCNA; (-) strand; PAM type: NNGRRT; PAM sequence: AAGAAT
attattaatgatgtagatat

SEQ ID NO: 7956 - DNA, 20 bp, Artificial Sequence
  Description of Artificial Sequence: Synthetic oligonucleotide
  Target: SCNA; (-) strand; PAM type: NNGRRT; PAM sequence: TTGAGT
tgtattttagagcaacagta

SEQ ID NO: 7957 - DNA, 20 bp, Artificial Sequence
  Description of Artificial Sequence: Synthetic oligonucleotide
  Target: SCNA; (-) strand; PAM type: NNGRRT; PAM sequence: AAGAAT
caggtgatgagaagctcctg

SEQ ID NO: 7958 - DNA, 20 bp, Artificial Sequence
  Description of Artificial Sequence: Synthetic oligonucleotide
  Target: SCNA; (-) strand; PAM type: NNGRRT; PAM sequence: GTGGGT
acttgagataagaaggctag

SEQ ID NO: 7959 - DNA, 20 bp, Artificial Sequence
  Description of Artificial Sequence: Synthetic oligonucleotide
  Target: SCNA; (-) strand; PAM type: NNGRRT; PAM sequence: CAGAGT
ttaaagaggggatatatgta

SEQ ID NO: 7960 - DNA, 20 bp, Artificial Sequence
  Description of Artificial Sequence: Synthetic oligonucleotide
  Target: SCNA; (-) strand; PAM type: NNGRRT; PAM sequence: GGGGAT
gtctaagggtgaattaaaga

SEQ ID NO: 7961 - DNA, 20 bp, Artificial Sequence
  Description of Artificial Sequence: Synthetic oligonucleotide
  Target: SCNA; (-) strand; PAM type: NNGRRT; PAM sequence: GTGAAT
ctctctgtctctgtctaagg

SEQ ID NO: 7962 - DNA, 20 bp, Artificial Sequence
  Description of Artificial Sequence: Synthetic oligonucleotide
  Target: SCNA; (-) strand; PAM type: NNGRRT; PAM sequence: AAGGGT
ggccctctctgtctctgtct

SEQ ID NO: 7963 - DNA, 20 bp, Artificial Sequence
  Description of Artificial Sequence: Synthetic oligonucleotide
  Target: SCNA; (-) strand; PAM type: NNGRRT; PAM sequence: ATGGAT
agcaaaggcatgctggacaa

SEQ ID NO: 7964 - DNA, 20 bp, Artificial Sequence
  Description of Artificial Sequence: Synthetic oligonucleotide
  Target: SCNA; (-) strand; PAM type: NNGRRT; PAM sequence: AGGAAT
ccagaagtggcgagaattgg

SEQ ID NO: 7965 - DNA, 20 bp, Artificial Sequence
  Description of Artificial Sequence: Synthetic oligonucleotide
  Target: SCNA; (-) strand; PAM type: NNGRRT; PAM sequence: GAGAAT
acagtgcatccagaagtggc

SEQ ID NO: 7966 - DNA, 20 bp, Artificial Sequence
  Description of Artificial Sequence: Synthetic oligonucleotide
  Target: SCNA; (-) strand; PAM type: NNGRRT; PAM sequence: TAGGAT
cattgtctgagagctgccac

SEQ ID NO: 7967 - DNA, 20 bp, Artificial Sequence
  Description of Artificial Sequence: Synthetic oligonucleotide
  Target: SCNA; (-) strand; PAM type: NNGRRT; PAM sequence: CTGGAT
gcattgtgcagattggtttt

SEQ ID NO: 7968 - DNA, 20 bp, Artificial Sequence
  Description of Artificial Sequence: Synthetic oligonucleotide
  Target: SCNA; (-) strand; PAM type: NNGRRT; PAM sequence: ATGAAT
tcgggaaacaggagcatgtg

SEQ ID NO: 7969 - DNA, 20 bp, Artificial Sequence
  Description of Artificial Sequence: Synthetic oligonucleotide
  Target: SCNA; (-) strand; PAM type: NNGRRT; PAM sequence: GTGGGT
gtagggtgcaagtagtatat

SEQ ID NO: 7970 - DNA, 20 bp, Artificial Sequence
  Description of Artificial Sequence: Synthetic oligonucleotide
  Target: SCNA; (-) strand; PAM type: NNGRRT; PAM sequence: TAGGGT
gaagagcctgaaatatagtg

SEQ ID NO: 7971 - DNA, 20 bp, Artificial Sequence
  Description of Artificial Sequence: Synthetic oligonucleotide
  Target: SCNA; (-) strand; PAM type: NNGRRT; PAM sequence: TTGGAT
caggatgagttaaacaaaag

SEQ ID NO: 7972 - DNA, 20 bp, Artificial Sequence
  Description of Artificial Sequence: Synthetic oligonucleotide
  Target: SCNA; (-) strand; PAM type: NNGRRT; PAM sequence: ATGAGT
cttgggagctcagaagcagg

SEQ ID NO: 7973 - DNA, 20 bp, Artificial Sequence
  Description of Artificial Sequence: Synthetic oligonucleotide
  Target: SCNA; (-) strand; PAM type: NNGRRT; PAM sequence: CAGGAT
ggatcttgggagctcagaag

SEQ ID NO: 7974 - DNA, 20 bp, Artificial Sequence
  Description of Artificial Sequence: Synthetic oligonucleotide
  Target: SCNA; (-) strand; PAM type: NNGRRT; PAM sequence: AGGGAT
tatataagagaagtaggttc

SEQ ID NO: 7975 - DNA, 20 bp, Artificial Sequence
  Description of Artificial Sequence: Synthetic oligonucleotide
  Target: SCNA; (-) strand; PAM type: NNGRRT; PAM sequence: TTGAAT
gagaattaggagtgcatgta

SEQ ID NO: 7976 - DNA, 20 bp, Artificial Sequence
  Description of Artificial Sequence: Synthetic oligonucleotide
  Target: SCNA; (-) strand; PAM type: NNGRRT; PAM sequence: AGGAGT
aatgttcataaatgagaatt

SEQ ID NO: 7977 - DNA, 20 bp, Artificial Sequence
  Description of Artificial Sequence: Synthetic oligonucleotide
  Target: SCNA; (-) strand; PAM type: NNGRRT; PAM sequence: GAGAAT
ttaacaaaatgttcataaat

SEQ ID NO: 7978 - DNA, 20 bp, Artificial Sequence
  Description of Artificial Sequence: Synthetic oligonucleotide
  Target: SCNA; (-) strand; PAM type: NNGRRT; PAM sequence: GAGAGT
tggccatgtgtattgttttg

SEQ ID NO: 7979 - DNA, 20 bp, Artificial Sequence
  Description of Artificial Sequence: Synthetic oligonucleotide
  Target: SCNA; (-) strand; PAM type: NNGRRT; PAM sequence: CAGAGT
agaataaaaacaagaatggt

SEQ ID NO: 7980 - DNA, 20 bp, Artificial Sequence
  Description of Artificial Sequence: Synthetic oligonucleotide
  Target: SCNA; (-) strand; PAM type: NNGRRT; PAM sequence: AAGAAT
aaaaaaaaaagaataaaaac

SEQ ID NO: 7981 - DNA, 20 bp, Artificial Sequence
  Description of Artificial Sequence: Synthetic oligonucleotide
  Target: SCNA; (-) strand; PAM type: NNGRRT; PAM sequence: AAGAAT
tctgtctcaaaaaaaaaaaa

SEQ ID NO: 7982 - DNA, 20 bp, Artificial Sequence
  Description of Artificial Sequence: Synthetic oligonucleotide
  Target: SCNA; (-) strand; PAM type: NNGRRT; PAM sequence: CTGGGT
tagtgccactgtgctccagc

SEQ ID NO: 7983 - DNA, 20 bp, Artificial Sequence
  Description of Artificial Sequence: Synthetic oligonucleotide
  Target: SCNA; (-) strand; PAM type: NNGRRT; PAM sequence: GAGAAT
tacttgggaggctgaggcag

SEQ ID NO: 7984 - DNA, 20 bp, Artificial Sequence
  Description of Artificial Sequence: Synthetic oligonucleotide
  Target: SCNA; (-) strand; PAM type: NNGRRT; PAM sequence: AGGAGT
ggcgggtggatcacaaggtt

SEQ ID NO: 7985 - DNA, 20 bp, Artificial Sequence
  Description of Artificial Sequence: Synthetic oligonucleotide
  Target: SCNA; (-) strand; PAM type: NNGRRT; PAM sequence: GTGGAT
tttgtgggaggccaaggcgg

SEQ ID NO: 7986 - DNA, 20 bp, Artificial Sequence
  Description of Artificial Sequence: Synthetic oligonucleotide
  Target: SCNA; (-) strand; PAM type: NNGRRT; PAM sequence: GCGGGT
gcactttgtgggaggccaag

SEQ ID NO: 7987 - DNA, 20 bp, Artificial Sequence
  Description of Artificial Sequence: Synthetic oligonucleotide
  Target: SCNA; (-) strand; PAM type: NNGRRT; PAM sequence: AAGAAT
gcatatagttctggttcttt

SEQ ID NO: 7988 - DNA, 20 bp, Artificial Sequence
  Description of Artificial Sequence: Synthetic oligonucleotide
  Target: SCNA; (-) strand; PAM type: NNGRRT; PAM sequence: TGGAAT
acactcaatatctgttttcc

SEQ ID NO: 7989 - DNA, 20 bp, Artificial Sequence
  Description of Artificial Sequence: Synthetic oligonucleotide
  Target: SCNA; (-) strand; PAM type: NNGRRT; PAM sequence: AAGGAT
tacagcaaacagagggtcaa

SEQ ID NO: 7990 - DNA, 20 bp, Artificial Sequence
  Description of Artificial Sequence: Synthetic oligonucleotide
  Target: SCNA; (-) strand; PAM type: NNGRRT; PAM sequence: GAGGGT
aaagctggctacagcaaaca

SEQ ID NO: 7991 - DNA, 20 bp, Artificial Sequence
  Description of Artificial Sequence: Synthetic oligonucleotide
  Target: SCNA; (-) strand; PAM type: NNGRRT; PAM sequence: AAGAAT
atagggtgaccatgaatcca

SEQ ID NO: 7992 - DNA, 20 bp, Artificial Sequence
  Description of Artificial Sequence: Synthetic oligonucleotide
  Target: SCNA; (-) strand; PAM type: NNGRRT; PAM sequence: ATGAAT
gaatatgttatagggtgacc

SEQ ID NO: 7993 - DNA, 20 bp, Artificial Sequence
  Description of Artificial Sequence: Synthetic oligonucleotide
  Target: SCNA; (-) strand; PAM type: NNGRRT; PAM sequence: TAGGGT
gtggattagtgaatatgtta

SEQ ID NO: 7994 - DNA, 20 bp, Artificial Sequence
  Description of Artificial Sequence: Synthetic oligonucleotide
  Target: SCNA; (-) strand; PAM type: NNGRRT; PAM sequence: GTGAAT
aacctttcattggtggatta

SEQ ID NO: 7995 - DNA, 20 bp, Artificial Sequence
  Description of Artificial Sequence: Synthetic oligonucleotide
  Target: SCNA; (-) strand; PAM type: NNGRRT; PAM sequence: GTGGAT
cattacataacctttcattg

SEQ ID NO: 7996 - DNA, 20 bp, Artificial Sequence
  Description of Artificial Sequence: Synthetic oligonucleotide
  Target: SCNA; (-) strand; PAM type: NNGRRT; PAM sequence: CTGAGT
aagattgtcattagaaaacc

SEQ ID NO: 7997 - DNA, 20 bp, Artificial Sequence
  Description of Artificial Sequence: Synthetic oligonucleotide
  Target: SCNA; (-) strand; PAM type: NNGRRT; PAM sequence: ATGAAT
ataagtttgtaaaagtatgc

SEQ ID NO: 7998 - DNA, 20 bp, Artificial Sequence
  Description of Artificial Sequence: Synthetic oligonucleotide
  Target: SCNA; (-) strand; PAM type: NNGRRT; PAM sequence: CTGAAT
actgaagtccacatttactt

SEQ ID NO: 7999 - DNA, 20 bp, Artificial Sequence
  Description of Artificial Sequence: Synthetic oligonucleotide
  Target: SCNA; (-) strand; PAM type: NNGRRT; PAM sequence: TAGAGT
gaaattttacaacaatattt

SEQ ID NO: 8000 - DNA, 20 bp, Artificial Sequence
  Description of Artificial Sequence: Synthetic oligonucleotide
  Target: SCNA; (-) strand; PAM type: NNGRRT; PAM sequence: TGGAAT
ctaagttgaaaattttatga

SEQ ID NO: 8001 - DNA, 20 bp, Artificial Sequence
  Description of Artificial Sequence: Synthetic oligonucleotide
  Target: SCNA; (-) strand; PAM type: NNGRRT; PAM sequence: CAGAAT
aagtgaattctacttaaccc

SEQ ID NO: 8002 - DNA, 20 bp, Artificial Sequence
  Description of Artificial Sequence: Synthetic oligonucleotide
  Target: SCNA; (-) strand; PAM type: NNGRRT; PAM sequence: GTGAAT
tcttagaccagcaaacacaa

SEQ ID NO: 8003 - DNA, 20 bp, Artificial Sequence
  Description of Artificial Sequence: Synthetic oligonucleotide
  Target: SCNA; (-) strand; PAM type: NNGRRT; PAM sequence: TAGAAT
cttccgtgtgtctgatttga

SEQ ID NO: 8004 - DNA, 20 bp, Artificial Sequence
  Description of Artificial Sequence: Synthetic oligonucleotide
  Target: SCNA; (-) strand; PAM type: NNGRRT; PAM sequence: TTGAAT
tgtggatctgtttttaagga

SEQ ID NO: 8005 - DNA, 20 bp, Artificial Sequence
  Description of Artificial Sequence: Synthetic oligonucleotide
  Target: SCNA; (-) strand; PAM type: NNGRRT; PAM sequence: AAGGAT
ctaagtgtggatctgttttt

SEQ ID NO: 8006 - DNA, 20 bp, Artificial Sequence
  Description of Artificial Sequence: Synthetic oligonucleotide
  Target: SCNA; (-) strand; PAM type: NNGRRT; PAM sequence: GTGGAT
ggtgtgaagaatgactaagt

SEQ ID NO: 8007 - DNA, 20 bp, Artificial Sequence
  Description of Artificial Sequence: Synthetic oligonucleotide
  Target: SCNA; (-) strand; PAM type: NNGRRT; PAM sequence: AAGAAT
gggcgagggagagaggtgtg

SEQ ID NO: 8008 - DNA, 20 bp, Artificial Sequence
  Description of Artificial Sequence: Synthetic oligonucleotide
  Target: SCNA; (-) strand; PAM type: NNGRRT; PAM sequence: TTGGGT
tagagaaaaaagttaacaat

SEQ ID NO: 8009 - DNA, 20 bp, Artificial Sequence
  Description of Artificial Sequence: Synthetic oligonucleotide
  Target: SCNA; (-) strand; PAM type: NNGRRT; PAM sequence: GAGAAT
ctgaaccagactataaatgt

SEQ ID NO: 8010 - DNA, 20 bp, Artificial Sequence
  Description of Artificial Sequence: Synthetic oligonucleotide
  Target: SCNA; (-) strand; PAM type: NNGRRT; PAM sequence: AGGAAT
taggagaagagattagagat

SEQ ID NO: 8011 - DNA, 20 bp, Artificial Sequence
  Description of Artificial Sequence: Synthetic oligonucleotide
  Target: SCNA; (-) strand; PAM type: NNGRRT; PAM sequence: TTGGGT
gggactagtgaaaacacatt

SEQ ID NO: 8012 - DNA, 20 bp, Artificial Sequence
  Description of Artificial Sequence: Synthetic oligonucleotide
  Target: SCNA; (-) strand; PAM type: NNGRRT; PAM sequence: GTGGAT
ctctatagccagtgggcaat

SEQ ID NO: 8013 - DNA, 20 bp, Artificial Sequence
  Description of Artificial Sequence: Synthetic oligonucleotide
  Target: SCNA; (-) strand; PAM type: NNGRRT; PAM sequence: TTGAAT
aagtagtgaatgactctagt

SEQ ID NO: 8014 - DNA, 20 bp, Artificial Sequence
  Description of Artificial Sequence: Synthetic oligonucleotide
  Target: SCNA; (-) strand; PAM type: NNGRRT; PAM sequence: GTGAAT
ggaagctggttgtccaagta

SEQ ID NO: 8015 - DNA, 20 bp, Artificial Sequence
  Description of Artificial Sequence: Synthetic oligonucleotide
  Target: SCNA; (-) strand; PAM type: NNGRRT; PAM sequence: AAGAAT
accattctgaaggcaagaga

SEQ ID NO: 8016 - DNA, 20 bp, Artificial Sequence
  Description of Artificial Sequence: Synthetic oligonucleotide
  Target: SCNA; (-) strand; PAM type: NNGRRT; PAM sequence: CTGAAT
tcatcctccagtaagtctcc

SEQ ID NO: 8017 - DNA, 20 bp, Artificial Sequence
  Description of Artificial Sequence: Synthetic oligonucleotide
  Target: SCNA; (-) strand; PAM type: NNGRRT; PAM sequence: GGGAAT
aatgatggtggtattttgat

SEQ ID NO: 8018 - DNA, 20 bp, Artificial Sequence
  Description of Artificial Sequence: Synthetic oligonucleotide
  Target: SCNA; (-) strand; PAM type: NNGRRT; PAM sequence: AAGAAT
ttgttttttctagttctgtg

SEQ ID NO: 8019 - DNA, 20 bp, Artificial Sequence
  Description of Artificial Sequence: Synthetic oligonucleotide
  Target: SCNA; (-) strand; PAM type: NNGRRT; PAM sequence: TAGGAT
ttttggttccatatgaattt

SEQ ID NO: 8020 - DNA, 20 bp, Artificial Sequence
  Description of Artificial Sequence: Synthetic oligonucleotide
  Target: SCNA; (-) strand; PAM type: NNGRRT; PAM sequence: ATGAAT
gggctcttttttggttccat

SEQ ID NO: 8021 - DNA, 20 bp, Artificial Sequence
  Description of Artificial Sequence: Synthetic oligonucleotide
  Target: SCNA; (-) strand; PAM type: NNGRRT; PAM sequence: TTGGGT
gatcacttggctgttagcat

SEQ ID NO: 8022 - DNA, 20 bp, Artificial Sequence
  Description of Artificial Sequence: Synthetic oligonucleotide
  Target: SCNA; (-) strand; PAM type: NNGRRT; PAM sequence: GGGAAT
acatcaaatatcaaattgtt

SEQ ID NO: 8023 - DNA, 20 bp, Artificial Sequence
  Description of Artificial Sequence: Synthetic oligonucleotide
  Target: SCNA; (-) strand; PAM type: NNGRRT; PAM sequence: CAGGGT
taagcttcatgggaaatcag

SEQ ID NO: 8024 - DNA, 20 bp, Artificial Sequence
  Description of Artificial Sequence: Synthetic oligonucleotide
  Target: SCNA; (-) strand; PAM type: NNGRRT; PAM sequence: GAGGGT
gctggttctgaaatgtgaga

SEQ ID NO: 8025 - DNA, 20 bp, Artificial Sequence
  Description of Artificial Sequence: Synthetic oligonucleotide
  Target: SCNA; (-) strand; PAM type: NNGRRT; PAM sequence: GTGAAT
ggtctaacaactgaagagaa

SEQ ID NO: 8026 - DNA, 20 bp, Artificial Sequence
  Description of Artificial Sequence: Synthetic oligonucleotide
  Target: SCNA; (-) strand; PAM type: NNGRRT; PAM sequence: GGGGGT
aaggcctcatatgccatgca

SEQ ID NO: 8027 - DNA, 20 bp, Artificial Sequence
  Description of Artificial Sequence: Synthetic oligonucleotide
  Target: SCNA; (-) strand; PAM type: NNGRRT; PAM sequence: TGGAAT
gggcaggggaactaggtctc

SEQ ID NO: 8028 - DNA, 20 bp, Artificial Sequence
  Description of Artificial Sequence: Synthetic oligonucleotide
  Target: SCNA; (-) strand; PAM type: NNGRRT; PAM sequence: GTGAGT
gtggcatggacccaaactaa

SEQ ID NO: 8029 - DNA, 20 bp, Artificial Sequence
  Description of Artificial Sequence: Synthetic oligonucleotide
  Target: SCNA; (-) strand; PAM type: NNGRRT; PAM sequence: AGGAAT
aggtgggtttcagttgcctc

SEQ ID NO: 8030 - DNA, 20 bp, Artificial Sequence
  Description of Artificial Sequence: Synthetic oligonucleotide
  Target: SCNA; (-) strand; PAM type: NNGRRT; PAM sequence: GTGGGT
ggaaggccatcaaggagtag

SEQ ID NO: 8031 - DNA, 20 bp, Artificial Sequence
  Description of Artificial Sequence: Synthetic oligonucleotide
  Target: SCNA; (-) strand; PAM type: NNGRRT; PAM sequence: AGGAGT
agcatcctggaaggccatca

SEQ ID NO: 8032 - DNA, 20 bp, Artificial Sequence
  Description of Artificial Sequence: Synthetic oligonucleotide
  Target: SCNA; (-) strand; PAM type: NNGRRT; PAM sequence: AGGGAT
cggacatccgtgaggcagga

SEQ ID NO: 8033 - DNA, 20 bp, Artificial Sequence
  Description of Artificial Sequence: Synthetic oligonucleotide
  Target: SCNA; (-) strand; PAM type: NNGRRT; PAM sequence: AGGAAT
ttcagtggaaggccttcctc

SEQ ID NO: 8034 - DNA, 20 bp, Artificial Sequence
  Description of Artificial Sequence: Synthetic oligonucleotide
  Target: SCNA; (-) strand; PAM type: NNGRRT; PAM sequence: ATGAAT
tctaacaggtagcaaagcac

SEQ ID NO: 8035 - DNA, 20 bp, Artificial Sequence
  Description of Artificial Sequence: Synthetic oligonucleotide
  Target: SCNA; (-) strand; PAM type: NNGRRT; PAM sequence: TAGAGT
cttagtgtttgggcttggct

SEQ ID NO: 8036 - DNA, 20 bp, Artificial Sequence
  Description of Artificial Sequence: Synthetic oligonucleotide
  Target: SCNA; (-) strand; PAM type: NNGRRT; PAM sequence: CAGAAT
tgtgtgtcctgaaaactctt

SEQ ID NO: 8037 - DNA, 20 bp, Artificial Sequence
  Description of Artificial Sequence: Synthetic oligonucleotide
  Target: SCNA; (-) strand; PAM type: NNGRRT; PAM sequence: TTGGAT
gttctttgtgcttcttatat

SEQ ID NO: 8038 - DNA, 20 bp, Artificial Sequence
  Description of Artificial Sequence: Synthetic oligonucleotide
  Target: SCNA; (-) strand; PAM type: NNGRRT; PAM sequence: TTGAAT
caggtggtaatctttttgca

SEQ ID NO: 8039 - DNA, 20 bp, Artificial Sequence
  Description of Artificial Sequence: Synthetic oligonucleotide
  Target: SCNA; (-) strand; PAM type: NNGRRT; PAM sequence: TAGGAT
atctgctatgttttctttta

SEQ ID NO: 8040 - DNA, 20 bp, Artificial Sequence
  Description of Artificial Sequence: Synthetic oligonucleotide
  Target: SCNA; (-) strand; PAM type: NNGRRT; PAM sequence: CAGGGT
gcccaatctcttctggctag

SEQ ID NO: 8041 - DNA, 20 bp, Artificial Sequence
  Description of Artificial Sequence: Synthetic oligonucleotide
  Target: SCNA; (-) strand; PAM type: NNGRRT; PAM sequence: CTGGAT
atttatgaagcttagtttca

SEQ ID NO: 8042 - DNA, 20 bp, Artificial Sequence
  Description of Artificial Sequence: Synthetic oligonucleotide
  Target: SCNA; (-) strand; PAM type: NNGRRT; PAM sequence: ATGGGT
gttaattgtgttattatttt

SEQ ID NO: 8043 - DNA, 20 bp, Artificial Sequence
  Description of Artificial Sequence: Synthetic oligonucleotide
  Target: SCNA; (-) strand; PAM type: NNGRRT; PAM sequence: ATGGAT
agacagcagatacttggttg

SEQ ID NO: 8044 - DNA, 20 bp, Artificial Sequence
  Description of Artificial Sequence: Synthetic oligonucleotide
  Target: SCNA; (-) strand; PAM type: NNGRRT; PAM sequence: GTGAGT
tgtgagtccttacgtgttag

SEQ ID NO: 8045 - DNA, 20 bp, Artificial Sequence
  Description of Artificial Sequence: Synthetic oligonucleotide
  Target: SCNA; (-) strand; PAM type: NNGRRT; PAM sequence: GTGAGT
cccctttaccttaagtttat

SEQ ID NO: 8046 - DNA, 20 bp, Artificial Sequence
  Description of Artificial Sequence: Synthetic oligonucleotide
  Target: SCNA; (-) strand; PAM type: NNGRRT; PAM sequence: TGGAAT
actttgagtttccatttgca

SEQ ID NO: 8047 - DNA, 20 bp, Artificial Sequence
  Description of Artificial Sequence: Synthetic oligonucleotide
  Target: SCNA; (-) strand; PAM type: NNGRRT; PAM sequence: TTGAGT
aattgctattctttctcact

SEQ ID NO: 8048 - DNA, 20 bp, Artificial Sequence
  Description of Artificial Sequence: Synthetic oligonucleotide
  Target: SCNA; (-) strand; PAM type: NNGRRT; PAM sequence: AAGAAT
aaatcttttttgtctgatat

SEQ ID NO: 8049 - DNA, 20 bp, Artificial Sequence
  Description of Artificial Sequence: Synthetic oligonucleotide
  Target: SCNA; (-) strand; PAM type: NNGRRT; PAM sequence: TGGAGT
gacctgtctagtgctgtcag

SEQ ID NO: 8050 - DNA, 20 bp, Artificial Sequence
  Description of Artificial Sequence: Synthetic oligonucleotide
  Target: SCNA; (-) strand; PAM type: NNGRRT; PAM sequence: TAGGGT
tctgttaagtccatttgttc

SEQ ID NO: 8051 - DNA, 20 bp, Artificial Sequence
  Description of Artificial Sequence: Synthetic oligonucleotide
  Target: SCNA; (-) strand; PAM type: NNGRRT; PAM sequence: TAGGAT
aaaaggatgtagttgttggg

SEQ ID NO: 8052 - DNA, 20 bp, Artificial Sequence
  Description of Artificial Sequence: Synthetic oligonucleotide
  Target: SCNA; (-) strand; PAM type: NNGRRT; PAM sequence: TTGGGT
tgatgaaaaggatgtagttg

SEQ ID NO: 8053 - DNA, 20 bp, Artificial Sequence
  Description of Artificial Sequence: Synthetic oligonucleotide
  Target: SCNA; (-) strand; PAM type: NNGRRT; PAM sequence: AAGGAT
atattccatgtgttgatgaa

SEQ ID NO: 8054 - DNA, 20 bp, Artificial Sequence
  Description of Artificial Sequence: Synthetic oligonucleotide
  Target: SCNA; (-) strand; PAM type: NNGRRT; PAM sequence: GAGAAT
tgttcatatggtctgtcttg

SEQ ID NO: 8055 - DNA, 20 bp, Artificial Sequence
  Description of Artificial Sequence: Synthetic oligonucleotide
  Target: SCNA; (-) strand; PAM type: NNGRRT; PAM sequence: GAGAAT
tttattccactgtggtctga

SEQ ID NO: 8056 - DNA, 20 bp, Artificial Sequence
  Description of Artificial Sequence: Synthetic oligonucleotide
  Target: SCNA; (-) strand; PAM type: NNGRRT; PAM sequence: TGGAGT
atagttttgagggtttcttt

SEQ ID NO: 8057 - DNA, 20 bp, Artificial Sequence
  Description of Artificial Sequence: Synthetic oligonucleotide
  Target: SCNA; (-) strand; PAM type: NNGRRT; PAM sequence: GAGGGT
ccatgtatttgtatagtttt

SEQ ID NO: 8058 - DNA, 20 bp, Artificial Sequence
  Description of Artificial Sequence: Synthetic oligonucleotide
  Target: SCNA; (-) strand; PAM type: NNGRRT; PAM sequence: TTGAAT
aggttttgtcattattattg

SEQ ID NO: 8059 - DNA, 20 bp, Artificial Sequence
  Description of Artificial Sequence: Synthetic oligonucleotide
  Target: SCNA; (-) strand; PAM type: NNGRRT; PAM sequence: TTGGGT
tttcttttcttctgctgggt

SEQ ID NO: 8060 - DNA, 20 bp, Artificial Sequence
  Description of Artificial Sequence: Synthetic oligonucleotide
  Target: SCNA; (-) strand; PAM type: NNGRRT; PAM sequence: CTGGGT
ttgttatttcttttcttctg

SEQ ID NO: 8061 - DNA, 20 bp, Artificial Sequence
  Description of Artificial Sequence: Synthetic oligonucleotide
  Target: SCNA; (-) strand; PAM type: NNGRRT; PAM sequence: CGGGGT
ttttgtatttttagtagaga

SEQ ID NO: 8062 - DNA, 20 bp, Artificial Sequence
  Description of Artificial Sequence: Synthetic oligonucleotide
  Target: SCNA; (-) strand; PAM type: NNGRRT; PAM sequence: CCGAGT
gattctcttgcctcagctgc

SEQ ID NO: 8063 - DNA, 20 bp, Artificial Sequence
  Description of Artificial Sequence: Synthetic oligonucleotide
  Target: SCNA; (-) strand; PAM type: NNGRRT; PAM sequence: TGGAAT
ctcactcttgttacccaggc

SEQ ID NO: 8064 - DNA, 20 bp, Artificial Sequence
  Description of Artificial Sequence: Synthetic oligonucleotide
  Target: SCNA; (-) strand; PAM type: NNGRRT; PAM sequence: TGGAGT
tttatttttattttttgaga

SEQ ID NO: 8065 - DNA, 20 bp, Artificial Sequence
  Description of Artificial Sequence: Synthetic oligonucleotide
  Target: SCNA; (-) strand; PAM type: NNGRRT; PAM sequence: TTGAAT
taaatgtgttcacagtagtc

SEQ ID NO: 8066 - DNA, 20 bp, Artificial Sequence
  Description of Artificial Sequence: Synthetic oligonucleotide
  Target: SCNA; (-) strand; PAM type: NNGRRT; PAM sequence: AGGAAT
taggaggtttgtatatatgc

SEQ ID NO: 8067 - DNA, 20 bp, Artificial Sequence
  Description of Artificial Sequence: Synthetic oligonucleotide
  Target: SCNA; (-) strand; PAM type: NNGRRT; PAM sequence: GTGAAT
atttctgatagcattcacct

SEQ ID NO: 8068 - DNA, 20 bp, Artificial Sequence
  Description of Artificial Sequence: Synthetic oligonucleotide
  Target: SCNA; (-) strand; PAM type: NNGRRT; PAM sequence: TTGAAT
gaatttgtaccaatttttct

SEQ ID NO: 8069 - DNA, 20 bp, Artificial Sequence
  Description of Artificial Sequence: Synthetic oligonucleotide
  Target: SCNA; (-) strand; PAM type: NNGRRT; PAM sequence: TAGAAT
atcttttggaacagtttcaa

SEQ ID NO: 8070 - DNA, 20 bp, Artificial Sequence
  Description of Artificial Sequence: Synthetic oligonucleotide
  Target: SCNA; (-) strand; PAM type: NNGRRT; PAM sequence: GAGGAT
gcttcatagaatgatttagg

SEQ ID NO: 8071 - DNA, 20 bp, Artificial Sequence
  Description of Artificial Sequence: Synthetic oligonucleotide
  Target: SCNA; (-) strand; PAM type: NNGRRT; PAM sequence: TAGAAT
ttagggtaatactggcttca

SEQ ID NO: 8072 - DNA, 20 bp, Artificial Sequence
  Description of Artificial Sequence: Synthetic oligonucleotide
  Target: SCNA; (-) strand; PAM type: NNGRRT; PAM sequence: TAGGGT
tccttttctggttttgatat

SEQ ID NO: 8073 - DNA, 20 bp, Artificial Sequence
  Description of Artificial Sequence: Synthetic oligonucleotide
  Target: SCNA; (-) strand; PAM type: NNGRRT; PAM sequence: AGGGAT
tttttacatctctgttcatc

SEQ ID NO: 8074 - DNA, 20 bp, Artificial Sequence
  Description of Artificial Sequence: Synthetic oligonucleotide
  Target: SCNA; (-) strand; PAM type: NNGRRT; PAM sequence: GAGGAT
catttagctagtattttatt

SEQ ID NO: 8075 - DNA, 20 bp, Artificial Sequence
  Description of Artificial Sequence: Synthetic oligonucleotide
  Target: SCNA; (-) strand; PAM type: NNGRRT; PAM sequence: CTGGAT
attatctttttgatatgctg

SEQ ID NO: 8076 - DNA, 20 bp, Artificial Sequence
  Description of Artificial Sequence: Synthetic oligonucleotide
  Target: SCNA; (-) strand; PAM type: NNGRRT; PAM sequence: GTGGAT
atgaaacccacctgatcatg

SEQ ID NO: 8077 - DNA, 20 bp, Artificial Sequence
  Description of Artificial Sequence: Synthetic oligonucleotide
  Target: SCNA; (-) strand; PAM type: NNGRRT; PAM sequence: TTGAGT
aaatgctttttctgcatcta

SEQ ID NO: 8078 - DNA, 20 bp, Artificial Sequence
  Description of Artificial Sequence: Synthetic oligonucleotide
  Target: SCNA; (-) strand; PAM type: NNGRRT; PAM sequence: CTGAAT
gttttaatcataaagcaata

SEQ ID NO: 8079 - DNA, 20 bp, Artificial Sequence
  Description of Artificial Sequence: Synthetic oligonucleotide
  Target: SCNA; (-) strand; PAM type: NNGRRT; PAM sequence: GAGGGT
tcttatatgccagttttgct

SEQ ID NO: 8080 - DNA, 20 bp, Artificial Sequence
  Description of Artificial Sequence: Synthetic oligonucleotide
  Target: SCNA; (-) strand; PAM type: NNGRRT; PAM sequence: GTGGGT
cgttcaatataatgttggct

SEQ ID NO: 8081 - DNA, 20 bp, Artificial Sequence
  Description of Artificial Sequence: Synthetic oligonucleotide
  Target: SCNA; (-) strand; PAM type: NNGRRT; PAM sequence: TTGAAT
ctaggatttccagtactatg

SEQ ID NO: 8082 - DNA, 20 bp, Artificial Sequence
  Description of Artificial Sequence: Synthetic oligonucleotide
  Target: SCNA; (-) strand; PAM type: NNGRRT; PAM sequence: TAGGAT
tcttgtctgattgctctggc

SEQ ID NO: 8083 - DNA, 20 bp, Artificial Sequence
  Description of Artificial Sequence: Synthetic oligonucleotide
  Target: SCNA; (-) strand; PAM type: NNGRRT; PAM sequence: TTGGAT
ttgacttcctctttagcagt

SEQ ID NO: 8084 - DNA, 20 bp, Artificial Sequence
  Description of Artificial Sequence: Synthetic oligonucleotide
  Target: SCNA; (-) strand; PAM type: NNGRRT; PAM sequence: ATGAGT
cagatctaggagctttttgg

SEQ ID NO: 8085 - DNA, 20 bp, Artificial Sequence
  Description of Artificial Sequence: Synthetic oligonucleotide
  Target: SCNA; (-) strand; PAM type: NNGRRT; PAM sequence: TTGGAT
ttatcagatctaggagcttt

SEQ ID NO: 8086 - DNA, 20 bp, Artificial Sequence
  Description of Artificial Sequence: Synthetic oligonucleotide
  Target: SCNA; (-) strand; PAM type: NNGRRT; PAM sequence: CTGAAT
ttttgtatctggaaacttta

SEQ ID NO: 8087 - DNA, 20 bp, Artificial Sequence
  Description of Artificial Sequence: Synthetic oligonucleotide
  Target: SCNA; (-) strand; PAM type: NNGRRT; PAM sequence: AGGGAT
attctgccaatccatgaata

SEQ ID NO: 8088 - DNA, 20 bp, Artificial Sequence
  Description of Artificial Sequence: Synthetic oligonucleotide
  Target: SCNA; (-) strand; PAM type: NNGRRT; PAM sequence: ATGAAT
aatattgattctgccaatcc

SEQ ID NO: 8089 - DNA, 20 bp, Artificial Sequence
  Description of Artificial Sequence: Synthetic oligonucleotide
  Target: SCNA; (-) strand; PAM type: NNGRRT; PAM sequence: TTGAAT
gcattttgatgggagtcgca

SEQ ID NO: 8090 - DNA, 20 bp, Artificial Sequence
  Description of Artificial Sequence: Synthetic oligonucleotide
  Target: SCNA; (-) strand; PAM type: NNGRRT; PAM sequence: GGGAGT
aatgatggtggcattttgat

SEQ ID NO: 8091 - DNA, 20 bp, Artificial Sequence
  Description of Artificial Sequence: Synthetic oligonucleotide
  Target: SCNA; (-) strand; PAM type: NNGRRT; PAM sequence: AAGAAT
attttttttcttgttctttg

SEQ ID NO: 8092 - DNA, 20 bp, Artificial Sequence
  Description of Artificial Sequence: Synthetic oligonucleotide
  Target: SCNA; (-) strand; PAM type: NNGRRT; PAM sequence: GTGAAT
gggctgttgttttgttccat

SEQ ID NO: 8093 - DNA, 20 bp, Artificial Sequence
  Description of Artificial Sequence: Synthetic oligonucleotide
  Target: SCNA; (-) strand; PAM type: NNGRRT; PAM sequence: TTGGGT
tcttgtagtatagtttgaag

SEQ ID NO: 8094 - DNA, 20 bp, Artificial Sequence
  Description of Artificial Sequence: Synthetic oligonucleotide
  Target: SCNA; (-) strand; PAM type: NNGRRT; PAM sequence: CTGGAT
gtaagtatttagctttattt

SEQ ID NO: 8095 - DNA, 20 bp, Artificial Sequence
  Description of Artificial Sequence: Synthetic oligonucleotide
  Target: SCNA; (-) strand; PAM type: NNGRRT; PAM sequence: TAGGAT
tcccaacaccatttgttgaa

SEQ ID NO: 8096 - DNA, 20 bp, Artificial Sequence
  Description of Artificial Sequence: Synthetic oligonucleotide
  Target: SCNA; (-) strand; PAM type: NNGRRT; PAM sequence: TTGAAT
aattatcccaacaccatttg

SEQ ID NO: 8097 - DNA, 20 bp, Artificial Sequence
  Description of Artificial Sequence: Synthetic oligonucleotide
  Target: SCNA; (-) strand; PAM type: NNGRRT; PAM sequence: GAGGAT
ttttgtataagttgagagat

SEQ ID NO: 8098 - DNA, 20 bp, Artificial Sequence
  Description of Artificial Sequence: Synthetic oligonucleotide
  Target: SCNA; (-) strand; PAM type: NNGRRT; PAM sequence: GTGGAT
aagtctttgatccatcttga

SEQ ID NO: 8099 - DNA, 20 bp, Artificial Sequence
  Description of Artificial Sequence: Synthetic oligonucleotide
  Target: SCNA; (-) strand; PAM type: NNGRRT; PAM sequence: TTGAGT
atttaagtctttgatccatc

SEQ ID NO: 8100 - DNA, 20 bp, Artificial Sequence
  Description of Artificial Sequence: Synthetic oligonucleotide
  Target: SCNA; (-) strand; PAM type: NNGRRT; PAM sequence: TTGGGT
cttctataatttttaaggtt

SEQ ID NO: 8101 - DNA, 20 bp, Artificial Sequence
  Description of Artificial Sequence: Synthetic oligonucleotide
  Target: SCNA; (-) strand; PAM type: NNGRRT; PAM sequence: AAGAGT
ttgcttaagccagtgtctag

SEQ ID NO: 8102 - DNA, 20 bp, Artificial Sequence
  Description of Artificial Sequence: Synthetic oligonucleotide
  Target: SCNA; (-) strand; PAM type: NNGRRT; PAM sequence: GTGGGT
gcagatatttctcccattct

SEQ ID NO: 8103 - DNA, 20 bp, Artificial Sequence
  Description of Artificial Sequence: Synthetic oligonucleotide
  Target: SCNA; (-) strand; PAM type: NNGRRT; PAM sequence: ATGGAT
ggatattagtcctttgtcag

SEQ ID NO: 8104 - DNA, 20 bp, Artificial Sequence
  Description of Artificial Sequence: Synthetic oligonucleotide
  Target: SCNA; (-) strand; PAM type: NNGRRT; PAM sequence: CTGGAT
gtttgagttccttgtagatt

SEQ ID NO: 8105 - DNA, 20 bp, Artificial Sequence
  Description of Artificial Sequence: Synthetic oligonucleotide
  Target: SCNA; (-) strand; PAM type: NNGRRT; PAM sequence: TTGAGT
gttttttcttactgatttgt

SEQ ID NO: 8106 - DNA, 20 bp, Artificial Sequence
  Description of Artificial Sequence: Synthetic oligonucleotide
  Target: SCNA; (-) strand; PAM type: NNGRRT; PAM sequence: TAGGAT
gtccttagcccactttttga

SEQ ID NO: 8107 - DNA, 20 bp, Artificial Sequence
  Description of Artificial Sequence: Synthetic oligonucleotide
  Target: SCNA; (-) strand; PAM type: NNGRRT; PAM sequence: GAGAAT
ctgtttgtctatcttctttt

SEQ ID NO: 8108 - DNA, 20 bp, Artificial Sequence
  Description of Artificial Sequence: Synthetic oligonucleotide
  Target: SCNA; (-) strand; PAM type: NNGRRT; PAM sequence: AGGAGT
ttaattatggcaattcttgc

SEQ ID NO: 8109 - DNA, 20 bp, Artificial Sequence
  Description of Artificial Sequence: Synthetic oligonucleotide
  Target: SCNA; (-) strand; PAM type: NNGRRT; PAM sequence: AGGAAT
gttctacttttagttcttta

SEQ ID NO: 8110 - DNA, 20 bp, Artificial Sequence
  Description of Artificial Sequence: Synthetic oligonucleotide
  Target: SCNA; (-) strand; PAM type: NNGRRT; PAM sequence: TGGGAT
tctgggtagatacctaggag

SEQ ID NO: 8111 - DNA, 20 bp, Artificial Sequence
  Description of Artificial Sequence: Synthetic oligonucleotide
  Target: SCNA; (-) strand; PAM type: NNGRRT; PAM sequence: AGGAGT
tttcctctgggtagatacct

SEQ ID NO: 8112 - DNA, 20 bp, Artificial Sequence
  Description of Artificial Sequence: Synthetic oligonucleotide
  Target: SCNA; (-) strand; PAM type: NNGRRT; PAM sequence: CTGGGT
atataatgacttcttttcct

SEQ ID NO: 8113 - DNA, 20 bp, Artificial Sequence
  Description of Artificial Sequence: Synthetic oligonucleotide
  Target: SCNA; (-) strand; PAM type: NNGRRT; PAM sequence: GTGAAT
ggttccatatttttgcaatt

SEQ ID NO: 8114 - DNA, 20 bp, Artificial Sequence
  Description of Artificial Sequence: Synthetic oligonucleotide
  Target: SCNA; (-) strand; PAM type: NNGRRT; PAM sequence: ATGGGT
ctttatccactcattggttg

SEQ ID NO: 8115 - DNA, 20 bp, Artificial Sequence
  Description of Artificial Sequence: Synthetic oligonucleotide
  Target: SCNA; (-) strand; PAM type: NNGRRT; PAM sequence: CTGAGT
tattttgttcctttttatgg

SEQ ID NO: 8116 - DNA, 20 bp, Artificial Sequence
  Description of Artificial Sequence: Synthetic oligonucleotide
  Target: SCNA; (-) strand; PAM type: NNGRRT; PAM sequence: TAGAAT
cactcctgagttacttcact

SEQ ID NO: 8117 - DNA, 20 bp, Artificial Sequence
  Description of Artificial Sequence: Synthetic oligonucleotide
  Target: SCNA; (-) strand; PAM type: NNGRRT; PAM sequence: CTGAGT
taatgtttggttttccactc

SEQ ID NO: 8118 - DNA, 20 bp, Artificial Sequence
  Description of Artificial Sequence: Synthetic oligonucleotide
  Target: SCNA; (-) strand; PAM type: NNGRRT; PAM sequence: CAGAGT
cacccttcccctcaagtctc

SEQ ID NO: 8119 - DNA, 20 bp, Artificial Sequence
  Description of Artificial Sequence: Synthetic oligonucleotide
  Target: SCNA; (-) strand; PAM type: NNGRRT; PAM sequence: AAGGGT
tggattcttatattttgtgt

SEQ ID NO: 8120 - DNA, 20 bp, Artificial Sequence
  Description of Artificial Sequence: Synthetic oligonucleotide
  Target: SCNA; (-) strand; PAM type: NNGRRT; PAM sequence: GTGGAT
aatcgatgaagtgatttgta

SEQ ID NO: 8121 - DNA, 20 bp, Artificial Sequence
  Description of Artificial Sequence: Synthetic oligonucleotide
  Target: SCNA; (-) strand; PAM type: NNGRRT; PAM sequence: CGGAGT
aaaggttttgccttcttggg

SEQ ID NO: 8122 - DNA, 20 bp, Artificial Sequence
  Description of Artificial Sequence: Synthetic oligonucleotide
  Target: SCNA; (-) strand; PAM type: NNGRRT; PAM sequence: ATGGGT
cagtacctagacgggaaact

SEQ ID NO: 8123 - DNA, 20 bp, Artificial Sequence
  Description of Artificial Sequence: Synthetic oligonucleotide
  Target: SCNA; (-) strand; PAM type: NNGRRT; PAM sequence: CAGGAT
gagtaaatgtgagctgcaat

SEQ ID NO: 8124 - DNA, 20 bp, Artificial Sequence
  Description of Artificial Sequence: Synthetic oligonucleotide
  Target: SCNA; (-) strand; PAM type: NNGRRT; PAM sequence: AAGAGT
aagaagagggcctcttgttt

SEQ ID NO: 8125 - DNA, 20 bp, Artificial Sequence
  Description of Artificial Sequence: Synthetic oligonucleotide
  Target: SCNA; (-) strand; PAM type: NNGRRT; PAM sequence: GAGAAT
tattacagagtcacttacct

SEQ ID NO: 8126 - DNA, 20 bp, Artificial Sequence
  Description of Artificial Sequence: Synthetic oligonucleotide
  Target: SCNA; (-) strand; PAM type: NNGRRT; PAM sequence: CAGAGT
gctacacaatcctcttatta

SEQ ID NO: 8127 - DNA, 20 bp, Artificial Sequence
  Description of Artificial Sequence: Synthetic oligonucleotide
  Target: SCNA; (-) strand; PAM type: NNGRRT; PAM sequence: GAGAAT
tatttggctctatctacttt

SEQ ID NO: 8128 - DNA, 20 bp, Artificial Sequence
  Description of Artificial Sequence: Synthetic oligonucleotide
  Target: SCNA; (-) strand; PAM type: NNGRRT; PAM sequence: TGGGAT
cctaatgaaacagtgcgctc

SEQ ID NO: 8129 - DNA, 20 bp, Artificial Sequence
  Description of Artificial Sequence: Synthetic oligonucleotide
  Target: SCNA; (-) strand; PAM type: NNGRRT; PAM sequence: TTGAAT
tagcatgtaggtcattaacc

SEQ ID NO: 8130 - DNA, 20 bp, Artificial Sequence
  Description of Artificial Sequence: Synthetic oligonucleotide
  Target: SCNA; (-) strand; PAM type: NNGRRT; PAM sequence: GGGAGT
gtgttggttcagctaaagca

SEQ ID NO: 8131 - DNA, 20 bp, Artificial Sequence
  Description of Artificial Sequence: Synthetic oligonucleotide
  Target: SCNA; (-) strand; PAM type: NNGRRT; PAM sequence: TGGGGT
ttcacaaaggagtaaccacc

SEQ ID NO: 8132 - DNA, 20 bp, Artificial Sequence
  Description of Artificial Sequence: Synthetic oligonucleotide
  Target: SCNA; (-) strand; PAM type: NNGRRT; PAM sequence: AGGAGT
gtggatgcttatattcacaa

SEQ ID NO: 8133 - DNA, 20 bp, Artificial Sequence
  Description of Artificial Sequence: Synthetic oligonucleotide
  Target: SCNA; (-) strand; PAM type: NNGRRT; PAM sequence: GTGGAT
gcggaaacaaccaatttcat

SEQ ID NO: 8134 - DNA, 20 bp, Artificial Sequence
  Description of Artificial Sequence: Synthetic oligonucleotide
  Target: SCNA; (-) strand; PAM type: NNGRRT; PAM sequence: TGGAAT
gaattagacttggaagtcta

SEQ ID NO: 8135 - DNA, 20 bp, Artificial Sequence
  Description of Artificial Sequence: Synthetic oligonucleotide
  Target: SCNA; (-) strand; PAM type: NNGRRT; PAM sequence: TAGAAT
ctattgatggaagttagtat

SEQ ID NO: 8136 - DNA, 20 bp, Artificial Sequence
  Description of Artificial Sequence: Synthetic oligonucleotide
  Target: SCNA; (-) strand; PAM type: NNGRRT; PAM sequence: TTGGAT
ataggaccttcaggtagcct

SEQ ID NO: 8137 - DNA, 20 bp, Artificial Sequence
  Description of Artificial Sequence: Synthetic oligonucleotide
  Target: SCNA; (-) strand; PAM type: NNGRRT; PAM sequence: AGGAAT
tgtaaaaatacattaaatag

SEQ ID NO: 8138 - DNA, 20 bp, Artificial Sequence
  Description of Artificial Sequence: Synthetic oligonucleotide
  Target: SCNA; (-) strand; PAM type: NNGRRT; PAM sequence: AAGAGT
tgagatcacctagctcaagt

SEQ ID NO: 8139 - DNA, 20 bp, Artificial Sequence
  Description of Artificial Sequence: Synthetic oligonucleotide
  Target: SCNA; (-) strand; PAM type: NNGRRT; PAM sequence: TCGGGT
tctgtagattaatgctaaaa

SEQ ID NO: 8140 - DNA, 20 bp, Artificial Sequence
  Description of Artificial Sequence: Synthetic oligonucleotide
  Target: SCNA; (-) strand; PAM type: NNGRRT; PAM sequence: TAGAGT
atcataaatgagtttctcaa

SEQ ID NO: 8141 - DNA, 20 bp, Artificial Sequence
  Description of Artificial Sequence: Synthetic oligonucleotide
  Target: SCNA; (-) strand; PAM type: NNGRRT; PAM sequence: ATGAGT
gaaaaaactcatgatcataa

SEQ ID NO: 8142 - DNA, 20 bp, Artificial Sequence
  Description of Artificial Sequence: Synthetic oligonucleotide
  Target: SCNA; (-) strand; PAM type: NNGRRT; PAM sequence: CTGGAT
tttatcattgaaagttattt

SEQ ID NO: 8143 - DNA, 20 bp, Artificial Sequence
  Description of Artificial Sequence: Synthetic oligonucleotide
  Target: SCNA; (-) strand; PAM type: NNGRRT; PAM sequence: TGGGGT
ccttctgccatggggaaata

SEQ ID NO: 8144 - DNA, 20 bp, Artificial Sequence
  Description of Artificial Sequence: Synthetic oligonucleotide
  Target: SCNA; (-) strand; PAM type: NNGRRT; PAM sequence: TTGAGT
ctgataattattgactactg

SEQ ID NO: 8145 - DNA, 20 bp, Artificial Sequence
  Description of Artificial Sequence: Synthetic oligonucleotide
  Target: SCNA; (-) strand; PAM type: NNGRRT; PAM sequence: AAGGGT
ctgcttatgcatgatgacag

SEQ ID NO: 8146 - DNA, 20 bp, Artificial Sequence
  Description of Artificial Sequence: Synthetic oligonucleotide
  Target: SCNA; (-) strand; PAM type: NNGRRT; PAM sequence: CAGGGT
caatctgagctttgtggtcc

SEQ ID NO: 8147 - DNA, 20 bp, Artificial Sequence
  Description of Artificial Sequence: Synthetic oligonucleotide
  Target: SCNA; (-) strand; PAM type: NNGRRT; PAM sequence: AGGGAT
gatagtaatggcctctagat

SEQ ID NO: 8148 - DNA, 20 bp, Artificial Sequence
  Description of Artificial Sequence: Synthetic oligonucleotide
  Target: SCNA; (-) strand; PAM type: NNGRRT; PAM sequence: AAGAGT
aataaatattgctttttctt

SEQ ID NO: 8149 - DNA, 20 bp, Artificial Sequence
  Description of Artificial Sequence: Synthetic oligonucleotide
  Target: SCNA; (-) strand; PAM type: NNGRRT; PAM sequence: TAGAAT
tctcatggtaggttgggcac

SEQ ID NO: 8150 - DNA, 20 bp, Artificial Sequence
  Description of Artificial Sequence: Synthetic oligonucleotide
  Target: SCNA; (-) strand; PAM type: NNGRRT; PAM sequence: AGGAAT
agactcatcttcagacccag

SEQ ID NO: 8151 - DNA, 20 bp, Artificial Sequence
  Description of Artificial Sequence: Synthetic oligonucleotide
  Target: SCNA; (-) strand; PAM type: NNGRRT; PAM sequence: AGGGAT
ccgccagtcccggtgttgga

SEQ ID NO: 8152 - DNA, 20 bp, Artificial Sequence
  Description of Artificial Sequence: Synthetic oligonucleotide
  Target: SCNA; (-) strand; PAM type: NNGRRT; PAM sequence: TGGAGT
ggaagctccaaaagcaccag

SEQ ID NO: 8153 - DNA, 20 bp, Artificial Sequence
  Description of Artificial Sequence: Synthetic oligonucleotide
  Target: SCNA; (-) strand; PAM type: NNGRRT; PAM sequence: TTGAAT
aaattttttatgactgcata

SEQ ID NO: 8154 - DNA, 20 bp, Artificial Sequence
  Description of Artificial Sequence: Synthetic oligonucleotide
  Target: SCNA; (-) strand; PAM type: NNGRRT; PAM sequence: ATGAAT
ttgagtaatatgaattctaa

SEQ ID NO: 8155 - DNA, 20 bp, Artificial Sequence
  Description of Artificial Sequence: Synthetic oligonucleotide
  Target: SCNA; (-) strand; PAM type: NNGRRT; PAM sequence: ATGAAT
gtcaagtgtaattgagtaat

SEQ ID NO: 8156 - DNA, 20 bp, Artificial Sequence
  Description of Artificial Sequence: Synthetic oligonucleotide
  Target: SCNA; (-) strand; PAM type: NNGRRT; PAM sequence: TTGAGT
agtgttatagtcaagtgtaa

SEQ ID NO: 8157 - DNA, 20 bp, Artificial Sequence
  Description of Artificial Sequence: Synthetic oligonucleotide
  Target: SCNA; (-) strand; PAM type: NNGRRT; PAM sequence: TAGAGT
ctcatttcatatttttaaaa

SEQ ID NO: 8158 - DNA, 20 bp, Artificial Sequence
  Description of Artificial Sequence: Synthetic oligonucleotide
  Target: SCNA; (-) strand; PAM type: NNGRRT; PAM sequence: AAGAAT
ctcttcccacactatattag

SEQ ID NO: 8159 - DNA, 20 bp, Artificial Sequence
  Description of Artificial Sequence: Synthetic oligonucleotide
  Target: SCNA; (-) strand; PAM type: NNGRRT; PAM sequence: GGGAAT
tgactagaaaaagaaaacca

SEQ ID NO: 8160 - DNA, 20 bp, Artificial Sequence
  Description of Artificial Sequence: Synthetic oligonucleotide
  Target: SCNA; (-) strand; PAM type: NNGRRT; PAM sequence: AGGGGT
gacagtagtgttatgatgcc

SEQ ID NO: 8161 - DNA, 20 bp, Artificial Sequence
  Description of Artificial Sequence: Synthetic oligonucleotide
  Target: SCNA; (-) strand; PAM type: NNGRRT; PAM sequence: CTGGAT
ttggcattttattctacctt

SEQ ID NO: 8162 - DNA, 20 bp, Artificial Sequence
  Description of Artificial Sequence: Synthetic oligonucleotide
  Target: SCNA; (-) strand; PAM type: NNGRRT; PAM sequence: TGGAAT
aaaaaccatctgagaatctc

SEQ ID NO: 8163 - DNA, 20 bp, Artificial Sequence
  Description of Artificial Sequence: Synthetic oligonucleotide
  Target: SCNA; (-) strand; PAM type: NNGRRT; PAM sequence: GAGAAT
gggaaaagaaaaaaccatct

SEQ ID NO: 8164 - DNA, 20 bp, Artificial Sequence
  Description of Artificial Sequence: Synthetic oligonucleotide
  Target: SCNA; (-) strand; PAM type: NNGRRT; PAM sequence: TGGAAT
aaaggaataacatgaacaaa

SEQ ID NO: 8165 - DNA, 20 bp, Artificial Sequence
  Description of Artificial Sequence: Synthetic oligonucleotide
  Target: SCNA; (-) strand; PAM type: NNGRRT; PAM sequence: AGGAAT
aggactgatttatgatgaaa

SEQ ID NO: 8166 - DNA, 20 bp, Artificial Sequence
  Description of Artificial Sequence: Synthetic oligonucleotide
  Target: SCNA; (-) strand; PAM type: NNGRRT; PAM sequence: GTGAAT
tctagtatttcttaagatta

SEQ ID NO: 8167 - DNA, 20 bp, Artificial Sequence
  Description of Artificial Sequence: Synthetic oligonucleotide
  Target: SCNA; (-) strand; PAM type: NNGRRT; PAM sequence: CTGGAT
agttttaacttcagattgta

SEQ ID NO: 8168 - DNA, 20 bp, Artificial Sequence
  Description of Artificial Sequence: Synthetic oligonucleotide
  Target: SCNA; (-) strand; PAM type: NNGRRT; PAM sequence: GAGAGT
tgtaaaagcagagttattgt

SEQ ID NO: 8169 - DNA, 20 bp, Artificial Sequence
  Description of Artificial Sequence: Synthetic oligonucleotide
  Target: SCNA; (-) strand; PAM type: NNGRRT; PAM sequence: CAGAGT
tatatgcttatgtgtaaaag

SEQ ID NO: 8170 - DNA, 20 bp, Artificial Sequence
  Description of Artificial Sequence: Synthetic oligonucleotide
  Target: SCNA; (-) strand; PAM type: NNGRRT; PAM sequence: GAGGGT
ctgaatcttacatatagtaa

SEQ ID NO: 8171 - DNA, 20 bp, Artificial Sequence
  Description of Artificial Sequence: Synthetic oligonucleotide
  Target: SCNA; (-) strand; PAM type: NNGRRT; PAM sequence: CTGAAT
attcatgttatttaccctct

SEQ ID NO: 8172 - DNA, 20 bp, Artificial Sequence
  Description of Artificial Sequence: Synthetic oligonucleotide
  Target: SCNA; (-) strand; PAM type: NNGRRT; PAM sequence: AAGAGT
taatcactagcacataattt

SEQ ID NO: 8173 - DNA, 20 bp, Artificial Sequence
  Description of Artificial Sequence: Synthetic oligonucleotide
  Target: SCNA; (-) strand; PAM type: NNGRRT; PAM sequence: AGGAAT
tgatcctatagaaataatgt

SEQ ID NO: 8174 - DNA, 20 bp, Artificial Sequence
  Description of Artificial Sequence: Synthetic oligonucleotide
  Target: SCNA; (-) strand; PAM type: NNGRRT; PAM sequence: TTGAAT
accttcatcaacacctgttt

SEQ ID NO: 8175 - DNA, 20 bp, Artificial Sequence
  Description of Artificial Sequence: Synthetic oligonucleotide
  Target: SCNA; (-) strand; PAM type: NNGRRT; PAM sequence: GTGAAT
tctctggtttcagtttactt

SEQ ID NO: 8176 - DNA, 20 bp, Artificial Sequence
  Description of Artificial Sequence: Synthetic oligonucleotide
  Target: SCNA; (-) strand; PAM type: NNGRRT; PAM sequence: TTGGAT
tggagatagctaacatggat

SEQ ID NO: 8177 - DNA, 20 bp, Artificial Sequence
  Description of Artificial Sequence: Synthetic oligonucleotide
  Target: SCNA; (-) strand; PAM type: NNGRRT; PAM sequence: ATGGAT
tatgtctggagatagctaac

SEQ ID NO: 8178 - DNA, 20 bp, Artificial Sequence
  Description of Artificial Sequence: Synthetic oligonucleotide
  Target: SCNA; (-) strand; PAM type: NNGRRT; PAM sequence: TGGAGT
caaaccattggtcccatagt

SEQ ID NO: 8179 - DNA, 20 bp, Artificial Sequence
  Description of Artificial Sequence: Synthetic oligonucleotide
  Target: SCNA; (-) strand; PAM type: NNGRRT; PAM sequence: AAGGAT
ccatctttctttcaatttaa

SEQ ID NO: 8180 - DNA, 20 bp, Artificial Sequence
  Description of Artificial Sequence: Synthetic oligonucleotide
  Target: SCNA; (-) strand; PAM type: NNGRRT; PAM sequence: CAGAGT
ttttttttttttttttgaga

SEQ ID NO: 8181 - DNA, 20 bp, Artificial Sequence
  Description of Artificial Sequence: Synthetic oligonucleotide
  Target: SCNA; (-) strand; PAM type: NNGRRT; PAM sequence: CTGAGT
gaacttacttttatttatct

SEQ ID NO: 8182 - DNA, 20 bp, Artificial Sequence
  Description of Artificial Sequence: Synthetic oligonucleotide
  Target: SCNA; (-) strand; PAM type: NNGRRT; PAM sequence: ATGGAT
tctaatgccacaaagcattt

SEQ ID NO: 8183 - DNA, 20 bp, Artificial Sequence
  Description of Artificial Sequence: Synthetic oligonucleotide
  Target: SCNA; (-) strand; PAM type: NNGRRT; PAM sequence: GGGAAT
tatttagacattgccctact

SEQ ID NO: 8184 - DNA, 20 bp, Artificial Sequence
  Description of Artificial Sequence: Synthetic oligonucleotide
  Target: SCNA; (-) strand; PAM type: NNGRRT; PAM sequence: GTGGAT
tccttggattttttttatta

SEQ ID NO: 8185 - DNA, 20 bp, Artificial Sequence
  Description of Artificial Sequence: Synthetic oligonucleotide
  Target: SCNA; (-) strand; PAM type: NNGRRT; PAM sequence: TTGGAT
cactgttatccaaatgctcc

SEQ ID NO: 8186 - DNA, 20 bp, Artificial Sequence
  Description of Artificial Sequence: Synthetic oligonucleotide
  Target: SCNA; (-) strand; PAM type: NNGRRT; PAM sequence: TGGGAT
tatttgcatggaagaatcac

SEQ ID NO: 8187 - DNA, 20 bp, Artificial Sequence
  Description of Artificial Sequence: Synthetic oligonucleotide
  Target: SCNA; (-) strand; PAM type: NNGRRT; PAM sequence: AAGAAT
acactaacatatttgcatgg

SEQ ID NO: 8188 - DNA, 20 bp, Artificial Sequence
  Description of Artificial Sequence: Synthetic oligonucleotide
  Target: SCNA; (-) strand; PAM type: NNGRRT; PAM sequence: TTGGGT
caaggatgggaaaaagactt

SEQ ID NO: 8189 - DNA, 20 bp, Artificial Sequence
  Description of Artificial Sequence: Synthetic oligonucleotide
  Target: SCNA; (-) strand; PAM type: NNGRRT; PAM sequence: AAGGAT
tgtttgaatgttattgtgtc

SEQ ID NO: 8190 - DNA, 20 bp, Artificial Sequence
  Description of Artificial Sequence: Synthetic oligonucleotide
  Target: SCNA; (-) strand; PAM type: NNGRRT; PAM sequence: TTGAAT
gagatcattaaaaatcatgt

SEQ ID NO: 8191 - DNA, 20 bp, Artificial Sequence
  Description of Artificial Sequence: Synthetic oligonucleotide
  Target: SCNA; (-) strand; PAM type: NNGRRT; PAM sequence: TTGAGT
aagtaaaatgaaacattatt

SEQ ID NO: 8192 - DNA, 20 bp, Artificial Sequence
  Description of Artificial Sequence: Synthetic oligonucleotide
  Target: SCNA; (-) strand; PAM type: NNGRRT; PAM sequence: CGGAAT
gctcaagaagaattagtatg

SEQ ID NO: 8193 - DNA, 20 bp, Artificial Sequence
  Description of Artificial Sequence: Synthetic oligonucleotide
  Target: SCNA; (-) strand; PAM type: NNGRRT; PAM sequence: AAGAAT
cttctgtcagtgagctcaag

SEQ ID NO: 8194 - DNA, 20 bp, Artificial Sequence
  Description of Artificial Sequence: Synthetic oligonucleotide
  Target: SCNA; (-) strand; PAM type: NNGRRT; PAM sequence: GGGAGT
ttgaaactaagctagatcat

SEQ ID NO: 8195 - DNA, 20 bp, Artificial Sequence
  Description of Artificial Sequence: Synthetic oligonucleotide
  Target: SCNA; (-) strand; PAM type: NNGRRT; PAM sequence: CTGAAT
ttcccttcagcaaatataaa

SEQ ID NO: 8196 - DNA, 20 bp, Artificial Sequence
  Description of Artificial Sequence: Synthetic oligonucleotide
  Target: SCNA; (-) strand; PAM type: NNGRRT; PAM sequence: GTGGAT
tctgttattaagcactgtgt

SEQ ID NO: 8197 - DNA, 20 bp, Artificial Sequence
  Description of Artificial Sequence: Synthetic oligonucleotide
  Target: SCNA; (-) strand; PAM type: NNGRRT; PAM sequence: TTGGAT
ttatttcctttctcattcct

SEQ ID NO: 8198 - DNA, 20 bp, Artificial Sequence
  Description of Artificial Sequence: Synthetic oligonucleotide
  Target: SCNA; (-) strand; PAM type: NNGRRT; PAM sequence: GGGGAT
gcagccccaccgtcttctga

SEQ ID NO: 8199 - DNA, 20 bp, Artificial Sequence
  Description of Artificial Sequence: Synthetic oligonucleotide
  Target: SCNA; (-) strand; PAM type: NNGRRT; PAM sequence: GTGAGT
taggtgtttttggcaggtgg

SEQ ID NO: 8200 - DNA, 20 bp, Artificial Sequence
  Description of Artificial Sequence: Synthetic oligonucleotide
  Target: SCNA; (-) strand; PAM type: NNGRRT; PAM sequence: GTGGGT
atggtaggtgtttttggcag

SEQ ID NO: 8201 - DNA, 20 bp, Artificial Sequence
  Description of Artificial Sequence: Synthetic oligonucleotide
  Target: SCNA; (-) strand; PAM type: NNGRRT; PAM sequence: ATGAAT
tgtatattaaatagtgttaa

SEQ ID NO: 8202 - DNA, 20 bp, Artificial Sequence
  Description of Artificial Sequence: Synthetic oligonucleotide
  Target: SCNA; (-) strand; PAM type: NNGRRT; PAM sequence: GTGGAT
aattaggaattctgggtgaa

SEQ ID NO: 8203 - DNA, 20 bp, Artificial Sequence
  Description of Artificial Sequence: Synthetic oligonucleotide
  Target: SCNA; (-) strand; PAM type: NNGRRT; PAM sequence: CTGGGT
aatgttaacaattaggaatt

SEQ ID NO: 8204 - DNA, 20 bp, Artificial Sequence
  Description of Artificial Sequence: Synthetic oligonucleotide
  Target: SCNA; (-) strand; PAM type: NNGRRT; PAM sequence: AGGAAT
gaggtaaaatgttaacaatt

SEQ ID NO: 8205 - DNA, 20 bp, Artificial Sequence
  Description of Artificial Sequence: Synthetic oligonucleotide
  Target: SCNA; (-) strand; PAM type: NNGRRT; PAM sequence: TAGGGT
gaggtacttactgaagtact

SEQ ID NO: 8206 - DNA, 20 bp, Artificial Sequence
  Description of Artificial Sequence: Synthetic oligonucleotide
  Target: SCNA; (-) strand; PAM type: NNGRRT; PAM sequence: GAGAAT
tttacagtgttagtgtagaa

SEQ ID NO: 8207 - DNA, 20 bp, Artificial Sequence
  Description of Artificial Sequence: Synthetic oligonucleotide
  Target: SCNA; (-) strand; PAM type: NNGRRT; PAM sequence: TTGGAT
taatttaatcatcctctggc

SEQ ID NO: 8208 - DNA, 20 bp, Artificial Sequence
  Description of Artificial Sequence: Synthetic oligonucleotide
  Target: SCNA; (-) strand; PAM type: NNGRRT; PAM sequence: CAGGAT
tggtggatgaaagagaaagc

SEQ ID NO: 8209 - DNA, 20 bp, Artificial Sequence
  Description of Artificial Sequence: Synthetic oligonucleotide
  Target: SCNA; (-) strand; PAM type: NNGRRT; PAM sequence: GTGGAT
aagagagagagacagagatg

SEQ ID NO: 8210 - DNA, 20 bp, Artificial Sequence
  Description of Artificial Sequence: Synthetic oligonucleotide
  Target: SCNA; (-) strand; PAM type: NNGRRT; PAM sequence: ATGAAT
cacgtagcattatattaaaa

SEQ ID NO: 8211 - DNA, 20 bp, Artificial Sequence
  Description of Artificial Sequence: Synthetic oligonucleotide
  Target: SCNA; (-) strand; PAM type: NNGRRT; PAM sequence: CAGAAT
atgcttttaccagtgatttt

SEQ ID NO: 8212 - DNA, 20 bp, Artificial Sequence
  Description of Artificial Sequence: Synthetic oligonucleotide
  Target: SCNA; (-) strand; PAM type: NNGRRT; PAM sequence: GGGGAT
gtccatatcaggtagacttt

SEQ ID NO: 8213 - DNA, 20 bp, Artificial Sequence
  Description of Artificial Sequence: Synthetic oligonucleotide
  Target: SCNA; (-) strand; PAM type: NNGRRT; PAM sequence: ATGAAT
tcttaaactcagaattttta

SEQ ID NO: 8214 - DNA, 20 bp, Artificial Sequence
  Description of Artificial Sequence: Synthetic oligonucleotide
  Target: SCNA; (-) strand; PAM type: NNGRRT; PAM sequence: CAGAAT
cttagctgttttcttaaact

SEQ ID NO: 8215 - DNA, 20 bp, Artificial Sequence
  Description of Artificial Sequence: Synthetic oligonucleotide
  Target: SCNA; (-) strand; PAM type: NNGRRT; PAM sequence: GAGAAT
aaaagatgctggtcagcaag

SEQ ID NO: 8216 - DNA, 20 bp, Artificial Sequence
  Description of Artificial Sequence: Synthetic oligonucleotide
  Target: SCNA; (-) strand; PAM type: NNGRRT; PAM sequence: AAGAAT
attcagatttaatccaagtg

SEQ ID NO: 8217 - DNA, 20 bp, Artificial Sequence
  Description of Artificial Sequence: Synthetic oligonucleotide
  Target: SCNA; (-) strand; PAM type: NNGRRT; PAM sequence: AGGAAT
ggaagatattttataagcaa

SEQ ID NO: 8218 - DNA, 20 bp, Artificial Sequence
  Description of Artificial Sequence: Synthetic oligonucleotide
  Target: SCNA; (-) strand; PAM type: NNGRRT; PAM sequence: CTGGAT
tgacagtgtgagttatgcta

SEQ ID NO: 8219 - DNA, 20 bp, Artificial Sequence
  Description of Artificial Sequence: Synthetic oligonucleotide
  Target: SCNA; (-) strand; PAM type: NNGRRT; PAM sequence: GTGAGT
agtaaggccttgttgacagt

SEQ ID NO: 8220 - DNA, 20 bp, Artificial Sequence
  Description of Artificial Sequence: Synthetic oligonucleotide
  Target: SCNA; (-) strand; PAM type: NNGRRT; PAM sequence: AAGGAT
gcagtgtttggtttgtgata

SEQ ID NO: 8221 - DNA, 20 bp, Artificial Sequence
  Description of Artificial Sequence: Synthetic oligonucleotide
  Target: SCNA; (-) strand; PAM type: NNGRRT; PAM sequence: CTGAAT
atccatgaaacaaaatgttt

SEQ ID NO: 8222 - DNA, 20 bp, Artificial Sequence
  Description of Artificial Sequence: Synthetic oligonucleotide
  Target: SCNA; (-) strand; PAM type: NNGRRT; PAM sequence: AGGAAT
gaagggaatgtatttttagc

SEQ ID NO: 8223 - DNA, 20 bp, Artificial Sequence
  Description of Artificial Sequence: Synthetic oligonucleotide
  Target: SCNA; (-) strand; PAM type: NNGRRT; PAM sequence: GGGAAT
tattgtgaatattcagggaa

SEQ ID NO: 8224 - DNA, 20 bp, Artificial Sequence
  Description of Artificial Sequence: Synthetic oligonucleotide
  Target: SCNA; (-) strand; PAM type: NNGRRT; PAM sequence: GTGAAT
agaatttttggcaagctatt

SEQ ID NO: 8225 - DNA, 20 bp, Artificial Sequence
  Description of Artificial Sequence: Synthetic oligonucleotide
  Target: SCNA; (-) strand; PAM type: NNGRRT; PAM sequence: GAGAAT
ttctgtctttattcatttgt

SEQ ID NO: 8226 - DNA, 20 bp, Artificial Sequence
  Description of Artificial Sequence: Synthetic oligonucleotide
  Target: SCNA; (-) strand; PAM type: NNGRRT; PAM sequence: CTGAAT
atgttgaaattatttaaaac

SEQ ID NO: 8227 - DNA, 20 bp, Artificial Sequence
  Description of Artificial Sequence: Synthetic oligonucleotide
  Target: SCNA; (-) strand; PAM type: NNGRRT; PAM sequence: ACGAAT
tgttatagtttcatgacata

SEQ ID NO: 8228 - DNA, 20 bp, Artificial Sequence
  Description of Artificial Sequence: Synthetic oligonucleotide
  Target: SCNA; (-) strand; PAM type: NNGRRT; PAM sequence: ATGGAT
gaaatctgggtctcttggga

SEQ ID NO: 8229 - DNA, 20 bp, Artificial Sequence
  Description of Artificial Sequence: Synthetic oligonucleotide
  Target: SCNA; (-) strand; PAM type: NNGRRT; PAM sequence: GGGAAT
tagagaaatctgggtctctt

SEQ ID NO: 8230 - DNA, 20 bp, Artificial Sequence
  Description of Artificial Sequence: Synthetic oligonucleotide
  Target: SCNA; (-) strand; PAM type: NNGRRT; PAM sequence: CTGGGT
actagaactggtagagaaat

SEQ ID NO: 8231 - DNA, 20 bp, Artificial Sequence
  Description of Artificial Sequence: Synthetic oligonucleotide
  Target: SCNA; (-) strand; PAM type: NNGRRT; PAM sequence: GAGAAT
aactaggaaaacttaccgct

SEQ ID NO: 8232 - DNA, 20 bp, Artificial Sequence
  Description of Artificial Sequence: Synthetic oligonucleotide
  Target: SCNA; (-) strand; PAM type: NNGRRT; PAM sequence: TGGAAT
ttattcggataggctgctgc

SEQ ID NO: 8233 - DNA, 20 bp, Artificial Sequence
  Description of Artificial Sequence: Synthetic oligonucleotide
  Target: SCNA; (-) strand; PAM type: NNGRRT; PAM sequence: TCGGAT
tgagataaggattttgttat

SEQ ID NO: 8234 - DNA, 20 bp, Artificial Sequence
  Description of Artificial Sequence: Synthetic oligonucleotide
  Target: SCNA; (-) strand; PAM type: NNGRRT; PAM sequence: AAGGAT
agagatggttttcctgagat

SEQ ID NO: 8235 - DNA, 20 bp, Artificial Sequence
  Description of Artificial Sequence: Synthetic oligonucleotide
  Target: SCNA; (-) strand; PAM type: NNGRRT; PAM sequence: ATGAAT
agtaattaaattgatacctg

SEQ ID NO: 8236 - DNA, 20 bp, Artificial Sequence
  Description of Artificial Sequence: Synthetic oligonucleotide
  Target: SCNA; (-) strand; PAM type: NNGRRT; PAM sequence: CTGAAT
aatccggacagctgaagata

SEQ ID NO: 8237 - DNA, 20 bp, Artificial Sequence
  Description of Artificial Sequence: Synthetic oligonucleotide
  Target: SCNA; (-) strand; PAM type: NNGRRT; PAM sequence: GTGAAT
agagagcatgctataaaatg

SEQ ID NO: 8238 - DNA, 20 bp, Artificial Sequence
  Description of Artificial Sequence: Synthetic oligonucleotide
  Target: SCNA; (-) strand; PAM type: NNGRRT; PAM sequence: TAGAGT
caaaccattacctaaatatg

SEQ ID NO: 8239 - DNA, 20 bp, Artificial Sequence
  Description of Artificial Sequence: Synthetic oligonucleotide
  Target: SCNA; (-) strand; PAM type: NNGRRT; PAM sequence: GTGGGT
catcagttgtgtctcctgag

SEQ ID NO: 8240 - DNA, 20 bp, Artificial Sequence
  Description of Artificial Sequence: Synthetic oligonucleotide
  Target: SCNA; (-) strand; PAM type: NNGRRT; PAM sequence: TAGGAT
tttaataagagatttttcca

SEQ ID NO: 8241 - DNA, 20 bp, Artificial Sequence
  Description of Artificial Sequence: Synthetic oligonucleotide
  Target: SCNA; (-) strand; PAM type: NNGRRT; PAM sequence: CAGAAT
cacacaaaatcacagctatg

SEQ ID NO: 8242 - DNA, 20 bp, Artificial Sequence
  Description of Artificial Sequence: Synthetic oligonucleotide
  Target: SCNA; (-) strand; PAM type: NNGRRT; PAM sequence: TGGGGT
tcatcaccttttatggtggg

SEQ ID NO: 8243 - DNA, 20 bp, Artificial Sequence
  Description of Artificial Sequence: Synthetic oligonucleotide
  Target: SCNA; (-) strand; PAM type: NNGRRT; PAM sequence: GTGGGT
atttatcatcaccttttatg

SEQ ID NO: 8244 - DNA, 20 bp, Artificial Sequence
  Description of Artificial Sequence: Synthetic oligonucleotide
  Target: SCNA; (-) strand; PAM type: NNGRRT; PAM sequence: ATGAGT
gctggaaaatttcaatcagc

SEQ ID NO: 8245 - DNA, 20 bp, Artificial Sequence
  Description of Artificial Sequence: Synthetic oligonucleotide
  Target: SCNA; (-) strand; PAM type: NNGRRT; PAM sequence: GGGGGT
gaagcaagaaatccagtagt

SEQ ID NO: 8246 - DNA, 20 bp, Artificial Sequence
  Description of Artificial Sequence: Synthetic oligonucleotide
  Target: SCNA; (-) strand; PAM type: NNGRRT; PAM sequence: GTGAGT
ctcctcagctatgcagaacg

SEQ ID NO: 8247 - DNA, 20 bp, Artificial Sequence
  Description of Artificial Sequence: Synthetic oligonucleotide
  Target: SCNA; (-) strand; PAM type: NNGRRT; PAM sequence: ATGAGT
tgctgttctcatgatagtga

SEQ ID NO: 8248 - DNA, 20 bp, Artificial Sequence
  Description of Artificial Sequence: Synthetic oligonucleotide
  Target: SCNA; (-) strand; PAM type: NNGRRT; PAM sequence: GTGAAT
tccatgctgttctcatgata

SEQ ID NO: 8249 - DNA, 20 bp, Artificial Sequence
  Description of Artificial Sequence: Synthetic oligonucleotide
  Target: SCNA; (-) strand; PAM type: NNGRRT; PAM sequence: GGGGGT
atgggaggtgattggatcat

SEQ ID NO: 8250 - DNA, 20 bp, Artificial Sequence
  Description of Artificial Sequence: Synthetic oligonucleotide
  Target: SCNA; (-) strand; PAM type: NNGRRT; PAM sequence: TTGGAT
agggaccttatgggaggtga

SEQ ID NO: 8251 - DNA, 20 bp, Artificial Sequence
  Description of Artificial Sequence: Synthetic oligonucleotide
  Target: SCNA; (-) strand; PAM type: NNGRRT; PAM sequence: TTGAAT
gtccccacccaaatctcatc

SEQ ID NO: 8252 - DNA, 20 bp, Artificial Sequence
  Description of Artificial Sequence: Synthetic oligonucleotide
  Target: SCNA; (-) strand; PAM type: NNGRRT; PAM sequence: AAGAAT
taaagtataatttaaaaaaa

SEQ ID NO: 8253 - DNA, 20 bp, Artificial Sequence
  Description of Artificial Sequence: Synthetic oligonucleotide
  Target: SCNA; (-) strand; PAM type: NNGRRT; PAM sequence: AGGAGT
ttcaagtgaaagcattttgg

SEQ ID NO: 8254 - DNA, 20 bp, Artificial Sequence
  Description of Artificial Sequence: Synthetic oligonucleotide
  Target: SCNA; (-) strand; PAM type: NNGRRT; PAM sequence: AAGGAT
ataagaggatgtgttactct

SEQ ID NO: 8255 - DNA, 20 bp, Artificial Sequence
  Description of Artificial Sequence: Synthetic oligonucleotide
  Target: SCNA; (-) strand; PAM type: NNGRRT; PAM sequence: GAGGAT
gtttccccatttgtaaataa

SEQ ID NO: 8256 - DNA, 20 bp, Artificial Sequence
  Description of Artificial Sequence: Synthetic oligonucleotide
  Target: SCNA; (-) strand; PAM type: NNGRRT; PAM sequence: ATGGAT
ccctgttgtacccctagctt

SEQ ID NO: 8257 - DNA, 20 bp, Artificial Sequence
  Description of Artificial Sequence: Synthetic oligonucleotide
  Target: SCNA; (-) strand; PAM type: NNGRRT; PAM sequence: CAGGAT
catatcagggagaaattgaa

SEQ ID NO: 8258 - DNA, 20 bp, Artificial Sequence
  Description of Artificial Sequence: Synthetic oligonucleotide
  Target: SCNA; (-) strand; PAM type: NNGRRT; PAM sequence: TAGGAT
gttggtaggtactccatcgc

SEQ ID NO: 8259 - DNA, 20 bp, Artificial Sequence
  Description of Artificial Sequence: Synthetic oligonucleotide
  Target: SCNA; (-) strand; PAM type: NNGRRT; PAM sequence: CAGAAT
tcaatttggaagagtgtcca

SEQ ID NO: 8260 - DNA, 20 bp, Artificial Sequence
  Description of Artificial Sequence: Synthetic oligonucleotide
  Target: SCNA; (-) strand; PAM type: NNGRRT; PAM sequence: AAGAGT
aggagattgtttcaatttgg

SEQ ID NO: 8261 - DNA, 20 bp, Artificial Sequence
  Description of Artificial Sequence: Synthetic oligonucleotide
  Target: SCNA; (-) strand; PAM type: NNGRRT; PAM sequence: AGGAGT
gagaatacataagctgtgcc

SEQ ID NO: 8262 - DNA, 20 bp, Artificial Sequence
  Description of Artificial Sequence: Synthetic oligonucleotide
  Target: SCNA; (-) strand; PAM type: NNGRRT; PAM sequence: GAGAAT
atgaccaggggattggctat

SEQ ID NO: 8263 - DNA, 20 bp, Artificial Sequence
  Description of Artificial Sequence: Synthetic oligonucleotide
  Target: SCNA; (-) strand; PAM type: NNGRRT; PAM sequence: GGGGAT
tagtgtcagagtcatgacca

SEQ ID NO: 8264 - DNA, 20 bp, Artificial Sequence
  Description of Artificial Sequence: Synthetic oligonucleotide
  Target: SCNA; (-) strand; PAM type: NNGRRT; PAM sequence: CAGAGT
tactttttatctactagtgt

SEQ ID NO: 8265 - DNA, 20 bp, Artificial Sequence
  Description of Artificial Sequence: Synthetic oligonucleotide
  Target: SCNA; (-) strand; PAM type: NNGRRT; PAM sequence: TAGAGT
tgatgaaaagatcaagagat

SEQ ID NO: 8266 - DNA, 20 bp, Artificial Sequence
  Description of Artificial Sequence: Synthetic oligonucleotide
  Target: SCNA; (-) strand; PAM type: NNGRRT; PAM sequence: CTGAGT
agctaaggtttgtttagact

SEQ ID NO: 8267 - DNA, 20 bp, Artificial Sequence
  Description of Artificial Sequence: Synthetic oligonucleotide
  Target: SCNA; (-) strand; PAM type: NNGRRT; PAM sequence: CAGAGT
actgcactccagcctggcaa

SEQ ID NO: 8268 - DNA, 20 bp, Artificial Sequence
  Description of Artificial Sequence: Synthetic oligonucleotide
  Target: SCNA; (-) strand; PAM type: NNGRRT; PAM sequence: AGGAGT
gagaatcacttgaacaacca

SEQ ID NO: 8269 - DNA, 20 bp, Artificial Sequence
  Description of Artificial Sequence: Synthetic oligonucleotide
  Target: SCNA; (-) strand; PAM type: NNGRRT; PAM sequence: GAGAAT
tatttgggaggctgaggcaa

SEQ ID NO: 8270 - DNA, 20 bp, Artificial Sequence
  Description of Artificial Sequence: Synthetic oligonucleotide
  Target: SCNA; (-) strand; PAM type: NNGRRT; PAM sequence: GTGGAT
actttggaaggctgaggtgg

SEQ ID NO: 8271 - DNA, 20 bp, Artificial Sequence
  Description of Artificial Sequence: Synthetic oligonucleotide
  Target: SCNA; (-) strand; PAM type: NNGRRT; PAM sequence: GTGGGT
cagcactttggaaggctgag

SEQ ID NO: 8272 - DNA, 20 bp, Artificial Sequence
  Description of Artificial Sequence: Synthetic oligonucleotide
  Target: SCNA; (-) strand; PAM type: NNGRRT; PAM sequence: TTGGAT
aaggcaaactaaatgtttta

SEQ ID NO: 8273 - DNA, 20 bp, Artificial Sequence
  Description of Artificial Sequence: Synthetic oligonucleotide
  Target: SCNA; (-) strand; PAM type: NNGRRT; PAM sequence: TAGAGT
tgctgaagaggaggtattaa

SEQ ID NO: 8274 - DNA, 20 bp, Artificial Sequence
  Description of Artificial Sequence: Synthetic oligonucleotide
  Target: SCNA; (-) strand; PAM type: NNGRRT; PAM sequence: TAGAGT
caaggagacagattttctcc

SEQ ID NO: 8275 - DNA, 20 bp, Artificial Sequence
  Description of Artificial Sequence: Synthetic oligonucleotide
  Target: SCNA; (-) strand; PAM type: NNGRRT; PAM sequence: ATGAAT
gccagatcatgaaagaagct

SEQ ID NO: 8276 - DNA, 20 bp, Artificial Sequence
  Description of Artificial Sequence: Synthetic oligonucleotide
  Target: SCNA; (-) strand; PAM type: NNGRRT; PAM sequence: TAGGAT
cagaaaataagtataacgta

SEQ ID NO: 8277 - DNA, 20 bp, Artificial Sequence
  Description of Artificial Sequence: Synthetic oligonucleotide
  Target: SCNA; (-) strand; PAM type: NNGRRT; PAM sequence: CTGGAT
caggcatcattttaaggcac

SEQ ID NO: 8278 - DNA, 20 bp, Artificial Sequence
  Description of Artificial Sequence: Synthetic oligonucleotide
  Target: SCNA; (-) strand; PAM type: NNGRRT; PAM sequence: TTGAGT
catttattaacctatgttga

SEQ ID NO: 8279 - DNA, 20 bp, Artificial Sequence
  Description of Artificial Sequence: Synthetic oligonucleotide
  Target: SCNA; (-) strand; PAM type: NNGRRT; PAM sequence: CTGAGT
acatatgagacttaagatgt

SEQ ID NO: 8280 - DNA, 20 bp, Artificial Sequence
  Description of Artificial Sequence: Synthetic oligonucleotide
  Target: SCNA; (-) strand; PAM type: NNGRRT; PAM sequence: TTGGAT
aaagaaacagaaaaggcaat

SEQ ID NO: 8281 - DNA, 20 bp, Artificial Sequence
  Description of Artificial Sequence: Synthetic oligonucleotide
  Target: SCNA; (-) strand; PAM type: NNGRRT; PAM sequence: TAGAAT
gtgggcacagctgtgggtgg

SEQ ID NO: 8282 - DNA, 20 bp, Artificial Sequence
  Description of Artificial Sequence: Synthetic oligonucleotide
  Target: SCNA; (-) strand; PAM type: NNGRRT; PAM sequence: GTGGGT
tcataatagtgggcacagct

SEQ ID NO: 8283 - DNA, 20 bp, Artificial Sequence
  Description of Artificial Sequence: Synthetic oligonucleotide
  Target: SCNA; (-) strand; PAM type: NNGRRT; PAM sequence: GTGAAT
ccccattttgagttctgaaa

SEQ ID NO: 8284 - DNA, 20 bp, Artificial Sequence
  Description of Artificial Sequence: Synthetic oligonucleotide
  Target: SCNA; (-) strand; PAM type: NNGRRT; PAM sequence: TTGAGT
ccaccaccctacaccccatt

SEQ ID NO: 8285 - DNA, 20 bp, Artificial Sequence
  Description of Artificial Sequence: Synthetic oligonucleotide
  Target: SCNA; (-) strand; PAM type: NNGRRT; PAM sequence: GTGGAT
tgtccagtatcgagggaagt

SEQ ID NO: 8286 - DNA, 20 bp, Artificial Sequence
  Description of Artificial Sequence: Synthetic oligonucleotide
  Target: SCNA; (-) strand; PAM type: NNGRRT; PAM sequence: AGGGAT
gcagactgctgtgagtatgt

SEQ ID NO: 8287 - DNA, 20 bp, Artificial Sequence
  Description of Artificial Sequence: Synthetic oligonucleotide
  Target: SCNA; (-) strand; PAM type: NNGRRT; PAM sequence: GTGAGT
gatatgttttgcagactgct

SEQ ID NO: 8288 - DNA, 20 bp, Artificial Sequence
  Description of Artificial Sequence: Synthetic oligonucleotide
  Target: SCNA; (-) strand; PAM type: NNGRRT; PAM sequence: TTGGAT
ttcagtgtctcagtgggccc

SEQ ID NO: 8289 - DNA, 20 bp, Artificial Sequence
  Description of Artificial Sequence: Synthetic oligonucleotide
  Target: SCNA; (-) strand; PAM type: NNGRRT; PAM sequence: ATGGGT
tgcaaatatgtattaaatca

SEQ ID NO: 8290 - DNA, 20 bp, Artificial Sequence
  Description of Artificial Sequence: Synthetic oligonucleotide
  Target: SCNA; (-) strand; PAM type: NNGRRT; PAM sequence: AAGGAT
aggataataatattgaagtt

SEQ ID NO: 8291 - DNA, 20 bp, Artificial Sequence
  Description of Artificial Sequence: Synthetic oligonucleotide
  Target: SCNA; (-) strand; PAM type: NNGRRT; PAM sequence: CAGGAT
acacaaagtatgaatctaca

SEQ ID NO: 8292 - DNA, 20 bp, Artificial Sequence
  Description of Artificial Sequence: Synthetic oligonucleotide
  Target: SCNA; (-) strand; PAM type: NNGRRT; PAM sequence: ATGAAT
aagtaaaaaatacacaaagt

SEQ ID NO: 8293 - DNA, 20 bp, Artificial Sequence
  Description of Artificial Sequence: Synthetic oligonucleotide
  Target: SCNA; (-) strand; PAM type: NNGRRT; PAM sequence: GCGAAT
tcttcaaagtgtttctccta

SEQ ID NO: 8294 - DNA, 20 bp, Artificial Sequence
  Description of Artificial Sequence: Synthetic oligonucleotide
  Target: SCNA; (-) strand; PAM type: NNGRRT; PAM sequence: ATGAGT
taaataaaataatgtggcaa

SEQ ID NO: 8295 - DNA, 20 bp, Artificial Sequence
  Description of Artificial Sequence: Synthetic oligonucleotide
  Target: SCNA; (-) strand; PAM type: NNGRRT; PAM sequence: AGGAAT
agtccactctctgtaggtta

SEQ ID NO: 8296 - DNA, 20 bp, Artificial Sequence
  Description of Artificial Sequence: Synthetic oligonucleotide
  Target: SCNA; (-) strand; PAM type: NNGRRT; PAM sequence: AAGAAT
aacaccctagcaatagaagt

SEQ ID NO: 8297 - DNA, 20 bp, Artificial Sequence
  Description of Artificial Sequence: Synthetic oligonucleotide
  Target: SCNA; (-) strand; PAM type: NNGRRT; PAM sequence: CAGAGT
catctagacatcaagtagtc

SEQ ID NO: 8298 - DNA, 20 bp, Artificial Sequence
  Description of Artificial Sequence: Synthetic oligonucleotide
  Target: SCNA; (-) strand; PAM type: NNGRRT; PAM sequence: TGGAAT
caatatggagtttcttttct

SEQ ID NO: 8299 - DNA, 20 bp, Artificial Sequence
  Description of Artificial Sequence: Synthetic oligonucleotide
  Target: SCNA; (-) strand; PAM type: NNGRRT; PAM sequence: TGGAGT
tctgtgtttagatggcaata

SEQ ID NO: 8300 - DNA, 20 bp, Artificial Sequence
  Description of Artificial Sequence: Synthetic oligonucleotide
  Target: SCNA; (-) strand; PAM type: NNGRRT; PAM sequence: TGGAAT
cgaatttaaatgactttcac

SEQ ID NO: 8301 - DNA, 20 bp, Artificial Sequence
  Description of Artificial Sequence: Synthetic oligonucleotide
  Target: SCNA; (-) strand; PAM type: NNGRRT; PAM sequence: TCGAAT
ctcaagttaaatttttctat

SEQ ID NO: 8302 - DNA, 20 bp, Artificial Sequence
  Description of Artificial Sequence: Synthetic oligonucleotide
  Target: SCNA; (-) strand; PAM type: NNGRRT; PAM sequence: TTGAAT
aaatagggttcgagaactat

SEQ ID NO: 8303 - DNA, 20 bp, Artificial Sequence
  Description of Artificial Sequence: Synthetic oligonucleotide
  Target: SCNA; (-) strand; PAM type: NNGRRT; PAM sequence: TAGGGT
tcaggaagtgatatgacaaa

SEQ ID NO: 8304 - DNA, 20 bp, Artificial Sequence
  Description of Artificial Sequence: Synthetic oligonucleotide
  Target: SCNA; (-) strand; PAM type: NNGRRT; PAM sequence: TTGAGT
aatagaaaaaaattaagaga

SEQ ID NO: 8305 - DNA, 20 bp, Artificial Sequence
  Description of Artificial Sequence: Synthetic oligonucleotide
  Target: SCNA; (-) strand; PAM type: NNGRRT; PAM sequence: CCGGGT
tatatgtaaaataaataatg

SEQ ID NO: 8306 - DNA, 20 bp, Artificial Sequence
  Description of Artificial Sequence: Synthetic oligonucleotide
  Target: SCNA; (-) strand; PAM type: NNGRRT; PAM sequence: AAGAGT
gttttaatatagttttaaca

SEQ ID NO: 8307 - DNA, 20 bp, Artificial Sequence
  Description of Artificial Sequence: Synthetic oligonucleotide
  Target: SCNA; (-) strand; PAM type: NNGRRT; PAM sequence: GTGGGT
aattaatcaattattattta

SEQ ID NO: 8308 - DNA, 20 bp, Artificial Sequence
  Description of Artificial Sequence: Synthetic oligonucleotide
  Target: SCNA; (-) strand; PAM type: NNGRRT; PAM sequence: GTGAAT
aaaaaaaaaaaaaaaaatta

SEQ ID NO: 8309 - DNA, 20 bp, Artificial Sequence
  Description of Artificial Sequence: Synthetic oligonucleotide
  Target: SCNA; (-) strand; PAM type: NNGRRT; PAM sequence: CTGGAT
ggtgagaggatcacttgagc

SEQ ID NO: 8310 - DNA, 20 bp, Artificial Sequence
  Description of Artificial Sequence: Synthetic oligonucleotide
  Target: SCNA; (-) strand; PAM type: NNGRRT; PAM sequence: GAGGAT
tagtctggtagctgaggtga

SEQ ID NO: 8311 - DNA, 20 bp, Artificial Sequence
  Description of Artificial Sequence: Synthetic oligonucleotide
  Target: SCNA; (-) strand; PAM type: NNGRRT; PAM sequence: AGGAGT
tggacagatcacttgagcct

SEQ ID NO: 8312 - DNA, 20 bp, Artificial Sequence
  Description of Artificial Sequence: Synthetic oligonucleotide
  Target: SCNA; (-) strand; PAM type: NNGRRT; PAM sequence: AAGAAT
aaccctctgcatatcttttc

SEQ ID NO: 8313 - DNA, 20 bp, Artificial Sequence
  Description of Artificial Sequence: Synthetic oligonucleotide
  Target: SCNA; (-) strand; PAM type: NNGRRT; PAM sequence: CAGAGT
aattcatgtctcacagctga

SEQ ID NO: 8314 - DNA, 20 bp, Artificial Sequence
  Description of Artificial Sequence: Synthetic oligonucleotide
  Target: SCNA; (-) strand; PAM type: NNGRRT; PAM sequence: TGGAAT
gcgtcagcctcccaaagtgc

SEQ ID NO: 8315 - DNA, 20 bp, Artificial Sequence
  Description of Artificial Sequence: Synthetic oligonucleotide
  Target: SCNA; (-) strand; PAM type: NNGRRT; PAM sequence: TGGGGT
ttttgtattttcagtagaga

SEQ ID NO: 8316 - DNA, 20 bp, Artificial Sequence
  Description of Artificial Sequence: Synthetic oligonucleotide
  Target: SCNA; (-) strand; PAM type: NNGRRT; PAM sequence: TGGGAT
agttcagcctcctgagtagc

SEQ ID NO: 8317 - DNA, 20 bp, Artificial Sequence
  Description of Artificial Sequence: Synthetic oligonucleotide
  Target: SCNA; (-) strand; PAM type: NNGRRT; PAM sequence: CTGAGT
gattctcctagttcagcctc

SEQ ID NO: 8318 - DNA, 20 bp, Artificial Sequence
  Description of Artificial Sequence: Synthetic oligonucleotide
  Target: SCNA; (-) strand; PAM type: NNGRRT; PAM sequence: TGGAGT
tctcgctctgttgcccaggc

SEQ ID NO: 8319 - DNA, 20 bp, Artificial Sequence
  Description of Artificial Sequence: Synthetic oligonucleotide
  Target: SCNA; (-) strand; PAM type: NNGRRT; PAM sequence: TGGAGT
atatatttttttttttgaga

SEQ ID NO: 8320 - DNA, 20 bp, Artificial Sequence
  Description of Artificial Sequence: Synthetic oligonucleotide
  Target: SCNA; (-) strand; PAM type: NNGRRT; PAM sequence: TGGAAT
ctttctgtataccttatttc

SEQ ID NO: 8321 - DNA, 20 bp, Artificial Sequence
  Description of Artificial Sequence: Synthetic oligonucleotide
  Target: SCNA; (-) strand; PAM type: NNGRRT; PAM sequence: TGGAAT
tatttaactttcagaacatg

SEQ ID NO: 8322 - DNA, 20 bp, Artificial Sequence
  Description of Artificial Sequence: Synthetic oligonucleotide
  Target: SCNA; (-) strand; PAM type: NNGRRT; PAM sequence: AAGGGT
gtccagagaagtaaaatagg

SEQ ID NO: 8323 - DNA, 20 bp, Artificial Sequence
  Description of Artificial Sequence: Synthetic oligonucleotide
  Target: SCNA; (-) strand; PAM type: NNGRRT; PAM sequence: GGGAAT
gggttaaattatttgtgcag

SEQ ID NO: 8324 - DNA, 20 bp, Artificial Sequence
  Description of Artificial Sequence: Synthetic oligonucleotide
  Target: SCNA; (-) strand; PAM type: NNGRRT; PAM sequence: AGGGGT
ataaaattttggatctgtaa

SEQ ID NO: 8325 - DNA, 20 bp, Artificial Sequence
  Description of Artificial Sequence: Synthetic oligonucleotide
  Target: SCNA; (-) strand; PAM type: NNGRRT; PAM sequence: TTGGAT
tatttgcctactataaaatt

SEQ ID NO: 8326 - DNA, 20 bp, Artificial Sequence
  Description of Artificial Sequence: Synthetic oligonucleotide
  Target: SCNA; (-) strand; PAM type: NNGRRT; PAM sequence: GGGGGT
ttcataacatacattttcaa

SEQ ID NO: 8327 - DNA, 20 bp, Artificial Sequence
  Description of Artificial Sequence: Synthetic oligonucleotide
  Target: SCNA; (-) strand; PAM type: NNGRRT; PAM sequence: GTGAAT
atgagtgcatatgattgtaa

SEQ ID NO: 8328 - DNA, 20 bp, Artificial Sequence
  Description of Artificial Sequence: Synthetic oligonucleotide
  Target: SCNA; (-) strand; PAM type: NNGRRT; PAM sequence: ATGAGT
tcaagaaatgtacatttaaa

SEQ ID NO: 8329 - DNA, 20 bp, Artificial Sequence
  Description of Artificial Sequence: Synthetic oligonucleotide
  Target: SCNA; (-) strand; PAM type: NNGRRT; PAM sequence: ATGGGT
tcaattgtggtggtcgttac

SEQ ID NO: 8330 - DNA, 20 bp, Artificial Sequence
  Description of Artificial Sequence: Synthetic oligonucleotide
  Target: SCNA; (-) strand; PAM type: NNGRRT; PAM sequence: AGGAAT
ggaggtggaggagaaggaga

SEQ ID NO: 8331 - DNA, 20 bp, Artificial Sequence
  Description of Artificial Sequence: Synthetic oligonucleotide
  Target: SCNA; (-) strand; PAM type: NNGRRT; PAM sequence: TGGGGT
catggctacccccatggggc

SEQ ID NO: 8332 - DNA, 20 bp, Artificial Sequence
  Description of Artificial Sequence: Synthetic oligonucleotide
  Target: SCNA; (-) strand; PAM type: NNGRRT; PAM sequence: GTGGAT
gtctgggttcctgtgctgtg

SEQ ID NO: 8333 - DNA, 20 bp, Artificial Sequence
  Description of Artificial Sequence: Synthetic oligonucleotide
  Target: SCNA; (-) strand; PAM type: NNGRRT; PAM sequence: CTGGGT
gtcattggctggaggccagt

SEQ ID NO: 8334 - DNA, 20 bp, Artificial Sequence
  Description of Artificial Sequence: Synthetic oligonucleotide
  Target: SCNA; (-) strand; PAM type: NNGRRT; PAM sequence: AGGAGT
ccaacaaaggttacttgttg

SEQ ID NO: 8335 - DNA, 20 bp, Artificial Sequence
  Description of Artificial Sequence: Synthetic oligonucleotide
  Target: SCNA; (-) strand; PAM type: NNGRRT; PAM sequence: AGGAAT
agaaggaaggagaattgggt

SEQ ID NO: 8336 - DNA, 20 bp, Artificial Sequence
  Description of Artificial Sequence: Synthetic oligonucleotide
  Target: SCNA; (-) strand; PAM type: NNGRRT; PAM sequence: TTGGGT
ggaggcagaaggaaggagaa

SEQ ID NO: 8337 - DNA, 20 bp, Artificial Sequence
  Description of Artificial Sequence: Synthetic oligonucleotide
  Target: SCNA; (-) strand; PAM type: NNGRRT; PAM sequence: GAGAAT
caaagggaggcagaaggaag

SEQ ID NO: 8338 - DNA, 20 bp, Artificial Sequence
  Description of Artificial Sequence: Synthetic oligonucleotide
  Target: SCNA; (-) strand; PAM type: NNGRRT; PAM sequence: TAGAAT
agctgattccaagatggtgt

SEQ ID NO: 8339 - DNA, 20 bp, Artificial Sequence
  Description of Artificial Sequence: Synthetic oligonucleotide
  Target: SCNA; (-) strand; PAM type: NNGRRT; PAM sequence: ATGAAT
tgataacctcaacaacatgg

SEQ ID NO: 8340 - DNA, 20 bp, Artificial Sequence
  Description of Artificial Sequence: Synthetic oligonucleotide
  Target: SCNA; (-) strand; PAM type: NNGRRT; PAM sequence: ATGGAT
ctactgataacctcaacaac

SEQ ID NO: 8341 - DNA, 20 bp, Artificial Sequence
  Description of Artificial Sequence: Synthetic oligonucleotide
  Target: SCNA; (-) strand; PAM type: NNGRRT; PAM sequence: TGGAAT
atactacttagcaacaaaaa

SEQ ID NO: 8342 - DNA, 20 bp, Artificial Sequence
  Description of Artificial Sequence: Synthetic oligonucleotide
  Target: SCNA; (-) strand; PAM type: NNGRRT; PAM sequence: CAGAAT
attgtgctgtattcatacag

SEQ ID NO: 8343 - DNA, 20 bp, Artificial Sequence
  Description of Artificial Sequence: Synthetic oligonucleotide
  Target: SCNA; (-) strand; PAM type: NNGRRT; PAM sequence: CAGAAT
tgttcatacaatgacttgta

SEQ ID NO: 8344 - DNA, 20 bp, Artificial Sequence
  Description of Artificial Sequence: Synthetic oligonucleotide
  Target: SCNA; (-) strand; PAM type: NNGRRT; PAM sequence: AGGAGT
catgaagaacaatacggcat

SEQ ID NO: 8345 - DNA, 20 bp, Artificial Sequence
  Description of Artificial Sequence: Synthetic oligonucleotide
  Target: SCNA; (-) strand; PAM type: NNGRRT; PAM sequence: ATGGGT
aaacattatggaaagtttaa

SEQ ID NO: 8346 - DNA, 20 bp, Artificial Sequence
  Description of Artificial Sequence: Synthetic oligonucleotide
  Target: SCNA; (-) strand; PAM type: NNGRRT; PAM sequence: TTGAAT
tgctgtttttaacttaaata

SEQ ID NO: 8347 - DNA, 20 bp, Artificial Sequence
  Description of Artificial Sequence: Synthetic oligonucleotide
  Target: SCNA; (-) strand; PAM type: NNGRRT; PAM sequence: ATGAGT
cagtgaaaatttttcttaaa

SEQ ID NO: 8348 - DNA, 20 bp, Artificial Sequence
  Description of Artificial Sequence: Synthetic oligonucleotide
  Target: SCNA; (-) strand; PAM type: NNGRRT; PAM sequence: AAGGAT
gtattcacttgaagaatttc

SEQ ID NO: 8349 - DNA, 20 bp, Artificial Sequence
  Description of Artificial Sequence: Synthetic oligonucleotide
  Target: SCNA; (-) strand; PAM type: NNGRRT; PAM sequence: AAGAAT
aactaatttgtattcacttg

SEQ ID NO: 8350 - DNA, 20 bp, Artificial Sequence
  Description of Artificial Sequence: Synthetic oligonucleotide
  Target: SCNA; (-) strand; PAM type: NNGRRT; PAM sequence: CTGAAT
ctgagaaggacccaaattat

SEQ ID NO: 8351 - DNA, 20 bp, Artificial Sequence
  Description of Artificial Sequence: Synthetic oligonucleotide
  Target: SCNA; (-) strand; PAM type: NNGRRT; PAM sequence: ATGAGT
tgctttagatagtaaagcat

SEQ ID NO: 8352 - DNA, 20 bp, Artificial Sequence
  Description of Artificial Sequence: Synthetic oligonucleotide
  Target: SCNA; (-) strand; PAM type: NNGRRT; PAM sequence: ATGAGT
tttttttctcatcagctatc

SEQ ID NO: 8353 - DNA, 20 bp, Artificial Sequence
  Description of Artificial Sequence: Synthetic oligonucleotide
  Target: SCNA; (-) strand; PAM type: NNGRRT; PAM sequence: ATGAAT
gtgaacttccttaaaacatt

SEQ ID NO: 8354 - DNA, 20 bp, Artificial Sequence
  Description of Artificial Sequence: Synthetic oligonucleotide
  Target: SCNA; (-) strand; PAM type: NNGRRT; PAM sequence: TTGAAT
acaagcggcccaggatggtt

SEQ ID NO: 8355 - DNA, 20 bp, Artificial Sequence
  Description of Artificial Sequence: Synthetic oligonucleotide
  Target: SCNA; (-) strand; PAM type: NNGRRT; PAM sequence: CAGGAT
cccatgggccacaagcggcc

SEQ ID NO: 8356 - DNA, 20 bp, Artificial Sequence
  Description of Artificial Sequence: Synthetic oligonucleotide
  Target: SCNA; (-) strand; PAM type: NNGRRT; PAM sequence: ATGGAT
tggctcacagaataattata

SEQ ID NO: 8357 - DNA, 20 bp, Artificial Sequence
  Description of Artificial Sequence: Synthetic oligonucleotide
  Target: SCNA; (-) strand; PAM type: NNGRRT; PAM sequence: CAGAAT
aaaattacataattggctca

SEQ ID NO: 8358 - DNA, 20 bp, Artificial Sequence
  Description of Artificial Sequence: Synthetic oligonucleotide
  Target: SCNA; (-) strand; PAM type: NNGRRT; PAM sequence: TTGAAT
catgtagaaactataacatt

SEQ ID NO: 8359 - DNA, 20 bp, Artificial Sequence
  Description of Artificial Sequence: Synthetic oligonucleotide
  Target: SCNA; (-) strand; PAM type: NNGRRT; PAM sequence: AGGGGT
gctagcctgagttgagatat

SEQ ID NO: 8360 - DNA, 20 bp, Artificial Sequence
  Description of Artificial Sequence: Synthetic oligonucleotide
  Target: SCNA; (-) strand; PAM type: NNGRRT; PAM sequence: CTGAGT
gcatttcaaaagtagctagc

SEQ ID NO: 8361 - DNA, 20 bp, Artificial Sequence
  Description of Artificial Sequence: Synthetic oligonucleotide
  Target: SCNA; (-) strand; PAM type: NNGRRT; PAM sequence: TGGAAT
atctctgccataatctctgc

SEQ ID NO: 8362 - DNA, 20 bp, Artificial Sequence
  Description of Artificial Sequence: Synthetic oligonucleotide
  Target: SCNA; (-) strand; PAM type: NNGRRT; PAM sequence: GTGAAT
ggaaattcagtatctatcat

SEQ ID NO: 8363 - DNA, 20 bp, Artificial Sequence
  Description of Artificial Sequence: Synthetic oligonucleotide
  Target: SCNA; (-) strand; PAM type: NNGRRT; PAM sequence: TGGAAT
gctcttcattcataagaagc

SEQ ID NO: 8364 - DNA, 20 bp, Artificial Sequence
  Description of Artificial Sequence: Synthetic oligonucleotide
  Target: SCNA; (-) strand; PAM type: NNGRRT; PAM sequence: TTGGAT
atctcttccattatgaaggt

SEQ ID NO: 8365 - DNA, 20 bp, Artificial Sequence
  Description of Artificial Sequence: Synthetic oligonucleotide
  Target: SCNA; (-) strand; PAM type: NNGRRT; PAM sequence: TAGGAT
atttagccataagatgattt

SEQ ID NO: 8366 - DNA, 20 bp, Artificial Sequence
  Description of Artificial Sequence: Synthetic oligonucleotide
  Target: SCNA; (-) strand; PAM type: NNGRRT; PAM sequence: CAGAAT
tcagttatcaccattggcac

SEQ ID NO: 8367 - DNA, 20 bp, Artificial Sequence
  Description of Artificial Sequence: Synthetic oligonucleotide
  Target: SCNA; (-) strand; PAM type: NNGRRT; PAM sequence: AGGAGT
cttaatttttccttcaagca

SEQ ID NO: 8368 - DNA, 20 bp, Artificial Sequence
  Description of Artificial Sequence: Synthetic oligonucleotide
  Target: SCNA; (-) strand; PAM type: NNGRRT; PAM sequence: GTGGAT
ttaaatctttaatctattgt

SEQ ID NO: 8369 - DNA, 20 bp, Artificial Sequence
  Description of Artificial Sequence: Synthetic oligonucleotide
  Target: SCNA; (-) strand; PAM type: NNGRRT; PAM sequence: CAGGAT
ctatacatgtttgcacacac

SEQ ID NO: 8370 - DNA, 20 bp, Artificial Sequence
  Description of Artificial Sequence: Synthetic oligonucleotide
  Target: SCNA; (-) strand; PAM type: NNGRRT; PAM sequence: AAGGAT
gacaatgtgatgtattcaca

SEQ ID NO: 8371 - DNA, 20 bp, Artificial Sequence
  Description of Artificial Sequence: Synthetic oligonucleotide
  Target: SCNA; (-) strand; PAM type: NNGRRT; PAM sequence: AAGAAT
tggttatgtaaaacatgggc

SEQ ID NO: 8372 - DNA, 20 bp, Artificial Sequence
  Description of Artificial Sequence: Synthetic oligonucleotide
  Target: SCNA; (-) strand; PAM type: NNGRRT; PAM sequence: AAGGAT
aatccttgtggggtttatac

SEQ ID NO: 8373 - DNA, 20 bp, Artificial Sequence
  Description of Artificial Sequence: Synthetic oligonucleotide
  Target: SCNA; (-) strand; PAM type: NNGRRT; PAM sequence: TGGGGT
tgtctttagagaaatccttg

SEQ ID NO: 8374 - DNA, 20 bp, Artificial Sequence
  Description of Artificial Sequence: Synthetic oligonucleotide
  Target: SCNA; (-) strand; PAM type: NNGRRT; PAM sequence: GTGAGT
ttattaaaatttagcctgga

SEQ ID NO: 8375 - DNA, 20 bp, Artificial Sequence
  Description of Artificial Sequence: Synthetic oligonucleotide
  Target: SCNA; (-) strand; PAM type: NNGRRT; PAM sequence: TGGAGT
gaatttattaaaatttagcc

SEQ ID NO: 8376 - DNA, 20 bp, Artificial Sequence
  Description of Artificial Sequence: Synthetic oligonucleotide
  Target: SCNA; (-) strand; PAM type: NNGRRT; PAM sequence: TGGAAT
atatatctgatagtgtttta

SEQ ID NO: 8377 - DNA, 20 bp, Artificial Sequence
  Description of Artificial Sequence: Synthetic oligonucleotide
  Target: SCNA; (-) strand; PAM type: NNGRRT; PAM sequence: AGGAAT
acttaaaatacaaaagtctc

SEQ ID NO: 8378 - DNA, 20 bp, Artificial Sequence
  Description of Artificial Sequence: Synthetic oligonucleotide
  Target: SCNA; (-) strand; PAM type: NNGRRT; PAM sequence: TGGAGT
ggcacagtgcaggagtgggg

SEQ ID NO: 8379 - DNA, 20 bp, Artificial Sequence
  Description of Artificial Sequence: Synthetic oligonucleotide
  Target: SCNA; (-) strand; PAM type: NNGRRT; PAM sequence: TGGGGT
ctccaggcacagtgcaggag

SEQ ID NO: 8380 - DNA, 20 bp, Artificial Sequence
  Description of Artificial Sequence: Synthetic oligonucleotide
  Target: SCNA; (-) strand; PAM type: NNGRRT; PAM sequence: AGGAGT
atcttctccaggcacagtgc

SEQ ID NO: 8381 - DNA, 20 bp, Artificial Sequence
  Description of Artificial Sequence: Synthetic oligonucleotide
  Target: SCNA; (-) strand; PAM type: NNGRRT; PAM sequence: AGGGAT
agtgctactatgattcactg

SEQ ID NO: 8382 - DNA, 20 bp, Artificial Sequence
  Description of Artificial Sequence: Synthetic oligonucleotide
  Target: SCNA; (-) strand; PAM type: NNGRRT; PAM sequence: TGGAGT
aggggaggaagggagaggag

SEQ ID NO: 8383 - DNA, 20 bp, Artificial Sequence
  Description of Artificial Sequence: Synthetic oligonucleotide
  Target: SCNA; (-) strand; PAM type: NNGRRT; PAM sequence: AGGAGT
agctcaggggaggaagggag

SEQ ID NO: 8384 - DNA, 20 bp, Artificial Sequence
  Description of Artificial Sequence: Synthetic oligonucleotide
  Target: SCNA; (-) strand; PAM type: NNGRRT; PAM sequence: AGGAGT
aaactcacagcgtagacaaa

SEQ ID NO: 8385 - DNA, 20 bp, Artificial Sequence
  Description of Artificial Sequence: Synthetic oligonucleotide
  Target: SCNA; (-) strand; PAM type: NNGRRT; PAM sequence: ATGGAT
gaatagtcaatatctggaaa

SEQ ID NO: 8386 - DNA, 20 bp, Artificial Sequence
  Description of Artificial Sequence: Synthetic oligonucleotide
  Target: SCNA; (-) strand; PAM type: NNGRRT; PAM sequence: GAGAAT
ctgcactggcctagcagggc

SEQ ID NO: 8387 - DNA, 20 bp, Artificial Sequence
  Description of Artificial Sequence: Synthetic oligonucleotide
  Target: SCNA; (-) strand; PAM type: NNGRRT; PAM sequence: TAGGAT
cacggaatagtgcaatactt

SEQ ID NO: 8388 - DNA, 20 bp, Artificial Sequence
  Description of Artificial Sequence: Synthetic oligonucleotide
  Target: SCNA; (-) strand; PAM type: NNGRRT; PAM sequence: CGGAAT
accgggttaggaaaaacaca

SEQ ID NO: 8389 - DNA, 20 bp, Artificial Sequence
  Description of Artificial Sequence: Synthetic oligonucleotide
  Target: SCNA; (-) strand; PAM type: NNGRRT; PAM sequence: CCGGGT
actaattacgaaggtttaga

SEQ ID NO: 8390 - DNA, 20 bp, Artificial Sequence
  Description of Artificial Sequence: Synthetic oligonucleotide
  Target: SCNA; (-) strand; PAM type: NNGRRT; PAM sequence: TGGAAT
agagaaaacatctcaatatt

SEQ ID NO: 8391 - DNA, 20 bp, Artificial Sequence
  Description of Artificial Sequence: Synthetic oligonucleotide
  Target: SCNA; (-) strand; PAM type: NNGRRT; PAM sequence: GAGAAT
ttcatatctccatttcacct

SEQ ID NO: 8392 - DNA, 20 bp, Artificial Sequence
  Description of Artificial Sequence: Synthetic oligonucleotide
  Target: SCNA; (-) strand; PAM type: NNGRRT; PAM sequence: TTGAGT
acaatctctattcttctttt

SEQ ID NO: 8393 - DNA, 20 bp, Artificial Sequence
  Description of Artificial Sequence: Synthetic oligonucleotide
  Target: SCNA; (-) strand; PAM type: NNGRRT; PAM sequence: ATGAGT
ctcaagaattgattgactca

SEQ ID NO: 8394 - DNA, 20 bp, Artificial Sequence
  Description of Artificial Sequence: Synthetic oligonucleotide
  Target: SCNA; (-) strand; PAM type: NNGRRT; PAM sequence: AAGAAT
cttcaaaaacaattggcctc

SEQ ID NO: 8395 - DNA, 20 bp, Artificial Sequence
  Description of Artificial Sequence: Synthetic oligonucleotide
  Target: SCNA; (-) strand; PAM type: NNGRRT; PAM sequence: GGGGGT
atgcaattaggaactgggaa

SEQ ID NO: 8396 - DNA, 20 bp, Artificial Sequence
  Description of Artificial Sequence: Synthetic oligonucleotide
  Target: SCNA; (-) strand; PAM type: NNGRRT; PAM sequence: AGGAAT
taatgtacataagatatgcc

SEQ ID NO: 8397 - DNA, 20 bp, Artificial Sequence
  Description of Artificial Sequence: Synthetic oligonucleotide
  Target: SCNA; (-) strand; PAM type: NNGRRT; PAM sequence: ATGAAT
gtatttcaaaataatcctta

SEQ ID NO: 8398 - DNA, 20 bp, Artificial Sequence
  Description of Artificial Sequence: Synthetic oligonucleotide
  Target: SCNA; (-) strand; PAM type: NNGRRT; PAM sequence: GTGAAT
aaaactcagaatccaaatat

SEQ ID NO: 8399 - DNA, 20 bp, Artificial Sequence
  Description of Artificial Sequence: Synthetic oligonucleotide
  Target: SCNA; (-) strand; PAM type: NNGRRT; PAM sequence: CAGAAT
tgtgccacttgggtaaaact

SEQ ID NO: 8400 - DNA, 20 bp, Artificial Sequence
  Description of Artificial Sequence: Synthetic oligonucleotide
  Target: SCNA; (-) strand; PAM type: NNGRRT; PAM sequence: TTGGGT
aaattatggttgtgtgccac

SEQ ID NO: 8401 - DNA, 20 bp, Artificial Sequence
  Description of Artificial Sequence: Synthetic oligonucleotide
  Target: SCNA; (-) strand; PAM type: NNGRRT; PAM sequence: CAGAAT
gctcagtctagatacagtac

SEQ ID NO: 8402 - DNA, 20 bp, Artificial Sequence
  Description of Artificial Sequence: Synthetic oligonucleotide
  Target: SCNA; (-) strand; PAM type: NNGRRT; PAM sequence: CTGGGT
ttacgccactgcactccagc

SEQ ID NO: 8403 - DNA, 20 bp, Artificial Sequence
  Description of Artificial Sequence: Synthetic oligonucleotide
  Target: SCNA; (-) strand; PAM type: NNGRRT; PAM sequence: TAGGGT
tcagaaggtggaggttgcag

SEQ ID NO: 8404 - DNA, 20 bp, Artificial Sequence
  Description of Artificial Sequence: Synthetic oligonucleotide
  Target: SCNA; (-) strand; PAM type: NNGRRT; PAM sequence: GAGAAT
tactcgggagactgaggcat

SEQ ID NO: 8405 - DNA, 20 bp, Artificial Sequence
  Description of Artificial Sequence: Synthetic oligonucleotide
  Target: SCNA; (-) strand; PAM type: NNGRRT; PAM sequence: AGGAGT
ccctcagatcacttgaggcc

SEQ ID NO: 8406 - DNA, 20 bp, Artificial Sequence
  Description of Artificial Sequence: Synthetic oligonucleotide
  Target: SCNA; (-) strand; PAM type: NNGRRT; PAM sequence: GGGAAT
ggaagggtaatggagtatat

SEQ ID NO: 8407 - DNA, 20 bp, Artificial Sequence
  Description of Artificial Sequence: Synthetic oligonucleotide
  Target: SCNA; (-) strand; PAM type: NNGRRT; PAM sequence: TGGAGT
gggaattgggggaagggtaa

SEQ ID NO: 8408 - DNA, 20 bp, Artificial Sequence
  Description of Artificial Sequence: Synthetic oligonucleotide
  Target: SCNA; (-) strand; PAM type: NNGRRT; PAM sequence: AAGGGT
aataataggggaattggggg

SEQ ID NO: 8409 - DNA, 20 bp, Artificial Sequence
  Description of Artificial Sequence: Synthetic oligonucleotide
  Target: SCNA; (-) strand; PAM type: NNGRRT; PAM sequence: GGGAAT
atgcaaaattataataatag

SEQ ID NO: 8410 - DNA, 20 bp, Artificial Sequence
  Description of Artificial Sequence: Synthetic oligonucleotide
  Target: SCNA; (-) strand; PAM type: NNGRRT; PAM sequence: GTGAAT
tcagaattttacaatacaga

SEQ ID NO: 8411 - DNA, 20 bp, Artificial Sequence
  Description of Artificial Sequence: Synthetic oligonucleotide
  Target: SCNA; (-) strand; PAM type: NNGRRT; PAM sequence: CAGAGT
aaactcagaattttacaata

SEQ ID NO: 8412 - DNA, 20 bp, Artificial Sequence
  Description of Artificial Sequence: Synthetic oligonucleotide
  Target: SCNA; (-) strand; PAM type: NNGRRT; PAM sequence: CAGAAT
cttatacctttgttaaaact

SEQ ID NO: 8413 - DNA, 20 bp, Artificial Sequence
  Description of Artificial Sequence: Synthetic oligonucleotide
  Target: SCNA; (-) strand; PAM type: NNGRRT; PAM sequence: GTGGAT
ttctctatgatactgtcatg

SEQ ID NO: 8414 - DNA, 20 bp, Artificial Sequence
  Description of Artificial Sequence: Synthetic oligonucleotide
  Target: SCNA; (-) strand; PAM type: NNGRRT; PAM sequence: ATGGGT
gagaaagtgcagagggatga

SEQ ID NO: 8415 - DNA, 20 bp, Artificial Sequence
  Description of Artificial Sequence: Synthetic oligonucleotide
  Target: SCNA; (-) strand; PAM type: NNGRRT; PAM sequence: ATGAAT
ctctgagaaagtgcagaggg

SEQ ID NO: 8416 - DNA, 20 bp, Artificial Sequence
  Description of Artificial Sequence: Synthetic oligonucleotide
  Target: SCNA; (-) strand; PAM type: NNGRRT; PAM sequence: AGGGAT
ggggctctgagaaagtgcag

SEQ ID NO: 8417 - DNA, 20 bp, Artificial Sequence
  Description of Artificial Sequence: Synthetic oligonucleotide
  Target: SCNA; (-) strand; PAM type: NNGRRT; PAM sequence: TGGAAT
agactggcacatgtactcaa

SEQ ID NO: 8418 - DNA, 20 bp, Artificial Sequence
  Description of Artificial Sequence: Synthetic oligonucleotide
  Target: SCNA; (-) strand; PAM type: NNGRRT; PAM sequence: GTGAAT
accaagatgttcctcaatag

SEQ ID NO: 8419 - DNA, 20 bp, Artificial Sequence
  Description of Artificial Sequence: Synthetic oligonucleotide
  Target: SCNA; (-) strand; PAM type: NNGRRT; PAM sequence: TTGGGT
attataattcaagatgagat

SEQ ID NO: 8420 - DNA, 20 bp, Artificial Sequence
  Description of Artificial Sequence: Synthetic oligonucleotide
  Target: SCNA; (-) strand; PAM type: NNGRRT; PAM sequence: GGGGAT
ccttgacatgtggggattat

SEQ ID NO: 8421 - DNA, 20 bp, Artificial Sequence
  Description of Artificial Sequence: Synthetic oligonucleotide
  Target: SCNA; (-) strand; PAM type: NNGRRT; PAM sequence: GGGGAT
tggtctctcccttgacatgt

SEQ ID NO: 8422 - DNA, 20 bp, Artificial Sequence
  Description of Artificial Sequence: Synthetic oligonucleotide
  Target: SCNA; (-) strand; PAM type: NNGRRT; PAM sequence: ATGAAT
acaaggtgacaggaaggaga

SEQ ID NO: 8423 - DNA, 20 bp, Artificial Sequence
  Description of Artificial Sequence: Synthetic oligonucleotide
  Target: SCNA; (-) strand; PAM type: NNGRRT; PAM sequence: GAGAAT
cttcacaaggtgacaggaag

SEQ ID NO: 8424 - DNA, 20 bp, Artificial Sequence
  Description of Artificial Sequence: Synthetic oligonucleotide
  Target: SCNA; (-) strand; PAM type: NNGRRT; PAM sequence: TTGGAT
tccagttctctgttctttgc

SEQ ID NO: 8425 - DNA, 20 bp, Artificial Sequence
  Description of Artificial Sequence: Synthetic oligonucleotide
  Target: SCNA; (-) strand; PAM type: NNGRRT; PAM sequence: TGGGAT
aaggtgtgatggagatcaca

SEQ ID NO: 8426 - DNA, 20 bp, Artificial Sequence
  Description of Artificial Sequence: Synthetic oligonucleotide
  Target: SCNA; (-) strand; PAM type: NNGRRT; PAM sequence: AAGAAT
ttgcatcatctgtataaaat

SEQ ID NO: 8427 - DNA, 20 bp, Artificial Sequence
  Description of Artificial Sequence: Synthetic oligonucleotide
  Target: SCNA; (-) strand; PAM type: NNGRRT; PAM sequence: AGGAAT
gccgtctccagttttctatg

SEQ ID NO: 8428 - DNA, 20 bp, Artificial Sequence
  Description of Artificial Sequence: Synthetic oligonucleotide
  Target: SCNA; (-) strand; PAM type: NNGRRT; PAM sequence: AAGGAT
tagaaatggtccctgtagtt

SEQ ID NO: 8429 - DNA, 20 bp, Artificial Sequence
  Description of Artificial Sequence: Synthetic oligonucleotide
  Target: SCNA; (-) strand; PAM type: NNGRRT; PAM sequence: TTGAAT
tatattgtatgtggtgtggc

SEQ ID NO: 8430 - DNA, 20 bp, Artificial Sequence
  Description of Artificial Sequence: Synthetic oligonucleotide
  Target: SCNA; (-) strand; PAM type: NNGRRT; PAM sequence: TGGGGT
ttagcattatcaataagcta

SEQ ID NO: 8431 - DNA, 20 bp, Artificial Sequence
  Description of Artificial Sequence: Synthetic oligonucleotide
  Target: SCNA; (-) strand; PAM type: NNGRRT; PAM sequence: AAGGAT
ctcatattctagcacaattt

SEQ ID NO: 8432 - DNA, 20 bp, Artificial Sequence
  Description of Artificial Sequence: Synthetic oligonucleotide
  Target: SCNA; (-) strand; PAM type: NNGRRT; PAM sequence: GAGGAT
agcaggaattctctatgcga

SEQ ID NO: 8433 - DNA, 20 bp, Artificial Sequence
  Description of Artificial Sequence: Synthetic oligonucleotide
  Target: SCNA; (-) strand; PAM type: NNGRRT; PAM sequence: AGGAAT
aacattgattcttgagtagc

SEQ ID NO: 8434 - DNA, 20 bp, Artificial Sequence
  Description of Artificial Sequence: Synthetic oligonucleotide
  Target: SCNA; (-) strand; PAM type: NNGRRT; PAM sequence: TTGAGT
tgaatgtctaacattgattc

SEQ ID NO: 8435 - DNA, 20 bp, Artificial Sequence
  Description of Artificial Sequence: Synthetic oligonucleotide
  Target: SCNA; (-) strand; PAM type: NNGRRT; PAM sequence: GTGAAT
aagaacactgtgagcacaga

SEQ ID NO: 8436 - DNA, 20 bp, Artificial Sequence
  Description of Artificial Sequence: Synthetic oligonucleotide
  Target: SCNA; (-) strand; PAM type: NNGRRT; PAM sequence: CAGAGT
agaaaagaacactgtgagca

SEQ ID NO: 8437 - DNA, 20 bp, Artificial Sequence
  Description of Artificial Sequence: Synthetic oligonucleotide
  Target: SCNA; (-) strand; PAM type: NNGRRT; PAM sequence: TGGAAT
tcttgttctccttatcagac

SEQ ID NO: 8438 - DNA, 20 bp, Artificial Sequence
  Description of Artificial Sequence: Synthetic oligonucleotide
  Target: SCNA; (-) strand; PAM type: NNGRRT; PAM sequence: ATGAGT
atgaattctaggatagaaga

SEQ ID NO: 8439 - DNA, 20 bp, Artificial Sequence
  Description of Artificial Sequence: Synthetic oligonucleotide
  Target: SCNA; (-) strand; PAM type: NNGRRT; PAM sequence: AAGAAT
cattatgaattctaggatag

SEQ ID NO: 8440 - DNA, 20 bp, Artificial Sequence
  Description of Artificial Sequence: Synthetic oligonucleotide
  Target: SCNA; (-) strand; PAM type: NNGRRT; PAM sequence: TAGGAT
ccatataccattatgaattc

SEQ ID NO: 8441 - DNA, 20 bp, Artificial Sequence
  Description of Artificial Sequence: Synthetic oligonucleotide
  Target: SCNA; (-) strand; PAM type: NNGRRT; PAM sequence: ATGAAT
gtgcagtgccatataccatt

SEQ ID NO: 8442 - DNA, 20 bp, Artificial Sequence
  Description of Artificial Sequence: Synthetic oligonucleotide
  Target: SCNA; (-) strand; PAM type: NNGRRT; PAM sequence: ATGAAT
taatatttcactaacattta

SEQ ID NO: 8443 - DNA, 20 bp, Artificial Sequence
  Description of Artificial Sequence: Synthetic oligonucleotide
  Target: SCNA; (-) strand; PAM type: NNGRRT; PAM sequence: AGGGGT
tttgaacattgtattttgaa

SEQ ID NO: 8444 - DNA, 20 bp, Artificial Sequence
  Description of Artificial Sequence: Synthetic oligonucleotide
  Target: SCNA; (-) strand; PAM type: NNGRRT; PAM sequence: TGGGAT
cctcggcctcccaacagtgc

SEQ ID NO: 8445 - DNA, 20 bp, Artificial Sequence
  Description of Artificial Sequence: Synthetic oligonucleotide
  Target: SCNA; (-) strand; PAM type: NNGRRT; PAM sequence: TAGAGT
ggaaatttcacacaagccag

SEQ ID NO: 8446 - DNA, 20 bp, Artificial Sequence
  Description of Artificial Sequence: Synthetic oligonucleotide
  Target: SCNA; (-) strand; PAM type: NNGRRT; PAM sequence: TGGAAT
gtgtttgaaaatattttaaa

SEQ ID NO: 8447 - DNA, 20 bp, Artificial Sequence
  Description of Artificial Sequence: Synthetic oligonucleotide
  Target: SCNA; (-) strand; PAM type: NNGRRT; PAM sequence: GGGAAT
taattatatttgttacctta

SEQ ID NO: 8448 - DNA, 20 bp, Artificial Sequence
  Description of Artificial Sequence: Synthetic oligonucleotide
  Target: SCNA; (-) strand; PAM type: NNGRRT; PAM sequence: CTGGAT
tgtcttctaaatgtttcttt

SEQ ID NO: 8449 - DNA, 20 bp, Artificial Sequence
  Description of Artificial Sequence: Synthetic oligonucleotide
  Target: SCNA; (-) strand; PAM type: NNGRRT; PAM sequence: CTGAAT
tatgagcttctgtctgaatt

SEQ ID NO: 8450 - DNA, 20 bp, Artificial Sequence
  Description of Artificial Sequence: Synthetic oligonucleotide
  Target: SCNA; (-) strand; PAM type: NNGRRT; PAM sequence: CTGAAT
tagcttttatgagcttctgt

SEQ ID NO: 8451 - DNA, 20 bp, Artificial Sequence
  Description of Artificial Sequence: Synthetic oligonucleotide
  Target: SCNA; (-) strand; PAM type: NNGRRT; PAM sequence: ATGGAT
aatcagccagacacacagac

SEQ ID NO: 8452 - DNA, 20 bp, Artificial Sequence
  Description of Artificial Sequence: Synthetic oligonucleotide
  Target: SCNA; (-) strand; PAM type: NNGRRT; PAM sequence: TGGAAT
tttattcattatattttgta

SEQ ID NO: 8453 - DNA, 20 bp, Artificial Sequence
  Description of Artificial Sequence: Synthetic oligonucleotide
  Target: SCNA; (-) strand; PAM type: NNGRRT; PAM sequence: TGGAAT
taataccttccttaaaatgt

SEQ ID NO: 8454 - DNA, 20 bp, Artificial Sequence
  Description of Artificial Sequence: Synthetic oligonucleotide
  Target: SCNA; (-) strand; PAM type: NNGRRT; PAM sequence: TTGGAT
ctttttcttaccagacaaat

SEQ ID NO: 8455 - DNA, 20 bp, Artificial Sequence
  Description of Artificial Sequence: Synthetic oligonucleotide
  Target: SCNA; (-) strand; PAM type: NNGRRT; PAM sequence: AGGGAT
gtaatggcaaccactatcat

SEQ ID NO: 8456 - DNA, 20 bp, Artificial Sequence
  Description of Artificial Sequence: Synthetic oligonucleotide
  Target: SCNA; (-) strand; PAM type: NNGRRT; PAM sequence: TAGAAT
ctcagacctcttataattga

SEQ ID NO: 8457 - DNA, 20 bp, Artificial Sequence
  Description of Artificial Sequence: Synthetic oligonucleotide
  Target: SCNA; (-) strand; PAM type: NNGRRT; PAM sequence: GAGGGT
tcgtttgagctagatggctt

SEQ ID NO: 8458 - DNA, 20 bp, Artificial Sequence
  Description of Artificial Sequence: Synthetic oligonucleotide
  Target: SCNA; (-) strand; PAM type: NNGRRT; PAM sequence: GGGAAT
acaatccttcctctgaaaca

SEQ ID NO: 8459 - DNA, 20 bp, Artificial Sequence
  Description of Artificial Sequence: Synthetic oligonucleotide
  Target: SCNA; (-) strand; PAM type: NNGRRT; PAM sequence: AAGAAT
gcagatctttatagtaaatg

SEQ ID NO: 8460 - DNA, 20 bp, Artificial Sequence
  Description of Artificial Sequence: Synthetic oligonucleotide
  Target: SCNA; (-) strand; PAM type: NNGRRT; PAM sequence: TCGGGT
aactaatttcaggtggtatt

SEQ ID NO: 8461 - DNA, 20 bp, Artificial Sequence
  Description of Artificial Sequence: Synthetic oligonucleotide
  Target: SCNA; (-) strand; PAM type: NNGRRT; PAM sequence: GAGGGT
tgaatattgatcaagattaa

SEQ ID NO: 8462 - DNA, 20 bp, Artificial Sequence
  Description of Artificial Sequence: Synthetic oligonucleotide
  Target: SCNA; (-) strand; PAM type: NNGRRT; PAM sequence: CTGAAT
gtgatggggagtagtcatct

SEQ ID NO: 8463 - DNA, 20 bp, Artificial Sequence
  Description of Artificial Sequence: Synthetic oligonucleotide
  Target: SCNA; (-) strand; PAM type: NNGRRT; PAM sequence: GGGAGT
acgaattagcttttgtgatg

SEQ ID NO: 8464 - DNA, 20 bp, Artificial Sequence
  Description of Artificial Sequence: Synthetic oligonucleotide
  Target: SCNA; (-) strand; PAM type: NNGRRT; PAM sequence: ACGAAT
agcagagaaaaatgtgaaaa

SEQ ID NO: 8465 - DNA, 20 bp, Artificial Sequence
  Description of Artificial Sequence: Synthetic oligonucleotide
  Target: SCNA; (-) strand; PAM type: NNGRRT; PAM sequence: AGGAAT
gagagaaaggttgcacgctg

SEQ ID NO: 8466 - DNA, 20 bp, Artificial Sequence
  Description of Artificial Sequence: Synthetic oligonucleotide
  Target: SCNA; (-) strand; PAM type: NNGRRT; PAM sequence: AGGAAT
tacagtacgtttcctctgca

SEQ ID NO: 8467 - DNA, 20 bp, Artificial Sequence
  Description of Artificial Sequence: Synthetic oligonucleotide
  Target: SCNA; (-) strand; PAM type: NNGRRT; PAM sequence: AAGAAT
atgtttaggcagaccaaaag

SEQ ID NO: 8468 - DNA, 20 bp, Artificial Sequence
  Description of Artificial Sequence: Synthetic oligonucleotide
  Target: SCNA; (-) strand; PAM type: NNGRRT; PAM sequence: AGGAAT
aagatgccagaaagaagatt

SEQ ID NO: 8469 - DNA, 20 bp, Artificial Sequence
  Description of Artificial Sequence: Synthetic oligonucleotide
  Target: SCNA; (-) strand; PAM type: NNGRRT; PAM sequence: TAGAAT
tcttagtaaaccacataatt

SEQ ID NO: 8470 - DNA, 20 bp, Artificial Sequence
  Description of Artificial Sequence: Synthetic oligonucleotide
  Target: SCNA; (-) strand; PAM type: NNGRRT; PAM sequence: ATGGAT
aacagcactacttattgtac

SEQ ID NO: 8471 - DNA, 20 bp, Artificial Sequence
  Description of Artificial Sequence: Synthetic oligonucleotide
  Target: SCNA; (-) strand; PAM type: NNGRRT; PAM sequence: GAGGGT
ttttgtatattatagaatat

SEQ ID NO: 8472 - DNA, 20 bp, Artificial Sequence
  Description of Artificial Sequence: Synthetic oligonucleotide
  Target: SCNA; (-) strand; PAM type: NNGRRT; PAM sequence: TAGAAT
gttagtaattttgtatatta

SEQ ID NO: 8473 - DNA, 20 bp, Artificial Sequence
  Description of Artificial Sequence: Synthetic oligonucleotide
  Target: SCNA; (-) strand; PAM type: NNGRRT; PAM sequence: CAGAAT
aaggaaacaattcactactt

SEQ ID NO: 8474 - DNA, 20 bp, Artificial Sequence
  Description of Artificial Sequence: Synthetic oligonucleotide
  Target: SCNA; (-) strand; PAM type: NNGRRT; PAM sequence: AAGAAT
attttaaaaagacaaactgc

SEQ ID NO: 8475 - DNA, 20 bp, Artificial Sequence
  Description of Artificial Sequence: Synthetic oligonucleotide
  Target: SCNA; (-) strand; PAM type: NNGRRT; PAM sequence: CAGAAT
ttcaaaaacaactaactgcc

SEQ ID NO: 8476 - DNA, 20 bp, Artificial Sequence
  Description of Artificial Sequence: Synthetic oligonucleotide
  Target: SCNA; (-) strand; PAM type: NNGRRT; PAM sequence: ATGAAT
gctcaattaatatgtagaaa

SEQ ID NO: 8477 - DNA, 20 bp, Artificial Sequence
  Description of Artificial Sequence: Synthetic oligonucleotide
  Target: SCNA; (-) strand; PAM type: NNGRRT; PAM sequence: TAGAAT
cagtgacctcttatcataca

SEQ ID NO: 8478 - DNA, 20 bp, Artificial Sequence
  Description of Artificial Sequence: Synthetic oligonucleotide
  Target: SCNA; (-) strand; PAM type: NNGRRT; PAM sequence: CGGAAT
ctagtccattcttgagcagt

SEQ ID NO: 8479 - DNA, 20 bp, Artificial Sequence
  Description of Artificial Sequence: Synthetic oligonucleotide
  Target: SCNA; (-) strand; PAM type: NNGRRT; PAM sequence: CTGAAT
aaggcttttatgtctcctgt

SEQ ID NO: 8480 - DNA, 20 bp, Artificial Sequence
  Description of Artificial Sequence: Synthetic oligonucleotide
  Target: SCNA; (-) strand; PAM type: NNGRRT; PAM sequence: TAGAAT
cagtggttttgcactctcta

SEQ ID NO: 8481 - DNA, 20 bp, Artificial Sequence
  Description of Artificial Sequence: Synthetic oligonucleotide
  Target: SCNA; (-) strand; PAM type: NNGRRT; PAM sequence: TGGAAT
tctacattgatctctatttt

SEQ ID NO: 8482 - DNA, 20 bp, Artificial Sequence
  Description of Artificial Sequence: Synthetic oligonucleotide
  Target: SCNA; (-) strand; PAM type: NNGRRT; PAM sequence: CAGAGT
agaaatctgcttggtcttcc

SEQ ID NO: 8483 - DNA, 20 bp, Artificial Sequence
  Description of Artificial Sequence: Synthetic oligonucleotide
  Target: SCNA; (-) strand; PAM type: NNGRRT; PAM sequence: CAGGGT
tgtagggtgtagggtatgtt

SEQ ID NO: 8484 - DNA, 20 bp, Artificial Sequence
  Description of Artificial Sequence: Synthetic oligonucleotide
  Target: SCNA; (-) strand; PAM type: NNGRRT; PAM sequence: TAGGGT
tataagtattatgtagggtg

SEQ ID NO: 8485 - DNA, 20 bp, Artificial Sequence
  Description of Artificial Sequence: Synthetic oligonucleotide
  Target: SCNA; (-) strand; PAM type: NNGRRT; PAM sequence: TAGGGT
gtgtatatataagtattatg

SEQ ID NO: 8486 - DNA, 20 bp, Artificial Sequence
  Description of Artificial Sequence: Synthetic oligonucleotide
  Target: SCNA; (-) strand; PAM type: NNGRRT; PAM sequence: GAGAAT
tgttttttattcttcatgga

SEQ ID NO: 8487 - DNA, 20 bp, Artificial Sequence
  Description of Artificial Sequence: Synthetic oligonucleotide
  Target: SCNA; (-) strand; PAM type: NNGRRT; PAM sequence: TAGAAT
tagttgtatgtttttggaag

SEQ ID NO: 8488 - DNA, 20 bp, Artificial Sequence
  Description of Artificial Sequence: Synthetic oligonucleotide
  Target: SCNA; (-) strand; PAM type: NNGRRT; PAM sequence: TTGAGT
ttattgaaaggtaacaagga

SEQ ID NO: 8489 - DNA, 20 bp, Artificial Sequence
  Description of Artificial Sequence: Synthetic oligonucleotide
  Target: SCNA; (-) strand; PAM type: NNGRRT; PAM sequence: AAGGAT
acagtttattgaaaggtaac

SEQ ID NO: 8490 - DNA, 20 bp, Artificial Sequence
  Description of Artificial Sequence: Synthetic oligonucleotide
  Target: SCNA; (-) strand; PAM type: NNGRRT; PAM sequence: CTGAAT
tagtgcttcccttataatct

SEQ ID NO: 8491 - DNA, 20 bp, Artificial Sequence
  Description of Artificial Sequence: Synthetic oligonucleotide
  Target: SCNA; (-) strand; PAM type: NNGRRT; PAM sequence: TTGGGT
acaaagactttatatatagt

SEQ ID NO: 8492 - DNA, 20 bp, Artificial Sequence
  Description of Artificial Sequence: Synthetic oligonucleotide
  Target: SCNA; (-) strand; PAM type: NNGRRT; PAM sequence: ATGAAT
tggttattacgatttatcac

SEQ ID NO: 8493 - DNA, 20 bp, Artificial Sequence
  Description of Artificial Sequence: Synthetic oligonucleotide
  Target: SCNA; (-) strand; PAM type: NNGRRT; PAM sequence: CTGGGT
ttataacaaaatacatgaga

SEQ ID NO: 8494 - DNA, 20 bp, Artificial Sequence
  Description of Artificial Sequence: Synthetic oligonucleotide
  Target: SCNA; (-) strand; PAM type: NNGRRT; PAM sequence: TTGAGT
gattgtcttgcccaagtgaa

SEQ ID NO: 8495 - DNA, 20 bp, Artificial Sequence
  Description of Artificial Sequence: Synthetic oligonucleotide
  Target: SCNA; (-) strand; PAM type: NNGRRT; PAM sequence: GTGAAT
taatggattgtcttgcccaa

SEQ ID NO: 8496 - DNA, 20 bp, Artificial Sequence
  Description of Artificial Sequence: Synthetic oligonucleotide
  Target: SCNA; (-) strand; PAM type: NNGRRT; PAM sequence: ATGGAT
acaaaaattttagacgaata

SEQ ID NO: 8497 - DNA, 20 bp, Artificial Sequence
  Description of Artificial Sequence: Synthetic oligonucleotide
  Target: SCNA; (-) strand; PAM type: NNGRRT; PAM sequence: ACGAAT
attattaacaaaaattttag

SEQ ID NO: 8498 - DNA, 20 bp, Artificial Sequence
  Description of Artificial Sequence: Synthetic oligonucleotide
  Target: SCNA; (-) strand; PAM type: NNGRRT; PAM sequence: AGGAGT
ctattaacaaaaaaatttgt

SEQ ID NO: 8499 - DNA, 20 bp, Artificial Sequence
  Description of Artificial Sequence: Synthetic oligonucleotide
  Target: SCNA; (-) strand; PAM type: NNGRRT; PAM sequence: TTGGAT
ttcccaactatcaaaccatt

SEQ ID NO: 8500 - DNA, 20 bp, Artificial Sequence
  Description of Artificial Sequence: Synthetic oligonucleotide
  Target: SCNA; (-) strand; PAM type: NNGRRT; PAM sequence: CTGAGT
taagtttgaagtgaggtttt

SEQ ID NO: 8501 - DNA, 20 bp, Artificial Sequence
  Description of Artificial Sequence: Synthetic oligonucleotide
  Target: SCNA; (-) strand; PAM type: NNGRRT; PAM sequence: AGGAGT
tgtcaaccattaatatgtgt

SEQ ID NO: 8502 - DNA, 20 bp, Artificial Sequence
  Description of Artificial Sequence: Synthetic oligonucleotide
  Target: SCNA; (-) strand; PAM type: NNGRRT; PAM sequence: CTGGGT
tcatgccaatacactccagc

SEQ ID NO: 8503 - DNA, 20 bp, Artificial Sequence
  Description of Artificial Sequence: Synthetic oligonucleotide
  Target: SCNA; (-) strand; PAM type: NNGRRT; PAM sequence: TGGAGT
aatcgctcgaacccaggaga

SEQ ID NO: 8504 - DNA, 20 bp, Artificial Sequence
  Description of Artificial Sequence: Synthetic oligonucleotide
  Target: SCNA; (-) strand; PAM type: NNGRRT; PAM sequence: GAGAAT
tacttaggaggctgaaccag

SEQ ID NO: 8505 - DNA, 20 bp, Artificial Sequence
  Description of Artificial Sequence: Synthetic oligonucleotide
  Target: SCNA; (-) strand; PAM type: NNGRRT; PAM sequence: GTGGAT
actttgggaggccaaggcgg

SEQ ID NO: 8506 - DNA, 20 bp, Artificial Sequence
  Description of Artificial Sequence: Synthetic oligonucleotide
  Target: SCNA; (-) strand; PAM type: NNGRRT; PAM sequence: GCGGGT
caggactttgggaggccaag

SEQ ID NO: 8507 - DNA, 20 bp, Artificial Sequence
  Description of Artificial Sequence: Synthetic oligonucleotide
  Target: SCNA; (-) strand; PAM type: NNGRRT; PAM sequence: TAGAGT
cttgatagactcttaaaagt

SEQ ID NO: 8508 - DNA, 20 bp, Artificial Sequence
  Description of Artificial Sequence: Synthetic oligonucleotide
  Target: SCNA; (-) strand; PAM type: NNGRRT; PAM sequence: CTGGAT
ttccctttaataagcatgta

SEQ ID NO: 8509 - DNA, 20 bp, Artificial Sequence
  Description of Artificial Sequence: Synthetic oligonucleotide
  Target: SCNA; (-) strand; PAM type: NNGRRT; PAM sequence: CTGGAT
actgggtcctagattacagt

SEQ ID NO: 8510 - DNA, 20 bp, Artificial Sequence
  Description of Artificial Sequence: Synthetic oligonucleotide
  Target: SCNA; (-) strand; PAM type: NNGRRT; PAM sequence: CTGGGT
ttgcaactaagtaactatta

SEQ ID NO: 8511 - DNA, 20 bp, Artificial Sequence
  Description of Artificial Sequence: Synthetic oligonucleotide
  Target: SCNA; (-) strand; PAM type: NNGRRT; PAM sequence: TAGGAT
tggagaactctcattcattg

SEQ ID NO: 8512 - DNA, 20 bp, Artificial Sequence
  Description of Artificial Sequence: Synthetic oligonucleotide
  Target: SCNA; (-) strand; PAM type: NNGRRT; PAM sequence: CTGGGT
agcccattttgcattttggg

SEQ ID NO: 8513 - DNA, 20 bp, Artificial Sequence
  Description of Artificial Sequence: Synthetic oligonucleotide
  Target: SCNA; (-) strand; PAM type: NNGRRT; PAM sequence: TGGAAT
cttatgtacatataaagacg

SEQ ID NO: 8514 - DNA, 20 bp, Artificial Sequence
  Description of Artificial Sequence: Synthetic oligonucleotide
  Target: SCNA; (-) strand; PAM type: NNGRRT; PAM sequence: AAGGAT
aataattattaatggtgtgg

SEQ ID NO: 8515 - DNA, 20 bp, Artificial Sequence
  Description of Artificial Sequence: Synthetic oligonucleotide
  Target: SCNA; (-) strand; PAM type: NNGRRT; PAM sequence: TAGAAT
gaacagccattaaaatgttg

SEQ ID NO: 8516 - DNA, 20 bp, Artificial Sequence
  Description of Artificial Sequence: Synthetic oligonucleotide
  Target: SCNA; (-) strand; PAM type: NNGRRT; PAM sequence: CAGAAT
aaatatgaagatgtttatca

SEQ ID NO: 8517 - DNA, 20 bp, Artificial Sequence
  Description of Artificial Sequence: Synthetic oligonucleotide
  Target: SCNA; (-) strand; PAM type: NNGRRT; PAM sequence: AAGAAT
ctctgaccagtcgcatgtct

SEQ ID NO: 8518 - DNA, 20 bp, Artificial Sequence
  Description of Artificial Sequence: Synthetic oligonucleotide
  Target: SCNA; (-) strand; PAM type: NNGRRT; PAM sequence: GAGAAT
caatcagaacaatatggtta

SEQ ID NO: 8519 - DNA, 20 bp, Artificial Sequence
  Description of Artificial Sequence: Synthetic oligonucleotide
  Target: SCNA; (-) strand; PAM type: NNGRRT; PAM sequence: CAGGGT
ggaagggaccagccagttcc

SEQ ID NO: 8520 - DNA, 20 bp, Artificial Sequence
  Description of Artificial Sequence: Synthetic oligonucleotide
  Target: SCNA; (-) strand; PAM type: NNGRRT; PAM sequence: TAGAAT
agggtctggcacttggaatt

SEQ ID NO: 8521 - DNA, 20 bp, Artificial Sequence
  Description of Artificial Sequence: Synthetic oligonucleotide
  Target: SCNA; (-) strand; PAM type: NNGRRT; PAM sequence: TGGAAT
taatgaaagggtctggcact

SEQ ID NO: 8522 - DNA, 20 bp, Artificial Sequence
  Description of Artificial Sequence: Synthetic oligonucleotide
  Target: SCNA; (-) strand; PAM type: NNGRRT; PAM sequence: AAGGGT
tcgctaatgaaaggtaatga

SEQ ID NO: 8523 - DNA, 20 bp, Artificial Sequence
  Description of Artificial Sequence: Synthetic oligonucleotide
  Target: SCNA; (-) strand; PAM type: NNGRRT; PAM sequence: ATGAGT
ttcagacaacaccaagcctc

SEQ ID NO: 8524 - DNA, 20 bp, Artificial Sequence
  Description of Artificial Sequence: Synthetic oligonucleotide
  Target: SCNA; (-) strand; PAM type: NNGRRT; PAM sequence: GGGAGT
cctcaggctgcatcctacca

SEQ ID NO: 8525 - DNA, 20 bp, Artificial Sequence
  Description of Artificial Sequence: Synthetic oligonucleotide
  Target: SCNA; (-) strand; PAM type: NNGRRT; PAM sequence: ATGAAT
atgtcagcccccacgtctgt

SEQ ID NO: 8526 - DNA, 20 bp, Artificial Sequence
  Description of Artificial Sequence: Synthetic oligonucleotide
  Target: SCNA; (-) strand; PAM type: NNGRRT; PAM sequence: GGGGGT
tcttgggaatcagggtgtat

SEQ ID NO: 8527 - DNA, 20 bp, Artificial Sequence
  Description of Artificial Sequence: Synthetic oligonucleotide
  Target: SCNA; (-) strand; PAM type: NNGRRT; PAM sequence: CAGGGT
ctgcctcaactcttgggaat

SEQ ID NO: 8528 - DNA, 20 bp, Artificial Sequence
  Description of Artificial Sequence: Synthetic oligonucleotide
  Target: SCNA; (-) strand; PAM type: NNGRRT; PAM sequence: GGGAAT
ccacaactgcctcaactctt

SEQ ID NO: 8529 - DNA, 20 bp, Artificial Sequence
  Description of Artificial Sequence: Synthetic oligonucleotide
  Target: SCNA; (-) strand; PAM type: NNGRRT; PAM sequence: AGGGAT
taatacttcaggggtctaaa

SEQ ID NO: 8530 - DNA, 20 bp, Artificial Sequence
  Description of Artificial Sequence: Synthetic oligonucleotide
  Target: SCNA; (-) strand; PAM type: NNGRRT; PAM sequence: AGGGGT
ctgatcctctctaatacttc

SEQ ID NO: 8531 - DNA, 20 bp, Artificial Sequence
  Description of Artificial Sequence: Synthetic oligonucleotide
  Target: SCNA; (-) strand; PAM type: NNGRRT; PAM sequence: GTGAAT
acagccacaaatgccttggg

SEQ ID NO: 8532 - DNA, 20 bp, Artificial Sequence
  Description of Artificial Sequence: Synthetic oligonucleotide
  Target: SCNA; (-) strand; PAM type: NNGRRT; PAM sequence: TGGGGT
ctgcacagccacaaatgcct

SEQ ID NO: 8533 - DNA, 20 bp, Artificial Sequence
  Description of Artificial Sequence: Synthetic oligonucleotide
  Target: SCNA; (-) strand; PAM type: NNGRRT; PAM sequence: GAGAGT
gggaatatccctacccttca

SEQ ID NO: 8534 - DNA, 20 bp, Artificial Sequence
  Description of Artificial Sequence: Synthetic oligonucleotide
  Target: SCNA; (-) strand; PAM type: NNGRRT; PAM sequence: GGGAAT
aaaagatgagggatagggac

SEQ ID NO: 8535 - DNA, 20 bp, Artificial Sequence
  Description of Artificial Sequence: Synthetic oligonucleotide
  Target: SCNA; (-) strand; PAM type: NNGRRT; PAM sequence: AGGGAT
ctgcaaagggggaaaagatg

SEQ ID NO: 8536 - DNA, 20 bp, Artificial Sequence
  Description of Artificial Sequence: Synthetic oligonucleotide
  Target: SCNA; (-) strand; PAM type: NNGRRT; PAM sequence: TGGGAT
ctcccaagttcatttgaaag

SEQ ID NO: 8537 - DNA, 20 bp, Artificial Sequence
  Description of Artificial Sequence: Synthetic oligonucleotide
  Target: SCNA; (-) strand; PAM type: NNGRRT; PAM sequence: TAGAAT
ttccctatgccagaactttt

SEQ ID NO: 8538 - DNA, 20 bp, Artificial Sequence
  Description of Artificial Sequence: Synthetic oligonucleotide
  Target: SCNA; (-) strand; PAM type: NNGRRT; PAM sequence: CAGAGT
tccattaaggggaaggaggg

SEQ ID NO: 8539 - DNA, 20 bp, Artificial Sequence
  Description of Artificial Sequence: Synthetic oligonucleotide
  Target: SCNA; (-) strand; PAM type: NNGRRT; PAM sequence: ATGAAT
tgcagctgtaaaattggctg

SEQ ID NO: 8540 - DNA, 20 bp, Artificial Sequence
  Description of Artificial Sequence: Synthetic oligonucleotide
  Target: SCNA; (-) strand; PAM type: NNGRRT; PAM sequence: CAGAAT
caggactcagcatcccatat

SEQ ID NO: 8541 - DNA, 20 bp, Artificial Sequence
  Description of Artificial Sequence: Synthetic oligonucleotide
  Target: SCNA; (-) strand; PAM type: NNGRRT; PAM sequence: TGGGAT
tgttcagtaaaacacagatt

SEQ ID NO: 8542 - DNA, 20 bp, Artificial Sequence
  Description of Artificial Sequence: Synthetic oligonucleotide
  Target: SCNA; (-) strand; PAM type: NNGRRT; PAM sequence: GAGAAT
tctttgacgccaaacccatg

SEQ ID NO: 8543 - DNA, 20 bp, Artificial Sequence
  Description of Artificial Sequence: Synthetic oligonucleotide
  Target: SCNA; (-) strand; PAM type: NNGRRT; PAM sequence: AGGAAT
gccttaatattgtatgtaag

SEQ ID NO: 8544 - DNA, 20 bp, Artificial Sequence
  Description of Artificial Sequence: Synthetic oligonucleotide
  Target: SCNA; (-) strand; PAM type: NNGRRT; PAM sequence: ATGGAT
atgcacatggtataattaga

SEQ ID NO: 8545 - DNA, 20 bp, Artificial Sequence
  Description of Artificial Sequence: Synthetic oligonucleotide
  Target: SCNA; (-) strand; PAM type: NNGRRT; PAM sequence: TAGAAT
tattatgcacatggtataat

SEQ ID NO: 8546 - DNA, 20 bp, Artificial Sequence
  Description of Artificial Sequence: Synthetic oligonucleotide
  Target: SCNA; (-) strand; PAM type: NNGRRT; PAM sequence: TTGAGT
cccaaagtcatgtgattcca

SEQ ID NO: 8547 - DNA, 20 bp, Artificial Sequence
  Description of Artificial Sequence: Synthetic oligonucleotide
  Target: SCNA; (-) strand; PAM type: NNGRRT; PAM sequence: GTGAAT
caactgcccagggttggagt

SEQ ID NO: 8548 - DNA, 20 bp, Artificial Sequence
  Description of Artificial Sequence: Synthetic oligonucleotide
  Target: SCNA; (-) strand; PAM type: NNGRRT; PAM sequence: TGGAGT
gccagccaactgcccagggt

SEQ ID NO: 8549 - DNA, 20 bp, Artificial Sequence
  Description of Artificial Sequence: Synthetic oligonucleotide
  Target: SCNA; (-) strand; PAM type: NNGRRT; PAM sequence: CAGGGT
taactggccagccaactgcc

SEQ ID NO: 8550 - DNA, 20 bp, Artificial Sequence
  Description of Artificial Sequence: Synthetic oligonucleotide
  Target: SCNA; (-) strand; PAM type: NNGRRT; PAM sequence: TTGAAT
ttcagtctgtgtttaatagc

SEQ ID NO: 8551 - DNA, 20 bp, Artificial Sequence
  Description of Artificial Sequence: Synthetic oligonucleotide
  Target: SCNA; (-) strand; PAM type: NNGRRT; PAM sequence: ATGAGT
aaataaaaatgttgaattaa

SEQ ID NO: 8552 - DNA, 20 bp, Artificial Sequence
  Description of Artificial Sequence: Synthetic oligonucleotide
  Target: SCNA; (-) strand; PAM type: NNGRRT; PAM sequence: TTGAAT
ttatctgtgaaataaaaatg

SEQ ID NO: 8553 - DNA, 20 bp, Artificial Sequence
  Description of Artificial Sequence: Synthetic oligonucleotide
  Target: SCNA; (-) strand; PAM type: NNGRRT; PAM sequence: ATGAGT
gtcatctcccctctctaagc

SEQ ID NO: 8554 - DNA, 20 bp, Artificial Sequence
  Description of Artificial Sequence: Synthetic oligonucleotide
  Target: SCNA; (-) strand; PAM type: NNGRRT; PAM sequence: CTGGAT
gtcttctctctctcactcta

SEQ ID NO: 8555 - DNA, 20 bp, Artificial Sequence
  Description of Artificial Sequence: Synthetic oligonucleotide
  Target: SCNA; (-) strand; PAM type: NNGRRT; PAM sequence: GAGAGT
gggcttgaattcagggaaca

SEQ ID NO: 8556 - DNA, 20 bp, Artificial Sequence
  Description of Artificial Sequence: Synthetic oligonucleotide
  Target: SCNA; (-) strand; PAM type: NNGRRT; PAM sequence: TTGAAT
atggtgtggagggcatgggc

SEQ ID NO: 8557 - DNA, 20 bp, Artificial Sequence
  Description of Artificial Sequence: Synthetic oligonucleotide
  Target: SCNA; (-) strand; PAM type: NNGRRT; PAM sequence: ATGAGT
acaaaggtatactaacattt

SEQ ID NO: 8558 - DNA, 20 bp, Artificial Sequence
  Description of Artificial Sequence: Synthetic oligonucleotide
  Target: SCNA; (-) strand; PAM type: NNGRRT; PAM sequence: TGGGAT
ctacttatgtcaggtaactt

SEQ ID NO: 8559 - DNA, 20 bp, Artificial Sequence
  Description of Artificial Sequence: Synthetic oligonucleotide
  Target: SCNA; (-) strand; PAM type: NNGRRT; PAM sequence: TTGAGT
tccaatttttgctcagtgga

SEQ ID NO: 8560 - DNA, 20 bp, Artificial Sequence
  Description of Artificial Sequence: Synthetic oligonucleotide
  Target: SCNA; (-) strand; PAM type: NNGRRT; PAM sequence: GTGGAT
gaggttccaatttttgctca

SEQ ID NO: 8561 - DNA, 20 bp, Artificial Sequence
  Description of Artificial Sequence: Synthetic oligonucleotide
  Target: SCNA; (-) strand; PAM type: NNGRRT; PAM sequence: GGGAAT
tttttttctatttggctatt

SEQ ID NO: 8562 - DNA, 20 bp, Artificial Sequence
  Description of Artificial Sequence: Synthetic oligonucleotide
  Target: SCNA; (-) strand; PAM type: NNGRRT; PAM sequence: TGGGGT
ttaactatctatgcttacaa

SEQ ID NO: 8563 - DNA, 20 bp, Artificial Sequence
  Description of Artificial Sequence: Synthetic oligonucleotide
  Target: SCNA; (-) strand; PAM type: NNGRRT; PAM sequence: ATGAAT
cagttacattatggattgtg

SEQ ID NO: 8564 - DNA, 20 bp, Artificial Sequence
  Description of Artificial Sequence: Synthetic oligonucleotide
  Target: SCNA; (-) strand; PAM type: NNGRRT; PAM sequence: ATGGAT
ggaatgaattcagttacatt

SEQ ID NO: 8565 - DNA, 20 bp, Artificial Sequence
  Description of Artificial Sequence: Synthetic oligonucleotide
  Target: SCNA; (-) strand; PAM type: NNGRRT; PAM sequence: ATGAAT
ttggaattcagttcatagga

SEQ ID NO: 8566 - DNA, 20 bp, Artificial Sequence
  Description of Artificial Sequence: Synthetic oligonucleotide
  Target: SCNA; (-) strand; PAM type: NNGRRT; PAM sequence: AGGAAT
ctaattggaattcagttcat

SEQ ID NO: 8567 - DNA, 20 bp, Artificial Sequence
  Description of Artificial Sequence: Synthetic oligonucleotide
  Target: SCNA; (-) strand; PAM type: NNGRRT; PAM sequence: TGGAAT
aacaatatgataaatctaat

SEQ ID NO: 8568 - DNA, 20 bp, Artificial Sequence
  Description of Artificial Sequence: Synthetic oligonucleotide
  Target: SCNA; (-) strand; PAM type: NNGRRT; PAM sequence: ACGGAT
tgaaaaaatggaaataaaga

SEQ ID NO: 8569 - DNA, 20 bp, Artificial Sequence
  Description of Artificial Sequence: Synthetic oligonucleotide
  Target: SCNA; (-) strand; PAM type: NNGRRT; PAM sequence: TTGAAT
tgagccagaaattatgcttg

SEQ ID NO: 8570 - DNA, 20 bp, Artificial Sequence
  Description of Artificial Sequence: Synthetic oligonucleotide
  Target: SCNA; (-) strand; PAM type: NNGRRT; PAM sequence: AAGAAT
tcatagtgaatactaatgca

SEQ ID NO: 8571 - DNA, 20 bp, Artificial Sequence
  Description of Artificial Sequence: Synthetic oligonucleotide
  Target: SCNA; (-) strand; PAM type: NNGRRT; PAM sequence: GTGAAT
taattcttattaatgtcata

SEQ ID NO: 8572 - DNA, 20 bp, Artificial Sequence
  Description of Artificial Sequence: Synthetic oligonucleotide
  Target: SCNA; (-) strand; PAM type: NNGRRT; PAM sequence: TGGAAT
ccccttctaccaggtgattc

SEQ ID NO: 8573 - DNA, 20 bp, Artificial Sequence
  Description of Artificial Sequence: Synthetic oligonucleotide
  Target: SCNA; (-) strand; PAM type: NNGRRT; PAM sequence: TTGGAT
attaaaacttttaacaacat

SEQ ID NO: 8574 - DNA, 20 bp, Artificial Sequence
  Description of Artificial Sequence: Synthetic oligonucleotide
  Target: SCNA; (-) strand; PAM type: NNGRRT; PAM sequence: GAGAGT
aaatatataattacgtgtat

SEQ ID NO: 8575 - DNA, 20 bp, Artificial Sequence
  Description of Artificial Sequence: Synthetic oligonucleotide
  Target: SCNA; (-) strand; PAM type: NNGRRT; PAM sequence: AAGGGT
aatatgtttacgtgatattc

SEQ ID NO: 8576 - DNA, 20 bp, Artificial Sequence
  Description of Artificial Sequence: Synthetic oligonucleotide
  Target: SCNA; (-) strand; PAM type: NNGRRT; PAM sequence: TAGGAT
gtttaggtgacgggcataaa

SEQ ID NO: 8577 - DNA, 20 bp, Artificial Sequence
  Description of Artificial Sequence: Synthetic oligonucleotide
  Target: SCNA; (-) strand; PAM type: NNGRRT; PAM sequence: TAGGAT
taatgagatactgttaaatg

SEQ ID NO: 8578 - DNA, 20 bp, Artificial Sequence
  Description of Artificial Sequence: Synthetic oligonucleotide
  Target: SCNA; (-) strand; PAM type: NNGRRT; PAM sequence: TGGGAT
gaaatgtattataggatgag

SEQ ID NO: 8579 - DNA, 20 bp, Artificial Sequence
  Description of Artificial Sequence: Synthetic oligonucleotide
  Target: SCNA; (-) strand; PAM type: NNGRRT; PAM sequence: ATGAGT
tcaaagaaatgtattatagg

SEQ ID NO: 8580 - DNA, 20 bp, Artificial Sequence
  Description of Artificial Sequence: Synthetic oligonucleotide
  Target: SCNA; (-) strand; PAM type: NNGRRT; PAM sequence: TAGGAT
tttgtcaaagaaatgtatta

SEQ ID NO: 8581 - DNA, 20 bp, Artificial Sequence
  Description of Artificial Sequence: Synthetic oligonucleotide
  Target: SCNA; (-) strand; PAM type: NNGRRT; PAM sequence: TAGGAT
aaatacttccacccaaatct

SEQ ID NO: 8582 - DNA, 20 bp, Artificial Sequence
  Description of Artificial Sequence: Synthetic oligonucleotide
  Target: SCNA; (-) strand; PAM type: NNGRRT; PAM sequence: ATGGGT
aatacaaaactgagtaacat

SEQ ID NO: 8583 - DNA, 20 bp, Artificial Sequence
  Description of Artificial Sequence: Synthetic oligonucleotide
  Target: SCNA; (-) strand; PAM type: NNGRRT; PAM sequence: CTGAGT
gcaccatgagaaatacaaaa

SEQ ID NO: 8584 - DNA, 20 bp, Artificial Sequence
  Description of Artificial Sequence: Synthetic oligonucleotide
  Target: SCNA; (-) strand; PAM type: NNGRRT; PAM sequence: CTGAGT
ttttcattaaaaatcattaa

SEQ ID NO: 8585 - DNA, 20 bp, Artificial Sequence
  Description of Artificial Sequence: Synthetic oligonucleotide
  Target: SCNA; (-) strand; PAM type: NNGRRT; PAM sequence: GTGAAT
gggttcaagatggatgaata

SEQ ID NO: 8586 - DNA, 20 bp, Artificial Sequence
  Description of Artificial Sequence: Synthetic oligonucleotide
  Target: SCNA; (-) strand; PAM type: NNGRRT; PAM sequence: ATGAAT
tttcactgggttcaagatgg

SEQ ID NO: 8587 - DNA, 20 bp, Artificial Sequence
  Description of Artificial Sequence: Synthetic oligonucleotide
  Target: SCNA; (-) strand; PAM type: NNGRRT; PAM sequence: ATGGAT
aaaatttcactgggttcaag

SEQ ID NO: 8588 - DNA, 20 bp, Artificial Sequence
  Description of Artificial Sequence: Synthetic oligonucleotide
  Target: SCNA; (-) strand; PAM type: NNGRRT; PAM sequence: CTGGGT
ttgtatctgacaaaatttca

SEQ ID NO: 8589 - DNA, 20 bp, Artificial Sequence
  Description of Artificial Sequence: Synthetic oligonucleotide
  Target: SCNA; (-) strand; PAM type: NNGRRT; PAM sequence: TCGAGT
gcctgatttgtatttgtgtt

SEQ ID NO: 8590 - DNA, 20 bp, Artificial Sequence
  Description of Artificial Sequence: Synthetic oligonucleotide
  Target: SCNA; (-) strand; PAM type: NNGRRT; PAM sequence: ATGAAT
attaaaagctttgagacaca

SEQ ID NO: 8591 - DNA, 20 bp, Artificial Sequence
  Description of Artificial Sequence: Synthetic oligonucleotide
  Target: SCNA; (-) strand; PAM type: NNGRRT; PAM sequence: CTGAAT
atgatgtatgttgccatcag

SEQ ID NO: 8592 - DNA, 20 bp, Artificial Sequence
  Description of Artificial Sequence: Synthetic oligonucleotide
  Target: SCNA; (-) strand; PAM type: NNGRRT; PAM sequence: TTGAGT
gaaaatttatttttaaacac

SEQ ID NO: 8593 - DNA, 20 bp, Artificial Sequence
  Description of Artificial Sequence: Synthetic oligonucleotide
  Target: SCNA; (-) strand; PAM type: NNGRRT; PAM sequence: GTGAAT
aaaatgtcaggtttgacatt

SEQ ID NO: 8594 - DNA, 20 bp, Artificial Sequence
  Description of Artificial Sequence: Synthetic oligonucleotide
  Target: SCNA; (-) strand; PAM type: NNGRRT; PAM sequence: ATGAAT
gctagccagttgtgtgctag

SEQ ID NO: 8595 - DNA, 20 bp, Artificial Sequence
  Description of Artificial Sequence: Synthetic oligonucleotide
  Target: SCNA; (-) strand; PAM type: NNGRRT; PAM sequence: AAGGAT
aatcctgacttaattcataa

SEQ ID NO: 8596 - DNA, 20 bp, Artificial Sequence
  Description of Artificial Sequence: Synthetic oligonucleotide
  Target: SCNA; (-) strand; PAM type: NNGRRT; PAM sequence: ATGGAT
tttttaaatcttgatttcaa

SEQ ID NO: 8597 - DNA, 20 bp, Artificial Sequence
  Description of Artificial Sequence: Synthetic oligonucleotide
  Target: SCNA; (-) strand; PAM type: NNGRRT; PAM sequence: CAGAAT
tatttattgttgttcaaaat

SEQ ID NO: 8598 - DNA, 20 bp, Artificial Sequence
  Description of Artificial Sequence: Synthetic oligonucleotide
  Target: SCNA; (-) strand; PAM type: NNGRRT; PAM sequence: TTGGAT
agcttgaaatgtctgttgcc

SEQ ID NO: 8599 - DNA, 20 bp, Artificial Sequence
  Description of Artificial Sequence: Synthetic oligonucleotide
  Target: SCNA; (-) strand; PAM type: NNGRRT; PAM sequence: CTGAAT
agttttagagagcaaaagtc

SEQ ID NO: 8600 - DNA, 20 bp, Artificial Sequence
  Description of Artificial Sequence: Synthetic oligonucleotide
  Target: SCNA; (-) strand; PAM type: NNGRRT; PAM sequence: TGGAGT
tttatatttttgtaattttc

SEQ ID NO: 8601 - DNA, 20 bp, Artificial Sequence
  Description of Artificial Sequence: Synthetic oligonucleotide
  Target: SCNA; (-) strand; PAM type: NNGRRT; PAM sequence: TTGGAT
catggaatgctctaaaagag

SEQ ID NO: 8602 - DNA, 20 bp, Artificial Sequence
  Description of Artificial Sequence: Synthetic oligonucleotide
  Target: SCNA; (-) strand; PAM type: NNGRRT; PAM sequence: AAGAGT
tgccacatggaatgctctaa

SEQ ID NO: 8603 - DNA, 20 bp, Artificial Sequence
  Description of Artificial Sequence: Synthetic oligonucleotide
  Target: SCNA; (-) strand; PAM type: NNGRRT; PAM sequence: TGGAAT
agcatctctttcatgccaca

SEQ ID NO: 8604 - DNA, 20 bp, Artificial Sequence
  Description of Artificial Sequence: Synthetic oligonucleotide
  Target: SCNA; (-) strand; PAM type: NNGRRT; PAM sequence: TGGAGT
atgctactatgcgtgcagtg

SEQ ID NO: 8605 - DNA, 20 bp, Artificial Sequence
  Description of Artificial Sequence: Synthetic oligonucleotide
  Target: SCNA; (-) strand; PAM type: NNGRRT; PAM sequence: TTGAAT
tattgtacaaagaaagtgac

SEQ ID NO: 8606 - DNA, 20 bp, Artificial Sequence
  Description of Artificial Sequence: Synthetic oligonucleotide
  Target: SCNA; (-) strand; PAM type: NNGRRT; PAM sequence: AAGAAT
aagaaagatctgcttgttct

SEQ ID NO: 8607 - DNA, 20 bp, Artificial Sequence
  Description of Artificial Sequence: Synthetic oligonucleotide
  Target: SCNA; (-) strand; PAM type: NNGRRT; PAM sequence: CAGAGT
aagttcatacctttcattgg

SEQ ID NO: 8608 - DNA, 20 bp, Artificial Sequence
  Description of Artificial Sequence: Synthetic oligonucleotide
  Target: SCNA; (-) strand; PAM type: NNGRRT; PAM sequence: TAGAAT
aactcttgtgtttagtacat

SEQ ID NO: 8609 - DNA, 20 bp, Artificial Sequence
  Description of Artificial Sequence: Synthetic oligonucleotide
  Target: SCNA; (-) strand; PAM type: NNGRRT; PAM sequence: TTGAAT
taaaggacaaatgagttatc

SEQ ID NO: 8610 - DNA, 20 bp, Artificial Sequence
  Description of Artificial Sequence: Synthetic oligonucleotide
  Target: SCNA; (-) strand; PAM type: NNGRRT; PAM sequence: ATGAGT
taagactagttaaaggacaa

SEQ ID NO: 8611 - DNA, 20 bp, Artificial Sequence
  Description of Artificial Sequence: Synthetic oligonucleotide
  Target: SCNA; (-) strand; PAM type: NNGRRT; PAM sequence: ATGAAT
tgttttgttaatttgatcat

SEQ ID NO: 8612 - DNA, 20 bp, Artificial Sequence
  Description of Artificial Sequence: Synthetic oligonucleotide
  Target: SCNA; (-) strand; PAM type: NNGRRT; PAM sequence: GAGAGT
ttctgaacaaccaataaatc

SEQ ID NO: 8613 - DNA, 20 bp, Artificial Sequence
  Description of Artificial Sequence: Synthetic oligonucleotide
  Target: SCNA; (-) strand; PAM type: NNGRRT; PAM sequence: GAGGGT
tttcacctttcatgcccttt

SEQ ID NO: 8614 - DNA, 20 bp, Artificial Sequence
  Description of Artificial Sequence: Synthetic oligonucleotide
  Target: SCNA; (-) strand; PAM type: NNGRRT; PAM sequence: GGGAGT
taagatcaggaacactgaaa

SEQ ID NO: 8615 - DNA, 20 bp, Artificial Sequence
  Description of Artificial Sequence: Synthetic oligonucleotide
  Target: SCNA; (-) strand; PAM type: NNGRRT; PAM sequence: GTGGAT
tggatgtctagcttgtagaa

SEQ ID NO: 8616 - DNA, 20 bp, Artificial Sequence
  Description of Artificial Sequence: Synthetic oligonucleotide
  Target: SCNA; (-) strand; PAM type: NNGRRT; PAM sequence: CTGGAT
ggatgtgacaagtaggggta

SEQ ID NO: 8617 - DNA, 20 bp, Artificial Sequence
  Description of Artificial Sequence: Synthetic oligonucleotide
  Target: SCNA; (-) strand; PAM type: NNGRRT; PAM sequence: AGGGGT
ggaagagggatgtgacaagt

SEQ ID NO: 8618 - DNA, 20 bp, Artificial Sequence
  Description of Artificial Sequence: Synthetic oligonucleotide
  Target: SCNA; (-) strand; PAM type: NNGRRT; PAM sequence: AGGGAT
tgccagaaacttggaggaag

SEQ ID NO: 8619 - DNA, 20 bp, Artificial Sequence
  Description of Artificial Sequence: Synthetic oligonucleotide
  Target: SCNA; (-) strand; PAM type: NNGRRT; PAM sequence: AAGAAT
cactcattcatcattcaaga

SEQ ID NO: 8620 - DNA, 20 bp, Artificial Sequence
  Description of Artificial Sequence: Synthetic oligonucleotide
  Target: SCNA; (-) strand; PAM type: NNGRRT; PAM sequence: CTGGAT
tctatgggatgctaaaaaat

SEQ ID NO: 8621 - DNA, 20 bp, Artificial Sequence
  Description of Artificial Sequence: Synthetic oligonucleotide
  Target: SCNA; (-) strand; PAM type: NNGRRT; PAM sequence: TGGGAT
tgcaattgtggtcacatcta

SEQ ID NO: 8622 - DNA, 20 bp, Artificial Sequence
  Description of Artificial Sequence: Synthetic oligonucleotide
  Target: SCNA; (-) strand; PAM type: NNGRRT; PAM sequence: AAGAAT
tgagtttctataataattca

SEQ ID NO: 8623 - DNA, 20 bp, Artificial Sequence
  Description of Artificial Sequence: Synthetic oligonucleotide
  Target: SCNA; (-) strand; PAM type: NNGRRT; PAM sequence: CTGAGT
tctaatttagcaataaagtt

SEQ ID NO: 8624 - DNA, 20 bp, Artificial Sequence
  Description of Artificial Sequence: Synthetic oligonucleotide
  Target: SCNA; (-) strand; PAM type: NNGRRT; PAM sequence: CTGGAT
tctgctcatacaccacctga

SEQ ID NO: 8625 - DNA, 20 bp, Artificial Sequence
  Description of Artificial Sequence: Synthetic oligonucleotide
  Target: SCNA; (-) strand; PAM type: NNGRRT; PAM sequence: GAGAGT
gtggaaataaacattggact

SEQ ID NO: 8626 - DNA, 20 bp, Artificial Sequence
  Description of Artificial Sequence: Synthetic oligonucleotide
  Target: SCNA; (-) strand; PAM type: NNGRRT; PAM sequence: CTGGGT
gtgcttaatcttttacaaaa

SEQ ID NO: 8627 - DNA, 20 bp, Artificial Sequence
  Description of Artificial Sequence: Synthetic oligonucleotide
  Target: SCNA; (-) strand; PAM type: NNGRRT; PAM sequence: CAGAAT
actagaggattttattgctt

SEQ ID NO: 8628 - DNA, 20 bp, Artificial Sequence
  Description of Artificial Sequence: Synthetic oligonucleotide
  Target: SCNA; (-) strand; PAM type: NNGRRT; PAM sequence: GAGGAT
tggacaactagatttaacta

SEQ ID NO: 8629 - DNA, 20 bp, Artificial Sequence
  Description of Artificial Sequence: Synthetic oligonucleotide
  Target: SCNA; (-) strand; PAM type: NNGRRT; PAM sequence: TTGGGT
tcctcaaaacttaccttcct

SEQ ID NO: 8630 - DNA, 20 bp, Artificial Sequence
  Description of Artificial Sequence: Synthetic oligonucleotide
  Target: SCNA; (-) strand; PAM type: NNGRRT; PAM sequence: TGGAAT
tccaagattgcacagtcatt

SEQ ID NO: 8631 - DNA, 20 bp, Artificial Sequence
  Description of Artificial Sequence: Synthetic oligonucleotide
  Target: SCNA; (-) strand; PAM type: NNGRRT; PAM sequence: GTGGGT
aacagaaatctacagaggaa

SEQ ID NO: 8632 - DNA, 20 bp, Artificial Sequence
  Description of Artificial Sequence: Synthetic oligonucleotide
  Target: SCNA; (-) strand; PAM type: NNGRRT; PAM sequence: AGGGAT
gcttttcaaataatcttatt

SEQ ID NO: 8633 - DNA, 20 bp, Artificial Sequence
  Description of Artificial Sequence: Synthetic oligonucleotide
  Target: SCNA; (-) strand; PAM type: NNGRRT; PAM sequence: TTGAAT
tgaagttcttcagctaatgt

SEQ ID NO: 8634 - DNA, 20 bp, Artificial Sequence
  Description of Artificial Sequence: Synthetic oligonucleotide
  Target: SCNA; (-) strand; PAM type: NNGRRT; PAM sequence: ATGGAT
catgtctagtgtctggtgca

SEQ ID NO: 8635 - DNA, 20 bp, Artificial Sequence
  Description of Artificial Sequence: Synthetic oligonucleotide
  Target: SCNA; (-) strand; PAM type: NNGRRT; PAM sequence: CTGGGT
ttatttgctggcaaactatt

SEQ ID NO: 8636 - DNA, 20 bp, Artificial Sequence
  Description of Artificial Sequence: Synthetic oligonucleotide
  Target: SCNA; (-) strand; PAM type: NNGRRT; PAM sequence: ATGAAT
tacaatcaaaatgattttgg

SEQ ID NO: 8637 - DNA, 20 bp, Artificial Sequence
  Description of Artificial Sequence: Synthetic oligonucleotide
  Target: SCNA; (-) strand; PAM type: NNGRRT; PAM sequence: TTGGAT
aagttacaatcaaaatgatt

SEQ ID NO: 8638 - DNA, 20 bp, Artificial Sequence
  Description of Artificial Sequence: Synthetic oligonucleotide
  Target: SCNA; (-) strand; PAM type: NNGRRT; PAM sequence: CTGGGT
aagcacaacaactttcattt

SEQ ID NO: 8639 - DNA, 20 bp, Artificial Sequence
  Description of Artificial Sequence: Synthetic oligonucleotide
  Target: SCNA; (-) strand; PAM type: NNGRRT; PAM sequence: GTGAGT
taaattaaggagggaaggaa

SEQ ID NO: 8640 - DNA, 20 bp, Artificial Sequence
  Description of Artificial Sequence: Synthetic oligonucleotide
  Target: SCNA; (-) strand; PAM type: NNGRRT; PAM sequence: GAGAGT
gatatttcacaagtgtctgg

SEQ ID NO: 8641 - DNA, 20 bp, Artificial Sequence
  Description of Artificial Sequence: Synthetic oligonucleotide
  Target: SCNA; (-) strand; PAM type: NNGRRT; PAM sequence: GAGAGT
ttctagaatgtaggcaccat

SEQ ID NO: 8642 - DNA, 20 bp, Artificial Sequence
  Description of Artificial Sequence: Synthetic oligonucleotide
  Target: SCNA; (-) strand; PAM type: NNGRRT; PAM sequence: TAGAAT
tttattttatttctcccttc

SEQ ID NO: 8643 - DNA, 20 bp, Artificial Sequence
  Description of Artificial Sequence: Synthetic oligonucleotide
  Target: SCNA; (-) strand; PAM type: NNGRRT; PAM sequence: TTGAAT
aatgacctccttgctatttc

SEQ ID NO: 8644 - DNA, 20 bp, Artificial Sequence
  Description of Artificial Sequence: Synthetic oligonucleotide
  Target: SCNA; (-) strand; PAM type: NNGRRT; PAM sequence: ACGAAT
ttttttgacaaacatgggac

SEQ ID NO: 8645 - DNA, 20 bp, Artificial Sequence
  Description of Artificial Sequence: Synthetic oligonucleotide
  Target: SCNA; (-) strand; PAM type: NNGRRT; PAM sequence: CTGAAT
aattctgagaagaattttga

SEQ ID NO: 8646 - DNA, 20 bp, Artificial Sequence
  Description of Artificial Sequence: Synthetic oligonucleotide
  Target: SCNA; (-) strand; PAM type: NNGRRT; PAM sequence: AAGAAT
gtagattttaaaattctgag

SEQ ID NO: 8647 - DNA, 20 bp, Artificial Sequence
  Description of Artificial Sequence: Synthetic oligonucleotide
  Target: SCNA; (-) strand; PAM type: NNGRRT; PAM sequence: TGGAGT
gtcttggaatttctcttcct

SEQ ID NO: 8648 - DNA, 20 bp, Artificial Sequence
  Description of Artificial Sequence: Synthetic oligonucleotide
  Target: SCNA; (-) strand; PAM type: NNGRRT; PAM sequence: TGGAAT
ttcatgttaattgtaagtct

SEQ ID NO: 8649 - DNA, 20 bp, Artificial Sequence
  Description of Artificial Sequence: Synthetic oligonucleotide
  Target: SCNA; (-) strand; PAM type: NNGRRT; PAM sequence: AAGAAT
aggaacagtgacatttcaga

SEQ ID NO: 8650 - DNA, 20 bp, Artificial Sequence
  Description of Artificial Sequence: Synthetic oligonucleotide
  Target: SCNA; (-) strand; PAM type: NNGRRT; PAM sequence: ACGGGT
atgttggaggagcagtggtg

SEQ ID NO: 8651 - DNA, 20 bp, Artificial Sequence
  Description of Artificial Sequence: Synthetic oligonucleotide
  Target: SCNA; (-) strand; PAM type: NNGRRT; PAM sequence: TGGAAT
aagccgatggctagtggaag

SEQ ID NO: 8652 - DNA, 20 bp, Artificial Sequence
  Description of Artificial Sequence: Synthetic oligonucleotide
  Target: SCNA; (-) strand; PAM type: NNGRRT; PAM sequence: AAGAAT
tcaaatataactgcacctgt

SEQ ID NO: 8653 - DNA, 20 bp, Artificial Sequence
  Description of Artificial Sequence: Synthetic oligonucleotide
  Target: SCNA; (-) strand; PAM type: NNGRRT; PAM sequence: CTGAGT
gaaataaagaaatattcatg

SEQ ID NO: 8654 - DNA, 20 bp, Artificial Sequence
  Description of Artificial Sequence: Synthetic oligonucleotide
  Target: SCNA; (-) strand; PAM type: NNGRRT; PAM sequence: CTGAAT
gtgagatcaaaggattggca

SEQ ID NO: 8655 - DNA, 20 bp, Artificial Sequence
  Description of Artificial Sequence: Synthetic oligonucleotide
  Target: SCNA; (-) strand; PAM type: NNGRRT; PAM sequence: AAGGAT
taacttgctgagtgagatca

SEQ ID NO: 8656 - DNA, 20 bp, Artificial Sequence
  Description of Artificial Sequence: Synthetic oligonucleotide
  Target: SCNA; (-) strand; PAM type: NNGRRT; PAM sequence: CTGAGT
gtgtggtggaaattaacttg

SEQ ID NO: 8657 - DNA, 20 bp, Artificial Sequence
  Description of Artificial Sequence: Synthetic oligonucleotide
  Target: SCNA; (-) strand; PAM type: NNGRRT; PAM sequence: AAGAAT
tgcattccagcctgaacaac

SEQ ID NO: 8658 - DNA, 20 bp, Artificial Sequence
  Description of Artificial Sequence: Synthetic oligonucleotide
  Target: SCNA; (-) strand; PAM type: NNGRRT; PAM sequence: GAGAAT
tactcgggagactgaggcag

SEQ ID NO: 8659 - DNA, 20 bp, Artificial Sequence
  Description of Artificial Sequence: Synthetic oligonucleotide
  Target: SCNA; (-) strand; PAM type: NNGRRT; PAM sequence: AGGAGT
cgggtggatcacctgaggtt

SEQ ID NO: 8660 - DNA, 20 bp, Artificial Sequence
  Description of Artificial Sequence: Synthetic oligonucleotide
  Target: SCNA; (-) strand; PAM type: NNGRRT; PAM sequence: GTGGAT
actttgggaggctaaggcgg

SEQ ID NO: 8661 - DNA, 20 bp, Artificial Sequence
  Description of Artificial Sequence: Synthetic oligonucleotide
  Target: SCNA; (-) strand; PAM type: NNGRRT; PAM sequence: GCGGGT
tagcactttgggaggctaag

SEQ ID NO: 8662 - DNA, 20 bp, Artificial Sequence
  Description of Artificial Sequence: Synthetic oligonucleotide
  Target: SCNA; (-) strand; PAM type: NNGRRT; PAM sequence: GTGGAT
ataagtaggggctgggtgcg

SEQ ID NO: 8663 - DNA, 20 bp, Artificial Sequence
  Description of Artificial Sequence: Synthetic oligonucleotide
  Target: SCNA; (-) strand; PAM type: NNGRRT; PAM sequence: CTGGGT
acgtagataataagtagggg

SEQ ID NO: 8664 - DNA, 20 bp, Artificial Sequence
  Description of Artificial Sequence: Synthetic oligonucleotide
  Target: SCNA; (-) strand; PAM type: NNGRRT; PAM sequence: AAGGGT
gttttatgaaaagaaattgt

SEQ ID NO: 8665 - DNA, 20 bp, Artificial Sequence
  Description of Artificial Sequence: Synthetic oligonucleotide
  Target: SCNA; (-) strand; PAM type: NNGRRT; PAM sequence: CTGAAT
aacttattttaataaatcta

SEQ ID NO: 8666 - DNA, 20 bp, Artificial Sequence
  Description of Artificial Sequence: Synthetic oligonucleotide
  Target: SCNA; (-) strand; PAM type: NNGRRT; PAM sequence: ATGAGT
tctttttctttagattccac

SEQ ID NO: 8667 - DNA, 20 bp, Artificial Sequence
  Description of Artificial Sequence: Synthetic oligonucleotide
  Target: SCNA; (-) strand; PAM type: NNGRRT; PAM sequence: ATGAGT
atgtgccttcatttccttag

SEQ ID NO: 8668 - DNA, 20 bp, Artificial Sequence
  Description of Artificial Sequence: Synthetic oligonucleotide
  Target: SCNA; (-) strand; PAM type: NNGRRT; PAM sequence: GGGAGT
ctcagactgaggcttatctg

SEQ ID NO: 8669 - DNA, 20 bp, Artificial Sequence
  Description of Artificial Sequence: Synthetic oligonucleotide
  Target: SCNA; (-) strand; PAM type: NNGRRT; PAM sequence: GTGAAT
gaaacctatacaatagtcat

SEQ ID NO: 8670 - DNA, 20 bp, Artificial Sequence
  Description of Artificial Sequence: Synthetic oligonucleotide
  Target: SCNA; (-) strand; PAM type: NNGRRT; PAM sequence: CTGGGT
tcgtgccactgcactccagc

SEQ ID NO: 8671 - DNA, 20 bp, Artificial Sequence
  Description of Artificial Sequence: Synthetic oligonucleotide
  Target: SCNA; (-) strand; PAM type: NNGRRT; PAM sequence: CGGAGT
aatggcctgaacccgggagt

SEQ ID NO: 8672 - DNA, 20 bp, Artificial Sequence
  Description of Artificial Sequence: Synthetic oligonucleotide
  Target: SCNA; (-) strand; PAM type: NNGRRT; PAM sequence: GGGAGT
caggagaatggcctgaaccc

SEQ ID NO: 8673 - DNA, 20 bp, Artificial Sequence
  Description of Artificial Sequence: Synthetic oligonucleotide
  Target: SCNA; (-) strand; PAM type: NNGRRT; PAM sequence: GAGAAT
tgctggggaggctgaggcag

SEQ ID NO: 8674 - DNA, 20 bp, Artificial Sequence
  Description of Artificial Sequence: Synthetic oligonucleotide
  Target: SCNA; (-) strand; PAM type: NNGRRT; PAM sequence: CCGGGT
taaaaatataaaaaaattag

SEQ ID NO: 8675 - DNA, 20 bp, Artificial Sequence
  Description of Artificial Sequence: Synthetic oligonucleotide
  Target: SCNA; (-) strand; PAM type: NNGRRT; PAM sequence: CGGAGT
ccatatccttagaagtggca

SEQ ID NO: 8676 - DNA, 20 bp, Artificial Sequence
  Description of Artificial Sequence: Synthetic oligonucleotide
  Target: SCNA; (-) strand; PAM type: NNGRRT; PAM sequence: TTGAAT
gctggcatttaaatcgaact

SEQ ID NO: 8677 - DNA, 20 bp, Artificial Sequence
  Description of Artificial Sequence: Synthetic oligonucleotide
  Target: SCNA; (-) strand; PAM type: NNGRRT; PAM sequence: AAGGAT
cacataattgactattttta

SEQ ID NO: 8678 - DNA, 20 bp, Artificial Sequence
  Description of Artificial Sequence: Synthetic oligonucleotide
  Target: SCNA; (-) strand; PAM type: NNGRRT; PAM sequence: CTGGAT
agatattataaaatttatgg

SEQ ID NO: 8679 - DNA, 20 bp, Artificial Sequence
  Description of Artificial Sequence: Synthetic oligonucleotide
  Target: SCNA; (-) strand; PAM type: NNGRRT; PAM sequence: TAGAGT
aacaaaattataataatgtg

SEQ ID NO: 8680 - DNA, 20 bp, Artificial Sequence
  Description of Artificial Sequence: Synthetic oligonucleotide
  Target: SCNA; (-) strand; PAM type: NNGRRT; PAM sequence: GTGAGT
acccgtcatttggaatgtca

SEQ ID NO: 8681 - DNA, 20 bp, Artificial Sequence
  Description of Artificial Sequence: Synthetic oligonucleotide
  Target: SCNA; (-) strand; PAM type: NNGRRT; PAM sequence: TGGAAT
ttgttttgtcacccgtcatt

SEQ ID NO: 8682 - DNA, 20 bp, Artificial Sequence
  Description of Artificial Sequence: Synthetic oligonucleotide
  Target: SCNA; (-) strand; PAM type: NNGRRT; PAM sequence: ATGAGT
tagacccaaaatgtactaat

SEQ ID NO: 8683 - DNA, 20 bp, Artificial Sequence
  Description of Artificial Sequence: Synthetic oligonucleotide
  Target: SCNA; (-) strand; PAM type: NNGRRT; PAM sequence: CAGAAT
taatataaagaaaaataaag

SEQ ID NO: 8684 - DNA, 20 bp, Artificial Sequence
  Description of Artificial Sequence: Synthetic oligonucleotide
  Target: SCNA; (-) strand; PAM type: NNGRRT; PAM sequence: TGGAAT
ttggtatcacatttcctttt

SEQ ID NO: 8685 - DNA, 20 bp, Artificial Sequence
  Description of Artificial Sequence: Synthetic oligonucleotide
  Target: SCNA; (-) strand; PAM type: NNGRRT; PAM sequence: CTGAAT
aatgtgtttaattaaactta

SEQ ID NO: 8686 - DNA, 20 bp, Artificial Sequence
  Description of Artificial Sequence: Synthetic oligonucleotide
  Target: SCNA; (-) strand; PAM type: NNGRRT; PAM sequence: ATGGGT
cctgatgtaaaatgtttatt

SEQ ID NO: 8687 - DNA, 20 bp, Artificial Sequence
  Description of Artificial Sequence: Synthetic oligonucleotide
  Target: SCNA; (-) strand; PAM type: NNGRRT; PAM sequence: GAGAAT
cttcaatggttaaagagagg

SEQ ID NO: 8688 - DNA, 20 bp, Artificial Sequence
  Description of Artificial Sequence: Synthetic oligonucleotide
  Target: SCNA; (-) strand; PAM type: NNGRRT; PAM sequence: TAGGGT
aaatgaattaactttttgaa

SEQ ID NO: 8689 - DNA, 20 bp, Artificial Sequence
  Description of Artificial Sequence: Synthetic oligonucleotide
  Target: SCNA; (-) strand; PAM type: NNGRRT; PAM sequence: TTGAAT
cagataaatgaattaacttt

SEQ ID NO: 8690 - DNA, 20 bp, Artificial Sequence
  Description of Artificial Sequence: Synthetic oligonucleotide
  Target: SCNA; (-) strand; PAM type: NNGRRT; PAM sequence: ATGAAT
tcctctcccacatcagataa

SEQ ID NO: 8691 - DNA, 20 bp, Artificial Sequence
  Description of Artificial Sequence: Synthetic oligonucleotide
  Target: SCNA; (-) strand; PAM type: NNGRRT; PAM sequence: TGGGAT
tatggctatgagaaacacat

SEQ ID NO: 8692 - DNA, 20 bp, Artificial Sequence
  Description of Artificial Sequence: Synthetic oligonucleotide
  Target: SCNA; (-) strand; PAM type: NNGRRT; PAM sequence: TTGAAT
ttcttcattagttactaggg

SEQ ID NO: 8693 - DNA, 20 bp, Artificial Sequence
  Description of Artificial Sequence: Synthetic oligonucleotide
  Target: SCNA; (-) strand; PAM type: NNGRRT; PAM sequence: TAGGGT
aaactttcttcattagttac

SEQ ID NO: 8694 - DNA, 20 bp, Artificial Sequence
  Description of Artificial Sequence: Synthetic oligonucleotide
  Target: SCNA; (-) strand; PAM type: NNGRRT; PAM sequence: CAGGGT
ttgcattacatagttaaaat

SEQ ID NO: 8695 - DNA, 20 bp, Artificial Sequence
  Description of Artificial Sequence: Synthetic oligonucleotide
  Target: SCNA; (-) strand; PAM type: NNGRRT; PAM sequence: AGGAAT
attttctctttagcgtatta

SEQ ID NO: 8696 - DNA, 20 bp, Artificial Sequence
  Description of Artificial Sequence: Synthetic oligonucleotide
  Target: SCNA; (-) strand; PAM type: NNGRRT; PAM sequence: CAGAAT
tgcatttttttagtcttttc

SEQ ID NO: 8697 - DNA, 20 bp, Artificial Sequence
  Description of Artificial Sequence: Synthetic oligonucleotide
  Target: SCNA; (-) strand; PAM type: NNGRRT; PAM sequence: TGGAGT
gacaagcatgtggcaagttc

SEQ ID NO: 8698 - DNA, 20 bp, Artificial Sequence
  Description of Artificial Sequence: Synthetic oligonucleotide
  Target: SCNA; (-) strand; PAM type: NNGRRT; PAM sequence: ATGAAT
tctgaagacggtcaacctag

SEQ ID NO: 8699 - DNA, 20 bp, Artificial Sequence
  Description of Artificial Sequence: Synthetic oligonucleotide
  Target: SCNA; (-) strand; PAM type: NNGRRT; PAM sequence: CAGAGT
aatacttttgatttaaaaat

SEQ ID NO: 8700 - DNA, 20 bp, Artificial Sequence
  Description of Artificial Sequence: Synthetic oligonucleotide
  Target: SCNA; (-) strand; PAM type: NNGRRT; PAM sequence: ATGAAT
ggagaaaaatatttctttaa

SEQ ID NO: 8701 - DNA, 20 bp, Artificial Sequence
  Description of Artificial Sequence: Synthetic oligonucleotide
  Target: SCNA; (-) strand; PAM type: NNGRRT; PAM sequence: GTGAAT
ctcatctataaaataattca

SEQ ID NO: 8702 - DNA, 20 bp, Artificial Sequence
  Description of Artificial Sequence: Synthetic oligonucleotide
  Target: SCNA; (-) strand; PAM type: NNGRRT; PAM sequence: AGGAGT
gtggatatgactaaaaacac

SEQ ID NO: 8703 - DNA, 20 bp, Artificial Sequence
  Description of Artificial Sequence: Synthetic oligonucleotide
  Target: SCNA; (-) strand; PAM type: NNGRRT; PAM sequence: GTGGAT
gggaatcttaatacagtgtt

SEQ ID NO: 8704 - DNA, 20 bp, Artificial Sequence
  Description of Artificial Sequence: Synthetic oligonucleotide
  Target: SCNA; (-) strand; PAM type: NNGRRT; PAM sequence: GGGAAT
ggaaatgaggacaatgatat

SEQ ID NO: 8705 - DNA, 20 bp, Artificial Sequence
  Description of Artificial Sequence: Synthetic oligonucleotide
  Target: SCNA; (-) strand; PAM type: NNGRRT; PAM sequence: GAGAGT
atgttgaggaagatgaggat

SEQ ID NO: 8706 - DNA, 20 bp, Artificial Sequence
  Description of Artificial Sequence: Synthetic oligonucleotide
  Target: SCNA; (-) strand; PAM type: NNGRRT; PAM sequence: GAGGAT
catcagatgttgaggaagat

SEQ ID NO: 8707 - DNA, 20 bp, Artificial Sequence
  Description of Artificial Sequence: Synthetic oligonucleotide
  Target: SCNA; (-) strand; PAM type: NNGRRT; PAM sequence: AAGGAT
gaaatatcaaaaatgatgaa

SEQ ID NO: 8708 - DNA, 20 bp, Artificial Sequence
  Description of Artificial Sequence: Synthetic oligonucleotide
  Target: SCNA; (-) strand; PAM type: NNGRRT; PAM sequence: GAGAAT
tcatttggcctaaatttacc

SEQ ID NO: 8709 - DNA, 20 bp, Artificial Sequence
  Description of Artificial Sequence: Synthetic oligonucleotide
  Target: SCNA; (-) strand; PAM type: NNGRRT; PAM sequence: CAGAGT
acaatattcctttgataatt

SEQ ID NO: 8710 - DNA, 20 bp, Artificial Sequence
  Description of Artificial Sequence: Synthetic oligonucleotide
  Target: SCNA; (-) strand; PAM type: NNGRRT; PAM sequence: GTGAAT
actgctgacaaaaataaaat

SEQ ID NO: 8711 - DNA, 20 bp, Artificial Sequence
  Description of Artificial Sequence: Synthetic oligonucleotide
  Target: SCNA; (-) strand; PAM type: NNGRRT; PAM sequence: TTGAAT
tgccaagaataatgagggct

SEQ ID NO: 8712 - DNA, 20 bp, Artificial Sequence
  Description of Artificial Sequence: Synthetic oligonucleotide
  Target: SCNA; (-) strand; PAM type: NNGRRT; PAM sequence: AAGAAT
aaataaaaaatatacttgcc

SEQ ID NO: 8713 - DNA, 20 bp, Artificial Sequence
  Description of Artificial Sequence: Synthetic oligonucleotide
  Target: SCNA; (-) strand; PAM type: NNGRRT; PAM sequence: CTGAAT
acatatcagtcttattgaaa

SEQ ID NO: 8714 - DNA, 20 bp, Artificial Sequence
  Description of Artificial Sequence: Synthetic oligonucleotide
  Target: SCNA; (-) strand; PAM type: NNGRRT; PAM sequence: GGGAGT
gtaggctccaaaaccaagga

SEQ ID NO: 8715 - DNA, 20 bp, Artificial Sequence
  Description of Artificial Sequence: Synthetic oligonucleotide
  Target: SCNA; (-) strand; PAM type: NNGRRT; PAM sequence: TTGAAT
gctagcttgagacttatgtc

SEQ ID NO: 8716 - DNA, 20 bp, Artificial Sequence
  Description of Artificial Sequence: Synthetic oligonucleotide
  Target: SCNA; (-) strand; PAM type: NNGRRT; PAM sequence: TAGGAT
ggagttccttcttctagttt

SEQ ID NO: 8717 - DNA, 20 bp, Artificial Sequence
  Description of Artificial Sequence: Synthetic oligonucleotide
  Target: SCNA; (-) strand; PAM type: NNGRRT; PAM sequence: TGGAGT
ctatttattgtggtggttac

SEQ ID NO: 8718 - DNA, 20 bp, Artificial Sequence
  Description of Artificial Sequence: Synthetic oligonucleotide
  Target: SCNA; (-) strand; PAM type: NNGRRT; PAM sequence: GGGGAT
acatgtgatgtgggaacaaa

SEQ ID NO: 8719 - DNA, 20 bp, Artificial Sequence
  Description of Artificial Sequence: Synthetic oligonucleotide
  Target: SCNA; (-) strand; PAM type: NNGRRT; PAM sequence: CTGAAT
cttttaaagcttctacagtt

SEQ ID NO: 8720 - DNA, 20 bp, Artificial Sequence
  Description of Artificial Sequence: Synthetic oligonucleotide
  Target: SCNA; (-) strand; PAM type: NNGRRT; PAM sequence: ATGGGT
tccttcttcccttttgtttc

SEQ ID NO: 8721 - DNA, 20 bp, Artificial Sequence
  Description of Artificial Sequence: Synthetic oligonucleotide
  Target: SCNA; (-) strand; PAM type: NNGRRT; PAM sequence: ATGGGT
taaaatgttttttttacata

SEQ ID NO: 8722 - DNA, 20 bp, Artificial Sequence
  Description of Artificial Sequence: Synthetic oligonucleotide
  Target: SCNA; (-) strand; PAM type: NNGRRT; PAM sequence: TGGGAT
acctcggcctcccaaattgc

SEQ ID NO: 8723 - DNA, 20 bp, Artificial Sequence
  Description of Artificial Sequence: Synthetic oligonucleotide
  Target: SCNA; (-) strand; PAM type: NNGRRT; PAM sequence: CAGGAT
tggggtttcaccatattagc

SEQ ID NO: 8724 - DNA, 20 bp, Artificial Sequence
  Description of Artificial Sequence: Synthetic oligonucleotide
  Target: SCNA; (-) strand; PAM type: NNGRRT; PAM sequence: TGGGGT
ttttgtatttttggtagaga

SEQ ID NO: 8725 - DNA, 20 bp, Artificial Sequence
  Description of Artificial Sequence: Synthetic oligonucleotide
  Target: SCNA; (-) strand; PAM type: NNGRRT; PAM sequence: CCGAGT
ctcactgcaagttctgcctc

SEQ ID NO: 8726 - DNA, 20 bp, Artificial Sequence
  Description of Artificial Sequence: Synthetic oligonucleotide
  Target: SCNA; (-) strand; PAM type: NNGRRT; PAM sequence: TGGAGT
tcttgctctgttacccaggc

SEQ ID NO: 8727 - DNA, 20 bp, Artificial Sequence
  Description of Artificial Sequence: Synthetic oligonucleotide
  Target: SCNA; (-) strand; PAM type: NNGRRT; PAM sequence: CAGAGT
gtctgtttgtttttttgaga

SEQ ID NO: 8728 - DNA, 20 bp, Artificial Sequence
  Description of Artificial Sequence: Synthetic oligonucleotide
  Target: SCNA; (-) strand; PAM type: NNGRRT; PAM sequence: TCGGAT
tgttacataaattacttaac

SEQ ID NO: 8729 - DNA, 20 bp, Artificial Sequence
  Description of Artificial Sequence: Synthetic oligonucleotide
  Target: SCNA; (-) strand; PAM type: NNGRRT; PAM sequence: TTGAAT
tcctgtgtagagaccctagt

SEQ ID NO: 8730 - DNA, 20 bp, Artificial Sequence
  Description of Artificial Sequence: Synthetic oligonucleotide
  Target: SCNA; (-) strand; PAM type: NNGRRT; PAM sequence: ATGAAT
aatccaacattagagaggat

SEQ ID NO: 8731 - DNA, 20 bp, Artificial Sequence
  Description of Artificial Sequence: Synthetic oligonucleotide
  Target: SCNA; (-) strand; PAM type: NNGRRT; PAM sequence: GAGGAT
ctgaaaaatccaacattaga

SEQ ID NO: 8732 - DNA, 20 bp, Artificial Sequence
  Description of Artificial Sequence: Synthetic oligonucleotide
  Target: SCNA; (-) strand; PAM type: NNGRRT; PAM sequence: GTGAAT
gattccataaattatacagt

SEQ ID NO: 8733 - DNA, 20 bp, Artificial Sequence
  Description of Artificial Sequence: Synthetic oligonucleotide
  Target: SCNA; (-) strand; PAM type: NNGRRT; PAM sequence: AGGAGT
aaactgatccaaacttaaaa

SEQ ID NO: 8734 - DNA, 20 bp, Artificial Sequence
  Description of Artificial Sequence: Synthetic oligonucleotide
  Target: SCNA; (-) strand; PAM type: NNGRRT; PAM sequence: AAGAGT
tggggaaagaggttgtgata

SEQ ID NO: 8735 - DNA, 20 bp, Artificial Sequence
  Description of Artificial Sequence: Synthetic oligonucleotide
  Target: SCNA; (-) strand; PAM type: NNGRRT; PAM sequence: GAGGAT
atacaggaagtagctaccct

SEQ ID NO: 8736 - DNA, 20 bp, Artificial Sequence
  Description of Artificial Sequence: Synthetic oligonucleotide
  Target: SCNA; (-) strand; PAM type: NNGRRT; PAM sequence: TTGAAT
aaacattctggaagtaaaat

SEQ ID NO: 8737 - DNA, 20 bp, Artificial Sequence
  Description of Artificial Sequence: Synthetic oligonucleotide
  Target: SCNA; (-) strand; PAM type: NNGRRT; PAM sequence: AAGAGT
aaactggccagcaaagatga

SEQ ID NO: 8738 - DNA, 20 bp, Artificial Sequence
  Description of Artificial Sequence: Synthetic oligonucleotide
  Target: SCNA; (-) strand; PAM type: NNGRRT; PAM sequence: GAGGAT
caacatggggtgcaggtggt

SEQ ID NO: 8739 - DNA, 20 bp, Artificial Sequence
  Description of Artificial Sequence: Synthetic oligonucleotide
  Target: SCNA; (-) strand; PAM type: NNGRRT; PAM sequence: TGGGGT
tagtcatttttaagacaaca

SEQ ID NO: 8740 - DNA, 20 bp, Artificial Sequence
  Description of Artificial Sequence: Synthetic oligonucleotide
  Target: SCNA; (-) strand; PAM type: NNGRRT; PAM sequence: TAGAAT
ctatctcattgtctttgatt

SEQ ID NO: 8741 - DNA, 20 bp, Artificial Sequence
  Description of Artificial Sequence: Synthetic oligonucleotide
  Target: SCNA; (-) strand; PAM type: NNGRRT; PAM sequence: CAGAAT
tatatcaccctacagtacta

SEQ ID NO: 8742 - DNA, 20 bp, Artificial Sequence
  Description of Artificial Sequence: Synthetic oligonucleotide
  Target: SCNA; (-) strand; PAM type: NNGRRT; PAM sequence: TAGGGT
acaatgtgtgataatcaaat

SEQ ID NO: 8743 - DNA, 20 bp, Artificial Sequence
  Description of Artificial Sequence: Synthetic oligonucleotide
  Target: SCNA; (-) strand; PAM type: NNGRRT; PAM sequence: CAGAAT
ttgtatataattgtgggatc

SEQ ID NO: 8744 - DNA, 20 bp, Artificial Sequence
  Description of Artificial Sequence: Synthetic oligonucleotide
  Target: SCNA; (-) strand; PAM type: NNGRRT; PAM sequence: TGGGAT
gtaataattgtatataattg

SEQ ID NO: 8745 - DNA, 20 bp, Artificial Sequence
  Description of Artificial Sequence: Synthetic oligonucleotide
  Target: SCNA; (-) strand; PAM type: NNGRRT; PAM sequence: GTGAAT
taatttttcttttattttta

SEQ ID NO: 8746 - DNA, 20 bp, Artificial Sequence
  Description of Artificial Sequence: Synthetic oligonucleotide
  Target: SCNA; (-) strand; PAM type: NNGRRT; PAM sequence: CTGGGT
tacacccagaagagggattg

SEQ ID NO: 8747 - DNA, 20 bp, Artificial Sequence
  Description of Artificial Sequence: Synthetic oligonucleotide
  Target: SCNA; (-) strand; PAM type: NNGRRT; PAM sequence: AGGGAT
tgtggatctacacccagaag

SEQ ID NO: 8748 - DNA, 20 bp, Artificial Sequence
  Description of Artificial Sequence: Synthetic oligonucleotide
  Target: SCNA; (-) strand; PAM type: NNGRRT; PAM sequence: GTGGAT
atatgctgaaatcttttctt

SEQ ID NO: 8749 - DNA, 20 bp, Artificial Sequence
  Description of Artificial Sequence: Synthetic oligonucleotide
  Target: SCNA; (-) strand; PAM type: NNGRRT; PAM sequence: TGGGAT
gcctcagcctcccaaagcac

SEQ ID NO: 8750 - DNA, 20 bp, Artificial Sequence
  Description of Artificial Sequence: Synthetic oligonucleotide
  Target: SCNA; (-) strand; PAM type: NNGRRT; PAM sequence: TAGAGT
ctcctaattcaaatttagaa

SEQ ID NO: 8751 - DNA, 20 bp, Artificial Sequence
  Description of Artificial Sequence: Synthetic oligonucleotide
  Target: SCNA; (-) strand; PAM type: NNGRRT; PAM sequence: TAGAAT
tcaaactcctaattcaaatt

SEQ ID NO: 8752 - DNA, 20 bp, Artificial Sequence
  Description of Artificial Sequence: Synthetic oligonucleotide
  Target: SCNA; (-) strand; PAM type: NNGRRT; PAM sequence: TGGAGT
tgctgtcacccaggctgcaa

SEQ ID NO: 8753 - DNA, 20 bp, Artificial Sequence
  Description of Artificial Sequence: Synthetic oligonucleotide
  Target: SCNA; (-) strand; PAM type: NNGRRT; PAM sequence: CAGGGT
ctttttttcttttttggaga

SEQ ID NO: 8754 - DNA, 20 bp, Artificial Sequence
  Description of Artificial Sequence: Synthetic oligonucleotide
  Target: SCNA; (-) strand; PAM type: NNGRRT; PAM sequence: TAGGAT
ttcatccatgttgtaaatgg

SEQ ID NO: 8755 - DNA, 20 bp, Artificial Sequence
  Description of Artificial Sequence: Synthetic oligonucleotide
  Target: SCNA; (-) strand; PAM type: NNGRRT; PAM sequence: CTGGGT
ttcacttagcataattttgt

SEQ ID NO: 8756 - DNA, 20 bp, Artificial Sequence
  Description of Artificial Sequence: Synthetic oligonucleotide
  Target: SCNA; (-) strand; PAM type: NNGRRT; PAM sequence: TTGAAT
tttacgtagtctctgtatat

SEQ ID NO: 8757 - DNA, 20 bp, Artificial Sequence
  Description of Artificial Sequence: Synthetic oligonucleotide
  Target: SCNA; (-) strand; PAM type: NNGRRT; PAM sequence: TTGGAT
cttacacatctgctacttgc

SEQ ID NO: 8758 - DNA, 20 bp, Artificial Sequence
  Description of Artificial Sequence: Synthetic oligonucleotide
  Target: SCNA; (-) strand; PAM type: NNGRRT; PAM sequence: ATGAAT
ctaaaatccacttatttatc

SEQ ID NO: 8759 - DNA, 20 bp, Artificial Sequence
  Description of Artificial Sequence: Synthetic oligonucleotide
  Target: SCNA; (-) strand; PAM type: NNGRRT; PAM sequence: TAGGGT
taaatttaattgtgtatatt

SEQ ID NO: 8760 - DNA, 20 bp, Artificial Sequence
  Description of Artificial Sequence: Synthetic oligonucleotide
  Target: SCNA; (-) strand; PAM type: NNGRRT; PAM sequence: TGGGAT
acctcggcctcccaaaatgc

SEQ ID NO: 8761 - DNA, 20 bp, Artificial Sequence
  Description of Artificial Sequence: Synthetic oligonucleotide
  Target: SCNA; (-) strand; PAM type: NNGRRT; PAM sequence: CAGGAT
tggggtttcaccatgttagc

SEQ ID NO: 8762 - DNA, 20 bp, Artificial Sequence
  Description of Artificial Sequence: Synthetic oligonucleotide
  Target: SCNA; (-) strand; PAM type: NNGRRT; PAM sequence: TGGGGT
ttttgtatttttagtagaga

SEQ ID NO: 8763 - DNA, 20 bp, Artificial Sequence
  Description of Artificial Sequence: Synthetic oligonucleotide
  Target: SCNA; (-) strand; PAM type: NNGRRT; PAM sequence: CTGAGT
tattctcctgactcagcctc

SEQ ID NO: 8764 - DNA, 20 bp, Artificial Sequence
  Description of Artificial Sequence: Synthetic oligonucleotide
  Target: SCNA; (-) strand; PAM type: NNGRRT; PAM sequence: CTGGGT
ctcactgcaacctccgcctc

SEQ ID NO: 8765 - DNA, 20 bp, Artificial Sequence
  Description of Artificial Sequence: Synthetic oligonucleotide
  Target: SCNA; (-) strand; PAM type: NNGRRT; PAM sequence: TAGGGT
ttttttctttttttctgaga

SEQ ID NO: 8766 - DNA, 20 bp, Artificial Sequence
  Description of Artificial Sequence: Synthetic oligonucleotide
  Target: SCNA; (-) strand; PAM type: NNGRRT; PAM sequence: TGGGGT
aagttatatacctatctctt

SEQ ID NO: 8767 - DNA, 20 bp, Artificial Sequence
  Description of Artificial Sequence: Synthetic oligonucleotide
  Target: SCNA; (-) strand; PAM type: NNGRRT; PAM sequence: TAGGGT
ttgaggttgggaagacaaga

SEQ ID NO: 8768 - DNA, 20 bp, Artificial Sequence
  Description of Artificial Sequence: Synthetic oligonucleotide
  Target: SCNA; (-) strand; PAM type: NNGRRT; PAM sequence: CTGAGT
aacatgcacaacagggataa

SEQ ID NO: 8769 - DNA, 20 bp, Artificial Sequence
  Description of Artificial Sequence: Synthetic oligonucleotide
  Target: SCNA; (-) strand; PAM type: NNGRRT; PAM sequence: AGGGAT
gtcaacataacatgcacaac

SEQ ID NO: 8770 - DNA, 20 bp, Artificial Sequence
  Description of Artificial Sequence: Synthetic oligonucleotide
  Target: SCNA; (-) strand; PAM type: NNGRRT; PAM sequence: TTGAGT
atacaagaaaatgatgatct

SEQ ID NO: 8771 - DNA, 20 bp, Artificial Sequence
  Description of Artificial Sequence: Synthetic oligonucleotide
  Target: SCNA; (-) strand; PAM type: NNGRRT; PAM sequence: ATGGGT
taatgatcagtgttattttt

SEQ ID NO: 8772 - DNA, 20 bp, Artificial Sequence
  Description of Artificial Sequence: Synthetic oligonucleotide
  Target: SCNA; (-) strand; PAM type: NNGRRT; PAM sequence: AAGAAT
aagtaatctcattcctttat

SEQ ID NO: 8773 - DNA, 20 bp, Artificial Sequence
  Description of Artificial Sequence: Synthetic oligonucleotide
  Target: SCNA; (-) strand; PAM type: NNGRRT; PAM sequence: CGGAAT
ttatcaaataaactctccaa

SEQ ID NO: 8774 - DNA, 20 bp, Artificial Sequence
  Description of Artificial Sequence: Synthetic oligonucleotide
  Target: SCNA; (-) strand; PAM type: NNGRRT; PAM sequence: ATGAAT
gtcataataagacaggacat

SEQ ID NO: 8775 - DNA, 20 bp, Artificial Sequence
  Description of Artificial Sequence: Synthetic oligonucleotide
  Target: SCNA; (-) strand; PAM type: NNGRRT; PAM sequence: GGGAAT
aactaccttgcagtttttgt

SEQ ID NO: 8776 - DNA, 20 bp, Artificial Sequence
  Description of Artificial Sequence: Synthetic oligonucleotide
  Target: SCNA; (-) strand; PAM type: NNGRRT; PAM sequence: TAGGGT
actacatcacttatcacctt

SEQ ID NO: 8777 - DNA, 20 bp, Artificial Sequence
  Description of Artificial Sequence: Synthetic oligonucleotide
  Target: SCNA; (-) strand; PAM type: NNGRRT; PAM sequence: TAGAGT
tgtagcttgctgactactga

SEQ ID NO: 8778 - DNA, 20 bp, Artificial Sequence
  Description of Artificial Sequence: Synthetic oligonucleotide
  Target: SCNA; (-) strand; PAM type: NNGRRT; PAM sequence: TGGAAT
tatcaaaacaggtggtgggc

SEQ ID NO: 8779 - DNA, 20 bp, Artificial Sequence
  Description of Artificial Sequence: Synthetic oligonucleotide
  Target: SCNA; (-) strand; PAM type: NNGRRT; PAM sequence: CAGAGT
ctgcactccagcctgggtgg

SEQ ID NO: 8780 - DNA, 20 bp, Artificial Sequence
  Description of Artificial Sequence: Synthetic oligonucleotide
  Target: SCNA; (-) strand; PAM type: NNGRRT; PAM sequence: CTGGGT
tcgagccactgcactccagc

SEQ ID NO: 8781 - DNA, 20 bp, Artificial Sequence
  Description of Artificial Sequence: Synthetic oligonucleotide
  Target: SCNA; (-) strand; PAM type: NNGRRT; PAM sequence: GAGGAT
tacccaggaggctgaggtag

SEQ ID NO: 8782 - DNA, 20 bp, Artificial Sequence
  Description of Artificial Sequence: Synthetic oligonucleotide
  Target: SCNA; (-) strand; PAM type: NNGRRT; PAM sequence: CCGGGT
acaaacaacgcaaaaattag

SEQ ID NO: 8783 - DNA, 20 bp, Artificial Sequence
  Description of Artificial Sequence: Synthetic oligonucleotide
  Target: SCNA; (-) strand; PAM type: NNGRRT; PAM sequence: AGGGGT
ctggtggatcacttgagccc

SEQ ID NO: 8784 - DNA, 20 bp, Artificial Sequence
  Description of Artificial Sequence: Synthetic oligonucleotide
  Target: SCNA; (-) strand; PAM type: NNGRRT; PAM sequence: GTGGAT
actttgagagcccgaggctg

SEQ ID NO: 8785 - DNA, 20 bp, Artificial Sequence
  Description of Artificial Sequence: Synthetic oligonucleotide
  Target: SCNA; (-) strand; PAM type: NNGRRT; PAM sequence: AGGAAT
gattggcaaaattttgggta

SEQ ID NO: 8786 - DNA, 20 bp, Artificial Sequence
  Description of Artificial Sequence: Synthetic oligonucleotide
  Target: SCNA; (-) strand; PAM type: NNGRRT; PAM sequence: TTGGGT
gtccagggattggcaaaatt

SEQ ID NO: 8787 - DNA, 20 bp, Artificial Sequence
  Description of Artificial Sequence: Synthetic oligonucleotide
  Target: SCNA; (-) strand; PAM type: NNGRRT; PAM sequence: AGGGAT
aagacacaatagtatagtcc

SEQ ID NO: 8788 - DNA, 20 bp, Artificial Sequence
  Description of Artificial Sequence: Synthetic oligonucleotide
  Target: SCNA; (-) strand; PAM type: NNGRRT; PAM sequence: CAGAAT
ttgagagttgaacttacaca

SEQ ID NO: 8789 - DNA, 20 bp, Artificial Sequence
  Description of Artificial Sequence: Synthetic oligonucleotide
  Target: SCNA; (-) strand; PAM type: NNGRRT; PAM sequence: GAGAGT
ttacattctgagttctaatt

SEQ ID NO: 8790 - DNA, 20 bp, Artificial Sequence
  Description of Artificial Sequence: Synthetic oligonucleotide
  Target: SCNA; (-) strand; PAM type: NNGRRT; PAM sequence: CTGAGT
aattttttattggttacatt

SEQ ID NO: 8791 - DNA, 20 bp, Artificial Sequence
  Description of Artificial Sequence: Synthetic oligonucleotide
  Target: SCNA; (-) strand; PAM type: NNGRRT; PAM sequence: CTGAAT
tttagatggaatttggaata

SEQ ID NO: 8792 - DNA, 20 bp, Artificial Sequence
  Description of Artificial Sequence: Synthetic oligonucleotide
  Target: SCNA; (-) strand; PAM type: NNGRRT; PAM sequence: TGGAAT
atacctttttagatggaatt

SEQ ID NO: 8793 - DNA, 20 bp, Artificial Sequence
  Description of Artificial Sequence: Synthetic oligonucleotide
  Target: SCNA; (-) strand; PAM type: NNGRRT; PAM sequence: TGGAAT
gtgaattatacctttttaga

SEQ ID NO: 8794 - DNA, 20 bp, Artificial Sequence
  Description of Artificial Sequence: Synthetic oligonucleotide
  Target: SCNA; (-) strand; PAM type: NNGRRT; PAM sequence: GTGAAT
ttttaaatattttatgaagt

SEQ ID NO: 8795 - DNA, 20 bp, Artificial Sequence
  Description of Artificial Sequence: Synthetic oligonucleotide
  Target: SCNA; (-) strand; PAM type: NNGRRT; PAM sequence: ATGAGT
gttacaagaggaaaaaattg

SEQ ID NO: 8796 - DNA, 20 bp, Artificial Sequence
  Description of Artificial Sequence: Synthetic oligonucleotide
  Target: SCNA; (-) strand; PAM type: NNGRRT; PAM sequence: TAGGGT
ttttcagaaagtcattgaaa

SEQ ID NO: 8797 - DNA, 20 bp, Artificial Sequence
  Description of Artificial Sequence: Synthetic oligonucleotide
  Target: SCNA; (-) strand; PAM type: NNGRRT; PAM sequence: CAGGAT
acctcagcctcctgagtagc

SEQ ID NO: 8798 - DNA, 20 bp, Artificial Sequence
  Description of Artificial Sequence: Synthetic oligonucleotide
  Target: SCNA; (-) strand; PAM type: NNGRRT; PAM sequence: CTGAGT
catgcccccacctcagcctc

SEQ ID NO: 8799 - DNA, 20 bp, Artificial Sequence
  Description of Artificial Sequence: Synthetic oligonucleotide
  Target: SCNA; (-) strand; PAM type: NNGRRT; PAM sequence: TTGAAT
tatcatagctcactgcatcc

SEQ ID NO: 8800 - DNA, 20 bp, Artificial Sequence
  Description of Artificial Sequence: Synthetic oligonucleotide
  Target: SCNA; (-) strand; PAM type: NNGRRT; PAM sequence: TAGAGT
agttttttattttcagtttt

SEQ ID NO: 8801 - DNA, 20 bp, Artificial Sequence
  Description of Artificial Sequence: Synthetic oligonucleotide
  Target: SCNA; (-) strand; PAM type: NNGRRT; PAM sequence: ATGAAT
ttatacttgggatgatttat

SEQ ID NO: 8802 - DNA, 20 bp, Artificial Sequence
  Description of Artificial Sequence: Synthetic oligonucleotide
  Target: SCNA; (-) strand; PAM type: NNGRRT; PAM sequence: TGGGAT
agtgggggaaattttatact

SEQ ID NO: 8803 - DNA, 20 bp, Artificial Sequence
  Description of Artificial Sequence: Synthetic oligonucleotide
  Target: SCNA; (-) strand; PAM type: NNGRRT; PAM sequence: TTGAGT
tcaggtggaggatgaccaca

SEQ ID NO: 8804 - DNA, 20 bp, Artificial Sequence
  Description of Artificial Sequence: Synthetic oligonucleotide
  Target: SCNA; (-) strand; PAM type: NNGRRT; PAM sequence: GAGGAT
acaggatgaacagtcaggtg

SEQ ID NO: 8805 - DNA, 20 bp, Artificial Sequence
  Description of Artificial Sequence: Synthetic oligonucleotide
  Target: SCNA; (-) strand; PAM type: NNGRRT; PAM sequence: CAGGAT
aactatagcagtaagagtca

SEQ ID NO: 8806 - DNA, 20 bp, Artificial Sequence
  Description of Artificial Sequence: Synthetic oligonucleotide
  Target: SCNA; (-) strand; PAM type: NNGRRT; PAM sequence: AAGAGT
ctggtggcaactatagcagt

SEQ ID NO: 8807 - DNA, 20 bp, Artificial Sequence
  Description of Artificial Sequence: Synthetic oligonucleotide
  Target: SCNA; (-) strand; PAM type: NNGRRT; PAM sequence: AAGAAT
ccactttgaattccttggaa

SEQ ID NO: 8808 - DNA, 20 bp, Artificial Sequence
  Description of Artificial Sequence: Synthetic oligonucleotide
  Target: SCNA; (-) strand; PAM type: NNGRRT; PAM sequence: TTGAAT
gtgttattttacaaaccact

SEQ ID NO: 8809 - DNA, 20 bp, Artificial Sequence
  Description of Artificial Sequence: Synthetic oligonucleotide
  Target: SCNA; (-) strand; PAM type: NNGRRT; PAM sequence: TTGAGT
gtaacttgaactgtattcaa

SEQ ID NO: 8810 - DNA, 20 bp, Artificial Sequence
  Description of Artificial Sequence: Synthetic oligonucleotide
  Target: SCNA; (-) strand; PAM type: NNGRRT; PAM sequence: TGGGGT
ttgttcctaaagttccacct

SEQ ID NO: 8811 - DNA, 20 bp, Artificial Sequence
  Description of Artificial Sequence: Synthetic oligonucleotide
  Target: SCNA; (-) strand; PAM type: NNGRRT; PAM sequence: AAGAAT
tcaaatgacacacatactaa

SEQ ID NO: 8812 - DNA, 20 bp, Artificial Sequence
  Description of Artificial Sequence: Synthetic oligonucleotide
  Target: SCNA; (-) strand; PAM type: NNGRRT; PAM sequence: TAGAGT
aagaacagattagtctttga

SEQ ID NO: 8813 - DNA, 20 bp, Artificial Sequence
  Description of Artificial Sequence: Synthetic oligonucleotide
  Target: SCNA; (-) strand; PAM type: NNGRRT; PAM sequence: ATGGAT
cttaagaatcaaaatcattg

SEQ ID NO: 8814 - DNA, 20 bp, Artificial Sequence
  Description of Artificial Sequence: Synthetic oligonucleotide
  Target: SCNA; (-) strand; PAM type: NNGRRT; PAM sequence: AAGAAT
aaataatcaagaatattctt

SEQ ID NO: 8815 - DNA, 20 bp, Artificial Sequence
  Description of Artificial Sequence: Synthetic oligonucleotide
  Target: SCNA; (-) strand; PAM type: NNGRRT; PAM sequence: AAGAAT
tagtcttttaaaaaataatc

SEQ ID NO: 8816 - DNA, 20 bp, Artificial Sequence
  Description of Artificial Sequence: Synthetic oligonucleotide
  Target: SCNA; (-) strand; PAM type: NNGRRT; PAM sequence: ATGAAT
atatttatgactttttaaaa

SEQ ID NO: 8817 - DNA, 20 bp, Artificial Sequence
  Description of Artificial Sequence: Synthetic oligonucleotide
  Target: SCNA; (-) strand; PAM type: NNGRRT; PAM sequence: GTGAAT
tcagaggtatgtgtaggtag

SEQ ID NO: 8818 - DNA, 20 bp, Artificial Sequence
  Description of Artificial Sequence: Synthetic oligonucleotide
  Target: SCNA; (-) strand; PAM type: NNGRRT; PAM sequence: CTGAGT
ttgcttgtcaaaaaggtgga

SEQ ID NO: 8819 - DNA, 20 bp, Artificial Sequence
  Description of Artificial Sequence: Synthetic oligonucleotide
  Target: SCNA; (-) strand; PAM type: NNGRRT; PAM sequence: TAGGAT
cttgttcatgagtgatgggt

SEQ ID NO: 8820 - DNA, 20 bp, Artificial Sequence
  Description of Artificial Sequence: Synthetic oligonucleotide
  Target: SCNA; (-) strand; PAM type: NNGRRT; PAM sequence: ATGGGT
ttggtgcttgttcatgagtg

SEQ ID NO: 8821 - DNA, 20 bp, Artificial Sequence
  Description of Artificial Sequence: Synthetic oligonucleotide
  Target: SCNA; (-) strand; PAM type: NNGRRT; PAM sequence: ATGAGT
tgtcagtttggtgcttgttc

SEQ ID NO: 8822 - DNA, 20 bp, Artificial Sequence
  Description of Artificial Sequence: Synthetic oligonucleotide
  Target: SCNA; (-) strand; PAM type: NNGRRT; PAM sequence: GAGGGT
aagcagcaggaaagacaaaa

SEQ ID NO: 8823 - DNA, 20 bp, Artificial Sequence
  Description of Artificial Sequence: Synthetic oligonucleotide
  Target: SCNA; (-) strand; PAM type: NNGRRT; PAM sequence: CAGGGT
ctgctgctgagaaaaccaaa

SEQ ID NO: 8824 - DNA, 20 bp, Artificial Sequence
  Description of Artificial Sequence: Synthetic oligonucleotide
  Target: SCNA; (-) strand; PAM type: NNGRRT; PAM sequence: GGGAGT
ggactttcaaaggccaagga

SEQ ID NO: 8825 - DNA, 20 bp, Artificial Sequence
  Description of Artificial Sequence: Synthetic oligonucleotide
  Target: SCNA; (-) strand; PAM type: NNGRRT; PAM sequence: ATGGAT
tgtaaaggaattcattagcc

SEQ ID NO: 8826 - DNA, 20 bp, Artificial Sequence
  Description of Artificial Sequence: Synthetic oligonucleotide
  Target: SCNA; (-) strand; PAM type: NNGRRT; PAM sequence: AGGAAT
tgttttccagtgtggtgtaa

SEQ ID NO: 8827 - DNA, 20 bp, Artificial Sequence
  Description of Artificial Sequence: Synthetic oligonucleotide
  Target: SCNA; (-) strand; PAM type: NNGRRT; PAM sequence: GAGGGT
taaaagagtctcacactttg

SEQ ID NO: 8828 - DNA, 20 bp, Artificial Sequence
  Description of Artificial Sequence: Synthetic oligonucleotide
  Target: SCNA; (-) strand; PAM type: NNGRRT; PAM sequence: AAGAGT
ttaaatgagtgtacacttaa

SEQ ID NO: 8829 - DNA, 20 bp, Artificial Sequence
  Description of Artificial Sequence: Synthetic oligonucleotide
  Target: SCNA; (-) strand; PAM type: NNGRRT; PAM sequence: ATGAGT
ctgctttgtccaatggttaa

SEQ ID NO: 8830 - DNA, 20 bp, Artificial Sequence
  Description of Artificial Sequence: Synthetic oligonucleotide
  Target: SCNA; (-) strand; PAM type: NNGRRT; PAM sequence: ATGGAT
ctagacttttactagccaag

SEQ ID NO: 8831 - DNA, 20 bp, Artificial Sequence
  Description of Artificial Sequence: Synthetic oligonucleotide
  Target: SCNA; (-) strand; PAM type: NNGRRT; PAM sequence: GAGGAT
aatgcagtaataacaactca

SEQ ID NO: 8832 - DNA, 20 bp, Artificial Sequence
  Description of Artificial Sequence: Synthetic oligonucleotide
  Target: SCNA; (-) strand; PAM type: NNGRRT; PAM sequence: AGGGGT
agaccccgggaatttaaaaa

SEQ ID NO: 8833 - DNA, 20 bp, Artificial Sequence
  Description of Artificial Sequence: Synthetic oligonucleotide
  Target: SCNA; (-) strand; PAM type: NNGRRT; PAM sequence: GGGAAT
actgttaccctttagacccc

SEQ ID NO: 8834 - DNA, 20 bp, Artificial Sequence
  Description of Artificial Sequence: Synthetic oligonucleotide
  Target: SCNA; (-) strand; PAM type: NNGRRT; PAM sequence: AAGGAT
cttcttctgggattcatgtt

SEQ ID NO: 8835 - DNA, 20 bp, Artificial Sequence
  Description of Artificial Sequence: Synthetic oligonucleotide
  Target: SCNA; (-) strand; PAM type: NNGRRT; PAM sequence: TGGGAT
tcaacctgttagccttcttc

SEQ ID NO: 8836 - DNA, 20 bp, Artificial Sequence
  Description of Artificial Sequence: Synthetic oligonucleotide
  Target: SCNA; (-) strand; PAM type: NNGRRT; PAM sequence: CCGAGT
gcctgagtttgaaccacacc

SEQ ID NO: 8837 - DNA, 20 bp, Artificial Sequence
  Description of Artificial Sequence: Synthetic oligonucleotide
  Target: SCNA; (-) strand; PAM type: NNGRRT; PAM sequence: CTGAGT
cacttgggcctgctgtttgc

SEQ ID NO: 8838 - DNA, 20 bp, Artificial Sequence
  Description of Artificial Sequence: Synthetic oligonucleotide
  Target: SCNA; (-) strand; PAM type: NNGRRT; PAM sequence: ATGGAT
agggcgggggtggatgttgg

SEQ ID NO: 8839 - DNA, 20 bp, Artificial Sequence
  Description of Artificial Sequence: Synthetic oligonucleotide
  Target: SCNA; (-) strand; PAM type: NNGRRT; PAM sequence: TTGGAT
gctgagggcgggggtggatg

SEQ ID NO: 8840 - DNA, 20 bp, Artificial Sequence
  Description of Artificial Sequence: Synthetic oligonucleotide
  Target: SCNA; (-) strand; PAM type: NNGRRT; PAM sequence: GTGGAT
gtagatagctgagggcgggg

SEQ ID NO: 8841 - DNA, 20 bp, Artificial Sequence
  Description of Artificial Sequence: Synthetic oligonucleotide
  Target: SCNA; (-) strand; PAM type: NNGRRT; PAM sequence: GGGGGT
cagggtagatagctgagggc

SEQ ID NO: 8842 - DNA, 20 bp, Artificial Sequence
  Description of Artificial Sequence: Synthetic oligonucleotide
  Target: SCNA; (-) strand; PAM type: NNGRRT; PAM sequence: CAGGGT
gagtgtgagcggcgcctgct

SEQ ID NO: 8843 - DNA, 20 bp, Artificial Sequence
  Description of Artificial Sequence: Synthetic oligonucleotide
  Target: SCNA; (-) strand; PAM type: NNGRRT; PAM sequence: GCGAGT
cgcggggttggagacggccc

SEQ ID NO: 8844 - DNA, 20 bp, Artificial Sequence
  Description of Artificial Sequence: Synthetic oligonucleotide
  Target: SCNA; (-) strand; PAM type: NNGRRT; PAM sequence: CGGGGT
gccccctcgggtggctggcg

SEQ ID NO: 8845 - DNA, 20 bp, Artificial Sequence
  Description of Artificial Sequence: Synthetic oligonucleotide
  Target: SCNA; (-) strand; PAM type: NNGRRT; PAM sequence: TCGGGT
tggaggctgagaacgccccc

SEQ ID NO: 8846 - DNA, 20 bp, Artificial Sequence
  Description of Artificial Sequence: Synthetic oligonucleotide
  Target: SCNA; (-) strand; PAM type: NNGRRT; PAM sequence: TAGGGT
agtgctggcgcggggtccgc

SEQ ID NO: 8847 - DNA, 20 bp, Artificial Sequence
  Description of Artificial Sequence: Synthetic oligonucleotide
  Target: SCNA; (-) strand; PAM type: NNGRRT; PAM sequence: CGGGGT
cgggttaacaagtgctggcg

SEQ ID NO: 8848 - DNA, 20 bp, Artificial Sequence
  Description of Artificial Sequence: Synthetic oligonucleotide
  Target: SCNA; (-) strand; PAM type: NNGRRT; PAM sequence: ACGGGT
ggccaagtcaacaggtggta

SEQ ID NO: 8849 - DNA, 20 bp, Artificial Sequence
  Description of Artificial Sequence: Synthetic oligonucleotide
  Target: SCNA; (-) strand; PAM type: NNGRRT; PAM sequence: GAGGAT
cgcttttccccgggaaacgc

SEQ ID NO: 8850 - DNA, 20 bp, Artificial Sequence
  Description of Artificial Sequence: Synthetic oligonucleotide
  Target: SCNA; (-) strand; PAM type: NNGRRT; PAM sequence: CGGGAT
gagagattaggctgcttctc

SEQ ID NO: 8851 - DNA, 20 bp, Artificial Sequence
  Description of Artificial Sequence: Synthetic oligonucleotide
  Target: SCNA; (-) strand; PAM type: NNGRRT; PAM sequence: GTGAGT
ctgggccaggtctctgggag

SEQ ID NO: 8852 - DNA, 20 bp, Artificial Sequence
  Description of Artificial Sequence: Synthetic oligonucleotide
  Target: SCNA; (-) strand; PAM type: NNGRRT; PAM sequence: GGGGGT
aatggtcgtgggcaccggga

SEQ ID NO: 8853 - DNA, 20 bp, Artificial Sequence
  Description of Artificial Sequence: Synthetic oligonucleotide
  Target: SCNA; (-) strand; PAM type: NNGRRT; PAM sequence: ACGAAT
tggagaacgccggatgggag

SEQ ID NO: 8854 - DNA, 20 bp, Artificial Sequence
  Description of Artificial Sequence: Synthetic oligonucleotide
  Target: SCNA; (-) strand; PAM type: NNGRRT; PAM sequence: CCGGAT
tttggaaatcctggagaacg

SEQ ID NO: 8855 - DNA, 20 bp, Artificial Sequence
  Description of Artificial Sequence: Synthetic oligonucleotide
  Target: SCNA; (-) strand; PAM type: NNGRRT; PAM sequence: GTGGAT
agggactcaggtaagtacct

SEQ ID NO: 8856 - DNA, 20 bp, Artificial Sequence
  Description of Artificial Sequence: Synthetic oligonucleotide
  Target: SCNA; (-) strand; PAM type: NNGRRT; PAM sequence: CGGAGT
agagagaggcggggaggagt

SEQ ID NO: 8857 - DNA, 20 bp, Artificial Sequence
  Description of Artificial Sequence: Synthetic oligonucleotide
  Target: SCNA; (-) strand; PAM type: NNGRRT; PAM sequence: AGGAGT
aaaaaaagagagaggcgggg

SEQ ID NO: 8858 - DNA, 20 bp, Artificial Sequence
  Description of Artificial Sequence: Synthetic oligonucleotide
  Target: SCNA; (-) strand; PAM type: NNGRRT; PAM sequence: GGGAAT
tttcctattaaatattattt

SEQ ID NO: 8859 - DNA, 20 bp, Artificial Sequence
  Description of Artificial Sequence: Synthetic oligonucleotide
  Target: SCNA; (-) strand; PAM type: NNGRRT; PAM sequence: CCGGGT
tcctctggggacagtccccc

SEQ ID NO: 8860 - DNA, 20 bp, Artificial Sequence
  Description of Artificial Sequence: Synthetic oligonucleotide
  Target: SCNA; (-) strand; PAM type: NNGRRT; PAM sequence: GCGGGT
ggccattcgacgacaggtta

SEQ ID NO: 8861 - DNA, 20 bp, Artificial Sequence
  Description of Artificial Sequence: Synthetic oligonucleotide
  Target: SCNA; (-) strand; PAM type: NNGRRT; PAM sequence: GGGAGT
accctcgtgagcggagaact

SEQ ID NO: 8862 - DNA, 20 bp, Artificial Sequence
  Description of Artificial Sequence: Synthetic oligonucleotide
  Target: SCNA; (-) strand; PAM type: NNGRRT; PAM sequence: TGGAGT
tgcgcggccaggcaggcggc

SEQ ID NO: 8863 - DNA, 20 bp, Artificial Sequence
  Description of Artificial Sequence: Synthetic oligonucleotide
  Target: SCNA; (-) strand; PAM type: NNGRRT; PAM sequence: AAGAGT
caaccgctcccgatctccac

SEQ ID NO: 8864 - DNA, 20 bp, Artificial Sequence
  Description of Artificial Sequence: Synthetic oligonucleotide
  Target: SCNA; (-) strand; PAM type: NNGRRT; PAM sequence: GGGGGT
ggcgactctgacgaggggta

SEQ ID NO: 8865 - DNA, 20 bp, Artificial Sequence
  Description of Artificial Sequence: Synthetic oligonucleotide
  Target: SCNA; (-) strand; PAM type: NNGRRT; PAM sequence: AGGGGT
ctcccagggcgactctgacg

SEQ ID NO: 8866 - DNA, 20 bp, Artificial Sequence
  Description of Artificial Sequence: Synthetic oligonucleotide
  Target: SCNA; (-) strand; PAM type: NNGRRT; PAM sequence: AGGGAT
tctcctccagcagctcccca

SEQ ID NO: 8867 - DNA, 20 bp, Artificial Sequence
  Description of Artificial Sequence: Synthetic oligonucleotide
  Target: SCNA; (-) strand; PAM type: NNGRRT; PAM sequence: GAGGAT
tggtgatagtggcgtggaaa

SEQ ID NO: 8868 - DNA, 20 bp, Artificial Sequence
  Description of Artificial Sequence: Synthetic oligonucleotide
  Target: SCNA; (-) strand; PAM type: NNGRRT; PAM sequence: GGGAAT
ccgcttgttttagacggctg

SEQ ID NO: 8869 - DNA, 20 bp, Artificial Sequence
  Description of Artificial Sequence: Synthetic oligonucleotide
  Target: SCNA; (-) strand; PAM type: NNGRRT; PAM sequence: CTGGAT
gtccggtaggctaaatcacg

SEQ ID NO: 8870 - DNA, 20 bp, Artificial Sequence
  Description of Artificial Sequence: Synthetic oligonucleotide
  Target: SCNA; (-) strand; PAM type: NNGRRT; PAM sequence: TTGGAT
agaaggggctgaagaagaaa

SEQ ID NO: 8871 - DNA, 20 bp, Artificial Sequence
  Description of Artificial Sequence: Synthetic oligonucleotide
  Target: SCNA; (-) strand; PAM type: NNGRRT; PAM sequence: GTGAGT
gagaatcagaagtcagaaag

SEQ ID NO: 8872 - DNA, 20 bp, Artificial Sequence
  Description of Artificial Sequence: Synthetic oligonucleotide
  Target: SCNA; (-) strand; PAM type: NNGRRT; PAM sequence: GAGAAT
gtgtcaattctgagggcaac

SEQ ID NO: 8873 - DNA, 20 bp, Artificial Sequence
  Description of Artificial Sequence: Synthetic oligonucleotide
  Target: SCNA; (-) strand; PAM type: NNGRRT; PAM sequence: GGGGGT
gtgggtggggggagagaaaa

SEQ ID NO: 8874 - DNA, 20 bp, Artificial Sequence
  Description of Artificial Sequence: Synthetic oligonucleotide
  Target: SCNA; (-) strand; PAM type: NNGRRT; PAM sequence: GTGGGT
tctgtgtgcatgtgcgtgtg

SEQ ID NO: 8875 - DNA, 20 bp, Artificial Sequence
  Description of Artificial Sequence: Synthetic oligonucleotide
  Target: SCNA; (-) strand; PAM type: NNGRRT; PAM sequence: CCGAAT
tccagtgcttaactaatctt

SEQ ID NO: 8876 - DNA, 20 bp, Artificial Sequence
  Description of Artificial Sequence: Synthetic oligonucleotide
  Target: SCNA; (-) strand; PAM type: NNGRRT; PAM sequence: ACGAGT
aaaaaaaacatacagcaaaa

SEQ ID NO: 8877 - DNA, 20 bp, Artificial Sequence
  Description of Artificial Sequence: Synthetic oligonucleotide
  Target: SCNA; (-) strand; PAM type: NNGRRT; PAM sequence: AAGAAT
ttcagaacccaaattagcgc

SEQ ID NO: 8878 - DNA, 20 bp, Artificial Sequence
  Description of Artificial Sequence: Synthetic oligonucleotide
  Target: SCNA; (-) strand; PAM type: NNGRRT; PAM sequence: AAGAGT
ggcagaccaatagttcaagg

SEQ ID NO: 8879 - DNA, 20 bp, Artificial Sequence
  Description of Artificial Sequence: Synthetic oligonucleotide
  Target: SCNA; (-) strand; PAM type: NNGRRT; PAM sequence: ATGAGT
gttgaaaatagagtgatcac

SEQ ID NO: 8880 - DNA, 20 bp, Artificial Sequence
  Description of Artificial Sequence: Synthetic oligonucleotide
  Target: SCNA; (-) strand; PAM type: NNGRRT; PAM sequence: TAGAGT
ccataacaaaaagttgaaaa

SEQ ID NO: 8881 - DNA, 20 bp, Artificial Sequence
  Description of Artificial Sequence: Synthetic oligonucleotide
  Target: SCNA; (-) strand; PAM type: NNGRRT; PAM sequence: TTGAAT
ctgtctacttttgcatatgt

SEQ ID NO: 8882 - DNA, 20 bp, Artificial Sequence
  Description of Artificial Sequence: Synthetic oligonucleotide
  Target: SCNA; (-) strand; PAM type: NNGRRT; PAM sequence: GAGAGT
aagttggatgatcttcacat

SEQ ID NO: 8883 - DNA, 20 bp, Artificial Sequence
  Description of Artificial Sequence: Synthetic oligonucleotide
  Target: SCNA; (-) strand; PAM type: NNGRRT; PAM sequence: TTGGAT
gcattgaaaaaatgtaaaag

SEQ ID NO: 8884 - DNA, 20 bp, Artificial Sequence
  Description of Artificial Sequence: Synthetic oligonucleotide
  Target: SCNA; (-) strand; PAM type: NNGRRT; PAM sequence: ATGGAT
gtgataaagtgagtggactt

SEQ ID NO: 8885 - DNA, 20 bp, Artificial Sequence
  Description of Artificial Sequence: Synthetic oligonucleotide
  Target: SCNA; (-) strand; PAM type: NNGRRT; PAM sequence: GTGAGT
ggaggattggtagtgataaa

SEQ ID NO: 8886 - DNA, 20 bp, Artificial Sequence
  Description of Artificial Sequence: Synthetic oligonucleotide
  Target: SCNA; (-) strand; PAM type: NNGRRT; PAM sequence: GAGGAT
aaaaaaaaaaaaaaaagagg

SEQ ID NO: 8887 - DNA, 20 bp, Artificial Sequence
  Description of Artificial Sequence: Synthetic oligonucleotide
  Target: SCNA; (-) strand; PAM type: NNGRRT; PAM sequence: TTGAAT
tgaaaagatatatataaagc

SEQ ID NO: 8888 - DNA, 20 bp, Artificial Sequence
  Description of Artificial Sequence: Synthetic oligonucleotide
  Target: SCNA; (-) strand; PAM type: NNGRRT; PAM sequence: CTGAAT
ttaaattttgtggatgcata

SEQ ID NO: 8889 - DNA, 20 bp, Artificial Sequence
  Description of Artificial Sequence: Synthetic oligonucleotide
  Target: SCNA; (-) strand; PAM type: NNGRRT; PAM sequence: GTGGAT
ttaaacagtccttaaatttt

SEQ ID NO: 8890 - DNA, 20 bp, Artificial Sequence
  Description of Artificial Sequence: Synthetic oligonucleotide
  Target: SCNA; (-) strand; PAM type: NNGRRT; PAM sequence: AAGAAT
taaattacactgcaatttta

SEQ ID NO: 8891 - DNA, 20 bp, Artificial Sequence
  Description of Artificial Sequence: Synthetic oligonucleotide
  Target: SCNA; (-) strand; PAM type: NNGRRT; PAM sequence: GTGGGT
tcctgtgtcttcaaaatagt

SEQ ID NO: 8892 - DNA, 20 bp, Artificial Sequence
  Description of Artificial Sequence: Synthetic oligonucleotide
  Target: SCNA; (-) strand; PAM type: NNGRRT; PAM sequence: TGGAAT
gaaggtacaaggtaactgtc

SEQ ID NO: 8893 - DNA, 20 bp, Artificial Sequence
  Description of Artificial Sequence: Synthetic oligonucleotide
  Target: SCNA; (-) strand; PAM type: NNGRRT; PAM sequence: TAGAAT
attagatctttatgacattc

SEQ ID NO: 8894 - DNA, 20 bp, Artificial Sequence
  Description of Artificial Sequence: Synthetic oligonucleotide
  Target: SCNA; (-) strand; PAM type: NNGRRT; PAM sequence: CTGAGT
cgaacctcacaaatattata

SEQ ID NO: 8895 - DNA, 20 bp, Artificial Sequence
  Description of Artificial Sequence: Synthetic oligonucleotide
  Target: SCNA; (-) strand; PAM type: NNGRRT; PAM sequence: TGGAAT
caaattaccaaataaaagtt

SEQ ID NO: 8896 - DNA, 20 bp, Artificial Sequence
  Description of Artificial Sequence: Synthetic oligonucleotide
  Target: SCNA; (-) strand; PAM type: NNGRRT; PAM sequence: CTGGGT
gaaggctatttctaacacag

SEQ ID NO: 8897 - DNA, 20 bp, Artificial Sequence
  Description of Artificial Sequence: Synthetic oligonucleotide
  Target: SCNA; (-) strand; PAM type: NNGRRT; PAM sequence: ATGAAT
gaaaaggcaaaactttaaat

SEQ ID NO: 8898 - DNA, 20 bp, Artificial Sequence
  Description of Artificial Sequence: Synthetic oligonucleotide
  Target: SCNA; (-) strand; PAM type: NNGRRT; PAM sequence: AGGAAT
gaaatcatctccccctattg

SEQ ID NO: 8899 - DNA, 20 bp, Artificial Sequence
  Description of Artificial Sequence: Synthetic oligonucleotide
  Target: SCNA; (-) strand; PAM type: NNGRRT; PAM sequence: AAGAGT
aaggcattttaaggagtgac

SEQ ID NO: 8900 - DNA, 20 bp, Artificial Sequence
  Description of Artificial Sequence: Synthetic oligonucleotide
  Target: SCNA; (-) strand; PAM type: NNGRRT; PAM sequence: AGGAGT
actgtgttcaaggcatttta

SEQ ID NO: 8901 - DNA, 20 bp, Artificial Sequence
  Description of Artificial Sequence: Synthetic oligonucleotide
  Target: SCNA; (-) strand; PAM type: NNGRRT; PAM sequence: TTGGAT
tatgtgtaattaaaagttca

SEQ ID NO: 8902 - DNA, 20 bp, Artificial Sequence
  Description of Artificial Sequence: Synthetic oligonucleotide
  Target: SCNA; (-) strand; PAM type: NNGRRT; PAM sequence: AAGAAT
ttgagcagctttccctcctt

SEQ ID NO: 8903 - DNA, 20 bp, Artificial Sequence
  Description of Artificial Sequence: Synthetic oligonucleotide
  Target: SCNA; (-) strand; PAM type: NNGRRT; PAM sequence: CAGAAT
atgaatattgtagttatgaa

SEQ ID NO: 8904 - DNA, 20 bp, Artificial Sequence
  Description of Artificial Sequence: Synthetic oligonucleotide
  Target: SCNA; (-) strand; PAM type: NNGRRT; PAM sequence: ATGAAT
tagcaaagagaaaacaaaac

SEQ ID NO: 8905 - DNA, 20 bp, Artificial Sequence
  Description of Artificial Sequence: Synthetic oligonucleotide
  Target: SCNA; (-) strand; PAM type: NNGRRT; PAM sequence: AAGAAT
aatgaattaaatccagataa

SEQ ID NO: 8906 - DNA, 20 bp, Artificial Sequence
  Description of Artificial Sequence: Synthetic oligonucleotide
  Target: SCNA; (-) strand; PAM type: NNGRRT; PAM sequence: ATGAAT
gttaatctatagcaaaatta

SEQ ID NO: 8907 - DNA, 20 bp, Artificial Sequence
  Description of Artificial Sequence: Synthetic oligonucleotide
  Target: SCNA; (-) strand; PAM type: NNGRRT; PAM sequence: TAGAAT
taggttaagcatatatttca

SEQ ID NO: 8908 - DNA, 20 bp, Artificial Sequence
  Description of Artificial Sequence: Synthetic oligonucleotide
  Target: SCNA; (-) strand; PAM type: NNGRRT; PAM sequence: GGGGGT
taaaaattcagttgttctat

SEQ ID NO: 8909 - DNA, 20 bp, Artificial Sequence
  Description of Artificial Sequence: Synthetic oligonucleotide
  Target: SCNA; (-) strand; PAM type: NNGRRT; PAM sequence: CGGAAT
ccttgtgttcacaacaaata

SEQ ID NO: 8910 - DNA, 20 bp, Artificial Sequence
  Description of Artificial Sequence: Synthetic oligonucleotide
  Target: SCNA; (-) strand; PAM type: NNGRRT; PAM sequence: GAGAAT
gtgagaggaaggtgcagata

SEQ ID NO: 8911 - DNA, 20 bp, Artificial Sequence
  Description of Artificial Sequence: Synthetic oligonucleotide
  Target: SCNA; (-) strand; PAM type: NNGRRT; PAM sequence: CAGAGT
gattgctcttcccatttctt

SEQ ID NO: 8912 - DNA, 20 bp, Artificial Sequence
  Description of Artificial Sequence: Synthetic oligonucleotide
  Target: SCNA; (-) strand; PAM type: NNGRRT; PAM sequence: CTGAAT
atggggtcaaattagagaat

SEQ ID NO: 8913 - DNA, 20 bp, Artificial Sequence
  Description of Artificial Sequence: Synthetic oligonucleotide
  Target: SCNA; (-) strand; PAM type: NNGRRT; PAM sequence: GAGAAT
ttggccatggggtcaaatta

SEQ ID NO: 8914 - DNA, 20 bp, Artificial Sequence
  Description of Artificial Sequence: Synthetic oligonucleotide
  Target: SCNA; (-) strand; PAM type: NNGRRT; PAM sequence: TGGGGT
aaacaatatgaagttggcca

SEQ ID NO: 8915 - DNA, 20 bp, Artificial Sequence
  Description of Artificial Sequence: Synthetic oligonucleotide
  Target: SCNA; (-) strand; PAM type: NNGRRT; PAM sequence: AGGAAT
tcttaggaccacgaaaccac

SEQ ID NO: 8916 - DNA, 20 bp, Artificial Sequence
  Description of Artificial Sequence: Synthetic oligonucleotide
  Target: SCNA; (-) strand; PAM type: NNGRRT; PAM sequence: TGGAAT
ggctttaacatctttaatct

SEQ ID NO: 8917 - DNA, 20 bp, Artificial Sequence
  Description of Artificial Sequence: Synthetic oligonucleotide
  Target: SCNA; (-) strand; PAM type: NNGRRT; PAM sequence: CAGAGT
tatcatgctcaccagagttg

SEQ ID NO: 8918 - DNA, 20 bp, Artificial Sequence
  Description of Artificial Sequence: Synthetic oligonucleotide
  Target: SCNA; (-) strand; PAM type: NNGRRT; PAM sequence: CAGAGT
tagaagtctatcatgctcac

SEQ ID NO: 8919 - DNA, 20 bp, Artificial Sequence
  Description of Artificial Sequence: Synthetic oligonucleotide
  Target: SCNA; (-) strand; PAM type: NNGRRT; PAM sequence: CTGAAT
agtagagctttaataagtcc

SEQ ID NO: 8920 - DNA, 20 bp, Artificial Sequence
  Description of Artificial Sequence: Synthetic oligonucleotide
  Target: SCNA; (-) strand; PAM type: NNGRRT; PAM sequence: ATGAGT
cttgctctgagtcactagta

SEQ ID NO: 8921 - DNA, 20 bp, Artificial Sequence
  Description of Artificial Sequence: Synthetic oligonucleotide
  Target: SCNA; (-) strand; PAM type: NNGRRT; PAM sequence: CTGAGT
agaggttatagatacttgct

SEQ ID NO: 8922 - DNA, 20 bp, Artificial Sequence
  Description of Artificial Sequence: Synthetic oligonucleotide
  Target: SCNA; (-) strand; PAM type: NNGRRT; PAM sequence: GAGGAT
tggtgggatgggagactgtg

SEQ ID NO: 8923 - DNA, 20 bp, Artificial Sequence
  Description of Artificial Sequence: Synthetic oligonucleotide
  Target: SCNA; (-) strand; PAM type: NNGRRT; PAM sequence: TGGGAT
tatctcacgtgtgttgctgg

SEQ ID NO: 8924 - DNA, 20 bp, Artificial Sequence
  Description of Artificial Sequence: Synthetic oligonucleotide
  Target: SCNA; (-) strand; PAM type: NNGRRT; PAM sequence: GAGAGT
tttgcttacccatactaagt

SEQ ID NO: 8925 - DNA, 20 bp, Artificial Sequence
  Description of Artificial Sequence: Synthetic oligonucleotide
  Target: SCNA; (-) strand; PAM type: NNGRRT; PAM sequence: TTGAGT
agctgtggctgcaaactgct

SEQ ID NO: 8926 - DNA, 20 bp, Artificial Sequence
  Description of Artificial Sequence: Synthetic oligonucleotide
  Target: SCNA; (-) strand; PAM type: NNGRRT; PAM sequence: GTGAAT
taaaaatgttaataaagata

SEQ ID NO: 8927 - DNA, 20 bp, Artificial Sequence
  Description of Artificial Sequence: Synthetic oligonucleotide
  Target: SCNA; (-) strand; PAM type: NNGRRT; PAM sequence: AAGGGT
ctttcagagccactggcaca

SEQ ID NO: 8928 - DNA, 20 bp, Artificial Sequence
  Description of Artificial Sequence: Synthetic oligonucleotide
  Target: SCNA; (-) strand; PAM type: NNGRRT; PAM sequence: TTGGAT
attagggactgatttctgaa

SEQ ID NO: 8929 - DNA, 20 bp, Artificial Sequence
  Description of Artificial Sequence: Synthetic oligonucleotide
  Target: SCNA; (-) strand; PAM type: NNGRRT; PAM sequence: CTGAAT
gaaatattagggactgattt

SEQ ID NO: 8930 - DNA, 20 bp, Artificial Sequence
  Description of Artificial Sequence: Synthetic oligonucleotide
  Target: SCNA; (-) strand; PAM type: NNGRRT; PAM sequence: CTGAAT
ttcatttattttcttccttt

SEQ ID NO: 8931 - DNA, 20 bp, Artificial Sequence
  Description of Artificial Sequence: Synthetic oligonucleotide
  Target: SCNA; (-) strand; PAM type: NNGRRT; PAM sequence: TTGGAT
gtattagattcctggatatt

SEQ ID NO: 8932 - DNA, 20 bp, Artificial Sequence
  Description of Artificial Sequence: Synthetic oligonucleotide
  Target: SCNA; (-) strand; PAM type: NNGRRT; PAM sequence: CTGGAT
aaggaaaacgtattagattc

SEQ ID NO: 8933 - DNA, 20 bp, Artificial Sequence
  Description of Artificial Sequence: Synthetic oligonucleotide
  Target: SCNA; (-) strand; PAM type: NNGRRT; PAM sequence: CGGGGT
ttttgtatttttagtagaga

SEQ ID NO: 8934 - DNA, 20 bp, Artificial Sequence
  Description of Artificial Sequence: Synthetic oligonucleotide
  Target: SCNA; (-) strand; PAM type: NNGRRT; PAM sequence: TGGGAT
gcctcagccccccaagtagc

SEQ ID NO: 8935 - DNA, 20 bp, Artificial Sequence
  Description of Artificial Sequence: Synthetic oligonucleotide
  Target: SCNA; (-) strand; PAM type: NNGRRT; PAM sequence: CTGGGT
ctcagtgcaacaaccacctc

SEQ ID NO: 8936 - DNA, 20 bp, Artificial Sequence
  Description of Artificial Sequence: Synthetic oligonucleotide
  Target: SCNA; (-) strand; PAM type: NNGRRT; PAM sequence: TGGAGT
tttttctttttcccccaaga

SEQ ID NO: 8937 - DNA, 20 bp, Artificial Sequence
  Description of Artificial Sequence: Synthetic oligonucleotide
  Target: SCNA; (-) strand; PAM type: NNGRRT; PAM sequence: TTGAAT
gccattaagagataacttct

SEQ ID NO: 8938 - DNA, 20 bp, Artificial Sequence
  Description of Artificial Sequence: Synthetic oligonucleotide
  Target: SCNA; (-) strand; PAM type: NNGRRT; PAM sequence: ATGGAT
acaaatccatatttattgac

SEQ ID NO: 8939 - DNA, 20 bp, Artificial Sequence
  Description of Artificial Sequence: Synthetic oligonucleotide
  Target: SCNA; (-) strand; PAM type: NNGRRT; PAM sequence: TTGAAT
gaagacaaaaagaagaaaaa

SEQ ID NO: 8940 - DNA, 20 bp, Artificial Sequence
  Description of Artificial Sequence: Synthetic oligonucleotide
  Target: SCNA; (-) strand; PAM type: NNGRRT; PAM sequence: CTGGGT
atatataaagaattattaga

SEQ ID NO: 8941 - DNA, 20 bp, Artificial Sequence
  Description of Artificial Sequence: Synthetic oligonucleotide
  Target: SCNA; (-) strand; PAM type: NNGRRT; PAM sequence: AAGAAT
agtaatatttaacatatata

SEQ ID NO: 8942 - DNA, 20 bp, Artificial Sequence
  Description of Artificial Sequence: Synthetic oligonucleotide
  Target: SCNA; (-) strand; PAM type: NNGRRT; PAM sequence: AAGGAT
agaatcagtaagacttagtg

SEQ ID NO: 8943 - DNA, 20 bp, Artificial Sequence
  Description of Artificial Sequence: Synthetic oligonucleotide
  Target: SCNA; (-) strand; PAM type: NNGRRT; PAM sequence: AAGAAT
aaatagaaatggactcagaa

SEQ ID NO: 8944 - DNA, 20 bp, Artificial Sequence
  Description of Artificial Sequence: Synthetic oligonucleotide
  Target: SCNA; (-) strand; PAM type: NNGRRT; PAM sequence: AAGGAT
atattttaatgacgaaattt

SEQ ID NO: 8945 - DNA, 20 bp, Artificial Sequence
  Description of Artificial Sequence: Synthetic oligonucleotide
  Target: SCNA; (+) strand; PAM type: NNGRRT; PAM sequence: TTGAAT
aaaccaacacagtgtagcat

SEQ ID NO: 8946 - DNA, 20 bp, Artificial Sequence
  Description of Artificial Sequence: Synthetic oligonucleotide
  Target: SCNA; (+) strand; PAM type: NNGRRT; PAM sequence: TTGGAT
agctgttcttaaacataact

SEQ ID NO: 8947 - DNA, 20 bp, Artificial Sequence
  Description of Artificial Sequence: Synthetic oligonucleotide
  Target: SCNA; (+) strand; PAM type: NNGRRT; PAM sequence: TAGAAT
gattgtgttggactccttct

SEQ ID NO: 8948 - DNA, 20 bp, Artificial Sequence
  Description of Artificial Sequence: Synthetic oligonucleotide
  Target: SCNA; (+) strand; PAM type: NNGRRT; PAM sequence: CAGAAT
ttgctgtgataatcagagct

SEQ ID NO: 8949 - DNA, 20 bp, Artificial Sequence
  Description of Artificial Sequence: Synthetic oligonucleotide
  Target: SCNA; (+) strand; PAM type: NNGRRT; PAM sequence: AAGGAT
caagtggcctaacctagcta

SEQ ID NO: 8950 - DNA, 20 bp, Artificial Sequence
  Description of Artificial Sequence: Synthetic oligonucleotide
  Target: SCNA; (+) strand; PAM type: NNGRRT; PAM sequence: AAGGAT
aaaggatggcacaaacagct

SEQ ID NO: 8951 - DNA, 20 bp, Artificial Sequence
  Description of Artificial Sequence: Synthetic oligonucleotide
  Target: SCNA; (+) strand; PAM type: NNGRRT; PAM sequence: ATGGAT
aacagctaaggatgcccaag

SEQ ID NO: 8952 - DNA, 20 bp, Artificial Sequence
  Description of Artificial Sequence: Synthetic oligonucleotide
  Target: SCNA; (+) strand; PAM type: NNGRRT; PAM sequence: AGGAGT
gacactccatcttcaacagc

SEQ ID NO: 8953 - DNA, 20 bp, Artificial Sequence
  Description of Artificial Sequence: Synthetic oligonucleotide
  Target: SCNA; (+) strand; PAM type: NNGRRT; PAM sequence: TTGGAT
ttgaccatttccatagagat

SEQ ID NO: 8954 - DNA, 20 bp, Artificial Sequence
  Description of Artificial Sequence: Synthetic oligonucleotide
  Target: SCNA; (+) strand; PAM type: NNGRRT; PAM sequence: AAGAGT
gtcttcatttgtttttttac

SEQ ID NO: 8955 - DNA, 20 bp, Artificial Sequence
  Description of Artificial Sequence: Synthetic oligonucleotide
  Target: SCNA; (+) strand; PAM type: NNGRRT; PAM sequence: TTGGAT
caggtaaacattgcttcctt

SEQ ID NO: 8956 - DNA, 20 bp, Artificial Sequence
  Description of Artificial Sequence: Synthetic oligonucleotide
  Target: SCNA; (+) strand; PAM type: NNGRRT; PAM sequence: GTGAGT
taatactctgttttaaatca

SEQ ID NO: 8957 - DNA, 20 bp, Artificial Sequence
  Description of Artificial Sequence: Synthetic oligonucleotide
  Target: SCNA; (+) strand; PAM type: NNGRRT; PAM sequence: ATGAAT
gaacaatactcagtgaactt

SEQ ID NO: 8958 - DNA, 20 bp, Artificial Sequence
  Description of Artificial Sequence: Synthetic oligonucleotide
  Target: SCNA; (+) strand; PAM type: NNGRRT; PAM sequence: TTGGAT
aaatattaaacacatcccac

SEQ ID NO: 8959 - DNA, 20 bp, Artificial Sequence
  Description of Artificial Sequence: Synthetic oligonucleotide
  Target: SCNA; (+) strand; PAM type: NNGRRT; PAM sequence: GTGAGT
ccacttggatgagaagatat

SEQ ID NO: 8960 - DNA, 20 bp, Artificial Sequence
  Description of Artificial Sequence: Synthetic oligonucleotide
  Target: SCNA; (+) strand; PAM type: NNGRRT; PAM sequence: ATGAGT
atgagaagatatgtgagtcg

SEQ ID NO: 8961 - DNA, 20 bp, Artificial Sequence
  Description of Artificial Sequence: Synthetic oligonucleotide
  Target: SCNA; (+) strand; PAM type: NNGRRT; PAM sequence: TGGAGT
ttccataaacatagtgttta

SEQ ID NO: 8962 - DNA, 20 bp, Artificial Sequence
  Description of Artificial Sequence: Synthetic oligonucleotide
  Target: SCNA; (+) strand; PAM type: NNGRRT; PAM sequence: GTGAAT
tttatattaaaagaagacat

SEQ ID NO: 8963 - DNA, 20 bp, Artificial Sequence
  Description of Artificial Sequence: Synthetic oligonucleotide
  Target: SCNA; (+) strand; PAM type: NNGRRT; PAM sequence: GGGAGT
aagtagtaagagacataaat

SEQ ID NO: 8964 - DNA, 20 bp, Artificial Sequence
  Description of Artificial Sequence: Synthetic oligonucleotide
  Target: SCNA; (+) strand; PAM type: NNGRRT; PAM sequence: TGGAGT
ccatagtctattaatagttt

SEQ ID NO: 8965 - DNA, 20 bp, Artificial Sequence
  Description of Artificial Sequence: Synthetic oligonucleotide
  Target: SCNA; (+) strand; PAM type: NNGRRT; PAM sequence: CAGGAT
ctattaatagttttggagtt

SEQ ID NO: 8966 - DNA, 20 bp, Artificial Sequence
  Description of Artificial Sequence: Synthetic oligonucleotide
  Target: SCNA; (+) strand; PAM type: NNGRRT; PAM sequence: AAGAGT
atccttgactattctaggta

SEQ ID NO: 8967 - DNA, 20 bp, Artificial Sequence
  Description of Artificial Sequence: Synthetic oligonucleotide
  Target: SCNA; (+) strand; PAM type: NNGRRT; PAM sequence: TTGGAT
tgacttgctactatatttgt

SEQ ID NO: 8968 - DNA, 20 bp, Artificial Sequence
  Description of Artificial Sequence: Synthetic oligonucleotide
  Target: SCNA; (+) strand; PAM type: NNGRRT; PAM sequence: ATGGGT
tagctttgacatttacagac

SEQ ID NO: 8969 - DNA, 20 bp, Artificial Sequence
  Description of Artificial Sequence: Synthetic oligonucleotide
  Target: SCNA; (+) strand; PAM type: NNGRRT; PAM sequence: GAGGAT
tgtgttgccatagaaacaac

SEQ ID NO: 8970 - DNA, 20 bp, Artificial Sequence
  Description of Artificial Sequence: Synthetic oligonucleotide
  Target: SCNA; (+) strand; PAM type: NNGRRT; PAM sequence: GGGAAT
ttctggtcactgaccttcca

SEQ ID NO: 8971 - DNA, 20 bp, Artificial Sequence
  Description of Artificial Sequence: Synthetic oligonucleotide
  Target: SCNA; (+) strand; PAM type: NNGRRT; PAM sequence: GAGGAT
actgaccttccagggaatct

SEQ ID NO: 8972 - DNA, 20 bp, Artificial Sequence
  Description of Artificial Sequence: Synthetic oligonucleotide
  Target: SCNA; (+) strand; PAM type: NNGRRT; PAM sequence: AGGAAT
tcaaactaagggctctttga

SEQ ID NO: 8973 - DNA, 20 bp, Artificial Sequence
  Description of Artificial Sequence: Synthetic oligonucleotide
  Target: SCNA; (+) strand; PAM type: NNGRRT; PAM sequence: AAGGAT
atataagatttcaaataatt

SEQ ID NO: 8974 - DNA, 20 bp, Artificial Sequence
  Description of Artificial Sequence: Synthetic oligonucleotide
  Target: SCNA; (+) strand; PAM type: NNGRRT; PAM sequence: AGGAAT
ttggaactaaaatcatattt

SEQ ID NO: 8975 - DNA, 20 bp, Artificial Sequence
  Description of Artificial Sequence: Synthetic oligonucleotide
  Target: SCNA; (+) strand; PAM type: NNGRRT; PAM sequence: TTGGGT
tatatctattctattgcatt

SEQ ID NO: 8976 - DNA, 20 bp, Artificial Sequence
  Description of Artificial Sequence: Synthetic oligonucleotide
  Target: SCNA; (+) strand; PAM type: NNGRRT; PAM sequence: AAGGAT
ttcaattctaggcttactca

SEQ ID NO: 8977 - DNA, 20 bp, Artificial Sequence
  Description of Artificial Sequence: Synthetic oligonucleotide
  Target: SCNA; (+) strand; PAM type: NNGRRT; PAM sequence: CAGGAT
aattaacttagttctataat

SEQ ID NO: 8978 - DNA, 20 bp, Artificial Sequence
  Description of Artificial Sequence: Synthetic oligonucleotide
  Target: SCNA; (+) strand; PAM type: NNGRRT; PAM sequence: TAGAAT
tatcaggtgctaatttctct

SEQ ID NO: 8979 - DNA, 20 bp, Artificial Sequence
  Description of Artificial Sequence: Synthetic oligonucleotide
  Target: SCNA; (+) strand; PAM type: NNGRRT; PAM sequence: GTGGAT
actttgggaggccgaggtag

SEQ ID NO: 8980 - DNA, 20 bp, Artificial Sequence
  Description of Artificial Sequence: Synthetic oligonucleotide
  Target: SCNA; (+) strand; PAM type: NNGRRT; PAM sequence: AGGAGT
taggtggattacctgaggtc

SEQ ID NO: 8981 - DNA, 20 bp, Artificial Sequence
  Description of Artificial Sequence: Synthetic oligonucleotide
  Target: SCNA; (+) strand; PAM type: NNGRRT; PAM sequence: GAGAAT
tactcgagaggctgaggcag

SEQ ID NO: 8982 - DNA, 20 bp, Artificial Sequence
  Description of Artificial Sequence: Synthetic oligonucleotide
  Target: SCNA; (+) strand; PAM type: NNGRRT; PAM sequence: GTGGGT
gtgggaaagttatctagcct

SEQ ID NO: 8983 - DNA, 20 bp, Artificial Sequence
  Description of Artificial Sequence: Synthetic oligonucleotide
  Target: SCNA; (+) strand; PAM type: NNGRRT; PAM sequence: TAGAAT
ctttggcttatgtgtaaaat

SEQ ID NO: 8984 - DNA, 20 bp, Artificial Sequence
  Description of Artificial Sequence: Synthetic oligonucleotide
  Target: SCNA; (+) strand; PAM type: NNGRRT; PAM sequence: GAGAAT
gaacctattaaggttgtttt

SEQ ID NO: 8985 - DNA, 20 bp, Artificial Sequence
  Description of Artificial Sequence: Synthetic oligonucleotide
  Target: SCNA; (+) strand; PAM type: NNGRRT; PAM sequence: TGGGAT
ccaagacagaaagaacaaag

SEQ ID NO: 8986 - DNA, 20 bp, Artificial Sequence
  Description of Artificial Sequence: Synthetic oligonucleotide
  Target: SCNA; (+) strand; PAM type: NNGRRT; PAM sequence: CAGAGT
aacacatttcagatgaaaca

SEQ ID NO: 8987 - DNA, 20 bp, Artificial Sequence
  Description of Artificial Sequence: Synthetic oligonucleotide
  Target: SCNA; (+) strand; PAM type: NNGRRT; PAM sequence: ATGGAT
aatgtgttttcttcctcagt

SEQ ID NO: 8988 - DNA, 20 bp, Artificial Sequence
  Description of Artificial Sequence: Synthetic oligonucleotide
  Target: SCNA; (+) strand; PAM type: NNGRRT; PAM sequence: GAGAAT
atttagacagcactgtcttt

SEQ ID NO: 8989 - DNA, 20 bp, Artificial Sequence
  Description of Artificial Sequence: Synthetic oligonucleotide
  Target: SCNA; (+) strand; PAM type: NNGRRT; PAM sequence: GTGAAT
aatagttgtctttgagatgt

SEQ ID NO: 8990 - DNA, 20 bp, Artificial Sequence
  Description of Artificial Sequence: Synthetic oligonucleotide
  Target: SCNA; (+) strand; PAM type: NNGRRT; PAM sequence: ATGAGT
tctttgagatgtgtgaatgc

SEQ ID NO: 8991 - DNA, 20 bp, Artificial Sequence
  Description of Artificial Sequence: Synthetic oligonucleotide
  Target: SCNA; (+) strand; PAM type: NNGRRT; PAM sequence: TGGGGT
tctgacaccacatgtgtgtg

SEQ ID NO: 8992 - DNA, 20 bp, Artificial Sequence
  Description of Artificial Sequence: Synthetic oligonucleotide
  Target: SCNA; (+) strand; PAM type: NNGRRT; PAM sequence: CTGGGT
ccattctttgtggctaccaa

SEQ ID NO: 8993 - DNA, 20 bp, Artificial Sequence
  Description of Artificial Sequence: Synthetic oligonucleotide
  Target: SCNA; (+) strand; PAM type: NNGRRT; PAM sequence: TGGAGT
caaatcggacactatctacc

SEQ ID NO: 8994 - DNA, 20 bp, Artificial Sequence
  Description of Artificial Sequence: Synthetic oligonucleotide
  Target: SCNA; (+) strand; PAM type: NNGRRT; PAM sequence: ATGAGT
gaagatgacaatcacaagca

SEQ ID NO: 8995 - DNA, 20 bp, Artificial Sequence
  Description of Artificial Sequence: Synthetic oligonucleotide
  Target: SCNA; (+) strand; PAM type: NNGRRT; PAM sequence: AAGGAT
agattaccagtttgttataa

SEQ ID NO: 8996 - DNA, 20 bp, Artificial Sequence
  Description of Artificial Sequence: Synthetic oligonucleotide
  Target: SCNA; (+) strand; PAM type: NNGRRT; PAM sequence: CTGAAT
ttcacctatttcaaagcact

SEQ ID NO: 8997 - DNA, 20 bp, Artificial Sequence
  Description of Artificial Sequence: Synthetic oligonucleotide
  Target: SCNA; (+) strand; PAM type: NNGRRT; PAM sequence: AGGGAT
cactctgaatcctgtctttt

SEQ ID NO: 8998 - DNA, 20 bp, Artificial Sequence
  Description of Artificial Sequence: Synthetic oligonucleotide
  Target: SCNA; (+) strand; PAM type: NNGRRT; PAM sequence: TGGAGT
ctgtcttttagggattttta

SEQ ID NO: 8999 - DNA, 20 bp, Artificial Sequence
  Description of Artificial Sequence: Synthetic oligonucleotide
  Target: SCNA; (+) strand; PAM type: NNGRRT; PAM sequence: GTGAAT
ctctcccgtccccagaagat

SEQ ID NO: 9000 - DNA, 20 bp, Artificial Sequence
  Description of Artificial Sequence: Synthetic oligonucleotide
  Target: SCNA; (+) strand; PAM type: NNGRRT; PAM sequence: AAGAGT
cccccatccaggaacccagc

SEQ ID NO: 9001 - DNA, 20 bp, Artificial Sequence
  Description of Artificial Sequence: Synthetic oligonucleotide
  Target: SCNA; (+) strand; PAM type: NNGRRT; PAM sequence: CAGAGT
taaggagctctgtcagaaag

SEQ ID NO: 9002 - DNA, 20 bp, Artificial Sequence
  Description of Artificial Sequence: Synthetic oligonucleotide
  Target: SCNA; (+) strand; PAM type: NNGRRT; PAM sequence: AAGGGT
cctactactcaggaaattac

SEQ ID NO: 9003 - DNA, 20 bp, Artificial Sequence
  Description of Artificial Sequence: Synthetic oligonucleotide
  Target: SCNA; (+) strand; PAM type: NNGRRT; PAM sequence: CTGGAT
atgtcacaaatagctacata

SEQ ID NO: 9004 - DNA, 20 bp, Artificial Sequence
  Description of Artificial Sequence: Synthetic oligonucleotide
  Target: SCNA; (+) strand; PAM type: NNGRRT; PAM sequence: TGGAAT
attctgaaaaagaccccact

SEQ ID NO: 9005 - DNA, 20 bp, Artificial Sequence
  Description of Artificial Sequence: Synthetic oligonucleotide
  Target: SCNA; (+) strand; PAM type: NNGRRT; PAM sequence: TGGAGT
tgttttggtaaagccgaccg

SEQ ID NO: 9006 - DNA, 20 bp, Artificial Sequence
  Description of Artificial Sequence: Synthetic oligonucleotide
  Target: SCNA; (+) strand; PAM type: NNGRRT; PAM sequence: CTGAAT
gaccgtggagtcatatgagg

SEQ ID NO: 9007 - DNA, 20 bp, Artificial Sequence
  Description of Artificial Sequence: Synthetic oligonucleotide
  Target: SCNA; (+) strand; PAM type: NNGRRT; PAM sequence: GAGAAT
tatgaggctgaataacttgg

SEQ ID NO: 9008 - DNA, 20 bp, Artificial Sequence
  Description of Artificial Sequence: Synthetic oligonucleotide
  Target: SCNA; (+) strand; PAM type: NNGRRT; PAM sequence: CTGGAT
tctgcaaaataaacctagga

SEQ ID NO: 9009 - DNA, 20 bp, Artificial Sequence
  Description of Artificial Sequence: Synthetic oligonucleotide
  Target: SCNA; (+) strand; PAM type: NNGRRT; PAM sequence: GTGAAT
atcctcaggccacttggcag

SEQ ID NO: 9010 - DNA, 20 bp, Artificial Sequence
  Description of Artificial Sequence: Synthetic oligonucleotide
  Target: SCNA; (+) strand; PAM type: NNGRRT; PAM sequence: GGGAGT
acttggcaggtgaatgtctc

SEQ ID NO: 9011 - DNA, 20 bp, Artificial Sequence
  Description of Artificial Sequence: Synthetic oligonucleotide
  Target: SCNA; (+) strand; PAM type: NNGRRT; PAM sequence: GTGAAT
ggcaggtgaatgtctcggga

SEQ ID NO: 9012 - DNA, 20 bp, Artificial Sequence
  Description of Artificial Sequence: Synthetic oligonucleotide
  Target: SCNA; (+) strand; PAM type: NNGRRT; PAM sequence: GAGAAT
agggaagaaacactttaaag

SEQ ID NO: 9013 - DNA, 20 bp, Artificial Sequence
  Description of Artificial Sequence: Synthetic oligonucleotide
  Target: SCNA; (+) strand; PAM type: NNGRRT; PAM sequence: ATGAAT
caatatatatcacattactc

SEQ ID NO: 9014 - DNA, 20 bp, Artificial Sequence
  Description of Artificial Sequence: Synthetic oligonucleotide
  Target: SCNA; (+) strand; PAM type: NNGRRT; PAM sequence: TAGAAT
atataaactgctagcatgtc

SEQ ID NO: 9015 - DNA, 20 bp, Artificial Sequence
  Description of Artificial Sequence: Synthetic oligonucleotide
  Target: SCNA; (+) strand; PAM type: NNGRRT; PAM sequence: CAGAAT
ttttagaaatgactatgccc

SEQ ID NO: 9016 - DNA, 20 bp, Artificial Sequence
  Description of Artificial Sequence: Synthetic oligonucleotide
  Target: SCNA; (+) strand; PAM type: NNGRRT; PAM sequence: CAGAGT
aatttttaaattaatttata

SEQ ID NO: 9017 - DNA, 20 bp, Artificial Sequence
  Description of Artificial Sequence: Synthetic oligonucleotide
  Target: SCNA; (+) strand; PAM type: NNGRRT; PAM sequence: GGGAGT
gtttattttcagcacccatg

SEQ ID NO: 9018 - DNA, 20 bp, Artificial Sequence
  Description of Artificial Sequence: Synthetic oligonucleotide
  Target: SCNA; (+) strand; PAM type: NNGRRT; PAM sequence: TAGAAT
cctttcctaaggaaaaatcc

SEQ ID NO: 9019 - DNA, 20 bp, Artificial Sequence
  Description of Artificial Sequence: Synthetic oligonucleotide
  Target: SCNA; (+) strand; PAM type: NNGRRT; PAM sequence: GAGAAT
atgaaatttttatcagtcta

SEQ ID NO: 9020 - DNA, 20 bp, Artificial Sequence
  Description of Artificial Sequence: Synthetic oligonucleotide
  Target: SCNA; (+) strand; PAM type: NNGRRT; PAM sequence: GAGAAT
gaaaaagagagagagagaga

SEQ ID NO: 9021 - DNA, 20 bp, Artificial Sequence
  Description of Artificial Sequence: Synthetic oligonucleotide
  Target: SCNA; (+) strand; PAM type: NNGRRT; PAM sequence: AGGAAT
atgattaaaaaaaaaaagtg

SEQ ID NO: 9022 - DNA, 20 bp, Artificial Sequence
  Description of Artificial Sequence: Synthetic oligonucleotide
  Target: SCNA; (+) strand; PAM type: NNGRRT; PAM sequence: CTGAGT
aaaaaaaaaagtgaggaatg

SEQ ID NO: 9023 - DNA, 20 bp, Artificial Sequence
  Description of Artificial Sequence: Synthetic oligonucleotide
  Target: SCNA; (+) strand; PAM type: NNGRRT; PAM sequence: TTGAAT
aaccacattctctcagagcc

SEQ ID NO: 9024 - DNA, 20 bp, Artificial Sequence
  Description of Artificial Sequence: Synthetic oligonucleotide
  Target: SCNA; (+) strand; PAM type: NNGRRT; PAM sequence: GAGGGT
gtgtcttatggctctctaag

SEQ ID NO: 9025 - DNA, 20 bp, Artificial Sequence
  Description of Artificial Sequence: Synthetic oligonucleotide
  Target: SCNA; (+) strand; PAM type: NNGRRT; PAM sequence: TCGAAT
ttttttttttttattcatgg

SEQ ID NO: 9026 - DNA, 20 bp, Artificial Sequence
  Description of Artificial Sequence: Synthetic oligonucleotide
  Target: SCNA; (+) strand; PAM type: NNGRRT; PAM sequence: CAGGAT
atacgtaaagcaaacattga

SEQ ID NO: 9027 - DNA, 20 bp, Artificial Sequence
  Description of Artificial Sequence: Synthetic oligonucleotide
  Target: SCNA; (+) strand; PAM type: NNGRRT; PAM sequence: TGGGGT
gaccactctacaatagtagt

SEQ ID NO: 9028 - DNA, 20 bp, Artificial Sequence
  Description of Artificial Sequence: Synthetic oligonucleotide
  Target: SCNA; (+) strand; PAM type: NNGRRT; PAM sequence: GGGAAT
cttctggcagtgttgcttca

SEQ ID NO: 9029 - DNA, 20 bp, Artificial Sequence
  Description of Artificial Sequence: Synthetic oligonucleotide
  Target: SCNA; (+) strand; PAM type: NNGRRT; PAM sequence: CCGAGT
cagtgttgcttcagggaatt

SEQ ID NO: 9030 - DNA, 20 bp, Artificial Sequence
  Description of Artificial Sequence: Synthetic oligonucleotide
  Target: SCNA; (+) strand; PAM type: NNGRRT; PAM sequence: TAGGGT
gcttcagggaattccgagtg

SEQ ID NO: 9031 - DNA, 20 bp, Artificial Sequence
  Description of Artificial Sequence: Synthetic oligonucleotide
  Target: SCNA; (+) strand; PAM type: NNGRRT; PAM sequence: TGGGAT
tttttattattaaagtgaga

SEQ ID NO: 9032 - DNA, 20 bp, Artificial Sequence
  Description of Artificial Sequence: Synthetic oligonucleotide
  Target: SCNA; (+) strand; PAM type: NNGRRT; PAM sequence: GTGAAT
ccatttatatacaaacacaa

SEQ ID NO: 9033 - DNA, 20 bp, Artificial Sequence
  Description of Artificial Sequence: Synthetic oligonucleotide
  Target: SCNA; (+) strand; PAM type: NNGRRT; PAM sequence: GAGGAT
aacagcaacaaaaaaatagt

SEQ ID NO: 9034 - DNA, 20 bp, Artificial Sequence
  Description of Artificial Sequence: Synthetic oligonucleotide
  Target: SCNA; (+) strand; PAM type: NNGRRT; PAM sequence: CTGAGT
gaaagggaagcaccgaaatg

SEQ ID NO: 9035 - DNA, 20 bp, Artificial Sequence
  Description of Artificial Sequence: Synthetic oligonucleotide
  Target: SCNA; (+) strand; PAM type: NNGRRT; PAM sequence: CAGGAT
attggaactgagcacttgta

SEQ ID NO: 9036 - DNA, 20 bp, Artificial Sequence
  Description of Artificial Sequence: Synthetic oligonucleotide
  Target: SCNA; (+) strand; PAM type: NNGRRT; PAM sequence: GTGAAT
ctttcttgtctgatataaaa

SEQ ID NO: 9037 - DNA, 20 bp, Artificial Sequence
  Description of Artificial Sequence: Synthetic oligonucleotide
  Target: SCNA; (+) strand; PAM type: NNGRRT; PAM sequence: CAGAGT
aagtgaattacagtagtagt

SEQ ID NO: 9038 - DNA, 20 bp, Artificial Sequence
  Description of Artificial Sequence: Synthetic oligonucleotide
  Target: SCNA; (+) strand; PAM type: NNGRRT; PAM sequence: CCGGAT
taaaatatctaggttctgat

SEQ ID NO: 9039 - DNA, 20 bp, Artificial Sequence
  Description of Artificial Sequence: Synthetic oligonucleotide
  Target: SCNA; (+) strand; PAM type: NNGRRT; PAM sequence: CTGGAT
tcaagctctccatacagtat

SEQ ID NO: 9040 - DNA, 20 bp, Artificial Sequence
  Description of Artificial Sequence: Synthetic oligonucleotide
  Target: SCNA; (+) strand; PAM type: NNGRRT; PAM sequence: ATGGAT
catccacaacacaaatatta

SEQ ID NO: 9041 - DNA, 20 bp, Artificial Sequence
  Description of Artificial Sequence: Synthetic oligonucleotide
  Target: SCNA; (+) strand; PAM type: NNGRRT; PAM sequence: AGGGAT
atattaatggatttaattaa

SEQ ID NO: 9042 - DNA, 20 bp, Artificial Sequence
  Description of Artificial Sequence: Synthetic oligonucleotide
  Target: SCNA; (+) strand; PAM type: NNGRRT; PAM sequence: CAGGAT
aagagcaactctaataatat

SEQ ID NO: 9043 - DNA, 20 bp, Artificial Sequence
  Description of Artificial Sequence: Synthetic oligonucleotide
  Target: SCNA; (+) strand; PAM type: NNGRRT; PAM sequence: CTGAAT
tcaataactcaagttgtttt

SEQ ID NO: 9044 - DNA, 20 bp, Artificial Sequence
  Description of Artificial Sequence: Synthetic oligonucleotide
  Target: SCNA; (+) strand; PAM type: NNGRRT; PAM sequence: TAGAAT
aactcaagttgttttctgaa

SEQ ID NO: 9045 - DNA, 20 bp, Artificial Sequence
  Description of Artificial Sequence: Synthetic oligonucleotide
  Target: SCNA; (+) strand; PAM type: NNGRRT; PAM sequence: TTGAGT
cattttccttgttcctaagc

SEQ ID NO: 9046 - DNA, 20 bp, Artificial Sequence
  Description of Artificial Sequence: Synthetic oligonucleotide
  Target: SCNA; (+) strand; PAM type: NNGRRT; PAM sequence: CAGAAT
cttctgatattcccttgtgc

SEQ ID NO: 9047 - DNA, 20 bp, Artificial Sequence
  Description of Artificial Sequence: Synthetic oligonucleotide
  Target: SCNA; (+) strand; PAM type: NNGRRT; PAM sequence: AGGAAT
caatcaattatgtttgttaa

SEQ ID NO: 9048 - DNA, 20 bp, Artificial Sequence
  Description of Artificial Sequence: Synthetic oligonucleotide
  Target: SCNA; (+) strand; PAM type: NNGRRT; PAM sequence: ATGAAT
aaaggaatcataatgaagaa

SEQ ID NO: 9049 - DNA, 20 bp, Artificial Sequence
  Description of Artificial Sequence: Synthetic oligonucleotide
  Target: SCNA; (+) strand; PAM type: NNGRRT; PAM sequence: ATGAAT
gaatcataatgaagaaatga

SEQ ID NO: 9050 - DNA, 20 bp, Artificial Sequence
  Description of Artificial Sequence: Synthetic oligonucleotide
  Target: SCNA; (+) strand; PAM type: NNGRRT; PAM sequence: ATGAAT
cataatgaagaaatgaatga

SEQ ID NO: 9051 - DNA, 20 bp, Artificial Sequence
  Description of Artificial Sequence: Synthetic oligonucleotide
  Target: SCNA; (+) strand; PAM type: NNGRRT; PAM sequence: TTGAAT
ttaatctcaatttctataag

SEQ ID NO: 9052 - DNA, 20 bp, Artificial Sequence
  Description of Artificial Sequence: Synthetic oligonucleotide
  Target: SCNA; (+) strand; PAM type: NNGRRT; PAM sequence: TGGAGT
tcttgctctgttaccaagat

SEQ ID NO: 9053 - DNA, 20 bp, Artificial Sequence
  Description of Artificial Sequence: Synthetic oligonucleotide
  Target: SCNA; (+) strand; PAM type: NNGRRT; PAM sequence: AGGGGT
tgttaccaagattggagtgc

SEQ ID NO: 9054 - DNA, 20 bp, Artificial Sequence
  Description of Artificial Sequence: Synthetic oligonucleotide
  Target: SCNA; (+) strand; PAM type: NNGRRT; PAM sequence: CTGGGT
ctcactgcaacctctgcctc

SEQ ID NO: 9055 - DNA, 20 bp, Artificial Sequence
  Description of Artificial Sequence: Synthetic oligonucleotide
  Target: SCNA; (+) strand; PAM type: NNGRRT; PAM sequence: TGGGGT
ttttgtatttttagtagaga

SEQ ID NO: 9056 - DNA, 20 bp, Artificial Sequence
  Description of Artificial Sequence: Synthetic oligonucleotide
  Target: SCNA; (+) strand; PAM type: NNGRRT; PAM sequence: CGGGAT
ccactttggctcacaaagtg

SEQ ID NO: 9057 - DNA, 20 bp, Artificial Sequence
  Description of Artificial Sequence: Synthetic oligonucleotide
  Target: SCNA; (+) strand; PAM type: NNGRRT; PAM sequence: AGGAAT
tgccttttaataatgccgtg

SEQ ID NO: 9058 - DNA, 20 bp, Artificial Sequence
  Description of Artificial Sequence: Synthetic oligonucleotide
  Target: SCNA; (+) strand; PAM type: NNGRRT; PAM sequence: CAGGGT
cttcatttggttttgattat

SEQ ID NO: 9059 - DNA, 20 bp, Artificial Sequence
  Description of Artificial Sequence: Synthetic oligonucleotide
  Target: SCNA; (+) strand; PAM type: NNGRRT; PAM sequence: TAGAAT
attcctctttaaatgtttgg

SEQ ID NO: 9060 - DNA, 20 bp, Artificial Sequence
  Description of Artificial Sequence: Synthetic oligonucleotide
  Target: SCNA; (+) strand; PAM type: NNGRRT; PAM sequence: TGGGAT
ccagtgatgccatctcggcc

SEQ ID NO: 9061 - DNA, 20 bp, Artificial Sequence
  Description of Artificial Sequence: Synthetic oligonucleotide
  Target: SCNA; (+) strand; PAM type: NNGRRT; PAM sequence: TGGAAT
tgttgtttaaaacattatac

SEQ ID NO: 9062 - DNA, 20 bp, Artificial Sequence
  Description of Artificial Sequence: Synthetic oligonucleotide
  Target: SCNA; (+) strand; PAM type: NNGRRT; PAM sequence: GTGGGT
ctttttattctataacttgt

SEQ ID NO: 9063 - DNA, 20 bp, Artificial Sequence
  Description of Artificial Sequence: Synthetic oligonucleotide
  Target: SCNA; (+) strand; PAM type: NNGRRT; PAM sequence: TAGAAT
ttccatttagaaatttattt

SEQ ID NO: 9064 - DNA, 20 bp, Artificial Sequence
  Description of Artificial Sequence: Synthetic oligonucleotide
  Target: SCNA; (+) strand; PAM type: NNGRRT; PAM sequence: AGGGGT
aaaaatatattctctaatgc

SEQ ID NO: 9065 - DNA, 20 bp, Artificial Sequence
  Description of Artificial Sequence: Synthetic oligonucleotide
  Target: SCNA; (+) strand; PAM type: NNGRRT; PAM sequence: AAGGGT
gttagtaaacttttcctgta

SEQ ID NO: 9066 - DNA, 20 bp, Artificial Sequence
  Description of Artificial Sequence: Synthetic oligonucleotide
  Target: SCNA; (+) strand; PAM type: NNGRRT; PAM sequence: CAGGAT
catttcataagcctcattgt

SEQ ID NO: 9067 - DNA, 20 bp, Artificial Sequence
  Description of Artificial Sequence: Synthetic oligonucleotide
  Target: SCNA; (+) strand; PAM type: NNGRRT; PAM sequence: CAGAAT
ggatccacaggcatatcttc

SEQ ID NO: 9068 - DNA, 20 bp, Artificial Sequence
  Description of Artificial Sequence: Synthetic oligonucleotide
  Target: SCNA; (+) strand; PAM type: NNGRRT; PAM sequence: AGGGAT
tttggaaaaatcttacatat

SEQ ID NO: 9069 - DNA, 20 bp, Artificial Sequence
  Description of Artificial Sequence: Synthetic oligonucleotide
  Target: SCNA; (+) strand; PAM type: NNGRRT; PAM sequence: ACGGAT
tacatatagggatgttggcc

SEQ ID NO: 9070 - DNA, 20 bp, Artificial Sequence
  Description of Artificial Sequence: Synthetic oligonucleotide
  Target: SCNA; (+) strand; PAM type: NNGRRT; PAM sequence: ATGGGT
cggggaaacattgcggcaac

SEQ ID NO: 9071 - DNA, 20 bp, Artificial Sequence
  Description of Artificial Sequence: Synthetic oligonucleotide
  Target: SCNA; (+) strand; PAM type: NNGRRT; PAM sequence: TAGAAT
acagcaggaaacaaaatttt

SEQ ID NO: 9072 - DNA, 20 bp, Artificial Sequence
  Description of Artificial Sequence: Synthetic oligonucleotide
  Target: SCNA; (+) strand; PAM type: NNGRRT; PAM sequence: ATGAAT
aattgttaactaaatgttca

SEQ ID NO: 9073 - DNA, 20 bp, Artificial Sequence
  Description of Artificial Sequence: Synthetic oligonucleotide
  Target: SCNA; (+) strand; PAM type: NNGRRT; PAM sequence: AAGAGT
taaatgttcaatgaataatg

SEQ ID NO: 9074 - DNA, 20 bp, Artificial Sequence
  Description of Artificial Sequence: Synthetic oligonucleotide
  Target: SCNA; (+) strand; PAM type: NNGRRT; PAM sequence: CTGGGT
gaagagttaaaaaattattg

SEQ ID NO: 9075 - DNA, 20 bp, Artificial Sequence
  Description of Artificial Sequence: Synthetic oligonucleotide
  Target: SCNA; (+) strand; PAM type: NNGRRT; PAM sequence: GTGGAT
actttgggaggctgaggcag

SEQ ID NO: 9076 - DNA, 20 bp, Artificial Sequence
  Description of Artificial Sequence: Synthetic oligonucleotide
  Target: SCNA; (+) strand; PAM type: NNGRRT; PAM sequence: TTGAGT
ggctgaggcaggtggatcat

SEQ ID NO: 9077 - DNA, 20 bp, Artificial Sequence
  Description of Artificial Sequence: Synthetic oligonucleotide
  Target: SCNA; (+) strand; PAM type: NNGRRT; PAM sequence: AGGAGT
caggtggatcatttgagtcc

SEQ ID NO: 9078 - DNA, 20 bp, Artificial Sequence
  Description of Artificial Sequence: Synthetic oligonucleotide
  Target: SCNA; (+) strand; PAM type: NNGRRT; PAM sequence: GAGGAT
cacttgggaggctgaggcag

SEQ ID NO: 9079 - DNA, 20 bp, Artificial Sequence
  Description of Artificial Sequence: Synthetic oligonucleotide
  Target: SCNA; (+) strand; PAM type: NNGRRT; PAM sequence: CTGGGT
gcatgccactgcattctagc

SEQ ID NO: 9080 - DNA, 20 bp, Artificial Sequence
  Description of Artificial Sequence: Synthetic oligonucleotide
  Target: SCNA; (+) strand; PAM type: NNGRRT; PAM sequence: GAGAAT
gacctgtattactattacct

SEQ ID NO: 9081 - DNA, 20 bp, Artificial Sequence
  Description of Artificial Sequence: Synthetic oligonucleotide
  Target: SCNA; (+) strand; PAM type: NNGRRT; PAM sequence: CAGAAT
tattatagatacaacctaca

SEQ ID NO: 9082 - DNA, 20 bp, Artificial Sequence
  Description of Artificial Sequence: Synthetic oligonucleotide
  Target: SCNA; (+) strand; PAM type: NNGRRT; PAM sequence: TTGGAT
aaaatatgaaagttattttg

SEQ ID NO: 9083 - DNA, 20 bp, Artificial Sequence
  Description of Artificial Sequence: Synthetic oligonucleotide
  Target: SCNA; (+) strand; PAM type: NNGRRT; PAM sequence: AAGAAT
taggtatctcttcctagaca

SEQ ID NO: 9084 - DNA, 20 bp, Artificial Sequence
  Description of Artificial Sequence: Synthetic oligonucleotide
  Target: SCNA; (+) strand; PAM type: NNGRRT; PAM sequence: TGGAGT
aactacctcactttaaaatg

SEQ ID NO: 9085 - DNA, 20 bp, Artificial Sequence
  Description of Artificial Sequence: Synthetic oligonucleotide
  Target: SCNA; (+) strand; PAM type: NNGRRT; PAM sequence: CAGGAT
tggtagatacgcctctgctg

SEQ ID NO: 9086 - DNA, 20 bp, Artificial Sequence
  Description of Artificial Sequence: Synthetic oligonucleotide
  Target: SCNA; (+) strand; PAM type: NNGRRT; PAM sequence: CTGAGT
agaagtttcctatgcttttt

SEQ ID NO: 9087 - DNA, 20 bp, Artificial Sequence
  Description of Artificial Sequence: Synthetic oligonucleotide
  Target: SCNA; (+) strand; PAM type: NNGRRT; PAM sequence: TAGGAT
attaatatttagattactgt

SEQ ID NO: 9088 - DNA, 20 bp, Artificial Sequence
  Description of Artificial Sequence: Synthetic oligonucleotide
  Target: SCNA; (+) strand; PAM type: NNGRRT; PAM sequence: AGGAGT
ttgttgtttgatgatcaaaa

SEQ ID NO: 9089 - DNA, 20 bp, Artificial Sequence
  Description of Artificial Sequence: Synthetic oligonucleotide
  Target: SCNA; (+) strand; PAM type: NNGRRT; PAM sequence: ATGGAT
ttatgacggaactaagactg

SEQ ID NO: 9090 - DNA, 20 bp, Artificial Sequence
  Description of Artificial Sequence: Synthetic oligonucleotide
  Target: SCNA; (+) strand; PAM type: NNGRRT; PAM sequence: CTGGAT
actaagactgatggatatta

SEQ ID NO: 9091 - DNA, 20 bp, Artificial Sequence
  Description of Artificial Sequence: Synthetic oligonucleotide
  Target: SCNA; (+) strand; PAM type: NNGRRT; PAM sequence: AAGGAT
tgttatttggctgaactttg

SEQ ID NO: 9092 - DNA, 20 bp, Artificial Sequence
  Description of Artificial Sequence: Synthetic oligonucleotide
  Target: SCNA; (+) strand; PAM type: NNGRRT; PAM sequence: GTGAGT
tacacagatgtgtaggttag

SEQ ID NO: 9093 - DNA, 20 bp, Artificial Sequence
  Description of Artificial Sequence: Synthetic oligonucleotide
  Target: SCNA; (+) strand; PAM type: NNGRRT; PAM sequence: CTGGGT
tgtgtctgcatggttccagc

SEQ ID NO: 9094 - DNA, 20 bp, Artificial Sequence
  Description of Artificial Sequence: Synthetic oligonucleotide
  Target: SCNA; (+) strand; PAM type: NNGRRT; PAM sequence: GTGAGT
tctgcatggttccagcctgg

SEQ ID NO: 9095 - DNA, 20 bp, Artificial Sequence
  Description of Artificial Sequence: Synthetic oligonucleotide
  Target: SCNA; (+) strand; PAM type: NNGRRT; PAM sequence: GTGGGT
catggttccagcctgggtga

SEQ ID NO: 9096 - DNA, 20 bp, Artificial Sequence
  Description of Artificial Sequence: Synthetic oligonucleotide
  Target: SCNA; (+) strand; PAM type: NNGRRT; PAM sequence: CGGGGT
taatggaacagcgtcctgtc

SEQ ID NO: 9097 - DNA, 20 bp, Artificial Sequence
  Description of Artificial Sequence: Synthetic oligonucleotide
  Target: SCNA; (+) strand; PAM type: NNGRRT; PAM sequence: GTGGGT
ggaacagcgtcctgtccggg

SEQ ID NO: 9098 - DNA, 20 bp, Artificial Sequence
  Description of Artificial Sequence: Synthetic oligonucleotide
  Target: SCNA; (+) strand; PAM type: NNGRRT; PAM sequence: CAGGAT
catattgctccctgagctgc

SEQ ID NO: 9099 - DNA, 20 bp, Artificial Sequence
  Description of Artificial Sequence: Synthetic oligonucleotide
  Target: SCNA; (+) strand; PAM type: NNGRRT; PAM sequence: AGGAGT
gaagtgatttatctttattt

SEQ ID NO: 9100 - DNA, 20 bp, Artificial Sequence
  Description of Artificial Sequence: Synthetic oligonucleotide
  Target: SCNA; (+) strand; PAM type: NNGRRT; PAM sequence: GAGGAT
aactattgatgaagttaagt

SEQ ID NO: 9101 - DNA, 20 bp, Artificial Sequence
  Description of Artificial Sequence: Synthetic oligonucleotide
  Target: SCNA; (+) strand; PAM type: NNGRRT; PAM sequence: AGGGAT
aagtgggaacaagctacact

SEQ ID NO: 9102 - DNA, 20 bp, Artificial Sequence
  Description of Artificial Sequence: Synthetic oligonucleotide
  Target: SCNA; (+) strand; PAM type: NNGRRT; PAM sequence: TAGAGT
atgacagcacaatcctattc

SEQ ID NO: 9103 - DNA, 20 bp, Artificial Sequence
  Description of Artificial Sequence: Synthetic oligonucleotide
  Target: SCNA; (+) strand; PAM type: NNGRRT; PAM sequence: TAGGGT
tctagagtccaaatcgacaa

SEQ ID NO: 9104 - DNA, 20 bp, Artificial Sequence
  Description of Artificial Sequence: Synthetic oligonucleotide
  Target: SCNA; (+) strand; PAM type: NNGRRT; PAM sequence: TTGGAT
tagggtttacgacctcgatg

SEQ ID NO: 9105 - DNA, 20 bp, Artificial Sequence
  Description of Artificial Sequence: Synthetic oligonucleotide
  Target: SCNA; (+) strand; PAM type: NNGRRT; PAM sequence: GGGAAT
tactcgggagactgagccag

SEQ ID NO: 9106 - DNA, 20 bp, Artificial Sequence
  Description of Artificial Sequence: Synthetic oligonucleotide
  Target: SCNA; (+) strand; PAM type: NNGRRT; PAM sequence: CGGAGT
attgcactccagcctggtga

SEQ ID NO: 9107 - DNA, 20 bp, Artificial Sequence
  Description of Artificial Sequence: Synthetic oligonucleotide
  Target: SCNA; (+) strand; PAM type: NNGRRT; PAM sequence: CCGAAT
aaagaaaagccctacgtgat

SEQ ID NO: 9108 - DNA, 20 bp, Artificial Sequence
  Description of Artificial Sequence: Synthetic oligonucleotide
  Target: SCNA; (+) strand; PAM type: NNGRRT; PAM sequence: TTGAAT
aagccctacgtgatccgaat

SEQ ID NO: 9109 - DNA, 20 bp, Artificial Sequence
  Description of Artificial Sequence: Synthetic oligonucleotide
  Target: SCNA; (+) strand; PAM type: NNGRRT; PAM sequence: AAGAAT
gtgagaaactacacaagaca

SEQ ID NO: 9110 - DNA, 20 bp, Artificial Sequence
  Description of Artificial Sequence: Synthetic oligonucleotide
  Target: SCNA; (+) strand; PAM type: NNGRRT; PAM sequence: AAGAAT
tgaacactgacttgatattt

SEQ ID NO: 9111 - DNA, 20 bp, Artificial Sequence
  Description of Artificial Sequence: Synthetic oligonucleotide
  Target: SCNA; (+) strand; PAM type: NNGRRT; PAM sequence: TTGGGT
aataagatatctatctaggt

SEQ ID NO: 9112 - DNA, 20 bp, Artificial Sequence
  Description of Artificial Sequence: Synthetic oligonucleotide
  Target: SCNA; (+) strand; PAM type: NNGRRT; PAM sequence: ATGGGT
tctaggtttgggtgggggaa

SEQ ID NO: 9113 - DNA, 20 bp, Artificial Sequence
  Description of Artificial Sequence: Synthetic oligonucleotide
  Target: SCNA; (+) strand; PAM type: NNGRRT; PAM sequence: TGGGAT
gtttgggtgggggaaatggg

SEQ ID NO: 9114 - DNA, 20 bp, Artificial Sequence
  Description of Artificial Sequence: Synthetic oligonucleotide
  Target: SCNA; (+) strand; PAM type: NNGRRT; PAM sequence: ATGAGT
gggtgggatatagaagaaac

SEQ ID NO: 9115 - DNA, 20 bp, Artificial Sequence
  Description of Artificial Sequence: Synthetic oligonucleotide
  Target: SCNA; (+) strand; PAM type: NNGRRT; PAM sequence: TAGGGT
attggaaaaaacagtatatg

SEQ ID NO: 9116 - DNA, 20 bp, Artificial Sequence
  Description of Artificial Sequence: Synthetic oligonucleotide
  Target: SCNA; (+) strand; PAM type: NNGRRT; PAM sequence: GGGGGT
gcaatttcaggtgtcctagt

SEQ ID NO: 9117 - DNA, 20 bp, Artificial Sequence
  Description of Artificial Sequence: Synthetic oligonucleotide
  Target: SCNA; (+) strand; PAM type: NNGRRT; PAM sequence: CAGAAT
aggtgtcctagtgggggttt

SEQ ID NO: 9118 - DNA, 20 bp, Artificial Sequence
  Description of Artificial Sequence: Synthetic oligonucleotide
  Target: SCNA; (+) strand; PAM type: NNGRRT; PAM sequence: CTGAAT
agttctctaactatgttttt

SEQ ID NO: 9119 - DNA, 20 bp, Artificial Sequence
  Description of Artificial Sequence: Synthetic oligonucleotide
  Target: SCNA; (+) strand; PAM type: NNGRRT; PAM sequence: GAGAAT
tatttggcagctattccaag

SEQ ID NO: 9120 - DNA, 20 bp, Artificial Sequence
  Description of Artificial Sequence: Synthetic oligonucleotide
  Target: SCNA; (+) strand; PAM type: NNGRRT; PAM sequence: ATGAGT
aacattaaaatttgcatttt

SEQ ID NO: 9121 - DNA, 20 bp, Artificial Sequence
  Description of Artificial Sequence: Synthetic oligonucleotide
  Target: SCNA; (+) strand; PAM type: NNGRRT; PAM sequence: CAGAAT
attatgatattatattaacc

SEQ ID NO: 9122 - DNA, 20 bp, Artificial Sequence
  Description of Artificial Sequence: Synthetic oligonucleotide
  Target: SCNA; (+) strand; PAM type: NNGRRT; PAM sequence: CTGGAT
aaaataaatgagaaaaacgt

SEQ ID NO: 9123 - DNA, 20 bp, Artificial Sequence
  Description of Artificial Sequence: Synthetic oligonucleotide
  Target: SCNA; (+) strand; PAM type: NNGRRT; PAM sequence: CAGGGT
atgcttaataagagaaccta

SEQ ID NO: 9124 - DNA, 20 bp, Artificial Sequence
  Description of Artificial Sequence: Synthetic oligonucleotide
  Target: SCNA; (+) strand; PAM type: NNGRRT; PAM sequence: TAGGAT
taataagagaacctacaggg

SEQ ID NO: 9125 - DNA, 20 bp, Artificial Sequence
  Description of Artificial Sequence: Synthetic oligonucleotide
  Target: SCNA; (+) strand; PAM type: NNGRRT; PAM sequence: TGGAAT
tctctactaggccctatccc

SEQ ID NO: 9126 - DNA, 20 bp, Artificial Sequence
  Description of Artificial Sequence: Synthetic oligonucleotide
  Target: SCNA; (+) strand; PAM type: NNGRRT; PAM sequence: TGGGAT
gtagacttttttttttcaaa

SEQ ID NO: 9127 - DNA, 20 bp, Artificial Sequence
  Description of Artificial Sequence: Synthetic oligonucleotide
  Target: SCNA; (+) strand; PAM type: NNGRRT; PAM sequence: TGGAAT
tggttatcaaaaaattacaa

SEQ ID NO: 9128 - DNA, 20 bp, Artificial Sequence
  Description of Artificial Sequence: Synthetic oligonucleotide
  Target: SCNA; (+) strand; PAM type: NNGRRT; PAM sequence: TAGGGT
gttctttttaaataaacctg

SEQ ID NO: 9129 - DNA, 20 bp, Artificial Sequence
  Description of Artificial Sequence: Synthetic oligonucleotide
  Target: SCNA; (+) strand; PAM type: NNGRRT; PAM sequence: TTGAAT
ttttaaataaacctgtaggg

SEQ ID NO: 9130 - DNA, 20 bp, Artificial Sequence
  Description of Artificial Sequence: Synthetic oligonucleotide
  Target: SCNA; (+) strand; PAM type: NNGRRT; PAM sequence: AGGAAT
aaatttcagctactgtcttt

SEQ ID NO: 9131 - DNA, 20 bp, Artificial Sequence
  Description of Artificial Sequence: Synthetic oligonucleotide
  Target: SCNA; (+) strand; PAM type: NNGRRT; PAM sequence: CAGAAT
tgtctttaggaatacaacta

SEQ ID NO: 9132 - DNA, 20 bp, Artificial Sequence
  Description of Artificial Sequence: Synthetic oligonucleotide
  Target: SCNA; (+) strand; PAM type: NNGRRT; PAM sequence: TAGAAT
ctttccaaaccacactcttc

SEQ ID NO: 9133 - DNA, 20 bp, Artificial Sequence
  Description of Artificial Sequence: Synthetic oligonucleotide
  Target: SCNA; (+) strand; PAM type: NNGRRT; PAM sequence: GTGAGT
atgcaggtttgtagggcctt

SEQ ID NO: 9134 - DNA, 20 bp, Artificial Sequence
  Description of Artificial Sequence: Synthetic oligonucleotide
  Target: SCNA; (+) strand; PAM type: NNGRRT; PAM sequence: TAGAGT
ccctgtggtataatttaata

SEQ ID NO: 9135 - DNA, 20 bp, Artificial Sequence
  Description of Artificial Sequence: Synthetic oligonucleotide
  Target: SCNA; (+) strand; PAM type: NNGRRT; PAM sequence: GTGAAT
ccaatgtacttgctgtcagt

SEQ ID NO: 9136 - DNA, 20 bp, Artificial Sequence
  Description of Artificial Sequence: Synthetic oligonucleotide
  Target: SCNA; (+) strand; PAM type: NNGRRT; PAM sequence: GAGGGT
atcaaatgttggcaaatgtt

SEQ ID NO: 9137 - DNA, 20 bp, Artificial Sequence
  Description of Artificial Sequence: Synthetic oligonucleotide
  Target: SCNA; (+) strand; PAM type: NNGRRT; PAM sequence: GTGAGT
gagctagtaagcttcaattg

SEQ ID NO: 9138 - DNA, 20 bp, Artificial Sequence
  Description of Artificial Sequence: Synthetic oligonucleotide
  Target: SCNA; (+) strand; PAM type: NNGRRT; PAM sequence: TTGAAT
ttggagcaatgtgatgtttc

SEQ ID NO: 9139 - DNA, 20 bp, Artificial Sequence
  Description of Artificial Sequence: Synthetic oligonucleotide
  Target: SCNA; (+) strand; PAM type: NNGRRT; PAM sequence: TTGGGT
aggcttcttgattgttttag

SEQ ID NO: 9140 - DNA, 20 bp, Artificial Sequence
  Description of Artificial Sequence: Synthetic oligonucleotide
  Target: SCNA; (+) strand; PAM type: NNGRRT; PAM sequence: AAGAAT
ttgttttagttgggtataac

SEQ ID NO: 9141 - DNA, 20 bp, Artificial Sequence
  Description of Artificial Sequence: Synthetic oligonucleotide
  Target: SCNA; (+) strand; PAM type: NNGRRT; PAM sequence: TTGGGT
cttttacacttgaagatatt

SEQ ID NO: 9142 - DNA, 20 bp, Artificial Sequence
  Description of Artificial Sequence: Synthetic oligonucleotide
  Target: SCNA; (+) strand; PAM type: NNGRRT; PAM sequence: TGGAAT
tgtcacttagcctcaaataa

SEQ ID NO: 9143 - DNA, 20 bp, Artificial Sequence
  Description of Artificial Sequence: Synthetic oligonucleotide
  Target: SCNA; (+) strand; PAM type: NNGRRT; PAM sequence: GAGGAT
cactcaacaactcacaccag

SEQ ID NO: 9144 - DNA, 20 bp, Artificial Sequence
  Description of Artificial Sequence: Synthetic oligonucleotide
  Target: SCNA; (+) strand; PAM type: NNGRRT; PAM sequence: GTGAAT
agcatagacgtttcaaaaat

SEQ ID NO: 9145 - DNA, 20 bp, Artificial Sequence
  Description of Artificial Sequence: Synthetic oligonucleotide
  Target: SCNA; (+) strand; PAM type: NNGRRT; PAM sequence: GGGAGT
tacttctctacctcagacag

SEQ ID NO: 9146 - DNA, 20 bp, Artificial Sequence
  Description of Artificial Sequence: Synthetic oligonucleotide
  Target: SCNA; (+) strand; PAM type: NNGRRT; PAM sequence: GAGAAT
tagatagtatatttcactaa

SEQ ID NO: 9147 - DNA, 20 bp, Artificial Sequence
  Description of Artificial Sequence: Synthetic oligonucleotide
  Target: SCNA; (+) strand; PAM type: NNGRRT; PAM sequence: ATGAAT
taaaaatgaaggcgatagac

SEQ ID NO: 9148 - DNA, 20 bp, Artificial Sequence
  Description of Artificial Sequence: Synthetic oligonucleotide
  Target: SCNA; (+) strand; PAM type: NNGRRT; PAM sequence: TGGGGT
gtctgctcataatgccattt

SEQ ID NO: 9149 - DNA, 20 bp, Artificial Sequence
  Description of Artificial Sequence: Synthetic oligonucleotide
  Target: SCNA; (+) strand; PAM type: NNGRRT; PAM sequence: AGGAAT
tcaatttttgataaaatcta

SEQ ID NO: 9150 - DNA, 20 bp, Artificial Sequence
  Description of Artificial Sequence: Synthetic oligonucleotide
  Target: SCNA; (+) strand; PAM type: NNGRRT; PAM sequence: TTGAAT
ggaattttatttttaaaaca

SEQ ID NO: 9151 - DNA, 20 bp, Artificial Sequence
  Description of Artificial Sequence: Synthetic oligonucleotide
  Target: SCNA; (+) strand; PAM type: NNGRRT; PAM sequence: TTGGAT
acattgaattaaagcaaact

SEQ ID NO: 9152 - DNA, 20 bp, Artificial Sequence
  Description of Artificial Sequence: Synthetic oligonucleotide
  Target: SCNA; (+) strand; PAM type: NNGRRT; PAM sequence: CTGGGT
ctatgtggagaggaacaact

SEQ ID NO: 9153 - DNA, 20 bp, Artificial Sequence
  Description of Artificial Sequence: Synthetic oligonucleotide
  Target: SCNA; (+) strand; PAM type: NNGRRT; PAM sequence: ACGAAT
ggaacaactctgggtcttaa

SEQ ID NO: 9154 - DNA, 20 bp, Artificial Sequence
  Description of Artificial Sequence: Synthetic oligonucleotide
  Target: SCNA; (+) strand; PAM type: NNGRRT; PAM sequence: AGGAGT
tttattgtttacatactctg

SEQ ID NO: 9155 - DNA, 20 bp, Artificial Sequence
  Description of Artificial Sequence: Synthetic oligonucleotide
  Target: SCNA; (+) strand; PAM type: NNGRRT; PAM sequence: AAGGAT
tctgctgtatccaatgccca

SEQ ID NO: 9156 - DNA, 20 bp, Artificial Sequence
  Description of Artificial Sequence: Synthetic oligonucleotide
  Target: SCNA; (+) strand; PAM type: NNGRRT; PAM sequence: TTGGAT
gggcctgtggttgaagtctg

SEQ ID NO: 9157 - DNA, 20 bp, Artificial Sequence
  Description of Artificial Sequence: Synthetic oligonucleotide
  Target: SCNA; (+) strand; PAM type: NNGRRT; PAM sequence: GGGAGT
atatgcagacgaaaggtaag

SEQ ID NO: 9158 - DNA, 20 bp, Artificial Sequence
  Description of Artificial Sequence: Synthetic oligonucleotide
  Target: SCNA; (+) strand; PAM type: NNGRRT; PAM sequence: TAGAGT
ggcaaggcataagtcttgta

SEQ ID NO: 9159 - DNA, 20 bp, Artificial Sequence
  Description of Artificial Sequence: Synthetic oligonucleotide
  Target: SCNA; (+) strand; PAM type: NNGRRT; PAM sequence: TTGAAT
aaatctataactatagtatt

SEQ ID NO: 9160 - DNA, 20 bp, Artificial Sequence
  Description of Artificial Sequence: Synthetic oligonucleotide
  Target: SCNA; (+) strand; PAM type: NNGRRT; PAM sequence: TAGAAT
aacctgtaaaagacatgcct

SEQ ID NO: 9161 - DNA, 20 bp, Artificial Sequence
  Description of Artificial Sequence: Synthetic oligonucleotide
  Target: SCNA; (+) strand; PAM type: NNGRRT; PAM sequence: TTGAAT
tgccacttcctgagatcatt

SEQ ID NO: 9162 - DNA, 20 bp, Artificial Sequence
  Description of Artificial Sequence: Synthetic oligonucleotide
  Target: SCNA; (+) strand; PAM type: NNGRRT; PAM sequence: CTGAGT
agccaaacctagcaacaagg

SEQ ID NO: 9163 - DNA, 20 bp, Artificial Sequence
  Description of Artificial Sequence: Synthetic oligonucleotide
  Target: SCNA; (+) strand; PAM type: NNGRRT; PAM sequence: CTGGGT
gctgagtgaagatgtggctc

SEQ ID NO: 9164 - DNA, 20 bp, Artificial Sequence
  Description of Artificial Sequence: Synthetic oligonucleotide
  Target: SCNA; (+) strand; PAM type: NNGRRT; PAM sequence: CTGGAT
attactatgtcatcagccat

SEQ ID NO: 9165 - DNA, 20 bp, Artificial Sequence
  Description of Artificial Sequence: Synthetic oligonucleotide
  Target: SCNA; (+) strand; PAM type: NNGRRT; PAM sequence: GGGAAT
atcagccatctggatcactt

SEQ ID NO: 9166 - DNA, 20 bp, Artificial Sequence
  Description of Artificial Sequence: Synthetic oligonucleotide
  Target: SCNA; (+) strand; PAM type: NNGRRT; PAM sequence: GAGAAT
ataatccatacctacagatt

SEQ ID NO: 9167 - DNA, 20 bp, Artificial Sequence
  Description of Artificial Sequence: Synthetic oligonucleotide
  Target: SCNA; (+) strand; PAM type: NNGRRT; PAM sequence: CAGGGT
gtttatcttttgtttagagg

SEQ ID NO: 9168 - DNA, 20 bp, Artificial Sequence
  Description of Artificial Sequence: Synthetic oligonucleotide
  Target: SCNA; (+) strand; PAM type: NNGRRT; PAM sequence: TGGGAT
gcgtcagcctccgaaagtgc

SEQ ID NO: 9169 - DNA, 20 bp, Artificial Sequence
  Description of Artificial Sequence: Synthetic oligonucleotide
  Target: SCNA; (+) strand; PAM type: NNGRRT; PAM sequence: TTGGAT
cacctgagccgtgctctact

SEQ ID NO: 9170 - DNA, 20 bp, Artificial Sequence
  Description of Artificial Sequence: Synthetic oligonucleotide
  Target: SCNA; (+) strand; PAM type: NNGRRT; PAM sequence: GAGAGT
aaaggtttggcagtggagga

SEQ ID NO: 9171 - DNA, 20 bp, Artificial Sequence
  Description of Artificial Sequence: Synthetic oligonucleotide
  Target: SCNA; (+) strand; PAM type: NNGRRT; PAM sequence: TGGGGT
gctaatatattaaatatatt

SEQ ID NO: 9172 - DNA, 20 bp, Artificial Sequence
  Description of Artificial Sequence: Synthetic oligonucleotide
  Target: SCNA; (+) strand; PAM type: NNGRRT; PAM sequence: CTGAAT
gctatttactagttttatct

SEQ ID NO: 9173 - DNA, 20 bp, Artificial Sequence
  Description of Artificial Sequence: Synthetic oligonucleotide
  Target: SCNA; (+) strand; PAM type: NNGRRT; PAM sequence: GTGGAT
cataaattaaaaaataattg

SEQ ID NO: 9174 - DNA, 20 bp, Artificial Sequence
  Description of Artificial Sequence: Synthetic oligonucleotide
  Target: SCNA; (+) strand; PAM type: NNGRRT; PAM sequence: AGGAAT
aaataattggtggataaatc

SEQ ID NO: 9175 - DNA, 20 bp, Artificial Sequence
  Description of Artificial Sequence: Synthetic oligonucleotide
  Target: SCNA; (+) strand; PAM type: NNGRRT; PAM sequence: TTGGAT
agctttttttgtcctgttac

SEQ ID NO: 9176 - DNA, 20 bp, Artificial Sequence
  Description of Artificial Sequence: Synthetic oligonucleotide
  Target: SCNA; (+) strand; PAM type: NNGRRT; PAM sequence: TTGAAT
tgttacttggatagactcgg

SEQ ID NO: 9177 - DNA, 20 bp, Artificial Sequence
  Description of Artificial Sequence: Synthetic oligonucleotide
  Target: SCNA; (+) strand; PAM type: NNGRRT; PAM sequence: GGGAAT
taatgcacaaagggaaatct

SEQ ID NO: 9178 - DNA, 20 bp, Artificial Sequence
  Description of Artificial Sequence: Synthetic oligonucleotide
  Target: SCNA; (+) strand; PAM type: NNGRRT; PAM sequence: ATGGAT
gtttactattttaagctttc

SEQ ID NO: 9179 - DNA, 20 bp, Artificial Sequence
  Description of Artificial Sequence: Synthetic oligonucleotide
  Target: SCNA; (+) strand; PAM type: NNGRRT; PAM sequence: TAGAAT
tattttaagctttcatggat

SEQ ID NO: 9180 - DNA, 20 bp, Artificial Sequence
  Description of Artificial Sequence: Synthetic oligonucleotide
  Target: SCNA; (+) strand; PAM type: NNGRRT; PAM sequence: TTGGGT
gaatcttgaaggtcagcccc

SEQ ID NO: 9181 - DNA, 20 bp, Artificial Sequence
  Description of Artificial Sequence: Synthetic oligonucleotide
  Target: SCNA; (+) strand; PAM type: NNGRRT; PAM sequence: CTGAAT
gtcagccccttgggtagtga

SEQ ID NO: 9182 - DNA, 20 bp, Artificial Sequence
  Description of Artificial Sequence: Synthetic oligonucleotide
  Target: SCNA; (+) strand; PAM type: NNGRRT; PAM sequence: ATGGGT
aagacattaacgatgtgaag

SEQ ID NO: 9183 - DNA, 20 bp, Artificial Sequence
  Description of Artificial Sequence: Synthetic oligonucleotide
  Target: SCNA; (+) strand; PAM type: NNGRRT; PAM sequence: CAGAAT
gtttgctcttgtgctgagct

SEQ ID NO: 9184 - DNA, 20 bp, Artificial Sequence
  Description of Artificial Sequence: Synthetic oligonucleotide
  Target: SCNA; (+) strand; PAM type: NNGRRT; PAM sequence: CAGAGT
ttttttttttttttttgaga

SEQ ID NO: 9185 - DNA, 20 bp, Artificial Sequence
  Description of Artificial Sequence: Synthetic oligonucleotide
  Target: SCNA; (+) strand; PAM type: NNGRRT; PAM sequence: TGGAGT
tctcgctctgtcgcccaggc

SEQ ID NO: 9186 - DNA, 20 bp, Artificial Sequence
  Description of Artificial Sequence: Synthetic oligonucleotide
  Target: SCNA; (+) strand; PAM type: NNGRRT; PAM sequence: CGGGAT
tcactgcaagctctgcctca

SEQ ID NO: 9187 - DNA, 20 bp, Artificial Sequence
  Description of Artificial Sequence: Synthetic oligonucleotide
  Target: SCNA; (+) strand; PAM type: NNGRRT; PAM sequence: CCGAGT
cattctcctgcttcagcctc

SEQ ID NO: 9188 - DNA, 20 bp, Artificial Sequence
  Description of Artificial Sequence: Synthetic oligonucleotide
  Target: SCNA; (+) strand; PAM type: NNGRRT; PAM sequence: CAGGGT
ttttgtaattttagtagaga

SEQ ID NO: 9189 - DNA, 20 bp, Artificial Sequence
  Description of Artificial Sequence: Synthetic oligonucleotide
  Target: SCNA; (+) strand; PAM type: NNGRRT; PAM sequence: CAGGAT
cagggtttcactgtgttagc

SEQ ID NO: 9190 - DNA, 20 bp, Artificial Sequence
  Description of Artificial Sequence: Synthetic oligonucleotide
  Target: SCNA; (+) strand; PAM type: NNGRRT; PAM sequence: TGGGAT
accttggcctcccaaagtgc

SEQ ID NO: 9191 - DNA, 20 bp, Artificial Sequence
  Description of Artificial Sequence: Synthetic oligonucleotide
  Target: SCNA; (+) strand; PAM type: NNGRRT; PAM sequence: CTGGGT
gcaggtcttaaaactagcaa

SEQ ID NO: 9192 - DNA, 20 bp, Artificial Sequence
  Description of Artificial Sequence: Synthetic oligonucleotide
  Target: SCNA; (+) strand; PAM type: NNGRRT; PAM sequence: GAGGGT
ctgggtgagaaatcagtggg

SEQ ID NO: 9193 - DNA, 20 bp, Artificial Sequence
  Description of Artificial Sequence: Synthetic oligonucleotide
  Target: SCNA; (+) strand; PAM type: NNGRRT; PAM sequence: AAGAGT
ctttgacaaagtaagagata

SEQ ID NO: 9194 - DNA, 20 bp, Artificial Sequence
  Description of Artificial Sequence: Synthetic oligonucleotide
  Target: SCNA; (+) strand; PAM type: NNGRRT; PAM sequence: GGGAAT
tcatattttagaaaaaccca

SEQ ID NO: 9195 - DNA, 20 bp, Artificial Sequence
  Description of Artificial Sequence: Synthetic oligonucleotide
  Target: SCNA; (+) strand; PAM type: NNGRRT; PAM sequence: AGGAGT
atgttagtgagccaaggccc

SEQ ID NO: 9196 - DNA, 20 bp, Artificial Sequence
  Description of Artificial Sequence: Synthetic oligonucleotide
  Target: SCNA; (+) strand; PAM type: NNGRRT; PAM sequence: AAGGAT
aacaaactactcatatacaa

SEQ ID NO: 9197 - DNA, 20 bp, Artificial Sequence
  Description of Artificial Sequence: Synthetic oligonucleotide
  Target: SCNA; (+) strand; PAM type: NNGRRT; PAM sequence: GAGAGT
aaaggatgggctctgaagca

SEQ ID NO: 9198 - DNA, 20 bp, Artificial Sequence
  Description of Artificial Sequence: Synthetic oligonucleotide
  Target: SCNA; (+) strand; PAM type: NNGRRT; PAM sequence: GTGGAT
aggcaatagcttcaagatcg

SEQ ID NO: 9199 - DNA, 20 bp, Artificial Sequence
  Description of Artificial Sequence: Synthetic oligonucleotide
  Target: SCNA; (+) strand; PAM type: NNGRRT; PAM sequence: AGGAAT
ggctttaagatagctagagc

SEQ ID NO: 9200 - DNA, 20 bp, Artificial Sequence
  Description of Artificial Sequence: Synthetic oligonucleotide
  Target: SCNA; (+) strand; PAM type: NNGRRT; PAM sequence: GTGAAT
agcaggaataaagtagtcaa

SEQ ID NO: 9201 - DNA, 20 bp, Artificial Sequence
  Description of Artificial Sequence: Synthetic oligonucleotide
  Target: SCNA; (+) strand; PAM type: NNGRRT; PAM sequence: CTGGAT
gtttgaggggccctcacaat

SEQ ID NO: 9202 - DNA, 20 bp, Artificial Sequence
  Description of Artificial Sequence: Synthetic oligonucleotide
  Target: SCNA; (+) strand; PAM type: NNGRRT; PAM sequence: TGGAAT
gtagatctcaaccttcaggc

SEQ ID NO: 9203 - DNA, 20 bp, Artificial Sequence
  Description of Artificial Sequence: Synthetic oligonucleotide
  Target: SCNA; (+) strand; PAM type: NNGRRT; PAM sequence: AGGAGT
ccatagtggttgatttcaaa

SEQ ID NO: 9204 - DNA, 20 bp, Artificial Sequence
  Description of Artificial Sequence: Synthetic oligonucleotide
  Target: SCNA; (+) strand; PAM type: NNGRRT; PAM sequence: AGGAAT
caacagatcggagataaaaa

SEQ ID NO: 9205 - DNA, 20 bp, Artificial Sequence
  Description of Artificial Sequence: Synthetic oligonucleotide
  Target: SCNA; (+) strand; PAM type: NNGRRT; PAM sequence: TGGAAT
ttttctgtgttattcggaca

SEQ ID NO: 9206 - DNA, 20 bp, Artificial Sequence
  Description of Artificial Sequence: Synthetic oligonucleotide
  Target: SCNA; (+) strand; PAM type: NNGRRT; PAM sequence: AAGAGT
tctgtatttggtaccatttc

SEQ ID NO: 9207 - DNA, 20 bp, Artificial Sequence
  Description of Artificial Sequence: Synthetic oligonucleotide
  Target: SCNA; (+) strand; PAM type: NNGRRT; PAM sequence: GTGAAT
ctactgtctccattttatca

SEQ ID NO: 9208 - DNA, 20 bp, Artificial Sequence
  Description of Artificial Sequence: Synthetic oligonucleotide
  Target: SCNA; (+) strand; PAM type: NNGRRT; PAM sequence: TGGAAT
tctaataccaatatttttat

SEQ ID NO: 9209 - DNA, 20 bp, Artificial Sequence
  Description of Artificial Sequence: Synthetic oligonucleotide
  Target: SCNA; (+) strand; PAM type: NNGRRT; PAM sequence: TAGAAT
gtttgcttgtttgtttgttt

SEQ ID NO: 9210 - DNA, 20 bp, Artificial Sequence
  Description of Artificial Sequence: Synthetic oligonucleotide
  Target: SCNA; (+) strand; PAM type: NNGRRT; PAM sequence: GAGAAT
taaccatgccttattccaca

SEQ ID NO: 9211 - DNA, 20 bp, Artificial Sequence
  Description of Artificial Sequence: Synthetic oligonucleotide
  Target: SCNA; (+) strand; PAM type: NNGRRT; PAM sequence: AGGAAT
attccacagagaatttaaag

SEQ ID NO: 9212 - DNA, 20 bp, Artificial Sequence
  Description of Artificial Sequence: Synthetic oligonucleotide
  Target: SCNA; (+) strand; PAM type: NNGRRT; PAM sequence: ATGAAT
ttatttcctcattgcatcaa

SEQ ID NO: 9213 - DNA, 20 bp, Artificial Sequence
  Description of Artificial Sequence: Synthetic oligonucleotide
  Target: SCNA; (+) strand; PAM type: NNGRRT; PAM sequence: CTGGAT
ttttaaggcatccattattt

SEQ ID NO: 9214 - DNA, 20 bp, Artificial Sequence
  Description of Artificial Sequence: Synthetic oligonucleotide
  Target: SCNA; (+) strand; PAM type: NNGRRT; PAM sequence: TTGAGT
gtatctccctttgctgttta

SEQ ID NO: 9215 - DNA, 20 bp, Artificial Sequence
  Description of Artificial Sequence: Synthetic oligonucleotide
  Target: SCNA; (+) strand; PAM type: NNGRRT; PAM sequence: CAGAAT
gagaacaaacaaacaacaca

SEQ ID NO: 9216 - DNA, 20 bp, Artificial Sequence
  Description of Artificial Sequence: Synthetic oligonucleotide
  Target: SCNA; (+) strand; PAM type: NNGRRT; PAM sequence: TGGGGT
ctatggttgcaatgtgtagg

SEQ ID NO: 9217 - DNA, 20 bp, Artificial Sequence
  Description of Artificial Sequence: Synthetic oligonucleotide
  Target: SCNA; (+) strand; PAM type: NNGRRT; PAM sequence: AAGAAT
tatgtgtgtgtgtgtgttgg

SEQ ID NO: 9218 - DNA, 20 bp, Artificial Sequence
  Description of Artificial Sequence: Synthetic oligonucleotide
  Target: SCNA; (+) strand; PAM type: NNGRRT; PAM sequence: GAGGAT
gtgttggaagaatatatatt

SEQ ID NO: 9219 - DNA, 20 bp, Artificial Sequence
  Description of Artificial Sequence: Synthetic oligonucleotide
  Target: SCNA; (+) strand; PAM type: NNGRRT; PAM sequence: CAGAGT
ggtaacaataaaacattttt

SEQ ID NO: 9220 - DNA, 20 bp, Artificial Sequence
  Description of Artificial Sequence: Synthetic oligonucleotide
  Target: SCNA; (+) strand; PAM type: NNGRRT; PAM sequence: AAGAAT
taagaaaacctttttttgga

SEQ ID NO: 9221 - DNA, 20 bp, Artificial Sequence
  Description of Artificial Sequence: Synthetic oligonucleotide
  Target: SCNA; (+) strand; PAM type: NNGRRT; PAM sequence: CCGAAT
aatctcagcactttgggagg

SEQ ID NO: 9222 - DNA, 20 bp, Artificial Sequence
  Description of Artificial Sequence: Synthetic oligonucleotide
  Target: SCNA; (+) strand; PAM type: NNGRRT; PAM sequence: GCGGAT
cactttgggaggccgaatgg

SEQ ID NO: 9223 - DNA, 20 bp, Artificial Sequence
  Description of Artificial Sequence: Synthetic oligonucleotide
  Target: SCNA; (+) strand; PAM type: NNGRRT; PAM sequence: AAGAAT
tactcgggaggctgaggcag

SEQ ID NO: 9224 - DNA, 20 bp, Artificial Sequence
  Description of Artificial Sequence: Synthetic oligonucleotide
  Target: SCNA; (+) strand; PAM type: NNGRRT; PAM sequence: CAGAGT
actgcactccagactggcga

SEQ ID NO: 9225 - DNA, 20 bp, Artificial Sequence
  Description of Artificial Sequence: Synthetic oligonucleotide
  Target: SCNA; (+) strand; PAM type: NNGRRT; PAM sequence: AGGAAT
tccccttctctctgttgcct

SEQ ID NO: 9226 - DNA, 20 bp, Artificial Sequence
  Description of Artificial Sequence: Synthetic oligonucleotide
  Target: SCNA; (+) strand; PAM type: NNGRRT; PAM sequence: TTGAGT
ctaggaatacagccaaaaac

SEQ ID NO: 9227 - DNA, 20 bp, Artificial Sequence
  Description of Artificial Sequence: Synthetic oligonucleotide
  Target: SCNA; (+) strand; PAM type: NNGRRT; PAM sequence: ATGGGT
acttgagtaatagatgatag

SEQ ID NO: 9228 - DNA, 20 bp, Artificial Sequence
  Description of Artificial Sequence: Synthetic oligonucleotide
  Target: SCNA; (+) strand; PAM type: NNGRRT; PAM sequence: TTGAGT
cttgcaagcctgccagtctt

SEQ ID NO: 9229 - DNA, 20 bp, Artificial Sequence
  Description of Artificial Sequence: Synthetic oligonucleotide
  Target: SCNA; (+) strand; PAM type: NNGRRT; PAM sequence: CTGGGT
tgggcaaagacacaatagtg

SEQ ID NO: 9230 - DNA, 20 bp, Artificial Sequence
  Description of Artificial Sequence: Synthetic oligonucleotide
  Target: SCNA; (+) strand; PAM type: NNGRRT; PAM sequence: AAGAGT
ctcacattaatagcattagc

SEQ ID NO: 9231 - DNA, 20 bp, Artificial Sequence
  Description of Artificial Sequence: Synthetic oligonucleotide
  Target: SCNA; (+) strand; PAM type: NNGRRT; PAM sequence: GTGGGT
aggtgacacctacatgctca

SEQ ID NO: 9232 - DNA, 20 bp, Artificial Sequence
  Description of Artificial Sequence: Synthetic oligonucleotide
  Target: SCNA; (+) strand; PAM type: NNGRRT; PAM sequence: ATGGAT
gaacgcagagctcaggaaac

SEQ ID NO: 9233 - DNA, 20 bp, Artificial Sequence
  Description of Artificial Sequence: Synthetic oligonucleotide
  Target: SCNA; (+) strand; PAM type: NNGRRT; PAM sequence: TTGAAT
gtgcagaaatgatacgctgc

SEQ ID NO: 9234 - DNA, 20 bp, Artificial Sequence
  Description of Artificial Sequence: Synthetic oligonucleotide
  Target: SCNA; (+) strand; PAM type: NNGRRT; PAM sequence: AGGAGT
ggacagctgacacagggaca

SEQ ID NO: 9235 - DNA, 20 bp, Artificial Sequence
  Description of Artificial Sequence: Synthetic oligonucleotide
  Target: SCNA; (+) strand; PAM type: NNGRRT; PAM sequence: TTGAGT
taagccattttttaggtagg

SEQ ID NO: 9236 - DNA, 20 bp, Artificial Sequence
  Description of Artificial Sequence: Synthetic oligonucleotide
  Target: SCNA; (+) strand; PAM type: NNGRRT; PAM sequence: TGGAGT
ataagttgaaaatatgagat

SEQ ID NO: 9237 - DNA, 20 bp, Artificial Sequence
  Description of Artificial Sequence: Synthetic oligonucleotide
  Target: SCNA; (+) strand; PAM type: NNGRRT; PAM sequence: TTGAGT
agacttcagaaatacatatt

SEQ ID NO: 9238 - DNA, 20 bp, Artificial Sequence
  Description of Artificial Sequence: Synthetic oligonucleotide
  Target: SCNA; (+) strand; PAM type: NNGRRT; PAM sequence: CAGAGT
acactacagaggtaagtcat

SEQ ID NO: 9239 - DNA, 20 bp, Artificial Sequence
  Description of Artificial Sequence: Synthetic oligonucleotide
  Target: SCNA; (+) strand; PAM type: NNGRRT; PAM sequence: AGGGAT
tactatgtattttatgcttc

SEQ ID NO: 9240 - DNA, 20 bp, Artificial Sequence
  Description of Artificial Sequence: Synthetic oligonucleotide
  Target: SCNA; (+) strand; PAM type: NNGRRT; PAM sequence: TTGAAT
atgttttttctcaaagtgtg

SEQ ID NO: 9241 - DNA, 20 bp, Artificial Sequence
  Description of Artificial Sequence: Synthetic oligonucleotide
  Target: SCNA; (+) strand; PAM type: NNGRRT; PAM sequence: AAGAGT
tggtagaaaacattttgaca

SEQ ID NO: 9242 - DNA, 20 bp, Artificial Sequence
  Description of Artificial Sequence: Synthetic oligonucleotide
  Target: SCNA; (+) strand; PAM type: NNGRRT; PAM sequence: AGGGGT
agttgtgcaatgagaaagct

SEQ ID NO: 9243 - DNA, 20 bp, Artificial Sequence
  Description of Artificial Sequence: Synthetic oligonucleotide
  Target: SCNA; (+) strand; PAM type: NNGRRT; PAM sequence: GAGGGT
ggggtgggacaattaatttt

SEQ ID NO: 9244 - DNA, 20 bp, Artificial Sequence
  Description of Artificial Sequence: Synthetic oligonucleotide
  Target: SCNA; (+) strand; PAM type: NNGRRT; PAM sequence: GGGGAT
taattttgagggtaacaatt

SEQ ID NO: 9245 - DNA, 20 bp, Artificial Sequence
  Description of Artificial Sequence: Synthetic oligonucleotide
  Target: SCNA; (+) strand; PAM type: NNGRRT; PAM sequence: TTGAGT
tgagggtaacaattggggat

SEQ ID NO: 9246 - DNA, 20 bp, Artificial Sequence
  Description of Artificial Sequence: Synthetic oligonucleotide
  Target: SCNA; (+) strand; PAM type: NNGRRT; PAM sequence: CAGAGT
gactgttaatgtagtaggag

SEQ ID NO: 9247 - DNA, 20 bp, Artificial Sequence
  Description of Artificial Sequence: Synthetic oligonucleotide
  Target: SCNA; (+) strand; PAM type: NNGRRT; PAM sequence: GAGGGT
gtttcacaatacagagcaga

SEQ ID NO: 9248 - DNA, 20 bp, Artificial Sequence
  Description of Artificial Sequence: Synthetic oligonucleotide
  Target: SCNA; (+) strand; PAM type: NNGRRT; PAM sequence: AAGAAT
agagagggtgttggttgata

SEQ ID NO: 9249 - DNA, 20 bp, Artificial Sequence
  Description of Artificial Sequence: Synthetic oligonucleotide
  Target: SCNA; (+) strand; PAM type: NNGRRT; PAM sequence: AAGAAT
attgtctcaaatgagaggaa

SEQ ID NO: 9250 - DNA, 20 bp, Artificial Sequence
  Description of Artificial Sequence: Synthetic oligonucleotide
  Target: SCNA; (+) strand; PAM type: NNGRRT; PAM sequence: ATGAGT
gaaaggtgggacatgttaac

SEQ ID NO: 9251 - DNA, 20 bp, Artificial Sequence
  Description of Artificial Sequence: Synthetic oligonucleotide
  Target: SCNA; (+) strand; PAM type: NNGRRT; PAM sequence: AGGAAT
aaaggaaaggaaggaaaagg

SEQ ID NO: 9252 - DNA, 20 bp, Artificial Sequence
  Description of Artificial Sequence: Synthetic oligonucleotide
  Target: SCNA; (+) strand; PAM type: NNGRRT; PAM sequence: TTGAAT
gaggaatttatatttattta

SEQ ID NO: 9253 - DNA, 20 bp, Artificial Sequence
  Description of Artificial Sequence: Synthetic oligonucleotide
  Target: SCNA; (+) strand; PAM type: NNGRRT; PAM sequence: CTGGGT
taaaaaattcgatagtcaag

SEQ ID NO: 9254 - DNA, 20 bp, Artificial Sequence
  Description of Artificial Sequence: Synthetic oligonucleotide
  Target: SCNA; (+) strand; PAM type: NNGRRT; PAM sequence: AAGAGT
tgtgattttaagggaagaag

SEQ ID NO: 9255 - DNA, 20 bp, Artificial Sequence
  Description of Artificial Sequence: Synthetic oligonucleotide
  Target: SCNA; (+) strand; PAM type: NNGRRT; PAM sequence: ATGGGT
ggaagaagaagagttttata

SEQ ID NO: 9256 - DNA, 20 bp, Artificial Sequence
  Description of Artificial Sequence: Synthetic oligonucleotide
  Target: SCNA; (+) strand; PAM type: NNGRRT; PAM sequence: GTGAAT
aaaacaactgctgagaagca

SEQ ID NO: 9257 - DNA, 20 bp, Artificial Sequence
  Description of Artificial Sequence: Synthetic oligonucleotide
  Target: SCNA; (+) strand; PAM type: NNGRRT; PAM sequence: CAGAAT
tgagaagcagtgaatccaag

SEQ ID NO: 9258 - DNA, 20 bp, Artificial Sequence
  Description of Artificial Sequence: Synthetic oligonucleotide
  Target: SCNA; (+) strand; PAM type: NNGRRT; PAM sequence: CTGAGT
gcagtgaatccaagcagaat

SEQ ID NO: 9259 - DNA, 20 bp, Artificial Sequence
  Description of Artificial Sequence: Synthetic oligonucleotide
  Target: SCNA; (+) strand; PAM type: NNGRRT; PAM sequence: AAGAAT
tgatttttctttaacaggca

SEQ ID NO: 9260 - DNA, 20 bp, Artificial Sequence
  Description of Artificial Sequence: Synthetic oligonucleotide
  Target: SCNA; (+) strand; PAM type: NNGRRT; PAM sequence: TTGAGT
ctttaacaggcaaagaattt

SEQ ID NO: 9261 - DNA, 20 bp, Artificial Sequence
  Description of Artificial Sequence: Synthetic oligonucleotide
  Target: SCNA; (+) strand; PAM type: NNGRRT; PAM sequence: CTGAGT
ttttgagtctttcccataga

SEQ ID NO: 9262 - DNA, 20 bp, Artificial Sequence
  Description of Artificial Sequence: Synthetic oligonucleotide
  Target: SCNA; (+) strand; PAM type: NNGRRT; PAM sequence: CAGGGT
ttgttgccaggtttctcctc

SEQ ID NO: 9263 - DNA, 20 bp, Artificial Sequence
  Description of Artificial Sequence: Synthetic oligonucleotide
  Target: SCNA; (+) strand; PAM type: NNGRRT; PAM sequence: ATGGGT
atataaaggagactgtgcat

SEQ ID NO: 9264 - DNA, 20 bp, Artificial Sequence
  Description of Artificial Sequence: Synthetic oligonucleotide
  Target: SCNA; (+) strand; PAM type: NNGRRT; PAM sequence: CTGAAT
ttttcttaattttgatatct

SEQ ID NO: 9265 - DNA, 20 bp, Artificial Sequence
  Description of Artificial Sequence: Synthetic oligonucleotide
  Target: SCNA; (+) strand; PAM type: NNGRRT; PAM sequence: GAGAAT
atctctgaatttaaagtcta

SEQ ID NO: 9266 - DNA, 20 bp, Artificial Sequence
  Description of Artificial Sequence: Synthetic oligonucleotide
  Target: SCNA; (+) strand; PAM type: NNGRRT; PAM sequence: TCGAGT
tctcaaactataatttggtg

SEQ ID NO: 9267 - DNA, 20 bp, Artificial Sequence
  Description of Artificial Sequence: Synthetic oligonucleotide
  Target: SCNA; (+) strand; PAM type: NNGRRT; PAM sequence: CAGAAT
tattagaacgtccactagat

SEQ ID NO: 9268 - DNA, 20 bp, Artificial Sequence
  Description of Artificial Sequence: Synthetic oligonucleotide
  Target: SCNA; (+) strand; PAM type: NNGRRT; PAM sequence: GAGAAT
tcaccaaatttaacctggaa

SEQ ID NO: 9269 - DNA, 20 bp, Artificial Sequence
  Description of Artificial Sequence: Synthetic oligonucleotide
  Target: SCNA; (+) strand; PAM type: NNGRRT; PAM sequence: TTGAAT
gaagagaatgtctgactctg

SEQ ID NO: 9270 - DNA, 20 bp, Artificial Sequence
  Description of Artificial Sequence: Synthetic oligonucleotide
  Target: SCNA; (+) strand; PAM type: NNGRRT; PAM sequence: CTGAAT
aatacaatatttgaaagtca

SEQ ID NO: 9271 - DNA, 20 bp, Artificial Sequence
  Description of Artificial Sequence: Synthetic oligonucleotide
  Target: SCNA; (+) strand; PAM type: NNGRRT; PAM sequence: TGGAGT
aaaggaactcatagcgttct

SEQ ID NO: 9272 - DNA, 20 bp, Artificial Sequence
  Description of Artificial Sequence: Synthetic oligonucleotide
  Target: SCNA; (+) strand; PAM type: NNGRRT; PAM sequence: ATGAAT
aagccaccgtgatgaactaa

SEQ ID NO: 9273 - DNA, 20 bp, Artificial Sequence
  Description of Artificial Sequence: Synthetic oligonucleotide
  Target: SCNA; (+) strand; PAM type: NNGRRT; PAM sequence: GCGGAT
accttgggaggccaagacag

SEQ ID NO: 9274 - DNA, 20 bp, Artificial Sequence
  Description of Artificial Sequence: Synthetic oligonucleotide
  Target: SCNA; (+) strand; PAM type: NNGRRT; PAM sequence: AGGAGT
caggcggatcacttgaggtc

SEQ ID NO: 9275 - DNA, 20 bp, Artificial Sequence
  Description of Artificial Sequence: Synthetic oligonucleotide
  Target: SCNA; (+) strand; PAM type: NNGRRT; PAM sequence: AAGAAT
tactcaggtggctgaggcag

SEQ ID NO: 9276 - DNA, 20 bp, Artificial Sequence
  Description of Artificial Sequence: Synthetic oligonucleotide
  Target: SCNA; (+) strand; PAM type: NNGRRT; PAM sequence: CTGGGT
ggcagaagaatcgcttgaac

SEQ ID NO: 9277 - DNA, 20 bp, Artificial Sequence
  Description of Artificial Sequence: Synthetic oligonucleotide
  Target: SCNA; (+) strand; PAM type: NNGRRT; PAM sequence: GAGAGT
ctgcactccagcctgggcaa

SEQ ID NO: 9278 - DNA, 20 bp, Artificial Sequence
  Description of Artificial Sequence: Synthetic oligonucleotide
  Target: SCNA; (+) strand; PAM type: NNGRRT; PAM sequence: ATGAGT
ttcatggcatagcataatag

SEQ ID NO: 9279 - DNA, 20 bp, Artificial Sequence
  Description of Artificial Sequence: Synthetic oligonucleotide
  Target: SCNA; (+) strand; PAM type: NNGRRT; PAM sequence: TTGGAT
tcactattagctcttcagac

SEQ ID NO: 9280 - DNA, 20 bp, Artificial Sequence
  Description of Artificial Sequence: Synthetic oligonucleotide
  Target: SCNA; (+) strand; PAM type: NNGRRT; PAM sequence: GTGGAT
tagtgtgaacacacaccact

SEQ ID NO: 9281 - DNA, 20 bp, Artificial Sequence
  Description of Artificial Sequence: Synthetic oligonucleotide
  Target: SCNA; (+) strand; PAM type: NNGRRT; PAM sequence: GAGAGT
cattcttgcttgctctcatg

SEQ ID NO: 9282 - DNA, 20 bp, Artificial Sequence
  Description of Artificial Sequence: Synthetic oligonucleotide
  Target: SCNA; (+) strand; PAM type: NNGRRT; PAM sequence: TAGAAT
ctctcatggagagtgcaatt

SEQ ID NO: 9283 - DNA, 20 bp, Artificial Sequence
  Description of Artificial Sequence: Synthetic oligonucleotide
  Target: SCNA; (+) strand; PAM type: NNGRRT; PAM sequence: GAGGGT
ttgagagctcaatttctaag

SEQ ID NO: 9284 - DNA, 20 bp, Artificial Sequence
  Description of Artificial Sequence: Synthetic oligonucleotide
  Target: SCNA; (+) strand; PAM type: NNGRRT; PAM sequence: TTGAGT
cttgaggcacaccaaggaga

SEQ ID NO: 9285 - DNA, 20 bp, Artificial Sequence
  Description of Artificial Sequence: Synthetic oligonucleotide
  Target: SCNA; (+) strand; PAM type: NNGRRT; PAM sequence: CTGAAT
tccatgtggcttctggctga

SEQ ID NO: 9286 - DNA, 20 bp, Artificial Sequence
  Description of Artificial Sequence: Synthetic oligonucleotide
  Target: SCNA; (+) strand; PAM type: NNGRRT; PAM sequence: ATGGGT
tagtaaaaagattttcacta

SEQ ID NO: 9287 - DNA, 20 bp, Artificial Sequence
  Description of Artificial Sequence: Synthetic oligonucleotide
  Target: SCNA; (+) strand; PAM type: NNGRRT; PAM sequence: ATGAAT
aatgggtggttttaatattt

SEQ ID NO: 9288 - DNA, 20 bp, Artificial Sequence
  Description of Artificial Sequence: Synthetic oligonucleotide
  Target: SCNA; (+) strand; PAM type: NNGRRT; PAM sequence: TTGAAT
gccaatgcttaatacttatt

SEQ ID NO: 9289 - DNA, 20 bp, Artificial Sequence
  Description of Artificial Sequence: Synthetic oligonucleotide
  Target: SCNA; (+) strand; PAM type: NNGRRT; PAM sequence: TAGGAT
cagtcctgttattctcactg

SEQ ID NO: 9290 - DNA, 20 bp, Artificial Sequence
  Description of Artificial Sequence: Synthetic oligonucleotide
  Target: SCNA; (+) strand; PAM type: NNGRRT; PAM sequence: GTGAAT
tatattaaaatccttcaact

SEQ ID NO: 9291 - DNA, 20 bp, Artificial Sequence
  Description of Artificial Sequence: Synthetic oligonucleotide
  Target: SCNA; (+) strand; PAM type: NNGRRT; PAM sequence: TTGAGT
actgtgaattcagcaatgtt

SEQ ID NO: 9292 - DNA, 20 bp, Artificial Sequence
  Description of Artificial Sequence: Synthetic oligonucleotide
  Target: SCNA; (+) strand; PAM type: NNGRRT; PAM sequence: AGGGAT
tcagcaatgttttgagttcc

SEQ ID NO: 9293 - DNA, 20 bp, Artificial Sequence
  Description of Artificial Sequence: Synthetic oligonucleotide
  Target: SCNA; (+) strand; PAM type: NNGRRT; PAM sequence: CTGAAT
atatttaagaaatgaaaggc

SEQ ID NO: 9294 - DNA, 20 bp, Artificial Sequence
  Description of Artificial Sequence: Synthetic oligonucleotide
  Target: SCNA; (+) strand; PAM type: NNGRRT; PAM sequence: CAGGGT
aaataagaggtcaaattttc

SEQ ID NO: 9295 - DNA, 20 bp, Artificial Sequence
  Description of Artificial Sequence: Synthetic oligonucleotide
  Target: SCNA; (+) strand; PAM type: NNGRRT; PAM sequence: GAGAGT
gatcaccacattaattaaac

SEQ ID NO: 9296 - DNA, 20 bp, Artificial Sequence
  Description of Artificial Sequence: Synthetic oligonucleotide
  Target: SCNA; (+) strand; PAM type: NNGRRT; PAM sequence: TGGAAT
acacacaccccccaaggctc

SEQ ID NO: 9297 - DNA, 20 bp, Artificial Sequence
  Description of Artificial Sequence: Synthetic oligonucleotide
  Target: SCNA; (+) strand; PAM type: NNGRRT; PAM sequence: CAGGGT
taaactgataattgattaac

SEQ ID NO: 9298 - DNA, 20 bp, Artificial Sequence
  Description of Artificial Sequence: Synthetic oligonucleotide
  Target: SCNA; (+) strand; PAM type: NNGRRT; PAM sequence: GAGGGT
gtgctatacaaatctaccta

SEQ ID NO: 9299 - DNA, 20 bp, Artificial Sequence
  Description of Artificial Sequence: Synthetic oligonucleotide
  Target: SCNA; (+) strand; PAM type: NNGRRT; PAM sequence: GAGGAT
ccaccccatccttcactttg

SEQ ID NO: 9300 - DNA, 20 bp, Artificial Sequence
  Description of Artificial Sequence: Synthetic oligonucleotide
  Target: SCNA; (+) strand; PAM type: NNGRRT; PAM sequence: CCGAGT
tacaaacaaaagcaaataaa

SEQ ID NO: 9301 - DNA, 20 bp, Artificial Sequence
  Description of Artificial Sequence: Synthetic oligonucleotide
  Target: SCNA; (+) strand; PAM type: NNGRRT; PAM sequence: CCGAGT
accgagtgataataaataaa

SEQ ID NO: 9302 - DNA, 20 bp, Artificial Sequence
  Description of Artificial Sequence: Synthetic oligonucleotide
  Target: SCNA; (+) strand; PAM type: NNGRRT; PAM sequence: CTGGGT
tccactagaagaaaagggac

SEQ ID NO: 9303 - DNA, 20 bp, Artificial Sequence
  Description of Artificial Sequence: Synthetic oligonucleotide
  Target: SCNA; (+) strand; PAM type: NNGRRT; PAM sequence: ATGAAT
aagtgccgagcaaatattca

SEQ ID NO: 9304 - DNA, 20 bp, Artificial Sequence
  Description of Artificial Sequence: Synthetic oligonucleotide
  Target: SCNA; (+) strand; PAM type: NNGRRT; PAM sequence: AAGAAT
tgaatgactgtacctttcct

SEQ ID NO: 9305 - DNA, 20 bp, Artificial Sequence
  Description of Artificial Sequence: Synthetic oligonucleotide
  Target: SCNA; (+) strand; PAM type: NNGRRT; PAM sequence: CTGAGT
tcaaatgctctcccattgga

SEQ ID NO: 9306 - DNA, 20 bp, Artificial Sequence
  Description of Artificial Sequence: Synthetic oligonucleotide
  Target: SCNA; (+) strand; PAM type: NNGRRT; PAM sequence: GCGAAT
ttttgagatgattggtgtaa

SEQ ID NO: 9307 - DNA, 20 bp, Artificial Sequence
  Description of Artificial Sequence: Synthetic oligonucleotide
  Target: SCNA; (+) strand; PAM type: NNGRRT; PAM sequence: CTGAGT
gtgtaagcgaatgtcctctc

SEQ ID NO: 9308 - DNA, 20 bp, Artificial Sequence
  Description of Artificial Sequence: Synthetic oligonucleotide
  Target: SCNA; (+) strand; PAM type: NNGRRT; PAM sequence: GAGAAT
aatgtcctctcctgagttgc

SEQ ID NO: 9309 - DNA, 20 bp, Artificial Sequence
  Description of Artificial Sequence: Synthetic oligonucleotide
  Target: SCNA; (+) strand; PAM type: NNGRRT; PAM sequence: ATGAAT
gccaagtgaaaaagggaaaa

SEQ ID NO: 9310 - DNA, 20 bp, Artificial Sequence
  Description of Artificial Sequence: Synthetic oligonucleotide
  Target: SCNA; (+) strand; PAM type: NNGRRT; PAM sequence: ATGAAT
agtgaaaaagggaaaaatga

SEQ ID NO: 9311 - DNA, 20 bp, Artificial Sequence
  Description of Artificial Sequence: Synthetic oligonucleotide
  Target: SCNA; (+) strand; PAM type: NNGRRT; PAM sequence: AAGAGT
atggaaaaaaacagaaaatc

SEQ ID NO: 9312 - DNA, 20 bp, Artificial Sequence
  Description of Artificial Sequence: Synthetic oligonucleotide
  Target: SCNA; (+) strand; PAM type: NNGRRT; PAM sequence: AAGAAT
ccatttaattgttttagact

SEQ ID NO: 9313 - DNA, 20 bp, Artificial Sequence
  Description of Artificial Sequence: Synthetic oligonucleotide
  Target: SCNA; (+) strand; PAM type: NNGRRT; PAM sequence: TAGGAT
cagtgatacctagccaaaat

SEQ ID NO: 9314 - DNA, 20 bp, Artificial Sequence
  Description of Artificial Sequence: Synthetic oligonucleotide
  Target: SCNA; (+) strand; PAM type: NNGRRT; PAM sequence: CTGAAT
taggctttgtctcttaacta

SEQ ID NO: 9315 - DNA, 20 bp, Artificial Sequence
  Description of Artificial Sequence: Synthetic oligonucleotide
  Target: SCNA; (+) strand; PAM type: NNGRRT; PAM sequence: CGGAAT
ttgtctcttaactactgaat

SEQ ID NO: 9316 - DNA, 20 bp, Artificial Sequence
  Description of Artificial Sequence: Synthetic oligonucleotide
  Target: SCNA; (+) strand; PAM type: NNGRRT; PAM sequence: GGGAGT
actactgaatcggaatcttt

SEQ ID NO: 9317 - DNA, 20 bp, Artificial Sequence
  Description of Artificial Sequence: Synthetic oligonucleotide
  Target: SCNA; (+) strand; PAM type: NNGRRT; PAM sequence: AGGAAT
atctttgggagtgaactgac

SEQ ID NO: 9318 - DNA, 20 bp, Artificial Sequence
  Description of Artificial Sequence: Synthetic oligonucleotide
  Target: SCNA; (+) strand; PAM type: NNGRRT; PAM sequence: CTGAAT
gggagtgaactgacaggaat

SEQ ID NO: 9319 - DNA, 20 bp, Artificial Sequence
  Description of Artificial Sequence: Synthetic oligonucleotide
  Target: SCNA; (+) strand; PAM type: NNGRRT; PAM sequence: GAGGAT
aaacccaaagagggacactt

SEQ ID NO: 9320 - DNA, 20 bp, Artificial Sequence
  Description of Artificial Sequence: Synthetic oligonucleotide
  Target: SCNA; (+) strand; PAM type: NNGRRT; PAM sequence: GTGAAT
ttcttttgcagagattaata

SEQ ID NO: 9321 - DNA, 20 bp, Artificial Sequence
  Description of Artificial Sequence: Synthetic oligonucleotide
  Target: SCNA; (+) strand; PAM type: NNGRRT; PAM sequence: TAGAAT
atgttgttttatctgctgtt

SEQ ID NO: 9322 - DNA, 20 bp, Artificial Sequence
  Description of Artificial Sequence: Synthetic oligonucleotide
  Target: SCNA; (+) strand; PAM type: NNGRRT; PAM sequence: TTGGAT
tttagaattttacatatgca

SEQ ID NO: 9323 - DNA, 20 bp, Artificial Sequence
  Description of Artificial Sequence: Synthetic oligonucleotide
  Target: SCNA; (+) strand; PAM type: NNGRRT; PAM sequence: CAGAGT
caatccatatgactctaaga

SEQ ID NO: 9324 - DNA, 20 bp, Artificial Sequence
  Description of Artificial Sequence: Synthetic oligonucleotide
  Target: SCNA; (+) strand; PAM type: NNGRRT; PAM sequence: TGGGAT
tttattactggtgttatcaa

SEQ ID NO: 9325 - DNA, 20 bp, Artificial Sequence
  Description of Artificial Sequence: Synthetic oligonucleotide
  Target: SCNA; (+) strand; PAM type: NNGRRT; PAM sequence: GTGGAT
gcttgcagcagcttaagtat

SEQ ID NO: 9326 - DNA, 20 bp, Artificial Sequence
  Description of Artificial Sequence: Synthetic oligonucleotide
  Target: SCNA; (+) strand; PAM type: NNGRRT; PAM sequence: AGGAAT
cttaagtatgtggataaaga

SEQ ID NO: 9327 - DNA, 20 bp, Artificial Sequence
  Description of Artificial Sequence: Synthetic oligonucleotide
  Target: SCNA; (+) strand; PAM type: NNGRRT; PAM sequence: CTGAAT
ggaatgcacaatatacggta

SEQ ID NO: 9328 - DNA, 20 bp, Artificial Sequence
  Description of Artificial Sequence: Synthetic oligonucleotide
  Target: SCNA; (+) strand; PAM type: NNGRRT; PAM sequence: CAGAAT
atttttaaaaagtggtcttt

SEQ ID NO: 9329 - DNA, 20 bp, Artificial Sequence
  Description of Artificial Sequence: Synthetic oligonucleotide
  Target: SCNA; (+) strand; PAM type: NNGRRT; PAM sequence: TGGAAT
caatgttttacattaatggc

SEQ ID NO: 9330 - DNA, 20 bp, Artificial Sequence
  Description of Artificial Sequence: Synthetic oligonucleotide
  Target: SCNA; (+) strand; PAM type: NNGRRT; PAM sequence: AGGGGT
acattttaagtgtaacagct

SEQ ID NO: 9331 - DNA, 20 bp, Artificial Sequence
  Description of Artificial Sequence: Synthetic oligonucleotide
  Target: SCNA; (+) strand; PAM type: NNGRRT; PAM sequence: TGGGAT
gcctcagcctccgtagtagc

SEQ ID NO: 9332 - DNA, 20 bp, Artificial Sequence
  Description of Artificial Sequence: Synthetic oligonucleotide
  Target: SCNA; (+) strand; PAM type: NNGRRT; PAM sequence: CAGGAT
ctccgtagtagctgggatta

SEQ ID NO: 9333 - DNA, 20 bp, Artificial Sequence
  Description of Artificial Sequence: Synthetic oligonucleotide
  Target: SCNA; (+) strand; PAM type: NNGRRT; PAM sequence: GAGAAT
taatttttgtatttttggta

SEQ ID NO: 9334 - DNA, 20 bp, Artificial Sequence
  Description of Artificial Sequence: Synthetic oligonucleotide
  Target: SCNA; (+) strand; PAM type: NNGRRT; PAM sequence: ATGGGT
ttttgtatttttggtagaga

SEQ ID NO: 9335 - DNA, 20 bp, Artificial Sequence
  Description of Artificial Sequence: Synthetic oligonucleotide
  Target: SCNA; (+) strand; PAM type: NNGRRT; PAM sequence: CTGGAT
cgccttggcctcccaaagtg

SEQ ID NO: 9336 - DNA, 20 bp, Artificial Sequence
  Description of Artificial Sequence: Synthetic oligonucleotide
  Target: SCNA; (+) strand; PAM type: NNGRRT; PAM sequence: AAGAAT
attcaagtttacacaggaaa

SEQ ID NO: 9337 - DNA, 20 bp, Artificial Sequence
  Description of Artificial Sequence: Synthetic oligonucleotide
  Target: SCNA; (+) strand; PAM type: NNGRRT; PAM sequence: CTGGAT
tcataagcctctagttctct

SEQ ID NO: 9338 - DNA, 20 bp, Artificial Sequence
  Description of Artificial Sequence: Synthetic oligonucleotide
  Target: SCNA; (+) strand; PAM type: NNGRRT; PAM sequence: CTGAAT
aattcagacaaagaaaaaaa

SEQ ID NO: 9339 - DNA, 20 bp, Artificial Sequence
  Description of Artificial Sequence: Synthetic oligonucleotide
  Target: SCNA; (+) strand; PAM type: NNGRRT; PAM sequence: TAGAAT
atatgctttcttgcaggtga

SEQ ID NO: 9340 - DNA, 20 bp, Artificial Sequence
  Description of Artificial Sequence: Synthetic oligonucleotide
  Target: SCNA; (+) strand; PAM type: NNGRRT; PAM sequence: TGGAGT
gtttgtttgtttgtttgaga

SEQ ID NO: 9341 - DNA, 20 bp, Artificial Sequence
  Description of Artificial Sequence: Synthetic oligonucleotide
  Target: SCNA; (+) strand; PAM type: NNGRRT; PAM sequence: TGGAGT
tctccctctgtagcccaggc

SEQ ID NO: 9342 - DNA, 20 bp, Artificial Sequence
  Description of Artificial Sequence: Synthetic oligonucleotide
  Target: SCNA; (+) strand; PAM type: NNGRRT; PAM sequence: CAGGAT
cccaggctggagtgcagtgg

SEQ ID NO: 9343 - DNA, 20 bp, Artificial Sequence
  Description of Artificial Sequence: Synthetic oligonucleotide
  Target: SCNA; (+) strand; PAM type: NNGRRT; PAM sequence: CCGGGT
ctcactgcaacctctgcctc

SEQ ID NO: 9344 - DNA, 20 bp, Artificial Sequence
  Description of Artificial Sequence: Synthetic oligonucleotide
  Target: SCNA; (+) strand; PAM type: NNGRRT; PAM sequence: CAGAGT
gactctcgtgcctcagcctc

SEQ ID NO: 9345 - DNA, 20 bp, Artificial Sequence
  Description of Artificial Sequence: Synthetic oligonucleotide
  Target: SCNA; (+) strand; PAM type: NNGRRT; PAM sequence: CAGGAT
gcctcagcctccagagtagc

SEQ ID NO: 9346 - DNA, 20 bp, Artificial Sequence
  Description of Artificial Sequence: Synthetic oligonucleotide
  Target: SCNA; (+) strand; PAM type: NNGRRT; PAM sequence: CAGGGT
caaggtttcaccatgttggc

SEQ ID NO: 9347 - DNA, 20 bp, Artificial Sequence
  Description of Artificial Sequence: Synthetic oligonucleotide
  Target: SCNA; (+) strand; PAM type: NNGRRT; PAM sequence: CAGAAT
aaaacttggcaataaagaaa

SEQ ID NO: 9348 - DNA, 20 bp, Artificial Sequence
  Description of Artificial Sequence: Synthetic oligonucleotide
  Target: SCNA; (+) strand; PAM type: NNGRRT; PAM sequence: TAGAAT
atctattagtcaattctctt

SEQ ID NO: 9349 - DNA, 20 bp, Artificial Sequence
  Description of Artificial Sequence: Synthetic oligonucleotide
  Target: SCNA; (+) strand; PAM type: NNGRRT; PAM sequence: TTGAAT
ctccactactaattaattag

SEQ ID NO: 9350 - DNA, 20 bp, Artificial Sequence
  Description of Artificial Sequence: Synthetic oligonucleotide
  Target: SCNA; (+) strand; PAM type: NNGRRT; PAM sequence: CTGAAT
tgctaggttcaactgaggaa

SEQ ID NO: 9351 - DNA, 20 bp, Artificial Sequence
  Description of Artificial Sequence: Synthetic oligonucleotide
  Target: SCNA; (+) strand; PAM type: NNGRRT; PAM sequence: GTGAAT
gaaaacttccataaatgatg

SEQ ID NO: 9352 - DNA, 20 bp, Artificial Sequence
  Description of Artificial Sequence: Synthetic oligonucleotide
  Target: SCNA; (+) strand; PAM type: NNGRRT; PAM sequence: ATGAAT
tctgagccatattcaatata

SEQ ID NO: 9353 - DNA, 20 bp, Artificial Sequence
  Description of Artificial Sequence: Synthetic oligonucleotide
  Target: SCNA; (+) strand; PAM type: NNGRRT; PAM sequence: CTGAAT
catattcaatataatgaatc

SEQ ID NO: 9354 - DNA, 20 bp, Artificial Sequence
  Description of Artificial Sequence: Synthetic oligonucleotide
  Target: SCNA; (+) strand; PAM type: NNGRRT; PAM sequence: AGGAGT
caatataatgaatcctgaat

SEQ ID NO: 9355 - DNA, 20 bp, Artificial Sequence
  Description of Artificial Sequence: Synthetic oligonucleotide
  Target: SCNA; (+) strand; PAM type: NNGRRT; PAM sequence: TGGGAT
taaaaaaaacccatatccca

SEQ ID NO: 9356 - DNA, 20 bp, Artificial Sequence
  Description of Artificial Sequence: Synthetic oligonucleotide
  Target: SCNA; (+) strand; PAM type: NNGRRT; PAM sequence: CAGAGT
ggcctccgaaggacaaaagc

SEQ ID NO: 9357 - DNA, 20 bp, Artificial Sequence
  Description of Artificial Sequence: Synthetic oligonucleotide
  Target: SCNA; (+) strand; PAM type: NNGRRT; PAM sequence: AGGAGT
gagttaatctaaagcaatca

SEQ ID NO: 9358 - DNA, 20 bp, Artificial Sequence
  Description of Artificial Sequence: Synthetic oligonucleotide
  Target: SCNA; (+) strand; PAM type: NNGRRT; PAM sequence: TGGAAT
cagacaaaaacatccgatat

SEQ ID NO: 9359 - DNA, 20 bp, Artificial Sequence
  Description of Artificial Sequence: Synthetic oligonucleotide
  Target: SCNA; (+) strand; PAM type: NNGRRT; PAM sequence: GTGAAT
cgatattggaatattccttc

SEQ ID NO: 9360 - DNA, 20 bp, Artificial Sequence
  Description of Artificial Sequence: Synthetic oligonucleotide
  Target: SCNA; (+) strand; PAM type: NNGRRT; PAM sequence: GAGGAT
ctactttcacagcatgctct

SEQ ID NO: 9361 - DNA, 20 bp, Artificial Sequence
  Description of Artificial Sequence: Synthetic oligonucleotide
  Target: SCNA; (+) strand; PAM type: NNGRRT; PAM sequence: TAGGAT
ggcacttatttaggcacaaa

SEQ ID NO: 9362 - DNA, 20 bp, Artificial Sequence
  Description of Artificial Sequence: Synthetic oligonucleotide
  Target: SCNA; (+) strand; PAM type: NNGRRT; PAM sequence: TGGGAT
ttatttaggcacaaatagga

SEQ ID NO: 9363 - DNA, 20 bp, Artificial Sequence
  Description of Artificial Sequence: Synthetic oligonucleotide
  Target: SCNA; (+) strand; PAM type: NNGRRT; PAM sequence: CTGAAT
aaatgtttttgagaacttgg

SEQ ID NO: 9364 - DNA, 20 bp, Artificial Sequence
  Description of Artificial Sequence: Synthetic oligonucleotide
  Target: SCNA; (+) strand; PAM type: NNGRRT; PAM sequence: CTGAGT
ttttgagaacttggctgaat

SEQ ID NO: 9365 - DNA, 20 bp, Artificial Sequence
  Description of Artificial Sequence: Synthetic oligonucleotide
  Target: SCNA; (+) strand; PAM type: NNGRRT; PAM sequence: TGGGGT
ttgtttgtatctggcacatt

SEQ ID NO: 9366 - DNA, 20 bp, Artificial Sequence
  Description of Artificial Sequence: Synthetic oligonucleotide
  Target: SCNA; (+) strand; PAM type: NNGRRT; PAM sequence: TGGAAT
ttactatagcttataagatc

SEQ ID NO: 9367 - DNA, 20 bp, Artificial Sequence
  Description of Artificial Sequence: Synthetic oligonucleotide
  Target: SCNA; (+) strand; PAM type: NNGRRT; PAM sequence: ACGAGT
cacccttaaagccttcatat

SEQ ID NO: 9368 - DNA, 20 bp, Artificial Sequence
  Description of Artificial Sequence: Synthetic oligonucleotide
  Target: SCNA; (+) strand; PAM type: NNGRRT; PAM sequence: TTGGAT
atatacgagtttgttctgcc

SEQ ID NO: 9369 - DNA, 20 bp, Artificial Sequence
  Description of Artificial Sequence: Synthetic oligonucleotide
  Target: SCNA; (+) strand; PAM type: NNGRRT; PAM sequence: ATGGAT
tgactgaacccaaatggcta

SEQ ID NO: 9370 - DNA, 20 bp, Artificial Sequence
  Description of Artificial Sequence: Synthetic oligonucleotide
  Target: SCNA; (+) strand; PAM type: NNGRRT; PAM sequence: GGGAGT
ttggggggaaaatgagaggt

SEQ ID NO: 9371 - DNA, 20 bp, Artificial Sequence
  Description of Artificial Sequence: Synthetic oligonucleotide
  Target: SCNA; (+) strand; PAM type: NNGRRT; PAM sequence: AAGAGT
aagtccttttgcagaggtac

SEQ ID NO: 9372 - DNA, 20 bp, Artificial Sequence
  Description of Artificial Sequence: Synthetic oligonucleotide
  Target: SCNA; (+) strand; PAM type: NNGRRT; PAM sequence: CTGAGT
ctgttccccagcctggctct

SEQ ID NO: 9373 - DNA, 20 bp, Artificial Sequence
  Description of Artificial Sequence: Synthetic oligonucleotide
  Target: SCNA; (+) strand; PAM type: NNGRRT; PAM sequence: AAGGGT
caaactgcaaggtcactggc

SEQ ID NO: 9374 - DNA, 20 bp, Artificial Sequence
  Description of Artificial Sequence: Synthetic oligonucleotide
  Target: SCNA; (+) strand; PAM type: NNGRRT; PAM sequence: CTGGGT
ggctgtcaggtctgaaatac

SEQ ID NO: 9375 - DNA, 20 bp, Artificial Sequence
  Description of Artificial Sequence: Synthetic oligonucleotide
  Target: SCNA; (+) strand; PAM type: NNGRRT; PAM sequence: TGGGAT
tgggttaagtaaatggcctc

SEQ ID NO: 9376 - DNA, 20 bp, Artificial Sequence
  Description of Artificial Sequence: Synthetic oligonucleotide
  Target: SCNA; (+) strand; PAM type: NNGRRT; PAM sequence: AGGAAT
caaaacagataacagcatcc

SEQ ID NO: 9377 - DNA, 20 bp, Artificial Sequence
  Description of Artificial Sequence: Synthetic oligonucleotide
  Target: SCNA; (+) strand; PAM type: NNGRRT; PAM sequence: ATGGAT
cccttcctcctagttactta

SEQ ID NO: 9378 - DNA, 20 bp, Artificial Sequence
  Description of Artificial Sequence: Synthetic oligonucleotide
  Target: SCNA; (+) strand; PAM type: NNGRRT; PAM sequence: GAGGAT
tgtcaaataaacaaacaagt

SEQ ID NO: 9379 - DNA, 20 bp, Artificial Sequence
  Description of Artificial Sequence: Synthetic oligonucleotide
  Target: SCNA; (+) strand; PAM type: NNGRRT; PAM sequence: GTGAAT
atgttgctccgaaatttaag

SEQ ID NO: 9380 - DNA, 20 bp, Artificial Sequence
  Description of Artificial Sequence: Synthetic oligonucleotide
  Target: SCNA; (+) strand; PAM type: NNGRRT; PAM sequence: TGGAAT
agtcagacttggtatcgtca

SEQ ID NO: 9381 - DNA, 20 bp, Artificial Sequence
  Description of Artificial Sequence: Synthetic oligonucleotide
  Target: SCNA; (+) strand; PAM type: NNGRRT; PAM sequence: ATGAAT
attccaactgatttggcaat

SEQ ID NO: 9382 - DNA, 20 bp, Artificial Sequence
  Description of Artificial Sequence: Synthetic oligonucleotide
  Target: SCNA; (+) strand; PAM type: NNGRRT; PAM sequence: TGGGAT
acaacatctgtttttgttct

SEQ ID NO: 9383 - DNA, 20 bp, Artificial Sequence
  Description of Artificial Sequence: Synthetic oligonucleotide
  Target: SCNA; (+) strand; PAM type: NNGRRT; PAM sequence: GAGGAT
ccagtcccctttaagtccaa

SEQ ID NO: 9384 - DNA, 20 bp, Artificial Sequence
  Description of Artificial Sequence: Synthetic oligonucleotide
  Target: SCNA; (+) strand; PAM type: NNGRRT; PAM sequence: TAGAGT
gatacaactgagaaggcagg

SEQ ID NO: 9385 - DNA, 20 bp, Artificial Sequence
  Description of Artificial Sequence: Synthetic oligonucleotide
  Target: SCNA; (+) strand; PAM type: NNGRRT; PAM sequence: CTGAAT
ggtcagtggctaggtttttc

SEQ ID NO: 9386 - DNA, 20 bp, Artificial Sequence
  Description of Artificial Sequence: Synthetic oligonucleotide
  Target: SCNA; (+) strand; PAM type: NNGRRT; PAM sequence: GAGAAT
tcaaacaaattgcctggtat

SEQ ID NO: 9387 - DNA, 20 bp, Artificial Sequence
  Description of Artificial Sequence: Synthetic oligonucleotide
  Target: SCNA; (+) strand; PAM type: NNGRRT; PAM sequence: CAGAAT
tgcctggtatgagaatttaa

SEQ ID NO: 9388 - DNA, 20 bp, Artificial Sequence
  Description of Artificial Sequence: Synthetic oligonucleotide
  Target: SCNA; (+) strand; PAM type: NNGRRT; PAM sequence: GAGGAT
caaattgctgttttaatcat

SEQ ID NO: 9389 - DNA, 20 bp, Artificial Sequence
  Description of Artificial Sequence: Synthetic oligonucleotide
  Target: SCNA; (+) strand; PAM type: NNGRRT; PAM sequence: ATGAAT
atcacacaacatgttttatc

SEQ ID NO: 9390 - DNA, 20 bp, Artificial Sequence
  Description of Artificial Sequence: Synthetic oligonucleotide
  Target: SCNA; (+) strand; PAM type: NNGRRT; PAM sequence: GTGGGT
aaaaatgtacttgttacctt

SEQ ID NO: 9391 - DNA, 20 bp, Artificial Sequence
  Description of Artificial Sequence: Synthetic oligonucleotide
  Target: SCNA; (+) strand; PAM type: NNGRRT; PAM sequence: TAGGAT
tgggtattcctgaacatgat

SEQ ID NO: 9392 - DNA, 20 bp, Artificial Sequence
  Description of Artificial Sequence: Synthetic oligonucleotide
  Target: SCNA; (+) strand; PAM type: NNGRRT; PAM sequence: CAGAAT
caagtatttttattcactca

SEQ ID NO: 9393 - DNA, 20 bp, Artificial Sequence
  Description of Artificial Sequence: Synthetic oligonucleotide
  Target: SCNA; (+) strand; PAM type: NNGRRT; PAM sequence: GAGAGT
tttgtaaaggaaataataat

SEQ ID NO: 9394 - DNA, 20 bp, Artificial Sequence
  Description of Artificial Sequence: Synthetic oligonucleotide
  Target: SCNA; (+) strand; PAM type: NNGRRT; PAM sequence: CTGAAT
aaatatttatggcactgagg

SEQ ID NO: 9395 - DNA, 20 bp, Artificial Sequence
  Description of Artificial Sequence: Synthetic oligonucleotide
  Target: SCNA; (+) strand; PAM type: NNGRRT; PAM sequence: ACGGGT
tggcactgaggctgaatcag

SEQ ID NO: 9396 - DNA, 20 bp, Artificial Sequence
  Description of Artificial Sequence: Synthetic oligonucleotide
  Target: SCNA; (+) strand; PAM type: NNGRRT; PAM sequence: GTGGGT
ggccatattgtgtagcaaca

SEQ ID NO: 9397 - DNA, 20 bp, Artificial Sequence
  Description of Artificial Sequence: Synthetic oligonucleotide
  Target: SCNA; (+) strand; PAM type: NNGRRT; PAM sequence: TCGAAT
ttgtgtagcaacagtgggtt

SEQ ID NO: 9398 - DNA, 20 bp, Artificial Sequence
  Description of Artificial Sequence: Synthetic oligonucleotide
  Target: SCNA; (+) strand; PAM type: NNGRRT; PAM sequence: ATGAAT
cttctaagtaaggcaaatat

SEQ ID NO: 9399 - DNA, 20 bp, Artificial Sequence
  Description of Artificial Sequence: Synthetic oligonucleotide
  Target: SCNA; (+) strand; PAM type: NNGRRT; PAM sequence: TTGGGT
taagtatatctatatgacca

SEQ ID NO: 9400 - DNA, 20 bp, Artificial Sequence
  Description of Artificial Sequence: Synthetic oligonucleotide
  Target: SCNA; (+) strand; PAM type: NNGRRT; PAM sequence: AAGAAT
gtcctgaacataagttttaa

SEQ ID NO: 9401 - DNA, 20 bp, Artificial Sequence
  Description of Artificial Sequence: Synthetic oligonucleotide
  Target: SCNA; (+) strand; PAM type: NNGRRT; PAM sequence: TGGAGT
aagaagcaaaaagattttta

SEQ ID NO: 9402 - DNA, 20 bp, Artificial Sequence
  Description of Artificial Sequence: Synthetic oligonucleotide
  Target: SCNA; (+) strand; PAM type: NNGRRT; PAM sequence: ATGGAT
tattttctaaacagtaaatg

SEQ ID NO: 9403 - DNA, 20 bp, Artificial Sequence
  Description of Artificial Sequence: Synthetic oligonucleotide
  Target: SCNA; (+) strand; PAM type: NNGRRT; PAM sequence: TGGGAT
aaattgctaaaattaaatgt

SEQ ID NO: 9404 - DNA, 20 bp, Artificial Sequence
  Description of Artificial Sequence: Synthetic oligonucleotide
  Target: SCNA; (+) strand; PAM type: NNGRRT; PAM sequence: TGGAAT
taaatgttgggatggaaatg

SEQ ID NO: 9405 - DNA, 20 bp, Artificial Sequence
  Description of Artificial Sequence: Synthetic oligonucleotide
  Target: SCNA; (+) strand; PAM type: NNGRRT; PAM sequence: CAGAGT
tgggatggaaatgtggaatg

SEQ ID NO: 9406 - DNA, 20 bp, Artificial Sequence
  Description of Artificial Sequence: Synthetic oligonucleotide
  Target: SCNA; (+) strand; PAM type: NNGRRT; PAM sequence: AAGAAT
cttttaatttaatattttca

SEQ ID NO: 9407 - DNA, 20 bp, Artificial Sequence
  Description of Artificial Sequence: Synthetic oligonucleotide
  Target: SCNA; (+) strand; PAM type: NNGRRT; PAM sequence: ATGAAT
ttaaaattactcaattctaa

SEQ ID NO: 9408 - DNA, 20 bp, Artificial Sequence
  Description of Artificial Sequence: Synthetic oligonucleotide
  Target: SCNA; (+) strand; PAM type: NNGRRT; PAM sequence: AAGAAT
tgcaaacctaggcttataag

SEQ ID NO: 9409 - DNA, 20 bp, Artificial Sequence
  Description of Artificial Sequence: Synthetic oligonucleotide
  Target: SCNA; (+) strand; PAM type: NNGRRT; PAM sequence: TGGAGT
ttttttttttttttttgaga

SEQ ID NO: 9410 - DNA, 20 bp, Artificial Sequence
  Description of Artificial Sequence: Synthetic oligonucleotide
  Target: SCNA; (+) strand; PAM type: NNGRRT; PAM sequence: TAGAAT
ttcgctcatgttgcctaggc

SEQ ID NO: 9411 - DNA, 20 bp, Artificial Sequence
  Description of Artificial Sequence: Synthetic oligonucleotide
  Target: SCNA; (+) strand; PAM type: NNGRRT; PAM sequence: CTGGGT
ctcactgcaaccaccgcctc

SEQ ID NO: 9412 - DNA, 20 bp, Artificial Sequence
  Description of Artificial Sequence: Synthetic oligonucleotide
  Target: SCNA; (+) strand; PAM type: NNGRRT; PAM sequence: TGGGAT
gcctcagcctccccagtagt

SEQ ID NO: 9413 - DNA, 20 bp, Artificial Sequence
  Description of Artificial Sequence: Synthetic oligonucleotide
  Target: SCNA; (+) strand; PAM type: NNGRRT; PAM sequence: TGGAGT
ttttgtatttttagtagaga

SEQ ID NO: 9414 - DNA, 20 bp, Artificial Sequence
  Description of Artificial Sequence: Synthetic oligonucleotide
  Target: SCNA; (+) strand; PAM type: NNGRRT; PAM sequence: TGGGAT
gccttggcctcccaaagtgc

SEQ ID NO: 9415 - DNA, 20 bp, Artificial Sequence
  Description of Artificial Sequence: Synthetic oligonucleotide
  Target: SCNA; (+) strand; PAM type: NNGRRT; PAM sequence: TGGAAT
tgggcaagcaaaaaattaag

SEQ ID NO: 9416 - DNA, 20 bp, Artificial Sequence
  Description of Artificial Sequence: Synthetic oligonucleotide
  Target: SCNA; (+) strand; PAM type: NNGRRT; PAM sequence: GTGAAT
gttattaacaactcaaagta

SEQ ID NO: 9417 - DNA, 20 bp, Artificial Sequence
  Description of Artificial Sequence: Synthetic oligonucleotide
  Target: SCNA; (+) strand; PAM type: NNGRRT; PAM sequence: AAGGGT
tagtgaattacatccaacta

SEQ ID NO: 9418 - DNA, 20 bp, Artificial Sequence
  Description of Artificial Sequence: Synthetic oligonucleotide
  Target: SCNA; (+) strand; PAM type: NNGRRT; PAM sequence: CTGAAT
ttatcttagcctaaggcagt

SEQ ID NO: 9419 - DNA, 20 bp, Artificial Sequence
  Description of Artificial Sequence: Synthetic oligonucleotide
  Target: SCNA; (+) strand; PAM type: NNGRRT; PAM sequence: TGGAAT
cccaaagcacataaatttgt

SEQ ID NO: 9420 - DNA, 20 bp, Artificial Sequence
  Description of Artificial Sequence: Synthetic oligonucleotide
  Target: SCNA; (+) strand; PAM type: NNGRRT; PAM sequence: CAGAAT
tctgcatacaatatttttga

SEQ ID NO: 9421 - DNA, 20 bp, Artificial Sequence
  Description of Artificial Sequence: Synthetic oligonucleotide
  Target: SCNA; (+) strand; PAM type: NNGRRT; PAM sequence: AGGAAT
atgactataagaaattcatg

SEQ ID NO: 9422 - DNA, 20 bp, Artificial Sequence
  Description of Artificial Sequence: Synthetic oligonucleotide
  Target: SCNA; (+) strand; PAM type: NNGRRT; PAM sequence: AAGGAT
caatgtcatctttacataaa

SEQ ID NO: 9423 - DNA, 20 bp, Artificial Sequence
  Description of Artificial Sequence: Synthetic oligonucleotide
  Target: SCNA; (+) strand; PAM type: NNGRRT; PAM sequence: TGGAAT
gtgtcagtaatttgagaggc

SEQ ID NO: 9424 - DNA, 20 bp, Artificial Sequence
  Description of Artificial Sequence: Synthetic oligonucleotide
  Target: SCNA; (+) strand; PAM type: NNGRRT; PAM sequence: ATGAAT
aatgtctatgtatcagtgca

SEQ ID NO: 9425 - DNA, 20 bp, Artificial Sequence
  Description of Artificial Sequence: Synthetic oligonucleotide
  Target: SCNA; (+) strand; PAM type: NNGRRT; PAM sequence: AGGAAT
atattcaagatgttcatggg

SEQ ID NO: 9426 - DNA, 20 bp, Artificial Sequence
  Description of Artificial Sequence: Synthetic oligonucleotide
  Target: SCNA; (+) strand; PAM type: NNGRRT; PAM sequence: AAGGGT
gatttgatatttaggcactg

SEQ ID NO: 9427 - DNA, 20 bp, Artificial Sequence
  Description of Artificial Sequence: Synthetic oligonucleotide
  Target: SCNA; (+) strand; PAM type: NNGRRT; PAM sequence: TTGAGT
atgatagttattatacacaa

SEQ ID NO: 9428 - DNA, 20 bp, Artificial Sequence
  Description of Artificial Sequence: Synthetic oligonucleotide
  Target: SCNA; (+) strand; PAM type: NNGRRT; PAM sequence: ATGAAT
tatacacaattgagtttaaa

SEQ ID NO: 9429 - DNA, 20 bp, Artificial Sequence
  Description of Artificial Sequence: Synthetic oligonucleotide
  Target: SCNA; (+) strand; PAM type: NNGRRT; PAM sequence: GGGAAT
ttaaatgttataaaatatga

SEQ ID NO: 9430 - DNA, 20 bp, Artificial Sequence
  Description of Artificial Sequence: Synthetic oligonucleotide
  Target: SCNA; (+) strand; PAM type: NNGRRT; PAM sequence: CTGAGT
tcaattacatagtcagaaat

SEQ ID NO: 9431 - DNA, 20 bp, Artificial Sequence
  Description of Artificial Sequence: Synthetic oligonucleotide
  Target: SCNA; (+) strand; PAM type: NNGRRT; PAM sequence: TCGAAT
tcatataaatcttcagggac

SEQ ID NO: 9432 - DNA, 20 bp, Artificial Sequence
  Description of Artificial Sequence: Synthetic oligonucleotide
  Target: SCNA; (+) strand; PAM type: NNGRRT; PAM sequence: CAGAAT
tcgaattctctcaagtgtga

SEQ ID NO: 9433 - DNA, 20 bp, Artificial Sequence
  Description of Artificial Sequence: Synthetic oligonucleotide
  Target: SCNA; (+) strand; PAM type: NNGRRT; PAM sequence: TTGAGT
tggcaaagggctctggtgtt

SEQ ID NO: 9434 - DNA, 20 bp, Artificial Sequence
  Description of Artificial Sequence: Synthetic oligonucleotide
  Target: SCNA; (+) strand; PAM type: NNGRRT; PAM sequence: AAGAAT
tgtctagctgtactctatct

SEQ ID NO: 9435 - DNA, 20 bp, Artificial Sequence
  Description of Artificial Sequence: Synthetic oligonucleotide
  Target: SCNA; (+) strand; PAM type: NNGRRT; PAM sequence: CAGGAT
agaatgatctttaaaacatt

SEQ ID NO: 9436 - DNA, 20 bp, Artificial Sequence
  Description of Artificial Sequence: Synthetic oligonucleotide
  Target: SCNA; (+) strand; PAM type: NNGRRT; PAM sequence: ATGGAT
catagccaccaggacccaat

SEQ ID NO: 9437 - DNA, 20 bp, Artificial Sequence
  Description of Artificial Sequence: Synthetic oligonucleotide
  Target: SCNA; (+) strand; PAM type: NNGRRT; PAM sequence: TGGGGT
tatggtttttttttttgaga

SEQ ID NO: 9438 - DNA, 20 bp, Artificial Sequence
  Description of Artificial Sequence: Synthetic oligonucleotide
  Target: SCNA; (+) strand; PAM type: NNGRRT; PAM sequence: GAGAGT
tcgctctgtcgttcaggctg

SEQ ID NO: 9439 - DNA, 20 bp, Artificial Sequence
  Description of Artificial Sequence: Synthetic oligonucleotide
  Target: SCNA; (+) strand; PAM type: NNGRRT; PAM sequence: CTGGGT
ctcagtgcaaactctgcctc

SEQ ID NO: 9440 - DNA, 20 bp, Artificial Sequence
  Description of Artificial Sequence: Synthetic oligonucleotide
  Target: SCNA; (+) strand; PAM type: NNGRRT; PAM sequence: CCGAGT
cattctcctgcctcagcctc

SEQ ID NO: 9441 - DNA, 20 bp, Artificial Sequence
  Description of Artificial Sequence: Synthetic oligonucleotide
  Target: SCNA; (+) strand; PAM type: NNGRRT; PAM sequence: CAGGAT
ctcccgagtagctgggacta

SEQ ID NO: 9442 - DNA, 20 bp, Artificial Sequence
  Description of Artificial Sequence: Synthetic oligonucleotide
  Target: SCNA; (+) strand; PAM type: NNGRRT; PAM sequence: CTGGGT
ttttgtatttttagtaaaga

SEQ ID NO: 9443 - DNA, 20 bp, Artificial Sequence
  Description of Artificial Sequence: Synthetic oligonucleotide
  Target: SCNA; (+) strand; PAM type: NNGRRT; PAM sequence: TAGGAT
ctgggtttcatggtgttagc

SEQ ID NO: 9444 - DNA, 20 bp, Artificial Sequence
  Description of Artificial Sequence: Synthetic oligonucleotide
  Target: SCNA; (+) strand; PAM type: NNGRRT; PAM sequence: TAGAAT
accgcgcctggcccttatta

SEQ ID NO: 9445 - DNA, 20 bp, Artificial Sequence
  Description of Artificial Sequence: Synthetic oligonucleotide
  Target: SCNA; (+) strand; PAM type: NNGRRT; PAM sequence: CTGAGT
actgggctacatttgcatcc

SEQ ID NO: 9446 - DNA, 20 bp, Artificial Sequence
  Description of Artificial Sequence: Synthetic oligonucleotide
  Target: SCNA; (+) strand; PAM type: NNGRRT; PAM sequence: GTGAAT
ttcacattggttttggtttt

SEQ ID NO: 9447 - DNA, 20 bp, Artificial Sequence
  Description of Artificial Sequence: Synthetic oligonucleotide
  Target: SCNA; (+) strand; PAM type: NNGRRT; PAM sequence: AGGAAT
tttggttttgtgaattttgg

SEQ ID NO: 9448 - DNA, 20 bp, Artificial Sequence
  Description of Artificial Sequence: Synthetic oligonucleotide
  Target: SCNA; (+) strand; PAM type: NNGRRT; PAM sequence: TGGAAT
aattttatttattgcattaa

SEQ ID NO: 9449 - DNA, 20 bp, Artificial Sequence
  Description of Artificial Sequence: Synthetic oligonucleotide
  Target: SCNA; (+) strand; PAM type: NNGRRT; PAM sequence: TGGAAT
tattcacaatagccacgata

SEQ ID NO: 9450 - DNA, 20 bp, Artificial Sequence
  Description of Artificial Sequence: Synthetic oligonucleotide
  Target: SCNA; (+) strand; PAM type: NNGRRT; PAM sequence: AAGGGT
agtgacaagatggcaaatga

SEQ ID NO: 9451 - DNA, 20 bp, Artificial Sequence
  Description of Artificial Sequence: Synthetic oligonucleotide
  Target: SCNA; (+) strand; PAM type: NNGRRT; PAM sequence: GTGGAT
aagggtcagttggttgcctg

SEQ ID NO: 9452 - DNA, 20 bp, Artificial Sequence
  Description of Artificial Sequence: Synthetic oligonucleotide
  Target: SCNA; (+) strand; PAM type: NNGRRT; PAM sequence: ATGAGT
tatcgtaaggtcaagttggt

SEQ ID NO: 9453 - DNA, 20 bp, Artificial Sequence
  Description of Artificial Sequence: Synthetic oligonucleotide
  Target: SCNA; (+) strand; PAM type: NNGRRT; PAM sequence: CTGAAT
tagaggactagaagttttat

SEQ ID NO: 9454 - DNA, 20 bp, Artificial Sequence
  Description of Artificial Sequence: Synthetic oligonucleotide
  Target: SCNA; (+) strand; PAM type: NNGRRT; PAM sequence: AGGAAT
atagtattgtcatagtggct

SEQ ID NO: 9455 - DNA, 20 bp, Artificial Sequence
  Description of Artificial Sequence: Synthetic oligonucleotide
  Target: SCNA; (+) strand; PAM type: NNGRRT; PAM sequence: GAGAGT
ttgtcatagtggctaggaat

SEQ ID NO: 9456 - DNA, 20 bp, Artificial Sequence
  Description of Artificial Sequence: Synthetic oligonucleotide
  Target: SCNA; (+) strand; PAM type: NNGRRT; PAM sequence: CTGGGT
tgatatctattatttaggaa

SEQ ID NO: 9457 - DNA, 20 bp, Artificial Sequence
  Description of Artificial Sequence: Synthetic oligonucleotide
  Target: SCNA; (+) strand; PAM type: NNGRRT; PAM sequence: CAGAAT
ctttatatcctaggtaccat

SEQ ID NO: 9458 - DNA, 20 bp, Artificial Sequence
  Description of Artificial Sequence: Synthetic oligonucleotide
  Target: SCNA; (+) strand; PAM type: NNGRRT; PAM sequence: GAGAAT
aagctcagaaaatcactaat

SEQ ID NO: 9459 - DNA, 20 bp, Artificial Sequence
  Description of Artificial Sequence: Synthetic oligonucleotide
  Target: SCNA; (+) strand; PAM type: NNGRRT; PAM sequence: AGGAAT
aaatcactaatgagaatgga

SEQ ID NO: 9460 - DNA, 20 bp, Artificial Sequence
  Description of Artificial Sequence: Synthetic oligonucleotide
  Target: SCNA; (+) strand; PAM type: NNGRRT; PAM sequence: CAGAGT
ggctaccatgctacattgct

SEQ ID NO: 9461 - DNA, 20 bp, Artificial Sequence
  Description of Artificial Sequence: Synthetic oligonucleotide
  Target: SCNA; (+) strand; PAM type: NNGRRT; PAM sequence: CAGGGT
agttcatgtagcagtttaat

SEQ ID NO: 9462 - DNA, 20 bp, Artificial Sequence
  Description of Artificial Sequence: Synthetic oligonucleotide
  Target: SCNA; (+) strand; PAM type: NNGRRT; PAM sequence: TGGAGT
gcaatgagctttgttggaac

SEQ ID NO: 9463 - DNA, 20 bp, Artificial Sequence
  Description of Artificial Sequence: Synthetic oligonucleotide
  Target: SCNA; (+) strand; PAM type: NNGRRT; PAM sequence: AAGGGT
gtgaaatatctactgtttga

SEQ ID NO: 9464 - DNA, 20 bp, Artificial Sequence
  Description of Artificial Sequence: Synthetic oligonucleotide
  Target: SCNA; (+) strand; PAM type: NNGRRT; PAM sequence: ATGAAT
tcctcaagtgttatttttta

SEQ ID NO: 9465 - DNA, 20 bp, Artificial Sequence
  Description of Artificial Sequence: Synthetic oligonucleotide
  Target: SCNA; (+) strand; PAM type: NNGRRT; PAM sequence: AAGGAT
tttgccctcagaagtattta

SEQ ID NO: 9466 - DNA, 20 bp, Artificial Sequence
  Description of Artificial Sequence: Synthetic oligonucleotide
  Target: SCNA; (+) strand; PAM type: NNGRRT; PAM sequence: ATGAAT
cactcacaaacatttgttta

SEQ ID NO: 9467 - DNA, 20 bp, Artificial Sequence
  Description of Artificial Sequence: Synthetic oligonucleotide
  Target: SCNA; (+) strand; PAM type: NNGRRT; PAM sequence: ATGAAT
cacaaacatttgtttaatga

SEQ ID NO: 9468 - DNA, 20 bp, Artificial Sequence
  Description of Artificial Sequence: Synthetic oligonucleotide
  Target: SCNA; (+) strand; PAM type: NNGRRT; PAM sequence: TTGAAT
tccaatggaaaattacactg

SEQ ID NO: 9469 - DNA, 20 bp, Artificial Sequence
  Description of Artificial Sequence: Synthetic oligonucleotide
  Target: SCNA; (+) strand; PAM type: NNGRRT; PAM sequence: TAGGAT
tctaaatttgttgatttatt

SEQ ID NO: 9470 - DNA, 20 bp, Artificial Sequence
  Description of Artificial Sequence: Synthetic oligonucleotide
  Target: SCNA; (+) strand; PAM type: NNGRRT; PAM sequence: GAGAGT
attaaagaaaggcagtgttg

SEQ ID NO: 9471 - DNA, 20 bp, Artificial Sequence
  Description of Artificial Sequence: Synthetic oligonucleotide
  Target: SCNA; (+) strand; PAM type: NNGRRT; PAM sequence: ATGAAT
gagagttttatagttgacag

SEQ ID NO: 9472 - DNA, 20 bp, Artificial Sequence
  Description of Artificial Sequence: Synthetic oligonucleotide
  Target: SCNA; (+) strand; PAM type: NNGRRT; PAM sequence: AGGAGT
tactcctacaagaaatctat

SEQ ID NO: 9473 - DNA, 20 bp, Artificial Sequence
  Description of Artificial Sequence: Synthetic oligonucleotide
  Target: SCNA; (+) strand; PAM type: NNGRRT; PAM sequence: AAGGAT
ctgtgtaaaatcaaatggga

SEQ ID NO: 9474 - DNA, 20 bp, Artificial Sequence
  Description of Artificial Sequence: Synthetic oligonucleotide
  Target: SCNA; (+) strand; PAM type: NNGRRT; PAM sequence: TAGAAT
catttctgtatataatgaca

SEQ ID NO: 9475 - DNA, 20 bp, Artificial Sequence
  Description of Artificial Sequence: Synthetic oligonucleotide
  Target: SCNA; (+) strand; PAM type: NNGRRT; PAM sequence: TTGGGT
cttgattggacattgctaaa

SEQ ID NO: 9476 - DNA, 20 bp, Artificial Sequence
  Description of Artificial Sequence: Synthetic oligonucleotide
  Target: SCNA; (+) strand; PAM type: NNGRRT; PAM sequence: TGGAAT
gtactagatctctaaagaga

SEQ ID NO: 9477 - DNA, 20 bp, Artificial Sequence
  Description of Artificial Sequence: Synthetic oligonucleotide
  Target: SCNA; (+) strand; PAM type: NNGRRT; PAM sequence: GGGAGT
ccacggctgcctgtcatttt

SEQ ID NO: 9478 - DNA, 20 bp, Artificial Sequence
  Description of Artificial Sequence: Synthetic oligonucleotide
  Target: SCNA; (+) strand; PAM type: NNGRRT; PAM sequence: AGGGAT
gtttcttatagattcttttt

SEQ ID NO: 9479 - DNA, 20 bp, Artificial Sequence
  Description of Artificial Sequence: Synthetic oligonucleotide
  Target: SCNA; (+) strand; PAM type: NNGRRT; PAM sequence: AAGAAT
tatagattctttttagggat

SEQ ID NO: 9480 - DNA, 20 bp, Artificial Sequence
  Description of Artificial Sequence: Synthetic oligonucleotide
  Target: SCNA; (+) strand; PAM type: NNGRRT; PAM sequence: TAGAAT
attatgttaaaaccagatgc

SEQ ID NO: 9481 - DNA, 20 bp, Artificial Sequence
  Description of Artificial Sequence: Synthetic oligonucleotide
  Target: SCNA; (+) strand; PAM type: NNGRRT; PAM sequence: ATGAAT
ttgacaaagaggcccaaaac

SEQ ID NO: 9482 - DNA, 20 bp, Artificial Sequence
  Description of Artificial Sequence: Synthetic oligonucleotide
  Target: SCNA; (+) strand; PAM type: NNGRRT; PAM sequence: CTGAAT
ctttataataataaccacca

SEQ ID NO: 9483 - DNA, 20 bp, Artificial Sequence
  Description of Artificial Sequence: Synthetic oligonucleotide
  Target: SCNA; (+) strand; PAM type: NNGRRT; PAM sequence: AGGGGT
tttatcaaatcttatgaaat

SEQ ID NO: 9484 - DNA, 20 bp, Artificial Sequence
  Description of Artificial Sequence: Synthetic oligonucleotide
  Target: SCNA; (+) strand; PAM type: NNGRRT; PAM sequence: CAGAGT
ctgtagaaaaccgtaggcca

SEQ ID NO: 9485 - DNA, 20 bp, Artificial Sequence
  Description of Artificial Sequence: Synthetic oligonucleotide
  Target: SCNA; (+) strand; PAM type: NNGRRT; PAM sequence: CTGAAT
aaccgtaggccacagagttc

SEQ ID NO: 9486 - DNA, 20 bp, Artificial Sequence
  Description of Artificial Sequence: Synthetic oligonucleotide
  Target: SCNA; (+) strand; PAM type: NNGRRT; PAM sequence: TTGGAT
taagaggcttagattttatt

SEQ ID NO: 9487 - DNA, 20 bp, Artificial Sequence
  Description of Artificial Sequence: Synthetic oligonucleotide
  Target: SCNA; (+) strand; PAM type: NNGRRT; PAM sequence: AAGGGT
gatgggctgggaaataattg

SEQ ID NO: 9488 - DNA, 20 bp, Artificial Sequence
  Description of Artificial Sequence: Synthetic oligonucleotide
  Target: SCNA; (+) strand; PAM type: NNGRRT; PAM sequence: GGGAAT
ataattgaagggttgtaaca

SEQ ID NO: 9489 - DNA, 20 bp, Artificial Sequence
  Description of Artificial Sequence: Synthetic oligonucleotide
  Target: SCNA; (+) strand; PAM type: NNGRRT; PAM sequence: CAGAAT
gggttgtaacagggaatgtg

SEQ ID NO: 9490 - DNA, 20 bp, Artificial Sequence
  Description of Artificial Sequence: Synthetic oligonucleotide
  Target: SCNA; (+) strand; PAM type: NNGRRT; PAM sequence: CAGAAT
ggcaagcttgaagggaggga

SEQ ID NO: 9491 - DNA, 20 bp, Artificial Sequence
  Description of Artificial Sequence: Synthetic oligonucleotide
  Target: SCNA; (+) strand; PAM type: NNGRRT; PAM sequence: GAGGAT
cccctgtgatttactggctg

SEQ ID NO: 9492 - DNA, 20 bp, Artificial Sequence
  Description of Artificial Sequence: Synthetic oligonucleotide
  Target: SCNA; (+) strand; PAM type: NNGRRT; PAM sequence: ATGAGT
tttttttacttcatgtgttc

SEQ ID NO: 9493 - DNA, 20 bp, Artificial Sequence
  Description of Artificial Sequence: Synthetic oligonucleotide
  Target: SCNA; (+) strand; PAM type: NNGRRT; PAM sequence: GGGAGT
cttcatgtgttcatgagttg

SEQ ID NO: 9494 - DNA, 20 bp, Artificial Sequence
  Description of Artificial Sequence: Synthetic oligonucleotide
  Target: SCNA; (+) strand; PAM type: NNGRRT; PAM sequence: CAGGGT
gtgttcatgagttggggagt

SEQ ID NO: 9495 - DNA, 20 bp, Artificial Sequence
  Description of Artificial Sequence: Synthetic oligonucleotide
  Target: SCNA; (+) strand; PAM type: NNGRRT; PAM sequence: GTGGGT
acacagagaccagacacaca

SEQ ID NO: 9496 - DNA, 20 bp, Artificial Sequence
  Description of Artificial Sequence: Synthetic oligonucleotide
  Target: SCNA; (+) strand; PAM type: NNGRRT; PAM sequence: ATGGAT
agacacacagtgggtgcttc

SEQ ID NO: 9497 - DNA, 20 bp, Artificial Sequence
  Description of Artificial Sequence: Synthetic oligonucleotide
  Target: SCNA; (+) strand; PAM type: NNGRRT; PAM sequence: TTGAAT
gggtgcttcatggatagctg

SEQ ID NO: 9498 - DNA, 20 bp, Artificial Sequence
  Description of Artificial Sequence: Synthetic oligonucleotide
  Target: SCNA; (+) strand; PAM type: NNGRRT; PAM sequence: GAGGGT
gaaaatcagatagcagtggt

SEQ ID NO: 9499 - DNA, 20 bp, Artificial Sequence
  Description of Artificial Sequence: Synthetic oligonucleotide
  Target: SCNA; (+) strand; PAM type: NNGRRT; PAM sequence: CTGAGT
aacttctcaaggtgccatat

SEQ ID NO: 9500 - DNA, 20 bp, Artificial Sequence
  Description of Artificial Sequence: Synthetic oligonucleotide
  Target: SCNA; (+) strand; PAM type: NNGRRT; PAM sequence: TTGAAT
ctttgatctggttcctgact

SEQ ID NO: 9501 - DNA, 20 bp, Artificial Sequence
  Description of Artificial Sequence: Synthetic oligonucleotide
  Target: SCNA; (+) strand; PAM type: NNGRRT; PAM sequence: AAGAAT
acacaaaatcccctggactt

SEQ ID NO: 9502 - DNA, 20 bp, Artificial Sequence
  Description of Artificial Sequence: Synthetic oligonucleotide
  Target: SCNA; (+) strand; PAM type: NNGRRT; PAM sequence: AAGAAT
agaatatctccacaagttat

SEQ ID NO: 9503 - DNA, 20 bp, Artificial Sequence
  Description of Artificial Sequence: Synthetic oligonucleotide
  Target: SCNA; (+) strand; PAM type: NNGRRT; PAM sequence: ATGAGT
agccagtcatcctcagctgc

SEQ ID NO: 9504 - DNA, 20 bp, Artificial Sequence
  Description of Artificial Sequence: Synthetic oligonucleotide
  Target: SCNA; (+) strand; PAM type: NNGRRT; PAM sequence: GGGGGT
agctgcatgagtctcaaaac

SEQ ID NO: 9505 - DNA, 20 bp, Artificial Sequence
  Description of Artificial Sequence: Synthetic oligonucleotide
  Target: SCNA; (+) strand; PAM type: NNGRRT; PAM sequence: GAGAGT
tgagtctcaaaacgggggtg

SEQ ID NO: 9506 - DNA, 20 bp, Artificial Sequence
  Description of Artificial Sequence: Synthetic oligonucleotide
  Target: SCNA; (+) strand; PAM type: NNGRRT; PAM sequence: AGGAGT
ggacaagaaacctggcaccc

SEQ ID NO: 9507 - DNA, 20 bp, Artificial Sequence
  Description of Artificial Sequence: Synthetic oligonucleotide
  Target: SCNA; (+) strand; PAM type: NNGRRT; PAM sequence: GAGGAT
tctccatttctgtcacttaa

SEQ ID NO: 9508 - DNA, 20 bp, Artificial Sequence
  Description of Artificial Sequence: Synthetic oligonucleotide
  Target: SCNA; (+) strand; PAM type: NNGRRT; PAM sequence: GAGAAT
ttttagggacatataacttt

SEQ ID NO: 9509 - DNA, 20 bp, Artificial Sequence
  Description of Artificial Sequence: Synthetic oligonucleotide
  Target: SCNA; (+) strand; PAM type: NNGRRT; PAM sequence: AAGAAT
gaagaaatctaaaaacagca

SEQ ID NO: 9510 - DNA, 20 bp, Artificial Sequence
  Description of Artificial Sequence: Synthetic oligonucleotide
  Target: SCNA; (+) strand; PAM type: NNGRRT; PAM sequence: CTGAGT
ttataggacatatgcttaaa

SEQ ID NO: 9511 - DNA, 20 bp, Artificial Sequence
  Description of Artificial Sequence: Synthetic oligonucleotide
  Target: SCNA; (+) strand; PAM type: NNGRRT; PAM sequence: CTGAAT
tttttctcctgtgtctgtga

SEQ ID NO: 9512 - DNA, 20 bp, Artificial Sequence
  Description of Artificial Sequence: Synthetic oligonucleotide
  Target: SCNA; (+) strand; PAM type: NNGRRT; PAM sequence: TGGAAT
aataaatggcctctgttcac

SEQ ID NO: 9513 - DNA, 20 bp, Artificial Sequence
  Description of Artificial Sequence: Synthetic oligonucleotide
  Target: SCNA; (+) strand; PAM type: NNGRRT; PAM sequence: ATGGGT
tattcagacaccaaaggcct

SEQ ID NO: 9514 - DNA, 20 bp, Artificial Sequence
  Description of Artificial Sequence: Synthetic oligonucleotide
  Target: SCNA; (+) strand; PAM type: NNGRRT; PAM sequence: GTGGAT
ttgaaaataaagtttagtaa

SEQ ID NO: 9515 - DNA, 20 bp, Artificial Sequence
  Description of Artificial Sequence: Synthetic oligonucleotide
  Target: SCNA; (+) strand; PAM type: NNGRRT; PAM sequence: TTGGAT
ttatgacttgcttttaatat

SEQ ID NO: 9516 - DNA, 20 bp, Artificial Sequence
  Description of Artificial Sequence: Synthetic oligonucleotide
  Target: SCNA; (+) strand; PAM type: NNGRRT; PAM sequence: TGGAGT
taaatttggaagctaatgta

SEQ ID NO: 9517 - DNA, 20 bp, Artificial Sequence
  Description of Artificial Sequence: Synthetic oligonucleotide
  Target: SCNA; (+) strand; PAM type: NNGRRT; PAM sequence: CCGAAT
tattagacatggctatgcat

SEQ ID NO: 9518 - DNA, 20 bp, Artificial Sequence
  Description of Artificial Sequence: Synthetic oligonucleotide
  Target: SCNA; (+) strand; PAM type: NNGRRT; PAM sequence: TTGGAT
tgcatccgaatatcttatta

SEQ ID NO: 9519 - DNA, 20 bp, Artificial Sequence
  Description of Artificial Sequence: Synthetic oligonucleotide
  Target: SCNA; (+) strand; PAM type: NNGRRT; PAM sequence: CAGAAT
tattcgattcaagaacatat

SEQ ID NO: 9520 - DNA, 20 bp, Artificial Sequence
  Description of Artificial Sequence: Synthetic oligonucleotide
  Target: SCNA; (+) strand; PAM type: NNGRRT; PAM sequence: AAGAGT
gaggtgctggagatgcaggg

SEQ ID NO: 9521 - DNA, 20 bp, Artificial Sequence
  Description of Artificial Sequence: Synthetic oligonucleotide
  Target: SCNA; (+) strand; PAM type: NNGRRT; PAM sequence: GGGGAT
tgttgtctgcagaaacagat

SEQ ID NO: 9522 - DNA, 20 bp, Artificial Sequence
  Description of Artificial Sequence: Synthetic oligonucleotide
  Target: SCNA; (+) strand; PAM type: NNGRRT; PAM sequence: AAGGGT
gcagaaacagatggggatcc

SEQ ID NO: 9523 - DNA, 20 bp, Artificial Sequence
  Description of Artificial Sequence: Synthetic oligonucleotide
  Target: SCNA; (+) strand; PAM type: NNGRRT; PAM sequence: ATGGAT
ggaaataatacagaggagag

SEQ ID NO: 9524 - DNA, 20 bp, Artificial Sequence
  Description of Artificial Sequence: Synthetic oligonucleotide
  Target: SCNA; (+) strand; PAM type: NNGRRT; PAM sequence: AAGAGT
aggagagatggattcatttg

SEQ ID NO: 9525 - DNA, 20 bp, Artificial Sequence
  Description of Artificial Sequence: Synthetic oligonucleotide
  Target: SCNA; (+) strand; PAM type: NNGRRT; PAM sequence: TTGAAT
atattgatggtgttaatcac

SEQ ID NO: 9526 - DNA, 20 bp, Artificial Sequence
  Description of Artificial Sequence: Synthetic oligonucleotide
  Target: SCNA; (+) strand; PAM type: NNGRRT; PAM sequence: AAGAAT
agggaaggacctgctgatct

SEQ ID NO: 9527 - DNA, 20 bp, Artificial Sequence
  Description of Artificial Sequence: Synthetic oligonucleotide
  Target: SCNA; (+) strand; PAM type: NNGRRT; PAM sequence: CAGAGT
ttttttttttttttttgaga

SEQ ID NO: 9528 - DNA, 20 bp, Artificial Sequence
  Description of Artificial Sequence: Synthetic oligonucleotide
  Target: SCNA; (+) strand; PAM type: NNGRRT; PAM sequence: TGGAGT
tctcgctctgtcacccaggc

SEQ ID NO: 9529 - DNA, 20 bp, Artificial Sequence
  Description of Artificial Sequence: Synthetic oligonucleotide
  Target: SCNA; (+) strand; PAM type: NNGRRT; PAM sequence: CCGGGT
ctcaccgcaacctccacctc

SEQ ID NO: 9530 - DNA, 20 bp, Artificial Sequence
  Description of Artificial Sequence: Synthetic oligonucleotide
  Target: SCNA; (+) strand; PAM type: NNGRRT; PAM sequence: TGGGGT
ttttgtatttttagtagaga

SEQ ID NO: 9531 - DNA, 20 bp, Artificial Sequence
  Description of Artificial Sequence: Synthetic oligonucleotide
  Target: SCNA; (+) strand; PAM type: NNGRRT; PAM sequence: CAGGAT
tggggtttcaccatgttagc

SEQ ID NO: 9532 - DNA, 20 bp, Artificial Sequence
  Description of Artificial Sequence: Synthetic oligonucleotide
  Target: SCNA; (+) strand; PAM type: NNGRRT; PAM sequence: TGGGAT
gcctcagcctcccaaagtgc

SEQ ID NO: 9533 - DNA, 20 bp, Artificial Sequence
  Description of Artificial Sequence: Synthetic oligonucleotide
  Target: SCNA; (+) strand; PAM type: NNGRRT; PAM sequence: CAGAAT
tgagccaccacgcctggctg

SEQ ID NO: 9534 - DNA, 20 bp, Artificial Sequence
  Description of Artificial Sequence: Synthetic oligonucleotide
  Target: SCNA; (+) strand; PAM type: NNGRRT; PAM sequence: GTGGGT
cctaggttactgttgtccat

SEQ ID NO: 9535 - DNA, 20 bp, Artificial Sequence
  Description of Artificial Sequence: Synthetic oligonucleotide
  Target: SCNA; (+) strand; PAM type: NNGRRT; PAM sequence: TTGAAT
cttgacatctgaagtgttca

SEQ ID NO: 9536 - DNA, 20 bp, Artificial Sequence
  Description of Artificial Sequence: Synthetic oligonucleotide
  Target: SCNA; (+) strand; PAM type: NNGRRT; PAM sequence: TTGAAT
tcattgaataaaaatttgta

SEQ ID NO: 9537 - DNA, 20 bp, Artificial Sequence
  Description of Artificial Sequence: Synthetic oligonucleotide
  Target: SCNA; (+) strand; PAM type: NNGRRT; PAM sequence: ATGGAT
agtacagagctatttttgaa

SEQ ID NO: 9538 - DNA, 20 bp, Artificial Sequence
  Description of Artificial Sequence: Synthetic oligonucleotide
  Target: SCNA; (+) strand; PAM type: NNGRRT; PAM sequence: GAGAAT
gagctatttttgaaatggat

SEQ ID NO: 9539 - DNA, 20 bp, Artificial Sequence
  Description of Artificial Sequence: Synthetic oligonucleotide
  Target: SCNA; (+) strand; PAM type: NNGRRT; PAM sequence: CTGAAT
gttttcagttatcattgcta

SEQ ID NO: 9540 - DNA, 20 bp, Artificial Sequence
  Description of Artificial Sequence: Synthetic oligonucleotide
  Target: SCNA; (+) strand; PAM type: NNGRRT; PAM sequence: AAGAAT
atgcttacaattgatgaagg

SEQ ID NO: 9541 - DNA, 20 bp, Artificial Sequence
  Description of Artificial Sequence: Synthetic oligonucleotide
  Target: SCNA; (+) strand; PAM type: NNGRRT; PAM sequence: ATGAAT
gaagtctattcttctcctcc

SEQ ID NO: 9542 - DNA, 20 bp, Artificial Sequence
  Description of Artificial Sequence: Synthetic oligonucleotide
  Target: SCNA; (+) strand; PAM type: NNGRRT; PAM sequence: CAGGAT
tgtcattaccagtgtttcca

SEQ ID NO: 9543 - DNA, 20 bp, Artificial Sequence
  Description of Artificial Sequence: Synthetic oligonucleotide
  Target: SCNA; (+) strand; PAM type: NNGRRT; PAM sequence: AAGAAT
aaatattggctagtgagatt

SEQ ID NO: 9544 - DNA, 20 bp, Artificial Sequence
  Description of Artificial Sequence: Synthetic oligonucleotide
  Target: SCNA; (+) strand; PAM type: NNGRRT; PAM sequence: AAGAAT
ggcaaaaccccatctctact

SEQ ID NO: 9545 - DNA, 20 bp, Artificial Sequence
  Description of Artificial Sequence: Synthetic oligonucleotide
  Target: SCNA; (+) strand; PAM type: NNGRRT; PAM sequence: TGGGGT
actaagaatacaaaaattag

SEQ ID NO: 9546 - DNA, 20 bp, Artificial Sequence
  Description of Artificial Sequence: Synthetic oligonucleotide
  Target: SCNA; (+) strand; PAM type: NNGRRT; PAM sequence: GAGAAT
tactcaagaggctgaggcag

SEQ ID NO: 9547 - DNA, 20 bp, Artificial Sequence
  Description of Artificial Sequence: Synthetic oligonucleotide
  Target: SCNA; (+) strand; PAM type: NNGRRT; PAM sequence: AAGAAT
agaaagtttatcagtctatt

SEQ ID NO: 9548 - DNA, 20 bp, Artificial Sequence
  Description of Artificial Sequence: Synthetic oligonucleotide
  Target: SCNA; (+) strand; PAM type: NNGRRT; PAM sequence: AAGAAT
atatacttgatttttacaag

SEQ ID NO: 9549 - DNA, 20 bp, Artificial Sequence
  Description of Artificial Sequence: Synthetic oligonucleotide
  Target: SCNA; (+) strand; PAM type: NNGRRT; PAM sequence: ATGAAT
aagttatttatctaaaatgt

SEQ ID NO: 9550 - DNA, 20 bp, Artificial Sequence
  Description of Artificial Sequence: Synthetic oligonucleotide
  Target: SCNA; (+) strand; PAM type: NNGRRT; PAM sequence: CTGGGT
tcttcaagatttatttttat

SEQ ID NO: 9551 - DNA, 20 bp, Artificial Sequence
  Description of Artificial Sequence: Synthetic oligonucleotide
  Target: SCNA; (+) strand; PAM type: NNGRRT; PAM sequence: TGGAGT
aagatttatttttatctggg

SEQ ID NO: 9552 - DNA, 20 bp, Artificial Sequence
  Description of Artificial Sequence: Synthetic oligonucleotide
  Target: SCNA; (+) strand; PAM type: NNGRRT; PAM sequence: CAGAGT
tttttatctgggtggagtta

SEQ ID NO: 9553 - DNA, 20 bp, Artificial Sequence
  Description of Artificial Sequence: Synthetic oligonucleotide
  Target: SCNA; (+) strand; PAM type: NNGRRT; PAM sequence: GAGAAT
aaaggagagcaatgtcagga

SEQ ID NO: 9554 - DNA, 20 bp, Artificial Sequence
  Description of Artificial Sequence: Synthetic oligonucleotide
  Target: SCNA; (+) strand; PAM type: NNGRRT; PAM sequence: GTGAAT
cctcttgcctcctgtcattt

SEQ ID NO: 9555 - DNA, 20 bp, Artificial Sequence
  Description of Artificial Sequence: Synthetic oligonucleotide
  Target: SCNA; (+) strand; PAM type: NNGRRT; PAM sequence: TAGAAT
agcatttctggcatttggtc

SEQ ID NO: 9556 - DNA, 20 bp, Artificial Sequence
  Description of Artificial Sequence: Synthetic oligonucleotide
  Target: SCNA; (+) strand; PAM type: NNGRRT; PAM sequence: GAGAGT
attgctatcaagatatggag

SEQ ID NO: 9557 - DNA, 20 bp, Artificial Sequence
  Description of Artificial Sequence: Synthetic oligonucleotide
  Target: SCNA; (+) strand; PAM type: NNGRRT; PAM sequence: CTGAAT
aaatccatacaatttctgtc

SEQ ID NO: 9558 - DNA, 20 bp, Artificial Sequence
  Description of Artificial Sequence: Synthetic oligonucleotide
  Target: SCNA; (+) strand; PAM type: NNGRRT; PAM sequence: TGGAAT
tgttttaaaactagacttgg

SEQ ID NO: 9559 - DNA, 20 bp, Artificial Sequence
  Description of Artificial Sequence: Synthetic oligonucleotide
  Target: SCNA; (+) strand; PAM type: NNGRRT; PAM sequence: GTGGAT
aatattaaacttctagaaca

SEQ ID NO: 9560 - DNA, 20 bp, Artificial Sequence
  Description of Artificial Sequence: Synthetic oligonucleotide
  Target: SCNA; (+) strand; PAM type: NNGRRT; PAM sequence: CTGAGT
actttaagactttccttaga

SEQ ID NO: 9561 - DNA, 20 bp, Artificial Sequence
  Description of Artificial Sequence: Synthetic oligonucleotide
  Target: SCNA; (+) strand; PAM type: NNGRRT; PAM sequence: TTGAAT
taaaaaaaattaaaaggaag

SEQ ID NO: 9562 - DNA, 20 bp, Artificial Sequence
  Description of Artificial Sequence: Synthetic oligonucleotide
  Target: SCNA; (+) strand; PAM type: NNGRRT; PAM sequence: ATGAAT
ttctaaacggtgcaggacaa

SEQ ID NO: 9563 - DNA, 20 bp, Artificial Sequence
  Description of Artificial Sequence: Synthetic oligonucleotide
  Target: SCNA; (+) strand; PAM type: NNGRRT; PAM sequence: AAGAGT
gtaattagtgcagtttaact

SEQ ID NO: 9564 - DNA, 20 bp, Artificial Sequence
  Description of Artificial Sequence: Synthetic oligonucleotide
  Target: SCNA; (+) strand; PAM type: NNGRRT; PAM sequence: CTGAAT
ctcatggtgtatccatgtag

SEQ ID NO: 9565 - DNA, 20 bp, Artificial Sequence
  Description of Artificial Sequence: Synthetic oligonucleotide
  Target: SCNA; (+) strand; PAM type: NNGRRT; PAM sequence: AGGAGT
ttgcttttttaatttgtata

SEQ ID NO: 9566 - DNA, 20 bp, Artificial Sequence
  Description of Artificial Sequence: Synthetic oligonucleotide
  Target: SCNA; (+) strand; PAM type: NNGRRT; PAM sequence: TTGAAT
atctctaatgtagtctctcc

SEQ ID NO: 9567 - DNA, 20 bp, Artificial Sequence
  Description of Artificial Sequence: Synthetic oligonucleotide
  Target: SCNA; (+) strand; PAM type: NNGRRT; PAM sequence: GAGAAT
tggcatataacagttgtgtt

SEQ ID NO: 9568 - DNA, 20 bp, Artificial Sequence
  Description of Artificial Sequence: Synthetic oligonucleotide
  Target: SCNA; (+) strand; PAM type: NNGRRT; PAM sequence: TTGAAT
gttgtgttgagaatttttca

SEQ ID NO: 9569 - DNA, 20 bp, Artificial Sequence
  Description of Artificial Sequence: Synthetic oligonucleotide
  Target: SCNA; (+) strand; PAM type: NNGRRT; PAM sequence: CTGAAT
tcatatctcataatccacct

SEQ ID NO: 9570 - DNA, 20 bp, Artificial Sequence
  Description of Artificial Sequence: Synthetic oligonucleotide
  Target: SCNA; (+) strand; PAM type: NNGRRT; PAM sequence: ATGAAT
aaacaacatgctgttataag

SEQ ID NO: 9571 - DNA, 20 bp, Artificial Sequence
  Description of Artificial Sequence: Synthetic oligonucleotide
  Target: SCNA; (+) strand; PAM type: NNGRRT; PAM sequence: CTGAAT
ctactcaattagcaaaaatc

SEQ ID NO: 9572 - DNA, 20 bp, Artificial Sequence
  Description of Artificial Sequence: Synthetic oligonucleotide
  Target: SCNA; (+) strand; PAM type: NNGRRT; PAM sequence: CAGAGT
tttgtttttttattttgaga

SEQ ID NO: 9573 - DNA, 20 bp, Artificial Sequence
  Description of Artificial Sequence: Synthetic oligonucleotide
  Target: SCNA; (+) strand; PAM type: NNGRRT; PAM sequence: TGGAGT
ttttgctcttttgcccaggc

SEQ ID NO: 9574 - DNA, 20 bp, Artificial Sequence
  Description of Artificial Sequence: Synthetic oligonucleotide
  Target: SCNA; (+) strand; PAM type: NNGRRT; PAM sequence: CTGAGT
ctcactgcaacctatgcctc

SEQ ID NO: 9575 - DNA, 20 bp, Artificial Sequence
  Description of Artificial Sequence: Synthetic oligonucleotide
  Target: SCNA; (+) strand; PAM type: NNGRRT; PAM sequence: CTGAGT
gattctcctttctcaactgc

SEQ ID NO: 9576 - DNA, 20 bp, Artificial Sequence
  Description of Artificial Sequence: Synthetic oligonucleotide
  Target: SCNA; (+) strand; PAM type: NNGRRT; PAM sequence: TGGGAT
ttctcaactgcctgagtagc

SEQ ID NO: 9577 - DNA, 20 bp, Artificial Sequence
  Description of Artificial Sequence: Synthetic oligonucleotide
  Target: SCNA; (+) strand; PAM type: NNGRRT; PAM sequence: CAGGAT
ttttgtacttttagtagaaa

SEQ ID NO: 9578 - DNA, 20 bp, Artificial Sequence
  Description of Artificial Sequence: Synthetic oligonucleotide
  Target: SCNA; (+) strand; PAM type: NNGRRT; PAM sequence: TAGGAT
acctcggcttcccaaagggc

SEQ ID NO: 9579 - DNA, 20 bp, Artificial Sequence
  Description of Artificial Sequence: Synthetic oligonucleotide
  Target: SCNA; (+) strand; PAM type: NNGRRT; PAM sequence: GTGGAT
gagattatgcaattttgtgt

SEQ ID NO: 9580 - DNA, 20 bp, Artificial Sequence
  Description of Artificial Sequence: Synthetic oligonucleotide
  Target: SCNA; (+) strand; PAM type: NNGRRT; PAM sequence: CAGGGT
atgcatgttgtggcaaatga

SEQ ID NO: 9581 - DNA, 20 bp, Artificial Sequence
  Description of Artificial Sequence: Synthetic oligonucleotide
  Target: SCNA; (+) strand; PAM type: NNGRRT; PAM sequence: CTGAAT
ggtcttctccttttttaagg

SEQ ID NO: 9582 - DNA, 20 bp, Artificial Sequence
  Description of Artificial Sequence: Synthetic oligonucleotide
  Target: SCNA; (+) strand; PAM type: NNGRRT; PAM sequence: ATGAAT
ctactgtaaataatgctgca

SEQ ID NO: 9583 - DNA, 20 bp, Artificial Sequence
  Description of Artificial Sequence: Synthetic oligonucleotide
  Target: SCNA; (+) strand; PAM type: NNGRRT; PAM sequence: TTGGGT
aggtgatgattttatttcct

SEQ ID NO: 9584 - DNA, 20 bp, Artificial Sequence
  Description of Artificial Sequence: Synthetic oligonucleotide
  Target: SCNA; (+) strand; PAM type: NNGRRT; PAM sequence: AGGGAT
cctttgggtacatccagagg

SEQ ID NO: 9585 - DNA, 20 bp, Artificial Sequence
  Description of Artificial Sequence: Synthetic oligonucleotide
  Target: SCNA; (+) strand; PAM type: NNGRRT; PAM sequence: CTGGGT
tacatccagaggagggattg

SEQ ID NO: 9586 - DNA, 20 bp, Artificial Sequence
  Description of Artificial Sequence: Synthetic oligonucleotide
  Target: SCNA; (+) strand; PAM type: NNGRRT; PAM sequence: AAGGGT
tatttccaccaacaatgtac

SEQ ID NO: 9587 - DNA, 20 bp, Artificial Sequence
  Description of Artificial Sequence: Synthetic oligonucleotide
  Target: SCNA; (+) strand; PAM type: NNGRRT; PAM sequence: TAGAAT
tagtataaaaactatttaca

SEQ ID NO: 9588 - DNA, 20 bp, Artificial Sequence
  Description of Artificial Sequence: Synthetic oligonucleotide
  Target: SCNA; (+) strand; PAM type: NNGRRT; PAM sequence: AGGGAT
gaagaaatgtttccacggac

SEQ ID NO: 9589 - DNA, 20 bp, Artificial Sequence
  Description of Artificial Sequence: Synthetic oligonucleotide
  Target: SCNA; (+) strand; PAM type: NNGRRT; PAM sequence: GGGAAT
acagggatggtgaggggaag

SEQ ID NO: 9590 - DNA, 20 bp, Artificial Sequence
  Description of Artificial Sequence: Synthetic oligonucleotide
  Target: SCNA; (+) strand; PAM type: NNGRRT; PAM sequence: TGGGAT
gaggggaaggggaatggttt

SEQ ID NO: 9591 - DNA, 20 bp, Artificial Sequence
  Description of Artificial Sequence: Synthetic oligonucleotide
  Target: SCNA; (+) strand; PAM type: NNGRRT; PAM sequence: TAGGGT
ctcacatgtgcagttcacaa

SEQ ID NO: 9592 - DNA, 20 bp, Artificial Sequence
  Description of Artificial Sequence: Synthetic oligonucleotide
  Target: SCNA; (+) strand; PAM type: NNGRRT; PAM sequence: TGGGGT
accagtactggtcatggccc

SEQ ID NO: 9593 - DNA, 20 bp, Artificial Sequence
  Description of Artificial Sequence: Synthetic oligonucleotide
  Target: SCNA; (+) strand; PAM type: NNGRRT; PAM sequence: GAGGAT
ccctgattgaaagtatatga

SEQ ID NO: 9594 - DNA, 20 bp, Artificial Sequence
  Description of Artificial Sequence: Synthetic oligonucleotide
  Target: SCNA; (+) strand; PAM type: NNGRRT; PAM sequence: TGGAAT
ttattatttccatttcactc

SEQ ID NO: 9595 - DNA, 20 bp, Artificial Sequence
  Description of Artificial Sequence: Synthetic oligonucleotide
  Target: SCNA; (+) strand; PAM type: NNGRRT; PAM sequence: GAGAGT
actgcatttgtatttcatct

SEQ ID NO: 9596 - DNA, 20 bp, Artificial Sequence
  Description of Artificial Sequence: Synthetic oligonucleotide
  Target: SCNA; (+) strand; PAM type: NNGRRT; PAM sequence: CCGGGT
tattttttaattttttgaga

SEQ ID NO: 9597 - DNA, 20 bp, Artificial Sequence
  Description of Artificial Sequence: Synthetic oligonucleotide
  Target: SCNA; (+) strand; PAM type: NNGRRT; PAM sequence: TGGAGT
tctttctctgtcacccagtc

SEQ ID NO: 9598 - DNA, 20 bp, Artificial Sequence
  Description of Artificial Sequence: Synthetic oligonucleotide
  Target: SCNA; (+) strand; PAM type: NNGRRT; PAM sequence: CCGGGT
gctcactgcagccccagctt

SEQ ID NO: 9599 - DNA, 20 bp, Artificial Sequence
  Description of Artificial Sequence: Synthetic oligonucleotide
  Target: SCNA; (+) strand; PAM type: NNGRRT; PAM sequence: TTGAGT
aattctcctgcttcagtttc

SEQ ID NO: 9600 - DNA, 20 bp, Artificial Sequence
  Description of Artificial Sequence: Synthetic oligonucleotide
  Target: SCNA; (+) strand; PAM type: NNGRRT; PAM sequence: TGGGAT
gcttcagtttcttgagtagc

SEQ ID NO: 9601 - DNA, 20 bp, Artificial Sequence
  Description of Artificial Sequence: Synthetic oligonucleotide
  Target: SCNA; (+) strand; PAM type: NNGRRT; PAM sequence: ATGGGT
tttctgtatttttagtagag

SEQ ID NO: 9602 - DNA, 20 bp, Artificial Sequence
  Description of Artificial Sequence: Synthetic oligonucleotide
  Target: SCNA; (+) strand; PAM type: NNGRRT; PAM sequence: TGGGAT
aacttgacctccaaaagtgc

SEQ ID NO: 9603 - DNA, 20 bp, Artificial Sequence
  Description of Artificial Sequence: Synthetic oligonucleotide
  Target: SCNA; (+) strand; PAM type: NNGRRT; PAM sequence: AAGGAT
atattctacatgaagtgata

SEQ ID NO: 9604 - DNA, 20 bp, Artificial Sequence
  Description of Artificial Sequence: Synthetic oligonucleotide
  Target: SCNA; (+) strand; PAM type: NNGRRT; PAM sequence: ACGAAT
gtacacacatacacggacac

SEQ ID NO: 9605 - DNA, 20 bp, Artificial Sequence
  Description of Artificial Sequence: Synthetic oligonucleotide
  Target: SCNA; (+) strand; PAM type: NNGRRT; PAM sequence: CTGGGT
cgaatgcacacacatgcaca

SEQ ID NO: 9606 - DNA, 20 bp, Artificial Sequence
  Description of Artificial Sequence: Synthetic oligonucleotide
  Target: SCNA; (+) strand; PAM type: NNGRRT; PAM sequence: TGGAAT
tgaaaactcagaaacttttt

SEQ ID NO: 9607 - DNA, 20 bp, Artificial Sequence
  Description of Artificial Sequence: Synthetic oligonucleotide
  Target: SCNA; (+) strand; PAM type: NNGRRT; PAM sequence: GGGAAT
agctaggactgtatttagaa

SEQ ID NO: 9608 - DNA, 20 bp, Artificial Sequence
  Description of Artificial Sequence: Synthetic oligonucleotide
  Target: SCNA; (+) strand; PAM type: NNGRRT; PAM sequence: GAGAAT
gtatttttaaaattgccata

SEQ ID NO: 9609 - DNA, 20 bp, Artificial Sequence
  Description of Artificial Sequence: Synthetic oligonucleotide
  Target: SCNA; (+) strand; PAM type: NNGRRT; PAM sequence: ATGAGT
aaaattccagctagcaaaac

SEQ ID NO: 9610 - DNA, 20 bp, Artificial Sequence
  Description of Artificial Sequence: Synthetic oligonucleotide
  Target: SCNA; (+) strand; PAM type: NNGRRT; PAM sequence: AAGGGT
tcacacgtttataactatac

SEQ ID NO: 9611 - DNA, 20 bp, Artificial Sequence
  Description of Artificial Sequence: Synthetic oligonucleotide
  Target: SCNA; (+) strand; PAM type: NNGRRT; PAM sequence: ATGAAT
gtttcatcaaagaaataagt

SEQ ID NO: 9612 - DNA, 20 bp, Artificial Sequence
  Description of Artificial Sequence: Synthetic oligonucleotide
  Target: SCNA; (+) strand; PAM type: NNGRRT; PAM sequence: CAGAAT
aagaaataagtatgaatgag

SEQ ID NO: 9613 - DNA, 20 bp, Artificial Sequence
  Description of Artificial Sequence: Synthetic oligonucleotide
  Target: SCNA; (+) strand; PAM type: NNGRRT; PAM sequence: AGGAAT
tttattcacactcggaacaa

SEQ ID NO: 9614 - DNA, 20 bp, Artificial Sequence
  Description of Artificial Sequence: Synthetic oligonucleotide
  Target: SCNA; (+) strand; PAM type: NNGRRT; PAM sequence: ATGAAT
aaaagagcaactaaaaacaa

SEQ ID NO: 9615 - DNA, 20 bp, Artificial Sequence
  Description of Artificial Sequence: Synthetic oligonucleotide
  Target: SCNA; (+) strand; PAM type: NNGRRT; PAM sequence: CTGAAT
gccacgcatcttgtcttttc

SEQ ID NO: 9616 - DNA, 20 bp, Artificial Sequence
  Description of Artificial Sequence: Synthetic oligonucleotide
  Target: SCNA; (+) strand; PAM type: NNGRRT; PAM sequence: GTGAAT
tgccccatgctttagcacat

SEQ ID NO: 9617 - DNA, 20 bp, Artificial Sequence
  Description of Artificial Sequence: Synthetic oligonucleotide
  Target: SCNA; (+) strand; PAM type: NNGRRT; PAM sequence: TAGAGT
acatcaaaggcgctggttct

SEQ ID NO: 9618 - DNA, 20 bp, Artificial Sequence
  Description of Artificial Sequence: Synthetic oligonucleotide
  Target: SCNA; (+) strand; PAM type: NNGRRT; PAM sequence: CTGGAT
tcctccaattctcgccactt

SEQ ID NO: 9619 - DNA, 20 bp, Artificial Sequence
  Description of Artificial Sequence: Synthetic oligonucleotide
  Target: SCNA; (+) strand; PAM type: NNGRRT; PAM sequence: CAGAAT
aaagtaagaggagatttctg

SEQ ID NO: 9620 - DNA, 20 bp, Artificial Sequence
  Description of Artificial Sequence: Synthetic oligonucleotide
  Target: SCNA; (+) strand; PAM type: NNGRRT; PAM sequence: GAGAAT
acaatgcttgagaaggtgca

SEQ ID NO: 9621 - DNA, 20 bp, Artificial Sequence
  Description of Artificial Sequence: Synthetic oligonucleotide
  Target: SCNA; (+) strand; PAM type: NNGRRT; PAM sequence: CAGGAT
tatatttcaggctcttcctt

SEQ ID NO: 9622 - DNA, 20 bp, Artificial Sequence
  Description of Artificial Sequence: Synthetic oligonucleotide
  Target: SCNA; (+) strand; PAM type: NNGRRT; PAM sequence: TTGAAT
gagatttctctagtttatct

SEQ ID NO: 9623 - DNA, 20 bp, Artificial Sequence
  Description of Artificial Sequence: Synthetic oligonucleotide
  Target: SCNA; (+) strand; PAM type: NNGRRT; PAM sequence: CAGAGT
aagttttatagcacctagta

SEQ ID NO: 9624 - DNA, 20 bp, Artificial Sequence
  Description of Artificial Sequence: Synthetic oligonucleotide
  Target: SCNA; (+) strand; PAM type: NNGRRT; PAM sequence: CAGAAT
tgacagctcaaaactatttg

SEQ ID NO: 9625 - DNA, 20 bp, Artificial Sequence
  Description of Artificial Sequence: Synthetic oligonucleotide
  Target: SCNA; (+) strand; PAM type: NNGRRT; PAM sequence: CAGAGT
tcttttttttttttttgaga

SEQ ID NO: 9626 - DNA, 20 bp, Artificial Sequence
  Description of Artificial Sequence: Synthetic oligonucleotide
  Target: SCNA; (+) strand; PAM type: NNGRRT; PAM sequence: CCGGGT
ctcactgcaacctctgcctc

SEQ ID NO: 9627 - DNA, 20 bp, Artificial Sequence
  Description of Artificial Sequence: Synthetic oligonucleotide
  Target: SCNA; (+) strand; PAM type: NNGRRT; PAM sequence: GGGAAT
cctcagcctcccaagtagct

SEQ ID NO: 9628 - DNA, 20 bp, Artificial Sequence
  Description of Artificial Sequence: Synthetic oligonucleotide
  Target: SCNA; (+) strand; PAM type: NNGRRT; PAM sequence: CAGGGT
ttttgtatttttagtagaga

SEQ ID NO: 9629 - DNA, 20 bp, Artificial Sequence
  Description of Artificial Sequence: Synthetic oligonucleotide
  Target: SCNA; (+) strand; PAM type: NNGRRT; PAM sequence: TGGGAT
cttggcctcccacaaagtgc

SEQ ID NO: 9630 - DNA, 20 bp, Artificial Sequence
  Description of Artificial Sequence: Synthetic oligonucleotide
  Target: SCNA; (+) strand; PAM type: NNGRRT; PAM sequence: TTGAGT
acattccaggaaaacagata

SEQ ID NO: 9631 - DNA, 20 bp, Artificial Sequence
  Description of Artificial Sequence: Synthetic oligonucleotide
  Target: SCNA; (+) strand; PAM type: NNGRRT; PAM sequence: CTGGAT
aacagatattgagtgttttg

SEQ ID NO: 9632 - DNA, 20 bp, Artificial Sequence
  Description of Artificial Sequence: Synthetic oligonucleotide
  Target: SCNA; (+) strand; PAM type: NNGRRT; PAM sequence: TTGGAT
ctgtagccagctttgattct

SEQ ID NO: 9633 - DNA, 20 bp, Artificial Sequence
  Description of Artificial Sequence: Synthetic oligonucleotide
  Target: SCNA; (+) strand; PAM type: NNGRRT; PAM sequence: CAGGGT
gtaatgtataacaatcaact

SEQ ID NO: 9634 - DNA, 20 bp, Artificial Sequence
  Description of Artificial Sequence: Synthetic oligonucleotide
  Target: SCNA; (+) strand; PAM type: NNGRRT; PAM sequence: AGGGGT
tggacttcagttttgtgggc

SEQ ID NO: 9635 - DNA, 20 bp, Artificial Sequence
  Description of Artificial Sequence: Synthetic oligonucleotide
  Target: SCNA; (+) strand; PAM type: NNGRRT; PAM sequence: CAGAAT
aaggcagtaagattttcata

SEQ ID NO: 9636 - DNA, 20 bp, Artificial Sequence
  Description of Artificial Sequence: Synthetic oligonucleotide
  Target: SCNA; (+) strand; PAM type: NNGRRT; PAM sequence: TGGGGT
aagattttcatacagaattc

SEQ ID NO: 9637 - DNA, 20 bp, Artificial Sequence
  Description of Artificial Sequence: Synthetic oligonucleotide
  Target: SCNA; (+) strand; PAM type: NNGRRT; PAM sequence: TAGAAT
tacagaattctggggttaag

SEQ ID NO: 9638 - DNA, 20 bp, Artificial Sequence
  Description of Artificial Sequence: Synthetic oligonucleotide
  Target: SCNA; (+) strand; PAM type: NNGRRT; PAM sequence: TGGAAT
tttgctggtctaagatgcaa

SEQ ID NO: 9639 - DNA, 20 bp, Artificial Sequence
  Description of Artificial Sequence: Synthetic oligonucleotide
  Target: SCNA; (+) strand; PAM type: NNGRRT; PAM sequence: CTGGAT
ggaatttggaggcaatgggg

SEQ ID NO: 9640 - DNA, 20 bp, Artificial Sequence
  Description of Artificial Sequence: Synthetic oligonucleotide
  Target: SCNA; (+) strand; PAM type: NNGRRT; PAM sequence: GAGAAT
cacggaagaggttataacgt

SEQ ID NO: 9641 - DNA, 20 bp, Artificial Sequence
  Description of Artificial Sequence: Synthetic oligonucleotide
  Target: SCNA; (+) strand; PAM type: NNGRRT; PAM sequence: AAGAGT
cacttgaaataacaatttgc

SEQ ID NO: 9642 - DNA, 20 bp, Artificial Sequence
  Description of Artificial Sequence: Synthetic oligonucleotide
  Target: SCNA; (+) strand; PAM type: NNGRRT; PAM sequence: TAGAGT
tccacattgcccactggcta

SEQ ID NO: 9643 - DNA, 20 bp, Artificial Sequence
  Description of Artificial Sequence: Synthetic oligonucleotide
  Target: SCNA; (+) strand; PAM type: NNGRRT; PAM sequence: TAGAGT
ctatagagttcaattcaaac

SEQ ID NO: 9644 - DNA, 20 bp, Artificial Sequence
  Description of Artificial Sequence: Synthetic oligonucleotide
  Target: SCNA; (+) strand; PAM type: NNGRRT; PAM sequence: CTGGGT
ccagcttcccagctccacct

SEQ ID NO: 9645 - DNA, 20 bp, Artificial Sequence
  Description of Artificial Sequence: Synthetic oligonucleotide
  Target: SCNA; (+) strand; PAM type: NNGRRT; PAM sequence: CAGAAT
ggtattctttctcttgcctt

SEQ ID NO: 9646 - DNA, 20 bp, Artificial Sequence
  Description of Artificial Sequence: Synthetic oligonucleotide
  Target: SCNA; (+) strand; PAM type: NNGRRT; PAM sequence: GAGGAT
cttgccttcagaatggtgtt

SEQ ID NO: 9647 - DNA, 20 bp, Artificial Sequence
  Description of Artificial Sequence: Synthetic oligonucleotide
  Target: SCNA; (+) strand; PAM type: NNGRRT; PAM sequence: GTGAAT
aatggtgttgaggatataag

SEQ ID NO: 9648 - DNA, 20 bp, Artificial Sequence
  Description of Artificial Sequence: Synthetic oligonucleotide
  Target: SCNA; (+) strand; PAM type: NNGRRT; PAM sequence: AAGGAT
gtgctatgggaaccaagagg

SEQ ID NO: 9649 - DNA, 20 bp, Artificial Sequence
  Description of Artificial Sequence: Synthetic oligonucleotide
  Target: SCNA; (+) strand; PAM type: NNGRRT; PAM sequence: GAGGAT
agattcagggagacttactg

SEQ ID NO: 9650 - DNA, 20 bp, Artificial Sequence
  Description of Artificial Sequence: Synthetic oligonucleotide
  Target: SCNA; (+) strand; PAM type: NNGRRT; PAM sequence: ATGAAT
tcagggagacttactggagg

SEQ ID NO: 9651 - DNA, 20 bp, Artificial Sequence
  Description of Artificial Sequence: Synthetic oligonucleotide
  Target: SCNA; (+) strand; PAM type: NNGRRT; PAM sequence: CAGGGT
aggaaaaggagacagcagca

SEQ ID NO: 9652 - DNA, 20 bp, Artificial Sequence
  Description of Artificial Sequence: Synthetic oligonucleotide
  Target: SCNA; (+) strand; PAM type: NNGRRT; PAM sequence: CTGGGT
ggtgccaaaataagaaaagc

SEQ ID NO: 9653 - DNA, 20 bp, Artificial Sequence
  Description of Artificial Sequence: Synthetic oligonucleotide
  Target: SCNA; (+) strand; PAM type: NNGRRT; PAM sequence: CAGAAT
aggcacacagaccaataaaa

SEQ ID NO: 9654 - DNA, 20 bp, Artificial Sequence
  Description of Artificial Sequence: Synthetic oligonucleotide
  Target: SCNA; (+) strand; PAM type: NNGRRT; PAM sequence: ATGGGT
aaggacatttgatgtattgt

SEQ ID NO: 9655 - DNA, 20 bp, Artificial Sequence
  Description of Artificial Sequence: Synthetic oligonucleotide
  Target: SCNA; (+) strand; PAM type: NNGRRT; PAM sequence: ATGGAT
ttagtggcaaaaagactaat

SEQ ID NO: 9656 - DNA, 20 bp, Artificial Sequence
  Description of Artificial Sequence: Synthetic oligonucleotide
  Target: SCNA; (+) strand; PAM type: NNGRRT; PAM sequence: ATGGGT
ctatctgagacagctttgta

SEQ ID NO: 9657 - DNA, 20 bp, Artificial Sequence
  Description of Artificial Sequence: Synthetic oligonucleotide
  Target: SCNA; (+) strand; PAM type: NNGRRT; PAM sequence: TAGAAT
tagtagtggagcctggtgca

SEQ ID NO: 9658 - DNA, 20 bp, Artificial Sequence
  Description of Artificial Sequence: Synthetic oligonucleotide
  Target: SCNA; (+) strand; PAM type: NNGRRT; PAM sequence: AGGGGT
catatgaggcctttcctgag

SEQ ID NO: 9659 - DNA, 20 bp, Artificial Sequence
  Description of Artificial Sequence: Synthetic oligonucleotide
  Target: SCNA; (+) strand; PAM type: NNGRRT; PAM sequence: TAGGAT
ggtgcctcagtttttacacc

SEQ ID NO: 9660 - DNA, 20 bp, Artificial Sequence
  Description of Artificial Sequence: Synthetic oligonucleotide
  Target: SCNA; (+) strand; PAM type: NNGRRT; PAM sequence: TTGAAT
tttacacctaggatgctatt

SEQ ID NO: 9661 - DNA, 20 bp, Artificial Sequence
  Description of Artificial Sequence: Synthetic oligonucleotide
  Target: SCNA; (+) strand; PAM type: NNGRRT; PAM sequence: TTGGGT
agtatctgtactcacttagt

SEQ ID NO: 9662 - DNA, 20 bp, Artificial Sequence
  Description of Artificial Sequence: Synthetic oligonucleotide
  Target: SCNA; (+) strand; PAM type: NNGRRT; PAM sequence: CAGGAT
cctactccttgatggccttc

SEQ ID NO: 9663 - DNA, 20 bp, Artificial Sequence
  Description of Artificial Sequence: Synthetic oligonucleotide
  Target: SCNA; (+) strand; PAM type: NNGRRT; PAM sequence: ACGGAT
tggacatcccttcctgcctc

SEQ ID NO: 9664 - DNA, 20 bp, Artificial Sequence
  Description of Artificial Sequence: Synthetic oligonucleotide
  Target: SCNA; (+) strand; PAM type: NNGRRT; PAM sequence: CTGGAT
gtgtgtatgtttggttttta

SEQ ID NO: 9665 - DNA, 20 bp, Artificial Sequence
  Description of Artificial Sequence: Synthetic oligonucleotide
  Target: SCNA; (+) strand; PAM type: NNGRRT; PAM sequence: ACGAAT
gataacaagtgctaaagatg

SEQ ID NO: 9666 - DNA, 20 bp, Artificial Sequence
  Description of Artificial Sequence: Synthetic oligonucleotide
  Target: SCNA; (+) strand; PAM type: NNGRRT; PAM sequence: AAGAGT
taaagatgacgaatattctg

SEQ ID NO: 9667 - DNA, 20 bp, Artificial Sequence
  Description of Artificial Sequence: Synthetic oligonucleotide
  Target: SCNA; (+) strand; PAM type: NNGRRT; PAM sequence: CAGAAT
tgaagagttttcaggacaca

SEQ ID NO: 9668 - DNA, 20 bp, Artificial Sequence
  Description of Artificial Sequence: Synthetic oligonucleotide
  Target: SCNA; (+) strand; PAM type: NNGRRT; PAM sequence: TGGGGT
agatatttcatgttatatag

SEQ ID NO: 9669 - DNA, 20 bp, Artificial Sequence
  Description of Artificial Sequence: Synthetic oligonucleotide
  Target: SCNA; (+) strand; PAM type: NNGRRT; PAM sequence: GGGAAT
gtcattaaggacttatttga

SEQ ID NO: 9670 - DNA, 20 bp, Artificial Sequence
  Description of Artificial Sequence: Synthetic oligonucleotide
  Target: SCNA; (+) strand; PAM type: NNGRRT; PAM sequence: AAGAAT
tctaaagtcaagatgaagga

SEQ ID NO: 9671 - DNA, 20 bp, Artificial Sequence
  Description of Artificial Sequence: Synthetic oligonucleotide
  Target: SCNA; (+) strand; PAM type: NNGRRT; PAM sequence: AAGAAT
aaacaaaataattatcagcc

SEQ ID NO: 9672 - DNA, 20 bp, Artificial Sequence
  Description of Artificial Sequence: Synthetic oligonucleotide
  Target: SCNA; (+) strand; PAM type: NNGRRT; PAM sequence: CTGAAT
ctttttcagacaaacaaatg

SEQ ID NO: 9673 - DNA, 20 bp, Artificial Sequence
  Description of Artificial Sequence: Synthetic oligonucleotide
  Target: SCNA; (+) strand; PAM type: NNGRRT; PAM sequence: TTGAAT
ctaaatcttgaaacagtaac

SEQ ID NO: 9674 - DNA, 20 bp, Artificial Sequence
  Description of Artificial Sequence: Synthetic oligonucleotide
  Target: SCNA; (+) strand; PAM type: NNGRRT; PAM sequence: ATGAAT
ttgaggcaacaactatcatg

SEQ ID NO: 9675 - DNA, 20 bp, Artificial Sequence
  Description of Artificial Sequence: Synthetic oligonucleotide
  Target: SCNA; (+) strand; PAM type: NNGRRT; PAM sequence: TTGAAT
ctcatacctcaatactaatg

SEQ ID NO: 9676 - DNA, 20 bp, Artificial Sequence
  Description of Artificial Sequence: Synthetic oligonucleotide
  Target: SCNA; (+) strand; PAM type: NNGRRT; PAM sequence: CAGAAT
aatgctccacttaaaagata

SEQ ID NO: 9677 - DNA, 20 bp, Artificial Sequence
  Description of Artificial Sequence: Synthetic oligonucleotide
  Target: SCNA; (+) strand; PAM type: NNGRRT; PAM sequence: CAGAAT
acttaaaagatacagaatgg

SEQ ID NO: 9678 - DNA, 20 bp, Artificial Sequence
  Description of Artificial Sequence: Synthetic oligonucleotide
  Target: SCNA; (+) strand; PAM type: NNGRRT; PAM sequence: ATGGAT
aaaagatacagaatggcaga

SEQ ID NO: 9679 - DNA, 20 bp, Artificial Sequence
  Description of Artificial Sequence: Synthetic oligonucleotide
  Target: SCNA; (+) strand; PAM type: NNGRRT; PAM sequence: AGGGGT
ctcacataaacttaaggtaa

SEQ ID NO: 9680 - DNA, 20 bp, Artificial Sequence
  Description of Artificial Sequence: Synthetic oligonucleotide
  Target: SCNA; (+) strand; PAM type: NNGRRT; PAM sequence: AAGAAT
aatggaaactcaaagtgaga

SEQ ID NO: 9681 - DNA, 20 bp, Artificial Sequence
  Description of Artificial Sequence: Synthetic oligonucleotide
  Target: SCNA; (+) strand; PAM type: NNGRRT; PAM sequence: TGGAAT
acatccttttcatcaacaca

SEQ ID NO: 9682 - DNA, 20 bp, Artificial Sequence
  Description of Artificial Sequence: Synthetic oligonucleotide
  Target: SCNA; (+) strand; PAM type: NNGRRT; PAM sequence: TGGAAT
agtattctctcagaccacag

SEQ ID NO: 9683 - DNA, 20 bp, Artificial Sequence
  Description of Artificial Sequence: Synthetic oligonucleotide
  Target: SCNA; (+) strand; PAM type: NNGRRT; PAM sequence: TCGAAT
actatacaaatacatggaaa

SEQ ID NO: 9684 - DNA, 20 bp, Artificial Sequence
  Description of Artificial Sequence: Synthetic oligonucleotide
  Target: SCNA; (+) strand; PAM type: NNGRRT; PAM sequence: CTGAAT
ggaaatcgaataatctgctc

SEQ ID NO: 9685 - DNA, 20 bp, Artificial Sequence
  Description of Artificial Sequence: Synthetic oligonucleotide
  Target: SCNA; (+) strand; PAM type: NNGRRT; PAM sequence: TTGGGT
aatctgctcctgaatgatct

SEQ ID NO: 9686 - DNA, 20 bp, Artificial Sequence
  Description of Artificial Sequence: Synthetic oligonucleotide
  Target: SCNA; (+) strand; PAM type: NNGRRT; PAM sequence: TTGAAT
gatgaaaattttaaaaatat

SEQ ID NO: 9687 - DNA, 20 bp, Artificial Sequence
  Description of Artificial Sequence: Synthetic oligonucleotide
  Target: SCNA; (+) strand; PAM type: NNGRRT; PAM sequence: TGGGAT
acaaaacctatcacaacctc

SEQ ID NO: 9688 - DNA, 20 bp, Artificial Sequence
  Description of Artificial Sequence: Synthetic oligonucleotide
  Target: SCNA; (+) strand; PAM type: NNGRRT; PAM sequence: CAGAAT
agaaaagaaataacaaagat

SEQ ID NO: 9689 - DNA, 20 bp, Artificial Sequence
  Description of Artificial Sequence: Synthetic oligonucleotide
  Target: SCNA; (+) strand; PAM type: NNGRRT; PAM sequence: TTGAGT
cagaatagaaataaataaaa

SEQ ID NO: 9690 - DNA, 20 bp, Artificial Sequence
  Description of Artificial Sequence: Synthetic oligonucleotide
  Target: SCNA; (+) strand; PAM type: NNGRRT; PAM sequence: GCGGAT
actttgggaggccaaggcag

SEQ ID NO: 9691 - DNA, 20 bp, Artificial Sequence
  Description of Artificial Sequence: Synthetic oligonucleotide
  Target: SCNA; (+) strand; PAM type: NNGRRT; PAM sequence: AGGAGT
caggcggatcaccataagtc

SEQ ID NO: 9692 - DNA, 20 bp, Artificial Sequence
  Description of Artificial Sequence: Synthetic oligonucleotide
  Target: SCNA; (+) strand; PAM type: NNGRRT; PAM sequence: GAGAAT
tactcgggcagctgaggcaa

SEQ ID NO: 9693 - DNA, 20 bp, Artificial Sequence
  Description of Artificial Sequence: Synthetic oligonucleotide
  Target: SCNA; (+) strand; PAM type: NNGRRT; PAM sequence: CTGGGT
tcatactgttgcattccagc

SEQ ID NO: 9694 - DNA, 20 bp, Artificial Sequence
  Description of Artificial Sequence: Synthetic oligonucleotide
  Target: SCNA; (+) strand; PAM type: NNGRRT; PAM sequence: AAGAGT
tgcattccagcctgggtaac

SEQ ID NO: 9695 - DNA, 20 bp, Artificial Sequence
  Description of Artificial Sequence: Synthetic oligonucleotide
  Target: SCNA; (+) strand; PAM type: NNGRRT; PAM sequence: GAGAGT
acagaccaataatgcatagt

SEQ ID NO: 9696 - DNA, 20 bp, Artificial Sequence
  Description of Artificial Sequence: Synthetic oligonucleotide
  Target: SCNA; (+) strand; PAM type: NNGRRT; PAM sequence: ATGGAT
caaaaaaagtctaggaccag

SEQ ID NO: 9697 - DNA, 20 bp, Artificial Sequence
  Description of Artificial Sequence: Synthetic oligonucleotide
  Target: SCNA; (+) strand; PAM type: NNGRRT; PAM sequence: GTGAAT
aggaccagatggattcacag

SEQ ID NO: 9698 - DNA, 20 bp, Artificial Sequence
  Description of Artificial Sequence: Synthetic oligonucleotide
  Target: SCNA; (+) strand; PAM type: NNGRRT; PAM sequence: GGGAAT
ttccaaaagatagagacaga

SEQ ID NO: 9699 - DNA, 20 bp, Artificial Sequence
  Description of Artificial Sequence: Synthetic oligonucleotide
  Target: SCNA; (+) strand; PAM type: NNGRRT; PAM sequence: ATGAAT
ctcaataaaatactagctaa

SEQ ID NO: 9700 - DNA, 20 bp, Artificial Sequence
  Description of Artificial Sequence: Synthetic oligonucleotide
  Target: SCNA; (+) strand; PAM type: NNGRRT; PAM sequence: GTGGGT
agataatccaccatgatcag

SEQ ID NO: 9701 - DNA, 20 bp, Artificial Sequence
  Description of Artificial Sequence: Synthetic oligonucleotide
  Target: SCNA; (+) strand; PAM type: NNGRRT; PAM sequence: GGGGAT
gatcaggtgggtttcatacc

SEQ ID NO: 9702 - DNA, 20 bp, Artificial Sequence
  Description of Artificial Sequence: Synthetic oligonucleotide
  Target: SCNA; (+) strand; PAM type: NNGRRT; PAM sequence: CAGGGT
tgggtttcataccggggatg

SEQ ID NO: 9703 - DNA, 20 bp, Artificial Sequence
  Description of Artificial Sequence: Synthetic oligonucleotide
  Target: SCNA; (+) strand; PAM type: NNGRRT; PAM sequence: AGGAGT
atgtgatacaccatataagc

SEQ ID NO: 9704 - DNA, 20 bp, Artificial Sequence
  Description of Artificial Sequence: Synthetic oligonucleotide
  Target: SCNA; (+) strand; PAM type: NNGRRT; PAM sequence: TGGAAT
aaagcatttcccccgagaac

SEQ ID NO: 9705 - DNA, 20 bp, Artificial Sequence
  Description of Artificial Sequence: Synthetic oligonucleotide
  Target: SCNA; (+) strand; PAM type: NNGRRT; PAM sequence: AAGAAT
cccgagaactggaataagac

SEQ ID NO: 9706 - DNA, 20 bp, Artificial Sequence
  Description of Artificial Sequence: Synthetic oligonucleotide
  Target: SCNA; (+) strand; PAM type: NNGRRT; PAM sequence: GAGAAT
acaccaacagcaacaaaact

SEQ ID NO: 9707 - DNA, 20 bp, Artificial Sequence
  Description of Artificial Sequence: Synthetic oligonucleotide
  Target: SCNA; (+) strand; PAM type: NNGRRT; PAM sequence: AGGAAT
tgcaaaaaaaaaaaatgctt

SEQ ID NO: 9708 - DNA, 20 bp, Artificial Sequence
  Description of Artificial Sequence: Synthetic oligonucleotide
  Target: SCNA; (+) strand; PAM type: NNGRRT; PAM sequence: ATGGAT
tgaaaacacatcccttattc

SEQ ID NO: 9709 - DNA, 20 bp, Artificial Sequence
  Description of Artificial Sequence: Synthetic oligonucleotide
  Target: SCNA; (+) strand; PAM type: NNGRRT; PAM sequence: CAGAAT
atcccttattcatggattgg

SEQ ID NO: 9710 - DNA, 20 bp, Artificial Sequence
  Description of Artificial Sequence: Synthetic oligonucleotide
  Target: SCNA; (+) strand; PAM type: NNGRRT; PAM sequence: CAGAAT
agacatgtagatcaatggag

SEQ ID NO: 9711 - DNA, 20 bp, Artificial Sequence
  Description of Artificial Sequence: Synthetic oligonucleotide
  Target: SCNA; (+) strand; PAM type: NNGRRT; PAM sequence: TGGGAT
tcctattcaacaaatggtgt

SEQ ID NO: 9712 - DNA, 20 bp, Artificial Sequence
  Description of Artificial Sequence: Synthetic oligonucleotide
  Target: SCNA; (+) strand; PAM type: NNGRRT; PAM sequence: AAGAAT
aattggcaagccacatgtag

SEQ ID NO: 9713 - DNA, 20 bp, Artificial Sequence
  Description of Artificial Sequence: Synthetic oligonucleotide
  Target: SCNA; (+) strand; PAM type: NNGRRT; PAM sequence: CTGGAT
ccacatgtagaagaatgaag

SEQ ID NO: 9714 - DNA, 20 bp, Artificial Sequence
  Description of Artificial Sequence: Synthetic oligonucleotide
  Target: SCNA; (+) strand; PAM type: NNGRRT; PAM sequence: ATGGAT
tatacaaaaatccactcaag

SEQ ID NO: 9715 - DNA, 20 bp, Artificial Sequence
  Description of Artificial Sequence: Synthetic oligonucleotide
  Target: SCNA; (+) strand; PAM type: NNGRRT; PAM sequence: AAGAGT
tctagacactggcttaagca

SEQ ID NO: 9716 - DNA, 20 bp, Artificial Sequence
  Description of Artificial Sequence: Synthetic oligonucleotide
  Target: SCNA; (+) strand; PAM type: NNGRRT; PAM sequence: CAGAGT
acagcaaaagaaataatcat

SEQ ID NO: 9717 - DNA, 20 bp, Artificial Sequence
  Description of Artificial Sequence: Synthetic oligonucleotide
  Target: SCNA; (+) strand; PAM type: NNGRRT; PAM sequence: CAGAAT
cagagtaaacagacaaccca

SEQ ID NO: 9718 - DNA, 20 bp, Artificial Sequence
  Description of Artificial Sequence: Synthetic oligonucleotide
  Target: SCNA; (+) strand; PAM type: NNGRRT; PAM sequence: CAGAAT
tctgacaaaggactaatatc

SEQ ID NO: 9719 - DNA, 20 bp, Artificial Sequence
  Description of Artificial Sequence: Synthetic oligonucleotide
  Target: SCNA; (+) strand; PAM type: NNGRRT; PAM sequence: ATGAAT
tcaaaaagtgggctaaggac

SEQ ID NO: 9720 - DNA, 20 bp, Artificial Sequence
  Description of Artificial Sequence: Synthetic oligonucleotide
  Target: SCNA; (+) strand; PAM type: NNGRRT; PAM sequence: AAGAAT
tgataccaccttactcctgc

SEQ ID NO: 9721 - DNA, 20 bp, Artificial Sequence
  Description of Artificial Sequence: Synthetic oligonucleotide
  Target: SCNA; (+) strand; PAM type: NNGRRT; PAM sequence: AGGAAT
catttttttacactgctggt

SEQ ID NO: 9722 - DNA, 20 bp, Artificial Sequence
  Description of Artificial Sequence: Synthetic oligonucleotide
  Target: SCNA; (+) strand; PAM type: NNGRRT; PAM sequence: ATGAGT
gcctaaatacccatcaacca

SEQ ID NO: 9723 - DNA, 20 bp, Artificial Sequence
  Description of Artificial Sequence: Synthetic oligonucleotide
  Target: SCNA; (+) strand; PAM type: NNGRRT; PAM sequence: GTGGAT
aaatacccatcaaccaatga

SEQ ID NO: 9724 - DNA, 20 bp, Artificial Sequence
  Description of Artificial Sequence: Synthetic oligonucleotide
  Target: SCNA; (+) strand; PAM type: NNGRRT; PAM sequence: GGGGGT
catatatatataaagcatag

SEQ ID NO: 9725 - DNA, 20 bp, Artificial Sequence
  Description of Artificial Sequence: Synthetic oligonucleotide
  Target: SCNA; (+) strand; PAM type: NNGRRT; PAM sequence: GTGGAT
taaagcataggggggtgtgt

SEQ ID NO: 9726 - DNA, 20 bp, Artificial Sequence
  Description of Artificial Sequence: Synthetic oligonucleotide
  Target: SCNA; (+) strand; PAM type: NNGRRT; PAM sequence: TGGAAT
gggggtgtgtgtggatgcta

SEQ ID NO: 9727 - DNA, 20 bp, Artificial Sequence
  Description of Artificial Sequence: Synthetic oligonucleotide
  Target: SCNA; (+) strand; PAM type: NNGRRT; PAM sequence: TAGAGT
ggcatttgtagctacgtaga

SEQ ID NO: 9728 - DNA, 20 bp, Artificial Sequence
  Description of Artificial Sequence: Synthetic oligonucleotide
  Target: SCNA; (+) strand; PAM type: NNGRRT; PAM sequence: AGGAGT
tattctaagtgaagtaactc

SEQ ID NO: 9729 - DNA, 20 bp, Artificial Sequence
  Description of Artificial Sequence: Synthetic oligonucleotide
  Target: SCNA; (+) strand; PAM type: NNGRRT; PAM sequence: AAGGAT
tataactgccacctaaacta

SEQ ID NO: 9730 - DNA, 20 bp, Artificial Sequence
  Description of Artificial Sequence: Synthetic oligonucleotide
  Target: SCNA; (+) strand; PAM type: NNGRRT; PAM sequence: AAGAAT
actaaaggatgcaaaggcat

SEQ ID NO: 9731 - DNA, 20 bp, Artificial Sequence
  Description of Artificial Sequence: Synthetic oligonucleotide
  Target: SCNA; (+) strand; PAM type: NNGRRT; PAM sequence: AAGGGT
gactctggagacttgagggg

SEQ ID NO: 9732 - DNA, 20 bp, Artificial Sequence
  Description of Artificial Sequence: Synthetic oligonucleotide
  Target: SCNA; (+) strand; PAM type: NNGRRT; PAM sequence: AGGAAT
ggaagggtgggaggaaggtg

SEQ ID NO: 9733 - DNA, 20 bp, Artificial Sequence
  Description of Artificial Sequence: Synthetic oligonucleotide
  Target: SCNA; (+) strand; PAM type: NNGRRT; PAM sequence: TTGGGT
gaggaatgaaagactacaca

SEQ ID NO: 9734 - DNA, 20 bp, Artificial Sequence
  Description of Artificial Sequence: Synthetic oligonucleotide
  Target: SCNA; (+) strand; PAM type: NNGRRT; PAM sequence: ATGAGT
cagtgtatgctgctcaggtt

SEQ ID NO: 9735 - DNA, 20 bp, Artificial Sequence
  Description of Artificial Sequence: Synthetic oligonucleotide
  Target: SCNA; (+) strand; PAM type: NNGRRT; PAM sequence: CTGAGT
ttataaagccctgaaggcaa

SEQ ID NO: 9736 - DNA, 20 bp, Artificial Sequence
  Description of Artificial Sequence: Synthetic oligonucleotide
  Target: SCNA; (+) strand; PAM type: NNGRRT; PAM sequence: CTGAAT
agaggcccaataagtgattg

SEQ ID NO: 9737 - DNA, 20 bp, Artificial Sequence
  Description of Artificial Sequence: Synthetic oligonucleotide
  Target: SCNA; (+) strand; PAM type: NNGRRT; PAM sequence: CTGAAT
tgctgaattgaaatgctgaa

SEQ ID NO: 9738 - DNA, 20 bp, Artificial Sequence
  Description of Artificial Sequence: Synthetic oligonucleotide
  Target: SCNA; (+) strand; PAM type: NNGRRT; PAM sequence: AAGAAT
tatacccttacacaaaatat

SEQ ID NO: 9739 - DNA, 20 bp, Artificial Sequence
  Description of Artificial Sequence: Synthetic oligonucleotide
  Target: SCNA; (+) strand; PAM type: NNGRRT; PAM sequence: ATGAGT
aaacaaaactaagtgtccaa

SEQ ID NO: 9740 - DNA, 20 bp, Artificial Sequence
  Description of Artificial Sequence: Synthetic oligonucleotide
  Target: SCNA; (+) strand; PAM type: NNGRRT; PAM sequence: CAGAAT
actaagtgtccaaatgagtg

SEQ ID NO: 9741 - DNA, 20 bp, Artificial Sequence
  Description of Artificial Sequence: Synthetic oligonucleotide
  Target: SCNA; (+) strand; PAM type: NNGRRT; PAM sequence: GAGGAT
ggtaagtgactctgtaataa

SEQ ID NO: 9742 - DNA, 20 bp, Artificial Sequence
  Description of Artificial Sequence: Synthetic oligonucleotide
  Target: SCNA; (+) strand; PAM type: NNGRRT; PAM sequence: AAGAAT
tttatatttcatttctaaat

SEQ ID NO: 9743 - DNA, 20 bp, Artificial Sequence
  Description of Artificial Sequence: Synthetic oligonucleotide
  Target: SCNA; (+) strand; PAM type: NNGRRT; PAM sequence: AGGAAT
ccagagcgcactgtttcatt

SEQ ID NO: 9744 - DNA, 20 bp, Artificial Sequence
  Description of Artificial Sequence: Synthetic oligonucleotide
  Target: SCNA; (+) strand; PAM type: NNGRRT; PAM sequence: GAGAAT
atagtgaaattgagcaatgt

SEQ ID NO: 9745 - DNA, 20 bp, Artificial Sequence
  Description of Artificial Sequence: Synthetic oligonucleotide
  Target: SCNA; (+) strand; PAM type: NNGRRT; PAM sequence: GTGAAT
ccccaggtggttactccttt

SEQ ID NO: 9746 - DNA, 20 bp, Artificial Sequence
  Description of Artificial Sequence: Synthetic oligonucleotide
  Target: SCNA; (+) strand; PAM type: NNGRRT; PAM sequence: TAGAAT
gtctgaagtacaaattgttg

SEQ ID NO: 9747 - DNA, 20 bp, Artificial Sequence
  Description of Artificial Sequence: Synthetic oligonucleotide
  Target: SCNA; (+) strand; PAM type: NNGRRT; PAM sequence: AAGAAT
tcctatcactttggtgtgag

SEQ ID NO: 9748 - DNA, 20 bp, Artificial Sequence
  Description of Artificial Sequence: Synthetic oligonucleotide
  Target: SCNA; (+) strand; PAM type: NNGRRT; PAM sequence: TCGGGT
tcactttggtgtgagaagaa

SEQ ID NO: 9749 - DNA, 20 bp, Artificial Sequence
  Description of Artificial Sequence: Synthetic oligonucleotide
  Target: SCNA; (+) strand; PAM type: NNGRRT; PAM sequence: TAGAAT
aggcttgcaccagttatcaa

SEQ ID NO: 9750 - DNA, 20 bp, Artificial Sequence
  Description of Artificial Sequence: Synthetic oligonucleotide
  Target: SCNA; (+) strand; PAM type: NNGRRT; PAM sequence: GAGAAT
taagaaagatttttaagaag

SEQ ID NO: 9751 - DNA, 20 bp, Artificial Sequence
  Description of Artificial Sequence: Synthetic oligonucleotide
  Target: SCNA; (+) strand; PAM type: NNGRRT; PAM sequence: ACGGAT
ttcaccagaaaataggaaag

SEQ ID NO: 9752 - DNA, 20 bp, Artificial Sequence
  Description of Artificial Sequence: Synthetic oligonucleotide
  Target: SCNA; (+) strand; PAM type: NNGRRT; PAM sequence: TTGGGT
cagaaaataggaaagacgga

SEQ ID NO: 9753 - DNA, 20 bp, Artificial Sequence
  Description of Artificial Sequence: Synthetic oligonucleotide
  Target: SCNA; (+) strand; PAM type: NNGRRT; PAM sequence: TTGAAT
tgagaaaacacacatttctt

SEQ ID NO: 9754 - DNA, 20 bp, Artificial Sequence
  Description of Artificial Sequence: Synthetic oligonucleotide
  Target: SCNA; (+) strand; PAM type: NNGRRT; PAM sequence: ACGGAT
tcttgatgtatatatttttg

SEQ ID NO: 9755 - DNA, 20 bp, Artificial Sequence
  Description of Artificial Sequence: Synthetic oligonucleotide
  Target: SCNA; (+) strand; PAM type: NNGRRT; PAM sequence: ATGAAT
gctattgtttctgtagccaa

SEQ ID NO: 9756 - DNA, 20 bp, Artificial Sequence
  Description of Artificial Sequence: Synthetic oligonucleotide
  Target: SCNA; (+) strand; PAM type: NNGRRT; PAM sequence: TGGGAT
atcatttttttgttcacttg

SEQ ID NO: 9757 - DNA, 20 bp, Artificial Sequence
  Description of Artificial Sequence: Synthetic oligonucleotide
  Target: SCNA; (+) strand; PAM type: NNGRRT; PAM sequence: TAGGAT
ttcacttgtgggatgaaaag

SEQ ID NO: 9758 - DNA, 20 bp, Artificial Sequence
  Description of Artificial Sequence: Synthetic oligonucleotide
  Target: SCNA; (+) strand; PAM type: NNGRRT; PAM sequence: ATGGAT
cttaaaagtatgacaactaa

SEQ ID NO: 9759 - DNA, 20 bp, Artificial Sequence
  Description of Artificial Sequence: Synthetic oligonucleotide
  Target: SCNA; (+) strand; PAM type: NNGRRT; PAM sequence: ATGAGT
tgagaaactcatttatgatc

SEQ ID NO: 9760 - DNA, 20 bp, Artificial Sequence
  Description of Artificial Sequence: Synthetic oligonucleotide
  Target: SCNA; (+) strand; PAM type: NNGRRT; PAM sequence: CAGGAT
ttatgatcatgagttttttc

SEQ ID NO: 9761 - DNA, 20 bp, Artificial Sequence
  Description of Artificial Sequence: Synthetic oligonucleotide
  Target: SCNA; (+) strand; PAM type: NNGRRT; PAM sequence: ATGGAT
tccaggatggacatataaag

SEQ ID NO: 9762 - DNA, 20 bp, Artificial Sequence
  Description of Artificial Sequence: Synthetic oligonucleotide
  Target: SCNA; (+) strand; PAM type: NNGRRT; PAM sequence: GAGAAT
atttttaaaacactggcctg

SEQ ID NO: 9763 - DNA, 20 bp, Artificial Sequence
  Description of Artificial Sequence: Synthetic oligonucleotide
  Target: SCNA; (+) strand; PAM type: NNGRRT; PAM sequence: GTGGGT
tgtgatttacggtaattact

SEQ ID NO: 9764 - DNA, 20 bp, Artificial Sequence
  Description of Artificial Sequence: Synthetic oligonucleotide
  Target: SCNA; (+) strand; PAM type: NNGRRT; PAM sequence: CTGAAT
attactgtgggtcatttttt

SEQ ID NO: 9765 - DNA, 20 bp, Artificial Sequence
  Description of Artificial Sequence: Synthetic oligonucleotide
  Target: SCNA; (+) strand; PAM type: NNGRRT; PAM sequence: GAGAAT
tgaacaagcaaagtgaccaa

SEQ ID NO: 9766 - DNA, 20 bp, Artificial Sequence
  Description of Artificial Sequence: Synthetic oligonucleotide
  Target: SCNA; (+) strand; PAM type: NNGRRT; PAM sequence: AAGAGT
aaggtgcagaaaaagaagag

SEQ ID NO: 9767 - DNA, 20 bp, Artificial Sequence
  Description of Artificial Sequence: Synthetic oligonucleotide
  Target: SCNA; (+) strand; PAM type: NNGRRT; PAM sequence: ATGGAT
aataattatcagccaaatca

SEQ ID NO: 9768 - DNA, 20 bp, Artificial Sequence
  Description of Artificial Sequence: Synthetic oligonucleotide
  Target: SCNA; (+) strand; PAM type: NNGRRT; PAM sequence: ATGAAT
attatcagccaaatcaatgg

SEQ ID NO: 9769 - DNA, 20 bp, Artificial Sequence
  Description of Artificial Sequence: Synthetic oligonucleotide
  Target: SCNA; (+) strand; PAM type: NNGRRT; PAM sequence: GTGGAT
ccaaatcaatggatgaatag

SEQ ID NO: 9770 - DNA, 20 bp, Artificial Sequence
  Description of Artificial Sequence: Synthetic oligonucleotide
  Target: SCNA; (+) strand; PAM type: NNGRRT; PAM sequence: ATGGAT
atcaatggatgaataggtgg

SEQ ID NO: 9771 - DNA, 20 bp, Artificial Sequence
  Description of Artificial Sequence: Synthetic oligonucleotide
  Target: SCNA; (+) strand; PAM type: NNGRRT; PAM sequence: ATGAAT
atggatgaataggtggatgg

SEQ ID NO: 9772 - DNA, 20 bp, Artificial Sequence
  Description of Artificial Sequence: Synthetic oligonucleotide
  Target: SCNA; (+) strand; PAM type: NNGRRT; PAM sequence: ATGGAT
ataggtggatggatgaatgc

SEQ ID NO: 9773 - DNA, 20 bp, Artificial Sequence
  Description of Artificial Sequence: Synthetic oligonucleotide
  Target: SCNA; (+) strand; PAM type: NNGRRT; PAM sequence: ATGAAT
gtggatggatgaatgcatgg

SEQ ID NO: 9774 - DNA, 20 bp, Artificial Sequence
  Description of Artificial Sequence: Synthetic oligonucleotide
  Target: SCNA; (+) strand; PAM type: NNGRRT; PAM sequence: CTGAGT
tgtcatcatgcataagcagc

SEQ ID NO: 9775 - DNA, 20 bp, Artificial Sequence
  Description of Artificial Sequence: Synthetic oligonucleotide
  Target: SCNA; (+) strand; PAM type: NNGRRT; PAM sequence: GTGAAT
atatgacatgctttcttcat

SEQ ID NO: 9776 - DNA, 20 bp, Artificial Sequence
  Description of Artificial Sequence: Synthetic oligonucleotide
  Target: SCNA; (+) strand; PAM type: NNGRRT; PAM sequence: GGGAGT
tctaagttgtgttggaaatg

SEQ ID NO: 9777 - DNA, 20 bp, Artificial Sequence
  Description of Artificial Sequence: Synthetic oligonucleotide
  Target: SCNA; (+) strand; PAM type: NNGRRT; PAM sequence: CTGGGT
gggcaagttatttaattcct

SEQ ID NO: 9778 - DNA, 20 bp, Artificial Sequence
  Description of Artificial Sequence: Synthetic oligonucleotide
  Target: SCNA; (+) strand; PAM type: NNGRRT; PAM sequence: ATGAGT
taattcctctgggtctgaag

SEQ ID NO: 9779 - DNA, 20 bp, Artificial Sequence
  Description of Artificial Sequence: Synthetic oligonucleotide
  Target: SCNA; (+) strand; PAM type: NNGRRT; PAM sequence: GCGGGT
cccttccaacaccgggactg

SEQ ID NO: 9780 - DNA, 20 bp, Artificial Sequence
  Description of Artificial Sequence: Synthetic oligonucleotide
  Target: SCNA; (+) strand; PAM type: NNGRRT; PAM sequence: AAGAGT
tggtgcttttggagcttccc

SEQ ID NO: 9781 - DNA, 20 bp, Artificial Sequence
  Description of Artificial Sequence: Synthetic oligonucleotide
  Target: SCNA; (+) strand; PAM type: NNGRRT; PAM sequence: AGGAAT
tggagcttcccaagagtatc

SEQ ID NO: 9782 - DNA, 20 bp, Artificial Sequence
  Description of Artificial Sequence: Synthetic oligonucleotide
  Target: SCNA; (+) strand; PAM type: NNGRRT; PAM sequence: TTGGGT
atatgcagtcataaaaaatt

SEQ ID NO: 9783 - DNA, 20 bp, Artificial Sequence
  Description of Artificial Sequence: Synthetic oligonucleotide
  Target: SCNA; (+) strand; PAM type: NNGRRT; PAM sequence: TAGAAT
gcagatcttagaaattcatt

SEQ ID NO: 9784 - DNA, 20 bp, Artificial Sequence
  Description of Artificial Sequence: Synthetic oligonucleotide
  Target: SCNA; (+) strand; PAM type: NNGRRT; PAM sequence: AAGAAT
tacacttgactataacactt

SEQ ID NO: 9785 - DNA, 20 bp, Artificial Sequence
  Description of Artificial Sequence: Synthetic oligonucleotide
  Target: SCNA; (+) strand; PAM type: NNGRRT; PAM sequence: GTGAAT
atatattttatttgaaatat

SEQ ID NO: 9786 - DNA, 20 bp, Artificial Sequence
  Description of Artificial Sequence: Synthetic oligonucleotide
  Target: SCNA; (+) strand; PAM type: NNGRRT; PAM sequence: AGGGAT
taaaagtcttgcaacacaaa

SEQ ID NO: 9787 - DNA, 20 bp, Artificial Sequence
  Description of Artificial Sequence: Synthetic oligonucleotide
  Target: SCNA; (+) strand; PAM type: NNGRRT; PAM sequence: TGGGGT
caaatcataggtttgtgaga

SEQ ID NO: 9788 - DNA, 20 bp, Artificial Sequence
  Description of Artificial Sequence: Synthetic oligonucleotide
  Target: SCNA; (+) strand; PAM type: NNGRRT; PAM sequence: CTGAAT
gttcttcatgagcaagaaca

SEQ ID NO: 9789 - DNA, 20 bp, Artificial Sequence
  Description of Artificial Sequence: Synthetic oligonucleotide
  Target: SCNA; (+) strand; PAM type: NNGRRT; PAM sequence: TAGAAT
aatcaactgcatccagaagg

SEQ ID NO: 9790 - DNA, 20 bp, Artificial Sequence
  Description of Artificial Sequence: Synthetic oligonucleotide
  Target: SCNA; (+) strand; PAM type: NNGRRT; PAM sequence: CAGAAT
atgccaagtgatactttcgg

SEQ ID NO: 9791 - DNA, 20 bp, Artificial Sequence
  Description of Artificial Sequence: Synthetic oligonucleotide
  Target: SCNA; (+) strand; PAM type: NNGRRT; PAM sequence: ATGAGT
cctcttaaaaactgtaccat

SEQ ID NO: 9792 - DNA, 20 bp, Artificial Sequence
  Description of Artificial Sequence: Synthetic oligonucleotide
  Target: SCNA; (+) strand; PAM type: NNGRRT; PAM sequence: ATGAAT
ttaaaactaatgattattaa

SEQ ID NO: 9793 - DNA, 20 bp, Artificial Sequence
  Description of Artificial Sequence: Synthetic oligonucleotide
  Target: SCNA; (+) strand; PAM type: NNGRRT; PAM sequence: GAGGGT
tactatatgtaagattcaga

SEQ ID NO: 9794 - DNA, 20 bp, Artificial Sequence
  Description of Artificial Sequence: Synthetic oligonucleotide
  Target: SCNA; (+) strand; PAM type: NNGRRT; PAM sequence: ATGAAT
attcagagagggtaaataac

SEQ ID NO: 9795 - DNA, 20 bp, Artificial Sequence
  Description of Artificial Sequence: Synthetic oligonucleotide
  Target: SCNA; (+) strand; PAM type: NNGRRT; PAM sequence: TAGGAT
taattcctacattatttcta

SEQ ID NO: 9796 - DNA, 20 bp, Artificial Sequence
  Description of Artificial Sequence: Synthetic oligonucleotide
  Target: SCNA; (+) strand; PAM type: NNGRRT; PAM sequence: GTGAAT
aaacttgcaaaaacaagaag

SEQ ID NO: 9797 - DNA, 20 bp, Artificial Sequence
  Description of Artificial Sequence: Synthetic oligonucleotide
  Target: SCNA; (+) strand; PAM type: NNGRRT; PAM sequence: AAGAGT
tgaataaacttcgaaatgag

SEQ ID NO: 9798 - DNA, 20 bp, Artificial Sequence
  Description of Artificial Sequence: Synthetic oligonucleotide
  Target: SCNA; (+) strand; PAM type: NNGRRT; PAM sequence: CAGGAT
ataatgcatttattttgcat

SEQ ID NO: 9799 - DNA, 20 bp, Artificial Sequence
  Description of Artificial Sequence: Synthetic oligonucleotide
  Target: SCNA; (+) strand; PAM type: NNGRRT; PAM sequence: AAGAAT
tacttctccaatctttccaa

SEQ ID NO: 9800 - DNA, 20 bp, Artificial Sequence
  Description of Artificial Sequence: Synthetic oligonucleotide
  Target: SCNA; (+) strand; PAM type: NNGRRT; PAM sequence: AAGGAT
gtaaaccaagatttagatgt

SEQ ID NO: 9801 - DNA, 20 bp, Artificial Sequence
  Description of Artificial Sequence: Synthetic oligonucleotide
  Target: SCNA; (+) strand; PAM type: NNGRRT; PAM sequence: TGGGAT
gcaacaggtaggagcagatc

SEQ ID NO: 9802 - DNA, 20 bp, Artificial Sequence
  Description of Artificial Sequence: Synthetic oligonucleotide
  Target: SCNA; (+) strand; PAM type: NNGRRT; PAM sequence: ATGGGT
attgtttattgcctatggta

SEQ ID NO: 9803 - DNA, 20 bp, Artificial Sequence
  Description of Artificial Sequence: Synthetic oligonucleotide
  Target: SCNA; (+) strand; PAM type: NNGRRT; PAM sequence: TGGGAT
cttttaaattgaaagaaaga

SEQ ID NO: 9804 - DNA, 20 bp, Artificial Sequence
  Description of Artificial Sequence: Synthetic oligonucleotide
  Target: SCNA; (+) strand; PAM type: NNGRRT; PAM sequence: ATGGGT
taaattgaaagaaagatggg

SEQ ID NO: 9805 - DNA, 20 bp, Artificial Sequence
  Description of Artificial Sequence: Synthetic oligonucleotide
  Target: SCNA; (+) strand; PAM type: NNGRRT; PAM sequence: GTGGGT
ttgaaagaaagatgggatgg

SEQ ID NO: 9806 - DNA, 20 bp, Artificial Sequence
  Description of Artificial Sequence: Synthetic oligonucleotide
  Target: SCNA; (+) strand; PAM type: NNGRRT; PAM sequence: TAGAAT
gaaactaaaaactatgcttg

SEQ ID NO: 9807 - DNA, 20 bp, Artificial Sequence
  Description of Artificial Sequence: Synthetic oligonucleotide
  Target: SCNA; (+) strand; PAM type: NNGRRT; PAM sequence: CTGAGT
tttatatgacaacagaacga

SEQ ID NO: 9808 - DNA, 20 bp, Artificial Sequence
  Description of Artificial Sequence: Synthetic oligonucleotide
  Target: SCNA; (+) strand; PAM type: NNGRRT; PAM sequence: CAGAGT
ggttagggacaagccaaaga

SEQ ID NO: 9809 - DNA, 20 bp, Artificial Sequence
  Description of Artificial Sequence: Synthetic oligonucleotide
  Target: SCNA; (+) strand; PAM type: NNGRRT; PAM sequence: AAGAGT
ttgtggcattagatgctgct

SEQ ID NO: 9810 - DNA, 20 bp, Artificial Sequence
  Description of Artificial Sequence: Synthetic oligonucleotide
  Target: SCNA; (+) strand; PAM type: NNGRRT; PAM sequence: GTGAAT
ggcattagatgctgctaaga

SEQ ID NO: 9811 - DNA, 20 bp, Artificial Sequence
  Description of Artificial Sequence: Synthetic oligonucleotide
  Target: SCNA; (+) strand; PAM type: NNGRRT; PAM sequence: GAGAAT
atgtctaaatatatttccat

SEQ ID NO: 9812 - DNA, 20 bp, Artificial Sequence
  Description of Artificial Sequence: Synthetic oligonucleotide
  Target: SCNA; (+) strand; PAM type: NNGRRT; PAM sequence: GAGGGT
aaaggtgatgatctagccaa

SEQ ID NO: 9813 - DNA, 20 bp, Artificial Sequence
  Description of Artificial Sequence: Synthetic oligonucleotide
  Target: SCNA; (+) strand; PAM type: NNGRRT; PAM sequence: TTGGAT
aaaaaaaatccaaggagcat

SEQ ID NO: 9814 - DNA, 20 bp, Artificial Sequence
  Description of Artificial Sequence: Synthetic oligonucleotide
  Target: SCNA; (+) strand; PAM type: NNGRRT; PAM sequence: AAGAAT
cataaaaaataagactaaac

SEQ ID NO: 9815 - DNA, 20 bp, Artificial Sequence
  Description of Artificial Sequence: Synthetic oligonucleotide
  Target: SCNA; (+) strand; PAM type: NNGRRT; PAM sequence: CAGAGT
tgcttaataacagattgtat

SEQ ID NO: 9816 - DNA, 20 bp, Artificial Sequence
  Description of Artificial Sequence: Synthetic oligonucleotide
  Target: SCNA; (+) strand; PAM type: NNGRRT; PAM sequence: TTGAAT
actacaattttctgtctacc

SEQ ID NO: 9817 - DNA, 20 bp, Artificial Sequence
  Description of Artificial Sequence: Synthetic oligonucleotide
  Target: SCNA; (+) strand; PAM type: NNGRRT; PAM sequence: AGGAAT
aaattgtggctggtatccaa

SEQ ID NO: 9818 - DNA, 20 bp, Artificial Sequence
  Description of Artificial Sequence: Synthetic oligonucleotide
  Target: SCNA; (+) strand; PAM type: NNGRRT; PAM sequence: GTGGGT
ataatgtatgctacttcgaa

SEQ ID NO: 9819 - DNA, 20 bp, Artificial Sequence
  Description of Artificial Sequence: Synthetic oligonucleotide
  Target: SCNA; (+) strand; PAM type: NNGRRT; PAM sequence: ATGGAT
tatgctacttcgaagtgggt

SEQ ID NO: 9820 - DNA, 20 bp, Artificial Sequence
  Description of Artificial Sequence: Synthetic oligonucleotide
  Target: SCNA; (+) strand; PAM type: NNGRRT; PAM sequence: AGGAGT
cggtggggctgcaacttggg

SEQ ID NO: 9821 - DNA, 20 bp, Artificial Sequence
  Description of Artificial Sequence: Synthetic oligonucleotide
  Target: SCNA; (+) strand; PAM type: NNGRRT; PAM sequence: CTGGGT
ggctgcaacttgggaggagt

SEQ ID NO: 9822 - DNA, 20 bp, Artificial Sequence
  Description of Artificial Sequence: Synthetic oligonucleotide
  Target: SCNA; (+) strand; PAM type: NNGRRT; PAM sequence: GTGAAT
aacacctaccatggacttat

SEQ ID NO: 9823 - DNA, 20 bp, Artificial Sequence
  Description of Artificial Sequence: Synthetic oligonucleotide
  Target: SCNA; (+) strand; PAM type: NNGRRT; PAM sequence: GAGAAT
taccatggacttatgtgaat

SEQ ID NO: 9824 - DNA, 20 bp, Artificial Sequence
  Description of Artificial Sequence: Synthetic oligonucleotide
  Target: SCNA; (+) strand; PAM type: NNGRRT; PAM sequence: ATGAAT
gttcagtagatgttcactaa

SEQ ID NO: 9825 - DNA, 20 bp, Artificial Sequence
  Description of Artificial Sequence: Synthetic oligonucleotide
  Target: SCNA; (+) strand; PAM type: NNGRRT; PAM sequence: AAGAAT
ttttgtagtttgattttctg

SEQ ID NO: 9826 - DNA, 20 bp, Artificial Sequence
  Description of Artificial Sequence: Synthetic oligonucleotide
  Target: SCNA; (+) strand; PAM type: NNGRRT; PAM sequence: AAGAGT
agaagtttcaagaacagtca

SEQ ID NO: 9827 - DNA, 20 bp, Artificial Sequence
  Description of Artificial Sequence: Synthetic oligonucleotide
  Target: SCNA; (+) strand; PAM type: NNGRRT; PAM sequence: CAGAAT
gtccctctatccacttcacc

SEQ ID NO: 9828 - DNA, 20 bp, Artificial Sequence
  Description of Artificial Sequence: Synthetic oligonucleotide
  Target: SCNA; (+) strand; PAM type: NNGRRT; PAM sequence: ATGGAT
ttgctccctctgcctaacac

SEQ ID NO: 9829 - DNA, 20 bp, Artificial Sequence
  Description of Artificial Sequence: Synthetic oligonucleotide
  Target: SCNA; (+) strand; PAM type: NNGRRT; PAM sequence: GAGAGT
atgtatttgtgcgtgtgtgt

SEQ ID NO: 9830 - DNA, 20 bp, Artificial Sequence
  Description of Artificial Sequence: Synthetic oligonucleotide
  Target: SCNA; (+) strand; PAM type: NNGRRT; PAM sequence: AAGGAT
agtaagtacctctctaaagc

SEQ ID NO: 9831 - DNA, 20 bp, Artificial Sequence
  Description of Artificial Sequence: Synthetic oligonucleotide
  Target: SCNA; (+) strand; PAM type: NNGRRT; PAM sequence: GAGGAT
gaacactgccatccaagcca

SEQ ID NO: 9832 - DNA, 20 bp, Artificial Sequence
  Description of Artificial Sequence: Synthetic oligonucleotide
  Target: SCNA; (+) strand; PAM type: NNGRRT; PAM sequence: TTGGGT
attaaattattatgtgctta

SEQ ID NO: 9833 - DNA, 20 bp, Artificial Sequence
  Description of Artificial Sequence: Synthetic oligonucleotide
  Target: SCNA; (+) strand; PAM type: NNGRRT; PAM sequence: TTGGGT
tgtgcttattgggtgctcaa

SEQ ID NO: 9834 - DNA, 20 bp, Artificial Sequence
  Description of Artificial Sequence: Synthetic oligonucleotide
  Target: SCNA; (+) strand; PAM type: NNGRRT; PAM sequence: GGGAGT
atggcaagaacaagggggaa

SEQ ID NO: 9835 - DNA, 20 bp, Artificial Sequence
  Description of Artificial Sequence: Synthetic oligonucleotide
  Target: SCNA; (+) strand; PAM type: NNGRRT; PAM sequence: GTGGAT
attagtaaggacaagggaag

SEQ ID NO: 9836 - DNA, 20 bp, Artificial Sequence
  Description of Artificial Sequence: Synthetic oligonucleotide
  Target: SCNA; (+) strand; PAM type: NNGRRT; PAM sequence: ATGAAT
gtaaggacaagggaaggtgg

SEQ ID NO: 9837 - DNA, 20 bp, Artificial Sequence
  Description of Artificial Sequence: Synthetic oligonucleotide
  Target: SCNA; (+) strand; PAM type: NNGRRT; PAM sequence: ATGAAT
ggacaagggaaggtggatga

SEQ ID NO: 9838 - DNA, 20 bp, Artificial Sequence
  Description of Artificial Sequence: Synthetic oligonucleotide
  Target: SCNA; (+) strand; PAM type: NNGRRT; PAM sequence: CTGAGT
atttaaattcattaaaaatt

SEQ ID NO: 9839 - DNA, 20 bp, Artificial Sequence
  Description of Artificial Sequence: Synthetic oligonucleotide
  Target: SCNA; (+) strand; PAM type: NNGRRT; PAM sequence: CAGAGT
cagctaagaggttgagaaat

SEQ ID NO: 9840 - DNA, 20 bp, Artificial Sequence
  Description of Artificial Sequence: Synthetic oligonucleotide
  Target: SCNA; (+) strand; PAM type: NNGRRT; PAM sequence: CAGGAT
ttggctgcctctcaaaataa

SEQ ID NO: 9841 - DNA, 20 bp, Artificial Sequence
  Description of Artificial Sequence: Synthetic oligonucleotide
  Target: SCNA; (+) strand; PAM type: NNGRRT; PAM sequence: CTGAAT
acaggataaggcacacaaaa

SEQ ID NO: 9842 - DNA, 20 bp, Artificial Sequence
  Description of Artificial Sequence: Synthetic oligonucleotide
  Target: SCNA; (+) strand; PAM type: NNGRRT; PAM sequence: TTGGAT
cacaaaactgaattcttcac

SEQ ID NO: 9843 - DNA, 20 bp, Artificial Sequence
  Description of Artificial Sequence: Synthetic oligonucleotide
  Target: SCNA; (+) strand; PAM type: NNGRRT; PAM sequence: CTGAAT
attcttcacttggattaaat

SEQ ID NO: 9844 - DNA, 20 bp, Artificial Sequence
  Description of Artificial Sequence: Synthetic oligonucleotide
  Target: SCNA; (+) strand; PAM type: NNGRRT; PAM sequence: CTGAAT
ctagagaccacctgagaaca

SEQ ID NO: 9845 - DNA, 20 bp, Artificial Sequence
  Description of Artificial Sequence: Synthetic oligonucleotide
  Target: SCNA; (+) strand; PAM type: NNGRRT; PAM sequence: TTGAGT
gagaacactgaatgttcctt

SEQ ID NO: 9846 - DNA, 20 bp, Artificial Sequence
  Description of Artificial Sequence: Synthetic oligonucleotide
  Target: SCNA; (+) strand; PAM type: NNGRRT; PAM sequence: ATGGAT
attcagaaacattttgtttc

SEQ ID NO: 9847 - DNA, 20 bp, Artificial Sequence
  Description of Artificial Sequence: Synthetic oligonucleotide
  Target: SCNA; (+) strand; PAM type: NNGRRT; PAM sequence: CTGAAT
ctaaaaatacattcccttcc

SEQ ID NO: 9848 - DNA, 20 bp, Artificial Sequence
  Description of Artificial Sequence: Synthetic oligonucleotide
  Target: SCNA; (+) strand; PAM type: NNGRRT; PAM sequence: ATGAAT
cttgccaaaaattctcacaa

SEQ ID NO: 9849 - DNA, 20 bp, Artificial Sequence
  Description of Artificial Sequence: Synthetic oligonucleotide
  Target: SCNA; (+) strand; PAM type: NNGRRT; PAM sequence: ATGAAT
aaattttatcaagtactttg

SEQ ID NO: 9850 - DNA, 20 bp, Artificial Sequence
  Description of Artificial Sequence: Synthetic oligonucleotide
  Target: SCNA; (+) strand; PAM type: NNGRRT; PAM sequence: ATGGGT
ttttaatgtttcttccccag

SEQ ID NO: 9851 - DNA, 20 bp, Artificial Sequence
  Description of Artificial Sequence: Synthetic oligonucleotide
  Target: SCNA; (+) strand; PAM type: NNGRRT; PAM sequence: AGGGGT
ccagaggctctaggtggtgg

SEQ ID NO: 9852 - DNA, 20 bp, Artificial Sequence
  Description of Artificial Sequence: Synthetic oligonucleotide
  Target: SCNA; (+) strand; PAM type: NNGRRT; PAM sequence: GAGGGT
gaggggttgctagctaaaag

SEQ ID NO: 9853 - DNA, 20 bp, Artificial Sequence
  Description of Artificial Sequence: Synthetic oligonucleotide
  Target: SCNA; (+) strand; PAM type: NNGRRT; PAM sequence: CAGAGT
gggtgtcctacagaaaggga

SEQ ID NO: 9854 - DNA, 20 bp, Artificial Sequence
  Description of Artificial Sequence: Synthetic oligonucleotide
  Target: SCNA; (+) strand; PAM type: NNGRRT; PAM sequence: CTGGAT
cagagtctccatgagcaatg

SEQ ID NO: 9855 - DNA, 20 bp, Artificial Sequence
  Description of Artificial Sequence: Synthetic oligonucleotide
  Target: SCNA; (+) strand; PAM type: NNGRRT; PAM sequence: GTGAGT
ggtccagttcttggcacatg

SEQ ID NO: 9856 - DNA, 20 bp, Artificial Sequence
  Description of Artificial Sequence: Synthetic oligonucleotide
  Target: SCNA; (+) strand; PAM type: NNGRRT; PAM sequence: AAGAGT
ggtgacaaaagtgatggcag

SEQ ID NO: 9857 - DNA, 20 bp, Artificial Sequence
  Description of Artificial Sequence: Synthetic oligonucleotide
  Target: SCNA; (+) strand; PAM type: NNGRRT; PAM sequence: ATGAGT
gcagaagagtggaaagaggt

SEQ ID NO: 9858 - DNA, 20 bp, Artificial Sequence
  Description of Artificial Sequence: Synthetic oligonucleotide
  Target: SCNA; (+) strand; PAM type: NNGRRT; PAM sequence: AAGGGT
atgactaaggacaaagaaac

SEQ ID NO: 9859 - DNA, 20 bp, Artificial Sequence
  Description of Artificial Sequence: Synthetic oligonucleotide
  Target: SCNA; (+) strand; PAM type: NNGRRT; PAM sequence: CCGAAT
caattccagcagcagcctat

SEQ ID NO: 9860 - DNA, 20 bp, Artificial Sequence
  Description of Artificial Sequence: Synthetic oligonucleotide
  Target: SCNA; (+) strand; PAM type: NNGRRT; PAM sequence: ATGAAT
tcaggaaaaccatctctgct

SEQ ID NO: 9861 - DNA, 20 bp, Artificial Sequence
  Description of Artificial Sequence: Synthetic oligonucleotide
  Target: SCNA; (+) strand; PAM type: NNGRRT; PAM sequence: CCGGAT
tattcagtatcttcagctgt

SEQ ID NO: 9862 - DNA, 20 bp, Artificial Sequence
  Description of Artificial Sequence: Synthetic oligonucleotide
  Target: SCNA; (+) strand; PAM type: NNGRRT; PAM sequence: GAGAAT
gcatgctctctgacattagt

SEQ ID NO: 9863 - DNA, 20 bp, Artificial Sequence
  Description of Artificial Sequence: Synthetic oligonucleotide
  Target: SCNA; (+) strand; PAM type: NNGRRT; PAM sequence: ATGAAT
gctctctgacattagtgaga

SEQ ID NO: 9864 - DNA, 20 bp, Artificial Sequence
  Description of Artificial Sequence: Synthetic oligonucleotide
  Target: SCNA; (+) strand; PAM type: NNGRRT; PAM sequence: TTGAAT
atgattaagtagtatagtca

SEQ ID NO: 9865 - DNA, 20 bp, Artificial Sequence
  Description of Artificial Sequence: Synthetic oligonucleotide
  Target: SCNA; (+) strand; PAM type: NNGRRT; PAM sequence: AGGGAT
ctcaggtcaaaattaaagtc

SEQ ID NO: 9866 - DNA, 20 bp, Artificial Sequence
  Description of Artificial Sequence: Synthetic oligonucleotide
  Target: SCNA; (+) strand; PAM type: NNGRRT; PAM sequence: AAGAAT
tggcttttttcttgtctcag

SEQ ID NO: 9867 - DNA, 20 bp, Artificial Sequence
  Description of Artificial Sequence: Synthetic oligonucleotide
  Target: SCNA; (+) strand; PAM type: NNGRRT; PAM sequence: GGGAAT
tgtttacaaagcaatgcaat

SEQ ID NO: 9868 - DNA, 20 bp, Artificial Sequence
  Description of Artificial Sequence: Synthetic oligonucleotide
  Target: SCNA; (+) strand; PAM type: NNGRRT; PAM sequence: CTGGAT
tttttaaataacccccacta

SEQ ID NO: 9869 - DNA, 20 bp, Artificial Sequence
  Description of Artificial Sequence: Synthetic oligonucleotide
  Target: SCNA; (+) strand; PAM type: NNGRRT; PAM sequence: GGGGGT
aggtccctccctcaacacat

SEQ ID NO: 9870 - DNA, 20 bp, Artificial Sequence
  Description of Artificial Sequence: Synthetic oligonucleotide
  Target: SCNA; (+) strand; PAM type: NNGRRT; PAM sequence: TTGGGT
gttacaattcaagatgagat

SEQ ID NO: 9871 - DNA, 20 bp, Artificial Sequence
  Description of Artificial Sequence: Synthetic oligonucleotide
  Target: SCNA; (+) strand; PAM type: NNGRRT; PAM sequence: ATGGAT
caaagccaaaccgtatcact

SEQ ID NO: 9872 - DNA, 20 bp, Artificial Sequence
  Description of Artificial Sequence: Synthetic oligonucleotide
  Target: SCNA; (+) strand; PAM type: NNGRRT; PAM sequence: CAGGGT
atcactatggatggtagtat

SEQ ID NO: 9873 - DNA, 20 bp, Artificial Sequence
  Description of Artificial Sequence: Synthetic oligonucleotide
  Target: SCNA; (+) strand; PAM type: NNGRRT; PAM sequence: TAGGGT
ttaaattatactttaagttt

SEQ ID NO: 9874 - DNA, 20 bp, Artificial Sequence
  Description of Artificial Sequence: Synthetic oligonucleotide
  Target: SCNA; (+) strand; PAM type: NNGRRT; PAM sequence: ATGGAT
tgacctggctacctttaaag

SEQ ID NO: 9875 - DNA, 20 bp, Artificial Sequence
  Description of Artificial Sequence: Synthetic oligonucleotide
  Target: SCNA; (+) strand; PAM type: NNGRRT; PAM sequence: TTGGAT
cctcttagatggtttgtatt

SEQ ID NO: 9876 - DNA, 20 bp, Artificial Sequence
  Description of Artificial Sequence: Synthetic oligonucleotide
  Target: SCNA; (+) strand; PAM type: NNGRRT; PAM sequence: TAGAAT
tgaagagaaacaaagacata

SEQ ID NO: 9877 - DNA, 20 bp, Artificial Sequence
  Description of Artificial Sequence: Synthetic oligonucleotide
  Target: SCNA; (+) strand; PAM type: NNGRRT; PAM sequence: TAGAAT
acattatctgtgtttatttg

SEQ ID NO: 9878 - DNA, 20 bp, Artificial Sequence
  Description of Artificial Sequence: Synthetic oligonucleotide
  Target: SCNA; (+) strand; PAM type: NNGRRT; PAM sequence: ATGAGT
ttttgtattttgttttttaa

SEQ ID NO: 9879 - DNA, 20 bp, Artificial Sequence
  Description of Artificial Sequence: Synthetic oligonucleotide
  Target: SCNA; (+) strand; PAM type: NNGRRT; PAM sequence: TAGAAT
tgtctgatatctcatacatt

SEQ ID NO: 9880 - DNA, 20 bp, Artificial Sequence
  Description of Artificial Sequence: Synthetic oligonucleotide
  Target: SCNA; (+) strand; PAM type: NNGRRT; PAM sequence: TAGAAT
tacatttagaatatttgtaa

SEQ ID NO: 9881 - DNA, 20 bp, Artificial Sequence
  Description of Artificial Sequence: Synthetic oligonucleotide
  Target: SCNA; (+) strand; PAM type: NNGRRT; PAM sequence: TGGAAT
agaatagcaaatttccacca

SEQ ID NO: 9882 - DNA, 20 bp, Artificial Sequence
  Description of Artificial Sequence: Synthetic oligonucleotide
  Target: SCNA; (+) strand; PAM type: NNGRRT; PAM sequence: AAGAAT
tatgcaatttaacaactgca

SEQ ID NO: 9883 - DNA, 20 bp, Artificial Sequence
  Description of Artificial Sequence: Synthetic oligonucleotide
  Target: SCNA; (+) strand; PAM type: NNGRRT; PAM sequence: TAGAGT
caaagaatcttagagatcct

SEQ ID NO: 9884 - DNA, 20 bp, Artificial Sequence
  Description of Artificial Sequence: Synthetic oligonucleotide
  Target: SCNA; (+) strand; PAM type: NNGRRT; PAM sequence: CAGGGT
cttatttacaaatggggaaa

SEQ ID NO: 9885 - DNA, 20 bp, Artificial Sequence
  Description of Artificial Sequence: Synthetic oligonucleotide
  Target: SCNA; (+) strand; PAM type: NNGRRT; PAM sequence: ACGAGT
caaatggggaaacagggtat

SEQ ID NO: 9886 - DNA, 20 bp, Artificial Sequence
  Description of Artificial Sequence: Synthetic oligonucleotide
  Target: SCNA; (+) strand; PAM type: NNGRRT; PAM sequence: AGGGGT
acttgcctaatccataagct

SEQ ID NO: 9887 - DNA, 20 bp, Artificial Sequence
  Description of Artificial Sequence: Synthetic oligonucleotide
  Target: SCNA; (+) strand; PAM type: NNGRRT; PAM sequence: CAGGGT
tccataagctaggggtacaa

SEQ ID NO: 9888 - DNA, 20 bp, Artificial Sequence
  Description of Artificial Sequence: Synthetic oligonucleotide
  Target: SCNA; (+) strand; PAM type: NNGRRT; PAM sequence: TGGAGT
ccctgatatgatcctagcga

SEQ ID NO: 9889 - DNA, 20 bp, Artificial Sequence
  Description of Artificial Sequence: Synthetic oligonucleotide
  Target: SCNA; (+) strand; PAM type: NNGRRT; PAM sequence: GAGAAT
aatagcccaacgtctagtat

SEQ ID NO: 9890 - DNA, 20 bp, Artificial Sequence
  Description of Artificial Sequence: Synthetic oligonucleotide
  Target: SCNA; (+) strand; PAM type: NNGRRT; PAM sequence: TTGGAT
tccaaattgaaacaatctcc

SEQ ID NO: 9891 - DNA, 20 bp, Artificial Sequence
  Description of Artificial Sequence: Synthetic oligonucleotide
  Target: SCNA; (+) strand; PAM type: NNGRRT; PAM sequence: CAGAGT
atttttacacatgcagtact

SEQ ID NO: 9892 - DNA, 20 bp, Artificial Sequence
  Description of Artificial Sequence: Synthetic oligonucleotide
  Target: SCNA; (+) strand; PAM type: NNGRRT; PAM sequence: ATGGAT
tttcctcttaaaagcccacc

SEQ ID NO: 9893 - DNA, 20 bp, Artificial Sequence
  Description of Artificial Sequence: Synthetic oligonucleotide
  Target: SCNA; (+) strand; PAM type: NNGRRT; PAM sequence: CGGGAT
tgttgttgttgttgttgaga

SEQ ID NO: 9894 - DNA, 20 bp, Artificial Sequence
  Description of Artificial Sequence: Synthetic oligonucleotide
  Target: SCNA; (+) strand; PAM type: NNGRRT; PAM sequence: TGGAGT
atctcactctgttgccaggc

SEQ ID NO: 9895 - DNA, 20 bp, Artificial Sequence
  Description of Artificial Sequence: Synthetic oligonucleotide
  Target: SCNA; (+) strand; PAM type: NNGRRT; PAM sequence: CAGGAT
cagcgtttcaccatgttggc

SEQ ID NO: 9896 - DNA, 20 bp, Artificial Sequence
  Description of Artificial Sequence: Synthetic oligonucleotide
  Target: SCNA; (+) strand; PAM type: NNGRRT; PAM sequence: TGGGAT
acctcagccttccaaagtgc

SEQ ID NO: 9897 - DNA, 20 bp, Artificial Sequence
  Description of Artificial Sequence: Synthetic oligonucleotide
  Target: SCNA; (+) strand; PAM type: NNGRRT; PAM sequence: TGGAAT
acatttagtttgcctttatt

SEQ ID NO: 9898 - DNA, 20 bp, Artificial Sequence
  Description of Artificial Sequence: Synthetic oligonucleotide
  Target: SCNA; (+) strand; PAM type: NNGRRT; PAM sequence: ATGAAT
gatgatgatgatattatagc

SEQ ID NO: 9899 - DNA, 20 bp, Artificial Sequence
  Description of Artificial Sequence: Synthetic oligonucleotide
  Target: SCNA; (+) strand; PAM type: NNGRRT; PAM sequence: CTGAAT
agttttctattgttccccta

SEQ ID NO: 9900 - DNA, 20 bp, Artificial Sequence
  Description of Artificial Sequence: Synthetic oligonucleotide
  Target: SCNA; (+) strand; PAM type: NNGRRT; PAM sequence: TGGGAT
accacaaatttattacattg

SEQ ID NO: 9901 - DNA, 20 bp, Artificial Sequence
  Description of Artificial Sequence: Synthetic oligonucleotide
  Target: SCNA; (+) strand; PAM type: NNGRRT; PAM sequence: AGGGGT
ttgtaagtctgaagtccaat

SEQ ID NO: 9902 - DNA, 20 bp, Artificial Sequence
  Description of Artificial Sequence: Synthetic oligonucleotide
  Target: SCNA; (+) strand; PAM type: NNGRRT; PAM sequence: ATGAAT
caatcaacataggttaataa

SEQ ID NO: 9903 - DNA, 20 bp, Artificial Sequence
  Description of Artificial Sequence: Synthetic oligonucleotide
  Target: SCNA; (+) strand; PAM type: NNGRRT; PAM sequence: GGGAAT
gcatattaattgttacctgg

SEQ ID NO: 9904 - DNA, 20 bp, Artificial Sequence
  Description of Artificial Sequence: Synthetic oligonucleotide
  Target: SCNA; (+) strand; PAM type: NNGRRT; PAM sequence: TGGGGT
ttaagtctcatatgtaaact

SEQ ID NO: 9905 - DNA, 20 bp, Artificial Sequence
  Description of Artificial Sequence: Synthetic oligonucleotide
  Target: SCNA; (+) strand; PAM type: NNGRRT; PAM sequence: GAGGAT
tgatatcaacatgccatttt

SEQ ID NO: 9906 - DNA, 20 bp, Artificial Sequence
  Description of Artificial Sequence: Synthetic oligonucleotide
  Target: SCNA; (+) strand; PAM type: NNGRRT; PAM sequence: CAGAGT
tcttaattgtttcacaaagg

SEQ ID NO: 9907 - DNA, 20 bp, Artificial Sequence
  Description of Artificial Sequence: Synthetic oligonucleotide
  Target: SCNA; (+) strand; PAM type: NNGRRT; PAM sequence: TAGAAT
gcctctatgtctttagtacc

SEQ ID NO: 9908 - DNA, 20 bp, Artificial Sequence
  Description of Artificial Sequence: Synthetic oligonucleotide
  Target: SCNA; (+) strand; PAM type: NNGRRT; PAM sequence: CTGAAT
tgcctgtttaaaagtaggag

SEQ ID NO: 9909 - DNA, 20 bp, Artificial Sequence
  Description of Artificial Sequence: Synthetic oligonucleotide
  Target: SCNA; (+) strand; PAM type: NNGRRT; PAM sequence: CTGAAT
aggagctgaataaatgtttg

SEQ ID NO: 9910 - DNA, 20 bp, Artificial Sequence
  Description of Artificial Sequence: Synthetic oligonucleotide
  Target: SCNA; (+) strand; PAM type: NNGRRT; PAM sequence: GGGAAT
atgtgtaggaaaagaagctt

SEQ ID NO: 9911 - DNA, 20 bp, Artificial Sequence
  Description of Artificial Sequence: Synthetic oligonucleotide
  Target: SCNA; (+) strand; PAM type: NNGRRT; PAM sequence: AAGGAT
tgttttgtgtgttctttctc

SEQ ID NO: 9912 - DNA, 20 bp, Artificial Sequence
  Description of Artificial Sequence: Synthetic oligonucleotide
  Target: SCNA; (+) strand; PAM type: NNGRRT; PAM sequence: TGGGGT
ttcactttcagaactcaaaa

SEQ ID NO: 9913 - DNA, 20 bp, Artificial Sequence
  Description of Artificial Sequence: Synthetic oligonucleotide
  Target: SCNA; (+) strand; PAM type: NNGRRT; PAM sequence: TAGGGT
tcagaactcaaaatggggtg

SEQ ID NO: 9914 - DNA, 20 bp, Artificial Sequence
  Description of Artificial Sequence: Synthetic oligonucleotide
  Target: SCNA; (+) strand; PAM type: NNGRRT; PAM sequence: GGGGAT
gtggtggtggtgccagcagt

SEQ ID NO: 9915 - DNA, 20 bp, Artificial Sequence
  Description of Artificial Sequence: Synthetic oligonucleotide
  Target: SCNA; (+) strand; PAM type: NNGRRT; PAM sequence: TAGGAT
gtgactaacacgacacagtt

SEQ ID NO: 9916 - DNA, 20 bp, Artificial Sequence
  Description of Artificial Sequence: Synthetic oligonucleotide
  Target: SCNA; (+) strand; PAM type: NNGRRT; PAM sequence: AGGAAT
cagtttaggatttatgtaac

SEQ ID NO: 9917 - DNA, 20 bp, Artificial Sequence
  Description of Artificial Sequence: Synthetic oligonucleotide
  Target: SCNA; (+) strand; PAM type: NNGRRT; PAM sequence: TGGAAT
gaagacctcagttgacacgg

SEQ ID NO: 9918 - DNA, 20 bp, Artificial Sequence
  Description of Artificial Sequence: Synthetic oligonucleotide
  Target: SCNA; (+) strand; PAM type: NNGRRT; PAM sequence: TGGAGT
ctcagttgacacggtggaat

SEQ ID NO: 9919 - DNA, 20 bp, Artificial Sequence
  Description of Artificial Sequence: Synthetic oligonucleotide
  Target: SCNA; (+) strand; PAM type: NNGRRT; PAM sequence: GAGAGT
gccaagtaaatagtattttg

SEQ ID NO: 9920 - DNA, 20 bp, Artificial Sequence
  Description of Artificial Sequence: Synthetic oligonucleotide
  Target: SCNA; (+) strand; PAM type: NNGRRT; PAM sequence: GAGAGT
taaatattccttaacctaca

SEQ ID NO: 9921 - DNA, 20 bp, Artificial Sequence
  Description of Artificial Sequence: Synthetic oligonucleotide
  Target: SCNA; (+) strand; PAM type: NNGRRT; PAM sequence: TGGAAT
ctagaagtatcatcaagtca

SEQ ID NO: 9922 - DNA, 20 bp, Artificial Sequence
  Description of Artificial Sequence: Synthetic oligonucleotide
  Target: SCNA; (+) strand; PAM type: NNGRRT; PAM sequence: TAGGGT
aatattcttacttctattgc

SEQ ID NO: 9923 - DNA, 20 bp, Artificial Sequence
  Description of Artificial Sequence: Synthetic oligonucleotide
  Target: SCNA; (+) strand; PAM type: NNGRRT; PAM sequence: AAGGGT
agccgctactgcttaaaggt

SEQ ID NO: 9924 - DNA, 20 bp, Artificial Sequence
  Description of Artificial Sequence: Synthetic oligonucleotide
  Target: SCNA; (+) strand; PAM type: NNGRRT; PAM sequence: GTGGAT
aagggtaaatcttgttcact

SEQ ID NO: 9925 - DNA, 20 bp, Artificial Sequence
  Description of Artificial Sequence: Synthetic oligonucleotide
  Target: SCNA; (+) strand; PAM type: NNGRRT; PAM sequence: TCGAAT
ccagtgaaagtcatttaaat

SEQ ID NO: 9926 - DNA, 20 bp, Artificial Sequence
  Description of Artificial Sequence: Synthetic oligonucleotide
  Target: SCNA; (+) strand; PAM type: NNGRRT; PAM sequence: GAGAAT
ctgcccttatgaaaagtggt

SEQ ID NO: 9927 - DNA, 20 bp, Artificial Sequence
  Description of Artificial Sequence: Synthetic oligonucleotide
  Target: SCNA; (+) strand; PAM type: NNGRRT; PAM sequence: AAGGAT
tttgtcatatcacttcctga

SEQ ID NO: 9928 - DNA, 20 bp, Artificial Sequence
  Description of Artificial Sequence: Synthetic oligonucleotide
  Target: SCNA; (+) strand; PAM type: NNGRRT; PAM sequence: GAGGAT
ttatggactttttaaacact

SEQ ID NO: 9929 - DNA, 20 bp, Artificial Sequence
  Description of Artificial Sequence: Synthetic oligonucleotide
  Target: SCNA; (+) strand; PAM type: NNGRRT; PAM sequence: CAGGAT
ttttttttttttttttgaga

SEQ ID NO: 9930 - DNA, 20 bp, Artificial Sequence
  Description of Artificial Sequence: Synthetic oligonucleotide
  Target: SCNA; (+) strand; PAM type: NNGRRT; PAM sequence: TGGAGT
tcttacttttttgcccaggc

SEQ ID NO: 9931 - DNA, 20 bp, Artificial Sequence
  Description of Artificial Sequence: Synthetic oligonucleotide
  Target: SCNA; (+) strand; PAM type: NNGRRT; PAM sequence: GGGGGT
accagactagctgagactac

SEQ ID NO: 9932 - DNA, 20 bp, Artificial Sequence
  Description of Artificial Sequence: Synthetic oligonucleotide
  Target: SCNA; (+) strand; PAM type: NNGRRT; PAM sequence: TGGGAT
caccttagcctcccaaagtg

SEQ ID NO: 9933 - DNA, 20 bp, Artificial Sequence
  Description of Artificial Sequence: Synthetic oligonucleotide
  Target: SCNA; (+) strand; PAM type: NNGRRT; PAM sequence: GAGAAT
catgagccaccatgccaggc

SEQ ID NO: 9934 - DNA, 20 bp, Artificial Sequence
  Description of Artificial Sequence: Synthetic oligonucleotide
  Target: SCNA; (+) strand; PAM type: NNGRRT; PAM sequence: GAGGGT
tattcttgaaaagatatgca

SEQ ID NO: 9935 - DNA, 20 bp, Artificial Sequence
  Description of Artificial Sequence: Synthetic oligonucleotide
  Target: SCNA; (+) strand; PAM type: NNGRRT; PAM sequence: ATGAAT
ctagaacacagagccaggtc

SEQ ID NO: 9936 - DNA, 20 bp, Artificial Sequence
  Description of Artificial Sequence: Synthetic oligonucleotide
  Target: SCNA; (+) strand; PAM type: NNGRRT; PAM sequence: ATGAAT
aactctgtcagctgtgagac

SEQ ID NO: 9937 - DNA, 20 bp, Artificial Sequence
  Description of Artificial Sequence: Synthetic oligonucleotide
  Target: SCNA; (+) strand; PAM type: NNGRRT; PAM sequence: GCGGGT
cagcactttgggaggctgac

SEQ ID NO: 9938 - DNA, 20 bp, Artificial Sequence
  Description of Artificial Sequence: Synthetic oligonucleotide
  Target: SCNA; (+) strand; PAM type: NNGRRT; PAM sequence: GTGGAT
actttgggaggctgacgcgg

SEQ ID NO: 9939 - DNA, 20 bp, Artificial Sequence
  Description of Artificial Sequence: Synthetic oligonucleotide
  Target: SCNA; (+) strand; PAM type: NNGRRT; PAM sequence: AGGAGT
cgggtggatcacctgaggtc

SEQ ID NO: 9940 - DNA, 20 bp, Artificial Sequence
  Description of Artificial Sequence: Synthetic oligonucleotide
  Target: SCNA; (+) strand; PAM type: NNGRRT; PAM sequence: GAGAAT
tactcaggaggctgaactag

SEQ ID NO: 9941 - DNA, 20 bp, Artificial Sequence
  Description of Artificial Sequence: Synthetic oligonucleotide
  Target: SCNA; (+) strand; PAM type: NNGRRT; PAM sequence: CTGGGT
actaggagaatcgcttgaac

SEQ ID NO: 9942 - DNA, 20 bp, Artificial Sequence
  Description of Artificial Sequence: Synthetic oligonucleotide
  Target: SCNA; (+) strand; PAM type: NNGRRT; PAM sequence: ATGAAT
atatattttgaagtctagag

SEQ ID NO: 9943 - DNA, 20 bp, Artificial Sequence
  Description of Artificial Sequence: Synthetic oligonucleotide
  Target: SCNA; (+) strand; PAM type: NNGRRT; PAM sequence: AAGAGT
gacaagggagagggaaaggg

SEQ ID NO: 9944 - DNA, 20 bp, Artificial Sequence
  Description of Artificial Sequence: Synthetic oligonucleotide
  Target: SCNA; (+) strand; PAM type: NNGRRT; PAM sequence: GAGGAT
gaaacaatagattacaggaa

SEQ ID NO: 9945 - DNA, 20 bp, Artificial Sequence
  Description of Artificial Sequence: Synthetic oligonucleotide
  Target: SCNA; (+) strand; PAM type: NNGRRT; PAM sequence: ATGAAT
cccccttgaaaatgtatgtt

SEQ ID NO: 9946 - DNA, 20 bp, Artificial Sequence
  Description of Artificial Sequence: Synthetic oligonucleotide
  Target: SCNA; (+) strand; PAM type: NNGRRT; PAM sequence: TGGAGT
atcacaaggtaattaagttt

SEQ ID NO: 9947 - DNA, 20 bp, Artificial Sequence
  Description of Artificial Sequence: Synthetic oligonucleotide
  Target: SCNA; (+) strand; PAM type: NNGRRT; PAM sequence: AGGAGT
gtaattaagttttggagtgg

SEQ ID NO: 9948 - DNA, 20 bp, Artificial Sequence
  Description of Artificial Sequence: Synthetic oligonucleotide
  Target: SCNA; (+) strand; PAM type: NNGRRT; PAM sequence: TTGAGT
tcattttaaatgtacatttc

SEQ ID NO: 9949 - DNA, 20 bp, Artificial Sequence
  Description of Artificial Sequence: Synthetic oligonucleotide
  Target: SCNA; (+) strand; PAM type: NNGRRT; PAM sequence: GGGGGT
cacctccaccccagccccat

SEQ ID NO: 9950 - DNA, 20 bp, Artificial Sequence
  Description of Artificial Sequence: Synthetic oligonucleotide
  Target: SCNA; (+) strand; PAM type: NNGRRT; PAM sequence: TTGGAT
tagccatgaaggtacacctc

SEQ ID NO: 9951 - DNA, 20 bp, Artificial Sequence
  Description of Artificial Sequence: Synthetic oligonucleotide
  Target: SCNA; (+) strand; PAM type: NNGRRT; PAM sequence: AGGAGT
tttctctccaattagctgcc

SEQ ID NO: 9952 - DNA, 20 bp, Artificial Sequence
  Description of Artificial Sequence: Synthetic oligonucleotide
  Target: SCNA; (+) strand; PAM type: NNGRRT; PAM sequence: TGGGAT
gcctcctgctgcagcagcaa

SEQ ID NO: 9953 - DNA, 20 bp, Artificial Sequence
  Description of Artificial Sequence: Synthetic oligonucleotide
  Target: SCNA; (+) strand; PAM type: NNGRRT; PAM sequence: GTGGAT
ttgcctgcaataaatctctt

SEQ ID NO: 9954 - DNA, 20 bp, Artificial Sequence
  Description of Artificial Sequence: Synthetic oligonucleotide
  Target: SCNA; (+) strand; PAM type: NNGRRT; PAM sequence: TGGAAT
ttgtaattctaacaccatct

SEQ ID NO: 9955 - DNA, 20 bp, Artificial Sequence
  Description of Artificial Sequence: Synthetic oligonucleotide
  Target: SCNA; (+) strand; PAM type: NNGRRT; PAM sequence: CTGAAT
accatcttggaatcagcttc

SEQ ID NO: 9956 - DNA, 20 bp, Artificial Sequence
  Description of Artificial Sequence: Synthetic oligonucleotide
  Target: SCNA; (+) strand; PAM type: NNGRRT; PAM sequence: ATGGAT
tgcctctacctccagcaagc

SEQ ID NO: 9957 - DNA, 20 bp, Artificial Sequence
  Description of Artificial Sequence: Synthetic oligonucleotide
  Target: SCNA; (+) strand; PAM type: NNGRRT; PAM sequence: ATGGAT
gcatggatcttgttgttacc

SEQ ID NO: 9958 - DNA, 20 bp, Artificial Sequence
  Description of Artificial Sequence: Synthetic oligonucleotide
  Target: SCNA; (+) strand; PAM type: NNGRRT; PAM sequence: TGGAAT
tggatgacatttgtcttttc

SEQ ID NO: 9959 - DNA, 20 bp, Artificial Sequence
  Description of Artificial Sequence: Synthetic oligonucleotide
  Target: SCNA; (+) strand; PAM type: NNGRRT; PAM sequence: ATGAAT
gctaagtagtattctgctgt

SEQ ID NO: 9960 - DNA, 20 bp, Artificial Sequence
  Description of Artificial Sequence: Synthetic oligonucleotide
  Target: SCNA; (+) strand; PAM type: NNGRRT; PAM sequence: AAGAGT
tgttaccagttagagctatt

SEQ ID NO: 9961 - DNA, 20 bp, Artificial Sequence
  Description of Artificial Sequence: Synthetic oligonucleotide
  Target: SCNA; (+) strand; PAM type: NNGRRT; PAM sequence: GTGAAT
ctattaagagtaatgctatc

SEQ ID NO: 9962 - DNA, 20 bp, Artificial Sequence
  Description of Artificial Sequence: Synthetic oligonucleotide
  Target: SCNA; (+) strand; PAM type: NNGRRT; PAM sequence: AGGGGT
ttaatcttaagtaaatacct

SEQ ID NO: 9963 - DNA, 20 bp, Artificial Sequence
  Description of Artificial Sequence: Synthetic oligonucleotide
  Target: SCNA; (+) strand; PAM type: NNGRRT; PAM sequence: TGGGAT
aagttaaaaacagcaaaatc

SEQ ID NO: 9964 - DNA, 20 bp, Artificial Sequence
  Description of Artificial Sequence: Synthetic oligonucleotide
  Target: SCNA; (+) strand; PAM type: NNGRRT; PAM sequence: AAGAAT
ccaggtgtttggaaaagtag

SEQ ID NO: 9965 - DNA, 20 bp, Artificial Sequence
  Description of Artificial Sequence: Synthetic oligonucleotide
  Target: SCNA; (+) strand; PAM type: NNGRRT; PAM sequence: TAGAAT
aactgtgcaatagttacatg

SEQ ID NO: 9966 - DNA, 20 bp, Artificial Sequence
  Description of Artificial Sequence: Synthetic oligonucleotide
  Target: SCNA; (+) strand; PAM type: NNGRRT; PAM sequence: AAGGAT
aaaagataatcatagaaaac

SEQ ID NO: 9967 - DNA, 20 bp, Artificial Sequence
  Description of Artificial Sequence: Synthetic oligonucleotide
  Target: SCNA; (+) strand; PAM type: NNGRRT; PAM sequence: TTGAAT
catagaaaacaaggataaat

SEQ ID NO: 9968 - DNA, 20 bp, Artificial Sequence
  Description of Artificial Sequence: Synthetic oligonucleotide
  Target: SCNA; (+) strand; PAM type: NNGRRT; PAM sequence: GTGAAT
acatccttgaaattcttcaa

SEQ ID NO: 9969 - DNA, 20 bp, Artificial Sequence
  Description of Artificial Sequence: Synthetic oligonucleotide
  Target: SCNA; (+) strand; PAM type: NNGRRT; PAM sequence: TTGAGT
ttcaagtgaatacaaattag

SEQ ID NO: 9970 - DNA, 20 bp, Artificial Sequence
  Description of Artificial Sequence: Synthetic oligonucleotide
  Target: SCNA; (+) strand; PAM type: NNGRRT; PAM sequence: TTGGGT
gagttaagcattcagataat

SEQ ID NO: 9971 - DNA, 20 bp, Artificial Sequence
  Description of Artificial Sequence: Synthetic oligonucleotide
  Target: SCNA; (+) strand; PAM type: NNGRRT; PAM sequence: TTGAAT
aggtagacataataatcgac

SEQ ID NO: 9972 - DNA, 20 bp, Artificial Sequence
  Description of Artificial Sequence: Synthetic oligonucleotide
  Target: SCNA; (+) strand; PAM type: NNGRRT; PAM sequence: CAGGGT
atatgctttactatctaaag

SEQ ID NO: 9973 - DNA, 20 bp, Artificial Sequence
  Description of Artificial Sequence: Synthetic oligonucleotide
  Target: SCNA; (+) strand; PAM type: NNGRRT; PAM sequence: AAGAAT
tccctgggccatatttgaag

SEQ ID NO: 9974 - DNA, 20 bp, Artificial Sequence
  Description of Artificial Sequence: Synthetic oligonucleotide
  Target: SCNA; (+) strand; PAM type: NNGRRT; PAM sequence: TTGGAT
aggaagttcacacatttgtg

SEQ ID NO: 9975 - DNA, 20 bp, Artificial Sequence
  Description of Artificial Sequence: Synthetic oligonucleotide
  Target: SCNA; (+) strand; PAM type: NNGRRT; PAM sequence: ACGGGT
ccgcttgtggcccatgggcc

SEQ ID NO: 9976 - DNA, 20 bp, Artificial Sequence
  Description of Artificial Sequence: Synthetic oligonucleotide
  Target: SCNA; (+) strand; PAM type: NNGRRT; PAM sequence: CCGGGT
atttaacaaattaaaaagaa

SEQ ID NO: 9977 - DNA, 20 bp, Artificial Sequence
  Description of Artificial Sequence: Synthetic oligonucleotide
  Target: SCNA; (+) strand; PAM type: NNGRRT; PAM sequence: GTGAAT
aacaaattaaaaagaaccgg

SEQ ID NO: 9978 - DNA, 20 bp, Artificial Sequence
  Description of Artificial Sequence: Synthetic oligonucleotide
  Target: SCNA; (+) strand; PAM type: NNGRRT; PAM sequence: ATGGGT
aaaaattactgagaaatttt

SEQ ID NO: 9979 - DNA, 20 bp, Artificial Sequence
  Description of Artificial Sequence: Synthetic oligonucleotide
  Target: SCNA; (+) strand; PAM type: NNGRRT; PAM sequence: CAGAGT
ctagtcactatggtattgta

SEQ ID NO: 9980 - DNA, 20 bp, Artificial Sequence
  Description of Artificial Sequence: Synthetic oligonucleotide
  Target: SCNA; (+) strand; PAM type: NNGRRT; PAM sequence: TTGAGT
agatcaacaggaaacattta

SEQ ID NO: 9981 - DNA, 20 bp, Artificial Sequence
  Description of Artificial Sequence: Synthetic oligonucleotide
  Target: SCNA; (+) strand; PAM type: NNGRRT; PAM sequence: AGGAAT
tgggcaaaagtgtgtatctt

SEQ ID NO: 9982 - DNA, 20 bp, Artificial Sequence
  Description of Artificial Sequence: Synthetic oligonucleotide
  Target: SCNA; (+) strand; PAM type: NNGRRT; PAM sequence: AAGAAT
taggaatttaagatttaaga

SEQ ID NO: 9983 - DNA, 20 bp, Artificial Sequence
  Description of Artificial Sequence: Synthetic oligonucleotide
  Target: SCNA; (+) strand; PAM type: NNGRRT; PAM sequence: ATGGAT
cctgctatgctctggtgaca

SEQ ID NO: 9984 - DNA, 20 bp, Artificial Sequence
  Description of Artificial Sequence: Synthetic oligonucleotide
  Target: SCNA; (+) strand; PAM type: NNGRRT; PAM sequence: GAGAAT
caatggatcaaccagtatta

SEQ ID NO: 9985 - DNA, 20 bp, Artificial Sequence
  Description of Artificial Sequence: Synthetic oligonucleotide
  Target: SCNA; (+) strand; PAM type: NNGRRT; PAM sequence: CTGAAT
gagaattcacatgatagata

SEQ ID NO: 9986 - DNA, 20 bp, Artificial Sequence
  Description of Artificial Sequence: Synthetic oligonucleotide
  Target: SCNA; (+) strand; PAM type: NNGRRT; PAM sequence: CTGGAT
catgatagatactgaatttc

SEQ ID NO: 9987 - DNA, 20 bp, Artificial Sequence
  Description of Artificial Sequence: Synthetic oligonucleotide
  Target: SCNA; (+) strand; PAM type: NNGRRT; PAM sequence: ATGAAT
gttagctaagtcttaagttt

SEQ ID NO: 9988 - DNA, 20 bp, Artificial Sequence
  Description of Artificial Sequence: Synthetic oligonucleotide
  Target: SCNA; (+) strand; PAM type: NNGRRT; PAM sequence: GAGGAT
acaagatacaacattagaac

SEQ ID NO: 9989 - DNA, 20 bp, Artificial Sequence
  Description of Artificial Sequence: Synthetic oligonucleotide
  Target: SCNA; (+) strand; PAM type: NNGRRT; PAM sequence: ATGAAT
acgacaaattccagcttctt

SEQ ID NO: 9990 - DNA, 20 bp, Artificial Sequence
  Description of Artificial Sequence: Synthetic oligonucleotide
  Target: SCNA; (+) strand; PAM type: NNGRRT; PAM sequence: TTGAAT
gaagagccagttaaatacgt

SEQ ID NO: 9991 - DNA, 20 bp, Artificial Sequence
  Description of Artificial Sequence: Synthetic oligonucleotide
  Target: SCNA; (+) strand; PAM type: NNGRRT; PAM sequence: ATGAGT
tctattgcactaatctaggc

SEQ ID NO: 9992 - DNA, 20 bp, Artificial Sequence
  Description of Artificial Sequence: Synthetic oligonucleotide
  Target: SCNA; (+) strand; PAM type: NNGRRT; PAM sequence: GAGAAT
ataatggaagagatggggga

SEQ ID NO: 9993 - DNA, 20 bp, Artificial Sequence
  Description of Artificial Sequence: Synthetic oligonucleotide
  Target: SCNA; (+) strand; PAM type: NNGRRT; PAM sequence: AAGGAT
aaagagagattggaaaaaac

SEQ ID NO: 9994 - DNA, 20 bp, Artificial Sequence
  Description of Artificial Sequence: Synthetic oligonucleotide
  Target: SCNA; (+) strand; PAM type: NNGRRT; PAM sequence: GAGAGT
tagcgtgcaaagagaaatat

SEQ ID NO: 9995 - DNA, 20 bp, Artificial Sequence
  Description of Artificial Sequence: Synthetic oligonucleotide
  Target: SCNA; (+) strand; PAM type: NNGRRT; PAM sequence: AGGGAT
ctggctagaaatgtaggcaa

SEQ ID NO: 9996 - DNA, 20 bp, Artificial Sequence
  Description of Artificial Sequence: Synthetic oligonucleotide
  Target: SCNA; (+) strand; PAM type: NNGRRT; PAM sequence: GAGAAT
gagggaagaggaaaagcttg

SEQ ID NO: 9997 - DNA, 20 bp, Artificial Sequence
  Description of Artificial Sequence: Synthetic oligonucleotide
  Target: SCNA; (+) strand; PAM type: NNGRRT; PAM sequence: ATGAGT
gaagaggaaaagcttggaga

SEQ ID NO: 9998 - DNA, 20 bp, Artificial Sequence
  Description of Artificial Sequence: Synthetic oligonucleotide
  Target: SCNA; (+) strand; PAM type: NNGRRT; PAM sequence: GAGAGT
gttgtgagaaagtttttatg

SEQ ID NO: 9999 - DNA, 20 bp, Artificial Sequence
  Description of Artificial Sequence: Synthetic oligonucleotide
  Target: SCNA; (+) strand; PAM type: NNGRRT; PAM sequence: GGGAAT
tttttatggagagtgttctg

SEQ ID NO: 10000 - DNA, 20 bp, Artificial Sequence
  Description of Artificial Sequence: Synthetic oligonucleotide
  Target: SCNA; (+) strand; PAM type: NNGRRT; PAM sequence: AAGAAT
aataaattagagattaataa

SEQ ID NO: 10001 - DNA, 20 bp, Artificial Sequence
  Description of Artificial Sequence: Synthetic oligonucleotide
  Target: SCNA; (+) strand; PAM type: NNGRRT; PAM sequence: ATGAAT
gtgcaaacatgtatagctgc

SEQ ID NO: 10002 - DNA, 20 bp, Artificial Sequence
  Description of Artificial Sequence: Synthetic oligonucleotide
  Target: SCNA; (+) strand; PAM type: NNGRRT; PAM sequence: GAGGAT
gtacgtaagtgaaagcatta

SEQ ID NO: 10003 - DNA, 20 bp, Artificial Sequence
  Description of Artificial Sequence: Synthetic oligonucleotide
  Target: SCNA; (+) strand; PAM type: NNGRRT; PAM sequence: GTGAAT
gtgtagtcctaaaatccttt

SEQ ID NO: 10004 - DNA, 20 bp, Artificial Sequence
  Description of Artificial Sequence: Synthetic oligonucleotide
  Target: SCNA; (+) strand; PAM type: NNGRRT; PAM sequence: ATGAGT
ataaccagactgactgtaat

SEQ ID NO: 10005 - DNA, 20 bp, Artificial Sequence
  Description of Artificial Sequence: Synthetic oligonucleotide
  Target: SCNA; (+) strand; PAM type: NNGRRT; PAM sequence: AAGGAT
aatccttgtataaaccccac

SEQ ID NO: 10006 - DNA, 20 bp, Artificial Sequence
  Description of Artificial Sequence: Synthetic oligonucleotide
  Target: SCNA; (+) strand; PAM type: NNGRRT; PAM sequence: TGGGGT
atttgcattggttacttttg

SEQ ID NO: 10007 - DNA, 20 bp, Artificial Sequence
  Description of Artificial Sequence: Synthetic oligonucleotide
  Target: SCNA; (+) strand; PAM type: NNGRRT; PAM sequence: ATGAAT
ctgcactgtgcctggagaag

SEQ ID NO: 10008 - DNA, 20 bp, Artificial Sequence
  Description of Artificial Sequence: Synthetic oligonucleotide
  Target: SCNA; (+) strand; PAM type: NNGRRT; PAM sequence: CTGGAT
gcagtaatgacattttttaa

SEQ ID NO: 10009 - DNA, 20 bp, Artificial Sequence
  Description of Artificial Sequence: Synthetic oligonucleotide
  Target: SCNA; (+) strand; PAM type: NNGRRT; PAM sequence: AAGGAT
aactggatactttgttgtgg

SEQ ID NO: 10010 - DNA, 20 bp, Artificial Sequence
  Description of Artificial Sequence: Synthetic oligonucleotide
  Target: SCNA; (+) strand; PAM type: NNGRRT; PAM sequence: GTGAAT
atgtttaaaaaaatccctca

SEQ ID NO: 10011 - DNA, 20 bp, Artificial Sequence
  Description of Artificial Sequence: Synthetic oligonucleotide
  Target: SCNA; (+) strand; PAM type: NNGRRT; PAM sequence: CTGGAT
ccctgggagcacaattggcc

SEQ ID NO: 10012 - DNA, 20 bp, Artificial Sequence
  Description of Artificial Sequence: Synthetic oligonucleotide
  Target: SCNA; (+) strand; PAM type: NNGRRT; PAM sequence: GTGAGT
gcactccttttgtctacgct

SEQ ID NO: 10013 - DNA, 20 bp, Artificial Sequence
  Description of Artificial Sequence: Synthetic oligonucleotide
  Target: SCNA; (+) strand; PAM type: NNGRRT; PAM sequence: AGGAGT
gtgcactgtttgttttcagc

SEQ ID NO: 10014 - DNA, 20 bp, Artificial Sequence
  Description of Artificial Sequence: Synthetic oligonucleotide
  Target: SCNA; (+) strand; PAM type: NNGRRT; PAM sequence: TGGAAT
tctgtattggccccaatcat

SEQ ID NO: 10015 - DNA, 20 bp, Artificial Sequence
  Description of Artificial Sequence: Synthetic oligonucleotide
  Target: SCNA; (+) strand; PAM type: NNGRRT; PAM sequence: ATGAAT
ttcatactttgatttgctca

SEQ ID NO: 10016 - DNA, 20 bp, Artificial Sequence
  Description of Artificial Sequence: Synthetic oligonucleotide
  Target: SCNA; (+) strand; PAM type: NNGRRT; PAM sequence: ATGAAT
ttctcaggtgaaatggagat

SEQ ID NO: 10017 - DNA, 20 bp, Artificial Sequence
  Description of Artificial Sequence: Synthetic oligonucleotide
  Target: SCNA; (+) strand; PAM type: NNGRRT; PAM sequence: AAGAGT
ggagatatgaatttataata

SEQ ID NO: 10018 - DNA, 20 bp, Artificial Sequence
  Description of Artificial Sequence: Synthetic oligonucleotide
  Target: SCNA; (+) strand; PAM type: NNGRRT; PAM sequence: TGGAAT
aataaagagtgacaagttag

SEQ ID NO: 10019 - DNA, 20 bp, Artificial Sequence
  Description of Artificial Sequence: Synthetic oligonucleotide
  Target: SCNA; (+) strand; PAM type: NNGRRT; PAM sequence: AAGAAT
taacattatactcaaaaaag

SEQ ID NO: 10020 - DNA, 20 bp, Artificial Sequence
  Description of Artificial Sequence: Synthetic oligonucleotide
  Target: SCNA; (+) strand; PAM type: NNGRRT; PAM sequence: TTGAGT
gagattgtaaagaaatgaga

SEQ ID NO: 10021 - DNA, 20 bp, Artificial Sequence
  Description of Artificial Sequence: Synthetic oligonucleotide
  Target: SCNA; (+) strand; PAM type: NNGRRT; PAM sequence: TTGAGT
tttagtctttcagtcactca

SEQ ID NO: 10022 - DNA, 20 bp, Artificial Sequence
  Description of Artificial Sequence: Synthetic oligonucleotide
  Target: SCNA; (+) strand; PAM type: NNGRRT; PAM sequence: GTGGAT
cactgattgtgctagatact

SEQ ID NO: 10023 - DNA, 20 bp, Artificial Sequence
  Description of Artificial Sequence: Synthetic oligonucleotide
  Target: SCNA; (+) strand; PAM type: NNGRRT; PAM sequence: GTGAAT
atactgtggatgttacaaag

SEQ ID NO: 10024 - DNA, 20 bp, Artificial Sequence
  Description of Artificial Sequence: Synthetic oligonucleotide
  Target: SCNA; (+) strand; PAM type: NNGRRT; PAM sequence: AAGAAT
taaaatgtcttaatctgagg

SEQ ID NO: 10025 - DNA, 20 bp, Artificial Sequence
  Description of Artificial Sequence: Synthetic oligonucleotide
  Target: SCNA; (+) strand; PAM type: NNGRRT; PAM sequence: AAGAGT
acaggcatgaaaaaacaagg

SEQ ID NO: 10026 - DNA, 20 bp, Artificial Sequence
  Description of Artificial Sequence: Synthetic oligonucleotide
  Target: SCNA; (+) strand; PAM type: NNGRRT; PAM sequence: TTGAAT
agtgtaggtgaaagggaaat

SEQ ID NO: 10027 - DNA, 20 bp, Artificial Sequence
  Description of Artificial Sequence: Synthetic oligonucleotide
  Target: SCNA; (+) strand; PAM type: NNGRRT; PAM sequence: TAGAAT
caatgctatgtggaagttat

SEQ ID NO: 10028 - DNA, 20 bp, Artificial Sequence
  Description of Artificial Sequence: Synthetic oligonucleotide
  Target: SCNA; (+) strand; PAM type: NNGRRT; PAM sequence: AGGAGT
ttattaatggctactttaga

SEQ ID NO: 10029 - DNA, 20 bp, Artificial Sequence
  Description of Artificial Sequence: Synthetic oligonucleotide
  Target: SCNA; (+) strand; PAM type: NNGRRT; PAM sequence: AAGGAT
ttagaaggagtgcattcatt

SEQ ID NO: 10030 - DNA, 20 bp, Artificial Sequence
  Description of Artificial Sequence: Synthetic oligonucleotide
  Target: SCNA; (+) strand; PAM type: NNGRRT; PAM sequence: TTGGAT
taaatcttacattcacatat

SEQ ID NO: 10031 - DNA, 20 bp, Artificial Sequence
  Description of Artificial Sequence: Synthetic oligonucleotide
  Target: SCNA; (+) strand; PAM type: NNGRRT; PAM sequence: CTGAGT
tacattcacatatttggatt

SEQ ID NO: 10032 - DNA, 20 bp, Artificial Sequence
  Description of Artificial Sequence: Synthetic oligonucleotide
  Target: SCNA; (+) strand; PAM type: NNGRRT; PAM sequence: TGGAGT
ccttgctctgtcacccaggc

SEQ ID NO: 10033 - DNA, 20 bp, Artificial Sequence
  Description of Artificial Sequence: Synthetic oligonucleotide
  Target: SCNA; (+) strand; PAM type: NNGRRT; PAM sequence: CTGAGT
cctactgcaacctccacctt

SEQ ID NO: 10034 - DNA, 20 bp, Artificial Sequence
  Description of Artificial Sequence: Synthetic oligonucleotide
  Target: SCNA; (+) strand; PAM type: NNGRRT; PAM sequence: CCGAGT
gattctcatgcctcagtctc

SEQ ID NO: 10035 - DNA, 20 bp, Artificial Sequence
  Description of Artificial Sequence: Synthetic oligonucleotide
  Target: SCNA; (+) strand; PAM type: NNGRRT; PAM sequence: CAGGAT
ttttgtatttttagtagaga

SEQ ID NO: 10036 - DNA, 20 bp, Artificial Sequence
  Description of Artificial Sequence: Synthetic oligonucleotide
  Target: SCNA; (+) strand; PAM type: NNGRRT; PAM sequence: GAGGGT
ctcctggcctcaagtgatct

SEQ ID NO: 10037 - DNA, 20 bp, Artificial Sequence
  Description of Artificial Sequence: Synthetic oligonucleotide
  Target: SCNA; (+) strand; PAM type: NNGRRT; PAM sequence: TGGAAT
tgaaagaagttttaggtttg

SEQ ID NO: 10038 - DNA, 20 bp, Artificial Sequence
  Description of Artificial Sequence: Synthetic oligonucleotide
  Target: SCNA; (+) strand; PAM type: NNGRRT; PAM sequence: TAGAAT
ctaaagtccatagtttatat

SEQ ID NO: 10039 - DNA, 20 bp, Artificial Sequence
  Description of Artificial Sequence: Synthetic oligonucleotide
  Target: SCNA; (+) strand; PAM type: NNGRRT; PAM sequence: CTGAGT
tcactctgtattgtaaaatt

SEQ ID NO: 10040 - DNA, 20 bp, Artificial Sequence
  Description of Artificial Sequence: Synthetic oligonucleotide
  Target: SCNA; (+) strand; PAM type: NNGRRT; PAM sequence: GAGAAT
tccaccatgacagtatcata

SEQ ID NO: 10041 - DNA, 20 bp, Artificial Sequence
  Description of Artificial Sequence: Synthetic oligonucleotide
  Target: SCNA; (+) strand; PAM type: NNGRRT; PAM sequence: CAGAAT
actgatctttttactgtctc

SEQ ID NO: 10042 - DNA, 20 bp, Artificial Sequence
  Description of Artificial Sequence: Synthetic oligonucleotide
  Target: SCNA; (+) strand; PAM type: NNGRRT; PAM sequence: CAGAAT
ctccagaattttgtctcttt

SEQ ID NO: 10043 - DNA, 20 bp, Artificial Sequence
  Description of Artificial Sequence: Synthetic oligonucleotide
  Target: SCNA; (+) strand; PAM type: NNGRRT; PAM sequence: TGGAAT
tctttcagaatgtcatatat

SEQ ID NO: 10044 - DNA, 20 bp, Artificial Sequence
  Description of Artificial Sequence: Synthetic oligonucleotide
  Target: SCNA; (+) strand; PAM type: NNGRRT; PAM sequence: TAGAAT
tgtcatatattggaatcata

SEQ ID NO: 10045 - DNA, 20 bp, Artificial Sequence
  Description of Artificial Sequence: Synthetic oligonucleotide
  Target: SCNA; (+) strand; PAM type: NNGRRT; PAM sequence: CTGAAT
tagctcatttctttttatca

SEQ ID NO: 10046 - DNA, 20 bp, Artificial Sequence
  Description of Artificial Sequence: Synthetic oligonucleotide
  Target: SCNA; (+) strand; PAM type: NNGRRT; PAM sequence: TTGAGT
tatcactgaataatattcca

SEQ ID NO: 10047 - DNA, 20 bp, Artificial Sequence
  Description of Artificial Sequence: Synthetic oligonucleotide
  Target: SCNA; (+) strand; PAM type: NNGRRT; PAM sequence: ATGAAT
gcttccaagttttggcaatt

SEQ ID NO: 10048 - DNA, 20 bp, Artificial Sequence
  Description of Artificial Sequence: Synthetic oligonucleotide
  Target: SCNA; (+) strand; PAM type: NNGRRT; PAM sequence: TTGGGT
ggacacagtttacatttcct

SEQ ID NO: 10049 - DNA, 20 bp, Artificial Sequence
  Description of Artificial Sequence: Synthetic oligonucleotide
  Target: SCNA; (+) strand; PAM type: NNGRRT; PAM sequence: GTGAAT
acagtttacatttcctttgg

SEQ ID NO: 10050 - DNA, 20 bp, Artificial Sequence
  Description of Artificial Sequence: Synthetic oligonucleotide
  Target: SCNA; (+) strand; PAM type: NNGRRT; PAM sequence: TTGGAT
gaatatcatgtagcatgatt

SEQ ID NO: 10051 - DNA, 20 bp, Artificial Sequence
  Description of Artificial Sequence: Synthetic oligonucleotide
  Target: SCNA; (+) strand; PAM type: NNGRRT; PAM sequence: TTGAAT
gtccccacccaaatctcatc

SEQ ID NO: 10052 - DNA, 20 bp, Artificial Sequence
  Description of Artificial Sequence: Synthetic oligonucleotide
  Target: SCNA; (+) strand; PAM type: NNGRRT; PAM sequence: GCGAGT
cccatgctgttctcatgata

SEQ ID NO: 10053 - DNA, 20 bp, Artificial Sequence
  Description of Artificial Sequence: Synthetic oligonucleotide
  Target: SCNA; (+) strand; PAM type: NNGRRT; PAM sequence: GTGAGT
tgctgttctcatgatagcga

SEQ ID NO: 10054 - DNA, 20 bp, Artificial Sequence
  Description of Artificial Sequence: Synthetic oligonucleotide
  Target: SCNA; (+) strand; PAM type: NNGRRT; PAM sequence: GTGAGT
ctcctcagccatgctgagct

SEQ ID NO: 10055 - DNA, 20 bp, Artificial Sequence
  Description of Artificial Sequence: Synthetic oligonucleotide
  Target: SCNA; (+) strand; PAM type: NNGRRT; PAM sequence: GTGAAT
attttgtattgccagcatta

SEQ ID NO: 10056 - DNA, 20 bp, Artificial Sequence
  Description of Artificial Sequence: Synthetic oligonucleotide
  Target: SCNA; (+) strand; PAM type: NNGRRT; PAM sequence: ATGAAT
tgtattgccagcattagtga

SEQ ID NO: 10057 - DNA, 20 bp, Artificial Sequence
  Description of Artificial Sequence: Synthetic oligonucleotide
  Target: SCNA; (+) strand; PAM type: NNGRRT; PAM sequence: TTGGAT
catgctgtgctcttggtgtt

SEQ ID NO: 10058 - DNA, 20 bp, Artificial Sequence
  Description of Artificial Sequence: Synthetic oligonucleotide
  Target: SCNA; (+) strand; PAM type: NNGRRT; PAM sequence: CTGAGT
tgagctttactgtttgatag

SEQ ID NO: 10059 - DNA, 20 bp, Artificial Sequence
  Description of Artificial Sequence: Synthetic oligonucleotide
  Target: SCNA; (+) strand; PAM type: NNGRRT; PAM sequence: GAGAAT
tctaccgaaggaaatatgtt

SEQ ID NO: 10060 - DNA, 20 bp, Artificial Sequence
  Description of Artificial Sequence: Synthetic oligonucleotide
  Target: SCNA; (+) strand; PAM type: NNGRRT; PAM sequence: ATGAGT
tttttacagttaaactaata

SEQ ID NO: 10061 - DNA, 20 bp, Artificial Sequence
  Description of Artificial Sequence: Synthetic oligonucleotide
  Target: SCNA; (+) strand; PAM type: NNGRRT; PAM sequence: ATGGGT
ctttcattgtcctctctttc

SEQ ID NO: 10062 - DNA, 20 bp, Artificial Sequence
  Description of Artificial Sequence: Synthetic oligonucleotide
  Target: SCNA; (+) strand; PAM type: NNGRRT; PAM sequence: TTGAGT
tctgttgattgctagcaatt

SEQ ID NO: 10063 - DNA, 20 bp, Artificial Sequence
  Description of Artificial Sequence: Synthetic oligonucleotide
  Target: SCNA; (+) strand; PAM type: NNGRRT; PAM sequence: ATGAAT
gaacactttttctgatatgt

SEQ ID NO: 10064 - DNA, 20 bp, Artificial Sequence
  Description of Artificial Sequence: Synthetic oligonucleotide
  Target: SCNA; (+) strand; PAM type: NNGRRT; PAM sequence: AAGAAT
atatgtatgaatatatagac

SEQ ID NO: 10065 - DNA, 20 bp, Artificial Sequence
  Description of Artificial Sequence: Synthetic oligonucleotide
  Target: SCNA; (+) strand; PAM type: NNGRRT; PAM sequence: CTGGAT
acaagaatcatatgatacac

SEQ ID NO: 10066 - DNA, 20 bp, Artificial Sequence
  Description of Artificial Sequence: Synthetic oligonucleotide
  Target: SCNA; (+) strand; PAM type: NNGRRT; PAM sequence: TGGAAT
agtaaggcaaccactgaact

SEQ ID NO: 10067 - DNA, 20 bp, Artificial Sequence
  Description of Artificial Sequence: Synthetic oligonucleotide
  Target: SCNA; (+) strand; PAM type: NNGRRT; PAM sequence: GTGAAT
aaccactgaacttggaatca

SEQ ID NO: 10068 - DNA, 20 bp, Artificial Sequence
  Description of Artificial Sequence: Synthetic oligonucleotide
  Target: SCNA; (+) strand; PAM type: NNGRRT; PAM sequence: CTGGGT
tgaattacaatttgtttctt

SEQ ID NO: 10069 - DNA, 20 bp, Artificial Sequence
  Description of Artificial Sequence: Synthetic oligonucleotide
  Target: SCNA; (+) strand; PAM type: NNGRRT; PAM sequence: TGGAGT
atgtaacgtcacattagtgt

SEQ ID NO: 10070 - DNA, 20 bp, Artificial Sequence
  Description of Artificial Sequence: Synthetic oligonucleotide
  Target: SCNA; (+) strand; PAM type: NNGRRT; PAM sequence: TAGAGT
gataagcaataaacttcctt

SEQ ID NO: 10071 - DNA, 20 bp, Artificial Sequence
  Description of Artificial Sequence: Synthetic oligonucleotide
  Target: SCNA; (+) strand; PAM type: NNGRRT; PAM sequence: GAGGAT
agagtatacggagaaatggg

SEQ ID NO: 10072 - DNA, 20 bp, Artificial Sequence
  Description of Artificial Sequence: Synthetic oligonucleotide
  Target: SCNA; (+) strand; PAM type: NNGRRT; PAM sequence: TAGAAT
atttctagaaatcaaatttc

SEQ ID NO: 10073 - DNA, 20 bp, Artificial Sequence
  Description of Artificial Sequence: Synthetic oligonucleotide
  Target: SCNA; (+) strand; PAM type: NNGRRT; PAM sequence: TGGGAT
ttattgataatgctaaaata

SEQ ID NO: 10074 - DNA, 20 bp, Artificial Sequence
  Description of Artificial Sequence: Synthetic oligonucleotide
  Target: SCNA; (+) strand; PAM type: NNGRRT; PAM sequence: TAGAAT
tagagatccttaaattgtgc

SEQ ID NO: 10075 - DNA, 20 bp, Artificial Sequence
  Description of Artificial Sequence: Synthetic oligonucleotide
  Target: SCNA; (+) strand; PAM type: NNGRRT; PAM sequence: GAGAAT
catagagatcctctcgcata

SEQ ID NO: 10076 - DNA, 20 bp, Artificial Sequence
  Description of Artificial Sequence: Synthetic oligonucleotide
  Target: SCNA; (+) strand; PAM type: NNGRRT; PAM sequence: AAGAAT
atagagaattcctgctactc

SEQ ID NO: 10077 - DNA, 20 bp, Artificial Sequence
  Description of Artificial Sequence: Synthetic oligonucleotide
  Target: SCNA; (+) strand; PAM type: NNGRRT; PAM sequence: CTGGAT
accttcagtaccaagtaaga

SEQ ID NO: 10078 - DNA, 20 bp, Artificial Sequence
  Description of Artificial Sequence: Synthetic oligonucleotide
  Target: SCNA; (+) strand; PAM type: NNGRRT; PAM sequence: TAGAAT
cagtaccaagtaagactgga

SEQ ID NO: 10079 - DNA, 20 bp, Artificial Sequence
  Description of Artificial Sequence: Synthetic oligonucleotide
  Target: SCNA; (+) strand; PAM type: NNGRRT; PAM sequence: TGGAAT
tgcccagaagttaagaggtt

SEQ ID NO: 10080 - DNA, 20 bp, Artificial Sequence
  Description of Artificial Sequence: Synthetic oligonucleotide
  Target: SCNA; (+) strand; PAM type: NNGRRT; PAM sequence: TGGAGT
aagacattgaagtaagtgtc

SEQ ID NO: 10081 - DNA, 20 bp, Artificial Sequence
  Description of Artificial Sequence: Synthetic oligonucleotide
  Target: SCNA; (+) strand; PAM type: NNGRRT; PAM sequence: TGGGAT
tctggagtctaaaatagatc

SEQ ID NO: 10082 - DNA, 20 bp, Artificial Sequence
  Description of Artificial Sequence: Synthetic oligonucleotide
  Target: SCNA; (+) strand; PAM type: NNGRRT; PAM sequence: GGGAAT
gcttttctgagatttaatat

SEQ ID NO: 10083 - DNA, 20 bp, Artificial Sequence
  Description of Artificial Sequence: Synthetic oligonucleotide
  Target: SCNA; (+) strand; PAM type: NNGRRT; PAM sequence: AAGAGT
atgggaatgaggtgtaaaag

SEQ ID NO: 10084 - DNA, 20 bp, Artificial Sequence
  Description of Artificial Sequence: Synthetic oligonucleotide
  Target: SCNA; (+) strand; PAM type: NNGRRT; PAM sequence: TAGAAT
tctcactcattcttctatcc

SEQ ID NO: 10085 - DNA, 20 bp, Artificial Sequence
  Description of Artificial Sequence: Synthetic oligonucleotide
  Target: SCNA; (+) strand; PAM type: NNGRRT; PAM sequence: TCGAAT
tttttagattgttttgctgc

SEQ ID NO: 10086 - DNA, 20 bp, Artificial Sequence
  Description of Artificial Sequence: Synthetic oligonucleotide
  Target: SCNA; (+) strand; PAM type: NNGRRT; PAM sequence: AGGGAT
atcattactggttgctatct

SEQ ID NO: 10087 - DNA, 20 bp, Artificial Sequence
  Description of Artificial Sequence: Synthetic oligonucleotide
  Target: SCNA; (+) strand; PAM type: NNGRRT; PAM sequence: GAGAAT
ctgttgggaggccgaggcag

SEQ ID NO: 10088 - DNA, 20 bp, Artificial Sequence
  Description of Artificial Sequence: Synthetic oligonucleotide
  Target: SCNA; (+) strand; PAM type: NNGRRT; PAM sequence: AGGAGT
caggagaattgcttgagccc

SEQ ID NO: 10089 - DNA, 20 bp, Artificial Sequence
  Description of Artificial Sequence: Synthetic oligonucleotide
  Target: SCNA; (+) strand; PAM type: NNGRRT; PAM sequence: AAGGAT
tttctagcttaggtcacata

SEQ ID NO: 10090 - DNA, 20 bp, Artificial Sequence
  Description of Artificial Sequence: Synthetic oligonucleotide
  Target: SCNA; (+) strand; PAM type: NNGRRT; PAM sequence: CTGAAT
ctggcttgtgtgaaatttcc

SEQ ID NO: 10091 - DNA, 20 bp, Artificial Sequence
  Description of Artificial Sequence: Synthetic oligonucleotide
  Target: SCNA; (+) strand; PAM type: NNGRRT; PAM sequence: AAGAGT
tcagaaacaatgcatcttag

SEQ ID NO: 10092 - DNA, 20 bp, Artificial Sequence
  Description of Artificial Sequence: Synthetic oligonucleotide
  Target: SCNA; (+) strand; PAM type: NNGRRT; PAM sequence: CAGAAT
gacattaagaaagacatatt

SEQ ID NO: 10093 - DNA, 20 bp, Artificial Sequence
  Description of Artificial Sequence: Synthetic oligonucleotide
  Target: SCNA; (+) strand; PAM type: NNGRRT; PAM sequence: ACGAAT
aaatacataacaaacactag

SEQ ID NO: 10094 - DNA, 20 bp, Artificial Sequence
  Description of Artificial Sequence: Synthetic oligonucleotide
  Target: SCNA; (+) strand; PAM type: NNGRRT; PAM sequence: AAGAAT
ttaaaagttaactttaaaag

SEQ ID NO: 10095 - DNA, 20 bp, Artificial Sequence
  Description of Artificial Sequence: Synthetic oligonucleotide
  Target: SCNA; (+) strand; PAM type: NNGRRT; PAM sequence: TTGGGT
tgtctgtgtgtctggctgat

SEQ ID NO: 10096 - DNA, 20 bp, Artificial Sequence
  Description of Artificial Sequence: Synthetic oligonucleotide
  Target: SCNA; (+) strand; PAM type: NNGRRT; PAM sequence: TTGGGT
atttgggttcaattaaaatc

SEQ ID NO: 10097 - DNA, 20 bp, Artificial Sequence
  Description of Artificial Sequence: Synthetic oligonucleotide
  Target: SCNA; (+) strand; PAM type: NNGRRT; PAM sequence: ATGAAT
ataattccatacaaaatata

SEQ ID NO: 10098 - DNA, 20 bp, Artificial Sequence
  Description of Artificial Sequence: Synthetic oligonucleotide
  Target: SCNA; (+) strand; PAM type: NNGRRT; PAM sequence: CAGAAT
ttacttctacttttgtgagg

SEQ ID NO: 10099 - DNA, 20 bp, Artificial Sequence
  Description of Artificial Sequence: Synthetic oligonucleotide
  Target: SCNA; (+) strand; PAM type: NNGRRT; PAM sequence: TAGGAT
caaacgatttcactggcatc

SEQ ID NO: 10100 - DNA, 20 bp, Artificial Sequence
  Description of Artificial Sequence: Synthetic oligonucleotide
  Target: SCNA; (+) strand; PAM type: NNGRRT; PAM sequence: TTGGAT
catctaggatctgatatatt

SEQ ID NO: 10101 - DNA, 20 bp, Artificial Sequence
  Description of Artificial Sequence: Synthetic oligonucleotide
  Target: SCNA; (+) strand; PAM type: NNGRRT; PAM sequence: AAGAGT
tgatatattttggattgggg

SEQ ID NO: 10102 - DNA, 20 bp, Artificial Sequence
  Description of Artificial Sequence: Synthetic oligonucleotide
  Target: SCNA; (+) strand; PAM type: NNGRRT; PAM sequence: TTGGAT
aaacacaggcaaaatttgca

SEQ ID NO: 10103 - DNA, 20 bp, Artificial Sequence
  Description of Artificial Sequence: Synthetic oligonucleotide
  Target: SCNA; (+) strand; PAM type: NNGRRT; PAM sequence: TAGGAT
ccttccacataattttgctg

SEQ ID NO: 10104 - DNA, 20 bp, Artificial Sequence
  Description of Artificial Sequence: Synthetic oligonucleotide
  Target: SCNA; (+) strand; PAM type: NNGRRT; PAM sequence: AAGGAT
ttgattccctgtttcagagg

SEQ ID NO: 10105 - DNA, 20 bp, Artificial Sequence
  Description of Artificial Sequence: Synthetic oligonucleotide
  Target: SCNA; (+) strand; PAM type: NNGRRT; PAM sequence: CAGAGT
agatcaaacattaaagtaag

SEQ ID NO: 10106 - DNA, 20 bp, Artificial Sequence
  Description of Artificial Sequence: Synthetic oligonucleotide
  Target: SCNA; (+) strand; PAM type: NNGRRT; PAM sequence: ATGGAT
tagttaaatcagtatagact

SEQ ID NO: 10107 - DNA, 20 bp, Artificial Sequence
  Description of Artificial Sequence: Synthetic oligonucleotide
  Target: SCNA; (+) strand; PAM type: NNGRRT; PAM sequence: CAGAGT
taaagaagcctggtgcctct

SEQ ID NO: 10108 - DNA, 20 bp, Artificial Sequence
  Description of Artificial Sequence: Synthetic oligonucleotide
  Target: SCNA; (+) strand; PAM type: NNGRRT; PAM sequence: ATGAGT
ctcagagttccacacagctg

SEQ ID NO: 10109 - DNA, 20 bp, Artificial Sequence
  Description of Artificial Sequence: Synthetic oligonucleotide
  Target: SCNA; (+) strand; PAM type: NNGRRT; PAM sequence: TTGAGT
tcaataaccatgagaaacta

SEQ ID NO: 10110 - DNA, 20 bp, Artificial Sequence
  Description of Artificial Sequence: Synthetic oligonucleotide
  Target: SCNA; (+) strand; PAM type: NNGRRT; PAM sequence: GAGAGT
ttcaaaggaaatgcatcgtg

SEQ ID NO: 10111 - DNA, 20 bp, Artificial Sequence
  Description of Artificial Sequence: Synthetic oligonucleotide
  Target: SCNA; (+) strand; PAM type: NNGRRT; PAM sequence: AGGAGT
gaaatgcatcgtggagagtg

SEQ ID NO: 10112 - DNA, 20 bp, Artificial Sequence
  Description of Artificial Sequence: Synthetic oligonucleotide
  Target: SCNA; (+) strand; PAM type: NNGRRT; PAM sequence: AAGGGT
atcgtggagagtgaggagtg

SEQ ID NO: 10113 - DNA, 20 bp, Artificial Sequence
  Description of Artificial Sequence: Synthetic oligonucleotide
  Target: SCNA; (+) strand; PAM type: NNGRRT; PAM sequence: GTGGAT
tgctcaccaactgcctaata

SEQ ID NO: 10114 - DNA, 20 bp, Artificial Sequence
  Description of Artificial Sequence: Synthetic oligonucleotide
  Target: SCNA; (+) strand; PAM type: NNGRRT; PAM sequence: ATGAAT
aagaaaatacttaacattat

SEQ ID NO: 10115 - DNA, 20 bp, Artificial Sequence
  Description of Artificial Sequence: Synthetic oligonucleotide
  Target: SCNA; (+) strand; PAM type: NNGRRT; PAM sequence: ATGAGT
aaatcttcaagatttatctc

SEQ ID NO: 10116 - DNA, 20 bp, Artificial Sequence
  Description of Artificial Sequence: Synthetic oligonucleotide
  Target: SCNA; (+) strand; PAM type: NNGRRT; PAM sequence: TAGAGT
atcatgataagtatacagca

SEQ ID NO: 10117 - DNA, 20 bp, Artificial Sequence
  Description of Artificial Sequence: Synthetic oligonucleotide
  Target: SCNA; (+) strand; PAM type: NNGRRT; PAM sequence: TAGAAT
cagcatagagttaagtttat

SEQ ID NO: 10118 - DNA, 20 bp, Artificial Sequence
  Description of Artificial Sequence: Synthetic oligonucleotide
  Target: SCNA; (+) strand; PAM type: NNGRRT; PAM sequence: TAGAAT
taacgtgcagtgaaatcata

SEQ ID NO: 10119 - DNA, 20 bp, Artificial Sequence
  Description of Artificial Sequence: Synthetic oligonucleotide
  Target: SCNA; (+) strand; PAM type: NNGRRT; PAM sequence: GTGAAT
tcatatagaattctgaagta

SEQ ID NO: 10120 - DNA, 20 bp, Artificial Sequence
  Description of Artificial Sequence: Synthetic oligonucleotide
  Target: SCNA; (+) strand; PAM type: NNGRRT; PAM sequence: AGGAAT
gtctttttaaaattaaaatc

SEQ ID NO: 10121 - DNA, 20 bp, Artificial Sequence
  Description of Artificial Sequence: Synthetic oligonucleotide
  Target: SCNA; (+) strand; PAM type: NNGRRT; PAM sequence: TAGAGT
agggaaaaagacagtgtagt

SEQ ID NO: 10122 - DNA, 20 bp, Artificial Sequence
  Description of Artificial Sequence: Synthetic oligonucleotide
  Target: SCNA; (+) strand; PAM type: NNGRRT; PAM sequence: GAGGGT
gtgtagttagagtgtagttg

SEQ ID NO: 10123 - DNA, 20 bp, Artificial Sequence
  Description of Artificial Sequence: Synthetic oligonucleotide
  Target: SCNA; (+) strand; PAM type: NNGRRT; PAM sequence: AGGGAT
gggtggcatacaaggagaaa

SEQ ID NO: 10124 - DNA, 20 bp, Artificial Sequence
  Description of Artificial Sequence: Synthetic oligonucleotide
  Target: SCNA; (+) strand; PAM type: NNGRRT; PAM sequence: CTGGAT
ctatgtatgataagaggtca

SEQ ID NO: 10125 - DNA, 20 bp, Artificial Sequence
  Description of Artificial Sequence: Synthetic oligonucleotide
  Target: SCNA; (+) strand; PAM type: NNGRRT; PAM sequence: GGGGAT
ctggatggttgggagcagag

SEQ ID NO: 10126 - DNA, 20 bp, Artificial Sequence
  Description of Artificial Sequence: Synthetic oligonucleotide
  Target: SCNA; (+) strand; PAM type: NNGRRT; PAM sequence: AAGAAT
tgatctggtttctttcttaa

SEQ ID NO: 10127 - DNA, 20 bp, Artificial Sequence
  Description of Artificial Sequence: Synthetic oligonucleotide
  Target: SCNA; (+) strand; PAM type: NNGRRT; PAM sequence: AAGAAT
aagaattattccgactgctc

SEQ ID NO: 10128 - DNA, 20 bp, Artificial Sequence
  Description of Artificial Sequence: Synthetic oligonucleotide
  Target: SCNA; (+) strand; PAM type: NNGRRT; PAM sequence: TTGGGT
ctgctcaagaatggactagg

SEQ ID NO: 10129 - DNA, 20 bp, Artificial Sequence
  Description of Artificial Sequence: Synthetic oligonucleotide
  Target: SCNA; (+) strand; PAM type: NNGRRT; PAM sequence: AGGAGT
atcagttcagaggttaggga

SEQ ID NO: 10130 - DNA, 20 bp, Artificial Sequence
  Description of Artificial Sequence: Synthetic oligonucleotide
  Target: SCNA; (+) strand; PAM type: NNGRRT; PAM sequence: TAGGGT
gaaatgatgaaggcctagcc

SEQ ID NO: 10131 - DNA, 20 bp, Artificial Sequence
  Description of Artificial Sequence: Synthetic oligonucleotide
  Target: SCNA; (+) strand; PAM type: NNGRRT; PAM sequence: GGGGAT
aagggagacatggtaagact

SEQ ID NO: 10132 - DNA, 20 bp, Artificial Sequence
  Description of Artificial Sequence: Synthetic oligonucleotide
  Target: SCNA; (+) strand; PAM type: NNGRRT; PAM sequence: TTGAAT
ggtaagactggggatacatt

SEQ ID NO: 10133 - DNA, 20 bp, Artificial Sequence
  Description of Artificial Sequence: Synthetic oligonucleotide
  Target: SCNA; (+) strand; PAM type: NNGRRT; PAM sequence: AAGGGT
gtaggtaaaattattagctt

SEQ ID NO: 10134 - DNA, 20 bp, Artificial Sequence
  Description of Artificial Sequence: Synthetic oligonucleotide
  Target: SCNA; (+) strand; PAM type: NNGRRT; PAM sequence: AAGGAT
tataaaaggtatgaaaggaa

SEQ ID NO: 10135 - DNA, 20 bp, Artificial Sequence
  Description of Artificial Sequence: Synthetic oligonucleotide
  Target: SCNA; (+) strand; PAM type: NNGRRT; PAM sequence: AAGGAT
ggtatgaaaggaaaaggatc

SEQ ID NO: 10136 - DNA, 20 bp, Artificial Sequence
  Description of Artificial Sequence: Synthetic oligonucleotide
  Target: SCNA; (+) strand; PAM type: NNGRRT; PAM sequence: AGGGAT
attactgtgtttcagcagtt

SEQ ID NO: 10137 - DNA, 20 bp, Artificial Sequence
  Description of Artificial Sequence: Synthetic oligonucleotide
  Target: SCNA; (+) strand; PAM type: NNGRRT; PAM sequence: TGGAGT
agcagttagggataactttt

SEQ ID NO: 10138 - DNA, 20 bp, Artificial Sequence
  Description of Artificial Sequence: Synthetic oligonucleotide
  Target: SCNA; (+) strand; PAM type: NNGRRT; PAM sequence: ATGGAT
cttgggctggacttttttgc

SEQ ID NO: 10139 - DNA, 20 bp, Artificial Sequence
  Description of Artificial Sequence: Synthetic oligonucleotide
  Target: SCNA; (+) strand; PAM type: NNGRRT; PAM sequence: TAGAAT
tttgaagatacttgtctacc

SEQ ID NO: 10140 - DNA, 20 bp, Artificial Sequence
  Description of Artificial Sequence: Synthetic oligonucleotide
  Target: SCNA; (+) strand; PAM type: NNGRRT; PAM sequence: AAGAAT
atacttgtctacctagaatg

SEQ ID NO: 10141 - DNA, 20 bp, Artificial Sequence
  Description of Artificial Sequence: Synthetic oligonucleotide
  Target: SCNA; (+) strand; PAM type: NNGRRT; PAM sequence: TTGAGT
acctagaatgaagaattttg

SEQ ID NO: 10142 - DNA, 20 bp, Artificial Sequence
  Description of Artificial Sequence: Synthetic oligonucleotide
  Target: SCNA; (+) strand; PAM type: NNGRRT; PAM sequence: CTGAGT
aggccagataaaacaaggcc

SEQ ID NO: 10143 - DNA, 20 bp, Artificial Sequence
  Description of Artificial Sequence: Synthetic oligonucleotide
  Target: SCNA; (+) strand; PAM type: NNGRRT; PAM sequence: AAGAGT
aaaacaaggccctgagtaac

SEQ ID NO: 10144 - DNA, 20 bp, Artificial Sequence
  Description of Artificial Sequence: Synthetic oligonucleotide
  Target: SCNA; (+) strand; PAM type: NNGRRT; PAM sequence: GAGAGT
ccttgggccttgattctata

SEQ ID NO: 10145 - DNA, 20 bp, Artificial Sequence
  Description of Artificial Sequence: Synthetic oligonucleotide
  Target: SCNA; (+) strand; PAM type: NNGRRT; PAM sequence: ATGGAT
gtactgccaaaaaacatttc

SEQ ID NO: 10146 - DNA, 20 bp, Artificial Sequence
  Description of Artificial Sequence: Synthetic oligonucleotide
  Target: SCNA; (+) strand; PAM type: NNGRRT; PAM sequence: ATGAAT
aaaaatagagatcaatgtag

SEQ ID NO: 10147 - DNA, 20 bp, Artificial Sequence
  Description of Artificial Sequence: Synthetic oligonucleotide
  Target: SCNA; (+) strand; PAM type: NNGRRT; PAM sequence: ATGAAT
aatgtagatgaatttataag

SEQ ID NO: 10148 - DNA, 20 bp, Artificial Sequence
  Description of Artificial Sequence: Synthetic oligonucleotide
  Target: SCNA; (+) strand; PAM type: NNGRRT; PAM sequence: AAGAAT
gaaatttcattctctccatg

SEQ ID NO: 10149 - DNA, 20 bp, Artificial Sequence
  Description of Artificial Sequence: Synthetic oligonucleotide
  Target: SCNA; (+) strand; PAM type: NNGRRT; PAM sequence: ATGGGT
tgatatttatcacatgaaaa

SEQ ID NO: 10150 - DNA, 20 bp, Artificial Sequence
  Description of Artificial Sequence: Synthetic oligonucleotide
  Target: SCNA; (+) strand; PAM type: NNGRRT; PAM sequence: TTGAAT
caaccaatttctatttacag

SEQ ID NO: 10151 - DNA, 20 bp, Artificial Sequence
  Description of Artificial Sequence: Synthetic oligonucleotide
  Target: SCNA; (+) strand; PAM type: NNGRRT; PAM sequence: TGGGAT
aaaatgtgaacctagacatt

SEQ ID NO: 10152 - DNA, 20 bp, Artificial Sequence
  Description of Artificial Sequence: Synthetic oligonucleotide
  Target: SCNA; (+) strand; PAM type: NNGRRT; PAM sequence: AAGAAT
caggcatgctagttactatt

SEQ ID NO: 10153 - DNA, 20 bp, Artificial Sequence
  Description of Artificial Sequence: Synthetic oligonucleotide
  Target: SCNA; (+) strand; PAM type: NNGRRT; PAM sequence: ATGAAT
agattataagggaagcacta

SEQ ID NO: 10154 - DNA, 20 bp, Artificial Sequence
  Description of Artificial Sequence: Synthetic oligonucleotide
  Target: SCNA; (+) strand; PAM type: NNGRRT; PAM sequence: ATGGAT
acaaaataaacacatgcact

SEQ ID NO: 10155 - DNA, 20 bp, Artificial Sequence
  Description of Artificial Sequence: Synthetic oligonucleotide
  Target: SCNA; (+) strand; PAM type: NNGRRT; PAM sequence: TGGGGT
ataaacacatgcactatgga

SEQ ID NO: 10156 - DNA, 20 bp, Artificial Sequence
  Description of Artificial Sequence: Synthetic oligonucleotide
  Target: SCNA; (+) strand; PAM type: NNGRRT; PAM sequence: AAGAGT
tagaagtaaacgggcagcta

SEQ ID NO: 10157 - DNA, 20 bp, Artificial Sequence
  Description of Artificial Sequence: Synthetic oligonucleotide
  Target: SCNA; (+) strand; PAM type: NNGRRT; PAM sequence: GTGGAT
tatcgaaaagttggcatact

SEQ ID NO: 10158 - DNA, 20 bp, Artificial Sequence
  Description of Artificial Sequence: Synthetic oligonucleotide
  Target: SCNA; (+) strand; PAM type: NNGRRT; PAM sequence: AAGGAT
aatgagaaaggcaaagtttt

SEQ ID NO: 10159 - DNA, 20 bp, Artificial Sequence
  Description of Artificial Sequence: Synthetic oligonucleotide
  Target: SCNA; (+) strand; PAM type: NNGRRT; PAM sequence: AAGGAT
ttaaggatatatgaaaatga

SEQ ID NO: 10160 - DNA, 20 bp, Artificial Sequence
  Description of Artificial Sequence: Synthetic oligonucleotide
  Target: SCNA; (+) strand; PAM type: NNGRRT; PAM sequence: TGGAAT
gggggcagagccctgacaag

SEQ ID NO: 10161 - DNA, 20 bp, Artificial Sequence
  Description of Artificial Sequence: Synthetic oligonucleotide
  Target: SCNA; (+) strand; PAM type: NNGRRT; PAM sequence: GGGAGT
aacattatgaaaggccttga

SEQ ID NO: 10162 - DNA, 20 bp, Artificial Sequence
  Description of Artificial Sequence: Synthetic oligonucleotide
  Target: SCNA; (+) strand; PAM type: NNGRRT; PAM sequence: GTGAGT
ttatgaaaggccttgaggga

SEQ ID NO: 10163 - DNA, 20 bp, Artificial Sequence
  Description of Artificial Sequence: Synthetic oligonucleotide
  Target: SCNA; (+) strand; PAM type: NNGRRT; PAM sequence: GAGGAT
acacagcatttggccctctg

SEQ ID NO: 10164 - DNA, 20 bp, Artificial Sequence
  Description of Artificial Sequence: Synthetic oligonucleotide
  Target: SCNA; (+) strand; PAM type: NNGRRT; PAM sequence: GGGAGT
cagtgacaagacaccatctt

SEQ ID NO: 10165 - DNA, 20 bp, Artificial Sequence
  Description of Artificial Sequence: Synthetic oligonucleotide
  Target: SCNA; (+) strand; PAM type: NNGRRT; PAM sequence: TGGAGT
gaagacaaatgccttgatct

SEQ ID NO: 10166 - DNA, 20 bp, Artificial Sequence
  Description of Artificial Sequence: Synthetic oligonucleotide
  Target: SCNA; (+) strand; PAM type: NNGRRT; PAM sequence: AAGAAT
cccaaaacatttataatagt

SEQ ID NO: 10167 - DNA, 20 bp, Artificial Sequence
  Description of Artificial Sequence: Synthetic oligonucleotide
  Target: SCNA; (+) strand; PAM type: NNGRRT; PAM sequence: ATGAGT
agaatttgcaaaatcaaaca

SEQ ID NO: 10168 - DNA, 20 bp, Artificial Sequence
  Description of Artificial Sequence: Synthetic oligonucleotide
  Target: SCNA; (+) strand; PAM type: NNGRRT; PAM sequence: CTGGAT
tgatttactatctaatagta

SEQ ID NO: 10169 - DNA, 20 bp, Artificial Sequence
  Description of Artificial Sequence: Synthetic oligonucleotide
  Target: SCNA; (+) strand; PAM type: NNGRRT; PAM sequence: CTGGAT
tgttttgctttttaataata

SEQ ID NO: 10170 - DNA, 20 bp, Artificial Sequence
  Description of Artificial Sequence: Synthetic oligonucleotide
  Target: SCNA; (+) strand; PAM type: NNGRRT; PAM sequence: CTGGAT
aataatactggataccaata

SEQ ID NO: 10171 - DNA, 20 bp, Artificial Sequence
  Description of Artificial Sequence: Synthetic oligonucleotide
  Target: SCNA; (+) strand; PAM type: NNGRRT; PAM sequence: GGGGAT
gtttgatagttgggaacaaa

SEQ ID NO: 10172 - DNA, 20 bp, Artificial Sequence
  Description of Artificial Sequence: Synthetic oligonucleotide
  Target: SCNA; (+) strand; PAM type: NNGRRT; PAM sequence: CGGAGT
ttttttgtttgtttttgaga

SEQ ID NO: 10173 - DNA, 20 bp, Artificial Sequence
  Description of Artificial Sequence: Synthetic oligonucleotide
  Target: SCNA; (+) strand; PAM type: NNGRRT; PAM sequence: TGGAGT
tcttgctctgtcacccaggc

SEQ ID NO: 10174 - DNA, 20 bp, Artificial Sequence
  Description of Artificial Sequence: Synthetic oligonucleotide
  Target: SCNA; (+) strand; PAM type: NNGRRT; PAM sequence: CTGGGT
ctcactgcaaactccatctc

SEQ ID NO: 10175 - DNA, 20 bp, Artificial Sequence
  Description of Artificial Sequence: Synthetic oligonucleotide
  Target: SCNA; (+) strand; PAM type: NNGRRT; PAM sequence: TGGGAT
ggttcagcctcctaagtagc

SEQ ID NO: 10176 - DNA, 20 bp, Artificial Sequence
  Description of Artificial Sequence: Synthetic oligonucleotide
  Target: SCNA; (+) strand; PAM type: NNGRRT; PAM sequence: TAGAGT
gcctcctaagtagctgggat

SEQ ID NO: 10177 - DNA, 20 bp, Artificial Sequence
  Description of Artificial Sequence: Synthetic oligonucleotide
  Target: SCNA; (+) strand; PAM type: NNGRRT; PAM sequence: CAGGGT
ttttgtatttttagtagaga

SEQ ID NO: 10178 - DNA, 20 bp, Artificial Sequence
  Description of Artificial Sequence: Synthetic oligonucleotide
  Target: SCNA; (+) strand; PAM type: NNGRRT; PAM sequence: TGGAAT
gccttggcctcccaaagtcc

SEQ ID NO: 10179 - DNA, 20 bp, Artificial Sequence
  Description of Artificial Sequence: Synthetic oligonucleotide
  Target: SCNA; (+) strand; PAM type: NNGRRT; PAM sequence: ATGGAT
acacagcatgcatcaacaaa

SEQ ID NO: 10180 - DNA, 20 bp, Artificial Sequence
  Description of Artificial Sequence: Synthetic oligonucleotide
  Target: SCNA; (+) strand; PAM type: NNGRRT; PAM sequence: ATGGAT
gcatcaacaaaatggatcag

SEQ ID NO: 10181 - DNA, 20 bp, Artificial Sequence
  Description of Artificial Sequence: Synthetic oligonucleotide
  Target: SCNA; (+) strand; PAM type: NNGRRT; PAM sequence: ATGGGT
caacaaaatggatcagatgg

SEQ ID NO: 10182 - DNA, 20 bp, Artificial Sequence
  Description of Artificial Sequence: Synthetic oligonucleotide
  Target: SCNA; (+) strand; PAM type: NNGRRT; PAM sequence: ATGGAT
tcagatggatgggtggacaa

SEQ ID NO: 10183 - DNA, 20 bp, Artificial Sequence
  Description of Artificial Sequence: Synthetic oligonucleotide
  Target: SCNA; (+) strand; PAM type: NNGRRT; PAM sequence: AAGAAT
gtggacaaatggataattga

SEQ ID NO: 10184 - DNA, 20 bp, Artificial Sequence
  Description of Artificial Sequence: Synthetic oligonucleotide
  Target: SCNA; (+) strand; PAM type: NNGRRT; PAM sequence: AAGAGT
aaatgataactctaactttt

SEQ ID NO: 10185 - DNA, 20 bp, Artificial Sequence
  Description of Artificial Sequence: Synthetic oligonucleotide
  Target: SCNA; (+) strand; PAM type: NNGRRT; PAM sequence: TTGAAT
ctatcaagctaaaatgactt

SEQ ID NO: 10186 - DNA, 20 bp, Artificial Sequence
  Description of Artificial Sequence: Synthetic oligonucleotide
  Target: SCNA; (+) strand; PAM type: NNGRRT; PAM sequence: TCGAAT
taaaatgacttttgaatcag

SEQ ID NO: 10187 - DNA, 20 bp, Artificial Sequence
  Description of Artificial Sequence: Synthetic oligonucleotide
  Target: SCNA; (+) strand; PAM type: NNGRRT; PAM sequence: ATGAAT
atgacttttgaatcagtcga

SEQ ID NO: 10188 - DNA, 20 bp, Artificial Sequence
  Description of Artificial Sequence: Synthetic oligonucleotide
  Target: SCNA; (+) strand; PAM type: NNGRRT; PAM sequence: CAGAAT
tgcaattgtggctaaagcag

SEQ ID NO: 10189 - DNA, 20 bp, Artificial Sequence
  Description of Artificial Sequence: Synthetic oligonucleotide
  Target: SCNA; (+) strand; PAM type: NNGRRT; PAM sequence: CGGAAT
tacataagttttaaccagtg

SEQ ID NO: 10190 - DNA, 20 bp, Artificial Sequence
  Description of Artificial Sequence: Synthetic oligonucleotide
  Target: SCNA; (+) strand; PAM type: NNGRRT; PAM sequence: ATGAAT
accatttatgttgttttttt

SEQ ID NO: 10191 - DNA, 20 bp, Artificial Sequence
  Description of Artificial Sequence: Synthetic oligonucleotide
  Target: SCNA; (+) strand; PAM type: NNGRRT; PAM sequence: GGGAAT
tccagtacatgcttattaaa

SEQ ID NO: 10192 - DNA, 20 bp, Artificial Sequence
  Description of Artificial Sequence: Synthetic oligonucleotide
  Target: SCNA; (+) strand; PAM type: NNGRRT; PAM sequence: GGGGGT
tttgtgcttgttgccatgct

SEQ ID NO: 10193 - DNA, 20 bp, Artificial Sequence
  Description of Artificial Sequence: Synthetic oligonucleotide
  Target: SCNA; (+) strand; PAM type: NNGRRT; PAM sequence: ATGAAT
gggcttgtaaacatcctaca

SEQ ID NO: 10194 - DNA, 20 bp, Artificial Sequence
  Description of Artificial Sequence: Synthetic oligonucleotide
  Target: SCNA; (+) strand; PAM type: NNGRRT; PAM sequence: GAGAGT
gtaaacatcctacaatgaat

SEQ ID NO: 10195 - DNA, 20 bp, Artificial Sequence
  Description of Artificial Sequence: Synthetic oligonucleotide
  Target: SCNA; (+) strand; PAM type: NNGRRT; PAM sequence: AAGAAT
aatgagagttctccacagcg

SEQ ID NO: 10196 - DNA, 20 bp, Artificial Sequence
  Description of Artificial Sequence: Synthetic oligonucleotide
  Target: SCNA; (+) strand; PAM type: NNGRRT; PAM sequence: CTGAGT
atgggcttcactgagaaaaa

SEQ ID NO: 10197 - DNA, 20 bp, Artificial Sequence
  Description of Artificial Sequence: Synthetic oligonucleotide
  Target: SCNA; (+) strand; PAM type: NNGRRT; PAM sequence: ATGGAT
gctgttcagcaaaccactgc

SEQ ID NO: 10198 - DNA, 20 bp, Artificial Sequence
  Description of Artificial Sequence: Synthetic oligonucleotide
  Target: SCNA; (+) strand; PAM type: NNGRRT; PAM sequence: AAGGGT
cacatcttagtagaagatgc

SEQ ID NO: 10199 - DNA, 20 bp, Artificial Sequence
  Description of Artificial Sequence: Synthetic oligonucleotide
  Target: SCNA; (+) strand; PAM type: NNGRRT; PAM sequence: TGGAAT
agaagatgcaagggttattg

SEQ ID NO: 10200 - DNA, 20 bp, Artificial Sequence
  Description of Artificial Sequence: Synthetic oligonucleotide
  Target: SCNA; (+) strand; PAM type: NNGRRT; PAM sequence: GCGGGT
ggttattgtggaatacgtcc

SEQ ID NO: 10201 - DNA, 20 bp, Artificial Sequence
  Description of Artificial Sequence: Synthetic oligonucleotide
  Target: SCNA; (+) strand; PAM type: NNGRRT; PAM sequence: AGGGAT
tataaaaagaaagagggaga

SEQ ID NO: 10202 - DNA, 20 bp, Artificial Sequence
  Description of Artificial Sequence: Synthetic oligonucleotide
  Target: SCNA; (+) strand; PAM type: NNGRRT; PAM sequence: TAGAGT
gggaagtattagtggaacat

SEQ ID NO: 10203 - DNA, 20 bp, Artificial Sequence
  Description of Artificial Sequence: Synthetic oligonucleotide
  Target: SCNA; (+) strand; PAM type: NNGRRT; PAM sequence: CTGAGT
gtttgtctctggtccttcct

SEQ ID NO: 10204 - DNA, 20 bp, Artificial Sequence
  Description of Artificial Sequence: Synthetic oligonucleotide
  Target: SCNA; (+) strand; PAM type: NNGRRT; PAM sequence: TTGGGT
tgtctgaaagcaggaaggac

SEQ ID NO: 10205 - DNA, 20 bp, Artificial Sequence
  Description of Artificial Sequence: Synthetic oligonucleotide
  Target: SCNA; (+) strand; PAM type: NNGRRT; PAM sequence: TAGGAT
acttgggtcttactccctgg

SEQ ID NO: 10206 - DNA, 20 bp, Artificial Sequence
  Description of Artificial Sequence: Synthetic oligonucleotide
  Target: SCNA; (+) strand; PAM type: NNGRRT; PAM sequence: GAGAAT
ggggctgacatatcaagttg

SEQ ID NO: 10207 - DNA, 20 bp, Artificial Sequence
  Description of Artificial Sequence: Synthetic oligonucleotide
  Target: SCNA; (+) strand; PAM type: NNGRRT; PAM sequence: AAGAGT
ccccatacaccctgattccc

SEQ ID NO: 10208 - DNA, 20 bp, Artificial Sequence
  Description of Artificial Sequence: Synthetic oligonucleotide
  Target: SCNA; (+) strand; PAM type: NNGRRT; PAM sequence: AGGGGT
agagttgaggcagttgtggt

SEQ ID NO: 10209 - DNA, 20 bp, Artificial Sequence
  Description of Artificial Sequence: Synthetic oligonucleotide
  Target: SCNA; (+) strand; PAM type: NNGRRT; PAM sequence: CTGGGT
gaagtgaaggcagtggctgg

SEQ ID NO: 10210 - DNA, 20 bp, Artificial Sequence
  Description of Artificial Sequence: Synthetic oligonucleotide
  Target: SCNA; (+) strand; PAM type: NNGRRT; PAM sequence: CAGAGT
gctgggtgaaatatggcgga

SEQ ID NO: 10211 - DNA, 20 bp, Artificial Sequence
  Description of Artificial Sequence: Synthetic oligonucleotide
  Target: SCNA; (+) strand; PAM type: NNGRRT; PAM sequence: GTGAGT
aaatatggcggacagagtcg

SEQ ID NO: 10212 - DNA, 20 bp, Artificial Sequence
  Description of Artificial Sequence: Synthetic oligonucleotide
  Target: SCNA; (+) strand; PAM type: NNGRRT; PAM sequence: GAGGAT
tagacccctgaagtattaga

SEQ ID NO: 10213 - DNA, 20 bp, Artificial Sequence
  Description of Artificial Sequence: Synthetic oligonucleotide
  Target: SCNA; (+) strand; PAM type: NNGRRT; PAM sequence: CAGGAT
gtggctgtgcagtaaaagtg

SEQ ID NO: 10214 - DNA, 20 bp, Artificial Sequence
  Description of Artificial Sequence: Synthetic oligonucleotide
  Target: SCNA; (+) strand; PAM type: NNGRRT; PAM sequence: AAGGGT
ggatgaaaccagactctctg

SEQ ID NO: 10215 - DNA, 20 bp, Artificial Sequence
  Description of Artificial Sequence: Synthetic oligonucleotide
  Target: SCNA; (+) strand; PAM type: NNGRRT; PAM sequence: AGGGAT
aaccagactctctgaagggt

SEQ ID NO: 10216 - DNA, 20 bp, Artificial Sequence
  Description of Artificial Sequence: Synthetic oligonucleotide
  Target: SCNA; (+) strand; PAM type: NNGRRT; PAM sequence: TGGGGT
agggggctttgaactgtgct

SEQ ID NO: 10217 - DNA, 20 bp, Artificial Sequence
  Description of Artificial Sequence: Synthetic oligonucleotide
  Target: SCNA; (+) strand; PAM type: NNGRRT; PAM sequence: GGGAAT
ttctaaaaagttctggcata

SEQ ID NO: 10218 - DNA, 20 bp, Artificial Sequence
  Description of Artificial Sequence: Synthetic oligonucleotide
  Target: SCNA; (+) strand; PAM type: NNGRRT; PAM sequence: TTGAGT
cttaatggactgtcctgcct

SEQ ID NO: 10219 - DNA, 20 bp, Artificial Sequence
  Description of Artificial Sequence: Synthetic oligonucleotide
  Target: SCNA; (+) strand; PAM type: NNGRRT; PAM sequence: GTGAGT
ggactgtcctgcctttgagt

SEQ ID NO: 10220 - DNA, 20 bp, Artificial Sequence
  Description of Artificial Sequence: Synthetic oligonucleotide
  Target: SCNA; (+) strand; PAM type: NNGRRT; PAM sequence: AAGGAT
ctgcccccatctaggtcacc

SEQ ID NO: 10221 - DNA, 20 bp, Artificial Sequence
  Description of Artificial Sequence: Synthetic oligonucleotide
  Target: SCNA; (+) strand; PAM type: NNGRRT; PAM sequence: GTGAAT
gcatttggtacaaagcctat

SEQ ID NO: 10222 - DNA, 20 bp, Artificial Sequence
  Description of Artificial Sequence: Synthetic oligonucleotide
  Target: SCNA; (+) strand; PAM type: NNGRRT; PAM sequence: AAGAAT
gtaacagaaaatgactataa

SEQ ID NO: 10223 - DNA, 20 bp, Artificial Sequence
  Description of Artificial Sequence: Synthetic oligonucleotide
  Target: SCNA; (+) strand; PAM type: NNGRRT; PAM sequence: ATGGAT
cagaaaatgactataaaaga

SEQ ID NO: 10224 - DNA, 20 bp, Artificial Sequence
  Description of Artificial Sequence: Synthetic oligonucleotide
  Target: SCNA; (+) strand; PAM type: NNGRRT; PAM sequence: TGGGAT
taaaagaatggattctgata

SEQ ID NO: 10225 - DNA, 20 bp, Artificial Sequence
  Description of Artificial Sequence: Synthetic oligonucleotide
  Target: SCNA; (+) strand; PAM type: NNGRRT; PAM sequence: CTGAGT
atggattctgatatgggatg

SEQ ID NO: 10226 - DNA, 20 bp, Artificial Sequence
  Description of Artificial Sequence: Synthetic oligonucleotide
  Target: SCNA; (+) strand; PAM type: NNGRRT; PAM sequence: AAGGAT
cattattaagaaaaagagaa

SEQ ID NO: 10227 - DNA, 20 bp, Artificial Sequence
  Description of Artificial Sequence: Synthetic oligonucleotide
  Target: SCNA; (+) strand; PAM type: NNGRRT; PAM sequence: ATGGGT
aacacctagaactattctcc

SEQ ID NO: 10228 - DNA, 20 bp, Artificial Sequence
  Description of Artificial Sequence: Synthetic oligonucleotide
  Target: SCNA; (+) strand; PAM type: NNGRRT; PAM sequence: GAGAAT
ttcccaaaattatttgagca

SEQ ID NO: 10229 - DNA, 20 bp, Artificial Sequence
  Description of Artificial Sequence: Synthetic oligonucleotide
  Target: SCNA; (+) strand; PAM type: NNGRRT; PAM sequence: TGGAAT
accatgtgcataatactcaa

SEQ ID NO: 10230 - DNA, 20 bp, Artificial Sequence
  Description of Artificial Sequence: Synthetic oligonucleotide
  Target: SCNA; (+) strand; PAM type: NNGRRT; PAM sequence: AGGAAT
ttaatatcatcaaactacaa

SEQ ID NO: 10231 - DNA, 20 bp, Artificial Sequence
  Description of Artificial Sequence: Synthetic oligonucleotide
  Target: SCNA; (+) strand; PAM type: NNGRRT; PAM sequence: ATGAGT
agttggctggccagttacag

SEQ ID NO: 10232 - DNA, 20 bp, Artificial Sequence
  Description of Artificial Sequence: Synthetic oligonucleotide
  Target: SCNA; (+) strand; PAM type: NNGRRT; PAM sequence: ATGAGT
ctatggtttagaaaggttac

SEQ ID NO: 10233 - DNA, 20 bp, Artificial Sequence
  Description of Artificial Sequence: Synthetic oligonucleotide
  Target: SCNA; (+) strand; PAM type: NNGRRT; PAM sequence: AGGGAT
gaaaggttacatgagttgcc

SEQ ID NO: 10234 - DNA, 20 bp, Artificial Sequence
  Description of Artificial Sequence: Synthetic oligonucleotide
  Target: SCNA; (+) strand; PAM type: NNGRRT; PAM sequence: TTGAAT
agggatctggcaacgcataa

SEQ ID NO: 10235 - DNA, 20 bp, Artificial Sequence
  Description of Artificial Sequence: Synthetic oligonucleotide
  Target: SCNA; (+) strand; PAM type: NNGRRT; PAM sequence: TAGAGT
ggggagatgacatcatccag

SEQ ID NO: 10236 - DNA, 20 bp, Artificial Sequence
  Description of Artificial Sequence: Synthetic oligonucleotide
  Target: SCNA; (+) strand; PAM type: NNGRRT; PAM sequence: CTGAAT
gaagaccaactctctgttcc

SEQ ID NO: 10237 - DNA, 20 bp, Artificial Sequence
  Description of Artificial Sequence: Synthetic oligonucleotide
  Target: SCNA; (+) strand; PAM type: NNGRRT; PAM sequence: CTGGAT
agggccagctggccatcatg

SEQ ID NO: 10238 - DNA, 20 bp, Artificial Sequence
  Description of Artificial Sequence: Synthetic oligonucleotide
  Target: SCNA; (+) strand; PAM type: NNGRRT; PAM sequence: GTGAAT
ccatctctagcagaacactt

SEQ ID NO: 10239 - DNA, 20 bp, Artificial Sequence
  Description of Artificial Sequence: Synthetic oligonucleotide
  Target: SCNA; (+) strand; PAM type: NNGRRT; PAM sequence: ATGAAT
taggaggactaccatgaaag

SEQ ID NO: 10240 - DNA, 20 bp, Artificial Sequence
  Description of Artificial Sequence: Synthetic oligonucleotide
  Target: SCNA; (+) strand; PAM type: NNGRRT; PAM sequence: AAGGAT
atgtcataatattagaaatt

SEQ ID NO: 10241 - DNA, 20 bp, Artificial Sequence
  Description of Artificial Sequence: Synthetic oligonucleotide
  Target: SCNA; (+) strand; PAM type: NNGRRT; PAM sequence: GAGGAT
gggcaattttcgatttttgt

SEQ ID NO: 10242 - DNA, 20 bp, Artificial Sequence
  Description of Artificial Sequence: Synthetic oligonucleotide
  Target: SCNA; (+) strand; PAM type: NNGRRT; PAM sequence: GTGAAT
gaaaaaaagtgtgtatacat

SEQ ID NO: 10243 - DNA, 20 bp, Artificial Sequence
  Description of Artificial Sequence: Synthetic oligonucleotide
  Target: SCNA; (+) strand; PAM type: NNGRRT; PAM sequence: AAGGAT
attggagatgacttgatatt

SEQ ID NO: 10244 - DNA, 20 bp, Artificial Sequence
  Description of Artificial Sequence: Synthetic oligonucleotide
  Target: SCNA; (+) strand; PAM type: NNGRRT; PAM sequence: CTGAAT
catcacaatccataatgtaa

SEQ ID NO: 10245 - DNA, 20 bp, Artificial Sequence
  Description of Artificial Sequence: Synthetic oligonucleotide
  Target: SCNA; (+) strand; PAM type: NNGRRT; PAM sequence: CTGAAT
actgaattcattcctatgaa

SEQ ID NO: 10246 - DNA, 20 bp, Artificial Sequence
  Description of Artificial Sequence: Synthetic oligonucleotide
  Target: SCNA; (+) strand; PAM type: NNGRRT; PAM sequence: AAGAAT
gtattcactatgacattaat

SEQ ID NO: 10247 - DNA, 20 bp, Artificial Sequence
  Description of Artificial Sequence: Synthetic oligonucleotide
  Target: SCNA; (+) strand; PAM type: NNGRRT; PAM sequence: TGGAAT
ataagaattaaatgctactt

SEQ ID NO: 10248 - DNA, 20 bp, Artificial Sequence
  Description of Artificial Sequence: Synthetic oligonucleotide
  Target: SCNA; (+) strand; PAM type: NNGRRT; PAM sequence: CAGAAT
aagtaactgcttagtgattc

SEQ ID NO: 10249 - DNA, 20 bp, Artificial Sequence
  Description of Artificial Sequence: Synthetic oligonucleotide
  Target: SCNA; (+) strand; PAM type: NNGRRT; PAM sequence: GGGGAT
tccagaatcacctggtagaa

SEQ ID NO: 10250 - DNA, 20 bp, Artificial Sequence
  Description of Artificial Sequence: Synthetic oligonucleotide
  Target: SCNA; (+) strand; PAM type: NNGRRT; PAM sequence: ACGAGT
ttataaaaattacttcatat

SEQ ID NO: 10251 - DNA, 20 bp, Artificial Sequence
  Description of Artificial Sequence: Synthetic oligonucleotide
  Target: SCNA; (+) strand; PAM type: NNGRRT; PAM sequence: TTGAAT
tttacctcatttctgtaccc

SEQ ID NO: 10252 - DNA, 20 bp, Artificial Sequence
  Description of Artificial Sequence: Synthetic oligonucleotide
  Target: SCNA; (+) strand; PAM type: NNGRRT; PAM sequence: TTGAAT
tgtcctgatttttaaatact

SEQ ID NO: 10253 - DNA, 20 bp, Artificial Sequence
  Description of Artificial Sequence: Synthetic oligonucleotide
  Target: SCNA; (+) strand; PAM type: NNGRRT; PAM sequence: TGGAAT
gtagttggagacaagatata

SEQ ID NO: 10254 - DNA, 20 bp, Artificial Sequence
  Description of Artificial Sequence: Synthetic oligonucleotide
  Target: SCNA; (+) strand; PAM type: NNGRRT; PAM sequence: ATGAGT
acaaacctaagtcatgtaag

SEQ ID NO: 10255 - DNA, 20 bp, Artificial Sequence
  Description of Artificial Sequence: Synthetic oligonucleotide
  Target: SCNA; (+) strand; PAM type: NNGRRT; PAM sequence: ATGGGT
gcaaagataaccatatgatg

SEQ ID NO: 10256 - DNA, 20 bp, Artificial Sequence
  Description of Artificial Sequence: Synthetic oligonucleotide
  Target: SCNA; (+) strand; PAM type: NNGRRT; PAM sequence: AGGAAT
atgttaatttgcttcaatgt

SEQ ID NO: 10257 - DNA, 20 bp, Artificial Sequence
  Description of Artificial Sequence: Synthetic oligonucleotide
  Target: SCNA; (+) strand; PAM type: NNGRRT; PAM sequence: AGGAAT
catgccatctttgcaagtga

SEQ ID NO: 10258 - DNA, 20 bp, Artificial Sequence
  Description of Artificial Sequence: Synthetic oligonucleotide
  Target: SCNA; (+) strand; PAM type: NNGRRT; PAM sequence: ATGGGT
ttagcacatgcacagtaaaa

SEQ ID NO: 10259 - DNA, 20 bp, Artificial Sequence
  Description of Artificial Sequence: Synthetic oligonucleotide
  Target: SCNA; (+) strand; PAM type: NNGRRT; PAM sequence: CAGAAT
tgctctcacgttgcagtcca

SEQ ID NO: 10260 - DNA, 20 bp, Artificial Sequence
  Description of Artificial Sequence: Synthetic oligonucleotide
  Target: SCNA; (+) strand; PAM type: NNGRRT; PAM sequence: TTGAAT
ctatcatcgcaatcagttct

SEQ ID NO: 10261 - DNA, 20 bp, Artificial Sequence
  Description of Artificial Sequence: Synthetic oligonucleotide
  Target: SCNA; (+) strand; PAM type: NNGRRT; PAM sequence: TTGGAT
cagttctttgaatattaaaa

SEQ ID NO: 10262 - DNA, 20 bp, Artificial Sequence
  Description of Artificial Sequence: Synthetic oligonucleotide
  Target: SCNA; (+) strand; PAM type: NNGRRT; PAM sequence: TGGGAT
gtatagtcatgcatatgttg

SEQ ID NO: 10263 - DNA, 20 bp, Artificial Sequence
  Description of Artificial Sequence: Synthetic oligonucleotide
  Target: SCNA; (+) strand; PAM type: NNGRRT; PAM sequence: TTGGGT
ttaaccactgatcctaagat

SEQ ID NO: 10264 - DNA, 20 bp, Artificial Sequence
  Description of Artificial Sequence: Synthetic oligonucleotide
  Target: SCNA; (+) strand; PAM type: NNGRRT; PAM sequence: ATGGAT
taaatctctttttttccatg

SEQ ID NO: 10265 - DNA, 20 bp, Artificial Sequence
  Description of Artificial Sequence: Synthetic oligonucleotide
  Target: SCNA; (+) strand; PAM type: NNGRRT; PAM sequence: CAGGGT
cacagctgctccctttttcc

SEQ ID NO: 10266 - DNA, 20 bp, Artificial Sequence
  Description of Artificial Sequence: Synthetic oligonucleotide
  Target: SCNA; (+) strand; PAM type: NNGRRT; PAM sequence: CTGAGT
gtatttctcatggtgcccag

SEQ ID NO: 10267 - DNA, 20 bp, Artificial Sequence
  Description of Artificial Sequence: Synthetic oligonucleotide
  Target: SCNA; (+) strand; PAM type: NNGRRT; PAM sequence: CAGAGT
tataattttatacataatta

SEQ ID NO: 10268 - DNA, 20 bp, Artificial Sequence
  Description of Artificial Sequence: Synthetic oligonucleotide
  Target: SCNA; (+) strand; PAM type: NNGRRT; PAM sequence: CAGGAT
ctttcccacctagaacctta

SEQ ID NO: 10269 - DNA, 20 bp, Artificial Sequence
  Description of Artificial Sequence: Synthetic oligonucleotide
  Target: SCNA; (+) strand; PAM type: NNGRRT; PAM sequence: AAGGGT
acctagaaccttacaggatt

SEQ ID NO: 10270 - DNA, 20 bp, Artificial Sequence
  Description of Artificial Sequence: Synthetic oligonucleotide
  Target: SCNA; (+) strand; PAM type: NNGRRT; PAM sequence: TAGAAT
cttacaggattaagggtcat

SEQ ID NO: 10271 - DNA, 20 bp, Artificial Sequence
  Description of Artificial Sequence: Synthetic oligonucleotide
  Target: SCNA; (+) strand; PAM type: NNGRRT; PAM sequence: ATGAGT
taccattagtgggctctcat

SEQ ID NO: 10272 - DNA, 20 bp, Artificial Sequence
  Description of Artificial Sequence: Synthetic oligonucleotide
  Target: SCNA; (+) strand; PAM type: NNGRRT; PAM sequence: GAGGGT
tctgattaatcatttaatca

SEQ ID NO: 10273 - DNA, 20 bp, Artificial Sequence
  Description of Artificial Sequence: Synthetic oligonucleotide
  Target: SCNA; (+) strand; PAM type: NNGRRT; PAM sequence: ATGAGT
gccatagtaagtcaaaggaa

SEQ ID NO: 10274 - DNA, 20 bp, Artificial Sequence
  Description of Artificial Sequence: Synthetic oligonucleotide
  Target: SCNA; (+) strand; PAM type: NNGRRT; PAM sequence: AAGGAT
aagtcaaaggaaatgagtaa

SEQ ID NO: 10275 - DNA, 20 bp, Artificial Sequence
  Description of Artificial Sequence: Synthetic oligonucleotide
  Target: SCNA; (+) strand; PAM type: NNGRRT; PAM sequence: ATGAAT
aactggctagctatcctttt

SEQ ID NO: 10276 - DNA, 20 bp, Artificial Sequence
  Description of Artificial Sequence: Synthetic oligonucleotide
  Target: SCNA; (+) strand; PAM type: NNGRRT; PAM sequence: CAGGAT
tatccttttatgaattaagt

SEQ ID NO: 10277 - DNA, 20 bp, Artificial Sequence
  Description of Artificial Sequence: Synthetic oligonucleotide
  Target: SCNA; (+) strand; PAM type: NNGRRT; PAM sequence: CAGAAT
gaattaagtcaggattatta

SEQ ID NO: 10278 - DNA, 20 bp, Artificial Sequence
  Description of Artificial Sequence: Synthetic oligonucleotide
  Target: SCNA; (+) strand; PAM type: NNGRRT; PAM sequence: CTGGAT
aataaataacatcgctgaac

SEQ ID NO: 10279 - DNA, 20 bp, Artificial Sequence
  Description of Artificial Sequence: Synthetic oligonucleotide
  Target: SCNA; (+) strand; PAM type: NNGRRT; PAM sequence: TGGGAT
gtagataagtcgtgtctcaa

SEQ ID NO: 10280 - DNA, 20 bp, Artificial Sequence
  Description of Artificial Sequence: Synthetic oligonucleotide
  Target: SCNA; (+) strand; PAM type: NNGRRT; PAM sequence: CAGGAT
ttacaaaaatataaaaactt

SEQ ID NO: 10281 - DNA, 20 bp, Artificial Sequence
  Description of Artificial Sequence: Synthetic oligonucleotide
  Target: SCNA; (+) strand; PAM type: NNGRRT; PAM sequence: AAGGAT
gagatgctcattagttcagc

SEQ ID NO: 10282 - DNA, 20 bp, Artificial Sequence
  Description of Artificial Sequence: Synthetic oligonucleotide
  Target: SCNA; (+) strand; PAM type: NNGRRT; PAM sequence: TGGGAT
gcaagacactgttgaggagc

SEQ ID NO: 10283 - DNA, 20 bp, Artificial Sequence
  Description of Artificial Sequence: Synthetic oligonucleotide
  Target: SCNA; (+) strand; PAM type: NNGRRT; PAM sequence: CAGAAT
ctgcacgcatagtagcatta

SEQ ID NO: 10284 - DNA, 20 bp, Artificial Sequence
  Description of Artificial Sequence: Synthetic oligonucleotide
  Target: SCNA; (+) strand; PAM type: NNGRRT; PAM sequence: ATGAAT
aaaggtatgaacttcaagaa

SEQ ID NO: 10285 - DNA, 20 bp, Artificial Sequence
  Description of Artificial Sequence: Synthetic oligonucleotide
  Target: SCNA; (+) strand; PAM type: NNGRRT; PAM sequence: ATGAGT
tgataacttcttatgtgcac

SEQ ID NO: 10286 - DNA, 20 bp, Artificial Sequence
  Description of Artificial Sequence: Synthetic oligonucleotide
  Target: SCNA; (+) strand; PAM type: NNGRRT; PAM sequence: ATGGAT
atgtgcacatgagtaaaaat

SEQ ID NO: 10287 - DNA, 20 bp, Artificial Sequence
  Description of Artificial Sequence: Synthetic oligonucleotide
  Target: SCNA; (+) strand; PAM type: NNGRRT; PAM sequence: AAGAGT
tattctaatgtactaaacac

SEQ ID NO: 10288 - DNA, 20 bp, Artificial Sequence
  Description of Artificial Sequence: Synthetic oligonucleotide
  Target: SCNA; (+) strand; PAM type: NNGRRT; PAM sequence: CAGAAT
ctctcgatttattggttgtt

SEQ ID NO: 10289 - DNA, 20 bp, Artificial Sequence
  Description of Artificial Sequence: Synthetic oligonucleotide
  Target: SCNA; (+) strand; PAM type: NNGRRT; PAM sequence: GAGGGT
tttccctccctcatcaacta

SEQ ID NO: 10290 - DNA, 20 bp, Artificial Sequence
  Description of Artificial Sequence: Synthetic oligonucleotide
  Target: SCNA; (+) strand; PAM type: NNGRRT; PAM sequence: TTGAAT
gtgtgagcaaacattctttc

SEQ ID NO: 10291 - DNA, 20 bp, Artificial Sequence
  Description of Artificial Sequence: Synthetic oligonucleotide
  Target: SCNA; (+) strand; PAM type: NNGRRT; PAM sequence: ATGAAT
caaacattctttcttgaatg

SEQ ID NO: 10292 - DNA, 20 bp, Artificial Sequence
  Description of Artificial Sequence: Synthetic oligonucleotide
  Target: SCNA; (+) strand; PAM type: NNGRRT; PAM sequence: ATGAGT
cattctttcttgaatgatga

SEQ ID NO: 10293 - DNA, 20 bp, Artificial Sequence
  Description of Artificial Sequence: Synthetic oligonucleotide
  Target: SCNA; (+) strand; PAM type: NNGRRT; PAM sequence: AAGAGT
taataagcatttcaagcaaa

SEQ ID NO: 10294 - DNA, 20 bp, Artificial Sequence
  Description of Artificial Sequence: Synthetic oligonucleotide
  Target: SCNA; (+) strand; PAM type: NNGRRT; PAM sequence: CAGGGT
gtttgcttatttctatttac

SEQ ID NO: 10295 - DNA, 20 bp, Artificial Sequence
  Description of Artificial Sequence: Synthetic oligonucleotide
  Target: SCNA; (+) strand; PAM type: NNGRRT; PAM sequence: TAGAGT
ccacaattgcagacatttat

SEQ ID NO: 10296 - DNA, 20 bp, Artificial Sequence
  Description of Artificial Sequence: Synthetic oligonucleotide
  Target: SCNA; (+) strand; PAM type: NNGRRT; PAM sequence: TTGAAT
gacatttattagagtattct

SEQ ID NO: 10297 - DNA, 20 bp, Artificial Sequence
  Description of Artificial Sequence: Synthetic oligonucleotide
  Target: SCNA; (+) strand; PAM type: NNGRRT; PAM sequence: ATGGGT
ataaatagaagtatttttag

SEQ ID NO: 10298 - DNA, 20 bp, Artificial Sequence
  Description of Artificial Sequence: Synthetic oligonucleotide
  Target: SCNA; (+) strand; PAM type: NNGRRT; PAM sequence: GTGAAT
attgtatgccttaaatgcag

SEQ ID NO: 10299 - DNA, 20 bp, Artificial Sequence
  Description of Artificial Sequence: Synthetic oligonucleotide
  Target: SCNA; (+) strand; PAM type: NNGRRT; PAM sequence: CTGAAT
ttaaatctagttgtccataa

SEQ ID NO: 10300 - DNA, 20 bp, Artificial Sequence
  Description of Artificial Sequence: Synthetic oligonucleotide
  Target: SCNA; (+) strand; PAM type: NNGRRT; PAM sequence: GAGGGT
tcagaagattgatctgaaca

SEQ ID NO: 10301 - DNA, 20 bp, Artificial Sequence
  Description of Artificial Sequence: Synthetic oligonucleotide
  Target: SCNA; (+) strand; PAM type: NNGRRT; PAM sequence: GTGAGT
aagctctttgatgtgcgtat

SEQ ID NO: 10302 - DNA, 20 bp, Artificial Sequence
  Description of Artificial Sequence: Synthetic oligonucleotide
  Target: SCNA; (+) strand; PAM type: NNGRRT; PAM sequence: GAGGGT
gcgcatttttctgaagctaa

SEQ ID NO: 10303 - DNA, 20 bp, Artificial Sequence
  Description of Artificial Sequence: Synthetic oligonucleotide
  Target: SCNA; (+) strand; PAM type: NNGRRT; PAM sequence: AAGGGT
agcttctattagcccgtgaa

SEQ ID NO: 10304 - DNA, 20 bp, Artificial Sequence
  Description of Artificial Sequence: Synthetic oligonucleotide
  Target: SCNA; (+) strand; PAM type: NNGRRT; PAM sequence: TAGAAT
aaatcttacgaagctataaa

SEQ ID NO: 10305 - DNA, 20 bp, Artificial Sequence
  Description of Artificial Sequence: Synthetic oligonucleotide
  Target: SCNA; (+) strand; PAM type: NNGRRT; PAM sequence: AGGAAT
taaaattttagatggaaacc

SEQ ID NO: 10306 - DNA, 20 bp, Artificial Sequence
  Description of Artificial Sequence: Synthetic oligonucleotide
  Target: SCNA; (+) strand; PAM type: NNGRRT; PAM sequence: AGGGGT
gaaaagcatattttgtacaa

SEQ ID NO: 10307 - DNA, 20 bp, Artificial Sequence
  Description of Artificial Sequence: Synthetic oligonucleotide
  Target: SCNA; (+) strand; PAM type: NNGRRT; PAM sequence: AAGGAT
aacttcactagaagcccagt

SEQ ID NO: 10308 - DNA, 20 bp, Artificial Sequence
  Description of Artificial Sequence: Synthetic oligonucleotide
  Target: SCNA; (+) strand; PAM type: NNGRRT; PAM sequence: CAGAGT
ttgttctgcctttttattat

SEQ ID NO: 10309 - DNA, 20 bp, Artificial Sequence
  Description of Artificial Sequence: Synthetic oligonucleotide
  Target: SCNA; (+) strand; PAM type: NNGRRT; PAM sequence: TAGGAT
atcaaggtaaggctgctact

SEQ ID NO: 10310 - DNA, 20 bp, Artificial Sequence
  Description of Artificial Sequence: Synthetic oligonucleotide
  Target: SCNA; (+) strand; PAM type: NNGRRT; PAM sequence: CAGAAT
tacatgaagtggaaacaacc

SEQ ID NO: 10311 - DNA, 20 bp, Artificial Sequence
  Description of Artificial Sequence: Synthetic oligonucleotide
  Target: SCNA; (+) strand; PAM type: NNGRRT; PAM sequence: TTGGAT
aatcattttgattgtaactt

SEQ ID NO: 10312 - DNA, 20 bp, Artificial Sequence
  Description of Artificial Sequence: Synthetic oligonucleotide
  Target: SCNA; (+) strand; PAM type: NNGRRT; PAM sequence: CTGAAT
tgattgtaacttttggatag

SEQ ID NO: 10313 - DNA, 20 bp, Artificial Sequence
  Description of Artificial Sequence: Synthetic oligonucleotide
  Target: SCNA; (+) strand; PAM type: NNGRRT; PAM sequence: GTGAAT
attatgtattatatttaaag

SEQ ID NO: 10314 - DNA, 20 bp, Artificial Sequence
  Description of Artificial Sequence: Synthetic oligonucleotide
  Target: SCNA; (+) strand; PAM type: NNGRRT; PAM sequence: GGGAAT
ggaaaaaaagtagggagact

SEQ ID NO: 10315 - DNA, 20 bp, Artificial Sequence
  Description of Artificial Sequence: Synthetic oligonucleotide
  Target: SCNA; (+) strand; PAM type: NNGRRT; PAM sequence: AAGAAT
ctgggaataccagaggtgag

SEQ ID NO: 10316 - DNA, 20 bp, Artificial Sequence
  Description of Artificial Sequence: Synthetic oligonucleotide
  Target: SCNA; (+) strand; PAM type: NNGRRT; PAM sequence: AAGGGT
ccccaagaacgtgtcagggc

SEQ ID NO: 10317 - DNA, 20 bp, Artificial Sequence
  Description of Artificial Sequence: Synthetic oligonucleotide
  Target: SCNA; (+) strand; PAM type: NNGRRT; PAM sequence: CAGAAT
aattcagtcaaaattcttct

SEQ ID NO: 10318 - DNA, 20 bp, Artificial Sequence
  Description of Artificial Sequence: Synthetic oligonucleotide
  Target: SCNA; (+) strand; PAM type: NNGRRT; PAM sequence: AGGGAT
aattaggaaattaggcacaa

SEQ ID NO: 10319 - DNA, 20 bp, Artificial Sequence
  Description of Artificial Sequence: Synthetic oligonucleotide
  Target: SCNA; (+) strand; PAM type: NNGRRT; PAM sequence: CTGGGT
aaaatttgcatggcatttat

SEQ ID NO: 10320 - DNA, 20 bp, Artificial Sequence
  Description of Artificial Sequence: Synthetic oligonucleotide
  Target: SCNA; (+) strand; PAM type: NNGRRT; PAM sequence: GAGGGT
gtagcactttttcacaaggg

SEQ ID NO: 10321 - DNA, 20 bp, Artificial Sequence
  Description of Artificial Sequence: Synthetic oligonucleotide
  Target: SCNA; (+) strand; PAM type: NNGRRT; PAM sequence: AAGGGT
taaagagcaacaacagatta

SEQ ID NO: 10322 - DNA, 20 bp, Artificial Sequence
  Description of Artificial Sequence: Synthetic oligonucleotide
  Target: SCNA; (+) strand; PAM type: NNGRRT; PAM sequence: TAGAAT
aacaacagattaaagggtgg

SEQ ID NO: 10323 - DNA, 20 bp, Artificial Sequence
  Description of Artificial Sequence: Synthetic oligonucleotide
  Target: SCNA; (+) strand; PAM type: NNGRRT; PAM sequence: CTGAGT
tctacacatgccatagataa

SEQ ID NO: 10324 - DNA, 20 bp, Artificial Sequence
  Description of Artificial Sequence: Synthetic oligonucleotide
  Target: SCNA; (+) strand; PAM type: NNGRRT; PAM sequence: GTGAGT
aaagccaccaagatgtccaa

SEQ ID NO: 10325 - DNA, 20 bp, Artificial Sequence
  Description of Artificial Sequence: Synthetic oligonucleotide
  Target: SCNA; (+) strand; PAM type: NNGRRT; PAM sequence: TTGAAT
gagtgtggttcaaccaaaca

SEQ ID NO: 10326 - DNA, 20 bp, Artificial Sequence
  Description of Artificial Sequence: Synthetic oligonucleotide
  Target: SCNA; (+) strand; PAM type: NNGRRT; PAM sequence: AGGAAT
gtgcttcaagtttaacgatc

SEQ ID NO: 10327 - DNA, 20 bp, Artificial Sequence
  Description of Artificial Sequence: Synthetic oligonucleotide
  Target: SCNA; (+) strand; PAM type: NNGRRT; PAM sequence: ATGAGT
acgatcaggaatgtaaagcc

SEQ ID NO: 10328 - DNA, 20 bp, Artificial Sequence
  Description of Artificial Sequence: Synthetic oligonucleotide
  Target: SCNA; (+) strand; PAM type: NNGRRT; PAM sequence: TTGGAT
aatgtaaagccatgagtgat

SEQ ID NO: 10329 - DNA, 20 bp, Artificial Sequence
  Description of Artificial Sequence: Synthetic oligonucleotide
  Target: SCNA; (+) strand; PAM type: NNGRRT; PAM sequence: ATGAAT
atatttgaaccagactcagc

SEQ ID NO: 10330 - DNA, 20 bp, Artificial Sequence
  Description of Artificial Sequence: Synthetic oligonucleotide
  Target: SCNA; (+) strand; PAM type: NNGRRT; PAM sequence: TGGAGT
atttatttatttatttgaga

SEQ ID NO: 10331 - DNA, 20 bp, Artificial Sequence
  Description of Artificial Sequence: Synthetic oligonucleotide
  Target: SCNA; (+) strand; PAM type: NNGRRT; PAM sequence: TGGAAT
ttcattcttgttgttcaggc

SEQ ID NO: 10332 - DNA, 20 bp, Artificial Sequence
  Description of Artificial Sequence: Synthetic oligonucleotide
  Target: SCNA; (+) strand; PAM type: NNGRRT; PAM sequence: CTGAGT
ctcacagcaacctccgcctc

SEQ ID NO: 10333 - DNA, 20 bp, Artificial Sequence
  Description of Artificial Sequence: Synthetic oligonucleotide
  Target: SCNA; (+) strand; PAM type: NNGRRT; PAM sequence: CCGAGT
tattctcctgcctcagtctc

SEQ ID NO: 10334 - DNA, 20 bp, Artificial Sequence
  Description of Artificial Sequence: Synthetic oligonucleotide
  Target: SCNA; (+) strand; PAM type: NNGRRT; PAM sequence: TGGGAT
gcctcagtctcccgagtagc

SEQ ID NO: 10335 - DNA, 20 bp, Artificial Sequence
  Description of Artificial Sequence: Synthetic oligonucleotide
  Target: SCNA; (+) strand; PAM type: NNGRRT; PAM sequence: CAGGGT
atttgtatttttagtagaaa

SEQ ID NO: 10336 - DNA, 20 bp, Artificial Sequence
  Description of Artificial Sequence: Synthetic oligonucleotide
  Target: SCNA; (+) strand; PAM type: NNGRRT; PAM sequence: TAGGAT
gccttagcctcccaaagtgc

SEQ ID NO: 10337 - DNA, 20 bp, Artificial Sequence
  Description of Artificial Sequence: Synthetic oligonucleotide
  Target: SCNA; (+) strand; PAM type: NNGRRT; PAM sequence: ACGAAT
cgtggtattatcacatatgt

SEQ ID NO: 10338 - DNA, 20 bp, Artificial Sequence
  Description of Artificial Sequence: Synthetic oligonucleotide
  Target: SCNA; (+) strand; PAM type: NNGRRT; PAM sequence: TTGGAT
agaaacggttgtgaaggaac

SEQ ID NO: 10339 - DNA, 20 bp, Artificial Sequence
  Description of Artificial Sequence: Synthetic oligonucleotide
  Target: SCNA; (+) strand; PAM type: NNGRRT; PAM sequence: AAGGGT
gaacttcaggtagtgaaaca

SEQ ID NO: 10340 - DNA, 20 bp, Artificial Sequence
  Description of Artificial Sequence: Synthetic oligonucleotide
  Target: SCNA; (+) strand; PAM type: NNGRRT; PAM sequence: TTGAAT
gagaagacagtgtaaatagt

SEQ ID NO: 10341 - DNA, 20 bp, Artificial Sequence
  Description of Artificial Sequence: Synthetic oligonucleotide
  Target: SCNA; (+) strand; PAM type: NNGRRT; PAM sequence: TTGAGT
gacagtgtaaatagtttgaa

SEQ ID NO: 10342 - DNA, 20 bp, Artificial Sequence
  Description of Artificial Sequence: Synthetic oligonucleotide
  Target: SCNA; (+) strand; PAM type: NNGRRT; PAM sequence: TGGAAT
accacatgatctcactcatg

SEQ ID NO: 10343 - DNA, 20 bp, Artificial Sequence
  Description of Artificial Sequence: Synthetic oligonucleotide
  Target: SCNA; (+) strand; PAM type: NNGRRT; PAM sequence: GAGAGT
cagagaggagaacagtggag

SEQ ID NO: 10344 - DNA, 20 bp, Artificial Sequence
  Description of Artificial Sequence: Synthetic oligonucleotide
  Target: SCNA; (+) strand; PAM type: NNGRRT; PAM sequence: GAGGAT
gagaacagtggaggagagtg

SEQ ID NO: 10345 - DNA, 20 bp, Artificial Sequence
  Description of Artificial Sequence: Synthetic oligonucleotide
  Target: SCNA; (+) strand; PAM type: NNGRRT; PAM sequence: AGGAGT
cagataagcctcagtctgag

SEQ ID NO: 10346 - DNA, 20 bp, Artificial Sequence
  Description of Artificial Sequence: Synthetic oligonucleotide
  Target: SCNA; (+) strand; PAM type: NNGRRT; PAM sequence: CGGAGT
tttatttatttattttgaga

SEQ ID NO: 10347 - DNA, 20 bp, Artificial Sequence
  Description of Artificial Sequence: Synthetic oligonucleotide
  Target: SCNA; (+) strand; PAM type: NNGRRT; PAM sequence: TGGAGT
tcttgctctgtcacccaggc

SEQ ID NO: 10348 - DNA, 20 bp, Artificial Sequence
  Description of Artificial Sequence: Synthetic oligonucleotide
  Target: SCNA; (+) strand; PAM type: NNGRRT; PAM sequence: CCGGGT
ctcactgcaaactccgactc

SEQ ID NO: 10349 - DNA, 20 bp, Artificial Sequence
  Description of Artificial Sequence: Synthetic oligonucleotide
  Target: SCNA; (+) strand; PAM type: NNGRRT; PAM sequence: CAGGGT
ttttatatttttagtagaga

SEQ ID NO: 10350 - DNA, 20 bp, Artificial Sequence
  Description of Artificial Sequence: Synthetic oligonucleotide
  Target: SCNA; (+) strand; PAM type: NNGRRT; PAM sequence: CAGGAT
cagggtttcaccgtgttagc

SEQ ID NO: 10351 - DNA, 20 bp, Artificial Sequence
  Description of Artificial Sequence: Synthetic oligonucleotide
  Target: SCNA; (+) strand; PAM type: NNGRRT; PAM sequence: TGGGAT
gcctcagcctcccaaagtgc

SEQ ID NO: 10352 - DNA, 20 bp, Artificial Sequence
  Description of Artificial Sequence: Synthetic oligonucleotide
  Target: SCNA; (+) strand; PAM type: NNGRRT; PAM sequence: GGGGGT
aaatagactatgtaagctaa

SEQ ID NO: 10353 - DNA, 20 bp, Artificial Sequence
  Description of Artificial Sequence: Synthetic oligonucleotide
  Target: SCNA; (+) strand; PAM type: NNGRRT; PAM sequence: TAGAAT
tccctatttgtcttttaggc

SEQ ID NO: 10354 - DNA, 20 bp, Artificial Sequence
  Description of Artificial Sequence: Synthetic oligonucleotide
  Target: SCNA; (+) strand; PAM type: NNGRRT; PAM sequence: AAGGAT
aacaactccgtgccacttct

SEQ ID NO: 10355 - DNA, 20 bp, Artificial Sequence
  Description of Artificial Sequence: Synthetic oligonucleotide
  Target: SCNA; (+) strand; PAM type: NNGRRT; PAM sequence: GTGAAT
tttttttccttttcaaggac

SEQ ID NO: 10356 - DNA, 20 bp, Artificial Sequence
  Description of Artificial Sequence: Synthetic oligonucleotide
  Target: SCNA; (+) strand; PAM type: NNGRRT; PAM sequence: TTGAAT
agcgagattaaaaataggtt

SEQ ID NO: 10357 - DNA, 20 bp, Artificial Sequence
  Description of Artificial Sequence: Synthetic oligonucleotide
  Target: SCNA; (+) strand; PAM type: NNGRRT; PAM sequence: CAGAGT
atggctacattacaaaatga

SEQ ID NO: 10358 - DNA, 20 bp, Artificial Sequence
  Description of Artificial Sequence: Synthetic oligonucleotide
  Target: SCNA; (+) strand; PAM type: NNGRRT; PAM sequence: TAGGGT
tgtagaactgatttctctag

SEQ ID NO: 10359 - DNA, 20 bp, Artificial Sequence
  Description of Artificial Sequence: Synthetic oligonucleotide
  Target: SCNA; (+) strand; PAM type: NNGRRT; PAM sequence: ACGGGT
actcactgacattccaaatg

SEQ ID NO: 10360 - DNA, 20 bp, Artificial Sequence
  Description of Artificial Sequence: Synthetic oligonucleotide
  Target: SCNA; (+) strand; PAM type: NNGRRT; PAM sequence: TTGGGT
cacactcatattagtacatt

SEQ ID NO: 10361 - DNA, 20 bp, Artificial Sequence
  Description of Artificial Sequence: Synthetic oligonucleotide
  Target: SCNA; (+) strand; PAM type: NNGRRT; PAM sequence: TTGAGT
tggtaactgtttttcggcaa

SEQ ID NO: 10362 - DNA, 20 bp, Artificial Sequence
  Description of Artificial Sequence: Synthetic oligonucleotide
  Target: SCNA; (+) strand; PAM type: NNGRRT; PAM sequence: AGGGAT
caattgagttctttgaaatc

SEQ ID NO: 10363 - DNA, 20 bp, Artificial Sequence
  Description of Artificial Sequence: Synthetic oligonucleotide
  Target: SCNA; (+) strand; PAM type: NNGRRT; PAM sequence: TAGAAT
atagtagataataaataatt

SEQ ID NO: 10364 - DNA, 20 bp, Artificial Sequence
  Description of Artificial Sequence: Synthetic oligonucleotide
  Target: SCNA; (+) strand; PAM type: NNGRRT; PAM sequence: ATGAAT
ataatttagaatatactaaa

SEQ ID NO: 10365 - DNA, 20 bp, Artificial Sequence
  Description of Artificial Sequence: Synthetic oligonucleotide
  Target: SCNA; (+) strand; PAM type: NNGRRT; PAM sequence: TAGAAT
ggaaatgtgataccaacttt

SEQ ID NO: 10366 - DNA, 20 bp, Artificial Sequence
  Description of Artificial Sequence: Synthetic oligonucleotide
  Target: SCNA; (+) strand; PAM type: NNGRRT; PAM sequence: TTGAAT
tataaaattaatatatggtt

SEQ ID NO: 10367 - DNA, 20 bp, Artificial Sequence
  Description of Artificial Sequence: Synthetic oligonucleotide
  Target: SCNA; (+) strand; PAM type: NNGRRT; PAM sequence: ATGGAT
ttaaatatacatatgtaaat

SEQ ID NO: 10368 - DNA, 20 bp, Artificial Sequence
  Description of Artificial Sequence: Synthetic oligonucleotide
  Target: SCNA; (+) strand; PAM type: NNGRRT; PAM sequence: AAGAAT
ttatgatgtaataaatttat

SEQ ID NO: 10369 - DNA, 20 bp, Artificial Sequence
  Description of Artificial Sequence: Synthetic oligonucleotide
  Target: SCNA; (+) strand; PAM type: NNGRRT; PAM sequence: CAGGAT
atttcctgagatcaaacagc

SEQ ID NO: 10370 - DNA, 20 bp, Artificial Sequence
  Description of Artificial Sequence: Synthetic oligonucleotide
  Target: SCNA; (+) strand; PAM type: NNGRRT; PAM sequence: GTGGAT
aacagccaggatttaagttg

SEQ ID NO: 10371 - DNA, 20 bp, Artificial Sequence
  Description of Artificial Sequence: Synthetic oligonucleotide
  Target: SCNA; (+) strand; PAM type: NNGRRT; PAM sequence: TAGGAT
tttcattgatattatctaac

SEQ ID NO: 10372 - DNA, 20 bp, Artificial Sequence
  Description of Artificial Sequence: Synthetic oligonucleotide
  Target: SCNA; (+) strand; PAM type: NNGRRT; PAM sequence: TGGGAT
accgaaaaaaaaaaagctaa

SEQ ID NO: 10373 - DNA, 20 bp, Artificial Sequence
  Description of Artificial Sequence: Synthetic oligonucleotide
  Target: SCNA; (+) strand; PAM type: NNGRRT; PAM sequence: ATGAAT
aaaaaaaaaaagctaatggg

SEQ ID NO: 10374 - DNA, 20 bp, Artificial Sequence
  Description of Artificial Sequence: Synthetic oligonucleotide
  Target: SCNA; (+) strand; PAM type: NNGRRT; PAM sequence: AGGAAT
tcatttatctgatgtgggag

SEQ ID NO: 10375 - DNA, 20 bp, Artificial Sequence
  Description of Artificial Sequence: Synthetic oligonucleotide
  Target: SCNA; (+) strand; PAM type: NNGRRT; PAM sequence: CAGGGT
tttggttatttcactactgc

SEQ ID NO: 10376 - DNA, 20 bp, Artificial Sequence
  Description of Artificial Sequence: Synthetic oligonucleotide
  Target: SCNA; (+) strand; PAM type: NNGRRT; PAM sequence: ATGGGT
cactactgccagggtggtcc

SEQ ID NO: 10377 - DNA, 20 bp, Artificial Sequence
  Description of Artificial Sequence: Synthetic oligonucleotide
  Target: SCNA; (+) strand; PAM type: NNGRRT; PAM sequence: TTGAAT
gttttcaataatcaaaaagt

SEQ ID NO: 10378 - DNA, 20 bp, Artificial Sequence
  Description of Artificial Sequence: Synthetic oligonucleotide
  Target: SCNA; (+) strand; PAM type: NNGRRT; PAM sequence: TTGGGT
tcatcaggtgacagtaatag

SEQ ID NO: 10379 - DNA, 20 bp, Artificial Sequence
  Description of Artificial Sequence: Synthetic oligonucleotide
  Target: SCNA; (+) strand; PAM type: NNGRRT; PAM sequence: ATGGGT
ttgtctgctttctaaacctc

SEQ ID NO: 10380 - DNA, 20 bp, Artificial Sequence
  Description of Artificial Sequence: Synthetic oligonucleotide
  Target: SCNA; (+) strand; PAM type: NNGRRT; PAM sequence: TGGAGT
ggttgaccgtcttcagatag

SEQ ID NO: 10381 - DNA, 20 bp, Artificial Sequence
  Description of Artificial Sequence: Synthetic oligonucleotide
  Target: SCNA; (+) strand; PAM type: NNGRRT; PAM sequence: TTGGAT
cttacttaactacttctctg

SEQ ID NO: 10382 - DNA, 20 bp, Artificial Sequence
  Description of Artificial Sequence: Synthetic oligonucleotide
  Target: SCNA; (+) strand; PAM type: NNGRRT; PAM sequence: AGGAGT
tctaacagaactagtttcaa

SEQ ID NO: 10383 - DNA, 20 bp, Artificial Sequence
  Description of Artificial Sequence: Synthetic oligonucleotide
  Target: SCNA; (+) strand; PAM type: NNGRRT; PAM sequence: CTGAAT
gttttgtgtacattaattca

SEQ ID NO: 10384 - DNA, 20 bp, Artificial Sequence
  Description of Artificial Sequence: Synthetic oligonucleotide
  Target: SCNA; (+) strand; PAM type: NNGRRT; PAM sequence: AAGAAT
agctaaatcacacagaggtg

SEQ ID NO: 10385 - DNA, 20 bp, Artificial Sequence
  Description of Artificial Sequence: Synthetic oligonucleotide
  Target: SCNA; (+) strand; PAM type: NNGRRT; PAM sequence: AGGAGT
caaaaaacacacagctggta

SEQ ID NO: 10386 - DNA, 20 bp, Artificial Sequence
  Description of Artificial Sequence: Synthetic oligonucleotide
  Target: SCNA; (+) strand; PAM type: NNGRRT; PAM sequence: TGGAGT
accacatctgccaggaaacg

SEQ ID NO: 10387 - DNA, 20 bp, Artificial Sequence
  Description of Artificial Sequence: Synthetic oligonucleotide
  Target: SCNA; (+) strand; PAM type: NNGRRT; PAM sequence: ATGAAT
tctcggtaaatttaggccaa

SEQ ID NO: 10388 - DNA, 20 bp, Artificial Sequence
  Description of Artificial Sequence: Synthetic oligonucleotide
  Target: SCNA; (+) strand; PAM type: NNGRRT; PAM sequence: AAGGGT
aaacattttactgactgtcc

SEQ ID NO: 10389 - DNA, 20 bp, Artificial Sequence
  Description of Artificial Sequence: Synthetic oligonucleotide
  Target: SCNA; (+) strand; PAM type: NNGRRT; PAM sequence: CTGAAT
ggtgtttcctgaaatgcact

SEQ ID NO: 10390 - DNA, 20 bp, Artificial Sequence
  Description of Artificial Sequence: Synthetic oligonucleotide
  Target: SCNA; (+) strand; PAM type: NNGRRT; PAM sequence: AGGAAT
aatgcactctgaattatcaa

SEQ ID NO: 10391 - DNA, 20 bp, Artificial Sequence
  Description of Artificial Sequence: Synthetic oligonucleotide
  Target: SCNA; (+) strand; PAM type: NNGRRT; PAM sequence: CAGAAT
tttgtcaatacatttttggt

SEQ ID NO: 10392 - DNA, 20 bp, Artificial Sequence
  Description of Artificial Sequence: Synthetic oligonucleotide
  Target: SCNA; (+) strand; PAM type: NNGRRT; PAM sequence: AAGAAT
ctatttaaaaatactttata

SEQ ID NO: 10393 - DNA, 20 bp, Artificial Sequence
  Description of Artificial Sequence: Synthetic oligonucleotide
  Target: SCNA; (+) strand; PAM type: NNGRRT; PAM sequence: TAGAAT
caataagactgatatgttct

SEQ ID NO: 10394 - DNA, 20 bp, Artificial Sequence
  Description of Artificial Sequence: Synthetic oligonucleotide
  Target: SCNA; (+) strand; PAM type: NNGRRT; PAM sequence: AGGAAT
tgattgttttacaatttcat

SEQ ID NO: 10395 - DNA, 20 bp, Artificial Sequence
  Description of Artificial Sequence: Synthetic oligonucleotide
  Target: SCNA; (+) strand; PAM type: NNGRRT; PAM sequence: TTGAAT
tttacaatttcataggaatc

SEQ ID NO: 10396 - DNA, 20 bp, Artificial Sequence
  Description of Artificial Sequence: Synthetic oligonucleotide
  Target: SCNA; (+) strand; PAM type: NNGRRT; PAM sequence: TTGGAT
agatactttaaatatcatct

SEQ ID NO: 10397 - DNA, 20 bp, Artificial Sequence
  Description of Artificial Sequence: Synthetic oligonucleotide
  Target: SCNA; (+) strand; PAM type: NNGRRT; PAM sequence: AAGAAT
tcaacttacagaggagaaaa

SEQ ID NO: 10398 - DNA, 20 bp, Artificial Sequence
  Description of Artificial Sequence: Synthetic oligonucleotide
  Target: SCNA; (+) strand; PAM type: NNGRRT; PAM sequence: TTGAAT
ggcccagtgagaagataatt

SEQ ID NO: 10399 - DNA, 20 bp, Artificial Sequence
  Description of Artificial Sequence: Synthetic oligonucleotide
  Target: SCNA; (+) strand; PAM type: NNGRRT; PAM sequence: AAGGAT
cccatgaaacaaaagggaag

SEQ ID NO: 10400 - DNA, 20 bp, Artificial Sequence
  Description of Artificial Sequence: Synthetic oligonucleotide
  Target: SCNA; (+) strand; PAM type: NNGRRT; PAM sequence: GCGGGT
aaaattagccaggcgtggtg

SEQ ID NO: 10401 - DNA, 20 bp, Artificial Sequence
  Description of Artificial Sequence: Synthetic oligonucleotide
  Target: SCNA; (+) strand; PAM type: NNGRRT; PAM sequence: GAGAAT
cttgggaggggctgaggcag

SEQ ID NO: 10402 - DNA, 20 bp, Artificial Sequence
  Description of Artificial Sequence: Synthetic oligonucleotide
  Target: SCNA; (+) strand; PAM type: NNGRRT; PAM sequence: CTGGGT
ttgtgccactgcactccagc

SEQ ID NO: 10403 - DNA, 20 bp, Artificial Sequence
  Description of Artificial Sequence: Synthetic oligonucleotide
  Target: SCNA; (+) strand; PAM type: NNGRRT; PAM sequence: CCGAGT
tagctgatgaaattaaaaat

SEQ ID NO: 10404 - DNA, 20 bp, Artificial Sequence
  Description of Artificial Sequence: Synthetic oligonucleotide
  Target: SCNA; (+) strand; PAM type: NNGRRT; PAM sequence: TAGGGT
ggctataagcacattcaaac

SEQ ID NO: 10405 - DNA, 20 bp, Artificial Sequence
  Description of Artificial Sequence: Synthetic oligonucleotide
  Target: SCNA; (+) strand; PAM type: NNGRRT; PAM sequence: CAGGAT
ttcaaactagggtctctaca

SEQ ID NO: 10406 - DNA, 20 bp, Artificial Sequence
  Description of Artificial Sequence: Synthetic oligonucleotide
  Target: SCNA; (+) strand; PAM type: NNGRRT; PAM sequence: CAGAAT
ctagggtctctacacaggat

SEQ ID NO: 10407 - DNA, 20 bp, Artificial Sequence
  Description of Artificial Sequence: Synthetic oligonucleotide
  Target: SCNA; (+) strand; PAM type: NNGRRT; PAM sequence: TTGAAT
aaccttgaacattactaaac

SEQ ID NO: 10408 - DNA, 20 bp, Artificial Sequence
  Description of Artificial Sequence: Synthetic oligonucleotide
  Target: SCNA; (+) strand; PAM type: NNGRRT; PAM sequence: TTGGAT
tattcatatcctctctaatg

SEQ ID NO: 10409 - DNA, 20 bp, Artificial Sequence
  Description of Artificial Sequence: Synthetic oligonucleotide
  Target: SCNA; (+) strand; PAM type: NNGRRT; PAM sequence: TGGAAT
aattcacactgtataattta

SEQ ID NO: 10410 - DNA, 20 bp, Artificial Sequence
  Description of Artificial Sequence: Synthetic oligonucleotide
  Target: SCNA; (+) strand; PAM type: NNGRRT; PAM sequence: CAGAAT
ggcatgatttttatgtttta

SEQ ID NO: 10411 - DNA, 20 bp, Artificial Sequence
  Description of Artificial Sequence: Synthetic oligonucleotide
  Target: SCNA; (+) strand; PAM type: NNGRRT; PAM sequence: TTGGAT
tatcatactcctttttaagt

SEQ ID NO: 10412 - DNA, 20 bp, Artificial Sequence
  Description of Artificial Sequence: Synthetic oligonucleotide
  Target: SCNA; (+) strand; PAM type: NNGRRT; PAM sequence: ACGGAT
acaacctctttccccattat

SEQ ID NO: 10413 - DNA, 20 bp, Artificial Sequence
  Description of Artificial Sequence: Synthetic oligonucleotide
  Target: SCNA; (+) strand; PAM type: NNGRRT; PAM sequence: TAGAGT
cgttcctctgactgcatatt

SEQ ID NO: 10414 - DNA, 20 bp, Artificial Sequence
  Description of Artificial Sequence: Synthetic oligonucleotide
  Target: SCNA; (+) strand; PAM type: NNGRRT; PAM sequence: CTGAAT
gactgcatatttagagtctc

SEQ ID NO: 10415 - DNA, 20 bp, Artificial Sequence
  Description of Artificial Sequence: Synthetic oligonucleotide
  Target: SCNA; (+) strand; PAM type: NNGRRT; PAM sequence: CAGGGT
tgcagcagtgacaacatcct

SEQ ID NO: 10416 - DNA, 20 bp, Artificial Sequence
  Description of Artificial Sequence: Synthetic oligonucleotide
  Target: SCNA; (+) strand; PAM type: NNGRRT; PAM sequence: CAGAAT
tttgattcaaattttacttc

SEQ ID NO: 10417 - DNA, 20 bp, Artificial Sequence
  Description of Artificial Sequence: Synthetic oligonucleotide
  Target: SCNA; (+) strand; PAM type: NNGRRT; PAM sequence: ATGGGT
tggttttgtcactgattata

SEQ ID NO: 10418 - DNA, 20 bp, Artificial Sequence
  Description of Artificial Sequence: Synthetic oligonucleotide
  Target: SCNA; (+) strand; PAM type: NNGRRT; PAM sequence: AAGAGT
atgtaatgatttgaaggctg

SEQ ID NO: 10419 - DNA, 20 bp, Artificial Sequence
  Description of Artificial Sequence: Synthetic oligonucleotide
  Target: SCNA; (+) strand; PAM type: NNGRRT; PAM sequence: TTGAAT
tatactgtggtaacagaaat

SEQ ID NO: 10420 - DNA, 20 bp, Artificial Sequence
  Description of Artificial Sequence: Synthetic oligonucleotide
  Target: SCNA; (+) strand; PAM type: NNGRRT; PAM sequence: TGGAAT
atttaactaaccatagtacc

SEQ ID NO: 10421 - DNA, 20 bp, Artificial Sequence
  Description of Artificial Sequence: Synthetic oligonucleotide
  Target: SCNA; (+) strand; PAM type: NNGRRT; PAM sequence: CAGAGT
ttgtttgtgctggaactatg

SEQ ID NO: 10422 - DNA, 20 bp, Artificial Sequence
  Description of Artificial Sequence: Synthetic oligonucleotide
  Target: SCNA; (+) strand; PAM type: NNGRRT; PAM sequence: GAGAAT
tgagaacagctgatatttaa

SEQ ID NO: 10423 - DNA, 20 bp, Artificial Sequence
  Description of Artificial Sequence: Synthetic oligonucleotide
  Target: SCNA; (+) strand; PAM type: NNGRRT; PAM sequence: TGGAAT
agtaagaaatgtctaacagc

SEQ ID NO: 10424 - DNA, 20 bp, Artificial Sequence
  Description of Artificial Sequence: Synthetic oligonucleotide
  Target: SCNA; (+) strand; PAM type: NNGRRT; PAM sequence: AAGAAT
tctttgccttagcagtacct

SEQ ID NO: 10425 - DNA, 20 bp, Artificial Sequence
  Description of Artificial Sequence: Synthetic oligonucleotide
  Target: SCNA; (+) strand; PAM type: NNGRRT; PAM sequence: GAGAGT
aagacaatgagatagaagta

SEQ ID NO: 10426 - DNA, 20 bp, Artificial Sequence
  Description of Artificial Sequence: Synthetic oligonucleotide
  Target: SCNA; (+) strand; PAM type: NNGRRT; PAM sequence: TAGAAT
aatgagatagaagtagagag

SEQ ID NO: 10427 - DNA, 20 bp, Artificial Sequence
  Description of Artificial Sequence: Synthetic oligonucleotide
  Target: SCNA; (+) strand; PAM type: NNGRRT; PAM sequence: GAGGAT
gacaacggtaagagggaggg

SEQ ID NO: 10428 - DNA, 20 bp, Artificial Sequence
  Description of Artificial Sequence: Synthetic oligonucleotide
  Target: SCNA; (+) strand; PAM type: NNGRRT; PAM sequence: AAGAAT
ggatatggagaggttggtta

SEQ ID NO: 10429 - DNA, 20 bp, Artificial Sequence
  Description of Artificial Sequence: Synthetic oligonucleotide
  Target: SCNA; (+) strand; PAM type: NNGRRT; PAM sequence: AGGAAT
tgaaattggagccaaatatg

SEQ ID NO: 10430 - DNA, 20 bp, Artificial Sequence
  Description of Artificial Sequence: Synthetic oligonucleotide
  Target: SCNA; (+) strand; PAM type: NNGRRT; PAM sequence: ATGAGT
attggagccaaatatgagga

SEQ ID NO: 10431 - DNA, 20 bp, Artificial Sequence
  Description of Artificial Sequence: Synthetic oligonucleotide
  Target: SCNA; (+) strand; PAM type: NNGRRT; PAM sequence: TAGGGT
tctagcattctgtagtactg

SEQ ID NO: 10432 - DNA, 20 bp, Artificial Sequence
  Description of Artificial Sequence: Synthetic oligonucleotide
  Target: SCNA; (+) strand; PAM type: NNGRRT; PAM sequence: GAGAAT
atgttcaaaaatctagaaga

SEQ ID NO: 10433 - DNA, 20 bp, Artificial Sequence
  Description of Artificial Sequence: Synthetic oligonucleotide
  Target: SCNA; (+) strand; PAM type: NNGRRT; PAM sequence: AGGAAT
ttttactgttcccaccacaa

SEQ ID NO: 10434 - DNA, 20 bp, Artificial Sequence
  Description of Artificial Sequence: Synthetic oligonucleotide
  Target: SCNA; (+) strand; PAM type: NNGRRT; PAM sequence: ATGGAT
aatgataaatgtttcaggta

SEQ ID NO: 10435 - DNA, 20 bp, Artificial Sequence
  Description of Artificial Sequence: Synthetic oligonucleotide
  Target: SCNA; (+) strand; PAM type: NNGRRT; PAM sequence: CTGGAT
acatgtatggaaatataatt

SEQ ID NO: 10436 - DNA, 20 bp, Artificial Sequence
  Description of Artificial Sequence: Synthetic oligonucleotide
  Target: SCNA; (+) strand; PAM type: NNGRRT; PAM sequence: TAGAGT
aataaaagaaaaattaaaaa

SEQ ID NO: 10437 - DNA, 20 bp, Artificial Sequence
  Description of Artificial Sequence: Synthetic oligonucleotide
  Target: SCNA; (+) strand; PAM type: NNGRRT; PAM sequence: CTGGGT
atgacccagcaatccctctt

SEQ ID NO: 10438 - DNA, 20 bp, Artificial Sequence
  Description of Artificial Sequence: Synthetic oligonucleotide
  Target: SCNA; (+) strand; PAM type: NNGRRT; PAM sequence: TGGAAT
ccaacacagtggctcttgct

SEQ ID NO: 10439 - DNA, 20 bp, Artificial Sequence
  Description of Artificial Sequence: Synthetic oligonucleotide
  Target: SCNA; (+) strand; PAM type: NNGRRT; PAM sequence: AGGAAT
agatcacttataactatata

SEQ ID NO: 10440 - DNA, 20 bp, Artificial Sequence
  Description of Artificial Sequence: Synthetic oligonucleotide
  Target: SCNA; (+) strand; PAM type: NNGRRT; PAM sequence: CAGAAT
tatttatttatttagcaaac

SEQ ID NO: 10441 - DNA, 20 bp, Artificial Sequence
  Description of Artificial Sequence: Synthetic oligonucleotide
  Target: SCNA; (+) strand; PAM type: NNGRRT; PAM sequence: AAGAGT
ttctttgtaaaaaacttatc

SEQ ID NO: 10442 - DNA, 20 bp, Artificial Sequence
  Description of Artificial Sequence: Synthetic oligonucleotide
  Target: SCNA; (+) strand; PAM type: NNGRRT; PAM sequence: CGGAGT
tcattgtataacttcctata

SEQ ID NO: 10443 - DNA, 20 bp, Artificial Sequence
  Description of Artificial Sequence: Synthetic oligonucleotide
  Target: SCNA; (+) strand; PAM type: NNGRRT; PAM sequence: CAGAAT
gacatgttttttatatttta

SEQ ID NO: 10444 - DNA, 20 bp, Artificial Sequence
  Description of Artificial Sequence: Synthetic oligonucleotide
  Target: SCNA; (+) strand; PAM type: NNGRRT; PAM sequence: TTGAAT
tgtcatactctattctaaat

SEQ ID NO: 10445 - DNA, 20 bp, Artificial Sequence
  Description of Artificial Sequence: Synthetic oligonucleotide
  Target: SCNA; (+) strand; PAM type: NNGRRT; PAM sequence: AGGAGT
ctctattctaaatttgaatt

SEQ ID NO: 10446 - DNA, 20 bp, Artificial Sequence
  Description of Artificial Sequence: Synthetic oligonucleotide
  Target: SCNA; (+) strand; PAM type: NNGRRT; PAM sequence: CAGAGT
tttgagaccagtctgggcaa

SEQ ID NO: 10447 - DNA, 20 bp, Artificial Sequence
  Description of Artificial Sequence: Synthetic oligonucleotide
  Target: SCNA; (+) strand; PAM type: NNGRRT; PAM sequence: GAGGAT
tacttgggaggccaaggcag

SEQ ID NO: 10448 - DNA, 20 bp, Artificial Sequence
  Description of Artificial Sequence: Synthetic oligonucleotide
  Target: SCNA; (+) strand; PAM type: NNGRRT; PAM sequence: CTGGGT
taacaccactccattgcagc

SEQ ID NO: 10449 - DNA, 20 bp, Artificial Sequence
  Description of Artificial Sequence: Synthetic oligonucleotide
  Target: SCNA; (+) strand; PAM type: NNGRRT; PAM sequence: TGGAAT
attgtggtacatagatacaa

SEQ ID NO: 10450 - DNA, 20 bp, Artificial Sequence
  Description of Artificial Sequence: Synthetic oligonucleotide
  Target: SCNA; (+) strand; PAM type: NNGRRT; PAM sequence: ATGGAT
aagatcctaccatttacaac

SEQ ID NO: 10451 - DNA, 20 bp, Artificial Sequence
  Description of Artificial Sequence: Synthetic oligonucleotide
  Target: SCNA; (+) strand; PAM type: NNGRRT; PAM sequence: CAGGGT
tacagagactacgtaaaaaa

SEQ ID NO: 10452 - DNA, 20 bp, Artificial Sequence
  Description of Artificial Sequence: Synthetic oligonucleotide
  Target: SCNA; (+) strand; PAM type: NNGRRT; PAM sequence: AGGGGT
acgtaaaaaacagggttaat

SEQ ID NO: 10453 - DNA, 20 bp, Artificial Sequence
  Description of Artificial Sequence: Synthetic oligonucleotide
  Target: SCNA; (+) strand; PAM type: NNGRRT; PAM sequence: TAGGAT
aaatagggacatataggcca

SEQ ID NO: 10454 - DNA, 20 bp, Artificial Sequence
  Description of Artificial Sequence: Synthetic oligonucleotide
  Target: SCNA; (+) strand; PAM type: NNGRRT; PAM sequence: GTGGAT
ttgagattcatgataaataa

SEQ ID NO: 10455 - DNA, 20 bp, Artificial Sequence
  Description of Artificial Sequence: Synthetic oligonucleotide
  Target: SCNA; (+) strand; PAM type: NNGRRT; PAM sequence: ATGAAT
aaaggtaactatgagagatt

SEQ ID NO: 10456 - DNA, 20 bp, Artificial Sequence
  Description of Artificial Sequence: Synthetic oligonucleotide
  Target: SCNA; (+) strand; PAM type: NNGRRT; PAM sequence: AAGAAT
aattaaatttatttttaaaa

SEQ ID NO: 10457 - DNA, 20 bp, Artificial Sequence
  Description of Artificial Sequence: Synthetic oligonucleotide
  Target: SCNA; (+) strand; PAM type: NNGRRT; PAM sequence: CCGGGT
taaaaaagaatgccactagg

SEQ ID NO: 10458 - DNA, 20 bp, Artificial Sequence
  Description of Artificial Sequence: Synthetic oligonucleotide
  Target: SCNA; (+) strand; PAM type: NNGRRT; PAM sequence: GGGGAT
cattttgggaggccgaggtc

SEQ ID NO: 10459 - DNA, 20 bp, Artificial Sequence
  Description of Artificial Sequence: Synthetic oligonucleotide
  Target: SCNA; (+) strand; PAM type: NNGRRT; PAM sequence: AGGAGT
aggtcggggatgatgagatc

SEQ ID NO: 10460 - DNA, 20 bp, Artificial Sequence
  Description of Artificial Sequence: Synthetic oligonucleotide
  Target: SCNA; (+) strand; PAM type: NNGRRT; PAM sequence: CTGAGT
aatttcagctactcaggagg

SEQ ID NO: 10461 - DNA, 20 bp, Artificial Sequence
  Description of Artificial Sequence: Synthetic oligonucleotide
  Target: SCNA; (+) strand; PAM type: NNGRRT; PAM sequence: GAGAAT
tactcaggaggctgagtcag

SEQ ID NO: 10462 - DNA, 20 bp, Artificial Sequence
  Description of Artificial Sequence: Synthetic oligonucleotide
  Target: SCNA; (+) strand; PAM type: NNGRRT; PAM sequence: TGGAGT
cacaccactgcacttcagcc

SEQ ID NO: 10463 - DNA, 20 bp, Artificial Sequence
  Description of Artificial Sequence: Synthetic oligonucleotide
  Target: SCNA; (+) strand; PAM type: NNGRRT; PAM sequence: AAGAAT
tcagaaaaaaagaaaaaaaa

SEQ ID NO: 10464 - DNA, 20 bp, Artificial Sequence
  Description of Artificial Sequence: Synthetic oligonucleotide
  Target: SCNA; (+) strand; PAM type: NNGRRT; PAM sequence: GAGAGT
cttaaaaaaacgagataaat

SEQ ID NO: 10465 - DNA, 20 bp, Artificial Sequence
  Description of Artificial Sequence: Synthetic oligonucleotide
  Target: SCNA; (+) strand; PAM type: NNGRRT; PAM sequence: ATGAGT
tgatggttagcctttaattt

SEQ ID NO: 10466 - DNA, 20 bp, Artificial Sequence
  Description of Artificial Sequence: Synthetic oligonucleotide
  Target: SCNA; (+) strand; PAM type: NNGRRT; PAM sequence: CAGAGT
ttcccaacctcaaaagagca

SEQ ID NO: 10467 - DNA, 20 bp, Artificial Sequence
  Description of Artificial Sequence: Synthetic oligonucleotide
  Target: SCNA; (+) strand; PAM type: NNGRRT; PAM sequence: GAGAGT
gaaggtcagaagtaatacct

SEQ ID NO: 10468 - DNA, 20 bp, Artificial Sequence
  Description of Artificial Sequence: Synthetic oligonucleotide
  Target: SCNA; (+) strand; PAM type: NNGRRT; PAM sequence: GAGAAT
ggtgaagcacattttgactt

SEQ ID NO: 10469 - DNA, 20 bp, Artificial Sequence
  Description of Artificial Sequence: Synthetic oligonucleotide
  Target: SCNA; (+) strand; PAM type: NNGRRT; PAM sequence: CAGAGT
ggccactgctgcttattgag

SEQ ID NO: 10470 - DNA, 20 bp, Artificial Sequence
  Description of Artificial Sequence: Synthetic oligonucleotide
  Target: SCNA; (+) strand; PAM type: NNGRRT; PAM sequence: TTGGAT
ataattaaatctttctgctt

SEQ ID NO: 10471 - DNA, 20 bp, Artificial Sequence
  Description of Artificial Sequence: Synthetic oligonucleotide
  Target: SCNA; (+) strand; PAM type: NNGRRT; PAM sequence: CTGAGT
gatttagatctaattaattt

SEQ ID NO: 10472 - DNA, 20 bp, Artificial Sequence
  Description of Artificial Sequence: Synthetic oligonucleotide
  Target: SCNA; (+) strand; PAM type: NNGRRT; PAM sequence: ATGAGT
atcattaaggtagttcttca

SEQ ID NO: 10473 - DNA, 20 bp, Artificial Sequence
  Description of Artificial Sequence: Synthetic oligonucleotide
  Target: SCNA; (+) strand; PAM type: NNGRRT; PAM sequence: AGGAAT
ttaaaagtatattcttataa

SEQ ID NO: 10474 - DNA, 20 bp, Artificial Sequence
  Description of Artificial Sequence: Synthetic oligonucleotide
  Target: SCNA; (+) strand; PAM type: NNGRRT; PAM sequence: AAGGAT
ttcaaactagttatgtaatg

SEQ ID NO: 10475 - DNA, 20 bp, Artificial Sequence
  Description of Artificial Sequence: Synthetic oligonucleotide
  Target: SCNA; (+) strand; PAM type: NNGRRT; PAM sequence: AAGAAT
agttatgtaatgaaggataa

SEQ ID NO: 10476 - DNA, 20 bp, Artificial Sequence
  Description of Artificial Sequence: Synthetic oligonucleotide
  Target: SCNA; (+) strand; PAM type: NNGRRT; PAM sequence: GAGAGT
gcaaagtaattattccgttg

SEQ ID NO: 10477 - DNA, 20 bp, Artificial Sequence
  Description of Artificial Sequence: Synthetic oligonucleotide
  Target: SCNA; (+) strand; PAM type: NNGRRT; PAM sequence: CAGAAT
ctaccttcacacttcaacag

SEQ ID NO: 10478 - DNA, 20 bp, Artificial Sequence
  Description of Artificial Sequence: Synthetic oligonucleotide
  Target: SCNA; (+) strand; PAM type: NNGRRT; PAM sequence: CAGGGT
ttttttttcttttttttaga

SEQ ID NO: 10479 - DNA, 20 bp, Artificial Sequence
  Description of Artificial Sequence: Synthetic oligonucleotide
  Target: SCNA; (+) strand; PAM type: NNGRRT; PAM sequence: TGGAGT
tatcactctgccacccaggc

SEQ ID NO: 10480 - DNA, 20 bp, Artificial Sequence
  Description of Artificial Sequence: Synthetic oligonucleotide
  Target: SCNA; (+) strand; PAM type: NNGRRT; PAM sequence: CTGGGT
catcctcctacctcagcctc

SEQ ID NO: 10481 - DNA, 20 bp, Artificial Sequence
  Description of Artificial Sequence: Synthetic oligonucleotide
  Target: SCNA; (+) strand; PAM type: NNGRRT; PAM sequence: CAGGGT
ttttgcgttgtttgtagaca

SEQ ID NO: 10482 - DNA, 20 bp, Artificial Sequence
  Description of Artificial Sequence: Synthetic oligonucleotide
  Target: SCNA; (+) strand; PAM type: NNGRRT; PAM sequence: TGGGAT
gcctcgggctctcaaagtgc

SEQ ID NO: 10483 - DNA, 20 bp, Artificial Sequence
  Description of Artificial Sequence: Synthetic oligonucleotide
  Target: SCNA; (+) strand; PAM type: NNGRRT; PAM sequence: CAGAAT
ttcaactctcaattagaact

SEQ ID NO: 10484 - DNA, 20 bp, Artificial Sequence
  Description of Artificial Sequence: Synthetic oligonucleotide
  Target: SCNA; (+) strand; PAM type: NNGRRT; PAM sequence: TAGAAT
tgtaaccaataaaaaattta

SEQ ID NO: 10485 - DNA, 20 bp, Artificial Sequence
  Description of Artificial Sequence: Synthetic oligonucleotide
  Target: SCNA; (+) strand; PAM type: NNGRRT; PAM sequence: AGGAAT
tgggggcatgacttgagccc

SEQ ID NO: 10486 - DNA, 20 bp, Artificial Sequence
  Description of Artificial Sequence: Synthetic oligonucleotide
  Target: SCNA; (+) strand; PAM type: NNGRRT; PAM sequence: AAGGAT
tgacttgagcccaggaattc

SEQ ID NO: 10487 - DNA, 20 bp, Artificial Sequence
  Description of Artificial Sequence: Synthetic oligonucleotide
  Target: SCNA; (+) strand; PAM type: NNGRRT; PAM sequence: GAGAAT
tactgctatagttgccacca

SEQ ID NO: 10488 - DNA, 20 bp, Artificial Sequence
  Description of Artificial Sequence: Synthetic oligonucleotide
  Target: SCNA; (+) strand; PAM type: NNGRRT; PAM sequence: AAGAAT
cagaggagaaagaagagagg

SEQ ID NO: 10489 - DNA, 20 bp, Artificial Sequence
  Description of Artificial Sequence: Synthetic oligonucleotide
  Target: SCNA; (+) strand; PAM type: NNGRRT; PAM sequence: TTGAGT
gaatgggcaatgtgtctgtg

SEQ ID NO: 10490 - DNA, 20 bp, Artificial Sequence
  Description of Artificial Sequence: Synthetic oligonucleotide
  Target: SCNA; (+) strand; PAM type: NNGRRT; PAM sequence: GTGGAT
gagtgtgtgtgtctatgcct

SEQ ID NO: 10491 - DNA, 20 bp, Artificial Sequence
  Description of Artificial Sequence: Synthetic oligonucleotide
  Target: SCNA; (+) strand; PAM type: NNGRRT; PAM sequence: GAGAGT
gtgtgtctatgcctgtggat

SEQ ID NO: 10492 - DNA, 20 bp, Artificial Sequence
  Description of Artificial Sequence: Synthetic oligonucleotide
  Target: SCNA; (+) strand; PAM type: NNGRRT; PAM sequence: AGGAAT
tgtgtgtctattcttttcca

SEQ ID NO: 10493 - DNA, 20 bp, Artificial Sequence
  Description of Artificial Sequence: Synthetic oligonucleotide
  Target: SCNA; (+) strand; PAM type: NNGRRT; PAM sequence: TTGAAT
gtttgtaaaataacactcaa

SEQ ID NO: 10494 - DNA, 20 bp, Artificial Sequence
  Description of Artificial Sequence: Synthetic oligonucleotide
  Target: SCNA; (+) strand; PAM type: NNGRRT; PAM sequence: GAGAGT
acagttcaagttacagaaaa

SEQ ID NO: 10495 - DNA, 20 bp, Artificial Sequence
  Description of Artificial Sequence: Synthetic oligonucleotide
  Target: SCNA; (+) strand; PAM type: NNGRRT; PAM sequence: CAGAGT
caagttacagaaaagagagt

SEQ ID NO: 10496 - DNA, 20 bp, Artificial Sequence
  Description of Artificial Sequence: Synthetic oligonucleotide
  Target: SCNA; (+) strand; PAM type: NNGRRT; PAM sequence: TTGGGT
acagaaaagagagtcagagt

SEQ ID NO: 10497 - DNA, 20 bp, Artificial Sequence
  Description of Artificial Sequence: Synthetic oligonucleotide
  Target: SCNA; (+) strand; PAM type: NNGRRT; PAM sequence: ATGGAT
tttagtatgtgtgtcatttg

SEQ ID NO: 10498 - DNA, 20 bp, Artificial Sequence
  Description of Artificial Sequence: Synthetic oligonucleotide
  Target: SCNA; (+) strand; PAM type: NNGRRT; PAM sequence: CAGAAT
caaagtcatattttaaaaat

SEQ ID NO: 10499 - DNA, 20 bp, Artificial Sequence
  Description of Artificial Sequence: Synthetic oligonucleotide
  Target: SCNA; (+) strand; PAM type: NNGRRT; PAM sequence: ATGGAT
gtcatattttaaaaatcaga

SEQ ID NO: 10500 - DNA, 20 bp, Artificial Sequence
  Description of Artificial Sequence: Synthetic oligonucleotide
  Target: SCNA; (+) strand; PAM type: NNGRRT; PAM sequence: AAGAAT
catcaatgattttgattctt

SEQ ID NO: 10501 - DNA, 20 bp, Artificial Sequence
  Description of Artificial Sequence: Synthetic oligonucleotide
  Target: SCNA; (+) strand; PAM type: NNGRRT; PAM sequence: ATGAGT
tgattattttttaaaagact

SEQ ID NO: 10502 - DNA, 20 bp, Artificial Sequence
  Description of Artificial Sequence: Synthetic oligonucleotide
  Target: SCNA; (+) strand; PAM type: NNGRRT; PAM sequence: TAGAAT
tttaaaactgttctctgaaa

SEQ ID NO: 10503 - DNA, 20 bp, Artificial Sequence
  Description of Artificial Sequence: Synthetic oligonucleotide
  Target: SCNA; (+) strand; PAM type: NNGRRT; PAM sequence: ATGAAT
tgacaagcaatgatgcaaaa

SEQ ID NO: 10504 - DNA, 20 bp, Artificial Sequence
  Description of Artificial Sequence: Synthetic oligonucleotide
  Target: SCNA; (+) strand; PAM type: NNGRRT; PAM sequence: TAGAGT
gagagagaactaccagcatt

SEQ ID NO: 10505 - DNA, 20 bp, Artificial Sequence
  Description of Artificial Sequence: Synthetic oligonucleotide
  Target: SCNA; (+) strand; PAM type: NNGRRT; PAM sequence: TGGGGT
acaagcaccaaactgacatt

SEQ ID NO: 10506 - DNA, 20 bp, Artificial Sequence
  Description of Artificial Sequence: Synthetic oligonucleotide
  Target: SCNA; (+) strand; PAM type: NNGRRT; PAM sequence: ATGAAT
tggcctttgaaagtcctttc

SEQ ID NO: 10507 - DNA, 20 bp, Artificial Sequence
  Description of Artificial Sequence: Synthetic oligonucleotide
  Target: SCNA; (+) strand; PAM type: NNGRRT; PAM sequence: ATGAAT
catgaatacatccatggcta

SEQ ID NO: 10508 - DNA, 20 bp, Artificial Sequence
  Description of Artificial Sequence: Synthetic oligonucleotide
  Target: SCNA; (+) strand; PAM type: NNGRRT; PAM sequence: TTGAAT
tggaaaacataaaatacact

SEQ ID NO: 10509 - DNA, 20 bp, Artificial Sequence
  Description of Artificial Sequence: Synthetic oligonucleotide
  Target: SCNA; (+) strand; PAM type: NNGRRT; PAM sequence: ACGGAT
aaaagtctagccacctaacc

SEQ ID NO: 10510 - DNA, 20 bp, Artificial Sequence
  Description of Artificial Sequence: Synthetic oligonucleotide
  Target: SCNA; (+) strand; PAM type: NNGRRT; PAM sequence: TAGGAT
ctagccacctaaccacggat

SEQ ID NO: 10511 - DNA, 20 bp, Artificial Sequence
  Description of Artificial Sequence: Synthetic oligonucleotide
  Target: SCNA; (+) strand; PAM type: NNGRRT; PAM sequence: ATGAAT
ccacctaaccacggattagg

SEQ ID NO: 10512 - DNA, 20 bp, Artificial Sequence
  Description of Artificial Sequence: Synthetic oligonucleotide
  Target: SCNA; (+) strand; PAM type: NNGRRT; PAM sequence: CTGAGT
cacggattaggatgaatcct

SEQ ID NO: 10513 - DNA, 20 bp, Artificial Sequence
  Description of Artificial Sequence: Synthetic oligonucleotide
  Target: SCNA; (+) strand; PAM type: NNGRRT; PAM sequence: TGGAGT
ttattactgcatttcagaag

SEQ ID NO: 10514 - DNA, 20 bp, Artificial Sequence
  Description of Artificial Sequence: Synthetic oligonucleotide
  Target: SCNA; (+) strand; PAM type: NNGRRT; PAM sequence: CGGGGT
taaccccttttttaaattcc

SEQ ID NO: 10515 - DNA, 20 bp, Artificial Sequence
  Description of Artificial Sequence: Synthetic oligonucleotide
  Target: SCNA; (+) strand; PAM type: NNGRRT; PAM sequence: AAGGGT
ttttaaattcccggggtcta

SEQ ID NO: 10516 - DNA, 20 bp, Artificial Sequence
  Description of Artificial Sequence: Synthetic oligonucleotide
  Target: SCNA; (+) strand; PAM type: NNGRRT; PAM sequence: ATGAGT
ggggtctaaagggtaacagt

SEQ ID NO: 10517 - DNA, 20 bp, Artificial Sequence
  Description of Artificial Sequence: Synthetic oligonucleotide
  Target: SCNA; (+) strand; PAM type: NNGRRT; PAM sequence: TAGGGT
aagcatggaagctggaggct

SEQ ID NO: 10518 - DNA, 20 bp, Artificial Sequence
  Description of Artificial Sequence: Synthetic oligonucleotide
  Target: SCNA; (+) strand; PAM type: NNGRRT; PAM sequence: AGGGGT
gaagctggaggcttagggtc

SEQ ID NO: 10519 - DNA, 20 bp, Artificial Sequence
  Description of Artificial Sequence: Synthetic oligonucleotide
  Target: SCNA; (+) strand; PAM type: NNGRRT; PAM sequence: ATGAAT
gggtcaggggtatccttaac

SEQ ID NO: 10520 - DNA, 20 bp, Artificial Sequence
  Description of Artificial Sequence: Synthetic oligonucleotide
  Target: SCNA; (+) strand; PAM type: NNGRRT; PAM sequence: CGGGGT
aacagaactaactgctcact

SEQ ID NO: 10521 - DNA, 20 bp, Artificial Sequence
  Description of Artificial Sequence: Synthetic oligonucleotide
  Target: SCNA; (+) strand; PAM type: NNGRRT; PAM sequence: TTGGAT
gattttatgtgagagaaaag

SEQ ID NO: 10522 - DNA, 20 bp, Artificial Sequence
  Description of Artificial Sequence: Synthetic oligonucleotide
  Target: SCNA; (+) strand; PAM type: NNGRRT; PAM sequence: GCGGAT
ctcgcgtttcccggggaaaa

SEQ ID NO: 10523 - DNA, 20 bp, Artificial Sequence
  Description of Artificial Sequence: Synthetic oligonucleotide
  Target: SCNA; (+) strand; PAM type: NNGRRT; PAM sequence: GGGAAT
ctctcagcccttgtggagaa

SEQ ID NO: 10524 - DNA, 20 bp, Artificial Sequence
  Description of Artificial Sequence: Synthetic oligonucleotide
  Target: SCNA; (+) strand; PAM type: NNGRRT; PAM sequence: GCGGGT
cctcccagagacctggccca

SEQ ID NO: 10525 - DNA, 20 bp, Artificial Sequence
  Description of Artificial Sequence: Synthetic oligonucleotide
  Target: SCNA; (+) strand; PAM type: NNGRRT; PAM sequence: CAGGAT
gtctcccatccggcgttctc

SEQ ID NO: 10526 - DNA, 20 bp, Artificial Sequence
  Description of Artificial Sequence: Synthetic oligonucleotide
  Target: SCNA; (+) strand; PAM type: NNGRRT; PAM sequence: CTGAGT
ttagatccacaggtacttac

SEQ ID NO: 10527 - DNA, 20 bp, Artificial Sequence
  Description of Artificial Sequence: Synthetic oligonucleotide
  Target: SCNA; (+) strand; PAM type: NNGRRT; PAM sequence: GGGAGT
agccggcgacgcgaggctgg

SEQ ID NO: 10528 - DNA, 20 bp, Artificial Sequence
  Description of Artificial Sequence: Synthetic oligonucleotide
  Target: SCNA; (+) strand; PAM type: NNGRRT; PAM sequence: TCGAAT
gcaaacccgctaacctgtcg

SEQ ID NO: 10529 - DNA, 20 bp, Artificial Sequence
  Description of Artificial Sequence: Synthetic oligonucleotide
  Target: SCNA; (+) strand; PAM type: NNGRRT; PAM sequence: GAGGGT
actcccagttctccgctcac

SEQ ID NO: 10530 - DNA, 20 bp, Artificial Sequence
  Description of Artificial Sequence: Synthetic oligonucleotide
  Target: SCNA; (+) strand; PAM type: NNGRRT; PAM sequence: CGGGGT
cgctctcggaggggccgggc

SEQ ID NO: 10531 - DNA, 20 bp, Artificial Sequence
  Description of Artificial Sequence: Synthetic oligonucleotide
  Target: SCNA; (+) strand; PAM type: NNGRRT; PAM sequence: TCGGAT
gcgtgctcctcgtccctatc

SEQ ID NO: 10532 - DNA, 20 bp, Artificial Sequence
  Description of Artificial Sequence: Synthetic oligonucleotide
  Target: SCNA; (+) strand; PAM type: NNGRRT; PAM sequence: GGGGAT
tcctcgtccctatctcggat

SEQ ID NO: 10533 - DNA, 20 bp, Artificial Sequence
  Description of Artificial Sequence: Synthetic oligonucleotide
  Target: SCNA; (+) strand; PAM type: NNGRRT; PAM sequence: CGGGGT
tggggatggggcagggggcg

SEQ ID NO: 10534 - DNA, 20 bp, Artificial Sequence
  Description of Artificial Sequence: Synthetic oligonucleotide
  Target: SCNA; (+) strand; PAM type: NNGRRT; PAM sequence: TAGGGT
tttgcgcctcacgttaagtt

SEQ ID NO: 10535 - DNA, 20 bp, Artificial Sequence
  Description of Artificial Sequence: Synthetic oligonucleotide
  Target: SCNA; (+) strand; PAM type: NNGRRT; PAM sequence: AGGGAT
agatcgggagcggttgggct

SEQ ID NO: 10536 - DNA, 20 bp, Artificial Sequence
  Description of Artificial Sequence: Synthetic oligonucleotide
  Target: SCNA; (+) strand; PAM type: NNGRRT; PAM sequence: CTGGGT
ttcttgtccccgcctttcct

SEQ ID NO: 10537 - DNA, 20 bp, Artificial Sequence
  Description of Artificial Sequence: Synthetic oligonucleotide
  Target: SCNA; (+) strand; PAM type: NNGRRT; PAM sequence: CAGAGT
gaccaccccctacccctcgt

SEQ ID NO: 10538 - DNA, 20 bp, Artificial Sequence
  Description of Artificial Sequence: Synthetic oligonucleotide
  Target: SCNA; (+) strand; PAM type: NNGRRT; PAM sequence: GAGGGT
cctgggagagccgagggcct

SEQ ID NO: 10539 - DNA, 20 bp, Artificial Sequence
  Description of Artificial Sequence: Synthetic oligonucleotide
  Target: SCNA; (+) strand; PAM type: NNGRRT; PAM sequence: AGGGGT
cggtcacaggttacaacgtt

SEQ ID NO: 10540 - DNA, 20 bp, Artificial Sequence
  Description of Artificial Sequence: Synthetic oligonucleotide
  Target: SCNA; (+) strand; PAM type: NNGRRT; PAM sequence: AAGGGT
ttaatctaggaagagccgga

SEQ ID NO: 10541 - DNA, 20 bp, Artificial Sequence
  Description of Artificial Sequence: Synthetic oligonucleotide
  Target: SCNA; (+) strand; PAM type: NNGRRT; PAM sequence: GAGGGT
gaagagccggaaagggtcct

SEQ ID NO: 10542 - DNA, 20 bp, Artificial Sequence
  Description of Artificial Sequence: Synthetic oligonucleotide
  Target: SCNA; (+) strand; PAM type: NNGRRT; PAM sequence: AAGAGT
tgaaagggagactactaagg

SEQ ID NO: 10543 - DNA, 20 bp, Artificial Sequence
  Description of Artificial Sequence: Synthetic oligonucleotide
  Target: SCNA; (+) strand; PAM type: NNGRRT; PAM sequence: AGGAAT
attttcccatcagtggaaca

SEQ ID NO: 10544 - DNA, 20 bp, Artificial Sequence
  Description of Artificial Sequence: Synthetic oligonucleotide
  Target: SCNA; (+) strand; PAM type: NNGRRT; PAM sequence: CAGAAT
cttctgattctcgttgccct

SEQ ID NO: 10545 - DNA, 20 bp, Artificial Sequence
  Description of Artificial Sequence: Synthetic oligonucleotide
  Target: SCNA; (+) strand; PAM type: NNGRRT; PAM sequence: CTGGAT
gagctggaagacagctgttc

SEQ ID NO: 10546 - DNA, 20 bp, Artificial Sequence
  Description of Artificial Sequence: Synthetic oligonucleotide
  Target: SCNA; (+) strand; PAM type: NNGRRT; PAM sequence: CAGAAT
cagctgttcctggatcacac

SEQ ID NO: 10547 - DNA, 20 bp, Artificial Sequence
  Description of Artificial Sequence: Synthetic oligonucleotide
  Target: SCNA; (+) strand; PAM type: NNGRRT; PAM sequence: CTGGAT
aaagcctttgctttctgtgc

SEQ ID NO: 10548 - DNA, 20 bp, Artificial Sequence
  Description of Artificial Sequence: Synthetic oligonucleotide
  Target: SCNA; (+) strand; PAM type: NNGRRT; PAM sequence: TTGGGT
tgtctgattcttgcgctaat

SEQ ID NO: 10549 - DNA, 20 bp, Artificial Sequence
  Description of Artificial Sequence: Synthetic oligonucleotide
  Target: SCNA; (+) strand; PAM type: NNGRRT; PAM sequence: TTGAGT
gctaatttgggttctgaaat

SEQ ID NO: 10550 - DNA, 20 bp, Artificial Sequence
  Description of Artificial Sequence: Synthetic oligonucleotide
  Target: SCNA; (+) strand; PAM type: NNGRRT; PAM sequence: CAGAAT
caaacatatgcaaaagtaga

SEQ ID NO: 10551 - DNA, 20 bp, Artificial Sequence
  Description of Artificial Sequence: Synthetic oligonucleotide
  Target: SCNA; (+) strand; PAM type: NNGRRT; PAM sequence: TAGAAT
gtaccttcatgtgcatattc

SEQ ID NO: 10552 - DNA, 20 bp, Artificial Sequence
  Description of Artificial Sequence: Synthetic oligonucleotide
  Target: SCNA; (+) strand; PAM type: NNGRRT; PAM sequence: ATGAAT
aggttcgttcatgtcgttgc

SEQ ID NO: 10553 - DNA, 20 bp, Artificial Sequence
  Description of Artificial Sequence: Synthetic oligonucleotide
  Target: SCNA; (+) strand; PAM type: NNGRRT; PAM sequence: ATGGGT
tcgttcatgtcgttgcatga

SEQ ID NO: 10554 - DNA, 20 bp, Artificial Sequence
  Description of Artificial Sequence: Synthetic oligonucleotide
  Target: SCNA; (+) strand; PAM type: NNGRRT; PAM sequence: TAGAGT
ctttacaactagtatctcaa

SEQ ID NO: 10555 - DNA, 20 bp, Artificial Sequence
  Description of Artificial Sequence: Synthetic oligonucleotide
  Target: SCNA; (+) strand; PAM type: NNGRRT; PAM sequence: GAGAAT
attacaacagaccaatgtga

SEQ ID NO: 10556 - DNA, 20 bp, Artificial Sequence
  Description of Artificial Sequence: Synthetic oligonucleotide
  Target: SCNA; (+) strand; PAM type: NNGRRT; PAM sequence: AAGAGT
agacagagaaactgagctcc

SEQ ID NO: 10557 - DNA, 20 bp, Artificial Sequence
  Description of Artificial Sequence: Synthetic oligonucleotide
  Target: SCNA; (+) strand; PAM type: NNGRRT; PAM sequence: CTGAAT
acagaaggcacaattgtctc

SEQ ID NO: 10558 - DNA, 20 bp, Artificial Sequence
  Description of Artificial Sequence: Synthetic oligonucleotide
  Target: SCNA; (+) strand; PAM type: NNGRRT; PAM sequence: TTGGGT
tgtgtctgaagcctcacaga

SEQ ID NO: 10559 - DNA, 20 bp, Artificial Sequence
  Description of Artificial Sequence: Synthetic oligonucleotide
  Target: SCNA; (+) strand; PAM type: NNGRRT; PAM sequence: AAGAGT
ctcacagattgggtgtggta

SEQ ID NO: 10560 - DNA, 20 bp, Artificial Sequence
  Description of Artificial Sequence: Synthetic oligonucleotide
  Target: SCNA; (+) strand; PAM type: NNGRRT; PAM sequence: TTGGAT
gttagaaatagccttcaaat

SEQ ID NO: 10561 - DNA, 20 bp, Artificial Sequence
  Description of Artificial Sequence: Synthetic oligonucleotide
  Target: SCNA; (+) strand; PAM type: NNGRRT; PAM sequence: TTGAAT
aaactaatttcgttgtcatt

SEQ ID NO: 10562 - DNA, 20 bp, Artificial Sequence
  Description of Artificial Sequence: Synthetic oligonucleotide
  Target: SCNA; (+) strand; PAM type: NNGRRT; PAM sequence: CTGAAT
tcagtaaatctttagcctct

SEQ ID NO: 10563 - DNA, 20 bp, Artificial Sequence
  Description of Artificial Sequence: Synthetic oligonucleotide
  Target: SCNA; (+) strand; PAM type: NNGRRT; PAM sequence: TTGAAT
tgaatataacgttaaactaa

SEQ ID NO: 10564 - DNA, 20 bp, Artificial Sequence
  Description of Artificial Sequence: Synthetic oligonucleotide
  Target: SCNA; (+) strand; PAM type: NNGRRT; PAM sequence: TAGGAT
aatattttaccagaccataa

SEQ ID NO: 10565 - DNA, 20 bp, Artificial Sequence
  Description of Artificial Sequence: Synthetic oligonucleotide
  Target: SCNA; (+) strand; PAM type: NNGRRT; PAM sequence: CTGGAT
ccataataggattcttttat

SEQ ID NO: 10566 - DNA, 20 bp, Artificial Sequence
  Description of Artificial Sequence: Synthetic oligonucleotide
  Target: SCNA; (+) strand; PAM type: NNGRRT; PAM sequence: CTGAAT
tgtttacccccatagaacaa

SEQ ID NO: 10567 - DNA, 20 bp, Artificial Sequence
  Description of Artificial Sequence: Synthetic oligonucleotide
  Target: SCNA; (+) strand; PAM type: NNGRRT; PAM sequence: CAGAGT
ttgtgctatagcaaagacag

SEQ ID NO: 10568 - DNA, 20 bp, Artificial Sequence
  Description of Artificial Sequence: Synthetic oligonucleotide
  Target: SCNA; (+) strand; PAM type: NNGRRT; PAM sequence: TAGAAT
ctatagcaaagacagcagag

SEQ ID NO: 10569 - DNA, 20 bp, Artificial Sequence
  Description of Artificial Sequence: Synthetic oligonucleotide
  Target: SCNA; (+) strand; PAM type: NNGRRT; PAM sequence: TTGGAT
aaatacaacgtttattatct

SEQ ID NO: 10570 - DNA, 20 bp, Artificial Sequence
  Description of Artificial Sequence: Synthetic oligonucleotide
  Target: SCNA; (+) strand; PAM type: NNGRRT; PAM sequence: AGGGGT
ccgtatttgttgtgaacaca

SEQ ID NO: 10571 - DNA, 20 bp, Artificial Sequence
  Description of Artificial Sequence: Synthetic oligonucleotide
  Target: SCNA; (+) strand; PAM type: NNGRRT; PAM sequence: GTGGGT
gcttcttgtgtaatttcata

SEQ ID NO: 10572 - DNA, 20 bp, Artificial Sequence
  Description of Artificial Sequence: Synthetic oligonucleotide
  Target: SCNA; (+) strand; PAM type: NNGRRT; PAM sequence: TAGAGT
ttgtgtaatttcatagtggg

SEQ ID NO: 10573 - DNA, 20 bp, Artificial Sequence
  Description of Artificial Sequence: Synthetic oligonucleotide
  Target: SCNA; (+) strand; PAM type: NNGRRT; PAM sequence: GGGGGT
attatgtatgattttggaaa

SEQ ID NO: 10574 - DNA, 20 bp, Artificial Sequence
  Description of Artificial Sequence: Synthetic oligonucleotide
  Target: SCNA; (+) strand; PAM type: NNGRRT; PAM sequence: GGGAAT
agggggtgagcatgagatgg

SEQ ID NO: 10575 - DNA, 20 bp, Artificial Sequence
  Description of Artificial Sequence: Synthetic oligonucleotide
  Target: SCNA; (+) strand; PAM type: NNGRRT; PAM sequence: TAGGGT
gtgagcatgagatgggggaa

SEQ ID NO: 10576 - DNA, 20 bp, Artificial Sequence
  Description of Artificial Sequence: Synthetic oligonucleotide
  Target: SCNA; (+) strand; PAM type: NNGRRT; PAM sequence: AAGAAT
tcctgtggtttcgtggtcct

SEQ ID NO: 10577 - DNA, 20 bp, Artificial Sequence
  Description of Artificial Sequence: Synthetic oligonucleotide
  Target: SCNA; (+) strand; PAM type: NNGRRT; PAM sequence: AAGAGT
ggtgagcatgatagacttct

SEQ ID NO: 10578 - DNA, 20 bp, Artificial Sequence
  Description of Artificial Sequence: Synthetic oligonucleotide
  Target: SCNA; (+) strand; PAM type: NNGRRT; PAM sequence: AGGAAT
tgtcttgtttgattgttgta

SEQ ID NO: 10579 - DNA, 20 bp, Artificial Sequence
  Description of Artificial Sequence: Synthetic oligonucleotide
  Target: SCNA; (+) strand; PAM type: NNGRRT; PAM sequence: ATGAAT
ttgtttgattgttgtaagga

SEQ ID NO: 10580 - DNA, 20 bp, Artificial Sequence
  Description of Artificial Sequence: Synthetic oligonucleotide
  Target: SCNA; (+) strand; PAM type: NNGRRT; PAM sequence: CAGAGT
gctcatagcaaagagccagg

SEQ ID NO: 10581 - DNA, 20 bp, Artificial Sequence
  Description of Artificial Sequence: Synthetic oligonucleotide
  Target: SCNA; (+) strand; PAM type: NNGRRT; PAM sequence: TTGGGT
tattatctagcctccatgtt

SEQ ID NO: 10582 - DNA, 20 bp, Artificial Sequence
  Description of Artificial Sequence: Synthetic oligonucleotide
  Target: SCNA; (+) strand; PAM type: NNGRRT; PAM sequence: ATGGGT
atcaataactctcacttagt

SEQ ID NO: 10583 - DNA, 20 bp, Artificial Sequence
  Description of Artificial Sequence: Synthetic oligonucleotide
  Target: SCNA; (+) strand; PAM type: NNGRRT; PAM sequence: AGGGAT
taagcaaaaaatttccaacc

SEQ ID NO: 10584 - DNA, 20 bp, Artificial Sequence
  Description of Artificial Sequence: Synthetic oligonucleotide
  Target: SCNA; (+) strand; PAM type: NNGRRT; PAM sequence: TAGAGT
ggatggaagttgtggagaga

SEQ ID NO: 10585 - DNA, 20 bp, Artificial Sequence
  Description of Artificial Sequence: Synthetic oligonucleotide
  Target: SCNA; (+) strand; PAM type: NNGRRT; PAM sequence: AGGGAT
aaagctcaaggagcattgat

SEQ ID NO: 10586 - DNA, 20 bp, Artificial Sequence
  Description of Artificial Sequence: Synthetic oligonucleotide
  Target: SCNA; (+) strand; PAM type: NNGRRT; PAM sequence: GCGAGT
tctctttctctccctaatgt

SEQ ID NO: 10587 - DNA, 20 bp, Artificial Sequence
  Description of Artificial Sequence: Synthetic oligonucleotide
  Target: SCNA; (+) strand; PAM type: NNGRRT; PAM sequence: CAGAAT
aagaaatacagtaacaatga

SEQ ID NO: 10588 - DNA, 20 bp, Artificial Sequence
  Description of Artificial Sequence: Synthetic oligonucleotide
  Target: SCNA; (+) strand; PAM type: NNGRRT; PAM sequence: ATGAAT
agacactggcatagtcctgt

SEQ ID NO: 10589 - DNA, 20 bp, Artificial Sequence
  Description of Artificial Sequence: Synthetic oligonucleotide
  Target: SCNA; (+) strand; PAM type: NNGRRT; PAM sequence: GTGGAT
catagtcctgtatgaattat

SEQ ID NO: 10590 - DNA, 20 bp, Artificial Sequence
  Description of Artificial Sequence: Synthetic oligonucleotide
  Target: SCNA; (+) strand; PAM type: NNGRRT; PAM sequence: CAGAAT
ccagtggctctgaaaggctt

SEQ ID NO: 10591 - DNA, 20 bp, Artificial Sequence
  Description of Artificial Sequence: Synthetic oligonucleotide
  Target: SCNA; (+) strand; PAM type: NNGRRT; PAM sequence: ATGAAT
tggctctgaaaggcttcaga

SEQ ID NO: 10592 - DNA, 20 bp, Artificial Sequence
  Description of Artificial Sequence: Synthetic oligonucleotide
  Target: SCNA; (+) strand; PAM type: NNGRRT; PAM sequence: AAGAAT
cctaatatttcagattagtg

SEQ ID NO: 10593 - DNA, 20 bp, Artificial Sequence
  Description of Artificial Sequence: Synthetic oligonucleotide
  Target: SCNA; (+) strand; PAM type: NNGRRT; PAM sequence: ATGAAT
ttcagaaaggaagaaaataa

SEQ ID NO: 10594 - DNA, 20 bp, Artificial Sequence
  Description of Artificial Sequence: Synthetic oligonucleotide
  Target: SCNA; (+) strand; PAM type: NNGRRT; PAM sequence: CAGAGT
agttacaatactgttacaaa

SEQ ID NO: 10595 - DNA, 20 bp, Artificial Sequence
  Description of Artificial Sequence: Synthetic oligonucleotide
  Target: SCNA; (+) strand; PAM type: NNGRRT; PAM sequence: AGGAAT
ttacaatatccaaaatatcc

SEQ ID NO: 10596 - DNA, 20 bp, Artificial Sequence
  Description of Artificial Sequence: Synthetic oligonucleotide
  Target: SCNA; (+) strand; PAM type: NNGRRT; PAM sequence: GAGAGT
ttttcctttctagataattt

SEQ ID NO: 10597 - DNA, 20 bp, Artificial Sequence
  Description of Artificial Sequence: Synthetic oligonucleotide
  Target: SCNA; (+) strand; PAM type: NNGRRT; PAM sequence: AGGAGT
tgggcagattacctgaggtc

SEQ ID NO: 10598 - DNA, 20 bp, Artificial Sequence
  Description of Artificial Sequence: Synthetic oligonucleotide
  Target: SCNA; (+) strand; PAM type: NNGRRT; PAM sequence: GAGAAT
tacttggggggctgaggcag

SEQ ID NO: 10599 - DNA, 20 bp, Artificial Sequence
  Description of Artificial Sequence: Synthetic oligonucleotide
  Target: SCNA; (+) strand; PAM type: NNGRRT; PAM sequence: ATGGAT
acatatccatgtcaataaat

SEQ ID NO: 10600 - DNA, 20 bp, Artificial Sequence
  Description of Artificial Sequence: Synthetic oligonucleotide
  Target: SCNA; (+) strand; PAM type: NNGRRT; PAM sequence: TTGAAT
tttattttcgtatacatcgg

SEQ ID NO: 10601 - DNA, 20 bp, Artificial Sequence
  Description of Artificial Sequence: Synthetic oligonucleotide
  Target: SCNA; (+) strand; PAM type: NNGRRT; PAM sequence: AAGAAT
ttttcttctttttgtcttcc

SEQ ID NO: 10602 - DNA, 20 bp, Artificial Sequence
  Description of Artificial Sequence: Synthetic oligonucleotide
  Target: SCNA; (+) strand; PAM type: NNGRRT; PAM sequence: CTGAGT
taagtcttactgattctttt

SEQ ID NO: 10603 - DNA, 20 bp, Artificial Sequence
  Description of Artificial Sequence: Synthetic oligonucleotide
  Target: SCNA; (+) strand; PAM type: NNGRRT; PAM sequence: CAGGGT
tgaagttaaagttgtatgtg

SEQ ID NO: 10604 - DNA, 20 bp, Artificial Sequence
  Description of Artificial Sequence: Synthetic oligonucleotide
  Target: SCNA; (-) strand; PAM type: NNNNGHTT; PAM sequence: TCATGATT
ctgttaggtataggttttag

SEQ ID NO: 10605 - DNA, 20 bp, Artificial Sequence
  Description of Artificial Sequence: Synthetic oligonucleotide
  Target: SCNA; (-) strand; PAM type: NNNNGHTT; PAM sequence: ATAGGTTT
ctacttccaggctgttaggt

SEQ ID NO: 10606 - DNA, 20 bp, Artificial Sequence
  Description of Artificial Sequence: Synthetic oligonucleotide
  Target: SCNA; (-) strand; PAM type: NNNNGHTT; PAM sequence: GTTGGTTT
acattcaaatgctacactgt

SEQ ID NO: 10607 - DNA, 20 bp, Artificial Sequence
  Description of Artificial Sequence: Synthetic oligonucleotide
  Target: SCNA; (-) strand; PAM type: NNNNGHTT; PAM sequence: CTGTGTTT
atattatggagtttccatgg

SEQ ID NO: 10608 - DNA, 20 bp, Artificial Sequence
  Description of Artificial Sequence: Synthetic oligonucleotide
  Target: SCNA; (-) strand; PAM type: NNNNGHTT; PAM sequence: TGGAGTTT
agctctgtacatcaatatta

SEQ ID NO: 10609 - DNA, 20 bp, Artificial Sequence
  Description of Artificial Sequence: Synthetic oligonucleotide
  Target: SCNA; (-) strand; PAM type: NNNNGHTT; PAM sequence: TTATGTTT
gagtccaacacaatccaaag

SEQ ID NO: 10610 - DNA, 20 bp, Artificial Sequence
  Description of Artificial Sequence: Synthetic oligonucleotide
  Target: SCNA; (-) strand; PAM type: NNNNGHTT; PAM sequence: CAATGTTT
ctgagctctgattatcacag

SEQ ID NO: 10611 - DNA, 20 bp, Artificial Sequence
  Description of Artificial Sequence: Synthetic oligonucleotide
  Target: SCNA; (-) strand; PAM type: NNNNGHTT; PAM sequence: CTCTGATT
tgttaacaactgattctgag

SEQ ID NO: 10612 - DNA, 20 bp, Artificial Sequence
  Description of Artificial Sequence: Synthetic oligonucleotide
  Target: SCNA; (-) strand; PAM type: NNNNGHTT; PAM sequence: AACTGATT
gtaaattatgtattgttaac

SEQ ID NO: 10613 - DNA, 20 bp, Artificial Sequence
  Description of Artificial Sequence: Synthetic oligonucleotide
  Target: SCNA; (-) strand; PAM type: NNNNGHTT; PAM sequence: AGCTGTTT
aatccatcttgggcatcctt

SEQ ID NO: 10614 - DNA, 20 bp, Artificial Sequence
  Description of Artificial Sequence: Synthetic oligonucleotide
  Target: SCNA; (-) strand; PAM type: NNNNGHTT; PAM sequence: GAATGATT
gaagatggagtgtccatgtt

SEQ ID NO: 10615 - DNA, 20 bp, Artificial Sequence
  Description of Artificial Sequence: Synthetic oligonucleotide
  Target: SCNA; (-) strand; PAM type: NNNNGHTT; PAM sequence: GCAAGTTT
tctctatggaaatggtcaaa

SEQ ID NO: 10616 - DNA, 20 bp, Artificial Sequence
  Description of Artificial Sequence: Synthetic oligonucleotide
  Target: SCNA; (-) strand; PAM type: NNNNGHTT; PAM sequence: CTACGTTT
cagaaaattattgttgaata

SEQ ID NO: 10617 - DNA, 20 bp, Artificial Sequence
  Description of Artificial Sequence: Synthetic oligonucleotide
  Target: SCNA; (-) strand; PAM type: NNNNGHTT; PAM sequence: GTCAGATT
gatgtttgttattgtcctct

SEQ ID NO: 10618 - DNA, 20 bp, Artificial Sequence
  Description of Artificial Sequence: Synthetic oligonucleotide
  Target: SCNA; (-) strand; PAM type: NNNNGHTT; PAM sequence: AGATGTTT
aaagaacgcatgagctggtg

SEQ ID NO: 10619 - DNA, 20 bp, Artificial Sequence
  Description of Artificial Sequence: Synthetic oligonucleotide
  Target: SCNA; (-) strand; PAM type: NNNNGHTT; PAM sequence: GTTTGTTT
atatttccaagaaaagtatt

SEQ ID NO: 10620 - DNA, 20 bp, Artificial Sequence
  Description of Artificial Sequence: Synthetic oligonucleotide
  Target: SCNA; (-) strand; PAM type: NNNNGHTT; PAM sequence: TATTGTTT
tacaatatttccaagaaaag

SEQ ID NO: 10621 - DNA, 20 bp, Artificial Sequence
  Description of Artificial Sequence: Synthetic oligonucleotide
  Target: SCNA; (-) strand; PAM type: NNNNGHTT; PAM sequence: CAATGTTT
ctttttgatccaaaaggaag

SEQ ID NO: 10622 - DNA, 20 bp, Artificial Sequence
  Description of Artificial Sequence: Synthetic oligonucleotide
  Target: SCNA; (-) strand; PAM type: NNNNGHTT; PAM sequence: CACTGATT
aaaaaaaccacttgaacctc

SEQ ID NO: 10623 - DNA, 20 bp, Artificial Sequence
  Description of Artificial Sequence: Synthetic oligonucleotide
  Target: SCNA; (-) strand; PAM type: NNNNGHTT; PAM sequence: CACTGATT
aagcatatataagtaaaact

SEQ ID NO: 10624 - DNA, 20 bp, Artificial Sequence
  Description of Artificial Sequence: Synthetic oligonucleotide
  Target: SCNA; (-) strand; PAM type: NNNNGHTT; PAM sequence: ATGTGTTT
tatcttctcatccaagtggg

SEQ ID NO: 10625 - DNA, 20 bp, Artificial Sequence
  Description of Artificial Sequence: Synthetic oligonucleotide
  Target: SCNA; (-) strand; PAM type: NNNNGHTT; PAM sequence: CTATGTTT
atgcaccaactccataaaca

SEQ ID NO: 10626 - DNA, 20 bp, Artificial Sequence
  Description of Artificial Sequence: Synthetic oligonucleotide
  Target: SCNA; (-) strand; PAM type: NNNNGHTT; PAM sequence: ACTAGTTT
aatagctaggggagcatttt

SEQ ID NO: 10627 - DNA, 20 bp, Artificial Sequence
  Description of Artificial Sequence: Synthetic oligonucleotide
  Target: SCNA; (-) strand; PAM type: NNNNGHTT; PAM sequence: CTCTGTTT
ttactacttaatattagtgt

SEQ ID NO: 10628 - DNA, 20 bp, Artificial Sequence
  Description of Artificial Sequence: Synthetic oligonucleotide
  Target: SCNA; (-) strand; PAM type: NNNNGHTT; PAM sequence: TGCTGCTT
ttacctagaatagtcaagga

SEQ ID NO: 10629 - DNA, 20 bp, Artificial Sequence
  Description of Artificial Sequence: Synthetic oligonucleotide
  Target: SCNA; (-) strand; PAM type: NNNNGHTT; PAM sequence: TCATGTTT
caaacaaatatagtagcaag

SEQ ID NO: 10630 - DNA, 20 bp, Artificial Sequence
  Description of Artificial Sequence: Synthetic oligonucleotide
  Target: SCNA; (-) strand; PAM type: NNNNGHTT; PAM sequence: ATCAGATT
cttttgcaggtaaactaaat

SEQ ID NO: 10631 - DNA, 20 bp, Artificial Sequence
  Description of Artificial Sequence: Synthetic oligonucleotide
  Target: SCNA; (-) strand; PAM type: NNNNGHTT; PAM sequence: TAGGGCTT
gcattttaattaggttcctc

SEQ ID NO: 10632 - DNA, 20 bp, Artificial Sequence
  Description of Artificial Sequence: Synthetic oligonucleotide
  Target: SCNA; (-) strand; PAM type: NNNNGHTT; PAM sequence: CGTTGTTT
ggtcagtgaccagaaatcct

SEQ ID NO: 10633 - DNA, 20 bp, Artificial Sequence
  Description of Artificial Sequence: Synthetic oligonucleotide
  Target: SCNA; (-) strand; PAM type: NNNNGHTT; PAM sequence: CTCAGATT
gaaccttatgaaaatacatc

SEQ ID NO: 10634 - DNA, 20 bp, Artificial Sequence
  Description of Artificial Sequence: Synthetic oligonucleotide
  Target: SCNA; (-) strand; PAM type: NNNNGHTT; PAM sequence: GATGGCTT
actataggttaacatactag

SEQ ID NO: 10635 - DNA, 20 bp, Artificial Sequence
  Description of Artificial Sequence: Synthetic oligonucleotide
  Target: SCNA; (-) strand; PAM type: NNNNGHTT; PAM sequence: TTTGGTTT
agtaagttttgctagtataa

SEQ ID NO: 10636 - DNA, 20 bp, Artificial Sequence
  Description of Artificial Sequence: Synthetic oligonucleotide
  Target: SCNA; (-) strand; PAM type: NNNNGHTT; PAM sequence: GTAAGTTT
gcccttagtttgagcctcta

SEQ ID NO: 10637 - DNA, 20 bp, Artificial Sequence
  Description of Artificial Sequence: Synthetic oligonucleotide
  Target: SCNA; (-) strand; PAM type: NNNNGHTT; PAM sequence: CTTAGTTT
ccacattccttcaaagagcc

SEQ ID NO: 10638 - DNA, 20 bp, Artificial Sequence
  Description of Artificial Sequence: Synthetic oligonucleotide
  Target: SCNA; (-) strand; PAM type: NNNNGHTT; PAM sequence: TAATGTTT
taattacctaagcttttctt

SEQ ID NO: 10639 - DNA, 20 bp, Artificial Sequence
  Description of Artificial Sequence: Synthetic oligonucleotide
  Target: SCNA; (-) strand; PAM type: NNNNGHTT; PAM sequence: CTAAGCTT
aatgttctttgtgtaattac

SEQ ID NO: 10640 - DNA, 20 bp, Artificial Sequence
  Description of Artificial Sequence: Synthetic oligonucleotide
  Target: SCNA; (-) strand; PAM type: NNNNGHTT; PAM sequence: ATATGATT
aacattgaaactattcctaa

SEQ ID NO: 10641 - DNA, 20 bp, Artificial Sequence
  Description of Artificial Sequence: Synthetic oligonucleotide
  Target: SCNA; (-) strand; PAM type: NNNNGHTT; PAM sequence: GTTCGTTT
tagttgattgatgcagtaat

SEQ ID NO: 10642 - DNA, 20 bp, Artificial Sequence
  Description of Artificial Sequence: Synthetic oligonucleotide
  Target: SCNA; (-) strand; PAM type: NNNNGHTT; PAM sequence: AGTTGATT
aagtttgattttctaggtgt

SEQ ID NO: 10643 - DNA, 20 bp, Artificial Sequence
  Description of Artificial Sequence: Synthetic oligonucleotide
  Target: SCNA; (-) strand; PAM type: NNNNGHTT; PAM sequence: GTTTGATT
acttaatattgtataataaa

SEQ ID NO: 10644 - DNA, 20 bp, Artificial Sequence
  Description of Artificial Sequence: Synthetic oligonucleotide
  Target: SCNA; (-) strand; PAM type: NNNNGHTT; PAM sequence: TAAAGTTT
agcaacttaatattgtataa

SEQ ID NO: 10645 - DNA, 20 bp, Artificial Sequence
  Description of Artificial Sequence: Synthetic oligonucleotide
  Target: SCNA; (-) strand; PAM type: NNNNGHTT; PAM sequence: CTGGGATT
aaatataaattaaggtataa

SEQ ID NO: 10646 - DNA, 20 bp, Artificial Sequence
  Description of Artificial Sequence: Synthetic oligonucleotide
  Target: SCNA; (-) strand; PAM type: NNNNGHTT; PAM sequence: CTTGGCTT
gttgaatcatggcatgggta

SEQ ID NO: 10647 - DNA, 20 bp, Artificial Sequence
  Description of Artificial Sequence: Synthetic oligonucleotide
  Target: SCNA; (-) strand; PAM type: NNNNGHTT; PAM sequence: GTGGGCTT
gagcagcagtctacagtaag

SEQ ID NO: 10648 - DNA, 20 bp, Artificial Sequence
  Description of Artificial Sequence: Synthetic oligonucleotide
  Target: SCNA; (-) strand; PAM type: NNNNGHTT; PAM sequence: TCCTGATT
ttgtaaataaaccgggcata

SEQ ID NO: 10649 - DNA, 20 bp, Artificial Sequence
  Description of Artificial Sequence: Synthetic oligonucleotide
  Target: SCNA; (-) strand; PAM type: NNNNGHTT; PAM sequence: CCAAGATT
gtgtgagccaccatgcctgg

SEQ ID NO: 10650 - DNA, 20 bp, Artificial Sequence
  Description of Artificial Sequence: Synthetic oligonucleotide
  Target: SCNA; (-) strand; PAM type: NNNNGHTT; PAM sequence: CTGGGATT
tacctcggcctcccaaagtg

SEQ ID NO: 10651 - DNA, 20 bp, Artificial Sequence
  Description of Artificial Sequence: Synthetic oligonucleotide
  Target: SCNA; (-) strand; PAM type: NNNNGHTT; PAM sequence: GTGGGATT
tgcctcagcctctcgagtag

SEQ ID NO: 10652 - DNA, 20 bp, Artificial Sequence
  Description of Artificial Sequence: Synthetic oligonucleotide
  Target: SCNA; (-) strand; PAM type: NNNNGHTT; PAM sequence: AAGCGATT
aacctccgcctcccaggttc

SEQ ID NO: 10653 - DNA, 20 bp, Artificial Sequence
  Description of Artificial Sequence: Synthetic oligonucleotide
  Target: SCNA; (-) strand; PAM type: NNNNGHTT; PAM sequence: GAGAGATT
tatatctatagatacatata

SEQ ID NO: 10654 - DNA, 20 bp, Artificial Sequence
  Description of Artificial Sequence: Synthetic oligonucleotide
  Target: SCNA; (-) strand; PAM type: NNNNGHTT; PAM sequence: ATCTGTTT
ttagtaagttttgctagtac

SEQ ID NO: 10655 - DNA, 20 bp, Artificial Sequence
  Description of Artificial Sequence: Synthetic oligonucleotide
  Target: SCNA; (-) strand; PAM type: NNNNGHTT; PAM sequence: GTAAGTTT
tactagagtttgagccttta

SEQ ID NO: 10656 - DNA, 20 bp, Artificial Sequence
  Description of Artificial Sequence: Synthetic oligonucleotide
  Target: SCNA; (-) strand; PAM type: NNNNGHTT; PAM sequence: TAGAGTTT
ggtacctaaagaaaatttac

SEQ ID NO: 10657 - DNA, 20 bp, Artificial Sequence
  Description of Artificial Sequence: Synthetic oligonucleotide
  Target: SCNA; (-) strand; PAM type: NNNNGHTT; PAM sequence: ATTTGTTT
tctaggtataataattagat

SEQ ID NO: 10658 - DNA, 20 bp, Artificial Sequence
  Description of Artificial Sequence: Synthetic oligonucleotide
  Target: SCNA; (-) strand; PAM type: NNNNGHTT; PAM sequence: TTATGATT
aacaaccttaataggttcca

SEQ ID NO: 10659 - DNA, 20 bp, Artificial Sequence
  Description of Artificial Sequence: Synthetic oligonucleotide
  Target: SCNA; (-) strand; PAM type: NNNNGHTT; PAM sequence: AAGTGATT
tatgtgtcaaatatagatgt

SEQ ID NO: 10660 - DNA, 20 bp, Artificial Sequence
  Description of Artificial Sequence: Synthetic oligonucleotide
  Target: SCNA; (-) strand; PAM type: NNNNGHTT; PAM sequence: CTGTGTTT
gtccacacactaatggaact

SEQ ID NO: 10661 - DNA, 20 bp, Artificial Sequence
  Description of Artificial Sequence: Synthetic oligonucleotide
  Target: SCNA; (-) strand; PAM type: NNNNGHTT; PAM sequence: ACTAGATT
aacagcgtttccttttcact

SEQ ID NO: 10662 - DNA, 20 bp, Artificial Sequence
  Description of Artificial Sequence: Synthetic oligonucleotide
  Target: SCNA; (-) strand; PAM type: NNNNGHTT; PAM sequence: CAGCGTTT
tgagtgtatagaaagaaaaa

SEQ ID NO: 10663 - DNA, 20 bp, Artificial Sequence
  Description of Artificial Sequence: Synthetic oligonucleotide
  Target: SCNA; (-) strand; PAM type: NNNNGHTT; PAM sequence: AATTGCTT
gtagccacaaagaatgggag

SEQ ID NO: 10664 - DNA, 20 bp, Artificial Sequence
  Description of Artificial Sequence: Synthetic oligonucleotide
  Target: SCNA; (-) strand; PAM type: NNNNGHTT; PAM sequence: GTCCGATT
gctaactccaggtagatagt

SEQ ID NO: 10665 - DNA, 20 bp, Artificial Sequence
  Description of Artificial Sequence: Synthetic oligonucleotide
  Target: SCNA; (-) strand; PAM type: NNNNGHTT; PAM sequence: TTGTGATT
gtaacatgaggactcattgc

SEQ ID NO: 10666 - DNA, 20 bp, Artificial Sequence
  Description of Artificial Sequence: Synthetic oligonucleotide
  Target: SCNA; (-) strand; PAM type: NNNNGHTT; PAM sequence: CATTGCTT
ctatgagtaacatgaggact

SEQ ID NO: 10667 - DNA, 20 bp, Artificial Sequence
  Description of Artificial Sequence: Synthetic oligonucleotide
  Target: SCNA; (-) strand; PAM type: NNNNGHTT; PAM sequence: CTTGGATT
gaggagagggccgtggagac

SEQ ID NO: 10668 - DNA, 20 bp, Artificial Sequence
  Description of Artificial Sequence: Synthetic oligonucleotide
  Target: SCNA; (-) strand; PAM type: NNNNGHTT; PAM sequence: AACTGTTT
aactggtaatctagtaagca

SEQ ID NO: 10669 - DNA, 20 bp, Artificial Sequence
  Description of Artificial Sequence: Synthetic oligonucleotide
  Target: SCNA; (-) strand; PAM type: NNNNGHTT; PAM sequence: GAGTGCTT
tccctaaaagacaggattca

SEQ ID NO: 10670 - DNA, 20 bp, Artificial Sequence
  Description of Artificial Sequence: Synthetic oligonucleotide
  Target: SCNA; (-) strand; PAM type: NNNNGHTT; PAM sequence: ACAGGATT
tccataaaaatccctaaaag

SEQ ID NO: 10671 - DNA, 20 bp, Artificial Sequence
  Description of Artificial Sequence: Synthetic oligonucleotide
  Target: SCNA; (-) strand; PAM type: NNNNGHTT; PAM sequence: CAATGCTT
gagattgagttaataagcaa

SEQ ID NO: 10672 - DNA, 20 bp, Artificial Sequence
  Description of Artificial Sequence: Synthetic oligonucleotide
  Target: SCNA; (-) strand; PAM type: NNNNGHTT; PAM sequence: TGGAGATT
ggacgggagagaagaggagc

SEQ ID NO: 10673 - DNA, 20 bp, Artificial Sequence
  Description of Artificial Sequence: Synthetic oligonucleotide
  Target: SCNA; (-) strand; PAM type: NNNNGHTT; PAM sequence: TGAAGCTT
tcaagccatgataagaagct

SEQ ID NO: 10674 - DNA, 20 bp, Artificial Sequence
  Description of Artificial Sequence: Synthetic oligonucleotide
  Target: SCNA; (-) strand; PAM type: NNNNGHTT; PAM sequence: AGAAGCTT
agaaaggtcaagccatgata

SEQ ID NO: 10675 - DNA, 20 bp, Artificial Sequence
  Description of Artificial Sequence: Synthetic oligonucleotide
  Target: SCNA; (-) strand; PAM type: NNNNGHTT; PAM sequence: CTCTGCTT
ttctaatatttggtctttga

SEQ ID NO: 10676 - DNA, 20 bp, Artificial Sequence
  Description of Artificial Sequence: Synthetic oligonucleotide
  Target: SCNA; (-) strand; PAM type: NNNNGHTT; PAM sequence: TTTGGTTT
tacatatatgaaaatatgta

SEQ ID NO: 10677 - DNA, 20 bp, Artificial Sequence
  Description of Artificial Sequence: Synthetic oligonucleotide
  Target: SCNA; (-) strand; PAM type: NNNNGHTT; PAM sequence: TCTGGCTT
caaacatgtttcctcatctt

SEQ ID NO: 10678 - DNA, 20 bp, Artificial Sequence
  Description of Artificial Sequence: Synthetic oligonucleotide
  Target: SCNA; (-) strand; PAM type: NNNNGHTT; PAM sequence: ACATGTTT
tgcactagtgtgagatgcaa

SEQ ID NO: 10679 - DNA, 20 bp, Artificial Sequence
  Description of Artificial Sequence: Synthetic oligonucleotide
  Target: SCNA; (-) strand; PAM type: NNNNGHTT; PAM sequence: TGTGGTTT
gggaacagaacaatctaatg

SEQ ID NO: 10680 - DNA, 20 bp, Artificial Sequence
  Description of Artificial Sequence: Synthetic oligonucleotide
  Target: SCNA; (-) strand; PAM type: NNNNGHTT; PAM sequence: GTCGGCTT
cagcctcatatgactccacg

SEQ ID NO: 10681 - DNA, 20 bp, Artificial Sequence
  Description of Artificial Sequence: Synthetic oligonucleotide
  Target: SCNA; (-) strand; PAM type: NNNNGHTT; PAM sequence: CTAGGTTT
gcctgaggatcaatccagtc

SEQ ID NO: 10682 - DNA, 20 bp, Artificial Sequence
  Description of Artificial Sequence: Synthetic oligonucleotide
  Target: SCNA; (-) strand; PAM type: NNNNGHTT; PAM sequence: GGAAGCTT
aagtcatataagccttttca

SEQ ID NO: 10683 - DNA, 20 bp, Artificial Sequence
  Description of Artificial Sequence: Synthetic oligonucleotide
  Target: SCNA; (-) strand; PAM type: NNNNGHTT; PAM sequence: AATAGTTT
tgaattactttatatatctt

SEQ ID NO: 10684 - DNA, 20 bp, Artificial Sequence
  Description of Artificial Sequence: Synthetic oligonucleotide
  Target: SCNA; (-) strand; PAM type: NNNNGHTT; PAM sequence: AAGTGTTT
tggatacaaattctccttta

SEQ ID NO: 10685 - DNA, 20 bp, Artificial Sequence
  Description of Artificial Sequence: Synthetic oligonucleotide
  Target: SCNA; (-) strand; PAM type: NNNNGHTT; PAM sequence: TAAGGATT
gaaagttgtgaccatgaatt

SEQ ID NO: 10686 - DNA, 20 bp, Artificial Sequence
  Description of Artificial Sequence: Synthetic oligonucleotide
  Target: SCNA; (-) strand; PAM type: NNNNGHTT; PAM sequence: TTGAGATT
tagcagtgacctagaacaat

SEQ ID NO: 10687 - DNA, 20 bp, Artificial Sequence
  Description of Artificial Sequence: Synthetic oligonucleotide
  Target: SCNA; (-) strand; PAM type: NNNNGHTT; PAM sequence: AAAGGATT
taagttatgtttaagcaagg

SEQ ID NO: 10688 - DNA, 20 bp, Artificial Sequence
  Description of Artificial Sequence: Synthetic oligonucleotide
  Target: SCNA; (-) strand; PAM type: NNNNGHTT; PAM sequence: TTATGTTT
agtttcttgttttatttaag

SEQ ID NO: 10689 - DNA, 20 bp, Artificial Sequence
  Description of Artificial Sequence: Synthetic oligonucleotide
  Target: SCNA; (-) strand; PAM type: NNNNGHTT; PAM sequence: TCTTGTTT
ctagagagaaatggtaagtt

SEQ ID NO: 10690 - DNA, 20 bp, Artificial Sequence
  Description of Artificial Sequence: Synthetic oligonucleotide
  Target: SCNA; (-) strand; PAM type: NNNNGHTT; PAM sequence: GTAAGTTT
tcttacactagagagaaatg

SEQ ID NO: 10691 - DNA, 20 bp, Artificial Sequence
  Description of Artificial Sequence: Synthetic oligonucleotide
  Target: SCNA; (-) strand; PAM type: NNNNGHTT; PAM sequence: AGCAGTTT
cagaatattctagacatgct

SEQ ID NO: 10692 - DNA, 20 bp, Artificial Sequence
  Description of Artificial Sequence: Synthetic oligonucleotide
  Target: SCNA; (-) strand; PAM type: NNNNGHTT; PAM sequence: TTTGGTTT
ataaattaatttaaaaatta

SEQ ID NO: 10693 - DNA, 20 bp, Artificial Sequence
  Description of Artificial Sequence: Synthetic oligonucleotide
  Target: SCNA; (-) strand; PAM type: NNNNGHTT; PAM sequence: AAAGGTTT
ttctaggatttttccttagg

SEQ ID NO: 10694 - DNA, 20 bp, Artificial Sequence
  Description of Artificial Sequence: Synthetic oligonucleotide
  Target: SCNA; (-) strand; PAM type: NNNNGHTT; PAM sequence: CTAGGATT
tgttgccaaatatatgaatt

SEQ ID NO: 10695 - DNA, 20 bp, Artificial Sequence
  Description of Artificial Sequence: Synthetic oligonucleotide
  Target: SCNA; (-) strand; PAM type: NNNNGHTT; PAM sequence: CTTTGTTT
ctctgagagaatgtggttaa

SEQ ID NO: 10696 - DNA, 20 bp, Artificial Sequence
  Description of Artificial Sequence: Synthetic oligonucleotide
  Target: SCNA; (-) strand; PAM type: NNNNGHTT; PAM sequence: AGATGATT
cgggaactaagcagtgtaga

SEQ ID NO: 10697 - DNA, 20 bp, Artificial Sequence
  Description of Artificial Sequence: Synthetic oligonucleotide
  Target: SCNA; (-) strand; PAM type: NNNNGHTT; PAM sequence: ATGTGTTT
ggaactgttgtttgatgtgt

SEQ ID NO: 10698 - DNA, 20 bp, Artificial Sequence
  Description of Artificial Sequence: Synthetic oligonucleotide
  Target: SCNA; (-) strand; PAM type: NNNNGHTT; PAM sequence: TGTTGTTT
ctttacgtattttggggaac

SEQ ID NO: 10699 - DNA, 20 bp, Artificial Sequence
  Description of Artificial Sequence: Synthetic oligonucleotide
  Target: SCNA; (-) strand; PAM type: NNNNGHTT; PAM sequence: GTTTGCTT
ctcccttcaatcctgtcaat

SEQ ID NO: 10700 - DNA, 20 bp, Artificial Sequence
  Description of Artificial Sequence: Synthetic oligonucleotide
  Target: SCNA; (-) strand; PAM type: NNNNGHTT; PAM sequence: CAATGTTT
atttctcccttcaatcctgt

SEQ ID NO: 10701 - DNA, 20 bp, Artificial Sequence
  Description of Artificial Sequence: Synthetic oligonucleotide
  Target: SCNA; (-) strand; PAM type: NNNNGHTT; PAM sequence: CTGTGATT
tgcactggttccttaagtgg

SEQ ID NO: 10702 - DNA, 20 bp, Artificial Sequence
  Description of Artificial Sequence: Synthetic oligonucleotide
  Target: SCNA; (-) strand; PAM type: NNNNGHTT; PAM sequence: GTGTGTTT
ctgaagcaacactgccagaa

SEQ ID NO: 10703 - DNA, 20 bp, Artificial Sequence
  Description of Artificial Sequence: Synthetic oligonucleotide
  Target: SCNA; (-) strand; PAM type: NNNNGHTT; PAM sequence: TCATGCTT
tctcactttaataataaaaa

SEQ ID NO: 10704 - DNA, 20 bp, Artificial Sequence
  Description of Artificial Sequence: Synthetic oligonucleotide
  Target: SCNA; (-) strand; PAM type: NNNNGHTT; PAM sequence: TTGTGTTT
ttgcgatgtgttttattcac

SEQ ID NO: 10705 - DNA, 20 bp, Artificial Sequence
  Description of Artificial Sequence: Synthetic oligonucleotide
  Target: SCNA; (-) strand; PAM type: NNNNGHTT; PAM sequence: ATGTGTTT
tgaaattttaccattttgcg

SEQ ID NO: 10706 - DNA, 20 bp, Artificial Sequence
  Description of Artificial Sequence: Synthetic oligonucleotide
  Target: SCNA; (-) strand; PAM type: NNNNGHTT; PAM sequence: ATAAGATT
gtgatttgctatcatatatt

SEQ ID NO: 10707 - DNA, 20 bp, Artificial Sequence
  Description of Artificial Sequence: Synthetic oligonucleotide
  Target: SCNA; (-) strand; PAM type: NNNNGHTT; PAM sequence: TAGTGATT
tgctgttgttcagaagttgt

SEQ ID NO: 10708 - DNA, 20 bp, Artificial Sequence
  Description of Artificial Sequence: Synthetic oligonucleotide
  Target: SCNA; (-) strand; PAM type: NNNNGHTT; PAM sequence: TGTGGCTT
tctttgtgtgctgtggattt

SEQ ID NO: 10709 - DNA, 20 bp, Artificial Sequence
  Description of Artificial Sequence: Synthetic oligonucleotide
  Target: SCNA; (-) strand; PAM type: NNNNGHTT; PAM sequence: TGTGGATT
gtagcagggtctttgtgtgc

SEQ ID NO: 10710 - DNA, 20 bp, Artificial Sequence
  Description of Artificial Sequence: Synthetic oligonucleotide
  Target: SCNA; (-) strand; PAM type: NNNNGHTT; PAM sequence: CGGTGCTT
cctgcccccactcagcattt

SEQ ID NO: 10711 - DNA, 20 bp, Artificial Sequence
  Description of Artificial Sequence: Synthetic oligonucleotide
  Target: SCNA; (-) strand; PAM type: NNNNGHTT; PAM sequence: CAGTGATT
atctcgaagtcttccatcag

SEQ ID NO: 10712 - DNA, 20 bp, Artificial Sequence
  Description of Artificial Sequence: Synthetic oligonucleotide
  Target: SCNA; (-) strand; PAM type: NNNNGHTT; PAM sequence: CAAAGTTT
tgcccagtcatgacatttct

SEQ ID NO: 10713 - DNA, 20 bp, Artificial Sequence
  Description of Artificial Sequence: Synthetic oligonucleotide
  Target: SCNA; (-) strand; PAM type: NNNNGHTT; PAM sequence: CCCAGTTT
gcctaagaaatatctttgct

SEQ ID NO: 10714 - DNA, 20 bp, Artificial Sequence
  Description of Artificial Sequence: Synthetic oligonucleotide
  Target: SCNA; (-) strand; PAM type: NNNNGHTT; PAM sequence: TTTTGATT
actaacagtgtgtgctgtct

SEQ ID NO: 10715 - DNA, 20 bp, Artificial Sequence
  Description of Artificial Sequence: Synthetic oligonucleotide
  Target: SCNA; (-) strand; PAM type: NNNNGHTT; PAM sequence: CATTGATT
ctgcagaatatttgcaaaaa

SEQ ID NO: 10716 - DNA, 20 bp, Artificial Sequence
  Description of Artificial Sequence: Synthetic oligonucleotide
  Target: SCNA; (-) strand; PAM type: NNNNGHTT; PAM sequence: GCTTGATT
tggaaaaggctttatagaca

SEQ ID NO: 10717 - DNA, 20 bp, Artificial Sequence
  Description of Artificial Sequence: Synthetic oligonucleotide
  Target: SCNA; (-) strand; PAM type: NNNNGHTT; PAM sequence: GACAGCTT
agtctggaaaaggctttata

SEQ ID NO: 10718 - DNA, 20 bp, Artificial Sequence
  Description of Artificial Sequence: Synthetic oligonucleotide
  Target: SCNA; (-) strand; PAM type: NNNNGHTT; PAM sequence: AAAGGCTT
ttagagcatcttagtctgga

SEQ ID NO: 10719 - DNA, 20 bp, Artificial Sequence
  Description of Artificial Sequence: Synthetic oligonucleotide
  Target: SCNA; (-) strand; PAM type: NNNNGHTT; PAM sequence: TGAGGTTT
cagatactgtatggagagct

SEQ ID NO: 10720 - DNA, 20 bp, Artificial Sequence
  Description of Artificial Sequence: Synthetic oligonucleotide
  Target: SCNA; (-) strand; PAM type: NNNNGHTT; PAM sequence: GAGAGCTT
tgctatccagatactgtatg

SEQ ID NO: 10721 - DNA, 20 bp, Artificial Sequence
  Description of Artificial Sequence: Synthetic oligonucleotide
  Target: SCNA; (-) strand; PAM type: NNNNGHTT; PAM sequence: GTTTGTTT
tattgaagttatgcttattt

SEQ ID NO: 10722 - DNA, 20 bp, Artificial Sequence
  Description of Artificial Sequence: Synthetic oligonucleotide
  Target: SCNA; (-) strand; PAM type: NNNNGHTT; PAM sequence: ATTTGTTT
gagttattgaagttatgctt

SEQ ID NO: 10723 - DNA, 20 bp, Artificial Sequence
  Description of Artificial Sequence: Synthetic oligonucleotide
  Target: SCNA; (-) strand; PAM type: NNNNGHTT; PAM sequence: TTATGCTT
aacaacttgagttattgaag

SEQ ID NO: 10724 - DNA, 20 bp, Artificial Sequence
  Description of Artificial Sequence: Synthetic oligonucleotide
  Target: SCNA; (-) strand; PAM type: NNNNGHTT; PAM sequence: TTCAGCTT
tattaggataatcttgtcat

SEQ ID NO: 10725 - DNA, 20 bp, Artificial Sequence
  Description of Artificial Sequence: Synthetic oligonucleotide
  Target: SCNA; (-) strand; PAM type: NNNNGHTT; PAM sequence: GATAGATT
ttaggaacaaggaaaatggt

SEQ ID NO: 10726 - DNA, 20 bp, Artificial Sequence
  Description of Artificial Sequence: Synthetic oligonucleotide
  Target: SCNA; (-) strand; PAM type: NNNNGHTT; PAM sequence: TCAAGCTT
gaacagtgaataattatgac

SEQ ID NO: 10727 - DNA, 20 bp, Artificial Sequence
  Description of Artificial Sequence: Synthetic oligonucleotide
  Target: SCNA; (-) strand; PAM type: NNNNGHTT; PAM sequence: AGAAGTTT
atctgtttcaatcaatcagg

SEQ ID NO: 10728 - DNA, 20 bp, Artificial Sequence
  Description of Artificial Sequence: Synthetic oligonucleotide
  Target: SCNA; (-) strand; PAM type: NNNNGHTT; PAM sequence: ATCTGTTT
aaaagtaaaacattttaaag

SEQ ID NO: 10729 - DNA, 20 bp, Artificial Sequence
  Description of Artificial Sequence: Synthetic oligonucleotide
  Target: SCNA; (-) strand; PAM type: NNNNGHTT; PAM sequence: AATTGATT
atgattcctttaacaaacat

SEQ ID NO: 10730 - DNA, 20 bp, Artificial Sequence
  Description of Artificial Sequence: Synthetic oligonucleotide
  Target: SCNA; (-) strand; PAM type: NNNNGHTT; PAM sequence: TTATGATT
ttcattcattcatttcttca

SEQ ID NO: 10731 - DNA, 20 bp, Artificial Sequence
  Description of Artificial Sequence: Synthetic oligonucleotide
  Target: SCNA; (-) strand; PAM type: NNNNGHTT; PAM sequence: GTAGGTTT
cataaggagtttacagtctg

SEQ ID NO: 10732 - DNA, 20 bp, Artificial Sequence
  Description of Artificial Sequence: Synthetic oligonucleotide
  Target: SCNA; (-) strand; PAM type: NNNNGHTT; PAM sequence: AGGAGTTT
attgacattaccaggacata

SEQ ID NO: 10733 - DNA, 20 bp, Artificial Sequence
  Description of Artificial Sequence: Synthetic oligonucleotide
  Target: SCNA; (-) strand; PAM type: NNNNGHTT; PAM sequence: GTTTGTTT
atagaaattgagattaaatt

SEQ ID NO: 10734 - DNA, 20 bp, Artificial Sequence
  Description of Artificial Sequence: Synthetic oligonucleotide
  Target: SCNA; (-) strand; PAM type: NNNNGHTT; PAM sequence: AATTGTTT
acttatagaaattgagatta

SEQ ID NO: 10735 - DNA, 20 bp, Artificial Sequence
  Description of Artificial Sequence: Synthetic oligonucleotide
  Target: SCNA; (-) strand; PAM type: NNNNGHTT; PAM sequence: TTGAGATT
aataattcaacttatagaaa

SEQ ID NO: 10736 - DNA, 20 bp, Artificial Sequence
  Description of Artificial Sequence: Synthetic oligonucleotide
  Target: SCNA; (-) strand; PAM type: NNNNGHTT; PAM sequence: TGTAGTTT
aaaattgagttcaagtatgt

SEQ ID NO: 10737 - DNA, 20 bp, Artificial Sequence
  Description of Artificial Sequence: Synthetic oligonucleotide
  Target: SCNA; (-) strand; PAM type: NNNNGHTT; PAM sequence: AATAGATT
aatagatttgtaacacagcg

SEQ ID NO: 10738 - DNA, 20 bp, Artificial Sequence
  Description of Artificial Sequence: Synthetic oligonucleotide
  Target: SCNA; (-) strand; PAM type: NNNNGHTT; PAM sequence: AATAGATT
aagaagaaacagtaaatctg

SEQ ID NO: 10739 - DNA, 20 bp, Artificial Sequence
  Description of Artificial Sequence: Synthetic oligonucleotide
  Target: SCNA; (-) strand; PAM type: NNNNGHTT; PAM sequence: TTTTGATT
caatatgattgttaatttta

SEQ ID NO: 10740 - DNA, 20 bp, Artificial Sequence
  Description of Artificial Sequence: Synthetic oligonucleotide
  Target: SCNA; (-) strand; PAM type: NNNNGHTT; PAM sequence: ATATGATT
ataatgttttaaacaacaca

SEQ ID NO: 10741 - DNA, 20 bp, Artificial Sequence
  Description of Artificial Sequence: Synthetic oligonucleotide
  Target: SCNA; (-) strand; PAM type: NNNNGHTT; PAM sequence: TAATGTTT
acaattgatatattccagta

SEQ ID NO: 10742 - DNA, 20 bp, Artificial Sequence
  Description of Artificial Sequence: Synthetic oligonucleotide
  Target: SCNA; (-) strand; PAM type: NNNNGHTT; PAM sequence: GCATGATT
tatagaataaaaagataaat

SEQ ID NO: 10743 - DNA, 20 bp, Artificial Sequence
  Description of Artificial Sequence: Synthetic oligonucleotide
  Target: SCNA; (-) strand; PAM type: NNNNGHTT; PAM sequence: AAAAGTTT
actacttgaccctttacagg

SEQ ID NO: 10744 - DNA, 20 bp, Artificial Sequence
  Description of Artificial Sequence: Synthetic oligonucleotide
  Target: SCNA; (-) strand; PAM type: NNNNGHTT; PAM sequence: CATAGCTT
aagaaatcatatgtagtcca

SEQ ID NO: 10745 - DNA, 20 bp, Artificial Sequence
  Description of Artificial Sequence: Synthetic oligonucleotide
  Target: SCNA; (-) strand; PAM type: NNNNGHTT; PAM sequence: AATAGTTT
tggacaacttgcaagttaag

SEQ ID NO: 10746 - DNA, 20 bp, Artificial Sequence
  Description of Artificial Sequence: Synthetic oligonucleotide
  Target: SCNA; (-) strand; PAM type: NNNNGHTT; PAM sequence: TAGTGCTT
ttgtcacatttctctttcat

SEQ ID NO: 10747 - DNA, 20 bp, Artificial Sequence
  Description of Artificial Sequence: Synthetic oligonucleotide
  Target: SCNA; (-) strand; PAM type: NNNNGHTT; PAM sequence: TGAGGCTT
atgcctgtggatcctgacaa

SEQ ID NO: 10748 - DNA, 20 bp, Artificial Sequence
  Description of Artificial Sequence: Synthetic oligonucleotide
  Target: SCNA; (-) strand; PAM type: NNNNGHTT; PAM sequence: TTGTGCTT
gctacttcatcatgttcttt

SEQ ID NO: 10749 - DNA, 20 bp, Artificial Sequence
  Description of Artificial Sequence: Synthetic oligonucleotide
  Target: SCNA; (-) strand; PAM type: NNNNGHTT; PAM sequence: TTCTGATT
aagatttttccaaaacatgg

SEQ ID NO: 10750 - DNA, 20 bp, Artificial Sequence
  Description of Artificial Sequence: Synthetic oligonucleotide
  Target: SCNA; (-) strand; PAM type: NNNNGHTT; PAM sequence: GTAAGATT
cgtggccaacatccctatat

SEQ ID NO: 10751 - DNA, 20 bp, Artificial Sequence
  Description of Artificial Sequence: Synthetic oligonucleotide
  Target: SCNA; (-) strand; PAM type: NNNNGHTT; PAM sequence: TGGAGTTT
atgtttccccggaggcattg

SEQ ID NO: 10752 - DNA, 20 bp, Artificial Sequence
  Description of Artificial Sequence: Synthetic oligonucleotide
  Target: SCNA; (-) strand; PAM type: NNNNGHTT; PAM sequence: CAATGTTT
gttgataacccatgttgccg

SEQ ID NO: 10753 - DNA, 20 bp, Artificial Sequence
  Description of Artificial Sequence: Synthetic oligonucleotide
  Target: SCNA; (-) strand; PAM type: NNNNGHTT; PAM sequence: AAAAGTTT
aatagtaaattacttgagca

SEQ ID NO: 10754 - DNA, 20 bp, Artificial Sequence
  Description of Artificial Sequence: Synthetic oligonucleotide
  Target: SCNA; (-) strand; PAM type: NNNNGHTT; PAM sequence: TGTGGATT
aaatatctttggactatagc

SEQ ID NO: 10755 - DNA, 20 bp, Artificial Sequence
  Description of Artificial Sequence: Synthetic oligonucleotide
  Target: SCNA; (-) strand; PAM type: NNNNGHTT; PAM sequence: TTTTGTTT
ttagttaacaattctaaaaa

SEQ ID NO: 10756 - DNA, 20 bp, Artificial Sequence
  Description of Artificial Sequence: Synthetic oligonucleotide
  Target: SCNA; (-) strand; PAM type: NNNNGHTT; PAM sequence: TGGGGTTT
atttgtatttttagtagaga

SEQ ID NO: 10757 - DNA, 20 bp, Artificial Sequence
  Description of Artificial Sequence: Synthetic oligonucleotide
  Target: SCNA; (-) strand; PAM type: NNNNGHTT; PAM sequence: TTGTGTTT
aaaataactttcatatttta

SEQ ID NO: 10758 - DNA, 20 bp, Artificial Sequence
  Description of Artificial Sequence: Synthetic oligonucleotide
  Target: SCNA; (-) strand; PAM type: NNNNGHTT; PAM sequence: GTATGCTT
aaaattaatgtgttaaatat

SEQ ID NO: 10759 - DNA, 20 bp, Artificial Sequence
  Description of Artificial Sequence: Synthetic oligonucleotide
  Target: SCNA; (-) strand; PAM type: NNNNGHTT; PAM sequence: ATTTGTTT
tcttcaaatttcagaaaaga

SEQ ID NO: 10760 - DNA, 20 bp, Artificial Sequence
  Description of Artificial Sequence: Synthetic oligonucleotide
  Target: SCNA; (-) strand; PAM type: NNNNGHTT; PAM sequence: ATTTGATT
gaaaaattttctgaccatgt

SEQ ID NO: 10761 - DNA, 20 bp, Artificial Sequence
  Description of Artificial Sequence: Synthetic oligonucleotide
  Target: SCNA; (-) strand; PAM type: NNNNGHTT; PAM sequence: CTGAGTTT
aaagccatgaccatttcagg

SEQ ID NO: 10762 - DNA, 20 bp, Artificial Sequence
  Description of Artificial Sequence: Synthetic oligonucleotide
  Target: SCNA; (-) strand; PAM type: NNNNGHTT; PAM sequence: GAGGGATT
gaaaatcagccgcgttggct

SEQ ID NO: 10763 - DNA, 20 bp, Artificial Sequence
  Description of Artificial Sequence: Synthetic oligonucleotide
  Target: SCNA; (-) strand; PAM type: NNNNGHTT; PAM sequence: GGAAGCTT
acttccatgtgaagacatgg

SEQ ID NO: 10764 - DNA, 20 bp, Artificial Sequence
  Description of Artificial Sequence: Synthetic oligonucleotide
  Target: SCNA; (-) strand; PAM type: NNNNGHTT; PAM sequence: GTAAGCTT
tggcaagggcagaatgatct

SEQ ID NO: 10765 - DNA, 20 bp, Artificial Sequence
  Description of Artificial Sequence: Synthetic oligonucleotide
  Target: SCNA; (-) strand; PAM type: NNNNGHTT; PAM sequence: TTTAGTTT
tatatattatttggattttt

SEQ ID NO: 10766 - DNA, 20 bp, Artificial Sequence
  Description of Artificial Sequence: Synthetic oligonucleotide
  Target: SCNA; (-) strand; PAM type: NNNNGHTT; PAM sequence: TTTGGATT
tttatttaatttatatatta

SEQ ID NO: 10767 - DNA, 20 bp, Artificial Sequence
  Description of Artificial Sequence: Synthetic oligonucleotide
  Target: SCNA; (-) strand; PAM type: NNNNGHTT; PAM sequence: GGTAGTTT
tactccacattttaaagtga

SEQ ID NO: 10768 - DNA, 20 bp, Artificial Sequence
  Description of Artificial Sequence: Synthetic oligonucleotide
  Target: SCNA; (-) strand; PAM type: NNNNGHTT; PAM sequence: GTATGTTT
agtgaaacactacgaaaaca

SEQ ID NO: 10769 - DNA, 20 bp, Artificial Sequence
  Description of Artificial Sequence: Synthetic oligonucleotide
  Target: SCNA; (-) strand; PAM type: NNNNGHTT; PAM sequence: TCCCGTTT
ttgtaaagaaggttttgctg

SEQ ID NO: 10770 - DNA, 20 bp, Artificial Sequence
  Description of Artificial Sequence: Synthetic oligonucleotide
  Target: SCNA; (-) strand; PAM type: NNNNGHTT; PAM sequence: GAAGGTTT
ttccttctccctgttgtaaa

SEQ ID NO: 10771 - DNA, 20 bp, Artificial Sequence
  Description of Artificial Sequence: Synthetic oligonucleotide
  Target: SCNA; (-) strand; PAM type: NNNNGHTT; PAM sequence: TGTCGTTT
attaatgagaaagttaatga

SEQ ID NO: 10772 - DNA, 20 bp, Artificial Sequence
  Description of Artificial Sequence: Synthetic oligonucleotide
  Target: SCNA; (-) strand; PAM type: NNNNGHTT; PAM sequence: GTCAGTTT
tattagaaaatcaaatctct

SEQ ID NO: 10773 - DNA, 20 bp, Artificial Sequence
  Description of Artificial Sequence: Synthetic oligonucleotide
  Target: SCNA; (-) strand; PAM type: NNNNGHTT; PAM sequence: GAAAGATT
tgagctatatatacgtttaa

SEQ ID NO: 10774 - DNA, 20 bp, Artificial Sequence
  Description of Artificial Sequence: Synthetic oligonucleotide
  Target: SCNA; (-) strand; PAM type: NNNNGHTT; PAM sequence: ATACGTTT
gaaattaatgtgagctatat

SEQ ID NO: 10775 - DNA, 20 bp, Artificial Sequence
  Description of Artificial Sequence: Synthetic oligonucleotide
  Target: SCNA; (-) strand; PAM type: NNNNGHTT; PAM sequence: ACCAGTTT
gcaaaacaacatataacaaa

SEQ ID NO: 10776 - DNA, 20 bp, Artificial Sequence
  Description of Artificial Sequence: Synthetic oligonucleotide
  Target: SCNA; (-) strand; PAM type: NNNNGHTT; PAM sequence: AATAGTTT
aatcctcacttaacttcatc

SEQ ID NO: 10777 - DNA, 20 bp, Artificial Sequence
  Description of Artificial Sequence: Synthetic oligonucleotide
  Target: SCNA; (-) strand; PAM type: NNNNGHTT; PAM sequence: CTTAGTTT
cccacttaaactagtacagt

SEQ ID NO: 10778 - DNA, 20 bp, Artificial Sequence
  Description of Artificial Sequence: Synthetic oligonucleotide
  Target: SCNA; (-) strand; PAM type: NNNNGHTT; PAM sequence: TGTAGCTT
gattgtgctgtcatccctag

SEQ ID NO: 10779 - DNA, 20 bp, Artificial Sequence
  Description of Artificial Sequence: Synthetic oligonucleotide
  Target: SCNA; (-) strand; PAM type: NNNNGHTT; PAM sequence: ATAGGATT
ttgtcgatttggactctaga

SEQ ID NO: 10780 - DNA, 20 bp, Artificial Sequence
  Description of Artificial Sequence: Synthetic oligonucleotide
  Target: SCNA; (-) strand; PAM type: NNNNGHTT; PAM sequence: TGTCGATT
atcgaggtcgtaaaccctat

SEQ ID NO: 10781 - DNA, 20 bp, Artificial Sequence
  Description of Artificial Sequence: Synthetic oligonucleotide
  Target: SCNA; (-) strand; PAM type: NNNNGHTT; PAM sequence: TGGGGTTT
tttttgtattttagtagaga

SEQ ID NO: 10782 - DNA, 20 bp, Artificial Sequence
  Description of Artificial Sequence: Synthetic oligonucleotide
  Target: SCNA; (-) strand; PAM type: NNNNGHTT; PAM sequence: AAGTGATT
aatctccacctcccgggttc

SEQ ID NO: 10783 - DNA, 20 bp, Artificial Sequence
  Description of Artificial Sequence: Synthetic oligonucleotide
  Target: SCNA; (-) strand; PAM type: NNNNGHTT; PAM sequence: TTTTGTTT
atcacgtagggcttttcttt

SEQ ID NO: 10784 - DNA, 20 bp, Artificial Sequence
  Description of Artificial Sequence: Synthetic oligonucleotide
  Target: SCNA; (-) strand; PAM type: NNNNGHTT; PAM sequence: TAGGGCTT
aaattcaaattcggatcacg

SEQ ID NO: 10785 - DNA, 20 bp, Artificial Sequence
  Description of Artificial Sequence: Synthetic oligonucleotide
  Target: SCNA; (-) strand; PAM type: NNNNGHTT; PAM sequence: ACATGTTT
gccactgttgtaagcaatga

SEQ ID NO: 10786 - DNA, 20 bp, Artificial Sequence
  Description of Artificial Sequence: Synthetic oligonucleotide
  Target: SCNA; (-) strand; PAM type: NNNNGHTT; PAM sequence: TGCTGATT
gtttctcacagtgcaaaatt

SEQ ID NO: 10787 - DNA, 20 bp, Artificial Sequence
  Description of Artificial Sequence: Synthetic oligonucleotide
  Target: SCNA; (-) strand; PAM type: NNNNGHTT; PAM sequence: TGTAGTTT
tagacgtattctttgtcttg

SEQ ID NO: 10788 - DNA, 20 bp, Artificial Sequence
  Description of Artificial Sequence: Synthetic oligonucleotide
  Target: SCNA; (-) strand; PAM type: NNNNGHTT; PAM sequence: ATTTGCTT
ctacctcatatgtgttttcc

SEQ ID NO: 10789 - DNA, 20 bp, Artificial Sequence
  Description of Artificial Sequence: Synthetic oligonucleotide
  Target: SCNA; (-) strand; PAM type: NNNNGHTT; PAM sequence: ATGTGTTT
aatttccccaactacctcat

SEQ ID NO: 10790 - DNA, 20 bp, Artificial Sequence
  Description of Artificial Sequence: Synthetic oligonucleotide
  Target: SCNA; (-) strand; PAM type: NNNNGHTT; PAM sequence: TCATGTTT
aaactgatgaaatattaaac

SEQ ID NO: 10791 - DNA, 20 bp, Artificial Sequence
  Description of Artificial Sequence: Synthetic oligonucleotide
  Target: SCNA; (-) strand; PAM type: NNNNGHTT; PAM sequence: TCTCGCTT
taaaagttatgtgggtatgg

SEQ ID NO: 10792 - DNA, 20 bp, Artificial Sequence
  Description of Artificial Sequence: Synthetic oligonucleotide
  Target: SCNA; (-) strand; PAM type: NNNNGHTT; PAM sequence: AAGAGATT
atttataaactaggcacagt

SEQ ID NO: 10793 - DNA, 20 bp, Artificial Sequence
  Description of Artificial Sequence: Synthetic oligonucleotide
  Target: SCNA; (-) strand; PAM type: NNNNGHTT; PAM sequence: AAAAGTTT
caatgcttatgtacctatga

SEQ ID NO: 10794 - DNA, 20 bp, Artificial Sequence
  Description of Artificial Sequence: Synthetic oligonucleotide
  Target: SCNA; (-) strand; PAM type: NNNNGHTT; PAM sequence: CAATGCTT
cctacatatactgttttttc

SEQ ID NO: 10795 - DNA, 20 bp, Artificial Sequence
  Description of Artificial Sequence: Synthetic oligonucleotide
  Target: SCNA; (-) strand; PAM type: NNNNGHTT; PAM sequence: TACTGTTT
atagtagcaaaccctacata

SEQ ID NO: 10796 - DNA, 20 bp, Artificial Sequence
  Description of Artificial Sequence: Synthetic oligonucleotide
  Target: SCNA; (-) strand; PAM type: NNNNGHTT; PAM sequence: GTATGCTT
aatagctgccaaatatttta

SEQ ID NO: 10797 - DNA, 20 bp, Artificial Sequence
  Description of Artificial Sequence: Synthetic oligonucleotide
  Target: SCNA; (-) strand; PAM type: NNNNGHTT; PAM sequence: AAGTGTTT
ttgtgtctgatggtcatatg

SEQ ID NO: 10798 - DNA, 20 bp, Artificial Sequence
  Description of Artificial Sequence: Synthetic oligonucleotide
  Target: SCNA; (-) strand; PAM type: NNNNGHTT; PAM sequence: ATAGGTTT
agataacaatgtttttagaa

SEQ ID NO: 10799 - DNA, 20 bp, Artificial Sequence
  Description of Artificial Sequence: Synthetic oligonucleotide
  Target: SCNA; (-) strand; PAM type: NNNNGHTT; PAM sequence: CAATGTTT
taatatttctttatagataa

SEQ ID NO: 10800 - DNA, 20 bp, Artificial Sequence
  Description of Artificial Sequence: Synthetic oligonucleotide
  Target: SCNA; (-) strand; PAM type: NNNNGHTT; PAM sequence: GTATGATT
ggtgcacttcacaccttcaa

SEQ ID NO: 10801 - DNA, 20 bp, Artificial Sequence
  Description of Artificial Sequence: Synthetic oligonucleotide
  Target: SCNA; (-) strand; PAM type: NNNNGHTT; PAM sequence: TCTTGTTT
gttatattggtagttttttt

SEQ ID NO: 10802 - DNA, 20 bp, Artificial Sequence
  Description of Artificial Sequence: Synthetic oligonucleotide
  Target: SCNA; (-) strand; PAM type: NNNNGHTT; PAM sequence: GGTAGTTT
tgtttaacatttgttatatt

SEQ ID NO: 10803 - DNA, 20 bp, Artificial Sequence
  Description of Artificial Sequence: Synthetic oligonucleotide
  Target: SCNA; (-) strand; PAM type: NNNNGHTT; PAM sequence: AAGTGTTT
gaaaaaattgattttttcaa

SEQ ID NO: 10804 - DNA, 20 bp, Artificial Sequence
  Description of Artificial Sequence: Synthetic oligonucleotide
  Target: SCNA; (-) strand; PAM type: NNNNGHTT; PAM sequence: AATTGATT
ataatgaaaatttgagaaaa

SEQ ID NO: 10805 - DNA, 20 bp, Artificial Sequence
  Description of Artificial Sequence: Synthetic oligonucleotide
  Target: SCNA; (-) strand; PAM type: NNNNGHTT; PAM sequence: AGACGTTT
acaggcatataccaaaatcc

SEQ ID NO: 10806 - DNA, 20 bp, Artificial Sequence
  Description of Artificial Sequence: Synthetic oligonucleotide
  Target: SCNA; (-) strand; PAM type: NNNNGHTT; PAM sequence: TATAGCTT
cagccatttctgtttcctaa

SEQ ID NO: 10807 - DNA, 20 bp, Artificial Sequence
  Description of Artificial Sequence: Synthetic oligonucleotide
  Target: SCNA; (-) strand; PAM type: NNNNGHTT; PAM sequence: TTCTGTTT
aagaggtcagtctcagccat

SEQ ID NO: 10808 - DNA, 20 bp, Artificial Sequence
  Description of Artificial Sequence: Synthetic oligonucleotide
  Target: SCNA; (-) strand; PAM type: NNNNGHTT; PAM sequence: ATAAGCTT
tttatttaaaaagaacttga

SEQ ID NO: 10809 - DNA, 20 bp, Artificial Sequence
  Description of Artificial Sequence: Synthetic oligonucleotide
  Target: SCNA; (-) strand; PAM type: NNNNGHTT; PAM sequence: ACAGGTTT
tatatcagctattcaaccct

SEQ ID NO: 10810 - DNA, 20 bp, Artificial Sequence
  Description of Artificial Sequence: Synthetic oligonucleotide
  Target: SCNA; (-) strand; PAM type: NNNNGHTT; PAM sequence: ATCTGTTT
gaaggaagcttcgtctcatg

SEQ ID NO: 10811 - DNA, 20 bp, Artificial Sequence
  Description of Artificial Sequence: Synthetic oligonucleotide
  Target: SCNA; (-) strand; PAM type: NNNNGHTT; PAM sequence: GGAAGCTT
aataagctattagcagtgaa

SEQ ID NO: 10812 - DNA, 20 bp, Artificial Sequence
  Description of Artificial Sequence: Synthetic oligonucleotide
  Target: SCNA; (-) strand; PAM type: NNNNGHTT; PAM sequence: AAAAGATT
ggttcaaaacaggaaattta

SEQ ID NO: 10813 - DNA, 20 bp, Artificial Sequence
  Description of Artificial Sequence: Synthetic oligonucleotide
  Target: SCNA; (-) strand; PAM type: NNNNGHTT; PAM sequence: TGTGGTTT
cctagatgattctagaagag

SEQ ID NO: 10814 - DNA, 20 bp, Artificial Sequence
  Description of Artificial Sequence: Synthetic oligonucleotide
  Target: SCNA; (-) strand; PAM type: NNNNGHTT; PAM sequence: AGATGATT
gcatttttaacaagggccct

SEQ ID NO: 10815 - DNA, 20 bp, Artificial Sequence
  Description of Artificial Sequence: Synthetic oligonucleotide
  Target: SCNA; (-) strand; PAM type: NNNNGHTT; PAM sequence: AGTGGTTT
aacaattggtgatgtcgggc

SEQ ID NO: 10816 - DNA, 20 bp, Artificial Sequence
  Description of Artificial Sequence: Synthetic oligonucleotide
  Target: SCNA; (-) strand; PAM type: NNNNGHTT; PAM sequence: CAGGGTTT
ctctatattaaattatacca

SEQ ID NO: 10817 - DNA, 20 bp, Artificial Sequence
  Description of Artificial Sequence: Synthetic oligonucleotide
  Target: SCNA; (-) strand; PAM type: NNNNGHTT; PAM sequence: CATGGATT
cttgctattttaacgatcac

SEQ ID NO: 10818 - DNA, 20 bp, Artificial Sequence
  Description of Artificial Sequence: Synthetic oligonucleotide
  Target: SCNA; (-) strand; PAM type: NNNNGHTT; PAM sequence: AAAAGTTT
ttcaatttttcttcccacat

SEQ ID NO: 10819 - DNA, 20 bp, Artificial Sequence
  Description of Artificial Sequence: Synthetic oligonucleotide
  Target: SCNA; (-) strand; PAM type: NNNNGHTT; PAM sequence: TGAAGCTT
caccactgtcactcaccaat

SEQ ID NO: 10820 - DNA, 20 bp, Artificial Sequence
  Description of Artificial Sequence: Synthetic oligonucleotide
  Target: SCNA; (-) strand; PAM type: NNNNGHTT; PAM sequence: GAATGTTT
aagtgcgcttctgctgcttt

SEQ ID NO: 10821 - DNA, 20 bp, Artificial Sequence
  Description of Artificial Sequence: Synthetic oligonucleotide
  Target: SCNA; (-) strand; PAM type: NNNNGHTT; PAM sequence: TGCTGCTT
caaaagagaaagtgcgcttc

SEQ ID NO: 10822 - DNA, 20 bp, Artificial Sequence
  Description of Artificial Sequence: Synthetic oligonucleotide
  Target: SCNA; (-) strand; PAM type: NNNNGHTT; PAM sequence: GTGCGCTT
agcagtgggcaaaagagaaa

SEQ ID NO: 10823 - DNA, 20 bp, Artificial Sequence
  Description of Artificial Sequence: Synthetic oligonucleotide
  Target: SCNA; (-) strand; PAM type: NNNNGHTT; PAM sequence: TTTAGTTT
ctcttaagtcaaagttcttt

SEQ ID NO: 10824 - DNA, 20 bp, Artificial Sequence
  Description of Artificial Sequence: Synthetic oligonucleotide
  Target: SCNA; (-) strand; PAM type: NNNNGHTT; PAM sequence: GTGTGCTT
tttcattttggaacacgggt

SEQ ID NO: 10825 - DNA, 20 bp, Artificial Sequence
  Description of Artificial Sequence: Synthetic oligonucleotide
  Target: SCNA; (-) strand; PAM type: NNNNGHTT; PAM sequence: GCTTGATT
tatttaaatacgagttctgg

SEQ ID NO: 10826 - DNA, 20 bp, Artificial Sequence
  Description of Artificial Sequence: Synthetic oligonucleotide
  Target: SCNA; (-) strand; PAM type: NNNNGHTT; PAM sequence: CTGGGCTT
tttttatttaaatacgagtt

SEQ ID NO: 10827 - DNA, 20 bp, Artificial Sequence
  Description of Artificial Sequence: Synthetic oligonucleotide
  Target: SCNA; (-) strand; PAM type: NNNNGHTT; PAM sequence: CCTTGCTT
acatatgaaatatatcttta

SEQ ID NO: 10828 - DNA, 20 bp, Artificial Sequence
  Description of Artificial Sequence: Synthetic oligonucleotide
  Target: SCNA; (-) strand; PAM type: NNNNGHTT; PAM sequence: GTTTGATT
tttatcaaaaattgagatta

SEQ ID NO: 10829 - DNA, 20 bp, Artificial Sequence
  Description of Artificial Sequence: Synthetic oligonucleotide
  Target: SCNA; (-) strand; PAM type: NNNNGHTT; PAM sequence: ATTAGTTT
agattttatcaaaaattgag

SEQ ID NO: 10830 - DNA, 20 bp, Artificial Sequence
  Description of Artificial Sequence: Synthetic oligonucleotide
  Target: SCNA; (-) strand; PAM type: NNNNGHTT; PAM sequence: TTGAGATT
tccttagattttatcaaaaa

SEQ ID NO: 10831 - DNA, 20 bp, Artificial Sequence
  Description of Artificial Sequence: Synthetic oligonucleotide
  Target: SCNA; (-) strand; PAM type: NNNNGHTT; PAM sequence: CTTAGATT
atgttttaaaaataaaattc

SEQ ID NO: 10832 - DNA, 20 bp, Artificial Sequence
  Description of Artificial Sequence: Synthetic oligonucleotide
  Target: SCNA; (-) strand; PAM type: NNNNGHTT; PAM sequence: CAATGTTT
atccaaagtttgctttaatt

SEQ ID NO: 10833 - DNA, 20 bp, Artificial Sequence
  Description of Artificial Sequence: Synthetic oligonucleotide
  Target: SCNA; (-) strand; PAM type: NNNNGHTT; PAM sequence: GTTTGCTT
gagaaatcagagtatccaaa

SEQ ID NO: 10834 - DNA, 20 bp, Artificial Sequence
  Description of Artificial Sequence: Synthetic oligonucleotide
  Target: SCNA; (-) strand; PAM type: NNNNGHTT; PAM sequence: CAAAGTTT
tcaagagaaatcagagtatc

SEQ ID NO: 10835 - DNA, 20 bp, Artificial Sequence
  Description of Artificial Sequence: Synthetic oligonucleotide
  Target: SCNA; (-) strand; PAM type: NNNNGHTT; PAM sequence: AGAGGATT
catagatctcttaaaaaggc

SEQ ID NO: 10836 - DNA, 20 bp, Artificial Sequence
  Description of Artificial Sequence: Synthetic oligonucleotide
  Target: SCNA; (-) strand; PAM type: NNNNGHTT; PAM sequence: ATTCGTTT
tccaaaacaagacctcaata

SEQ ID NO: 10837 - DNA, 20 bp, Artificial Sequence
  Description of Artificial Sequence: Synthetic oligonucleotide
  Target: SCNA; (-) strand; PAM type: NNNNGHTT; PAM sequence: TTAGGTTT
aaataacattgtccaaagtt

SEQ ID NO: 10838 - DNA, 20 bp, Artificial Sequence
  Description of Artificial Sequence: Synthetic oligonucleotide
  Target: SCNA; (-) strand; PAM type: NNNNGHTT; PAM sequence: CAAAGTTT
gatgattaaataacattgtc

SEQ ID NO: 10839 - DNA, 20 bp, Artificial Sequence
  Description of Artificial Sequence: Synthetic oligonucleotide
  Target: SCNA; (-) strand; PAM type: NNNNGHTT; PAM sequence: TGATGATT
tatgcatattgttttgcttt

SEQ ID NO: 10840 - DNA, 20 bp, Artificial Sequence
  Description of Artificial Sequence: Synthetic oligonucleotide
  Target: SCNA; (-) strand; PAM type: NNNNGHTT; PAM sequence: TTTTGCTT
tttctgaaatatgcatattg

SEQ ID NO: 10841 - DNA, 20 bp, Artificial Sequence
  Description of Artificial Sequence: Synthetic oligonucleotide
  Target: SCNA; (-) strand; PAM type: NNNNGHTT; PAM sequence: TATTGTTT
tgttatttctgaaatatgca

SEQ ID NO: 10842 - DNA, 20 bp, Artificial Sequence
  Description of Artificial Sequence: Synthetic oligonucleotide
  Target: SCNA; (-) strand; PAM type: NNNNGHTT; PAM sequence: TATGGCTT
cagcagaacatgccaatttc

SEQ ID NO: 10843 - DNA, 20 bp, Artificial Sequence
  Description of Artificial Sequence: Synthetic oligonucleotide
  Target: SCNA; (-) strand; PAM type: NNNNGHTT; PAM sequence: TCATGCTT
gttcgttaagtgtaatttta

SEQ ID NO: 10844 - DNA, 20 bp, Artificial Sequence
  Description of Artificial Sequence: Synthetic oligonucleotide
  Target: SCNA; (-) strand; PAM type: NNNNGHTT; PAM sequence: TAAAGTTT
aactatactttcccaaaaat

SEQ ID NO: 10845 - DNA, 20 bp, Artificial Sequence
  Description of Artificial Sequence: Synthetic oligonucleotide
  Target: SCNA; (-) strand; PAM type: NNNNGHTT; PAM sequence: CTGGGCTT
gtgacaaatagctcttaatg

SEQ ID NO: 10846 - DNA, 20 bp, Artificial Sequence
  Description of Artificial Sequence: Synthetic oligonucleotide
  Target: SCNA; (-) strand; PAM type: NNNNGHTT; PAM sequence: TATAGATT
aatattcaaaatactatagt

SEQ ID NO: 10847 - DNA, 20 bp, Artificial Sequence
  Description of Artificial Sequence: Synthetic oligonucleotide
  Target: SCNA; (-) strand; PAM type: NNNNGHTT; PAM sequence: TATAGATT
agaaaatgttgatagaaaat

SEQ ID NO: 10848 - DNA, 20 bp, Artificial Sequence
  Description of Artificial Sequence: Synthetic oligonucleotide
  Target: SCNA; (-) strand; PAM type: NNNNGHTT; PAM sequence: ATGTGTTT
gtatgtgtctgtgagtatgt

SEQ ID NO: 10849 - DNA, 20 bp, Artificial Sequence
  Description of Artificial Sequence: Synthetic oligonucleotide
  Target: SCNA; (-) strand; PAM type: NNNNGHTT; PAM sequence: TTTGGCTT
cactcagccttgttgctagg

SEQ ID NO: 10850 - DNA, 20 bp, Artificial Sequence
  Description of Artificial Sequence: Synthetic oligonucleotide
  Target: SCNA; (-) strand; PAM type: NNNNGHTT; PAM sequence: CTAGGTTT
atcttcactcagccttgttg

SEQ ID NO: 10851 - DNA, 20 bp, Artificial Sequence
  Description of Artificial Sequence: Synthetic oligonucleotide
  Target: SCNA; (-) strand; PAM type: NNNNGHTT; PAM sequence: TATGGATT
ttgcattctcaatctgtagg

SEQ ID NO: 10852 - DNA, 20 bp, Artificial Sequence
  Description of Artificial Sequence: Synthetic oligonucleotide
  Target: SCNA; (-) strand; PAM type: NNNNGHTT; PAM sequence: AATAGATT
taaaggtatcatttaattaa

SEQ ID NO: 10853 - DNA, 20 bp, Artificial Sequence
  Description of Artificial Sequence: Synthetic oligonucleotide
  Target: SCNA; (-) strand; PAM type: NNNNGHTT; PAM sequence: AATGGCTT
gataaacaaagtagagcata

SEQ ID NO: 10854 - DNA, 20 bp, Artificial Sequence
  Description of Artificial Sequence: Synthetic oligonucleotide
  Target: SCNA; (-) strand; PAM type: NNNNGHTT; PAM sequence: CTATGATT
gagttggagactacagtgag

SEQ ID NO: 10855 - DNA, 20 bp, Artificial Sequence
  Description of Artificial Sequence: Synthetic oligonucleotide
  Target: SCNA; (-) strand; PAM type: NNNNGHTT; PAM sequence: AGGAGTTT
caggaggatcacttgagtcc

SEQ ID NO: 10856 - DNA, 20 bp, Artificial Sequence
  Description of Artificial Sequence: Synthetic oligonucleotide
  Target: SCNA; (-) strand; PAM type: NNNNGHTT; PAM sequence: AACAGATT
aagaaaatcagtaagatagt

SEQ ID NO: 10857 - DNA, 20 bp, Artificial Sequence
  Description of Artificial Sequence: Synthetic oligonucleotide
  Target: SCNA; (-) strand; PAM type: NNNNGHTT; PAM sequence: AGGTGATT
tctctttttctctctctcta

SEQ ID NO: 10858 - DNA, 20 bp, Artificial Sequence
  Description of Artificial Sequence: Synthetic oligonucleotide
  Target: SCNA; (-) strand; PAM type: NNNNGHTT; PAM sequence: AATTGTTT
aacctttaaaaactgaaata

SEQ ID NO: 10859 - DNA, 20 bp, Artificial Sequence
  Description of Artificial Sequence: Synthetic oligonucleotide
  Target: SCNA; (-) strand; PAM type: NNNNGHTT; PAM sequence: ATTAGCTT
accccaaatatatttaatat

SEQ ID NO: 10860 - DNA, 20 bp, Artificial Sequence
  Description of Artificial Sequence: Synthetic oligonucleotide
  Target: SCNA; (-) strand; PAM type: NNNNGHTT; PAM sequence: TCCTGATT
aaaaatgattttgcaccaat

SEQ ID NO: 10861 - DNA, 20 bp, Artificial Sequence
  Description of Artificial Sequence: Synthetic oligonucleotide
  Target: SCNA; (-) strand; PAM type: NNNNGHTT; PAM sequence: AAATGATT
taatgacattttcttcttaa

SEQ ID NO: 10862 - DNA, 20 bp, Artificial Sequence
  Description of Artificial Sequence: Synthetic oligonucleotide
  Target: SCNA; (-) strand; PAM type: NNNNGHTT; PAM sequence: TAAGGATT
gttaggcttgccaaggaaaa

SEQ ID NO: 10863 - DNA, 20 bp, Artificial Sequence
  Description of Artificial Sequence: Synthetic oligonucleotide
  Target: SCNA; (-) strand; PAM type: NNNNGHTT; PAM sequence: TTAGGCTT
agcaggcactgccctgcttg

SEQ ID NO: 10864 - DNA, 20 bp, Artificial Sequence
  Description of Artificial Sequence: Synthetic oligonucleotide
  Target: SCNA; (-) strand; PAM type: NNNNGHTT; PAM sequence: CCCTGCTT
cataaatacagcaggcactg

SEQ ID NO: 10865 - DNA, 20 bp, Artificial Sequence
  Description of Artificial Sequence: Synthetic oligonucleotide
  Target: SCNA; (-) strand; PAM type: NNNNGHTT; PAM sequence: CCCAGATT
aaaagtaaaaatagtttatt

SEQ ID NO: 10866 - DNA, 20 bp, Artificial Sequence
  Description of Artificial Sequence: Synthetic oligonucleotide
  Target: SCNA; (-) strand; PAM type: NNNNGHTT; PAM sequence: AATAGTTT
ccttagacatgaaaagtaaa

SEQ ID NO: 10867 - DNA, 20 bp, Artificial Sequence
  Description of Artificial Sequence: Synthetic oligonucleotide
  Target: SCNA; (-) strand; PAM type: NNNNGHTT; PAM sequence: TATAGTTT
aaatagtaaacaaatttgaa

SEQ ID NO: 10868 - DNA, 20 bp, Artificial Sequence
  Description of Artificial Sequence: Synthetic oligonucleotide
  Target: SCNA; (-) strand; PAM type: NNNNGHTT; PAM sequence: GAAAGCTT
ccttcaagattctaatccat

SEQ ID NO: 10869 - DNA, 20 bp, Artificial Sequence
  Description of Artificial Sequence: Synthetic oligonucleotide
  Target: SCNA; (-) strand; PAM type: NNNNGHTT; PAM sequence: TCAAGATT
actacccaaggggctgacct

SEQ ID NO: 10870 - DNA, 20 bp, Artificial Sequence
  Description of Artificial Sequence: Synthetic oligonucleotide
  Target: SCNA; (-) strand; PAM type: NNNNGHTT; PAM sequence: CTCAGCTT
cagcacaagagcaaaccttt

SEQ ID NO: 10871 - DNA, 20 bp, Artificial Sequence
  Description of Artificial Sequence: Synthetic oligonucleotide
  Target: SCNA; (-) strand; PAM type: NNNNGHTT; PAM sequence: TATTGATT
tttgcaaacatgaaatgact

SEQ ID NO: 10872 - DNA, 20 bp, Artificial Sequence
  Description of Artificial Sequence: Synthetic oligonucleotide
  Target: SCNA; (-) strand; PAM type: NNNNGHTT; PAM sequence: CAGAGCTT
aatggcgtgatcccgtgagg

SEQ ID NO: 10873 - DNA, 20 bp, Artificial Sequence
  Description of Artificial Sequence: Synthetic oligonucleotide
  Target: SCNA; (-) strand; PAM type: NNNNGHTT; PAM sequence: GCTAGTTT
cactgatttctcacccagtt

SEQ ID NO: 10874 - DNA, 20 bp, Artificial Sequence
  Description of Artificial Sequence: Synthetic oligonucleotide
  Target: SCNA; (-) strand; PAM type: NNNNGHTT; PAM sequence: CACTGATT
ttgtcaaagcctaccctccc

SEQ ID NO: 10875 - DNA, 20 bp, Artificial Sequence
  Description of Artificial Sequence: Synthetic oligonucleotide
  Target: SCNA; (-) strand; PAM type: NNNNGHTT; PAM sequence: CTGGGTTT
tatgggcttttcagcattcc

SEQ ID NO: 10876 - DNA, 20 bp, Artificial Sequence
  Description of Artificial Sequence: Synthetic oligonucleotide
  Target: SCNA; (-) strand; PAM type: NNNNGHTT; PAM sequence: ATGGGCTT
cagcatatttcttctttcct

SEQ ID NO: 10877 - DNA, 20 bp, Artificial Sequence
  Description of Artificial Sequence: Synthetic oligonucleotide
  Target: SCNA; (-) strand; PAM type: NNNNGHTT; PAM sequence: ATCTGTTT
gattttaagtccagtttctc

SEQ ID NO: 10878 - DNA, 20 bp, Artificial Sequence
  Description of Artificial Sequence: Synthetic oligonucleotide
  Target: SCNA; (-) strand; PAM type: NNNNGHTT; PAM sequence: TCCAGTTT
tctcccagtcagattttaag

SEQ ID NO: 10879 - DNA, 20 bp, Artificial Sequence
  Description of Artificial Sequence: Synthetic oligonucleotide
  Target: SCNA; (-) strand; PAM type: NNNNGHTT; PAM sequence: GTCAGATT
gcctaaagtactttctccca

SEQ ID NO: 10880 - DNA, 20 bp, Artificial Sequence
  Description of Artificial Sequence: Synthetic oligonucleotide
  Target: SCNA; (-) strand; PAM type: NNNNGHTT; PAM sequence: GTTTGTTT
catccttttgtatatgagta

SEQ ID NO: 10881 - DNA, 20 bp, Artificial Sequence
  Description of Artificial Sequence: Synthetic oligonucleotide
  Target: SCNA; (-) strand; PAM type: NNNNGHTT; PAM sequence: AGTAGTTT
agcccatccttttgtatatg

SEQ ID NO: 10882 - DNA, 20 bp, Artificial Sequence
  Description of Artificial Sequence: Synthetic oligonucleotide
  Target: SCNA; (-) strand; PAM type: NNNNGHTT; PAM sequence: CTCTGCTT
ttgaagctattgccttcact

SEQ ID NO: 10883 - DNA, 20 bp, Artificial Sequence
  Description of Artificial Sequence: Synthetic oligonucleotide
  Target: SCNA; (-) strand; PAM type: NNNNGHTT; PAM sequence: CTAGGTTT
atcttttagagaagatactt

SEQ ID NO: 10884 - DNA, 20 bp, Artificial Sequence
  Description of Artificial Sequence: Synthetic oligonucleotide
  Target: SCNA; (-) strand; PAM type: NNNNGHTT; PAM sequence: ATCTGTTT
cccctcaaacttcacttagt

SEQ ID NO: 10885 - DNA, 20 bp, Artificial Sequence
  Description of Artificial Sequence: Synthetic oligonucleotide
  Target: SCNA; (-) strand; PAM type: NNNNGHTT; PAM sequence: TCCAGATT
tctacttgaagagttttcta

SEQ ID NO: 10886 - DNA, 20 bp, Artificial Sequence
  Description of Artificial Sequence: Synthetic oligonucleotide
  Target: SCNA; (-) strand; PAM type: NNNNGHTT; PAM sequence: AAGAGTTT
tgaaggttgagatctacttg

SEQ ID NO: 10887 - DNA, 20 bp, Artificial Sequence
  Description of Artificial Sequence: Synthetic oligonucleotide
  Target: SCNA; (-) strand; PAM type: NNNNGHTT; PAM sequence: AGAGGTTT
cgatctgttgaggcatggat

SEQ ID NO: 10888 - DNA, 20 bp, Artificial Sequence
  Description of Artificial Sequence: Synthetic oligonucleotide
  Target: SCNA; (-) strand; PAM type: NNNNGHTT; PAM sequence: AGATGATT
tctttcttgataatcttgta

SEQ ID NO: 10889 - DNA, 20 bp, Artificial Sequence
  Description of Artificial Sequence: Synthetic oligonucleotide
  Target: SCNA; (-) strand; PAM type: NNNNGHTT; PAM sequence: AGTTGTTT
cagtagtaacttcctcaaag

SEQ ID NO: 10890 - DNA, 20 bp, Artificial Sequence
  Description of Artificial Sequence: Synthetic oligonucleotide
  Target: SCNA; (-) strand; PAM type: NNNNGHTT; PAM sequence: GTGGGCTT
attgcataatagttaagagt

SEQ ID NO: 10891 - DNA, 20 bp, Artificial Sequence
  Description of Artificial Sequence: Synthetic oligonucleotide
  Target: SCNA; (-) strand; PAM type: NNNNGHTT; PAM sequence: CACAGATT
gcgtaatattttagtaatta

SEQ ID NO: 10892 - DNA, 20 bp, Artificial Sequence
  Description of Artificial Sequence: Synthetic oligonucleotide
  Target: SCNA; (-) strand; PAM type: NNNNGHTT; PAM sequence: AAAGGATT
atagttaacattgcatttgg

SEQ ID NO: 10893 - DNA, 20 bp, Artificial Sequence
  Description of Artificial Sequence: Synthetic oligonucleotide
  Target: SCNA; (-) strand; PAM type: NNNNGHTT; PAM sequence: TCTGGTTT
gattatgtgtttaaaaaaaa

SEQ ID NO: 10894 - DNA, 20 bp, Artificial Sequence
  Description of Artificial Sequence: Synthetic oligonucleotide
  Target: SCNA; (-) strand; PAM type: NNNNGHTT; PAM sequence: ATGTGTTT
tatttgcagatttaatgatt

SEQ ID NO: 10895 - DNA, 20 bp, Artificial Sequence
  Description of Artificial Sequence: Synthetic oligonucleotide
  Target: SCNA; (-) strand; PAM type: NNNNGHTT; PAM sequence: TAATGATT
aaacttgatatttgcagatt

SEQ ID NO: 10896 - DNA, 20 bp, Artificial Sequence
  Description of Artificial Sequence: Synthetic oligonucleotide
  Target: SCNA; (-) strand; PAM type: NNNNGHTT; PAM sequence: TGCAGATT
aaattgataaacttgatatt

SEQ ID NO: 10897 - DNA, 20 bp, Artificial Sequence
  Description of Artificial Sequence: Synthetic oligonucleotide
  Target: SCNA; (-) strand; PAM type: NNNNGHTT; PAM sequence: AAAGGTTT
aaagctttcttggttggtca

SEQ ID NO: 10898 - DNA, 20 bp, Artificial Sequence
  Description of Artificial Sequence: Synthetic oligonucleotide
  Target: SCNA; (-) strand; PAM type: NNNNGHTT; PAM sequence: AAAAGCTT
gataaagcctgtgcccaggc

SEQ ID NO: 10899 - DNA, 20 bp, Artificial Sequence
  Description of Artificial Sequence: Synthetic oligonucleotide
  Target: SCNA; (-) strand; PAM type: NNNNGHTT; PAM sequence: GAGGGATT
aatcataatgaaattgttgg

SEQ ID NO: 10900 - DNA, 20 bp, Artificial Sequence
  Description of Artificial Sequence: Synthetic oligonucleotide
  Target: SCNA; (-) strand; PAM type: NNNNGHTT; PAM sequence: TATTGATT
aaattatatacagaactatg

SEQ ID NO: 10901 - DNA, 20 bp, Artificial Sequence
  Description of Artificial Sequence: Synthetic oligonucleotide
  Target: SCNA; (-) strand; PAM type: NNNNGHTT; PAM sequence: GTTTGTTT
tacagaatattctgtgtgtt

SEQ ID NO: 10902 - DNA, 20 bp, Artificial Sequence
  Description of Artificial Sequence: Synthetic oligonucleotide
  Target: SCNA; (-) strand; PAM type: NNNNGHTT; PAM sequence: TGTTGTTT
taaatacagaatattctgtg

SEQ ID NO: 10903 - DNA, 20 bp, Artificial Sequence
  Description of Artificial Sequence: Synthetic oligonucleotide
  Target: SCNA; (-) strand; PAM type: NNNNGHTT; PAM sequence: CTGAGCTT
tcttaaatgccctttttctc

SEQ ID NO: 10904 - DNA, 20 bp, Artificial Sequence
  Description of Artificial Sequence: Synthetic oligonucleotide
  Target: SCNA; (-) strand; PAM type: NNNNGHTT; PAM sequence: TACCGTTT
tctgaaaaatgttttattgt

SEQ ID NO: 10905 - DNA, 20 bp, Artificial Sequence
  Description of Artificial Sequence: Synthetic oligonucleotide
  Target: SCNA; (-) strand; PAM type: NNNNGHTT; PAM sequence: AAATGTTT
tagtacaacatcactctgaa

SEQ ID NO: 10906 - DNA, 20 bp, Artificial Sequence
  Description of Artificial Sequence: Synthetic oligonucleotide
  Target: SCNA; (-) strand; PAM type: NNNNGHTT; PAM sequence: AAGTGCTT
caaaatacttatattttcaa

SEQ ID NO: 10907 - DNA, 20 bp, Artificial Sequence
  Description of Artificial Sequence: Synthetic oligonucleotide
  Target: SCNA; (-) strand; PAM type: NNNNGHTT; PAM sequence: AAAGGTTT
agtttcgattctttccaaaa

SEQ ID NO: 10908 - DNA, 20 bp, Artificial Sequence
  Description of Artificial Sequence: Synthetic oligonucleotide
  Target: SCNA; (-) strand; PAM type: NNNNGHTT; PAM sequence: TTTCGATT
ttaaatagttgggtttttag

SEQ ID NO: 10909 - DNA, 20 bp, Artificial Sequence
  Description of Artificial Sequence: Synthetic oligonucleotide
  Target: SCNA; (-) strand; PAM type: NNNNGHTT; PAM sequence: TTTAGTTT
attttttaaatagttgggtt

SEQ ID NO: 10910 - DNA, 20 bp, Artificial Sequence
  Description of Artificial Sequence: Synthetic oligonucleotide
  Target: SCNA; (-) strand; PAM type: NNNNGHTT; PAM sequence: TTGGGTTT
agtttccattttttaaatag

SEQ ID NO: 10911 - DNA, 20 bp, Artificial Sequence
  Description of Artificial Sequence: Synthetic oligonucleotide
  Target: SCNA; (-) strand; PAM type: NNNNGHTT; PAM sequence: AAAAGTTT
gtgagcctccgttcccggcc

SEQ ID NO: 10912 - DNA, 20 bp, Artificial Sequence
  Description of Artificial Sequence: Synthetic oligonucleotide
  Target: SCNA; (-) strand; PAM type: NNNNGHTT; PAM sequence: CTGAGATT
ccattcggcctcccaaagtg

SEQ ID NO: 10913 - DNA, 20 bp, Artificial Sequence
  Description of Artificial Sequence: Synthetic oligonucleotide
  Target: SCNA; (-) strand; PAM type: NNNNGHTT; PAM sequence: CGGAGTTT
ttttgtatttttagtagaga

SEQ ID NO: 10914 - DNA, 20 bp, Artificial Sequence
  Description of Artificial Sequence: Synthetic oligonucleotide
  Target: SCNA; (-) strand; PAM type: NNNNGHTT; PAM sequence: CAGCGATT
aacctccgcctcctgggttc

SEQ ID NO: 10915 - DNA, 20 bp, Artificial Sequence
  Description of Artificial Sequence: Synthetic oligonucleotide
  Target: SCNA; (-) strand; PAM type: NNNNGHTT; PAM sequence: CCGAGCTT
agtttgagaaaggcaaaaca

SEQ ID NO: 10916 - DNA, 20 bp, Artificial Sequence
  Description of Artificial Sequence: Synthetic oligonucleotide
  Target: SCNA; (-) strand; PAM type: NNNNGHTT; PAM sequence: CACAGTTT
aacaaacaagaggacctgtg

SEQ ID NO: 10917 - DNA, 20 bp, Artificial Sequence
  Description of Artificial Sequence: Synthetic oligonucleotide
  Target: SCNA; (-) strand; PAM type: NNNNGHTT; PAM sequence: TCAAGTTT
acccatctatcatctattac

SEQ ID NO: 10918 - DNA, 20 bp, Artificial Sequence
  Description of Artificial Sequence: Synthetic oligonucleotide
  Target: SCNA; (-) strand; PAM type: NNNNGHTT; PAM sequence: ATGTGCTT
ttcttatctatgtcactagg

SEQ ID NO: 10919 - DNA, 20 bp, Artificial Sequence
  Description of Artificial Sequence: Synthetic oligonucleotide
  Target: SCNA; (-) strand; PAM type: NNNNGHTT; PAM sequence: ATTTGCTT
tgcacctataattttgtagc

SEQ ID NO: 10920 - DNA, 20 bp, Artificial Sequence
  Description of Artificial Sequence: Synthetic oligonucleotide
  Target: SCNA; (-) strand; PAM type: NNNNGHTT; PAM sequence: TGTAGTTT
aaaccaattaaaacacaact

SEQ ID NO: 10921 - DNA, 20 bp, Artificial Sequence
  Description of Artificial Sequence: Synthetic oligonucleotide
  Target: SCNA; (-) strand; PAM type: NNNNGHTT; PAM sequence: TTCTGCTT
tgttagatttttcacagttc

SEQ ID NO: 10922 - DNA, 20 bp, Artificial Sequence
  Description of Artificial Sequence: Synthetic oligonucleotide
  Target: SCNA; (-) strand; PAM type: NNNNGHTT; PAM sequence: GTTAGATT
gcttgcaagtaggacaaaat

SEQ ID NO: 10923 - DNA, 20 bp, Artificial Sequence
  Description of Artificial Sequence: Synthetic oligonucleotide
  Target: SCNA; (-) strand; PAM type: NNNNGHTT; PAM sequence: GCAGGCTT
gcccagcactcaaaagactg

SEQ ID NO: 10924 - DNA, 20 bp, Artificial Sequence
  Description of Artificial Sequence: Synthetic oligonucleotide
  Target: SCNA; (-) strand; PAM type: NNNNGHTT; PAM sequence: TGCGGCTT
ctgagcttttctgtgggaat

SEQ ID NO: 10925 - DNA, 20 bp, Artificial Sequence
  Description of Artificial Sequence: Synthetic oligonucleotide
  Target: SCNA; (-) strand; PAM type: NNNNGHTT; PAM sequence: CTGAGCTT
actgagcatgtaggtgtcac

SEQ ID NO: 10926 - DNA, 20 bp, Artificial Sequence
  Description of Artificial Sequence: Synthetic oligonucleotide
  Target: SCNA; (-) strand; PAM type: NNNNGHTT; PAM sequence: CCATGTTT
tactggccattataaaatat

SEQ ID NO: 10927 - DNA, 20 bp, Artificial Sequence
  Description of Artificial Sequence: Synthetic oligonucleotide
  Target: SCNA; (-) strand; PAM type: NNNNGHTT; PAM sequence: GTGTGCTT
ccttctaaaacaaaaggcag

SEQ ID NO: 10928 - DNA, 20 bp, Artificial Sequence
  Description of Artificial Sequence: Synthetic oligonucleotide
  Target: SCNA; (-) strand; PAM type: NNNNGHTT; PAM sequence: TTTTGTTT
caagcaagtcagtaactgcc

SEQ ID NO: 10929 - DNA, 20 bp, Artificial Sequence
  Description of Artificial Sequence: Synthetic oligonucleotide
  Target: SCNA; (-) strand; PAM type: NNNNGHTT; PAM sequence: AATGGCTT
cagactcaacctacctaaaa

SEQ ID NO: 10930 - DNA, 20 bp, Artificial Sequence
  Description of Artificial Sequence: Synthetic oligonucleotide
  Target: SCNA; (-) strand; PAM type: NNNNGHTT; PAM sequence: TCTTGTTT
aagttcttcatgcaatgcca

SEQ ID NO: 10931 - DNA, 20 bp, Artificial Sequence
  Description of Artificial Sequence: Synthetic oligonucleotide
  Target: SCNA; (-) strand; PAM type: NNNNGHTT; PAM sequence: AAATGTTT
cattgcacaactctttgtca

SEQ ID NO: 10932 - DNA, 20 bp, Artificial Sequence
  Description of Artificial Sequence: Synthetic oligonucleotide
  Target: SCNA; (-) strand; PAM type: NNNNGHTT; PAM sequence: CCTAGCTT
tcaaaattaattgtcccacc

SEQ ID NO: 10933 - DNA, 20 bp, Artificial Sequence
  Description of Artificial Sequence: Synthetic oligonucleotide
  Target: SCNA; (-) strand; PAM type: NNNNGHTT; PAM sequence: CTTGGTTT
tcctactacattaacagtct

SEQ ID NO: 10934 - DNA, 20 bp, Artificial Sequence
  Description of Artificial Sequence: Synthetic oligonucleotide
  Target: SCNA; (-) strand; PAM type: NNNNGHTT; PAM sequence: ACAAGATT
aaggggtgattaacagtttt

SEQ ID NO: 10935 - DNA, 20 bp, Artificial Sequence
  Description of Artificial Sequence: Synthetic oligonucleotide
  Target: SCNA; (-) strand; PAM type: NNNNGHTT; PAM sequence: AACAGTTT
gtcagtaaaaaggggtgatt

SEQ ID NO: 10936 - DNA, 20 bp, Artificial Sequence
  Description of Artificial Sequence: Synthetic oligonucleotide
  Target: SCNA; (-) strand; PAM type: NNNNGHTT; PAM sequence: GGGTGATT
gtcttatcgtcagtaaaaag

SEQ ID NO: 10937 - DNA, 20 bp, Artificial Sequence
  Description of Artificial Sequence: Synthetic oligonucleotide
  Target: SCNA; (-) strand; PAM type: NNNNGHTT; PAM sequence: CCCAGCTT
aagactgatatggttttaaa

SEQ ID NO: 10938 - DNA, 20 bp, Artificial Sequence
  Description of Artificial Sequence: Synthetic oligonucleotide
  Target: SCNA; (-) strand; PAM type: NNNNGHTT; PAM sequence: TATGGTTT
atgctttgacgtaagactga

SEQ ID NO: 10939 - DNA, 20 bp, Artificial Sequence
  Description of Artificial Sequence: Synthetic oligonucleotide
  Target: SCNA; (-) strand; PAM type: NNNNGHTT; PAM sequence: ACATGCTT
accacacaacagcaattaaa

SEQ ID NO: 10940 - DNA, 20 bp, Artificial Sequence
  Description of Artificial Sequence: Synthetic oligonucleotide
  Target: SCNA; (-) strand; PAM type: NNNNGHTT; PAM sequence: TTTTGTTT
tcactgcttctcagcagttg

SEQ ID NO: 10941 - DNA, 20 bp, Artificial Sequence
  Description of Artificial Sequence: Synthetic oligonucleotide
  Target: SCNA; (-) strand; PAM type: NNNNGHTT; PAM sequence: AGTTGTTT
tggattcactgcttctcagc

SEQ ID NO: 10942 - DNA, 20 bp, Artificial Sequence
  Description of Artificial Sequence: Synthetic oligonucleotide
  Target: SCNA; (-) strand; PAM type: NNNNGHTT; PAM sequence: CACTGCTT
actcagattctgcttggatt

SEQ ID NO: 10943 - DNA, 20 bp, Artificial Sequence
  Description of Artificial Sequence: Synthetic oligonucleotide
  Target: SCNA; (-) strand; PAM type: NNNNGHTT; PAM sequence: CTTGGATT
gtgatgatactcagattctg

SEQ ID NO: 10944 - DNA, 20 bp, Artificial Sequence
  Description of Artificial Sequence: Synthetic oligonucleotide
  Target: SCNA; (-) strand; PAM type: NNNNGHTT; PAM sequence: TTCTGCTT
aaaaagtgatgatactcaga

SEQ ID NO: 10945 - DNA, 20 bp, Artificial Sequence
  Description of Artificial Sequence: Synthetic oligonucleotide
  Target: SCNA; (-) strand; PAM type: NNNNGHTT; PAM sequence: CTCAGATT
ttaactaaaaagtgatgata

SEQ ID NO: 10946 - DNA, 20 bp, Artificial Sequence
  Description of Artificial Sequence: Synthetic oligonucleotide
  Target: SCNA; (-) strand; PAM type: NNNNGHTT; PAM sequence: GTTAGTTT
aaaatcaggatattggactg

SEQ ID NO: 10947 - DNA, 20 bp, Artificial Sequence
  Description of Artificial Sequence: Synthetic oligonucleotide
  Target: SCNA; (-) strand; PAM type: NNNNGHTT; PAM sequence: ATAGGATT
cagctttgttattgttatct

SEQ ID NO: 10948 - DNA, 20 bp, Artificial Sequence
  Description of Artificial Sequence: Synthetic oligonucleotide
  Target: SCNA; (-) strand; PAM type: NNNNGHTT; PAM sequence: TGCAGCTT
aacctggcaacaaaatggtc

SEQ ID NO: 10949 - DNA, 20 bp, Artificial Sequence
  Description of Artificial Sequence: Synthetic oligonucleotide
  Target: SCNA; (-) strand; PAM type: NNNNGHTT; PAM sequence: ATTTGTTT
atgacagggccacctgagtt

SEQ ID NO: 10950 - DNA, 20 bp, Artificial Sequence
  Description of Artificial Sequence: Synthetic oligonucleotide
  Target: SCNA; (-) strand; PAM type: NNNNGHTT; PAM sequence: CTTGGTTT
tattatatgtgtgctttaga

SEQ ID NO: 10951 - DNA, 20 bp, Artificial Sequence
  Description of Artificial Sequence: Synthetic oligonucleotide
  Target: SCNA; (-) strand; PAM type: NNNNGHTT; PAM sequence: GTGTGCTT
acacacatatgttattatat

SEQ ID NO: 10952 - DNA, 20 bp, Artificial Sequence
  Description of Artificial Sequence: Synthetic oligonucleotide
  Target: SCNA; (-) strand; PAM type: NNNNGHTT; PAM sequence: GCCAGTTT
atttaggaatttgaaagcaa

SEQ ID NO: 10953 - DNA, 20 bp, Artificial Sequence
  Description of Artificial Sequence: Synthetic oligonucleotide
  Target: SCNA; (-) strand; PAM type: NNNNGHTT; PAM sequence: GTATGATT
gttatttttaaaatttaatt

SEQ ID NO: 10954 - DNA, 20 bp, Artificial Sequence
  Description of Artificial Sequence: Synthetic oligonucleotide
  Target: SCNA; (-) strand; PAM type: NNNNGHTT; PAM sequence: TCTTGTTT
gggtgtcaaagtgacttttt

SEQ ID NO: 10955 - DNA, 20 bp, Artificial Sequence
  Description of Artificial Sequence: Synthetic oligonucleotide
  Target: SCNA; (-) strand; PAM type: NNNNGHTT; PAM sequence: CATTGTTT
ataaaaatagatttacataa

SEQ ID NO: 10956 - DNA, 20 bp, Artificial Sequence
  Description of Artificial Sequence: Synthetic oligonucleotide
  Target: SCNA; (-) strand; PAM type: NNNNGHTT; PAM sequence: AATAGATT
tttcagaaaaattaaataaa

SEQ ID NO: 10957 - DNA, 20 bp, Artificial Sequence
  Description of Artificial Sequence: Synthetic oligonucleotide
  Target: SCNA; (-) strand; PAM type: NNNNGHTT; PAM sequence: ATAAGTTT
aagagggtaagcaaaacaat

SEQ ID NO: 10958 - DNA, 20 bp, Artificial Sequence
  Description of Artificial Sequence: Synthetic oligonucleotide
  Target: SCNA; (-) strand; PAM type: NNNNGHTT; PAM sequence: TATAGTTT
ctgggtactcgacaccaaat

SEQ ID NO: 10959 - DNA, 20 bp, Artificial Sequence
  Description of Artificial Sequence: Synthetic oligonucleotide
  Target: SCNA; (-) strand; PAM type: NNNNGHTT; PAM sequence: TTTTGTTT
gttatctgaatgttgttata

SEQ ID NO: 10960 - DNA, 20 bp, Artificial Sequence
  Description of Artificial Sequence: Synthetic oligonucleotide
  Target: SCNA; (-) strand; PAM type: NNNNGHTT; PAM sequence: GTCTGCTT
ttaatcttagagaagctcca

SEQ ID NO: 10961 - DNA, 20 bp, Artificial Sequence
  Description of Artificial Sequence: Synthetic oligonucleotide
  Target: SCNA; (-) strand; PAM type: NNNNGHTT; PAM sequence: TACTGTTT
aatctgggctggaattgtaa

SEQ ID NO: 10962 - DNA, 20 bp, Artificial Sequence
  Description of Artificial Sequence: Synthetic oligonucleotide
  Target: SCNA; (-) strand; PAM type: NNNNGHTT; PAM sequence: AAATGATT
tgatgatgatactaaggttt

SEQ ID NO: 10963 - DNA, 20 bp, Artificial Sequence
  Description of Artificial Sequence: Synthetic oligonucleotide
  Target: SCNA; (-) strand; PAM type: NNNNGHTT; PAM sequence: TAAGGTTT
ggtggtgatgatgatgatac

SEQ ID NO: 10964 - DNA, 20 bp, Artificial Sequence
  Description of Artificial Sequence: Synthetic oligonucleotide
  Target: SCNA; (-) strand; PAM type: NNNNGHTT; PAM sequence: AATCGCTT
gaaagggagtggtgagcagg

SEQ ID NO: 10965 - DNA, 20 bp, Artificial Sequence
  Description of Artificial Sequence: Synthetic oligonucleotide
  Target: SCNA; (-) strand; PAM type: NNNNGHTT; PAM sequence: GGTGGCTT
gcattcatttagttcatcac

SEQ ID NO: 10966 - DNA, 20 bp, Artificial Sequence
  Description of Artificial Sequence: Synthetic oligonucleotide
  Target: SCNA; (-) strand; PAM type: NNNNGHTT; PAM sequence: ATATGTTT
tcatgccaccttttaatgta

SEQ ID NO: 10967 - DNA, 20 bp, Artificial Sequence
  Description of Artificial Sequence: Synthetic oligonucleotide
  Target: SCNA; (-) strand; PAM type: NNNNGHTT; PAM sequence: TAATGATT
ttatctactatgtcaaatta

SEQ ID NO: 10968 - DNA, 20 bp, Artificial Sequence
  Description of Artificial Sequence: Synthetic oligonucleotide
  Target: SCNA; (-) strand; PAM type: NNNNGHTT; PAM sequence: ATATGTTT
cctgactgtaactggcagga

SEQ ID NO: 10969 - DNA, 20 bp, Artificial Sequence
  Description of Artificial Sequence: Synthetic oligonucleotide
  Target: SCNA; (-) strand; PAM type: NNNNGHTT; PAM sequence: GCTTGTTT
agtttagatgctcactaaat

SEQ ID NO: 10970 - DNA, 20 bp, Artificial Sequence
  Description of Artificial Sequence: Synthetic oligonucleotide
  Target: SCNA; (-) strand; PAM type: NNNNGHTT; PAM sequence: AAATGCTT
cttcagtttagatgctcact

SEQ ID NO: 10971 - DNA, 20 bp, Artificial Sequence
  Description of Artificial Sequence: Synthetic oligonucleotide
  Target: SCNA; (-) strand; PAM type: NNNNGHTT; PAM sequence: TTCAGTTT
acaaaactgaagttctaagc

SEQ ID NO: 10972 - DNA, 20 bp, Artificial Sequence
  Description of Artificial Sequence: Synthetic oligonucleotide
  Target: SCNA; (-) strand; PAM type: NNNNGHTT; PAM sequence: CTAAGCTT
cccgccacaaaactgaagtt

SEQ ID NO: 10973 - DNA, 20 bp, Artificial Sequence
  Description of Artificial Sequence: Synthetic oligonucleotide
  Target: SCNA; (-) strand; PAM type: NNNNGHTT; PAM sequence: CTGGGATT
tgtcttggcctcccaaggtg

SEQ ID NO: 10974 - DNA, 20 bp, Artificial Sequence
  Description of Artificial Sequence: Synthetic oligonucleotide
  Target: SCNA; (-) strand; PAM type: NNNNGHTT; PAM sequence: TGGGGTTT
ttttgtatttttagtagaga

SEQ ID NO: 10975 - DNA, 20 bp, Artificial Sequence
  Description of Artificial Sequence: Synthetic oligonucleotide
  Target: SCNA; (-) strand; PAM type: NNNNGHTT; PAM sequence: AAGCGATT
aatctccaccacccaggttc

SEQ ID NO: 10976 - DNA, 20 bp, Artificial Sequence
  Description of Artificial Sequence: Synthetic oligonucleotide
  Target: SCNA; (-) strand; PAM type: NNNNGHTT; PAM sequence: ATCTGTTT
attgcaattaacacatgtca

SEQ ID NO: 10977 - DNA, 20 bp, Artificial Sequence
  Description of Artificial Sequence: Synthetic oligonucleotide
  Target: SCNA; (-) strand; PAM type: NNNNGHTT; PAM sequence: ATATGATT
ggaaatgatttctgttctgt

SEQ ID NO: 10978 - DNA, 20 bp, Artificial Sequence
  Description of Artificial Sequence: Synthetic oligonucleotide
  Target: SCNA; (-) strand; PAM type: NNNNGHTT; PAM sequence: AAATGATT
gcaggttaaatattttatgg

SEQ ID NO: 10979 - DNA, 20 bp, Artificial Sequence
  Description of Artificial Sequence: Synthetic oligonucleotide
  Target: SCNA; (-) strand; PAM type: NNNNGHTT; PAM sequence: GAGAGATT
aaattggggcatcagctaca

SEQ ID NO: 10980 - DNA, 20 bp, Artificial Sequence
  Description of Artificial Sequence: Synthetic oligonucleotide
  Target: SCNA; (-) strand; PAM type: NNNNGHTT; PAM sequence: CAGTGCTT
gagaggtccaggggaaggca

SEQ ID NO: 10981 - DNA, 20 bp, Artificial Sequence
  Description of Artificial Sequence: Synthetic oligonucleotide
  Target: SCNA; (-) strand; PAM type: NNNNGHTT; PAM sequence: TCCTGCTT
ttcttttttctgagttattt

SEQ ID NO: 10982 - DNA, 20 bp, Artificial Sequence
  Description of Artificial Sequence: Synthetic oligonucleotide
  Target: SCNA; (-) strand; PAM type: NNNNGHTT; PAM sequence: ATGTGTTT
ctgttgtatttttcagcacc

SEQ ID NO: 10983 - DNA, 20 bp, Artificial Sequence
  Description of Artificial Sequence: Synthetic oligonucleotide
  Target: SCNA; (-) strand; PAM type: NNNNGHTT; PAM sequence: CTTTGCTT
catgagagcaagcaagaatg

SEQ ID NO: 10984 - DNA, 20 bp, Artificial Sequence
  Description of Artificial Sequence: Synthetic oligonucleotide
  Target: SCNA; (-) strand; PAM type: NNNNGHTT; PAM sequence: GAATGCTT
ctctccatgagagcaagcaa

SEQ ID NO: 10985 - DNA, 20 bp, Artificial Sequence
  Description of Artificial Sequence: Synthetic oligonucleotide
  Target: SCNA; (-) strand; PAM type: NNNNGHTT; PAM sequence: CAGTGCTT
ctccctgacttgaattatgg

SEQ ID NO: 10986 - DNA, 20 bp, Artificial Sequence
  Description of Artificial Sequence: Synthetic oligonucleotide
  Target: SCNA; (-) strand; PAM type: NNNNGHTT; PAM sequence: GCCAGCTT
aatattttgttttgttaaaa

SEQ ID NO: 10987 - DNA, 20 bp, Artificial Sequence
  Description of Artificial Sequence: Synthetic oligonucleotide
  Target: SCNA; (-) strand; PAM type: NNNNGHTT; PAM sequence: TTTTGTTT
ccagaagccacatggaaata

SEQ ID NO: 10988 - DNA, 20 bp, Artificial Sequence
  Description of Artificial Sequence: Synthetic oligonucleotide
  Target: SCNA; (-) strand; PAM type: NNNNGHTT; PAM sequence: AAAGGCTT
tctccattgcaataaaaaat

SEQ ID NO: 10989 - DNA, 20 bp, Artificial Sequence
  Description of Artificial Sequence: Synthetic oligonucleotide
  Target: SCNA; (-) strand; PAM type: NNNNGHTT; PAM sequence: TTCAGTTT
caactgatagtcaaataatg

SEQ ID NO: 10990 - DNA, 20 bp, Artificial Sequence
  Description of Artificial Sequence: Synthetic oligonucleotide
  Target: SCNA; (-) strand; PAM type: NNNNGHTT; PAM sequence: AGATGATT
attacatgttccatttgtaa

SEQ ID NO: 10991 - DNA, 20 bp, Artificial Sequence
  Description of Artificial Sequence: Synthetic oligonucleotide
  Target: SCNA; (-) strand; PAM type: NNNNGHTT; PAM sequence: ACCAGCTT
gaaggattttaatataatat

SEQ ID NO: 10992 - DNA, 20 bp, Artificial Sequence
  Description of Artificial Sequence: Synthetic oligonucleotide
  Target: SCNA; (-) strand; PAM type: NNNNGHTT; PAM sequence: GAAGGATT
acattgctgaattcacagtt

SEQ ID NO: 10993 - DNA, 20 bp, Artificial Sequence
  Description of Artificial Sequence: Synthetic oligonucleotide
  Target: SCNA; (-) strand; PAM type: NNNNGHTT; PAM sequence: TTATGCTT
attttctttaatgttgatgt

SEQ ID NO: 10994 - DNA, 20 bp, Artificial Sequence
  Description of Artificial Sequence: Synthetic oligonucleotide
  Target: SCNA; (-) strand; PAM type: NNNNGHTT; PAM sequence: TGATGTTT
ttaaatattttctttaatgt

SEQ ID NO: 10995 - DNA, 20 bp, Artificial Sequence
  Description of Artificial Sequence: Synthetic oligonucleotide
  Target: SCNA; (-) strand; PAM type: NNNNGHTT; PAM sequence: TTTTGATT
ctggaaaatttgacctctta

SEQ ID NO: 10996 - DNA, 20 bp, Artificial Sequence
  Description of Artificial Sequence: Synthetic oligonucleotide
  Target: SCNA; (-) strand; PAM type: NNNNGHTT; PAM sequence: GAAAGATT
gtctttaggtaattacagca

SEQ ID NO: 10997 - DNA, 20 bp, Artificial Sequence
  Description of Artificial Sequence: Synthetic oligonucleotide
  Target: SCNA; (-) strand; PAM type: NNNNGHTT; PAM sequence: TCTCGTTT
caacctgttcccagtgagac

SEQ ID NO: 10998 - DNA, 20 bp, Artificial Sequence
  Description of Artificial Sequence: Synthetic oligonucleotide
  Target: SCNA; (-) strand; PAM type: NNNNGHTT; PAM sequence: GTGTGCTT
gtgtgtgtgtgcgtgtgtgt

SEQ ID NO: 10999 - DNA, 20 bp, Artificial Sequence
  Description of Artificial Sequence: Synthetic oligonucleotide
  Target: SCNA; (-) strand; PAM type: NNNNGHTT; PAM sequence: ATAAGATT
tccttttaaaatgtgcaaaa

SEQ ID NO: 11000 - DNA, 20 bp, Artificial Sequence
  Description of Artificial Sequence: Synthetic oligonucleotide
  Target: SCNA; (-) strand; PAM type: NNNNGHTT; PAM sequence: ACCTGATT
gcatcttgatcacagcaagc

SEQ ID NO: 11001 - DNA, 20 bp, Artificial Sequence
  Description of Artificial Sequence: Synthetic oligonucleotide
  Target: SCNA; (-) strand; PAM type: NNNNGHTT; PAM sequence: CTAAGCTT
tcagtttacttcttgtctca

SEQ ID NO: 11002 - DNA, 20 bp, Artificial Sequence
  Description of Artificial Sequence: Synthetic oligonucleotide
  Target: SCNA; (-) strand; PAM type: NNNNGHTT; PAM sequence: ATCAGTTT
agcaccctggttaatcaatt

SEQ ID NO: 11003 - DNA, 20 bp, Artificial Sequence
  Description of Artificial Sequence: Synthetic oligonucleotide
  Target: SCNA; (-) strand; PAM type: NNNNGHTT; PAM sequence: GGTAGATT
acctgggaaggcaccctcta

SEQ ID NO: 11004 - DNA, 20 bp, Artificial Sequence
  Description of Artificial Sequence: Synthetic oligonucleotide
  Target: SCNA; (-) strand; PAM type: NNNNGHTT; PAM sequence: TTTTGTTT
ttatcactcggtttatttgc

SEQ ID NO: 11005 - DNA, 20 bp, Artificial Sequence
  Description of Artificial Sequence: Synthetic oligonucleotide
  Target: SCNA; (-) strand; PAM type: NNNNGHTT; PAM sequence: ATTTGCTT
tatttattatcactcggttt

SEQ ID NO: 11006 - DNA, 20 bp, Artificial Sequence
  Description of Artificial Sequence: Synthetic oligonucleotide
  Target: SCNA; (-) strand; PAM type: NNNNGHTT; PAM sequence: CTCGGTTT
actcggtttatttattatca

SEQ ID NO: 11007 - DNA, 20 bp, Artificial Sequence
  Description of Artificial Sequence: Synthetic oligonucleotide
  Target: SCNA; (-) strand; PAM type: NNNNGHTT; PAM sequence: CTCGGTTT
tggataaggaaactgagtca

SEQ ID NO: 11008 - DNA, 20 bp, Artificial Sequence
  Description of Artificial Sequence: Synthetic oligonucleotide
  Target: SCNA; (-) strand; PAM type: NNNNGHTT; PAM sequence: GGCAGTTT
caccaatcatctcaaaacat

SEQ ID NO: 11009 - DNA, 20 bp, Artificial Sequence
  Description of Artificial Sequence: Synthetic oligonucleotide
  Target: SCNA; (-) strand; PAM type: NNNNGHTT; PAM sequence: ATTCGCTT
ctcgcaactcaggagaggac

SEQ ID NO: 11010 - DNA, 20 bp, Artificial Sequence
  Description of Artificial Sequence: Synthetic oligonucleotide
  Target: SCNA; (-) strand; PAM type: NNNNGHTT; PAM sequence: CTTAGATT
gcatgtgatgttgtcctgct

SEQ ID NO: 11011 - DNA, 20 bp, Artificial Sequence
  Description of Artificial Sequence: Synthetic oligonucleotide
  Target: SCNA; (-) strand; PAM type: NNNNGHTT; PAM sequence: TTCTGTTT
ttttttagtaactcttgatt

SEQ ID NO: 11012 - DNA, 20 bp, Artificial Sequence
  Description of Artificial Sequence: Synthetic oligonucleotide
  Target: SCNA; (-) strand; PAM type: NNNNGHTT; PAM sequence: TCTTGATT
tagtggttttttttagtaac

SEQ ID NO: 11013 - DNA, 20 bp, Artificial Sequence
  Description of Artificial Sequence: Synthetic oligonucleotide
  Target: SCNA; (-) strand; PAM type: NNNNGHTT; PAM sequence: AGTGGTTT
taaaacaattaaatggagtt

SEQ ID NO: 11014 - DNA, 20 bp, Artificial Sequence
  Description of Artificial Sequence: Synthetic oligonucleotide
  Target: SCNA; (-) strand; PAM type: NNNNGHTT; PAM sequence: GAGGGATT
aattttggctaggtatcact

SEQ ID NO: 11015 - DNA, 20 bp, Artificial Sequence
  Description of Artificial Sequence: Synthetic oligonucleotide
  Target: SCNA; (-) strand; PAM type: NNNNGHTT; PAM sequence: AACAGTTT
aaaaacttgaaatgtggtat

SEQ ID NO: 11016 - DNA, 20 bp, Artificial Sequence
  Description of Artificial Sequence: Synthetic oligonucleotide
  Target: SCNA; (-) strand; PAM type: NNNNGHTT; PAM sequence: TAAAGTTT
atctatgcataaaaggaaga

SEQ ID NO: 11017 - DNA, 20 bp, Artificial Sequence
  Description of Artificial Sequence: Synthetic oligonucleotide
  Target: SCNA; (-) strand; PAM type: NNNNGHTT; PAM sequence: TTCCGATT
tgtcagttcactcccaaaga

SEQ ID NO: 11018 - DNA, 20 bp, Artificial Sequence
  Description of Artificial Sequence: Synthetic oligonucleotide
  Target: SCNA; (-) strand; PAM type: NNNNGHTT; PAM sequence: CAAAGATT
gattcctgtcagttcactcc

SEQ ID NO: 11019 - DNA, 20 bp, Artificial Sequence
  Description of Artificial Sequence: Synthetic oligonucleotide
  Target: SCNA; (-) strand; PAM type: NNNNGHTT; PAM sequence: TTCAGATT
tgaagaccttatttttaaaa

SEQ ID NO: 11020 - DNA, 20 bp, Artificial Sequence
  Description of Artificial Sequence: Synthetic oligonucleotide
  Target: SCNA; (-) strand; PAM type: NNNNGHTT; PAM sequence: TTGGGTTT
aaatcctcaagtgtccctct

SEQ ID NO: 11021 - DNA, 20 bp, Artificial Sequence
  Description of Artificial Sequence: Synthetic oligonucleotide
  Target: SCNA; (-) strand; PAM type: NNNNGHTT; PAM sequence: TGGGGCTT
tgtcttagagtcatatggat

SEQ ID NO: 11022 - DNA, 20 bp, Artificial Sequence
  Description of Artificial Sequence: Synthetic oligonucleotide
  Target: SCNA; (-) strand; PAM type: NNNNGHTT; PAM sequence: TATGGATT
atcactctgtcttagagtca

SEQ ID NO: 11023 - DNA, 20 bp, Artificial Sequence
  Description of Artificial Sequence: Synthetic oligonucleotide
  Target: SCNA; (-) strand; PAM type: NNNNGHTT; PAM sequence: ATGAGATT
aaaagatgggaccatcagta

SEQ ID NO: 11024 - DNA, 20 bp, Artificial Sequence
  Description of Artificial Sequence: Synthetic oligonucleotide
  Target: SCNA; (-) strand; PAM type: NNNNGHTT; PAM sequence: ATTGGTTT
tccagccattaatgtaaaac

SEQ ID NO: 11025 - DNA, 20 bp, Artificial Sequence
  Description of Artificial Sequence: Synthetic oligonucleotide
  Target: SCNA; (-) strand; PAM type: NNNNGHTT; PAM sequence: AATGGTTT
atgagttccactaaactttt

SEQ ID NO: 11026 - DNA, 20 bp, Artificial Sequence
  Description of Artificial Sequence: Synthetic oligonucleotide
  Target: SCNA; (-) strand; PAM type: NNNNGHTT; PAM sequence: GAAAGTTT
tgttcaaatcatacagttat

SEQ ID NO: 11027 - DNA, 20 bp, Artificial Sequence
  Description of Artificial Sequence: Synthetic oligonucleotide
  Target: SCNA; (-) strand; PAM type: NNNNGHTT; PAM sequence: AATTGCTT
tacggaggctgaggcaggag

SEQ ID NO: 11028 - DNA, 20 bp, Artificial Sequence
  Description of Artificial Sequence: Synthetic oligonucleotide
  Target: SCNA; (-) strand; PAM type: NNNNGHTT; PAM sequence: AGAGGCTT
agtcaaatccagagagaact

SEQ ID NO: 11029 - DNA, 20 bp, Artificial Sequence
  Description of Artificial Sequence: Synthetic oligonucleotide
  Target: SCNA; (-) strand; PAM type: NNNNGHTT; PAM sequence: TTGAGATT
gttagtttctgggaaatgtg

SEQ ID NO: 11030 - DNA, 20 bp, Artificial Sequence
  Description of Artificial Sequence: Synthetic oligonucleotide
  Target: SCNA; (-) strand; PAM type: NNNNGHTT; PAM sequence: GTTAGTTT
atagaagtcagccagaagat

SEQ ID NO: 11031 - DNA, 20 bp, Artificial Sequence
  Description of Artificial Sequence: Synthetic oligonucleotide
  Target: SCNA; (-) strand; PAM type: NNNNGHTT; PAM sequence: TTCAGTTT
tataatctctctccattgta

SEQ ID NO: 11032 - DNA, 20 bp, Artificial Sequence
  Description of Artificial Sequence: Synthetic oligonucleotide
  Target: SCNA; (-) strand; PAM type: NNNNGHTT; PAM sequence: AACTGATT
tgtgctaggagttagatatg

SEQ ID NO: 11033 - DNA, 20 bp, Artificial Sequence
  Description of Artificial Sequence: Synthetic oligonucleotide
  Target: SCNA; (-) strand; PAM type: NNNNGHTT; PAM sequence: ATCTGCTT
atatatatatatatatatat

SEQ ID NO: 11034 - DNA, 20 bp, Artificial Sequence
  Description of Artificial Sequence: Synthetic oligonucleotide
  Target: SCNA; (-) strand; PAM type: NNNNGHTT; PAM sequence: ATCTGCTT
gcaagaaagcatatatatat

SEQ ID NO: 11035 - DNA, 20 bp, Artificial Sequence
  Description of Artificial Sequence: Synthetic oligonucleotide
  Target: SCNA; (-) strand; PAM type: NNNNGHTT; PAM sequence: AGTAGTTT
ctggccaattacttgagatc

SEQ ID NO: 11036 - DNA, 20 bp, Artificial Sequence
  Description of Artificial Sequence: Synthetic oligonucleotide
  Target: SCNA; (-) strand; PAM type: NNNNGHTT; PAM sequence: CCAAGTTT
gtcattctgtttctttattg

SEQ ID NO: 11037 - DNA, 20 bp, Artificial Sequence
  Description of Artificial Sequence: Synthetic oligonucleotide
  Target: SCNA; (-) strand; PAM type: NNNNGHTT; PAM sequence: TTCTGTTT
atttaaaggacatgtagtca

SEQ ID NO: 11038 - DNA, 20 bp, Artificial Sequence
  Description of Artificial Sequence: Synthetic oligonucleotide
  Target: SCNA; (-) strand; PAM type: NNNNGHTT; PAM sequence: CATTGATT
atcttagataacttcatagt

SEQ ID NO: 11039 - DNA, 20 bp, Artificial Sequence
  Description of Artificial Sequence: Synthetic oligonucleotide
  Target: SCNA; (-) strand; PAM type: NNNNGHTT; PAM sequence: TGGTGTTT
ttaatggcaatgtcaaaatc

SEQ ID NO: 11040 - DNA, 20 bp, Artificial Sequence
  Description of Artificial Sequence: Synthetic oligonucleotide
  Target: SCNA; (-) strand; PAM type: NNNNGHTT; PAM sequence: TGGGGATT
ttgtatgtcaagtggaaggg

SEQ ID NO: 11041 - DNA, 20 bp, Artificial Sequence
  Description of Artificial Sequence: Synthetic oligonucleotide
  Target: SCNA; (-) strand; PAM type: NNNNGHTT; PAM sequence: TTGGGTTT
ataaatgagcatgaatctct

SEQ ID NO: 11042 - DNA, 20 bp, Artificial Sequence
  Description of Artificial Sequence: Synthetic oligonucleotide
  Target: SCNA; (-) strand; PAM type: NNNNGHTT; PAM sequence: TTATGTTT
aatagcagtaacctatggaa

SEQ ID NO: 11043 - DNA, 20 bp, Artificial Sequence
  Description of Artificial Sequence: Synthetic oligonucleotide
  Target: SCNA; (-) strand; PAM type: NNNNGHTT; PAM sequence: ATTTGATT
tagatataaatctagtaaat

SEQ ID NO: 11044 - DNA, 20 bp, Artificial Sequence
  Description of Artificial Sequence: Synthetic oligonucleotide
  Target: SCNA; (-) strand; PAM type: NNNNGHTT; PAM sequence: TAAAGATT
ttaaaggaatatctgaggaa

SEQ ID NO: 11045 - DNA, 20 bp, Artificial Sequence
  Description of Artificial Sequence: Synthetic oligonucleotide
  Target: SCNA; (-) strand; PAM type: NNNNGHTT; PAM sequence: ACTGGTTT
ggagccaataagctggtaag

SEQ ID NO: 11046 - DNA, 20 bp, Artificial Sequence
  Description of Artificial Sequence: Synthetic oligonucleotide
  Target: SCNA; (-) strand; PAM type: NNNNGHTT; PAM sequence: CAAAGATT
atacaaacataaacacattt

SEQ ID NO: 11047 - DNA, 20 bp, Artificial Sequence
  Description of Artificial Sequence: Synthetic oligonucleotide
  Target: SCNA; (-) strand; PAM type: NNNNGHTT; PAM sequence: GATGGTTT
agtttttgaaaagtaaagaa

SEQ ID NO: 11048 - DNA, 20 bp, Artificial Sequence
  Description of Artificial Sequence: Synthetic oligonucleotide
  Target: SCNA; (-) strand; PAM type: NNNNGHTT; PAM sequence: TATAGTTT
cttttcacagtgtgctcaag

SEQ ID NO: 11049 - DNA, 20 bp, Artificial Sequence
  Description of Artificial Sequence: Synthetic oligonucleotide
  Target: SCNA; (-) strand; PAM type: NNNNGHTT; PAM sequence: TTTAGATT
ttttctgagttttaaaataa

SEQ ID NO: 11050 - DNA, 20 bp, Artificial Sequence
  Description of Artificial Sequence: Synthetic oligonucleotide
  Target: SCNA; (-) strand; PAM type: NNNNGHTT; PAM sequence: CTGAGTTT
atatgagcttaaagcatttt

SEQ ID NO: 11051 - DNA, 20 bp, Artificial Sequence
  Description of Artificial Sequence: Synthetic oligonucleotide
  Target: SCNA; (-) strand; PAM type: NNNNGHTT; PAM sequence: ATGAGCTT
tacttgggaagtctataaat

SEQ ID NO: 11052 - DNA, 20 bp, Artificial Sequence
  Description of Artificial Sequence: Synthetic oligonucleotide
  Target: SCNA; (-) strand; PAM type: NNNNGHTT; PAM sequence: AACAGATT
tttacttacctacctcagtt

SEQ ID NO: 11053 - DNA, 20 bp, Artificial Sequence
  Description of Artificial Sequence: Synthetic oligonucleotide
  Target: SCNA; (-) strand; PAM type: NNNNGHTT; PAM sequence: GGACGTTT
tcatttatggaagttttcaa

SEQ ID NO: 11054 - DNA, 20 bp, Artificial Sequence
  Description of Artificial Sequence: Synthetic oligonucleotide
  Target: SCNA; (-) strand; PAM type: NNNNGHTT; PAM sequence: GGAAGTTT
atttattcaccatcatttat

SEQ ID NO: 11055 - DNA, 20 bp, Artificial Sequence
  Description of Artificial Sequence: Synthetic oligonucleotide
  Target: SCNA; (-) strand; PAM type: NNNNGHTT; PAM sequence: AATTGTTT
tatggctcagagacctggaa

SEQ ID NO: 11056 - DNA, 20 bp, Artificial Sequence
  Description of Artificial Sequence: Synthetic oligonucleotide
  Target: SCNA; (-) strand; PAM type: NNNNGHTT; PAM sequence: TCAGGATT
tcttttcattgaactcctat

SEQ ID NO: 11057 - DNA, 20 bp, Artificial Sequence
  Description of Artificial Sequence: Synthetic oligonucleotide
  Target: SCNA; (-) strand; PAM type: NNNNGHTT; PAM sequence: ATGGGTTT
acagcaggatcccatgggat

SEQ ID NO: 11058 - DNA, 20 bp, Artificial Sequence
  Description of Artificial Sequence: Synthetic oligonucleotide
  Target: SCNA; (-) strand; PAM type: NNNNGHTT; PAM sequence: AAATGCTT
aaaaatgcctgtaataggtt

SEQ ID NO: 11059 - DNA, 20 bp, Artificial Sequence
  Description of Artificial Sequence: Synthetic oligonucleotide
  Target: SCNA; (-) strand; PAM type: NNNNGHTT; PAM sequence: ACCAGATT
gcttttgtccttcggaggcc

SEQ ID NO: 11060 - DNA, 20 bp, Artificial Sequence
  Description of Artificial Sequence: Synthetic oligonucleotide
  Target: SCNA; (-) strand; PAM type: NNNNGHTT; PAM sequence: TCTGGCTT
cttgattgctttagattaac

SEQ ID NO: 11061 - DNA, 20 bp, Artificial Sequence
  Description of Artificial Sequence: Synthetic oligonucleotide
  Target: SCNA; (-) strand; PAM type: NNNNGHTT; PAM sequence: TTTAGATT
tggtcagactccttgattgc

SEQ ID NO: 11062 - DNA, 20 bp, Artificial Sequence
  Description of Artificial Sequence: Synthetic oligonucleotide
  Target: SCNA; (-) strand; PAM type: NNNNGHTT; PAM sequence: GATTGCTT
ccatggtggtcagactcctt

SEQ ID NO: 11063 - DNA, 20 bp, Artificial Sequence
  Description of Artificial Sequence: Synthetic oligonucleotide
  Target: SCNA; (-) strand; PAM type: NNNNGHTT; PAM sequence: CCTTGATT
gcttccatggtggtcagact

SEQ ID NO: 11064 - DNA, 20 bp, Artificial Sequence
  Description of Artificial Sequence: Synthetic oligonucleotide
  Target: SCNA; (-) strand; PAM type: NNNNGHTT; PAM sequence: CAGGGCTT
aaatacagcagccacttcct

SEQ ID NO: 11065 - DNA, 20 bp, Artificial Sequence
  Description of Artificial Sequence: Synthetic oligonucleotide
  Target: SCNA; (-) strand; PAM type: NNNNGHTT; PAM sequence: TGGGGATT
ttgtatgtcaagtggagggg

SEQ ID NO: 11066 - DNA, 20 bp, Artificial Sequence
  Description of Artificial Sequence: Synthetic oligonucleotide
  Target: SCNA; (-) strand; PAM type: NNNNGHTT; PAM sequence: TTGGGTTT
acaaatgttaattaatctct

SEQ ID NO: 11067 - DNA, 20 bp, Artificial Sequence
  Description of Artificial Sequence: Synthetic oligonucleotide
  Target: SCNA; (-) strand; PAM type: NNNNGHTT; PAM sequence: GGATGTTT
cgaaggaatattccaatatc

SEQ ID NO: 11068 - DNA, 20 bp, Artificial Sequence
  Description of Artificial Sequence: Synthetic oligonucleotide
  Target: SCNA; (-) strand; PAM type: NNNNGHTT; PAM sequence: ATAAGTTT
aaatatcttcctccctctcc

SEQ ID NO: 11069 - DNA, 20 bp, Artificial Sequence
  Description of Artificial Sequence: Synthetic oligonucleotide
  Target: SCNA; (-) strand; PAM type: NNNNGHTT; PAM sequence: CAATGATT
tggctttgagcaataaagtc

SEQ ID NO: 11070 - DNA, 20 bp, Artificial Sequence
  Description of Artificial Sequence: Synthetic oligonucleotide
  Target: SCNA; (-) strand; PAM type: NNNNGHTT; PAM sequence: TTTGGCTT
tgccacaaaaaacaatttct

SEQ ID NO: 11071 - DNA, 20 bp, Artificial Sequence
  Description of Artificial Sequence: Synthetic oligonucleotide
  Target: SCNA; (-) strand; PAM type: NNNNGHTT; PAM sequence: CCTTGTTT
cagcacacagtacaaaatta

SEQ ID NO: 11072 - DNA, 20 bp, Artificial Sequence
  Description of Artificial Sequence: Synthetic oligonucleotide
  Target: SCNA; (-) strand; PAM type: NNNNGHTT; PAM sequence: GCCTGCTT
ctatttgtgcctaaataagt

SEQ ID NO: 11073 - DNA, 20 bp, Artificial Sequence
  Description of Artificial Sequence: Synthetic oligonucleotide
  Target: SCNA; (-) strand; PAM type: NNNNGHTT; PAM sequence: TTTTGTTT
agatttaaaatctgactgta

SEQ ID NO: 11074 - DNA, 20 bp, Artificial Sequence
  Description of Artificial Sequence: Synthetic oligonucleotide
  Target: SCNA; (-) strand; PAM type: NNNNGHTT; PAM sequence: GAGAGATT
gaagtgtctatcttagaata

SEQ ID NO: 11075 - DNA, 20 bp, Artificial Sequence
  Description of Artificial Sequence: Synthetic oligonucleotide
  Target: SCNA; (-) strand; PAM type: NNNNGHTT; PAM sequence: ATTTGCTT
tcagccaagttctcaaaaac

SEQ ID NO: 11076 - DNA, 20 bp, Artificial Sequence
  Description of Artificial Sequence: Synthetic oligonucleotide
  Target: SCNA; (-) strand; PAM type: NNNNGHTT; PAM sequence: CTCAGATT
aatctgctaatcggaatgga

SEQ ID NO: 11077 - DNA, 20 bp, Artificial Sequence
  Description of Artificial Sequence: Synthetic oligonucleotide
  Target: SCNA; (-) strand; PAM type: NNNNGHTT; PAM sequence: GATAGCTT
aggttgctacataatgtctt

SEQ ID NO: 11078 - DNA, 20 bp, Artificial Sequence
  Description of Artificial Sequence: Synthetic oligonucleotide
  Target: SCNA; (-) strand; PAM type: NNNNGHTT; PAM sequence: CATGGTTT
tattggggaatattggtgag

SEQ ID NO: 11079 - DNA, 20 bp, Artificial Sequence
  Description of Artificial Sequence: Synthetic oligonucleotide
  Target: SCNA; (-) strand; PAM type: NNNNGHTT; PAM sequence: TGAAGTTT
atgcatgagcttacaaatct

SEQ ID NO: 11080 - DNA, 20 bp, Artificial Sequence
  Description of Artificial Sequence: Synthetic oligonucleotide
  Target: SCNA; (-) strand; PAM type: NNNNGHTT; PAM sequence: ATGAGCTT
taacataaatgtgggtatgc

SEQ ID NO: 11081 - DNA, 20 bp, Artificial Sequence
  Description of Artificial Sequence: Synthetic oligonucleotide
  Target: SCNA; (-) strand; PAM type: NNNNGHTT; PAM sequence: GATGGTTT
aacagcaatggaactgtggt

SEQ ID NO: 11082 - DNA, 20 bp, Artificial Sequence
  Description of Artificial Sequence: Synthetic oligonucleotide
  Target: SCNA; (-) strand; PAM type: NNNNGHTT; PAM sequence: TTGTGATT
cattatcttatttatgttat

SEQ ID NO: 11083 - DNA, 20 bp, Artificial Sequence
  Description of Artificial Sequence: Synthetic oligonucleotide
  Target: SCNA; (-) strand; PAM type: NNNNGHTT; PAM sequence: AGGAGATT
agccattggattttgtaaga

SEQ ID NO: 11084 - DNA, 20 bp, Artificial Sequence
  Description of Artificial Sequence: Synthetic oligonucleotide
  Target: SCNA; (-) strand; PAM type: NNNNGHTT; PAM sequence: ATTGGATT
atatagacttgtgggaagcc

SEQ ID NO: 11085 - DNA, 20 bp, Artificial Sequence
  Description of Artificial Sequence: Synthetic oligonucleotide
  Target: SCNA; (-) strand; PAM type: NNNNGHTT; PAM sequence: TCCTGATT
tattttatgacataaaagag

SEQ ID NO: 11086 - DNA, 20 bp, Artificial Sequence
  Description of Artificial Sequence: Synthetic oligonucleotide
  Target: SCNA; (-) strand; PAM type: NNNNGHTT; PAM sequence: GAAGGCTT
ggcagaacaaactcgtatat

SEQ ID NO: 11087 - DNA, 20 bp, Artificial Sequence
  Description of Artificial Sequence: Synthetic oligonucleotide
  Target: SCNA; (-) strand; PAM type: NNNNGHTT; PAM sequence: GAAAGTTT
gtcagacaagccagctcatg

SEQ ID NO: 11088 - DNA, 20 bp, Artificial Sequence
  Description of Artificial Sequence: Synthetic oligonucleotide
  Target: SCNA; (-) strand; PAM type: NNNNGHTT; PAM sequence: AAGCGTTT
aattaccacaatcaaaacag

SEQ ID NO: 11089 - DNA, 20 bp, Artificial Sequence
  Description of Artificial Sequence: Synthetic oligonucleotide
  Target: SCNA; (-) strand; PAM type: NNNNGHTT; PAM sequence: CCCTGATT
cagtgaccttgcagtttgtg

SEQ ID NO: 11090 - DNA, 20 bp, Artificial Sequence
  Description of Artificial Sequence: Synthetic oligonucleotide
  Target: SCNA; (-) strand; PAM type: NNNNGHTT; PAM sequence: TGCAGTTT
gctacccttgccagtgacct

SEQ ID NO: 11091 - DNA, 20 bp, Artificial Sequence
  Description of Artificial Sequence: Synthetic oligonucleotide
  Target: SCNA; (-) strand; PAM type: NNNNGHTT; PAM sequence: TGCTGCTT
tggttttcccttttgaaatc

SEQ ID NO: 11092 - DNA, 20 bp, Artificial Sequence
  Description of Artificial Sequence: Synthetic oligonucleotide
  Target: SCNA; (-) strand; PAM type: NNNNGHTT; PAM sequence: CTTGGTTT
aatctgctcactttcatctg

SEQ ID NO: 11093 - DNA, 20 bp, Artificial Sequence
  Description of Artificial Sequence: Synthetic oligonucleotide
  Target: SCNA; (-) strand; PAM type: NNNNGHTT; PAM sequence: ATCTGCTT
gaacaaatctgctcactttc

SEQ ID NO: 11094 - DNA, 20 bp, Artificial Sequence
  Description of Artificial Sequence: Synthetic oligonucleotide
  Target: SCNA; (-) strand; PAM type: NNNNGHTT; PAM sequence: CAGTGATT
agcctccttcacagtctctc

SEQ ID NO: 11095 - DNA, 20 bp, Artificial Sequence
  Description of Artificial Sequence: Synthetic oligonucleotide
  Target: SCNA; (-) strand; PAM type: NNNNGHTT; PAM sequence: ACACGATT
acctgacagcccgaggataa

SEQ ID NO: 11096 - DNA, 20 bp, Artificial Sequence
  Description of Artificial Sequence: Synthetic oligonucleotide
  Target: SCNA; (-) strand; PAM type: NNNNGHTT; PAM sequence: ATCTGTTT
gataattcctggatgctgtt

SEQ ID NO: 11097 - DNA, 20 bp, Artificial Sequence
  Description of Artificial Sequence: Synthetic oligonucleotide
  Target: SCNA; (-) strand; PAM type: NNNNGHTT; PAM sequence: CACTGATT
ggtgagtgacaagacactga

SEQ ID NO: 11098 - DNA, 20 bp, Artificial Sequence
  Description of Artificial Sequence: Synthetic oligonucleotide
  Target: SCNA; (-) strand; PAM type: NNNNGHTT; PAM sequence: GTTTGTTT
agcaacatttatcctcactt

SEQ ID NO: 11099 - DNA, 20 bp, Artificial Sequence
  Description of Artificial Sequence: Synthetic oligonucleotide
  Target: SCNA; (-) strand; PAM type: NNNNGHTT; PAM sequence: ACTTGTTT
tcggagcaacatttatcctc

SEQ ID NO: 11100 - DNA, 20 bp, Artificial Sequence
  Description of Artificial Sequence: Synthetic oligonucleotide
  Target: SCNA; (-) strand; PAM type: NNNNGHTT; PAM sequence: TAATGATT
atgacgataccaagtctgac

SEQ ID NO: 11101 - DNA, 20 bp, Artificial Sequence
  Description of Artificial Sequence: Synthetic oligonucleotide
  Target: SCNA; (-) strand; PAM type: NNNNGHTT; PAM sequence: GCCAGATT
cggagttaaagacaattaca

SEQ ID NO: 11102 - DNA, 20 bp, Artificial Sequence
  Description of Artificial Sequence: Synthetic oligonucleotide
  Target: SCNA; (-) strand; PAM type: NNNNGHTT; PAM sequence: AAATGCTT
tcacggttgaaagttaaatg

SEQ ID NO: 11103 - DNA, 20 bp, Artificial Sequence
  Description of Artificial Sequence: Synthetic oligonucleotide
  Target: SCNA; (-) strand; PAM type: NNNNGHTT; PAM sequence: ATTTGTTT
ttaaattctcataccaggca

SEQ ID NO: 11104 - DNA, 20 bp, Artificial Sequence
  Description of Artificial Sequence: Synthetic oligonucleotide
  Target: SCNA; (-) strand; PAM type: NNNNGHTT; PAM sequence: CGATGTTT
agtttcttcattgactgagg

SEQ ID NO: 11105 - DNA, 20 bp, Artificial Sequence
  Description of Artificial Sequence: Synthetic oligonucleotide
  Target: SCNA; (-) strand; PAM type: NNNNGHTT; PAM sequence: ATAAGTTT
tttattattagttatagaac

SEQ ID NO: 11106 - DNA, 20 bp, Artificial Sequence
  Description of Artificial Sequence: Synthetic oligonucleotide
  Target: SCNA; (-) strand; PAM type: NNNNGHTT; PAM sequence: TCATGATT
gctgttctaaatggtaatcc

SEQ ID NO: 11107 - DNA, 20 bp, Artificial Sequence
  Description of Artificial Sequence: Synthetic oligonucleotide
  Target: SCNA; (-) strand; PAM type: NNNNGHTT; PAM sequence: AAATGTTT
ttatttccggattaaaaagt

SEQ ID NO: 11108 - DNA, 20 bp, Artificial Sequence
  Description of Artificial Sequence: Synthetic oligonucleotide
  Target: SCNA; (-) strand; PAM type: NNNNGHTT; PAM sequence: TCCGGATT
attatttgctttaacttatt

SEQ ID NO: 11109 - DNA, 20 bp, Artificial Sequence
  Description of Artificial Sequence: Synthetic oligonucleotide
  Target: SCNA; (-) strand; PAM type: NNNNGHTT; PAM sequence: ATTTGCTT
tttaaatataaatttttatt

SEQ ID NO: 11110 - DNA, 20 bp, Artificial Sequence
  Description of Artificial Sequence: Synthetic oligonucleotide
  Target: SCNA; (-) strand; PAM type: NNNNGHTT; PAM sequence: GTGTGATT
tattcatgataaaacatgtt

SEQ ID NO: 11111 - DNA, 20 bp, Artificial Sequence
  Description of Artificial Sequence: Synthetic oligonucleotide
  Target: SCNA; (-) strand; PAM type: NNNNGHTT; PAM sequence: TTTTGATT
aaacttatatagccttgaca

SEQ ID NO: 11112 - DNA, 20 bp, Artificial Sequence
  Description of Artificial Sequence: Synthetic oligonucleotide
  Target: SCNA; (-) strand; PAM type: NNNNGHTT; PAM sequence: AGATGCTT
gaaatggagctcaccacagg

SEQ ID NO: 11113 - DNA, 20 bp, Artificial Sequence
  Description of Artificial Sequence: Synthetic oligonucleotide
  Target: SCNA; (-) strand; PAM type: NNNNGHTT; PAM sequence: AATGGTTT
ctcagtgccataaatatttt

SEQ ID NO: 11114 - DNA, 20 bp, Artificial Sequence
  Description of Artificial Sequence: Synthetic oligonucleotide
  Target: SCNA; (-) strand; PAM type: NNNNGHTT; PAM sequence: GTCTGATT
caagagagtacacaagaccc

SEQ ID NO: 11115 - DNA, 20 bp, Artificial Sequence
  Description of Artificial Sequence: Synthetic oligonucleotide
  Target: SCNA; (-) strand; PAM type: NNNNGHTT; PAM sequence: ATAAGTTT
tggctttttagttccactgc

SEQ ID NO: 11116 - DNA, 20 bp, Artificial Sequence
  Description of Artificial Sequence: Synthetic oligonucleotide
  Target: SCNA; (-) strand; PAM type: NNNNGHTT; PAM sequence: GGTGGCTT
gcctttttattataaaaata

SEQ ID NO: 11117 - DNA, 20 bp, Artificial Sequence
  Description of Artificial Sequence: Synthetic oligonucleotide
  Target: SCNA; (-) strand; PAM type: NNNNGHTT; PAM sequence: TCAAGATT
gataattatatttgaaacgt

SEQ ID NO: 11118 - DNA, 20 bp, Artificial Sequence
  Description of Artificial Sequence: Synthetic oligonucleotide
  Target: SCNA; (-) strand; PAM type: NNNNGHTT; PAM sequence: AACTGATT
atatttgccttacttagaag

SEQ ID NO: 11119 - DNA, 20 bp, Artificial Sequence
  Description of Artificial Sequence: Synthetic oligonucleotide
  Target: SCNA; (-) strand; PAM type: NNNNGHTT; PAM sequence: TGGAGTTT
ggtcatatagatatacttaa

SEQ ID NO: 11120 - DNA, 20 bp, Artificial Sequence
  Description of Artificial Sequence: Synthetic oligonucleotide
  Target: SCNA; (-) strand; PAM type: NNNNGHTT; PAM sequence: TGAGGTTT
aatttttaatactggcaaaa

SEQ ID NO: 11121 - DNA, 20 bp, Artificial Sequence
  Description of Artificial Sequence: Synthetic oligonucleotide
  Target: SCNA; (-) strand; PAM type: NNNNGHTT; PAM sequence: AACTGTTT
ctttgtcaggagttctgagg

SEQ ID NO: 11122 - DNA, 20 bp, Artificial Sequence
  Description of Artificial Sequence: Synthetic oligonucleotide
  Target: SCNA; (-) strand; PAM type: NNNNGHTT; PAM sequence: TTTTGCTT
cctgaactccataaaaatct

SEQ ID NO: 11123 - DNA, 20 bp, Artificial Sequence
  Description of Artificial Sequence: Synthetic oligonucleotide
  Target: SCNA; (-) strand; PAM type: NNNNGHTT; PAM sequence: TTCAGCTT
gggaatgtacacaaaggcct

SEQ ID NO: 11124 - DNA, 20 bp, Artificial Sequence
  Description of Artificial Sequence: Synthetic oligonucleotide
  Target: SCNA; (-) strand; PAM type: NNNNGHTT; PAM sequence: TACTGTTT
ctaaaatgcaatccatcatt

SEQ ID NO: 11125 - DNA, 20 bp, Artificial Sequence
  Description of Artificial Sequence: Synthetic oligonucleotide
  Target: SCNA; (-) strand; PAM type: NNNNGHTT; PAM sequence: CTAGGTTT
aatgcattcttcttataagc

SEQ ID NO: 11126 - DNA, 20 bp, Artificial Sequence
  Description of Artificial Sequence: Synthetic oligonucleotide
  Target: SCNA; (-) strand; PAM type: NNNNGHTT; PAM sequence: TAGGGCTT
tttttatattgtatgttatc

SEQ ID NO: 11127 - DNA, 20 bp, Artificial Sequence
  Description of Artificial Sequence: Synthetic oligonucleotide
  Target: SCNA; (-) strand; PAM type: NNNNGHTT; PAM sequence: CCGAGATT
gaggcggtggttgcagtgag

SEQ ID NO: 11128 - DNA, 20 bp, Artificial Sequence
  Description of Artificial Sequence: Synthetic oligonucleotide
  Target: SCNA; (-) strand; PAM type: NNNNGHTT; PAM sequence: AATCGTTT
tggggaggctgaggcagaag

SEQ ID NO: 11129 - DNA, 20 bp, Artificial Sequence
  Description of Artificial Sequence: Synthetic oligonucleotide
  Target: SCNA; (-) strand; PAM type: NNNNGHTT; PAM sequence: ACCAGCTT
cctgaggtcgggagttcaag

SEQ ID NO: 11130 - DNA, 20 bp, Artificial Sequence
  Description of Artificial Sequence: Synthetic oligonucleotide
  Target: SCNA; (-) strand; PAM type: NNNNGHTT; PAM sequence: TTTTGCTT
tccaattattccacttaatt

SEQ ID NO: 11131 - DNA, 20 bp, Artificial Sequence
  Description of Artificial Sequence: Synthetic oligonucleotide
  Target: SCNA; (-) strand; PAM type: NNNNGHTT; PAM sequence: CATTGTTT
aaatacctatctcatgttac

SEQ ID NO: 11132 - DNA, 20 bp, Artificial Sequence
  Description of Artificial Sequence: Synthetic oligonucleotide
  Target: SCNA; (-) strand; PAM type: NNNNGHTT; PAM sequence: GATAGTTT
tgtctattattagaacacta

SEQ ID NO: 11133 - DNA, 20 bp, Artificial Sequence
  Description of Artificial Sequence: Synthetic oligonucleotide
  Target: SCNA; (-) strand; PAM type: NNNNGHTT; PAM sequence: TGCAGATT
ctggctctttctattatata

SEQ ID NO: 11134 - DNA, 20 bp, Artificial Sequence
  Description of Artificial Sequence: Synthetic oligonucleotide
  Target: SCNA; (-) strand; PAM type: NNNNGHTT; PAM sequence: TTGGGCTT
ttccaacaaatttatgtgct

SEQ ID NO: 11135 - DNA, 20 bp, Artificial Sequence
  Description of Artificial Sequence: Synthetic oligonucleotide
  Target: SCNA; (-) strand; PAM type: NNNNGHTT; PAM sequence: ATGTGCTT
gaaataattccaacaaattt

SEQ ID NO: 11136 - DNA, 20 bp, Artificial Sequence
  Description of Artificial Sequence: Synthetic oligonucleotide
  Target: SCNA; (-) strand; PAM type: NNNNGHTT; PAM sequence: CTGTGCTT
attgctgtaagtgtgtatac

SEQ ID NO: 11137 - DNA, 20 bp, Artificial Sequence
  Description of Artificial Sequence: Synthetic oligonucleotide
  Target: SCNA; (-) strand; PAM type: NNNNGHTT; PAM sequence: ACTAGATT
taaaaagtgacacatttgtc

SEQ ID NO: 11138 - DNA, 20 bp, Artificial Sequence
  Description of Artificial Sequence: Synthetic oligonucleotide
  Target: SCNA; (-) strand; PAM type: NNNNGHTT; PAM sequence: CATTGTTT
tcattgcactgatacataga

SEQ ID NO: 11139 - DNA, 20 bp, Artificial Sequence
  Description of Artificial Sequence: Synthetic oligonucleotide
  Target: SCNA; (-) strand; PAM type: NNNNGHTT; PAM sequence: ACAAGCTT
aggtactgtggttagctcca

SEQ ID NO: 11140 - DNA, 20 bp, Artificial Sequence
  Description of Artificial Sequence: Synthetic oligonucleotide
  Target: SCNA; (-) strand; PAM type: NNNNGHTT; PAM sequence: TGTAGTTT
tttcctgatataaattttct

SEQ ID NO: 11141 - DNA, 20 bp, Artificial Sequence
  Description of Artificial Sequence: Synthetic oligonucleotide
  Target: SCNA; (-) strand; PAM type: NNNNGHTT; PAM sequence: AGCAGTTT
agtgcatatattaggaaata

SEQ ID NO: 11142 - DNA, 20 bp, Artificial Sequence
  Description of Artificial Sequence: Synthetic oligonucleotide
  Target: SCNA; (-) strand; PAM type: NNNNGHTT; PAM sequence: GACAGTTT
ctagtcacattggcagagtt

SEQ ID NO: 11143 - DNA, 20 bp, Artificial Sequence
  Description of Artificial Sequence: Synthetic oligonucleotide
  Target: SCNA; (-) strand; PAM type: NNNNGHTT; PAM sequence: CTCAGATT
ctcataaggtgaaagaaaga

SEQ ID NO: 11144 - DNA, 20 bp, Artificial Sequence
  Description of Artificial Sequence: Synthetic oligonucleotide
  Target: SCNA; (-) strand; PAM type: NNNNGHTT; PAM sequence: AATGGCTT
tgtctgcctttgcatcagat

SEQ ID NO: 11145 - DNA, 20 bp, Artificial Sequence
  Description of Artificial Sequence: Synthetic oligonucleotide
  Target: SCNA; (-) strand; PAM type: NNNNGHTT; PAM sequence: GAATGCTT
gagtccctgaagatttatat

SEQ ID NO: 11146 - DNA, 20 bp, Artificial Sequence
  Description of Artificial Sequence: Synthetic oligonucleotide
  Target: SCNA; (-) strand; PAM type: NNNNGHTT; PAM sequence: TGAAGATT
cttgagagaattcgagtccc

SEQ ID NO: 11147 - DNA, 20 bp, Artificial Sequence
  Description of Artificial Sequence: Synthetic oligonucleotide
  Target: SCNA; (-) strand; PAM type: NNNNGHTT; PAM sequence: ATGTGATT
acaccagagccctttgccaa

SEQ ID NO: 11148 - DNA, 20 bp, Artificial Sequence
  Description of Artificial Sequence: Synthetic oligonucleotide
  Target: SCNA; (-) strand; PAM type: NNNNGHTT; PAM sequence: GAATGTTT
gatatctctctcataatcct

SEQ ID NO: 11149 - DNA, 20 bp, Artificial Sequence
  Description of Artificial Sequence: Synthetic oligonucleotide
  Target: SCNA; (-) strand; PAM type: NNNNGHTT; PAM sequence: TATGGTTT
gataaatgtttgtcctctct

SEQ ID NO: 11150 - DNA, 20 bp, Artificial Sequence
  Description of Artificial Sequence: Synthetic oligonucleotide
  Target: SCNA; (-) strand; PAM type: NNNNGHTT; PAM sequence: AAATGTTT
taatagtctctttcttggat

SEQ ID NO: 11151 - DNA, 20 bp, Artificial Sequence
  Description of Artificial Sequence: Synthetic oligonucleotide
  Target: SCNA; (-) strand; PAM type: NNNNGHTT; PAM sequence: ACCTGTTT
agactaagcaattgagcagc

SEQ ID NO: 11152 - DNA, 20 bp, Artificial Sequence
  Description of Artificial Sequence: Synthetic oligonucleotide
  Target: SCNA; (-) strand; PAM type: NNNNGHTT; PAM sequence: CAGAGTTT
aatggcatgaacccaggagg

SEQ ID NO: 11153 - DNA, 20 bp, Artificial Sequence
  Description of Artificial Sequence: Synthetic oligonucleotide
  Target: SCNA; (-) strand; PAM type: NNNNGHTT; PAM sequence: ACTTGTTT
gcccagtgaagcatttgccc

SEQ ID NO: 11154 - DNA, 20 bp, Artificial Sequence
  Description of Artificial Sequence: Synthetic oligonucleotide
  Target: SCNA; (-) strand; PAM type: NNNNGHTT; PAM sequence: GATAGATT
aatattttctgcctaatgct

SEQ ID NO: 11155 - DNA, 20 bp, Artificial Sequence
  Description of Artificial Sequence: Synthetic oligonucleotide
  Target: SCNA; (-) strand; PAM type: NNNNGHTT; PAM sequence: GAAAGCTT
tatttttaaaagttcagtta

SEQ ID NO: 11156 - DNA, 20 bp, Artificial Sequence
  Description of Artificial Sequence: Synthetic oligonucleotide
  Target: SCNA; (-) strand; PAM type: NNNNGHTT; PAM sequence: GGTTGATT
ctcttctgttgatgaacaaa

SEQ ID NO: 11157 - DNA, 20 bp, Artificial Sequence
  Description of Artificial Sequence: Synthetic oligonucleotide
  Target: SCNA; (-) strand; PAM type: NNNNGHTT; PAM sequence: TCAGGTTT
gcagccagcacagaccaaag

SEQ ID NO: 11158 - DNA, 20 bp, Artificial Sequence
  Description of Artificial Sequence: Synthetic oligonucleotide
  Target: SCNA; (-) strand; PAM type: NNNNGHTT; PAM sequence: TATGGTTT
tcatgctgtttgtccattat

SEQ ID NO: 11159 - DNA, 20 bp, Artificial Sequence
  Description of Artificial Sequence: Synthetic oligonucleotide
  Target: SCNA; (-) strand; PAM type: NNNNGHTT; PAM sequence: TGCTGTTT
ggggtgcatatctaggttca

SEQ ID NO: 11160 - DNA, 20 bp, Artificial Sequence
  Description of Artificial Sequence: Synthetic oligonucleotide
  Target: SCNA; (-) strand; PAM type: NNNNGHTT; PAM sequence: TATAGATT
aaatacagtaggaatgtaat

SEQ ID NO: 11161 - DNA, 20 bp, Artificial Sequence
  Description of Artificial Sequence: Synthetic oligonucleotide
  Target: SCNA; (-) strand; PAM type: NNNNGHTT; PAM sequence: TGGAGTTT
ctttgggcttgagaaagaaa

SEQ ID NO: 11162 - DNA, 20 bp, Artificial Sequence
  Description of Artificial Sequence: Synthetic oligonucleotide
  Target: SCNA; (-) strand; PAM type: NNNNGHTT; PAM sequence: TTGGGCTT
aatttcaagatttatgtact

SEQ ID NO: 11163 - DNA, 20 bp, Artificial Sequence
  Description of Artificial Sequence: Synthetic oligonucleotide
  Target: SCNA; (-) strand; PAM type: NNNNGHTT; PAM sequence: TCAAGATT
tattttttagctggaaaatt

SEQ ID NO: 11164 - DNA, 20 bp, Artificial Sequence
  Description of Artificial Sequence: Synthetic oligonucleotide
  Target: SCNA; (-) strand; PAM type: NNNNGHTT; PAM sequence: AATGGCTT
tagatgtaacataaaatatg

SEQ ID NO: 11165 - DNA, 20 bp, Artificial Sequence
  Description of Artificial Sequence: Synthetic oligonucleotide
  Target: SCNA; (-) strand; PAM type: NNNNGHTT; PAM sequence: CTGAGCTT
ccattctcattagtgatttt

SEQ ID NO: 11166 - DNA, 20 bp, Artificial Sequence
  Description of Artificial Sequence: Synthetic oligonucleotide
  Target: SCNA; (-) strand; PAM type: NNNNGHTT; PAM sequence: TAGTGATT
ttaattccttccattctcat

SEQ ID NO: 11167 - DNA, 20 bp, Artificial Sequence
  Description of Artificial Sequence: Synthetic oligonucleotide
  Target: SCNA; (-) strand; PAM type: NNNNGHTT; PAM sequence: TTCTGCTT
gtagcatggtagccgcatgc

SEQ ID NO: 11168 - DNA, 20 bp, Artificial Sequence
  Description of Artificial Sequence: Synthetic oligonucleotide
  Target: SCNA; (-) strand; PAM type: NNNNGHTT; PAM sequence: GCATGCTT
agcaatgtagcatggtagcc

SEQ ID NO: 11169 - DNA, 20 bp, Artificial Sequence
  Description of Artificial Sequence: Synthetic oligonucleotide
  Target: SCNA; (-) strand; PAM type: NNNNGHTT; PAM sequence: CCCTGATT
agctcattgcacagctgcta

SEQ ID NO: 11170 - DNA, 20 bp, Artificial Sequence
  Description of Artificial Sequence: Synthetic oligonucleotide
  Target: SCNA; (-) strand; PAM type: NNNNGHTT; PAM sequence: GACTGTTT
attaaaaaataacacttgag

SEQ ID NO: 11171 - DNA, 20 bp, Artificial Sequence
  Description of Artificial Sequence: Synthetic oligonucleotide
  Target: SCNA; (-) strand; PAM type: NNNNGHTT; PAM sequence: ATGGGATT
taggcagtgtgagttatcat

SEQ ID NO: 11172 - DNA, 20 bp, Artificial Sequence
  Description of Artificial Sequence: Synthetic oligonucleotide
  Target: SCNA; (-) strand; PAM type: NNNNGHTT; PAM sequence: AAATGTTT
cacttattcattcattaaac

SEQ ID NO: 11173 - DNA, 20 bp, Artificial Sequence
  Description of Artificial Sequence: Synthetic oligonucleotide
  Target: SCNA; (-) strand; PAM type: NNNNGHTT; PAM sequence: GAGAGTTT
tgttaaaactttaaatgttg

SEQ ID NO: 11174 - DNA, 20 bp, Artificial Sequence
  Description of Artificial Sequence: Synthetic oligonucleotide
  Target: SCNA; (-) strand; PAM type: NNNNGHTT; PAM sequence: ATAGGCTT
ttgttatgttatacaaatta

SEQ ID NO: 11175 - DNA, 20 bp, Artificial Sequence
  Description of Artificial Sequence: Synthetic oligonucleotide
  Target: SCNA; (-) strand; PAM type: NNNNGHTT; PAM sequence: TATAGATT
tataatcataattttactcc

SEQ ID NO: 11176 - DNA, 20 bp, Artificial Sequence
  Description of Artificial Sequence: Synthetic oligonucleotide
  Target: SCNA; (-) strand; PAM type: NNNNGHTT; PAM sequence: TGTTGATT
gttatttgtttgtttaagtc

SEQ ID NO: 11177 - DNA, 20 bp, Artificial Sequence
  Description of Artificial Sequence: Synthetic oligonucleotide
  Target: SCNA; (-) strand; PAM type: NNNNGHTT; PAM sequence: GTTTGTTT
ttaattgaaagctgttattt

SEQ ID NO: 11178 - DNA, 20 bp, Artificial Sequence
  Description of Artificial Sequence: Synthetic oligonucleotide
  Target: SCNA; (-) strand; PAM type: NNNNGHTT; PAM sequence: ATTTGTTT
aaacttaattgaaagctgtt

SEQ ID NO: 11179 - DNA, 20 bp, Artificial Sequence
  Description of Artificial Sequence: Synthetic oligonucleotide
  Target: SCNA; (-) strand; PAM type: NNNNGHTT; PAM sequence: ATTTGATT
tggtccttttatcctttccc

SEQ ID NO: 11180 - DNA, 20 bp, Artificial Sequence
  Description of Artificial Sequence: Synthetic oligonucleotide
  Target: SCNA; (-) strand; PAM type: NNNNGHTT; PAM sequence: CATAGCTT
caatcaattatattactaac

SEQ ID NO: 11181 - DNA, 20 bp, Artificial Sequence
  Description of Artificial Sequence: Synthetic oligonucleotide
  Target: SCNA; (-) strand; PAM type: NNNNGHTT; PAM sequence: ATTAGTTT
tagcacagatattaaaacaa

SEQ ID NO: 11182 - DNA, 20 bp, Artificial Sequence
  Description of Artificial Sequence: Synthetic oligonucleotide
  Target: SCNA; (-) strand; PAM type: NNNNGHTT; PAM sequence: TAAGGTTT
ttaaagatagctctgcatag

SEQ ID NO: 11183 - DNA, 20 bp, Artificial Sequence
  Description of Artificial Sequence: Synthetic oligonucleotide
  Target: SCNA; (-) strand; PAM type: NNNNGHTT; PAM sequence: AAATGATT
ctgcatagcacatagcccta

SEQ ID NO: 11184 - DNA, 20 bp, Artificial Sequence
  Description of Artificial Sequence: Synthetic oligonucleotide
  Target: SCNA; (-) strand; PAM type: NNNNGHTT; PAM sequence: TTAAGTTT
aatcttttaattgttaaaat

SEQ ID NO: 11185 - DNA, 20 bp, Artificial Sequence
  Description of Artificial Sequence: Synthetic oligonucleotide
  Target: SCNA; (-) strand; PAM type: NNNNGHTT; PAM sequence: TCTGGTTT
aaattaaagcaattctagca

SEQ ID NO: 11186 - DNA, 20 bp, Artificial Sequence
  Description of Artificial Sequence: Synthetic oligonucleotide
  Target: SCNA; (-) strand; PAM type: NNNNGHTT; PAM sequence: TCATGTTT
aaaacagatcaaaaggctat

SEQ ID NO: 11187 - DNA, 20 bp, Artificial Sequence
  Description of Artificial Sequence: Synthetic oligonucleotide
  Target: SCNA; (-) strand; PAM type: NNNNGHTT; PAM sequence: CAATGATT
gacctggaaagaattggcca

SEQ ID NO: 11188 - DNA, 20 bp, Artificial Sequence
  Description of Artificial Sequence: Synthetic oligonucleotide
  Target: SCNA; (-) strand; PAM type: NNNNGHTT; PAM sequence: GGAGGTTT
ttgatctatagctttgatat

SEQ ID NO: 11189 - DNA, 20 bp, Artificial Sequence
  Description of Artificial Sequence: Synthetic oligonucleotide
  Target: SCNA; (-) strand; PAM type: NNNNGHTT; PAM sequence: TATAGCTT
tgttctgatagttattgatc

SEQ ID NO: 11190 - DNA, 20 bp, Artificial Sequence
  Description of Artificial Sequence: Synthetic oligonucleotide
  Target: SCNA; (-) strand; PAM type: NNNNGHTT; PAM sequence: TAATGTTT
aaagatgattaactttatct

SEQ ID NO: 11191 - DNA, 20 bp, Artificial Sequence
  Description of Artificial Sequence: Synthetic oligonucleotide
  Target: SCNA; (-) strand; PAM type: NNNNGHTT; PAM sequence: AGATGATT
tggttattattataaagaaa

SEQ ID NO: 11192 - DNA, 20 bp, Artificial Sequence
  Description of Artificial Sequence: Synthetic oligonucleotide
  Target: SCNA; (-) strand; PAM type: NNNNGHTT; PAM sequence: AAGTGTTT
ctatttcataagatttgata

SEQ ID NO: 11193 - DNA, 20 bp, Artificial Sequence
  Description of Artificial Sequence: Synthetic oligonucleotide
  Target: SCNA; (-) strand; PAM type: NNNNGHTT; PAM sequence: ATAAGATT
ataaaaattacccctatttc

SEQ ID NO: 11194 - DNA, 20 bp, Artificial Sequence
  Description of Artificial Sequence: Synthetic oligonucleotide
  Target: SCNA; (-) strand; PAM type: NNNNGHTT; PAM sequence: CAGTGCTT
gacacagtggccctatagta

SEQ ID NO: 11195 - DNA, 20 bp, Artificial Sequence
  Description of Artificial Sequence: Synthetic oligonucleotide
  Target: SCNA; (-) strand; PAM type: NNNNGHTT; PAM sequence: AAAGGTTT
aatgtatagaccatgccatg

SEQ ID NO: 11196 - DNA, 20 bp, Artificial Sequence
  Description of Artificial Sequence: Synthetic oligonucleotide
  Target: SCNA; (-) strand; PAM type: NNNNGHTT; PAM sequence: TACGGTTT
cattcaggaactctgtggcc

SEQ ID NO: 11197 - DNA, 20 bp, Artificial Sequence
  Description of Artificial Sequence: Synthetic oligonucleotide
  Target: SCNA; (-) strand; PAM type: NNNNGHTT; PAM sequence: CACAGTTT
ttcaagcttgccaacattat

SEQ ID NO: 11198 - DNA, 20 bp, Artificial Sequence
  Description of Artificial Sequence: Synthetic oligonucleotide
  Target: SCNA; (-) strand; PAM type: NNNNGHTT; PAM sequence: TCAAGCTT
ttctgattctgtccctccct

SEQ ID NO: 11199 - DNA, 20 bp, Artificial Sequence
  Description of Artificial Sequence: Synthetic oligonucleotide
  Target: SCNA; (-) strand; PAM type: NNNNGHTT; PAM sequence: TTCTGATT
aaatgtcacttacaaatatt

SEQ ID NO: 11200 - DNA, 20 bp, Artificial Sequence
  Description of Artificial Sequence: Synthetic oligonucleotide
  Target: SCNA; (-) strand; PAM type: NNNNGHTT; PAM sequence: CCTGGCTT
gtctggtctctgtgtcagtc

SEQ ID NO: 11201 - DNA, 20 bp, Artificial Sequence
  Description of Artificial Sequence: Synthetic oligonucleotide
  Target: SCNA; (-) strand; PAM type: NNNNGHTT; PAM sequence: ATCTGATT
taaaaaccctcaccactgct

SEQ ID NO: 11202 - DNA, 20 bp, Artificial Sequence
  Description of Artificial Sequence: Synthetic oligonucleotide
  Target: SCNA; (-) strand; PAM type: NNNNGHTT; PAM sequence: GGTGGATT
gtccaggggattttgtgtat

SEQ ID NO: 11203 - DNA, 20 bp, Artificial Sequence
  Description of Artificial Sequence: Synthetic oligonucleotide
  Target: SCNA; (-) strand; PAM type: NNNNGHTT; PAM sequence: AGGGGATT
gtggagatattcttaagtcc

SEQ ID NO: 11204 - DNA, 20 bp, Artificial Sequence
  Description of Artificial Sequence: Synthetic oligonucleotide
  Target: SCNA; (-) strand; PAM type: NNNNGHTT; PAM sequence: AGCAGTTT
acaagcaattgttccttcta

SEQ ID NO: 11205 - DNA, 20 bp, Artificial Sequence
  Description of Artificial Sequence: Synthetic oligonucleotide
  Target: SCNA; (-) strand; PAM type: NNNNGHTT; PAM sequence: CCCCGTTT
aggaggtagacactctccac

SEQ ID NO: 11206 - DNA, 20 bp, Artificial Sequence
  Description of Artificial Sequence: Synthetic oligonucleotide
  Target: SCNA; (-) strand; PAM type: NNNNGHTT; PAM sequence: CTTTGATT
tggtggagaagaggcagtct

SEQ ID NO: 11207 - DNA, 20 bp, Artificial Sequence
  Description of Artificial Sequence: Synthetic oligonucleotide
  Target: SCNA; (-) strand; PAM type: NNNNGHTT; PAM sequence: CCAGGTTT
tgtgtccttactcctgggtg

SEQ ID NO: 11208 - DNA, 20 bp, Artificial Sequence
  Description of Artificial Sequence: Synthetic oligonucleotide
  Target: SCNA; (-) strand; PAM type: NNNNGHTT; PAM sequence: TTCAGCTT
ttaggacaagacagttcagc

SEQ ID NO: 11209 - DNA, 20 bp, Artificial Sequence
  Description of Artificial Sequence: Synthetic oligonucleotide
  Target: SCNA; (-) strand; PAM type: NNNNGHTT; PAM sequence: TTCAGCTT
atgtttttaggacaagacag

SEQ ID NO: 11210 - DNA, 20 bp, Artificial Sequence
  Description of Artificial Sequence: Synthetic oligonucleotide
  Target: SCNA; (-) strand; PAM type: NNNNGHTT; PAM sequence: ATATGTTT
agcttttctagagtctgggc

SEQ ID NO: 11211 - DNA, 20 bp, Artificial Sequence
  Description of Artificial Sequence: Synthetic oligonucleotide
  Target: SCNA; (-) strand; PAM type: NNNNGHTT; PAM sequence: GAGAGCTT
gaaattagcagtctgtctaa

SEQ ID NO: 11212 - DNA, 20 bp, Artificial Sequence
  Description of Artificial Sequence: Synthetic oligonucleotide
  Target: SCNA; (-) strand; PAM type: NNNNGHTT; PAM sequence: ATTGGATT
accataagcccactatgagt

SEQ ID NO: 11213 - DNA, 20 bp, Artificial Sequence
  Description of Artificial Sequence: Synthetic oligonucleotide
  Target: SCNA; (-) strand; PAM type: NNNNGHTT; PAM sequence: GAATGTTT
taaagaagctataacaagta

SEQ ID NO: 11214 - DNA, 20 bp, Artificial Sequence
  Description of Artificial Sequence: Synthetic oligonucleotide
  Target: SCNA; (-) strand; PAM type: NNNNGHTT; PAM sequence: TTCTGCTT
ttttactgctgatgttaaag

SEQ ID NO: 11215 - DNA, 20 bp, Artificial Sequence
  Description of Artificial Sequence: Synthetic oligonucleotide
  Target: SCNA; (-) strand; PAM type: NNNNGHTT; PAM sequence: CAGGGTTT
acacattaaaacaatagtct

SEQ ID NO: 11216 - DNA, 20 bp, Artificial Sequence
  Description of Artificial Sequence: Synthetic oligonucleotide
  Target: SCNA; (-) strand; PAM type: NNNNGHTT; PAM sequence: TCTGGTTT
acagcatacttttaatttgc

SEQ ID NO: 11217 - DNA, 20 bp, Artificial Sequence
  Description of Artificial Sequence: Synthetic oligonucleotide
  Target: SCNA; (-) strand; PAM type: NNNNGHTT; PAM sequence: TTTAGATT
aaatatcattctttgctgtt

SEQ ID NO: 11218 - DNA, 20 bp, Artificial Sequence
  Description of Artificial Sequence: Synthetic oligonucleotide
  Target: SCNA; (-) strand; PAM type: NNNNGHTT; PAM sequence: TGCTGTTT
tcttcttaaatatcattctt

SEQ ID NO: 11219 - DNA, 20 bp, Artificial Sequence
  Description of Artificial Sequence: Synthetic oligonucleotide
  Target: SCNA; (-) strand; PAM type: NNNNGHTT; PAM sequence: CTCAGTTT
aaaagttcataaaaagttca

SEQ ID NO: 11220 - DNA, 20 bp, Artificial Sequence
  Description of Artificial Sequence: Synthetic oligonucleotide
  Target: SCNA; (-) strand; PAM type: NNNNGHTT; PAM sequence: TGCTGCTT
acagatatgttaatttcctg

SEQ ID NO: 11221 - DNA, 20 bp, Artificial Sequence
  Description of Artificial Sequence: Synthetic oligonucleotide
  Target: SCNA; (-) strand; PAM type: NNNNGHTT; PAM sequence: GCATGTTT
atctcagtttaatgaacacg

SEQ ID NO: 11222 - DNA, 20 bp, Artificial Sequence
  Description of Artificial Sequence: Synthetic oligonucleotide
  Target: SCNA; (-) strand; PAM type: NNNNGHTT; PAM sequence: CTCAGTTT
ttttcaaaatgtggttttat

SEQ ID NO: 11223 - DNA, 20 bp, Artificial Sequence
  Description of Artificial Sequence: Synthetic oligonucleotide
  Target: SCNA; (-) strand; PAM type: NNNNGHTT; PAM sequence: TGTGGTTT
actaaactttattttcaaaa

SEQ ID NO: 11224 - DNA, 20 bp, Artificial Sequence
  Description of Artificial Sequence: Synthetic oligonucleotide
  Target: SCNA; (-) strand; PAM type: NNNNGHTT; PAM sequence: ATAAGCTT
ccaaatattaaaagcaagtc

SEQ ID NO: 11225 - DNA, 20 bp, Artificial Sequence
  Description of Artificial Sequence: Synthetic oligonucleotide
  Target: SCNA; (-) strand; PAM type: NNNNGHTT; PAM sequence: ATTAGCTT
gctattattgtactccatac

SEQ ID NO: 11226 - DNA, 20 bp, Artificial Sequence
  Description of Artificial Sequence: Synthetic oligonucleotide
  Target: SCNA; (-) strand; PAM type: NNNNGHTT; PAM sequence: CCATGCTT
gccatgtctaatatcaaagc

SEQ ID NO: 11227 - DNA, 20 bp, Artificial Sequence
  Description of Artificial Sequence: Synthetic oligonucleotide
  Target: SCNA; (-) strand; PAM type: NNNNGHTT; PAM sequence: GAAAGCTT
tgtaacaagatagggtaaag

SEQ ID NO: 11228 - DNA, 20 bp, Artificial Sequence
  Description of Artificial Sequence: Synthetic oligonucleotide
  Target: SCNA; (-) strand; PAM type: NNNNGHTT; PAM sequence: CATTGTTT
tgtacaagggacacaattag

SEQ ID NO: 11229 - DNA, 20 bp, Artificial Sequence
  Description of Artificial Sequence: Synthetic oligonucleotide
  Target: SCNA; (-) strand; PAM type: NNNNGHTT; PAM sequence: AGATGTTT
cagaatgttggtcacataga

SEQ ID NO: 11230 - DNA, 20 bp, Artificial Sequence
  Description of Artificial Sequence: Synthetic oligonucleotide
  Target: SCNA; (-) strand; PAM type: NNNNGHTT; PAM sequence: ACTAGCTT
cttaatggtttgctgcccca

SEQ ID NO: 11231 - DNA, 20 bp, Artificial Sequence
  Description of Artificial Sequence: Synthetic oligonucleotide
  Target: SCNA; (-) strand; PAM type: NNNNGHTT; PAM sequence: AATGGTTT
gctatgctgctgaatgtctt

SEQ ID NO: 11232 - DNA, 20 bp, Artificial Sequence
  Description of Artificial Sequence: Synthetic oligonucleotide
  Target: SCNA; (-) strand; PAM type: NNNNGHTT; PAM sequence: ATCTGTTT
tttccaacccttggatcccc

SEQ ID NO: 11233 - DNA, 20 bp, Artificial Sequence
  Description of Artificial Sequence: Synthetic oligonucleotide
  Target: SCNA; (-) strand; PAM type: NNNNGHTT; PAM sequence: AGGGGATT
catcaatatcttcaagacta

SEQ ID NO: 11234 - DNA, 20 bp, Artificial Sequence
  Description of Artificial Sequence: Synthetic oligonucleotide
  Target: SCNA; (-) strand; PAM type: NNNNGHTT; PAM sequence: AAGTGATT
ttattaatgtcactgcattc

SEQ ID NO: 11235 - DNA, 20 bp, Artificial Sequence
  Description of Artificial Sequence: Synthetic oligonucleotide
  Target: SCNA; (-) strand; PAM type: NNNNGHTT; PAM sequence: TTATGATT
gagtctgggaggcagggaat

SEQ ID NO: 11236 - DNA, 20 bp, Artificial Sequence
  Description of Artificial Sequence: Synthetic oligonucleotide
  Target: SCNA; (-) strand; PAM type: NNNNGHTT; PAM sequence: CATGGCTT
ctcaccagcagaaggggtaa

SEQ ID NO: 11237 - DNA, 20 bp, Artificial Sequence
  Description of Artificial Sequence: Synthetic oligonucleotide
  Target: SCNA; (-) strand; PAM type: NNNNGHTT; PAM sequence: CCGAGATT
gaggtggaggttgcggtgag

SEQ ID NO: 11238 - DNA, 20 bp, Artificial Sequence
  Description of Artificial Sequence: Synthetic oligonucleotide
  Target: SCNA; (-) strand; PAM type: NNNNGHTT; PAM sequence: AATCGCTT
tcgggaggctaaggcaggag

SEQ ID NO: 11239 - DNA, 20 bp, Artificial Sequence
  Description of Artificial Sequence: Synthetic oligonucleotide
  Target: SCNA; (-) strand; PAM type: NNNNGHTT; PAM sequence: ATGTGCTT
aattagccaggtgtggtgtc

SEQ ID NO: 11240 - DNA, 20 bp, Artificial Sequence
  Description of Artificial Sequence: Synthetic oligonucleotide
  Target: SCNA; (-) strand; PAM type: NNNNGHTT; PAM sequence: TAAAGATT
atggacaacagtaacctagg

SEQ ID NO: 11241 - DNA, 20 bp, Artificial Sequence
  Description of Artificial Sequence: Synthetic oligonucleotide
  Target: SCNA; (-) strand; PAM type: NNNNGHTT; PAM sequence: TCAAGATT
ttcaatgaacacttcagatg

SEQ ID NO: 11242 - DNA, 20 bp, Artificial Sequence
  Description of Artificial Sequence: Synthetic oligonucleotide
  Target: SCNA; (-) strand; PAM type: NNNNGHTT; PAM sequence: TTCAGATT
aaaaatagctctgtactttt

SEQ ID NO: 11243 - DNA, 20 bp, Artificial Sequence
  Description of Artificial Sequence: Synthetic oligonucleotide
  Target: SCNA; (-) strand; PAM type: NNNNGHTT; PAM sequence: CTGTGTTT
atttaaaataacattttgct

SEQ ID NO: 11244 - DNA, 20 bp, Artificial Sequence
  Description of Artificial Sequence: Synthetic oligonucleotide
  Target: SCNA; (-) strand; PAM type: NNNNGHTT; PAM sequence: AAATGCTT
aagtgctttcagcaaatatt

SEQ ID NO: 11245 - DNA, 20 bp, Artificial Sequence
  Description of Artificial Sequence: Synthetic oligonucleotide
  Target: SCNA; (-) strand; PAM type: NNNNGHTT; PAM sequence: AAGTGCTT
agccaatattttttctgttt

SEQ ID NO: 11246 - DNA, 20 bp, Artificial Sequence
  Description of Artificial Sequence: Synthetic oligonucleotide
  Target: SCNA; (-) strand; PAM type: NNNNGHTT; PAM sequence: TTCTGTTT
atctcactagccaatatttt

SEQ ID NO: 11247 - DNA, 20 bp, Artificial Sequence
  Description of Artificial Sequence: Synthetic oligonucleotide
  Target: SCNA; (-) strand; PAM type: NNNNGHTT; PAM sequence: TGGGGTTT
ttttgtattcttagtagaga

SEQ ID NO: 11248 - DNA, 20 bp, Artificial Sequence
  Description of Artificial Sequence: Synthetic oligonucleotide
  Target: SCNA; (-) strand; PAM type: NNNNGHTT; PAM sequence: CTGAGATT
tgcctcagcctcttgagtag

SEQ ID NO: 11249 - DNA, 20 bp, Artificial Sequence
  Description of Artificial Sequence: Synthetic oligonucleotide
  Target: SCNA; (-) strand; PAM type: NNNNGHTT; PAM sequence: AATTGATT
gataaataactttgtaaagc

SEQ ID NO: 11250 - DNA, 20 bp, Artificial Sequence
  Description of Artificial Sequence: Synthetic oligonucleotide
  Target: SCNA; (-) strand; PAM type: NNNNGHTT; PAM sequence: ATATGTTT
gatctttactagttttatag

SEQ ID NO: 11251 - DNA, 20 bp, Artificial Sequence
  Description of Artificial Sequence: Synthetic oligonucleotide
  Target: SCNA; (-) strand; PAM type: NNNNGHTT; PAM sequence: ACTAGTTT
tacctgagcttttgatcttt

SEQ ID NO: 11252 - DNA, 20 bp, Artificial Sequence
  Description of Artificial Sequence: Synthetic oligonucleotide
  Target: SCNA; (-) strand; PAM type: NNNNGHTT; PAM sequence: CTGAGCTT
gcagagaaagttaaagatac

SEQ ID NO: 11253 - DNA, 20 bp, Artificial Sequence
  Description of Artificial Sequence: Synthetic oligonucleotide
  Target: SCNA; (-) strand; PAM type: NNNNGHTT; PAM sequence: ATGAGTTT
gataaaaataaatcttgaag

SEQ ID NO: 11254 - DNA, 20 bp, Artificial Sequence
  Description of Artificial Sequence: Synthetic oligonucleotide
  Target: SCNA; (-) strand; PAM type: NNNNGHTT; PAM sequence: GTGTGCTT
tgttaaaaatgtttaaaaac

SEQ ID NO: 11255 - DNA, 20 bp, Artificial Sequence
  Description of Artificial Sequence: Synthetic oligonucleotide
  Target: SCNA; (-) strand; PAM type: NNNNGHTT; PAM sequence: AAATGTTT
ctgcatttttaaaatgttaa

SEQ ID NO: 11256 - DNA, 20 bp, Artificial Sequence
  Description of Artificial Sequence: Synthetic oligonucleotide
  Target: SCNA; (-) strand; PAM type: NNNNGHTT; PAM sequence: GGGAGTTT
tcaagtagatgtgggaaaaa

SEQ ID NO: 11257 - DNA, 20 bp, Artificial Sequence
  Description of Artificial Sequence: Synthetic oligonucleotide
  Target: SCNA; (-) strand; PAM type: NNNNGHTT; PAM sequence: GTGTGTTT
aagaagtgctctgtgtatat

SEQ ID NO: 11258 - DNA, 20 bp, Artificial Sequence
  Description of Artificial Sequence: Synthetic oligonucleotide
  Target: SCNA; (-) strand; PAM type: NNNNGHTT; PAM sequence: AGGTGATT
attgcattacataattttta

SEQ ID NO: 11259 - DNA, 20 bp, Artificial Sequence
  Description of Artificial Sequence: Synthetic oligonucleotide
  Target: SCNA; (-) strand; PAM type: NNNNGHTT; PAM sequence: TGTGGTTT
gtcaatggtaggaaaaccat

SEQ ID NO: 11260 - DNA, 20 bp, Artificial Sequence
  Description of Artificial Sequence: Synthetic oligonucleotide
  Target: SCNA; (-) strand; PAM type: NNNNGHTT; PAM sequence: CTTTGCTT
tcactttcagaagaaaggtc

SEQ ID NO: 11261 - DNA, 20 bp, Artificial Sequence
  Description of Artificial Sequence: Synthetic oligonucleotide
  Target: SCNA; (-) strand; PAM type: NNNNGHTT; PAM sequence: GAATGATT
agcaccaggcttgcccttca

SEQ ID NO: 11262 - DNA, 20 bp, Artificial Sequence
  Description of Artificial Sequence: Synthetic oligonucleotide
  Target: SCNA; (-) strand; PAM type: NNNNGHTT; PAM sequence: CCAGGCTT
ttgtgcttagcaacacagca

SEQ ID NO: 11263 - DNA, 20 bp, Artificial Sequence
  Description of Artificial Sequence: Synthetic oligonucleotide
  Target: SCNA; (-) strand; PAM type: NNNNGHTT; PAM sequence: TTGTGCTT
ggagccaaataccaaattgt

SEQ ID NO: 11264 - DNA, 20 bp, Artificial Sequence
  Description of Artificial Sequence: Synthetic oligonucleotide
  Target: SCNA; (-) strand; PAM type: NNNNGHTT; PAM sequence: AATTGTTT
atttttggagccaaatacca

SEQ ID NO: 11265 - DNA, 20 bp, Artificial Sequence
  Description of Artificial Sequence: Synthetic oligonucleotide
  Target: SCNA; (-) strand; PAM type: NNNNGHTT; PAM sequence: TATGGATT
ttaattcaggacagaaattg

SEQ ID NO: 11266 - DNA, 20 bp, Artificial Sequence
  Description of Artificial Sequence: Synthetic oligonucleotide
  Target: SCNA; (-) strand; PAM type: NNNNGHTT; PAM sequence: CGTGGTTT
aaggtgaaagaaaccaatta

SEQ ID NO: 11267 - DNA, 20 bp, Artificial Sequence
  Description of Artificial Sequence: Synthetic oligonucleotide
  Target: SCNA; (-) strand; PAM type: NNNNGHTT; PAM sequence: TGGAGTTT
aacaaaatacttctctaact

SEQ ID NO: 11268 - DNA, 20 bp, Artificial Sequence
  Description of Artificial Sequence: Synthetic oligonucleotide
  Target: SCNA; (-) strand; PAM type: NNNNGHTT; PAM sequence: TCTAGTTT
atgttctgtattccaccaag

SEQ ID NO: 11269 - DNA, 20 bp, Artificial Sequence
  Description of Artificial Sequence: Synthetic oligonucleotide
  Target: SCNA; (-) strand; PAM type: NNNNGHTT; PAM sequence: AAATGTTT
gaagtttaatattttgttta

SEQ ID NO: 11270 - DNA, 20 bp, Artificial Sequence
  Description of Artificial Sequence: Synthetic oligonucleotide
  Target: SCNA; (-) strand; PAM type: NNNNGHTT; PAM sequence: TTTTGTTT
actgttctagaagtttaata

SEQ ID NO: 11271 - DNA, 20 bp, Artificial Sequence
  Description of Artificial Sequence: Synthetic oligonucleotide
  Target: SCNA; (-) strand; PAM type: NNNNGHTT; PAM sequence: AGAAGTTT
tttaagtgatccactgttct

SEQ ID NO: 11272 - DNA, 20 bp, Artificial Sequence
  Description of Artificial Sequence: Synthetic oligonucleotide
  Target: SCNA; (-) strand; PAM type: NNNNGHTT; PAM sequence: TAAAGTTT
actcagtctaaggaaagtct

SEQ ID NO: 11273 - DNA, 20 bp, Artificial Sequence
  Description of Artificial Sequence: Synthetic oligonucleotide
  Target: SCNA; (-) strand; PAM type: NNNNGHTT; PAM sequence: CACCGTTT
tattttattcatttgtcctg

SEQ ID NO: 11274 - DNA, 20 bp, Artificial Sequence
  Description of Artificial Sequence: Synthetic oligonucleotide
  Target: SCNA; (-) strand; PAM type: NNNNGHTT; PAM sequence: CTAAGTTT
aaagagattgcgtatctgtt

SEQ ID NO: 11275 - DNA, 20 bp, Artificial Sequence
  Description of Artificial Sequence: Synthetic oligonucleotide
  Target: SCNA; (-) strand; PAM type: NNNNGHTT; PAM sequence: AAGAGATT
tgaatttttacatactgtta

SEQ ID NO: 11276 - DNA, 20 bp, Artificial Sequence
  Description of Artificial Sequence: Synthetic oligonucleotide
  Target: SCNA; (-) strand; PAM type: NNNNGHTT; PAM sequence: AAATGTTT
actaattacacataaaagga

SEQ ID NO: 11277 - DNA, 20 bp, Artificial Sequence
  Description of Artificial Sequence: Synthetic oligonucleotide
  Target: SCNA; (-) strand; PAM type: NNNNGHTT; PAM sequence: CAAAGATT
attagatcaacttctaattt

SEQ ID NO: 11278 - DNA, 20 bp, Artificial Sequence
  Description of Artificial Sequence: Synthetic oligonucleotide
  Target: SCNA; (-) strand; PAM type: NNNNGHTT; PAM sequence: GGTGGATT
caagtgttcattgattcaga

SEQ ID NO: 11279 - DNA, 20 bp, Artificial Sequence
  Description of Artificial Sequence: Synthetic oligonucleotide
  Target: SCNA; (-) strand; PAM type: NNNNGHTT; PAM sequence: CATTGATT
tctccaccaatacaagtgtt

SEQ ID NO: 11280 - DNA, 20 bp, Artificial Sequence
  Description of Artificial Sequence: Synthetic oligonucleotide
  Target: SCNA; (-) strand; PAM type: NNNNGHTT; PAM sequence: CTTTGTTT
agaaagtctgtctgaaggat

SEQ ID NO: 11281 - DNA, 20 bp, Artificial Sequence
  Description of Artificial Sequence: Synthetic oligonucleotide
  Target: SCNA; (-) strand; PAM type: NNNNGHTT; PAM sequence: TGATGATT
ttaaatatctgagtatgatt

SEQ ID NO: 11282 - DNA, 20 bp, Artificial Sequence
  Description of Artificial Sequence: Synthetic oligonucleotide
  Target: SCNA; (-) strand; PAM type: NNNNGHTT; PAM sequence: GTATGATT
atttatttttaaatatctga

SEQ ID NO: 11283 - DNA, 20 bp, Artificial Sequence
  Description of Artificial Sequence: Synthetic oligonucleotide
  Target: SCNA; (-) strand; PAM type: NNNNGHTT; PAM sequence: TGTTGTTT
acattcatcttataacagca

SEQ ID NO: 11284 - DNA, 20 bp, Artificial Sequence
  Description of Artificial Sequence: Synthetic oligonucleotide
  Target: SCNA; (-) strand; PAM type: NNNNGHTT; PAM sequence: AGTAGATT
ttcaggatttttgctaattg

SEQ ID NO: 11285 - DNA, 20 bp, Artificial Sequence
  Description of Artificial Sequence: Synthetic oligonucleotide
  Target: SCNA; (-) strand; PAM type: NNNNGHTT; PAM sequence: TCAGGATT
ttagtaatagtgtattgtat

SEQ ID NO: 11286 - DNA, 20 bp, Artificial Sequence
  Description of Artificial Sequence: Synthetic oligonucleotide
  Target: SCNA; (-) strand; PAM type: NNNNGHTT; PAM sequence: AGGAGATT
ccatgagtgaggtggcaggg

SEQ ID NO: 11287 - DNA, 20 bp, Artificial Sequence
  Description of Artificial Sequence: Synthetic oligonucleotide
  Target: SCNA; (-) strand; PAM type: NNNNGHTT; PAM sequence: TCCTGTTT
gcctgaccaacatggtgaaa

SEQ ID NO: 11288 - DNA, 20 bp, Artificial Sequence
  Description of Artificial Sequence: Synthetic oligonucleotide
  Target: SCNA; (-) strand; PAM type: NNNNGHTT; PAM sequence: TATAGATT
ttgtacattgttggtggaaa

SEQ ID NO: 11289 - DNA, 20 bp, Artificial Sequence
  Description of Artificial Sequence: Synthetic oligonucleotide
  Target: SCNA; (-) strand; PAM type: NNNNGHTT; PAM sequence: TTCAGTTT
gaaaagaaaaagtctacatg

SEQ ID NO: 11290 - DNA, 20 bp, Artificial Sequence
  Description of Artificial Sequence: Synthetic oligonucleotide
  Target: SCNA; (-) strand; PAM type: NNNNGHTT; PAM sequence: TATTGTTT
tgtaaatagtttttatacta

SEQ ID NO: 11291 - DNA, 20 bp, Artificial Sequence
  Description of Artificial Sequence: Synthetic oligonucleotide
  Target: SCNA; (-) strand; PAM type: NNNNGHTT; PAM sequence: AATAGTTT
tacaatgtaaattctatgta

SEQ ID NO: 11292 - DNA, 20 bp, Artificial Sequence
  Description of Artificial Sequence: Synthetic oligonucleotide
  Target: SCNA; (-) strand; PAM type: NNNNGHTT; PAM sequence: TCTAGATT
gactgctgctttaaataatc

SEQ ID NO: 11293 - DNA, 20 bp, Artificial Sequence
  Description of Artificial Sequence: Synthetic oligonucleotide
  Target: SCNA; (-) strand; PAM type: NNNNGHTT; PAM sequence: TGCTGCTT
gtgccagaaaggttggggac

SEQ ID NO: 11294 - DNA, 20 bp, Artificial Sequence
  Description of Artificial Sequence: Synthetic oligonucleotide
  Target: SCNA; (-) strand; PAM type: NNNNGHTT; PAM sequence: ATGTGCTT
agaatctaatgataaatgta

SEQ ID NO: 11295 - DNA, 20 bp, Artificial Sequence
  Description of Artificial Sequence: Synthetic oligonucleotide
  Target: SCNA; (-) strand; PAM type: NNNNGHTT; PAM sequence: ATTAGATT
cctgtcagctcagtggtggc

SEQ ID NO: 11296 - DNA, 20 bp, Artificial Sequence
  Description of Artificial Sequence: Synthetic oligonucleotide
  Target: SCNA; (-) strand; PAM type: NNNNGHTT; PAM sequence: AATGGCTT
tgcctaagcccctgttataa

SEQ ID NO: 11297 - DNA, 20 bp, Artificial Sequence
  Description of Artificial Sequence: Synthetic oligonucleotide
  Target: SCNA; (-) strand; PAM type: NNNNGHTT; PAM sequence: ATTGGTTT
tccttcagtagccatagggg

SEQ ID NO: 11298 - DNA, 20 bp, Artificial Sequence
  Description of Artificial Sequence: Synthetic oligonucleotide
  Target: SCNA; (-) strand; PAM type: NNNNGHTT; PAM sequence: AGGGGATT
agttgtccttcagtagccat

SEQ ID NO: 11299 - DNA, 20 bp, Artificial Sequence
  Description of Artificial Sequence: Synthetic oligonucleotide
  Target: SCNA; (-) strand; PAM type: NNNNGHTT; PAM sequence: TTTTGTTT
aattttatttacaaaacaga

SEQ ID NO: 11300 - DNA, 20 bp, Artificial Sequence
  Description of Artificial Sequence: Synthetic oligonucleotide
  Target: SCNA; (-) strand; PAM type: NNNNGHTT; PAM sequence: AACAGATT
tgaaaaaattttatttacaa

SEQ ID NO: 11301 - DNA, 20 bp, Artificial Sequence
  Description of Artificial Sequence: Synthetic oligonucleotide
  Target: SCNA; (-) strand; PAM type: NNNNGHTT; PAM sequence: ATTAGTTT
aatattattggaatatttgt

SEQ ID NO: 11302 - DNA, 20 bp, Artificial Sequence
  Description of Artificial Sequence: Synthetic oligonucleotide
  Target: SCNA; (-) strand; PAM type: NNNNGHTT; PAM sequence: CTGTGATT
gtgtgataagggactgtttt

SEQ ID NO: 11303 - DNA, 20 bp, Artificial Sequence
  Description of Artificial Sequence: Synthetic oligonucleotide
  Target: SCNA; (-) strand; PAM type: NNNNGHTT; PAM sequence: GACTGTTT
tttttatttgtgtgataagg

SEQ ID NO: 11304 - DNA, 20 bp, Artificial Sequence
  Description of Artificial Sequence: Synthetic oligonucleotide
  Target: SCNA; (-) strand; PAM type: NNNNGHTT; PAM sequence: AATTGCTT
tcaagaaactgaagcaggag

SEQ ID NO: 11305 - DNA, 20 bp, Artificial Sequence
  Description of Artificial Sequence: Synthetic oligonucleotide
  Target: SCNA; (-) strand; PAM type: NNNNGHTT; PAM sequence: TAGTGATT
aattacaacagaaagtggca

SEQ ID NO: 11306 - DNA, 20 bp, Artificial Sequence
  Description of Artificial Sequence: Synthetic oligonucleotide
  Target: SCNA; (-) strand; PAM type: NNNNGHTT; PAM sequence: GGTGGCTT
ggaagactggtatggacaca

SEQ ID NO: 11307 - DNA, 20 bp, Artificial Sequence
  Description of Artificial Sequence: Synthetic oligonucleotide
  Target: SCNA; (-) strand; PAM type: NNNNGHTT; PAM sequence: GATTGTTT
taaataaaagacaagttgct

SEQ ID NO: 11308 - DNA, 20 bp, Artificial Sequence
  Description of Artificial Sequence: Synthetic oligonucleotide
  Target: SCNA; (-) strand; PAM type: NNNNGHTT; PAM sequence: TGCTGATT
cccttaaataaaagacaagt

SEQ ID NO: 11309 - DNA, 20 bp, Artificial Sequence
  Description of Artificial Sequence: Synthetic oligonucleotide
  Target: SCNA; (-) strand; PAM type: NNNNGHTT; PAM sequence: TGCAGTTT
aaataattgaaagggtctgt

SEQ ID NO: 11310 - DNA, 20 bp, Artificial Sequence
  Description of Artificial Sequence: Synthetic oligonucleotide
  Target: SCNA; (-) strand; PAM type: NNNNGHTT; PAM sequence: CTGAGTTT
aggtcattccaaaaaagttt

SEQ ID NO: 11311 - DNA, 20 bp, Artificial Sequence
  Description of Artificial Sequence: Synthetic oligonucleotide
  Target: SCNA; (-) strand; PAM type: NNNNGHTT; PAM sequence: AAAAGTTT
aaatctgaaggtcattccaa

SEQ ID NO: 11312 - DNA, 20 bp, Artificial Sequence
  Description of Artificial Sequence: Synthetic oligonucleotide
  Target: SCNA; (-) strand; PAM type: NNNNGHTT; PAM sequence: CTATGATT
gcttttgcagccttggaaat

SEQ ID NO: 11313 - DNA, 20 bp, Artificial Sequence
  Description of Artificial Sequence: Synthetic oligonucleotide
  Target: SCNA; (-) strand; PAM type: NNNNGHTT; PAM sequence: TTTAGCTT
cattattatatgctttacta

SEQ ID NO: 11314 - DNA, 20 bp, Artificial Sequence
  Description of Artificial Sequence: Synthetic oligonucleotide
  Target: SCNA; (-) strand; PAM type: NNNNGHTT; PAM sequence: ATATGCTT
aaattaacgctaccattatt

SEQ ID NO: 11315 - DNA, 20 bp, Artificial Sequence
  Description of Artificial Sequence: Synthetic oligonucleotide
  Target: SCNA; (-) strand; PAM type: NNNNGHTT; PAM sequence: TCATGTTT
catgatatctacatctagac

SEQ ID NO: 11316 - DNA, 20 bp, Artificial Sequence
  Description of Artificial Sequence: Synthetic oligonucleotide
  Target: SCNA; (-) strand; PAM type: NNNNGHTT; PAM sequence: TTGTGATT
ttttttgctggcaatctgct

SEQ ID NO: 11317 - DNA, 20 bp, Artificial Sequence
  Description of Artificial Sequence: Synthetic oligonucleotide
  Target: SCNA; (-) strand; PAM type: NNNNGHTT; PAM sequence: ATCTGCTT
ggttcaattttttgctggca

SEQ ID NO: 11318 - DNA, 20 bp, Artificial Sequence
  Description of Artificial Sequence: Synthetic oligonucleotide
  Target: SCNA; (-) strand; PAM type: NNNNGHTT; PAM sequence: GCTAGTTT
aggaaatttttttaaataaa

SEQ ID NO: 11319 - DNA, 20 bp, Artificial Sequence
  Description of Artificial Sequence: Synthetic oligonucleotide
  Target: SCNA; (-) strand; PAM type: NNNNGHTT; PAM sequence: ATTTGTTT
agggatggggaaaagaattc

SEQ ID NO: 11320 - DNA, 20 bp, Artificial Sequence
  Description of Artificial Sequence: Synthetic oligonucleotide
  Target: SCNA; (-) strand; PAM type: NNNNGHTT; PAM sequence: AACTGATT
atatatcattaaaaggattt

SEQ ID NO: 11321 - DNA, 20 bp, Artificial Sequence
  Description of Artificial Sequence: Synthetic oligonucleotide
  Target: SCNA; (-) strand; PAM type: NNNNGHTT; PAM sequence: AAAGGATT
ctacttatgatatatcatta

SEQ ID NO: 11322 - DNA, 20 bp, Artificial Sequence
  Description of Artificial Sequence: Synthetic oligonucleotide
  Target: SCNA; (-) strand; PAM type: NNNNGHTT; PAM sequence: TTTTGATT
aactaaagacagaaagacta

SEQ ID NO: 11323 - DNA, 20 bp, Artificial Sequence
  Description of Artificial Sequence: Synthetic oligonucleotide
  Target: SCNA; (-) strand; PAM type: NNNNGHTT; PAM sequence: AATGGATT
gagcaaaggcatgctggaca

SEQ ID NO: 11324 - DNA, 20 bp, Artificial Sequence
  Description of Artificial Sequence: Synthetic oligonucleotide
  Target: SCNA; (-) strand; PAM type: NNNNGHTT; PAM sequence: TCTGGATT
agcattgtgcagattggttt

SEQ ID NO: 11325 - DNA, 20 bp, Artificial Sequence
  Description of Artificial Sequence: Synthetic oligonucleotide
  Target: SCNA; (-) strand; PAM type: NNNNGHTT; PAM sequence: ATTGGTTT
ccttctcaagcattgtgcag

SEQ ID NO: 11326 - DNA, 20 bp, Artificial Sequence
  Description of Artificial Sequence: Synthetic oligonucleotide
  Target: SCNA; (-) strand; PAM type: NNNNGHTT; PAM sequence: TGCAGATT
ctgcaccttctcaagcattg

SEQ ID NO: 11327 - DNA, 20 bp, Artificial Sequence
  Description of Artificial Sequence: Synthetic oligonucleotide
  Target: SCNA; (-) strand; PAM type: NNNNGHTT; PAM sequence: CTTGGTTT
aagttggattttgcctttag

SEQ ID NO: 11328 - DNA, 20 bp, Artificial Sequence
  Description of Artificial Sequence: Synthetic oligonucleotide
  Target: SCNA; (-) strand; PAM type: NNNNGHTT; PAM sequence: TTTAGCTT
aacaaaagttggattttgcc

SEQ ID NO: 11329 - DNA, 20 bp, Artificial Sequence
  Description of Artificial Sequence: Synthetic oligonucleotide
  Target: SCNA; (-) strand; PAM type: NNNNGHTT; PAM sequence: GTTGGATT
gcaggatgagttaaacaaaa

SEQ ID NO: 11330 - DNA, 20 bp, Artificial Sequence
  Description of Artificial Sequence: Synthetic oligonucleotide
  Target: SCNA; (-) strand; PAM type: NNNNGHTT; PAM sequence: TCATGCTT
aaagataaactagagaaatc

SEQ ID NO: 11331 - DNA, 20 bp, Artificial Sequence
  Description of Artificial Sequence: Synthetic oligonucleotide
  Target: SCNA; (-) strand; PAM type: NNNNGHTT; PAM sequence: TGGAGATT
gccagagactatattgacag

SEQ ID NO: 11332 - DNA, 20 bp, Artificial Sequence
  Description of Artificial Sequence: Synthetic oligonucleotide
  Target: SCNA; (-) strand; PAM type: NNNNGHTT; PAM sequence: AACAGCTT
gaatcaccacacattaactg

SEQ ID NO: 11333 - DNA, 20 bp, Artificial Sequence
  Description of Artificial Sequence: Synthetic oligonucleotide
  Target: SCNA; (-) strand; PAM type: NNNNGHTT; PAM sequence: CCACGATT
acatgcctatttcctatagg

SEQ ID NO: 11334 - DNA, 20 bp, Artificial Sequence
  Description of Artificial Sequence: Synthetic oligonucleotide
  Target: SCNA; (-) strand; PAM type: NNNNGHTT; PAM sequence: AATAGTTT
cttttttctttcattctgca

SEQ ID NO: 11335 - DNA, 20 bp, Artificial Sequence
  Description of Artificial Sequence: Synthetic oligonucleotide
  Target: SCNA; (-) strand; PAM type: NNNNGHTT; PAM sequence: TATTGTTT
ttccaggctttggccatgtg

SEQ ID NO: 11336 - DNA, 20 bp, Artificial Sequence
  Description of Artificial Sequence: Synthetic oligonucleotide
  Target: SCNA; (-) strand; PAM type: NNNNGHTT; PAM sequence: CCAGGCTT
tgggacactattactttttt

SEQ ID NO: 11337 - DNA, 20 bp, Artificial Sequence
  Description of Artificial Sequence: Synthetic oligonucleotide
  Target: SCNA; (-) strand; PAM type: NNNNGHTT; PAM sequence: TTTTGTTT
agcctgggaaaaggtgccaa

SEQ ID NO: 11338 - DNA, 20 bp, Artificial Sequence
  Description of Artificial Sequence: Synthetic oligonucleotide
  Target: SCNA; (-) strand; PAM type: NNNNGHTT; PAM sequence: CTATGCTT
tagccctgtttctctttaga

SEQ ID NO: 11339 - DNA, 20 bp, Artificial Sequence
  Description of Artificial Sequence: Synthetic oligonucleotide
  Target: SCNA; (-) strand; PAM type: NNNNGHTT; PAM sequence: CCCTGTTT
gaaagtgataccttccttag

SEQ ID NO: 11340 - DNA, 20 bp, Artificial Sequence
  Description of Artificial Sequence: Synthetic oligonucleotide
  Target: SCNA; (-) strand; PAM type: NNNNGHTT; PAM sequence: TTGAGATT
ttgtccagtgtagtgctgcc

SEQ ID NO: 11341 - DNA, 20 bp, Artificial Sequence
  Description of Artificial Sequence: Synthetic oligonucleotide
  Target: SCNA; (-) strand; PAM type: NNNNGHTT; PAM sequence: ATCTGTTT
gatccagcaaaacactcaat

SEQ ID NO: 11342 - DNA, 20 bp, Artificial Sequence
  Description of Artificial Sequence: Synthetic oligonucleotide
  Target: SCNA; (-) strand; PAM type: NNNNGHTT; PAM sequence: GGTGGATT
acattacataacctttcatt

SEQ ID NO: 11343 - DNA, 20 bp, Artificial Sequence
  Description of Artificial Sequence: Synthetic oligonucleotide
  Target: SCNA; (-) strand; PAM type: NNNNGHTT; PAM sequence: AGTTGATT
attgtcattagaaaaccctg

SEQ ID NO: 11344 - DNA, 20 bp, Artificial Sequence
  Description of Artificial Sequence: Synthetic oligonucleotide
  Target: SCNA; (-) strand; PAM type: NNNNGHTT; PAM sequence: TAAAGATT
tcaagcttatagaacattga

SEQ ID NO: 11345 - DNA, 20 bp, Artificial Sequence
  Description of Artificial Sequence: Synthetic oligonucleotide
  Target: SCNA; (-) strand; PAM type: NNNNGHTT; PAM sequence: TCAAGCTT
ataaattattaaattaattt

SEQ ID NO: 11346 - DNA, 20 bp, Artificial Sequence
  Description of Artificial Sequence: Synthetic oligonucleotide
  Target: SCNA; (-) strand; PAM type: NNNNGHTT; PAM sequence: TAAAGTTT
catgaatttcgttattaaat

SEQ ID NO: 11347 - DNA, 20 bp, Artificial Sequence
  Description of Artificial Sequence: Synthetic oligonucleotide
  Target: SCNA; (-) strand; PAM type: NNNNGHTT; PAM sequence: ATAAGTTT
catttacttctgaatgactg

SEQ ID NO: 11348 - DNA, 20 bp, Artificial Sequence
  Description of Artificial Sequence: Synthetic oligonucleotide
  Target: SCNA; (-) strand; PAM type: NNNNGHTT; PAM sequence: ATATGATT
gtttagtcacttaaaaagtg

SEQ ID NO: 11349 - DNA, 20 bp, Artificial Sequence
  Description of Artificial Sequence: Synthetic oligonucleotide
  Target: SCNA; (-) strand; PAM type: NNNNGHTT; PAM sequence: AGTAGTTT
agttaactaaatgtttcttt

SEQ ID NO: 11350 - DNA, 20 bp, Artificial Sequence
  Description of Artificial Sequence: Synthetic oligonucleotide
  Target: SCNA; (-) strand; PAM type: NNNNGHTT; PAM sequence: AAATGTTT
acaatattttagagttaact

SEQ ID NO: 11351 - DNA, 20 bp, Artificial Sequence
  Description of Artificial Sequence: Synthetic oligonucleotide
  Target: SCNA; (-) strand; PAM type: NNNNGHTT; PAM sequence: AATTGTTT
tataatttttcaagtaaaca

SEQ ID NO: 11352 - DNA, 20 bp, Artificial Sequence
  Description of Artificial Sequence: Synthetic oligonucleotide
  Target: SCNA; (-) strand; PAM type: NNNNGHTT; PAM sequence: TTATGTTT
agtgtgggaagaacttttat

SEQ ID NO: 11353 - DNA, 20 bp, Artificial Sequence
  Description of Artificial Sequence: Synthetic oligonucleotide
  Target: SCNA; (-) strand; PAM type: NNNNGHTT; PAM sequence: GTCTGATT
cgttataacctcttccgtgt

SEQ ID NO: 11354 - DNA, 20 bp, Artificial Sequence
  Description of Artificial Sequence: Synthetic oligonucleotide
  Target: SCNA; (-) strand; PAM type: NNNNGHTT; PAM sequence: TAAGGATT
actaagtgtggatctgtttt

SEQ ID NO: 11355 - DNA, 20 bp, Artificial Sequence
  Description of Artificial Sequence: Synthetic oligonucleotide
  Target: SCNA; (-) strand; PAM type: NNNNGHTT; PAM sequence: ATCTGTTT
tgaagaatgactaagtgtgg

SEQ ID NO: 11356 - DNA, 20 bp, Artificial Sequence
  Description of Artificial Sequence: Synthetic oligonucleotide
  Target: SCNA; (-) strand; PAM type: NNNNGHTT; PAM sequence: AAGAGATT
tctgatgacatacataggag

SEQ ID NO: 11357 - DNA, 20 bp, Artificial Sequence
  Description of Artificial Sequence: Synthetic oligonucleotide
  Target: SCNA; (-) strand; PAM type: NNNNGHTT; PAM sequence: TTGGGTTT
gggactagtgaaaacacatt

SEQ ID NO: 11358 - DNA, 20 bp, Artificial Sequence
  Description of Artificial Sequence: Synthetic oligonucleotide
  Target: SCNA; (-) strand; PAM type: NNNNGHTT; PAM sequence: GACAGTTT
gtgggcaatgtggatgtgtt

SEQ ID NO: 11359 - DNA, 20 bp, Artificial Sequence
  Description of Artificial Sequence: Synthetic oligonucleotide
  Target: SCNA; (-) strand; PAM type: NNNNGHTT; PAM sequence: TCTAGTTT
ttgtccaagtagtgaatgac

SEQ ID NO: 11360 - DNA, 20 bp, Artificial Sequence
  Description of Artificial Sequence: Synthetic oligonucleotide
  Target: SCNA; (-) strand; PAM type: NNNNGHTT; PAM sequence: ATTTGTTT
ttctgtcattgcacttgcca

SEQ ID NO: 11361 - DNA, 20 bp, Artificial Sequence
  Description of Artificial Sequence: Synthetic oligonucleotide
  Target: SCNA; (-) strand; PAM type: NNNNGHTT; PAM sequence: CCTGGCTT
cctgaatcttctcttccttc

SEQ ID NO: 11362 - DNA, 20 bp, Artificial Sequence
  Description of Artificial Sequence: Synthetic oligonucleotide
  Target: SCNA; (-) strand; PAM type: NNNNGHTT; PAM sequence: TTCTGCTT
tgctgtctccttttccttct

SEQ ID NO: 11363 - DNA, 20 bp, Artificial Sequence
  Description of Artificial Sequence: Synthetic oligonucleotide
  Target: SCNA; (-) strand; PAM type: NNNNGHTT; PAM sequence: CCAGGCTT
atttctcttggcagtattac

SEQ ID NO: 11364 - DNA, 20 bp, Artificial Sequence
  Description of Artificial Sequence: Synthetic oligonucleotide
  Target: SCNA; (-) strand; PAM type: NNNNGHTT; PAM sequence: TGTAGATT
tgatgggaattgcatttaat

SEQ ID NO: 11365 - DNA, 20 bp, Artificial Sequence
  Description of Artificial Sequence: Synthetic oligonucleotide
  Target: SCNA; (-) strand; PAM type: NNNNGHTT; PAM sequence: GATTGTTT
tggttccatatgaattttag

SEQ ID NO: 11366 - DNA, 20 bp, Artificial Sequence
  Description of Artificial Sequence: Synthetic oligonucleotide
  Target: SCNA; (-) strand; PAM type: NNNNGHTT; PAM sequence: TTAGGATT
tttttggttccatatgaatt

SEQ ID NO: 11367 - DNA, 20 bp, Artificial Sequence
  Description of Artificial Sequence: Synthetic oligonucleotide
  Target: SCNA; (-) strand; PAM type: NNNNGHTT; PAM sequence: TCTTGCTT
agatttttctttttgcttaa

SEQ ID NO: 11368 - DNA, 20 bp, Artificial Sequence
  Description of Artificial Sequence: Synthetic oligonucleotide
  Target: SCNA; (-) strand; PAM type: NNNNGHTT; PAM sequence: TTTTGCTT
tgatgcctccagatttttct

SEQ ID NO: 11369 - DNA, 20 bp, Artificial Sequence
  Description of Artificial Sequence: Synthetic oligonucleotide
  Target: SCNA; (-) strand; PAM type: NNNNGHTT; PAM sequence: TCCAGATT
aaagcaggtaatgtgatgcc

SEQ ID NO: 11370 - DNA, 20 bp, Artificial Sequence
  Description of Artificial Sequence: Synthetic oligonucleotide
  Target: SCNA; (-) strand; PAM type: NNNNGHTT; PAM sequence: TATAGTTT
tggtgactatggccttatag

SEQ ID NO: 11371 - DNA, 20 bp, Artificial Sequence
  Description of Artificial Sequence: Synthetic oligonucleotide
  Target: SCNA; (-) strand; PAM type: NNNNGHTT; PAM sequence: TGCTGTTT
ctatttttataccagtgcca

SEQ ID NO: 11372 - DNA, 20 bp, Artificial Sequence
  Description of Artificial Sequence: Synthetic oligonucleotide
  Target: SCNA; (-) strand; PAM type: NNNNGHTT; PAM sequence: TTCTGTTT
gtttatttctaggttctcta

SEQ ID NO: 11373 - DNA, 20 bp, Artificial Sequence
  Description of Artificial Sequence: Synthetic oligonucleotide
  Target: SCNA; (-) strand; PAM type: NNNNGHTT; PAM sequence: TTGGGTTT
gatcacttggctgttagcat

SEQ ID NO: 11374 - DNA, 20 bp, Artificial Sequence
  Description of Artificial Sequence: Synthetic oligonucleotide
  Target: SCNA; (-) strand; PAM type: NNNNGHTT; PAM sequence: ATTTGCTT
tttccccactttatgttttt

SEQ ID NO: 11375 - DNA, 20 bp, Artificial Sequence
  Description of Artificial Sequence: Synthetic oligonucleotide
  Target: SCNA; (-) strand; PAM type: NNNNGHTT; PAM sequence: TTATGTTT
tcaaatgtcctttccccact

SEQ ID NO: 11376 - DNA, 20 bp, Artificial Sequence
  Description of Artificial Sequence: Synthetic oligonucleotide
  Target: SCNA; (-) strand; PAM type: NNNNGHTT; PAM sequence: AATAGTTT
ttttgccactaatatttaaa

SEQ ID NO: 11377 - DNA, 20 bp, Artificial Sequence
  Description of Artificial Sequence: Synthetic oligonucleotide
  Target: SCNA; (-) strand; PAM type: NNNNGHTT; PAM sequence: AATAGTTT
tttattataaccaatctcac

SEQ ID NO: 11378 - DNA, 20 bp, Artificial Sequence
  Description of Artificial Sequence: Synthetic oligonucleotide
  Target: SCNA; (-) strand; PAM type: NNNNGHTT; PAM sequence: GGTAGTTT
gcttcatgggaaatcagcag

SEQ ID NO: 11379 - DNA, 20 bp, Artificial Sequence
  Description of Artificial Sequence: Synthetic oligonucleotide
  Target: SCNA; (-) strand; PAM type: NNNNGHTT; PAM sequence: TTAAGCTT
ttctgaaatgtgagagaggg

SEQ ID NO: 11380 - DNA, 20 bp, Artificial Sequence
  Description of Artificial Sequence: Synthetic oligonucleotide
  Target: SCNA; (-) strand; PAM type: NNNNGHTT; PAM sequence: AGAGGCTT
ttgaagctgtttaagtatgt

SEQ ID NO: 11381 - DNA, 20 bp, Artificial Sequence
  Description of Artificial Sequence: Synthetic oligonucleotide
  Target: SCNA; (-) strand; PAM type: NNNNGHTT; PAM sequence: AGCTGTTT
tgtctcagataggcatttga

SEQ ID NO: 11382 - DNA, 20 bp, Artificial Sequence
  Description of Artificial Sequence: Synthetic oligonucleotide
  Target: SCNA; (-) strand; PAM type: NNNNGHTT; PAM sequence: GTTGGCTT
gggaactaggtctctggaat

SEQ ID NO: 11383 - DNA, 20 bp, Artificial Sequence
  Description of Artificial Sequence: Synthetic oligonucleotide
  Target: SCNA; (-) strand; PAM type: NNNNGHTT; PAM sequence: AGAAGATT
acagatacttgtcattgagg

SEQ ID NO: 11384 - DNA, 20 bp, Artificial Sequence
  Description of Artificial Sequence: Synthetic oligonucleotide
  Target: SCNA; (-) strand; PAM type: NNNNGHTT; PAM sequence: GTGGGTTT
ggaaggccatcaaggagtag

SEQ ID NO: 11385 - DNA, 20 bp, Artificial Sequence
  Description of Artificial Sequence: Synthetic oligonucleotide
  Target: SCNA; (-) strand; PAM type: NNNNGHTT; PAM sequence: AGAGGTTT
tcagtaaaactagaggcacc

SEQ ID NO: 11386 - DNA, 20 bp, Artificial Sequence
  Description of Artificial Sequence: Synthetic oligonucleotide
  Target: SCNA; (-) strand; PAM type: NNNNGHTT; PAM sequence: CCAAGATT
gcaacagaaagaaccaggaa

SEQ ID NO: 11387 - DNA, 20 bp, Artificial Sequence
  Description of Artificial Sequence: Synthetic oligonucleotide
  Target: SCNA; (-) strand; PAM type: NNNNGHTT; PAM sequence: CTTGGCTT
ttgttatcttagtgtttggg

SEQ ID NO: 11388 - DNA, 20 bp, Artificial Sequence
  Description of Artificial Sequence: Synthetic oligonucleotide
  Target: SCNA; (-) strand; PAM type: NNNNGHTT; PAM sequence: TTGGGCTT
agcacttgttatcttagtgt

SEQ ID NO: 11389 - DNA, 20 bp, Artificial Sequence
  Description of Artificial Sequence: Synthetic oligonucleotide
  Target: SCNA; (-) strand; PAM type: NNNNGHTT; PAM sequence: TAGTGTTT
atctttagcacttgttatct

SEQ ID NO: 11390 - DNA, 20 bp, Artificial Sequence
  Description of Artificial Sequence: Synthetic oligonucleotide
  Target: SCNA; (-) strand; PAM type: NNNNGHTT; PAM sequence: TCTTGATT
tagcaagactaggaagtttt

SEQ ID NO: 11391 - DNA, 20 bp, Artificial Sequence
  Description of Artificial Sequence: Synthetic oligonucleotide
  Target: SCNA; (-) strand; PAM type: NNNNGHTT; PAM sequence: GGAAGTTT
ctagatctctagcaagacta

SEQ ID NO: 11392 - DNA, 20 bp, Artificial Sequence
  Description of Artificial Sequence: Synthetic oligonucleotide
  Target: SCNA; (-) strand; PAM type: NNNNGHTT; PAM sequence: TTGTGCTT
ttgaatttcccaggtgttct

SEQ ID NO: 11393 - DNA, 20 bp, Artificial Sequence
  Description of Artificial Sequence: Synthetic oligonucleotide
  Target: SCNA; (-) strand; PAM type: NNNNGHTT; PAM sequence: TTAAGATT
atgcttttgcctcacagctc

SEQ ID NO: 11394 - DNA, 20 bp, Artificial Sequence
  Description of Artificial Sequence: Synthetic oligonucleotide
  Target: SCNA; (-) strand; PAM type: NNNNGHTT; PAM sequence: TGATGCTT
gttttcttttataggatacc

SEQ ID NO: 11395 - DNA, 20 bp, Artificial Sequence
  Description of Artificial Sequence: Synthetic oligonucleotide
  Target: SCNA; (-) strand; PAM type: NNNNGHTT; PAM sequence: CTATGTTT
agaaatctgctattaatctg

SEQ ID NO: 11396 - DNA, 20 bp, Artificial Sequence
  Description of Artificial Sequence: Synthetic oligonucleotide
  Target: SCNA; (-) strand; PAM type: NNNNGHTT; PAM sequence: CAGGGTTT
gcccaatctcttctggctag

SEQ ID NO: 11397 - DNA, 20 bp, Artificial Sequence
  Description of Artificial Sequence: Synthetic oligonucleotide
  Target: SCNA; (-) strand; PAM type: NNNNGHTT; PAM sequence: TTTTGTTT
aaattcttggctgataatta

SEQ ID NO: 11398 - DNA, 20 bp, Artificial Sequence
  Description of Artificial Sequence: Synthetic oligonucleotide
  Target: SCNA; (-) strand; PAM type: NNNNGHTT; PAM sequence: CTTAGTTT
tctctctttcatttatgaag

SEQ ID NO: 11399 - DNA, 20 bp, Artificial Sequence
  Description of Artificial Sequence: Synthetic oligonucleotide
  Target: SCNA; (-) strand; PAM type: NNNNGHTT; PAM sequence: TGAAGCTT
ctttatctctctttcattta

SEQ ID NO: 11400 - DNA, 20 bp, Artificial Sequence
  Description of Artificial Sequence: Synthetic oligonucleotide
  Target: SCNA; (-) strand; PAM type: NNNNGHTT; PAM sequence: ATTTGTTT
ttggtagtggcaaattcagc

SEQ ID NO: 11401 - DNA, 20 bp, Artificial Sequence
  Description of Artificial Sequence: Synthetic oligonucleotide
  Target: SCNA; (-) strand; PAM type: NNNNGHTT; PAM sequence: GCTGGCTT
tccttttagcatttctcagt

SEQ ID NO: 11402 - DNA, 20 bp, Artificial Sequence
  Description of Artificial Sequence: Synthetic oligonucleotide
  Target: SCNA; (-) strand; PAM type: NNNNGHTT; PAM sequence: TCAAGATT
gatgtattcaagttactgtt

SEQ ID NO: 11403 - DNA, 20 bp, Artificial Sequence
  Description of Artificial Sequence: Synthetic oligonucleotide
  Target: SCNA; (-) strand; PAM type: NNNNGHTT; PAM sequence: TACTGTTT
ctattttgatgtattcaagt

SEQ ID NO: 11404 - DNA, 20 bp, Artificial Sequence
  Description of Artificial Sequence: Synthetic oligonucleotide
  Target: SCNA; (-) strand; PAM type: NNNNGHTT; PAM sequence: TTATGCTT
ttttatgggtcctgttaaat

SEQ ID NO: 11405 - DNA, 20 bp, Artificial Sequence
  Description of Artificial Sequence: Synthetic oligonucleotide
  Target: SCNA; (-) strand; PAM type: NNNNGHTT; PAM sequence: GATGGATT
aagacagcagatacttggtt

SEQ ID NO: 11406 - DNA, 20 bp, Artificial Sequence
  Description of Artificial Sequence: Synthetic oligonucleotide
  Target: SCNA; (-) strand; PAM type: NNNNGHTT; PAM sequence: TTAAGTTT
tctttttccacccctttacc

SEQ ID NO: 11407 - DNA, 20 bp, Artificial Sequence
  Description of Artificial Sequence: Synthetic oligonucleotide
  Target: SCNA; (-) strand; PAM type: NNNNGHTT; PAM sequence: TTGAGTTT
aattgctattctttctcact

SEQ ID NO: 11408 - DNA, 20 bp, Artificial Sequence
  Description of Artificial Sequence: Synthetic oligonucleotide
  Target: SCNA; (-) strand; PAM type: NNNNGHTT; PAM sequence: TGTTGCTT
tctttgtcttttttaattgt

SEQ ID NO: 11409 - DNA, 20 bp, Artificial Sequence
  Description of Artificial Sequence: Synthetic oligonucleotide
  Target: SCNA; (-) strand; PAM type: NNNNGHTT; PAM sequence: TTAAGATT
agtgttagatgcatatacac

SEQ ID NO: 11410 - DNA, 20 bp, Artificial Sequence
  Description of Artificial Sequence: Synthetic oligonucleotide
  Target: SCNA; (-) strand; PAM type: NNNNGHTT; PAM sequence: GATTGCTT
catgtcttaggtctagtagt

SEQ ID NO: 11411 - DNA, 20 bp, Artificial Sequence
  Description of Artificial Sequence: Synthetic oligonucleotide
  Target: SCNA; (-) strand; PAM type: NNNNGHTT; PAM sequence: TAGTGATT
atctcatgtcttaggtctag

SEQ ID NO: 11412 - DNA, 20 bp, Artificial Sequence
  Description of Artificial Sequence: Synthetic oligonucleotide
  Target: SCNA; (-) strand; PAM type: NNNNGHTT; PAM sequence: CCATGTTT
ttctagggtatagtttaagt

SEQ ID NO: 11413 - DNA, 20 bp, Artificial Sequence
  Description of Artificial Sequence: Synthetic oligonucleotide
  Target: SCNA; (-) strand; PAM type: NNNNGHTT; PAM sequence: TATAGTTT
taagtccatttgttctaggg

SEQ ID NO: 11414 - DNA, 20 bp, Artificial Sequence
  Description of Artificial Sequence: Synthetic oligonucleotide
  Target: SCNA; (-) strand; PAM type: NNNNGHTT; PAM sequence: GTAGGATT
gaaaaggatgtagttgttgg

SEQ ID NO: 11415 - DNA, 20 bp, Artificial Sequence
  Description of Artificial Sequence: Synthetic oligonucleotide
  Target: SCNA; (-) strand; PAM type: NNNNGHTT; PAM sequence: TTTTGATT
tgagagaatacttgatataa

SEQ ID NO: 11416 - DNA, 20 bp, Artificial Sequence
  Description of Artificial Sequence: Synthetic oligonucleotide
  Target: SCNA; (-) strand; PAM type: NNNNGHTT; PAM sequence: GAGGGTTT
ccatgtatttgtatagtttt

SEQ ID NO: 11417 - DNA, 20 bp, Artificial Sequence
  Description of Artificial Sequence: Synthetic oligonucleotide
  Target: SCNA; (-) strand; PAM type: NNNNGHTT; PAM sequence: TATAGTTT
attcgatttccatgtatttg

SEQ ID NO: 11418 - DNA, 20 bp, Artificial Sequence
  Description of Artificial Sequence: Synthetic oligonucleotide
  Target: SCNA; (-) strand; PAM type: NNNNGHTT; PAM sequence: ATTCGATT
agatcattcaggagcagatt

SEQ ID NO: 11419 - DNA, 20 bp, Artificial Sequence
  Description of Artificial Sequence: Synthetic oligonucleotide
  Target: SCNA; (-) strand; PAM type: NNNNGHTT; PAM sequence: AGCAGATT
tgacccaaagatcattcagg

SEQ ID NO: 11420 - DNA, 20 bp, Artificial Sequence
  Description of Artificial Sequence: Synthetic oligonucleotide
  Target: SCNA; (-) strand; PAM type: NNNNGHTT; PAM sequence: TCTTGATT
atttttaaaattttcatctt

SEQ ID NO: 11421 - DNA, 20 bp, Artificial Sequence
  Description of Artificial Sequence: Synthetic oligonucleotide
  Target: SCNA; (-) strand; PAM type: NNNNGHTT; PAM sequence: ATAGGTTT
gctgtatcccagaggttgtg

SEQ ID NO: 11422 - DNA, 20 bp, Artificial Sequence
  Description of Artificial Sequence: Synthetic oligonucleotide
  Target: SCNA; (-) strand; PAM type: NNNNGHTT; PAM sequence: CATGGCTT
gctatgaactttgctcttaa

SEQ ID NO: 11423 - DNA, 20 bp, Artificial Sequence
  Description of Artificial Sequence: Synthetic oligonucleotide
  Target: SCNA; (-) strand; PAM type: NNNNGHTT; PAM sequence: CTCAGATT
ccagttcctagaggtgtaag

SEQ ID NO: 11424 - DNA, 20 bp, Artificial Sequence
  Description of Artificial Sequence: Synthetic oligonucleotide
  Target: SCNA; (-) strand; PAM type: NNNNGHTT; PAM sequence: TCTTGTTT
ctgggtttgggtttgctttg

SEQ ID NO: 11425 - DNA, 20 bp, Artificial Sequence
  Description of Artificial Sequence: Synthetic oligonucleotide
  Target: SCNA; (-) strand; PAM type: NNNNGHTT; PAM sequence: GTTTGCTT
ttttcttctgctgggtttgg

SEQ ID NO: 11426 - DNA, 20 bp, Artificial Sequence
  Description of Artificial Sequence: Synthetic oligonucleotide
  Target: SCNA; (-) strand; PAM type: NNNNGHTT; PAM sequence: TTGGGTTT
tttcttttcttctgctgggt

SEQ ID NO: 11427 - DNA, 20 bp, Artificial Sequence
  Description of Artificial Sequence: Synthetic oligonucleotide
  Target: SCNA; (-) strand; PAM type: NNNNGHTT; PAM sequence: CTGGGTTT
ttgttatttcttttcttctg

SEQ ID NO: 11428 - DNA, 20 bp, Artificial Sequence
  Description of Artificial Sequence: Synthetic oligonucleotide
  Target: SCNA; (-) strand; PAM type: NNNNGHTT; PAM sequence: CTGCGATT
tgccttggcctcccaaagtg

SEQ ID NO: 11429 - DNA, 20 bp, Artificial Sequence
  Description of Artificial Sequence: Synthetic oligonucleotide
  Target: SCNA; (-) strand; PAM type: NNNNGHTT; PAM sequence: CGGGGTTT
ttttgtatttttagtagaga

SEQ ID NO: 11430 - DNA, 20 bp, Artificial Sequence
  Description of Artificial Sequence: Synthetic oligonucleotide
  Target: SCNA; (-) strand; PAM type: NNNNGHTT; PAM sequence: AAGTGATT
aacatctgccttccaggttc

SEQ ID NO: 11431 - DNA, 20 bp, Artificial Sequence
  Description of Artificial Sequence: Synthetic oligonucleotide
  Target: SCNA; (-) strand; PAM type: NNNNGHTT; PAM sequence: TTGTGTTT
tttatcttttgtattgtatt

SEQ ID NO: 11432 - DNA, 20 bp, Artificial Sequence
  Description of Artificial Sequence: Synthetic oligonucleotide
  Target: SCNA; (-) strand; PAM type: NNNNGHTT; PAM sequence: TTTTGTTT
atcttttcaaagaagcaggt

SEQ ID NO: 11433 - DNA, 20 bp, Artificial Sequence
  Description of Artificial Sequence: Synthetic oligonucleotide
  Target: SCNA; (-) strand; PAM type: NNNNGHTT; PAM sequence: GCAGGTTT
ttgtttatcttttcaaagaa

SEQ ID NO: 11434 - DNA, 20 bp, Artificial Sequence
  Description of Artificial Sequence: Synthetic oligonucleotide
  Target: SCNA; (-) strand; PAM type: NNNNGHTT; PAM sequence: TTTTGTTT
tcttgccaatggtctattga

SEQ ID NO: 11435 - DNA, 20 bp, Artificial Sequence
  Description of Artificial Sequence: Synthetic oligonucleotide
  Target: SCNA; (-) strand; PAM type: NNNNGHTT; PAM sequence: TATTGATT
ggttaatcttgccaatggtc

SEQ ID NO: 11436 - DNA, 20 bp, Artificial Sequence
  Description of Artificial Sequence: Synthetic oligonucleotide
  Target: SCNA; (-) strand; PAM type: NNNNGHTT; PAM sequence: TCTTGTTT
gagcttgtttagatcttttt

SEQ ID NO: 11437 - DNA, 20 bp, Artificial Sequence
  Description of Artificial Sequence: Synthetic oligonucleotide
  Target: SCNA; (-) strand; PAM type: NNNNGHTT; PAM sequence: GCTTGTTT
cccatttcatttctaattga

SEQ ID NO: 11438 - DNA, 20 bp, Artificial Sequence
  Description of Artificial Sequence: Synthetic oligonucleotide
  Target: SCNA; (-) strand; PAM type: NNNNGHTT; PAM sequence: TTGAGCTT
atctcccatttcatttctaa

SEQ ID NO: 11439 - DNA, 20 bp, Artificial Sequence
  Description of Artificial Sequence: Synthetic oligonucleotide
  Target: SCNA; (-) strand; PAM type: NNNNGHTT; PAM sequence: TCTAGTTT
tgtccatctcttcttggttt

SEQ ID NO: 11440 - DNA, 20 bp, Artificial Sequence
  Description of Artificial Sequence: Synthetic oligonucleotide
  Target: SCNA; (-) strand; PAM type: NNNNGHTT; PAM sequence: CTTGGTTT
caggaatttgtccatctctt

SEQ ID NO: 11441 - DNA, 20 bp, Artificial Sequence
  Description of Artificial Sequence: Synthetic oligonucleotide
  Target: SCNA; (-) strand; PAM type: NNNNGHTT; PAM sequence: GGAGGTTT
tttcttcctgttttaatcta

SEQ ID NO: 11442 - DNA, 20 bp, Artificial Sequence
  Description of Artificial Sequence: Synthetic oligonucleotide
  Target: SCNA; (-) strand; PAM type: NNNNGHTT; PAM sequence: TCCTGTTT
tgttaataatttctatttct

SEQ ID NO: 11443 - DNA, 20 bp, Artificial Sequence
  Description of Artificial Sequence: Synthetic oligonucleotide
  Target: SCNA; (-) strand; PAM type: NNNNGHTT; PAM sequence: TATTGTTT
tttcctgacattttttctat

SEQ ID NO: 11444 - DNA, 20 bp, Artificial Sequence
  Description of Artificial Sequence: Synthetic oligonucleotide
  Target: SCNA; (-) strand; PAM type: NNNNGHTT; PAM sequence: TTTTGTTT
tccatctggtcctagacttt

SEQ ID NO: 11445 - DNA, 20 bp, Artificial Sequence
  Description of Artificial Sequence: Synthetic oligonucleotide
  Target: SCNA; (-) strand; PAM type: NNNNGHTT; PAM sequence: AACAGTTT
cctctgtctctatcttttgg

SEQ ID NO: 11446 - DNA, 20 bp, Artificial Sequence
  Description of Artificial Sequence: Synthetic oligonucleotide
  Target: SCNA; (-) strand; PAM type: NNNNGHTT; PAM sequence: GGAGGATT
ggcttcatagaatgatttag

SEQ ID NO: 11447 - DNA, 20 bp, Artificial Sequence
  Description of Artificial Sequence: Synthetic oligonucleotide
  Target: SCNA; (-) strand; PAM type: NNNNGHTT; PAM sequence: GAATGATT
agggtaatactggcttcata

SEQ ID NO: 11448 - DNA, 20 bp, Artificial Sequence
  Description of Artificial Sequence: Synthetic oligonucleotide
  Target: SCNA; (-) strand; PAM type: NNNNGHTT; PAM sequence: ACTGGCTT
ggttttgatattagggtaat

SEQ ID NO: 11449 - DNA, 20 bp, Artificial Sequence
  Description of Artificial Sequence: Synthetic oligonucleotide
  Target: SCNA; (-) strand; PAM type: NNNNGHTT; PAM sequence: TCTGGTTT
ctttttttgttatgtccttt

SEQ ID NO: 11450 - DNA, 20 bp, Artificial Sequence
  Description of Artificial Sequence: Synthetic oligonucleotide
  Target: SCNA; (-) strand; PAM type: NNNNGHTT; PAM sequence: TGTAGTTT
gttcatcagggatattggtc

SEQ ID NO: 11451 - DNA, 20 bp, Artificial Sequence
  Description of Artificial Sequence: Synthetic oligonucleotide
  Target: SCNA; (-) strand; PAM type: NNNNGHTT; PAM sequence: TGAGGATT
tcatttagctagtattttat

SEQ ID NO: 11452 - DNA, 20 bp, Artificial Sequence
  Description of Artificial Sequence: Synthetic oligonucleotide
  Target: SCNA; (-) strand; PAM type: NNNNGHTT; PAM sequence: GCTGGATT
gattatctttttgatatgct

SEQ ID NO: 11453 - DNA, 20 bp, Artificial Sequence
  Description of Artificial Sequence: Synthetic oligonucleotide
  Target: SCNA; (-) strand; PAM type: NNNNGHTT; PAM sequence: GGTGGATT
tatgaaacccacctgatcat

SEQ ID NO: 11454 - DNA, 20 bp, Artificial Sequence
  Description of Artificial Sequence: Synthetic oligonucleotide
  Target: SCNA; (-) strand; PAM type: NNNNGHTT; PAM sequence: TCCTGCTT
catatgatttttgtttttac

SEQ ID NO: 11455 - DNA, 20 bp, Artificial Sequence
  Description of Artificial Sequence: Synthetic oligonucleotide
  Target: SCNA; (-) strand; PAM type: NNNNGHTT; PAM sequence: TTTTGTTT
tattgagtttatcatatgat

SEQ ID NO: 11456 - DNA, 20 bp, Artificial Sequence
  Description of Artificial Sequence: Synthetic oligonucleotide
  Target: SCNA; (-) strand; PAM type: NNNNGHTT; PAM sequence: ATATGATT
ctgcatctattgagtttatc

SEQ ID NO: 11457 - DNA, 20 bp, Artificial Sequence
  Description of Artificial Sequence: Synthetic oligonucleotide
  Target: SCNA; (-) strand; PAM type: NNNNGHTT; PAM sequence: TTGAGTTT
aaatgctttttctgcatcta

SEQ ID NO: 11458 - DNA, 20 bp, Artificial Sequence
  Description of Artificial Sequence: Synthetic oligonucleotide
  Target: SCNA; (-) strand; PAM type: NNNNGHTT; PAM sequence: AAATGCTT
aagcaatactgaattttgtc

SEQ ID NO: 11459 - DNA, 20 bp, Artificial Sequence
  Description of Artificial Sequence: Synthetic oligonucleotide
  Target: SCNA; (-) strand; PAM type: NNNNGHTT; PAM sequence: GAGGGTTT
tcttatatgccagttttgct

SEQ ID NO: 11460 - DNA, 20 bp, Artificial Sequence
  Description of Artificial Sequence: Synthetic oligonucleotide
  Target: SCNA; (-) strand; PAM type: NNNNGHTT; PAM sequence: GCCAGTTT
ttaaggtgtgtatcttatat

SEQ ID NO: 11461 - DNA, 20 bp, Artificial Sequence
  Description of Artificial Sequence: Synthetic oligonucleotide
  Target: SCNA; (-) strand; PAM type: NNNNGHTT; PAM sequence: AGTGGCTT
ttggctgtgggtttgtcata

SEQ ID NO: 11462 - DNA, 20 bp, Artificial Sequence
  Description of Artificial Sequence: Synthetic oligonucleotide
  Target: SCNA; (-) strand; PAM type: NNNNGHTT; PAM sequence: GTGGGTTT
cgttcaatataatgttggct

SEQ ID NO: 11463 - DNA, 20 bp, Artificial Sequence
  Description of Artificial Sequence: Synthetic oligonucleotide
  Target: SCNA; (-) strand; PAM type: NNNNGHTT; PAM sequence: AAATGCTT
cttattccagttctcggggg

SEQ ID NO: 11464 - DNA, 20 bp, Artificial Sequence
  Description of Artificial Sequence: Synthetic oligonucleotide
  Target: SCNA; (-) strand; PAM type: NNNNGHTT; PAM sequence: CTAGGATT
ctcttgtctgattgctctgg

SEQ ID NO: 11465 - DNA, 20 bp, Artificial Sequence
  Description of Artificial Sequence: Synthetic oligonucleotide
  Target: SCNA; (-) strand; PAM type: NNNNGHTT; PAM sequence: GTCTGATT
gctctttatttctttctctt

SEQ ID NO: 11466 - DNA, 20 bp, Artificial Sequence
  Description of Artificial Sequence: Synthetic oligonucleotide
  Target: SCNA; (-) strand; PAM type: NNNNGHTT; PAM sequence: AGCAGTTT
aacagtttgacttcctcttt

SEQ ID NO: 11467 - DNA, 20 bp, Artificial Sequence
  Description of Artificial Sequence: Synthetic oligonucleotide
  Target: SCNA; (-) strand; PAM type: NNNNGHTT; PAM sequence: AACAGTTT
acatatcatcggcaaagagc

SEQ ID NO: 11468 - DNA, 20 bp, Artificial Sequence
  Description of Artificial Sequence: Synthetic oligonucleotide
  Target: SCNA; (-) strand; PAM type: NNNNGHTT; PAM sequence: TTAGGTTT
ggagctttttggatgagtct

SEQ ID NO: 11469 - DNA, 20 bp, Artificial Sequence
  Description of Artificial Sequence: Synthetic oligonucleotide
  Target: SCNA; (-) strand; PAM type: NNNNGHTT; PAM sequence: AGGAGCTT
tgaattaacttatcagatct

SEQ ID NO: 11470 - DNA, 20 bp, Artificial Sequence
  Description of Artificial Sequence: Synthetic oligonucleotide
  Target: SCNA; (-) strand; PAM type: NNNNGHTT; PAM sequence: CATTGATT
cactggtactgatttgtgta

SEQ ID NO: 11471 - DNA, 20 bp, Artificial Sequence
  Description of Artificial Sequence: Synthetic oligonucleotide
  Target: SCNA; (-) strand; PAM type: NNNNGHTT; PAM sequence: TACTGATT
ctgttggtgtatagcactgg

SEQ ID NO: 11472 - DNA, 20 bp, Artificial Sequence
  Description of Artificial Sequence: Synthetic oligonucleotide
  Target: SCNA; (-) strand; PAM type: NNNNGHTT; PAM sequence: CTCAGTTT
ctcaagttcttaatttgatt

SEQ ID NO: 11473 - DNA, 20 bp, Artificial Sequence
  Description of Artificial Sequence: Synthetic oligonucleotide
  Target: SCNA; (-) strand; PAM type: NNNNGHTT; PAM sequence: ATTTGATT
taaaaaggctcaagttctta

SEQ ID NO: 11474 - DNA, 20 bp, Artificial Sequence
  Description of Artificial Sequence: Synthetic oligonucleotide
  Target: SCNA; (-) strand; PAM type: NNNNGHTT; PAM sequence: TGTAGTTT
gatttctttcagcaatattt

SEQ ID NO: 11475 - DNA, 20 bp, Artificial Sequence
  Description of Artificial Sequence: Synthetic oligonucleotide
  Target: SCNA; (-) strand; PAM type: NNNNGHTT; PAM sequence: CTGTGATT
ttttcattagtttctgttgt

SEQ ID NO: 11476 - DNA, 20 bp, Artificial Sequence
  Description of Artificial Sequence: Synthetic oligonucleotide
  Target: SCNA; (-) strand; PAM type: NNNNGHTT; PAM sequence: ATTAGTTT
tgaataagggatgtgttttc

SEQ ID NO: 11477 - DNA, 20 bp, Artificial Sequence
  Description of Artificial Sequence: Synthetic oligonucleotide
  Target: SCNA; (-) strand; PAM type: NNNNGHTT; PAM sequence: ATGTGTTT
tgccaatccatgaataaggg

SEQ ID NO: 11478 - DNA, 20 bp, Artificial Sequence
  Description of Artificial Sequence: Synthetic oligonucleotide
  Target: SCNA; (-) strand; PAM type: NNNNGHTT; PAM sequence: TATTGATT
cagtgtgctcattttcacaa

SEQ ID NO: 11479 - DNA, 20 bp, Artificial Sequence
  Description of Artificial Sequence: Synthetic oligonucleotide
  Target: SCNA; (-) strand; PAM type: NNNNGHTT; PAM sequence: GATTGTTT
ggagtcgcattgaatttata

SEQ ID NO: 11480 - DNA, 20 bp, Artificial Sequence
  Description of Artificial Sequence: Synthetic oligonucleotide
  Target: SCNA; (-) strand; PAM type: NNNNGHTT; PAM sequence: TATAGATT
gatgggagtcgcattgaatt

SEQ ID NO: 11481 - DNA, 20 bp, Artificial Sequence
  Description of Artificial Sequence: Synthetic oligonucleotide
  Target: SCNA; (-) strand; PAM type: NNNNGHTT; PAM sequence: TTAAGATT
tgttttgttccatgtgaatt

SEQ ID NO: 11482 - DNA, 20 bp, Artificial Sequence
  Description of Artificial Sequence: Synthetic oligonucleotide
  Target: SCNA; (-) strand; PAM type: NNNNGHTT; PAM sequence: TGTTGTTT
cttgctttggctgtatgggc

SEQ ID NO: 11483 - DNA, 20 bp, Artificial Sequence
  Description of Artificial Sequence: Synthetic oligonucleotide
  Target: SCNA; (-) strand; PAM type: NNNNGHTT; PAM sequence: TCTTGCTT
atttgttattttttgcttag

SEQ ID NO: 11484 - DNA, 20 bp, Artificial Sequence
  Description of Artificial Sequence: Synthetic oligonucleotide
  Target: SCNA; (-) strand; PAM type: NNNNGHTT; PAM sequence: TTTTGCTT
gtgcctccagatttgttatt

SEQ ID NO: 11485 - DNA, 20 bp, Artificial Sequence
  Description of Artificial Sequence: Synthetic oligonucleotide
  Target: SCNA; (-) strand; PAM type: NNNNGHTT; PAM sequence: TCCAGATT
aagttgggtaatctagtgcc

SEQ ID NO: 11486 - DNA, 20 bp, Artificial Sequence
  Description of Artificial Sequence: Synthetic oligonucleotide
  Target: SCNA; (-) strand; PAM type: NNNNGHTT; PAM sequence: TATAGTTT
tcctaactatagtcttgtag

SEQ ID NO: 11487 - DNA, 20 bp, Artificial Sequence
  Description of Artificial Sequence: Synthetic oligonucleotide
  Target: SCNA; (-) strand; PAM type: NNNNGHTT; PAM sequence: TGCTGTTT
ctatttttatagtagtacca

SEQ ID NO: 11488 - DNA, 20 bp, Artificial Sequence
  Description of Artificial Sequence: Synthetic oligonucleotide
  Target: SCNA; (-) strand; PAM type: NNNNGHTT; PAM sequence: TCTGGATT
tgtaagtatttagctttatt

SEQ ID NO: 11489 - DNA, 20 bp, Artificial Sequence
  Description of Artificial Sequence: Synthetic oligonucleotide
  Target: SCNA; (-) strand; PAM type: NNNNGHTT; PAM sequence: TTTAGCTT
agatcagttggctgtaagta

SEQ ID NO: 11490 - DNA, 20 bp, Artificial Sequence
  Description of Artificial Sequence: Synthetic oligonucleotide
  Target: SCNA; (-) strand; PAM type: NNNNGHTT; PAM sequence: GTTTGCTT
tttccccaccttatgttttt

SEQ ID NO: 11491 - DNA, 20 bp, Artificial Sequence
  Description of Artificial Sequence: Synthetic oligonucleotide
  Target: SCNA; (-) strand; PAM type: NNNNGHTT; PAM sequence: TTTTGTTT
gtcctttccccaccttatgt

SEQ ID NO: 11492 - DNA, 20 bp, Artificial Sequence
  Description of Artificial Sequence: Synthetic oligonucleotide
  Target: SCNA; (-) strand; PAM type: NNNNGHTT; PAM sequence: TTATGTTT
taggatgtcctttccccacc

SEQ ID NO: 11493 - DNA, 20 bp, Artificial Sequence
  Description of Artificial Sequence: Synthetic oligonucleotide
  Target: SCNA; (-) strand; PAM type: NNNNGHTT; PAM sequence: TGTGGCTT
tccagcttcattcttctaca

SEQ ID NO: 11494 - DNA, 20 bp, Artificial Sequence
  Description of Artificial Sequence: Synthetic oligonucleotide
  Target: SCNA; (-) strand; PAM type: NNNNGHTT; PAM sequence: TCCAGCTT
tataagttgagagatgagga

SEQ ID NO: 11495 - DNA, 20 bp, Artificial Sequence
  Description of Artificial Sequence: Synthetic oligonucleotide
  Target: SCNA; (-) strand; PAM type: NNNNGHTT; PAM sequence: AGTGGATT
taagtctttgatccatcttg

SEQ ID NO: 11496 - DNA, 20 bp, Artificial Sequence
  Description of Artificial Sequence: Synthetic oligonucleotide
  Target: SCNA; (-) strand; PAM type: NNNNGHTT; PAM sequence: CTTAGATT
taatttttaaggttttgggt

SEQ ID NO: 11497 - DNA, 20 bp, Artificial Sequence
  Description of Artificial Sequence: Synthetic oligonucleotide
  Target: SCNA; (-) strand; PAM type: NNNNGHTT; PAM sequence: TAAGGTTT
atgttatcttctataatttt

SEQ ID NO: 11498 - DNA, 20 bp, Artificial Sequence
  Description of Artificial Sequence: Synthetic oligonucleotide
  Target: SCNA; (-) strand; PAM type: NNNNGHTT; PAM sequence: AAGAGTTT
ttgcttaagccagtgtctag

SEQ ID NO: 11499 - DNA, 20 bp, Artificial Sequence
  Description of Artificial Sequence: Synthetic oligonucleotide
  Target: SCNA; (-) strand; PAM type: NNNNGHTT; PAM sequence: CTTTGCTT
tggtttcttggtcatgaact

SEQ ID NO: 11500 - DNA, 20 bp, Artificial Sequence
  Description of Artificial Sequence: Synthetic oligonucleotide
  Target: SCNA; (-) strand; PAM type: NNNNGHTT; PAM sequence: TTTGGTTT
ttgttgttgttgcatttgct

SEQ ID NO: 11501 - DNA, 20 bp, Artificial Sequence
  Description of Artificial Sequence: Synthetic oligonucleotide
  Target: SCNA; (-) strand; PAM type: NNNNGHTT; PAM sequence: ATTTGCTT
atcttttttgttgttgttgc

SEQ ID NO: 11502 - DNA, 20 bp, Artificial Sequence
  Description of Artificial Sequence: Synthetic oligonucleotide
  Target: SCNA; (-) strand; PAM type: NNNNGHTT; PAM sequence: TATAGTTT
cttttgctgtgcagaagctt

SEQ ID NO: 11503 - DNA, 20 bp, Artificial Sequence
  Description of Artificial Sequence: Synthetic oligonucleotide
  Target: SCNA; (-) strand; PAM type: NNNNGHTT; PAM sequence: AGAAGCTT
gattatttcttttgctgtgc

SEQ ID NO: 11504 - DNA, 20 bp, Artificial Sequence
  Description of Artificial Sequence: Synthetic oligonucleotide
  Target: SCNA; (-) strand; PAM type: NNNNGHTT; PAM sequence: TGATGATT
tgtgggttgtctgtttactc

SEQ ID NO: 11505 - DNA, 20 bp, Artificial Sequence
  Description of Artificial Sequence: Synthetic oligonucleotide
  Target: SCNA; (-) strand; PAM type: NNNNGHTT; PAM sequence: GTCTGTTT
tttctcccattctgtgggtt

SEQ ID NO: 11506 - DNA, 20 bp, Artificial Sequence
  Description of Artificial Sequence: Synthetic oligonucleotide
  Target: SCNA; (-) strand; PAM type: NNNNGHTT; PAM sequence: GATAGTTT
tattagtcctttgtcagatg

SEQ ID NO: 11507 - DNA, 20 bp, Artificial Sequence
  Description of Artificial Sequence: Synthetic oligonucleotide
  Target: SCNA; (-) strand; PAM type: NNNNGHTT; PAM sequence: TGTAGATT
actgatttgtttgagttcct

SEQ ID NO: 11508 - DNA, 20 bp, Artificial Sequence
  Description of Artificial Sequence: Synthetic oligonucleotide
  Target: SCNA; (-) strand; PAM type: NNNNGHTT; PAM sequence: ATTTGTTT
ttatttgttttttcttactg

SEQ ID NO: 11509 - DNA, 20 bp, Artificial Sequence
  Description of Artificial Sequence: Synthetic oligonucleotide
  Target: SCNA; (-) strand; PAM type: NNNNGHTT; PAM sequence: TACTGATT
taggattatttgttttttct

SEQ ID NO: 11510 - DNA, 20 bp, Artificial Sequence
  Description of Artificial Sequence: Synthetic oligonucleotide
  Target: SCNA; (-) strand; PAM type: NNNNGHTT; PAM sequence: ATTTGTTT
gcccactttttgataggatt

SEQ ID NO: 11511 - DNA, 20 bp, Artificial Sequence
  Description of Artificial Sequence: Synthetic oligonucleotide
  Target: SCNA; (-) strand; PAM type: NNNNGHTT; PAM sequence: ATAGGATT
tgtccttagcccactttttg

SEQ ID NO: 11512 - DNA, 20 bp, Artificial Sequence
  Description of Artificial Sequence: Synthetic oligonucleotide
  Target: SCNA; (-) strand; PAM type: NNNNGHTT; PAM sequence: GGCTGTTT
cattttttcatatgtttgtt

SEQ ID NO: 11513 - DNA, 20 bp, Artificial Sequence
  Description of Artificial Sequence: Synthetic oligonucleotide
  Target: SCNA; (-) strand; PAM type: NNNNGHTT; PAM sequence: ATATGTTT
aagatgttgagcattttttc

SEQ ID NO: 11514 - DNA, 20 bp, Artificial Sequence
  Description of Artificial Sequence: Synthetic oligonucleotide
  Target: SCNA; (-) strand; PAM type: NNNNGHTT; PAM sequence: TTTTGATT
aaggtggtatcacattgtgg

SEQ ID NO: 11515 - DNA, 20 bp, Artificial Sequence
  Description of Artificial Sequence: Synthetic oligonucleotide
  Target: SCNA; (-) strand; PAM type: NNNNGHTT; PAM sequence: TGTGGTTT
ggagtaaggtggtatcacat

SEQ ID NO: 11516 - DNA, 20 bp, Artificial Sequence
  Description of Artificial Sequence: Synthetic oligonucleotide
  Target: SCNA; (-) strand; PAM type: NNNNGHTT; PAM sequence: CAACGTTT
cctttttaccacttccatgc

SEQ ID NO: 11517 - DNA, 20 bp, Artificial Sequence
  Description of Artificial Sequence: Synthetic oligonucleotide
  Target: SCNA; (-) strand; PAM type: NNNNGHTT; PAM sequence: ACTAGTTT
aacttttccatggtggttgt

SEQ ID NO: 11518 - DNA, 20 bp, Artificial Sequence
  Description of Artificial Sequence: Synthetic oligonucleotide
  Target: SCNA; (-) strand; PAM type: NNNNGHTT; PAM sequence: AAATGATT
aggagtgggatcgctggaac

SEQ ID NO: 11519 - DNA, 20 bp, Artificial Sequence
  Description of Artificial Sequence: Synthetic oligonucleotide
  Target: SCNA; (-) strand; PAM type: NNNNGHTT; PAM sequence: CTATGCTT
tagcatccacacacaccccc

SEQ ID NO: 11520 - DNA, 20 bp, Artificial Sequence
  Description of Artificial Sequence: Synthetic oligonucleotide
  Target: SCNA; (-) strand; PAM type: NNNNGHTT; PAM sequence: TTTGGTTT
ataaatgagaacatgtaatg

SEQ ID NO: 11521 - DNA, 20 bp, Artificial Sequence
  Description of Artificial Sequence: Synthetic oligonucleotide
  Target: SCNA; (-) strand; PAM type: NNNNGHTT; PAM sequence: TAATGTTT
cagttataaatgagaacatg

SEQ ID NO: 11522 - DNA, 20 bp, Artificial Sequence
  Description of Artificial Sequence: Synthetic oligonucleotide
  Target: SCNA; (-) strand; PAM type: NNNNGHTT; PAM sequence: TTTAGTTT
attcttatgcctttgcatcc

SEQ ID NO: 11523 - DNA, 20 bp, Artificial Sequence
  Description of Artificial Sequence: Synthetic oligonucleotide
  Target: SCNA; (-) strand; PAM type: NNNNGHTT; PAM sequence: CTGAGATT
aagttgtttaggtatgattt

SEQ ID NO: 11524 - DNA, 20 bp, Artificial Sequence
  Description of Artificial Sequence: Synthetic oligonucleotide
  Target: SCNA; (-) strand; PAM type: NNNNGHTT; PAM sequence: GTATGATT
tatatggagaagttgtttag

SEQ ID NO: 11525 - DNA, 20 bp, Artificial Sequence
  Description of Artificial Sequence: Synthetic oligonucleotide
  Target: SCNA; (-) strand; PAM type: NNNNGHTT; PAM sequence: AGTTGTTT
ggtttttggttatatggaga

SEQ ID NO: 11526 - DNA, 20 bp, Artificial Sequence
  Description of Artificial Sequence: Synthetic oligonucleotide
  Target: SCNA; (-) strand; PAM type: NNNNGHTT; PAM sequence: GGTGGTTT
tcaatagcttttggggagca

SEQ ID NO: 11527 - DNA, 20 bp, Artificial Sequence
  Description of Artificial Sequence: Synthetic oligonucleotide
  Target: SCNA; (-) strand; PAM type: NNNNGHTT; PAM sequence: AATAGCTT
aactttattattattatttc

SEQ ID NO: 11528 - DNA, 20 bp, Artificial Sequence
  Description of Artificial Sequence: Synthetic oligonucleotide
  Target: SCNA; (-) strand; PAM type: NNNNGHTT; PAM sequence: TTCTGATT
tggtgttatagacaataatt

SEQ ID NO: 11529 - DNA, 20 bp, Artificial Sequence
  Description of Artificial Sequence: Synthetic oligonucleotide
  Target: SCNA; (-) strand; PAM type: NNNNGHTT; PAM sequence: GATCGCTT
attaattaattataacaaca

SEQ ID NO: 11530 - DNA, 20 bp, Artificial Sequence
  Description of Artificial Sequence: Synthetic oligonucleotide
  Target: SCNA; (-) strand; PAM type: NNNNGHTT; PAM sequence: CAGGGCTT
ggcctctactcagttgcctt

SEQ ID NO: 11531 - DNA, 20 bp, Artificial Sequence
  Description of Artificial Sequence: Synthetic oligonucleotide
  Target: SCNA; (-) strand; PAM type: NNNNGHTT; PAM sequence: TGAGGCTT
tatatgtgaggccctatata

SEQ ID NO: 11532 - DNA, 20 bp, Artificial Sequence
  Description of Artificial Sequence: Synthetic oligonucleotide
  Target: SCNA; (-) strand; PAM type: NNNNGHTT; PAM sequence: AGTGGATT
taatcgatgaagtgatttgt

SEQ ID NO: 11533 - DNA, 20 bp, Artificial Sequence
  Description of Artificial Sequence: Synthetic oligonucleotide
  Target: SCNA; (-) strand; PAM type: NNNNGHTT; PAM sequence: AAGTGATT
agccagttgattaatcgatg

SEQ ID NO: 11534 - DNA, 20 bp, Artificial Sequence
  Description of Artificial Sequence: Synthetic oligonucleotide
  Target: SCNA; (-) strand; PAM type: NNNNGHTT; PAM sequence: AGTTGATT
ccttgttacaaagtacagcc

SEQ ID NO: 11535 - DNA, 20 bp, Artificial Sequence
  Description of Artificial Sequence: Synthetic oligonucleotide
  Target: SCNA; (-) strand; PAM type: NNNNGHTT; PAM sequence: CACAGATT
aaaacttccagttgcatttt

SEQ ID NO: 11536 - DNA, 20 bp, Artificial Sequence
  Description of Artificial Sequence: Synthetic oligonucleotide
  Target: SCNA; (-) strand; PAM type: NNNNGHTT; PAM sequence: AAAGGTTT
acgggaaactatgggtctat

SEQ ID NO: 11537 - DNA, 20 bp, Artificial Sequence
  Description of Artificial Sequence: Synthetic oligonucleotide
  Target: SCNA; (-) strand; PAM type: NNNNGHTT; PAM sequence: CACAGCTT
acacctacctgtcatgtgac

SEQ ID NO: 11538 - DNA, 20 bp, Artificial Sequence
  Description of Artificial Sequence: Synthetic oligonucleotide
  Target: SCNA; (-) strand; PAM type: NNNNGHTT; PAM sequence: TTTTGTTT
gcactcatttggacacttag

SEQ ID NO: 11539 - DNA, 20 bp, Artificial Sequence
  Description of Artificial Sequence: Synthetic oligonucleotide
  Target: SCNA; (-) strand; PAM type: NNNNGHTT; PAM sequence: CTTAGTTT
attctgcactcatttggaca

SEQ ID NO: 11540 - DNA, 20 bp, Artificial Sequence
  Description of Artificial Sequence: Synthetic oligonucleotide
  Target: SCNA; (-) strand; PAM type: NNNNGHTT; PAM sequence: TCAGGATT
agagtaaatgtgagctgcaa

SEQ ID NO: 11541 - DNA, 20 bp, Artificial Sequence
  Description of Artificial Sequence: Synthetic oligonucleotide
  Target: SCNA; (-) strand; PAM type: NNNNGHTT; PAM sequence: TCTTGTTT
gagaatataagaagagggcc

SEQ ID NO: 11542 - DNA, 20 bp, Artificial Sequence
  Description of Artificial Sequence: Synthetic oligonucleotide
  Target: SCNA; (-) strand; PAM type: NNNNGHTT; PAM sequence: AAAAGTTT
ttatttagaaatgaaatata

SEQ ID NO: 11543 - DNA, 20 bp, Artificial Sequence
  Description of Artificial Sequence: Synthetic oligonucleotide
  Target: SCNA; (-) strand; PAM type: NNNNGHTT; PAM sequence: AGTGGTTT
ttgtttttatgcaagttcta

SEQ ID NO: 11544 - DNA, 20 bp, Artificial Sequence
  Description of Artificial Sequence: Synthetic oligonucleotide
  Target: SCNA; (-) strand; PAM type: NNNNGHTT; PAM sequence: ACTTGTTT
aactgacattttgcttctta

SEQ ID NO: 11545 - DNA, 20 bp, Artificial Sequence
  Description of Artificial Sequence: Synthetic oligonucleotide
  Target: SCNA; (-) strand; PAM type: NNNNGHTT; PAM sequence: TTTTGCTT
gagaaaggaactaactgaca

SEQ ID NO: 11546 - DNA, 20 bp, Artificial Sequence
  Description of Artificial Sequence: Synthetic oligonucleotide
  Target: SCNA; (-) strand; PAM type: NNNNGHTT; PAM sequence: TCATGATT
tcattaaccttgaatcactg

SEQ ID NO: 11547 - DNA, 20 bp, Artificial Sequence
  Description of Artificial Sequence: Synthetic oligonucleotide
  Target: SCNA; (-) strand; PAM type: NNNNGHTT; PAM sequence: ACAAGTTT
aatggcttttaaaaattaaa

SEQ ID NO: 11548 - DNA, 20 bp, Artificial Sequence
  Description of Artificial Sequence: Synthetic oligonucleotide
  Target: SCNA; (-) strand; PAM type: NNNNGHTT; PAM sequence: AATGGCTT
gcagggagttttcagttagt

SEQ ID NO: 11549 - DNA, 20 bp, Artificial Sequence
  Description of Artificial Sequence: Synthetic oligonucleotide
  Target: SCNA; (-) strand; PAM type: NNNNGHTT; PAM sequence: GGGAGTTT
gtgttggttcagctaaagca

SEQ ID NO: 11550 - DNA, 20 bp, Artificial Sequence
  Description of Artificial Sequence: Synthetic oligonucleotide
  Target: SCNA; (-) strand; PAM type: NNNNGHTT; PAM sequence: TGGGGTTT
ttcacaaaggagtaaccacc

SEQ ID NO: 11551 - DNA, 20 bp, Artificial Sequence
  Description of Artificial Sequence: Synthetic oligonucleotide
  Target: SCNA; (-) strand; PAM type: NNNNGHTT; PAM sequence: GGATGCTT
ggaaacaaccaatttcatgt

SEQ ID NO: 11552 - DNA, 20 bp, Artificial Sequence
  Description of Artificial Sequence: Synthetic oligonucleotide
  Target: SCNA; (-) strand; PAM type: NNNNGHTT; PAM sequence: ACATGTTT
tcagacattagtataacaaa

SEQ ID NO: 11553 - DNA, 20 bp, Artificial Sequence
  Description of Artificial Sequence: Synthetic oligonucleotide
  Target: SCNA; (-) strand; PAM type: NNNNGHTT; PAM sequence: AAATGATT
acttggaagtctatggaata

SEQ ID NO: 11554 - DNA, 20 bp, Artificial Sequence
  Description of Artificial Sequence: Synthetic oligonucleotide
  Target: SCNA; (-) strand; PAM type: NNNNGHTT; PAM sequence: ACCCGATT
caagcctaactttttgtctt

SEQ ID NO: 11555 - DNA, 20 bp, Artificial Sequence
  Description of Artificial Sequence: Synthetic oligonucleotide
  Target: SCNA; (-) strand; PAM type: NNNNGHTT; PAM sequence: AGAAGTTT
aatacattaaatagaggaat

SEQ ID NO: 11556 - DNA, 20 bp, Artificial Sequence
  Description of Artificial Sequence: Synthetic oligonucleotide
  Target: SCNA; (-) strand; PAM type: NNNNGHTT; PAM sequence: GTGTGTTT
catcaagattcaaaagaaat

SEQ ID NO: 11557 - DNA, 20 bp, Artificial Sequence
  Description of Artificial Sequence: Synthetic oligonucleotide
  Target: SCNA; (-) strand; PAM type: NNNNGHTT; PAM sequence: TCAAGATT
atccgtcaaaaatatataca

SEQ ID NO: 11558 - DNA, 20 bp, Artificial Sequence
  Description of Artificial Sequence: Synthetic oligonucleotide
  Target: SCNA; (-) strand; PAM type: NNNNGHTT; PAM sequence: GCTTGATT
gtaaaagcaaaatttgtttg

SEQ ID NO: 11559 - DNA, 20 bp, Artificial Sequence
  Description of Artificial Sequence: Synthetic oligonucleotide
  Target: SCNA; (-) strand; PAM type: NNNNGHTT; PAM sequence: TTTGGCTT
gggtgtaaaagcaaaatttg

SEQ ID NO: 11560 - DNA, 20 bp, Artificial Sequence
  Description of Artificial Sequence: Synthetic oligonucleotide
  Target: SCNA; (-) strand; PAM type: NNNNGHTT; PAM sequence: ATTTGTTT
aaatcgggtgtaaaagcaaa

SEQ ID NO: 11561 - DNA, 20 bp, Artificial Sequence
  Description of Artificial Sequence: Synthetic oligonucleotide
  Target: SCNA; (-) strand; PAM type: NNNNGHTT; PAM sequence: TGTAGATT
tactattgaaaagccgtgtc

SEQ ID NO: 11562 - DNA, 20 bp, Artificial Sequence
  Description of Artificial Sequence: Synthetic oligonucleotide
  Target: SCNA; (-) strand; PAM type: NNNNGHTT; PAM sequence: TGTAGCTT
ataaaacatttttcccaaaa

SEQ ID NO: 11563 - DNA, 20 bp, Artificial Sequence
  Description of Artificial Sequence: Synthetic oligonucleotide
  Target: SCNA; (-) strand; PAM type: NNNNGHTT; PAM sequence: GACTGTTT
tagagaaggtagagataatg

SEQ ID NO: 11564 - DNA, 20 bp, Artificial Sequence
  Description of Artificial Sequence: Synthetic oligonucleotide
  Target: SCNA; (-) strand; PAM type: NNNNGHTT; PAM sequence: TTTTGTTT
atttaatggcaaatattatg

SEQ ID NO: 11565 - DNA, 20 bp, Artificial Sequence
  Description of Artificial Sequence: Synthetic oligonucleotide
  Target: SCNA; (-) strand; PAM type: NNNNGHTT; PAM sequence: TTATGTTT
ttaagatttaatggcaaata

SEQ ID NO: 11566 - DNA, 20 bp, Artificial Sequence
  Description of Artificial Sequence: Synthetic oligonucleotide
  Target: SCNA; (-) strand; PAM type: NNNNGHTT; PAM sequence: TTAAGATT
tccatttagttgtcatactt

SEQ ID NO: 11567 - DNA, 20 bp, Artificial Sequence
  Description of Artificial Sequence: Synthetic oligonucleotide
  Target: SCNA; (-) strand; PAM type: NNNNGHTT; PAM sequence: TAGAGTTT
atcataaatgagtttctcaa

SEQ ID NO: 11568 - DNA, 20 bp, Artificial Sequence
  Description of Artificial Sequence: Synthetic oligonucleotide
  Target: SCNA; (-) strand; PAM type: NNNNGHTT; PAM sequence: ATGAGTTT
gaaaaaactcatgatcataa

SEQ ID NO: 11569 - DNA, 20 bp, Artificial Sequence
  Description of Artificial Sequence: Synthetic oligonucleotide
  Target: SCNA; (-) strand; PAM type: NNNNGHTT; PAM sequence: CAGTGTTT
tctctccctattctccaggc

SEQ ID NO: 11570 - DNA, 20 bp, Artificial Sequence
  Description of Artificial Sequence: Synthetic oligonucleotide
  Target: SCNA; (-) strand; PAM type: NNNNGHTT; PAM sequence: AAATGTTT
acagaaatatttatacttta

SEQ ID NO: 11571 - DNA, 20 bp, Artificial Sequence
  Description of Artificial Sequence: Synthetic oligonucleotide
  Target: SCNA; (-) strand; PAM type: NNNNGHTT; PAM sequence: CTTTGCTT
atagatcattctcttggtca

SEQ ID NO: 11572 - DNA, 20 bp, Artificial Sequence
  Description of Artificial Sequence: Synthetic oligonucleotide
  Target: SCNA; (-) strand; PAM type: NNNNGHTT; PAM sequence: TCAGGTTT
tctgacttctttgttgtact

SEQ ID NO: 11573 - DNA, 20 bp, Artificial Sequence
  Description of Artificial Sequence: Synthetic oligonucleotide
  Target: SCNA; (-) strand; PAM type: NNNNGHTT; PAM sequence: TTTAGTTT
actgttgagttgccctcaga

SEQ ID NO: 11574 - DNA, 20 bp, Artificial Sequence
  Description of Artificial Sequence: Synthetic oligonucleotide
  Target: SCNA; (-) strand; PAM type: NNNNGHTT; PAM sequence: CTCAGATT
ttgactactgttgagttgcc

SEQ ID NO: 11575 - DNA, 20 bp, Artificial Sequence
  Description of Artificial Sequence: Synthetic oligonucleotide
  Target: SCNA; (-) strand; PAM type: NNNNGHTT; PAM sequence: CATTGATT
catccatccacctattcatc

SEQ ID NO: 11576 - DNA, 20 bp, Artificial Sequence
  Description of Artificial Sequence: Synthetic oligonucleotide
  Target: SCNA; (-) strand; PAM type: NNNNGHTT; PAM sequence: GGCTGCTT
atagtattatctaagactca

SEQ ID NO: 11577 - DNA, 20 bp, Artificial Sequence
  Description of Artificial Sequence: Synthetic oligonucleotide
  Target: SCNA; (-) strand; PAM type: NNNNGHTT; PAM sequence: GTCTGTTT
ctcctagtgcctgtctttag

SEQ ID NO: 11578 - DNA, 20 bp, Artificial Sequence
  Description of Artificial Sequence: Synthetic oligonucleotide
  Target: SCNA; (-) strand; PAM type: NNNNGHTT; PAM sequence: CTGAGCTT
cctccttttattataacaat

SEQ ID NO: 11579 - DNA, 20 bp, Artificial Sequence
  Description of Artificial Sequence: Synthetic oligonucleotide
  Target: SCNA; (-) strand; PAM type: NNNNGHTT; PAM sequence: CTTTGTTT
aaattttcttcaacagggag

SEQ ID NO: 11580 - DNA, 20 bp, Artificial Sequence
  Description of Artificial Sequence: Synthetic oligonucleotide
  Target: SCNA; (-) strand; PAM type: NNNNGHTT; PAM sequence: GGGAGCTT
tgcaaaaattttcttcaaca

SEQ ID NO: 11581 - DNA, 20 bp, Artificial Sequence
  Description of Artificial Sequence: Synthetic oligonucleotide
  Target: SCNA; (-) strand; PAM type: NNNNGHTT; PAM sequence: TCAAGCTT
tataaatgtgtcctttcaag

SEQ ID NO: 11582 - DNA, 20 bp, Artificial Sequence
  Description of Artificial Sequence: Synthetic oligonucleotide
  Target: SCNA; (-) strand; PAM type: NNNNGHTT; PAM sequence: AGATGCTT
tctcatctcctttacctgac

SEQ ID NO: 11583 - DNA, 20 bp, Artificial Sequence
  Description of Artificial Sequence: Synthetic oligonucleotide
  Target: SCNA; (-) strand; PAM type: NNNNGHTT; PAM sequence: ATCTGTTT
tgatgatatctcctttcttc

SEQ ID NO: 11584 - DNA, 20 bp, Artificial Sequence
  Description of Artificial Sequence: Synthetic oligonucleotide
  Target: SCNA; (-) strand; PAM type: NNNNGHTT; PAM sequence: AAGAGTTT
aataaatattgctttttctt

SEQ ID NO: 11585 - DNA, 20 bp, Artificial Sequence
  Description of Artificial Sequence: Synthetic oligonucleotide
  Target: SCNA; (-) strand; PAM type: NNNNGHTT; PAM sequence: TATTGCTT
aggttgggcactagaataaa

SEQ ID NO: 11586 - DNA, 20 bp, Artificial Sequence
  Description of Artificial Sequence: Synthetic oligonucleotide
  Target: SCNA; (-) strand; PAM type: NNNNGHTT; PAM sequence: TGGAGTTT
ggaagctccaaaagcaccag

SEQ ID NO: 11587 - DNA, 20 bp, Artificial Sequence
  Description of Artificial Sequence: Synthetic oligonucleotide
  Target: SCNA; (-) strand; PAM type: NNNNGHTT; PAM sequence: CTCAGCTT
aaatgaatttctaagatctg

SEQ ID NO: 11588 - DNA, 20 bp, Artificial Sequence
  Description of Artificial Sequence: Synthetic oligonucleotide
  Target: SCNA; (-) strand; PAM type: NNNNGHTT; PAM sequence: ACTAGATT
tttactacaaaaggaaaata

SEQ ID NO: 11589 - DNA, 20 bp, Artificial Sequence
  Description of Artificial Sequence: Synthetic oligonucleotide
  Target: SCNA; (-) strand; PAM type: NNNNGHTT; PAM sequence: TGTAGATT
ctttaaggttaaatttttca

SEQ ID NO: 11590 - DNA, 20 bp, Artificial Sequence
  Description of Artificial Sequence: Synthetic oligonucleotide
  Target: SCNA; (-) strand; PAM type: NNNNGHTT; PAM sequence: TACCGATT
aataaacattgcttcataag

SEQ ID NO: 11591 - DNA, 20 bp, Artificial Sequence
  Description of Artificial Sequence: Synthetic oligonucleotide
  Target: SCNA; (-) strand; PAM type: NNNNGHTT; PAM sequence: CATTGCTT
cactatattagaagaataaa

SEQ ID NO: 11592 - DNA, 20 bp, Artificial Sequence
  Description of Artificial Sequence: Synthetic oligonucleotide
  Target: SCNA; (-) strand; PAM type: NNNNGHTT; PAM sequence: CTATGATT
tgccaccccatctcacaaac

SEQ ID NO: 11593 - DNA, 20 bp, Artificial Sequence
  Description of Artificial Sequence: Synthetic oligonucleotide
  Target: SCNA; (-) strand; PAM type: NNNNGHTT; PAM sequence: ATGAGATT
agcttggttctttaaaaaca

SEQ ID NO: 11594 - DNA, 20 bp, Artificial Sequence
  Description of Artificial Sequence: Synthetic oligonucleotide
  Target: SCNA; (-) strand; PAM type: NNNNGHTT; PAM sequence: AACAGCTT
cagtgttcttgctcatgaag

SEQ ID NO: 11595 - DNA, 20 bp, Artificial Sequence
  Description of Artificial Sequence: Synthetic oligonucleotide
  Target: SCNA; (-) strand; PAM type: NNNNGHTT; PAM sequence: AGTTGATT
ttattctaccttctggatgc

SEQ ID NO: 11596 - DNA, 20 bp, Artificial Sequence
  Description of Artificial Sequence: Synthetic oligonucleotide
  Target: SCNA; (-) strand; PAM type: NNNNGHTT; PAM sequence: TACAGTTT
aataaacctaactcatatgg

SEQ ID NO: 11597 - DNA, 20 bp, Artificial Sequence
  Description of Artificial Sequence: Synthetic oligonucleotide
  Target: SCNA; (-) strand; PAM type: NNNNGHTT; PAM sequence: TGAAGCTT
catgaacaaatggaattata

SEQ ID NO: 11598 - DNA, 20 bp, Artificial Sequence
  Description of Artificial Sequence: Synthetic oligonucleotide
  Target: SCNA; (-) strand; PAM type: NNNNGHTT; PAM sequence: GACTGATT
atttgaagctctttatagag

SEQ ID NO: 11599 - DNA, 20 bp, Artificial Sequence
  Description of Artificial Sequence: Synthetic oligonucleotide
  Target: SCNA; (-) strand; PAM type: NNNNGHTT; PAM sequence: TTAAGATT
tggatttcctctagtatttc

SEQ ID NO: 11600 - DNA, 20 bp, Artificial Sequence
  Description of Artificial Sequence: Synthetic oligonucleotide
  Target: SCNA; (-) strand; PAM type: NNNNGHTT; PAM sequence: ACTGGATT
tagttttaacttcagattgt

SEQ ID NO: 11601 - DNA, 20 bp, Artificial Sequence
  Description of Artificial Sequence: Synthetic oligonucleotide
  Target: SCNA; (-) strand; PAM type: NNNNGHTT; PAM sequence: TTCAGATT
taataatcattagttttaac

SEQ ID NO: 11602 - DNA, 20 bp, Artificial Sequence
  Description of Artificial Sequence: Synthetic oligonucleotide
  Target: SCNA; (-) strand; PAM type: NNNNGHTT; PAM sequence: ATTAGTTT
gtaacattcatttaataatc

SEQ ID NO: 11603 - DNA, 20 bp, Artificial Sequence
  Description of Artificial Sequence: Synthetic oligonucleotide
  Target: SCNA; (-) strand; PAM type: NNNNGHTT; PAM sequence: TGTAGTTT
atggaaatgtgaaagtactt

SEQ ID NO: 11604 - DNA, 20 bp, Artificial Sequence
  Description of Artificial Sequence: Synthetic oligonucleotide
  Target: SCNA; (-) strand; PAM type: NNNNGHTT; PAM sequence: ATATGCTT
gtatacaggtaagtaagtat

SEQ ID NO: 11605 - DNA, 20 bp, Artificial Sequence
  Description of Artificial Sequence: Synthetic oligonucleotide
  Target: SCNA; (-) strand; PAM type: NNNNGHTT; PAM sequence: GCAAGTTT
ttattcaccttcttgttttt

SEQ ID NO: 11606 - DNA, 20 bp, Artificial Sequence
  Description of Artificial Sequence: Synthetic oligonucleotide
  Target: SCNA; (-) strand; PAM type: NNNNGHTT; PAM sequence: TCTTGTTT
atttcgaagtttattcacct

SEQ ID NO: 11607 - DNA, 20 bp, Artificial Sequence
  Description of Artificial Sequence: Synthetic oligonucleotide
  Target: SCNA; (-) strand; PAM type: NNNNGHTT; PAM sequence: CGAAGTTT
ttagtgaactcttctcattt

SEQ ID NO: 11608 - DNA, 20 bp, Artificial Sequence
  Description of Artificial Sequence: Synthetic oligonucleotide
  Target: SCNA; (-) strand; PAM type: NNNNGHTT; PAM sequence: TTATGCTT
cctgatgcaaaataaatgca

SEQ ID NO: 11609 - DNA, 20 bp, Artificial Sequence
  Description of Artificial Sequence: Synthetic oligonucleotide
  Target: SCNA; (-) strand; PAM type: NNNNGHTT; PAM sequence: AAATGTTT
agatgtatgtcggctattaa

SEQ ID NO: 11610 - DNA, 20 bp, Artificial Sequence
  Description of Artificial Sequence: Synthetic oligonucleotide
  Target: SCNA; (-) strand; PAM type: NNNNGHTT; PAM sequence: GAAAGATT
cattttcatcaattcttttg

SEQ ID NO: 11611 - DNA, 20 bp, Artificial Sequence
  Description of Artificial Sequence: Synthetic oligonucleotide
  Target: SCNA; (-) strand; PAM type: NNNNGHTT; PAM sequence: CTTGGTTT
gatcatccttacatctaaat

SEQ ID NO: 11612 - DNA, 20 bp, Artificial Sequence
  Description of Artificial Sequence: Synthetic oligonucleotide
  Target: SCNA; (-) strand; PAM type: NNNNGHTT; PAM sequence: TTTTGCTT
atacaatgtttttctgtaat

SEQ ID NO: 11613 - DNA, 20 bp, Artificial Sequence
  Description of Artificial Sequence: Synthetic oligonucleotide
  Target: SCNA; (-) strand; PAM type: NNNNGHTT; PAM sequence: CAATGTTT
tcaacacctgtttttgaata

SEQ ID NO: 11614 - DNA, 20 bp, Artificial Sequence
  Description of Artificial Sequence: Synthetic oligonucleotide
  Target: SCNA; (-) strand; PAM type: NNNNGHTT; PAM sequence: ACCTGTTT
aagtaaataccttcatcaac

SEQ ID NO: 11615 - DNA, 20 bp, Artificial Sequence
  Description of Artificial Sequence: Synthetic oligonucleotide
  Target: SCNA; (-) strand; PAM type: NNNNGHTT; PAM sequence: TTCAGTTT
aatcatgtgatctctctggt

SEQ ID NO: 11616 - DNA, 20 bp, Artificial Sequence
  Description of Artificial Sequence: Synthetic oligonucleotide
  Target: SCNA; (-) strand; PAM type: NNNNGHTT; PAM sequence: TCTGGTTT
tgaccaaatcatgtgatctc

SEQ ID NO: 11617 - DNA, 20 bp, Artificial Sequence
  Description of Artificial Sequence: Synthetic oligonucleotide
  Target: SCNA; (-) strand; PAM type: NNNNGHTT; PAM sequence: CATGGATT
ctatgtctggagatagctaa

SEQ ID NO: 11618 - DNA, 20 bp, Artificial Sequence
  Description of Artificial Sequence: Synthetic oligonucleotide
  Target: SCNA; (-) strand; PAM type: NNNNGHTT; PAM sequence: GTGTGTTT
tagttggagtgtggtctgaa

SEQ ID NO: 11619 - DNA, 20 bp, Artificial Sequence
  Description of Artificial Sequence: Synthetic oligonucleotide
  Target: SCNA; (-) strand; PAM type: NNNNGHTT; PAM sequence: TCACGATT
taaaaggataatgattttag

SEQ ID NO: 11620 - DNA, 20 bp, Artificial Sequence
  Description of Artificial Sequence: Synthetic oligonucleotide
  Target: SCNA; (-) strand; PAM type: NNNNGHTT; PAM sequence: TAATGATT
tttctttcaatttaaaagga

SEQ ID NO: 11621 - DNA, 20 bp, Artificial Sequence
  Description of Artificial Sequence: Synthetic oligonucleotide
  Target: SCNA; (-) strand; PAM type: NNNNGHTT; PAM sequence: TACTGCTT
tgtgtggcaaaatagcaatc

SEQ ID NO: 11622 - DNA, 20 bp, Artificial Sequence
  Description of Artificial Sequence: Synthetic oligonucleotide
  Target: SCNA; (-) strand; PAM type: NNNNGHTT; PAM sequence: TTTAGTTT
gacattctacaagcatagtt

SEQ ID NO: 11623 - DNA, 20 bp, Artificial Sequence
  Description of Artificial Sequence: Synthetic oligonucleotide
  Target: SCNA; (-) strand; PAM type: NNNNGHTT; PAM sequence: CATAGTTT
taaatgagacattctacaag

SEQ ID NO: 11624 - DNA, 20 bp, Artificial Sequence
  Description of Artificial Sequence: Synthetic oligonucleotide
  Target: SCNA; (-) strand; PAM type: NNNNGHTT; PAM sequence: TTTGGCTT
agacagagtctcactctgtc

SEQ ID NO: 11625 - DNA, 20 bp, Artificial Sequence
  Description of Artificial Sequence: Synthetic oligonucleotide
  Target: SCNA; (-) strand; PAM type: NNNNGHTT; PAM sequence: CTTGGCTT
agcttgtgcaacagcttgat

SEQ ID NO: 11626 - DNA, 20 bp, Artificial Sequence
  Description of Artificial Sequence: Synthetic oligonucleotide
  Target: SCNA; (-) strand; PAM type: NNNNGHTT; PAM sequence: AACAGCTT
aattaatgtacagcttgtgc

SEQ ID NO: 11627 - DNA, 20 bp, Artificial Sequence
  Description of Artificial Sequence: Synthetic oligonucleotide
  Target: SCNA; (-) strand; PAM type: NNNNGHTT; PAM sequence: TACAGCTT
tttttttcaagtaattaatg

SEQ ID NO: 11628 - DNA, 20 bp, Artificial Sequence
  Description of Artificial Sequence: Synthetic oligonucleotide
  Target: SCNA; (-) strand; PAM type: NNNNGHTT; PAM sequence: CTTGGATT
ccactgttatccaaatgctc

SEQ ID NO: 11629 - DNA, 20 bp, Artificial Sequence
  Description of Artificial Sequence: Synthetic oligonucleotide
  Target: SCNA; (-) strand; PAM type: NNNNGHTT; PAM sequence: ATCTGTTT
atgcccaaaatgtgaagtcc

SEQ ID NO: 11630 - DNA, 20 bp, Artificial Sequence
  Description of Artificial Sequence: Synthetic oligonucleotide
  Target: SCNA; (-) strand; PAM type: NNNNGHTT; PAM sequence: CTGGGATT
atatttgcatggaagaatca

SEQ ID NO: 11631 - DNA, 20 bp, Artificial Sequence
  Description of Artificial Sequence: Synthetic oligonucleotide
  Target: SCNA; (-) strand; PAM type: NNNNGHTT; PAM sequence: GACTGTTT
atttatacttgctaagtaaa

SEQ ID NO: 11632 - DNA, 20 bp, Artificial Sequence
  Description of Artificial Sequence: Synthetic oligonucleotide
  Target: SCNA; (-) strand; PAM type: NNNNGHTT; PAM sequence: TTATGTTT
ttcttgtttagtcttatttt

SEQ ID NO: 11633 - DNA, 20 bp, Artificial Sequence
  Description of Artificial Sequence: Synthetic oligonucleotide
  Target: SCNA; (-) strand; PAM type: NNNNGHTT; PAM sequence: TCTTGTTT
tagttaaaaacagtttttat

SEQ ID NO: 11634 - DNA, 20 bp, Artificial Sequence
  Description of Artificial Sequence: Synthetic oligonucleotide
  Target: SCNA; (-) strand; PAM type: NNNNGHTT; PAM sequence: AACAGTTT
acttgataattatagttaaa

SEQ ID NO: 11635 - DNA, 20 bp, Artificial Sequence
  Description of Artificial Sequence: Synthetic oligonucleotide
  Target: SCNA; (-) strand; PAM type: NNNNGHTT; PAM sequence: TCATGTTT
tactacgagatcattaaaaa

SEQ ID NO: 11636 - DNA, 20 bp, Artificial Sequence
  Description of Artificial Sequence: Synthetic oligonucleotide
  Target: SCNA; (-) strand; PAM type: NNNNGHTT; PAM sequence: GGGGGCTT
ggaatgtaatcatacctaca

SEQ ID NO: 11637 - DNA, 20 bp, Artificial Sequence
  Description of Artificial Sequence: Synthetic oligonucleotide
  Target: SCNA; (-) strand; PAM type: NNNNGHTT; PAM sequence: TGCCGTTT
ttcagcaaatataaactgaa

SEQ ID NO: 11638 - DNA, 20 bp, Artificial Sequence
  Description of Artificial Sequence: Synthetic oligonucleotide
  Target: SCNA; (-) strand; PAM type: NNNNGHTT; PAM sequence: AGGAGATT
gtggatagatgctaactaga

SEQ ID NO: 11639 - DNA, 20 bp, Artificial Sequence
  Description of Artificial Sequence: Synthetic oligonucleotide
  Target: SCNA; (-) strand; PAM type: NNNNGHTT; PAM sequence: AACAGATT
tgccctgacaaagaagggag

SEQ ID NO: 11640 - DNA, 20 bp, Artificial Sequence
  Description of Artificial Sequence: Synthetic oligonucleotide
  Target: SCNA; (-) strand; PAM type: NNNNGHTT; PAM sequence: GGGAGATT
gtgggtgagtttctccctta

SEQ ID NO: 11641 - DNA, 20 bp, Artificial Sequence
  Description of Artificial Sequence: Synthetic oligonucleotide
  Target: SCNA; (-) strand; PAM type: NNNNGHTT; PAM sequence: GTGAGTTT
taggtgtttttggcaggtgg

SEQ ID NO: 11642 - DNA, 20 bp, Artificial Sequence
  Description of Artificial Sequence: Synthetic oligonucleotide
  Target: SCNA; (-) strand; PAM type: NNNNGHTT; PAM sequence: AGGTGTTT
cattcacataagtccatggt

SEQ ID NO: 11643 - DNA, 20 bp, Artificial Sequence
  Description of Artificial Sequence: Synthetic oligonucleotide
  Target: SCNA; (-) strand; PAM type: NNNNGHTT; PAM sequence: GGTTGATT
aaatgctcaaacacagtaga

SEQ ID NO: 11644 - DNA, 20 bp, Artificial Sequence
  Description of Artificial Sequence: Synthetic oligonucleotide
  Target: SCNA; (-) strand; PAM type: NNNNGHTT; PAM sequence: ATCTGTTT
gaaacttctctatacatttg

SEQ ID NO: 11645 - DNA, 20 bp, Artificial Sequence
  Description of Artificial Sequence: Synthetic oligonucleotide
  Target: SCNA; (-) strand; PAM type: NNNNGHTT; PAM sequence: CCTTGCTT
gtgttagtgtagaagagaat

SEQ ID NO: 11646 - DNA, 20 bp, Artificial Sequence
  Description of Artificial Sequence: Synthetic oligonucleotide
  Target: SCNA; (-) strand; PAM type: NNNNGHTT; PAM sequence: GACAGTTT
agtgttgacttcctggttgt

SEQ ID NO: 11647 - DNA, 20 bp, Artificial Sequence
  Description of Artificial Sequence: Synthetic oligonucleotide
  Target: SCNA; (-) strand; PAM type: NNNNGHTT; PAM sequence: TCTGGCTT
acataataatttaatcatcc

SEQ ID NO: 11648 - DNA, 20 bp, Artificial Sequence
  Description of Artificial Sequence: Synthetic oligonucleotide
  Target: SCNA; (-) strand; PAM type: NNNNGHTT; PAM sequence: GGATGATT
gtggatgaaagagaaagcca

SEQ ID NO: 11649 - DNA, 20 bp, Artificial Sequence
  Description of Artificial Sequence: Synthetic oligonucleotide
  Target: SCNA; (-) strand; PAM type: NNNNGHTT; PAM sequence: CAGTGATT
gactttggggatgcttttac

SEQ ID NO: 11650 - DNA, 20 bp, Artificial Sequence
  Description of Artificial Sequence: Synthetic oligonucleotide
  Target: SCNA; (-) strand; PAM type: NNNNGHTT; PAM sequence: GGATGCTT
ccatatcaggtagactttgg

SEQ ID NO: 11651 - DNA, 20 bp, Artificial Sequence
  Description of Artificial Sequence: Synthetic oligonucleotide
  Target: SCNA; (-) strand; PAM type: NNNNGHTT; PAM sequence: AGCTGTTT
ctctgatttctcaacctctt

SEQ ID NO: 11652 - DNA, 20 bp, Artificial Sequence
  Description of Artificial Sequence: Synthetic oligonucleotide
  Target: SCNA; (-) strand; PAM type: NNNNGHTT; PAM sequence: CTCTGATT
attgtaagttgggcagccaa

SEQ ID NO: 11653 - DNA, 20 bp, Artificial Sequence
  Description of Artificial Sequence: Synthetic oligonucleotide
  Target: SCNA; (-) strand; PAM type: NNNNGHTT; PAM sequence: TTCAGTTT
gatttaatccaagtgaagaa

SEQ ID NO: 11654 - DNA, 20 bp, Artificial Sequence
  Description of Artificial Sequence: Synthetic oligonucleotide
  Target: SCNA; (-) strand; PAM type: NNNNGHTT; PAM sequence: TTCAGATT
aaggaataagagaaggaaga

SEQ ID NO: 11655 - DNA, 20 bp, Artificial Sequence
  Description of Artificial Sequence: Synthetic oligonucleotide
  Target: SCNA; (-) strand; PAM type: NNNNGHTT; PAM sequence: GGAAGATT
taagcaaaggaataagagaa

SEQ ID NO: 11656 - DNA, 20 bp, Artificial Sequence
  Description of Artificial Sequence: Synthetic oligonucleotide
  Target: SCNA; (-) strand; PAM type: NNNNGHTT; PAM sequence: TTTGGTTT
tattttataactaagcagtg

SEQ ID NO: 11657 - DNA, 20 bp, Artificial Sequence
  Description of Artificial Sequence: Synthetic oligonucleotide
  Target: SCNA; (-) strand; PAM type: NNNNGHTT; PAM sequence: CAGTGTTT
acatatattttataactaag

SEQ ID NO: 11658 - DNA, 20 bp, Artificial Sequence
  Description of Artificial Sequence: Synthetic oligonucleotide
  Target: SCNA; (-) strand; PAM type: NNNNGHTT; PAM sequence: CTTTGCTT
gctatattttggagaaaaat

SEQ ID NO: 11659 - DNA, 20 bp, Artificial Sequence
  Description of Artificial Sequence: Synthetic oligonucleotide
  Target: SCNA; (-) strand; PAM type: NNNNGHTT; PAM sequence: AAATGTTT
actgaaacatccatgaaaca

SEQ ID NO: 11660 - DNA, 20 bp, Artificial Sequence
  Description of Artificial Sequence: Synthetic oligonucleotide
  Target: SCNA; (-) strand; PAM type: NNNNGHTT; PAM sequence: ATGAGATT
acattaattgggaggttttt

SEQ ID NO: 11661 - DNA, 20 bp, Artificial Sequence
  Description of Artificial Sequence: Synthetic oligonucleotide
  Target: SCNA; (-) strand; PAM type: NNNNGHTT; PAM sequence: GGAGGTTT
tatacatagtacattaattg

SEQ ID NO: 11662 - DNA, 20 bp, Artificial Sequence
  Description of Artificial Sequence: Synthetic oligonucleotide
  Target: SCNA; (-) strand; PAM type: NNNNGHTT; PAM sequence: ATTAGTTT
tgttttagtctaaaataatg

SEQ ID NO: 11663 - DNA, 20 bp, Artificial Sequence
  Description of Artificial Sequence: Synthetic oligonucleotide
  Target: SCNA; (-) strand; PAM type: NNNNGHTT; PAM sequence: TAATGATT
tttcctgttttagtctaaaa

SEQ ID NO: 11664 - DNA, 20 bp, Artificial Sequence
  Description of Artificial Sequence: Synthetic oligonucleotide
  Target: SCNA; (-) strand; PAM type: NNNNGHTT; PAM sequence: TCCTGTTT
cctagataactatgttcttt

SEQ ID NO: 11665 - DNA, 20 bp, Artificial Sequence
  Description of Artificial Sequence: Synthetic oligonucleotide
  Target: SCNA; (-) strand; PAM type: NNNNGHTT; PAM sequence: TATAGTTT
gtgtattaataatgcagtgt

SEQ ID NO: 11666 - DNA, 20 bp, Artificial Sequence
  Description of Artificial Sequence: Synthetic oligonucleotide
  Target: SCNA; (-) strand; PAM type: NNNNGHTT; PAM sequence: TATTGATT
gggaatggatttttaggctt

SEQ ID NO: 11667 - DNA, 20 bp, Artificial Sequence
  Description of Artificial Sequence: Synthetic oligonucleotide
  Target: SCNA; (-) strand; PAM type: NNNNGHTT; PAM sequence: TTAGGCTT
ggtctcttgggaatggattt

SEQ ID NO: 11668 - DNA, 20 bp, Artificial Sequence
  Description of Artificial Sequence: Synthetic oligonucleotide
  Target: SCNA; (-) strand; PAM type: NNNNGHTT; PAM sequence: AATGGATT
agaaatctgggtctcttggg

SEQ ID NO: 11669 - DNA, 20 bp, Artificial Sequence
  Description of Artificial Sequence: Synthetic oligonucleotide
  Target: SCNA; (-) strand; PAM type: NNNNGHTT; PAM sequence: CGCCGATT
caaagtcatggtcctttccc

SEQ ID NO: 11670 - DNA, 20 bp, Artificial Sequence
  Description of Artificial Sequence: Synthetic oligonucleotide
  Target: SCNA; (-) strand; PAM type: NNNNGHTT; PAM sequence: CCTTGTTT
tgctggaattgtccttctac

SEQ ID NO: 11671 - DNA, 20 bp, Artificial Sequence
  Description of Artificial Sequence: Synthetic oligonucleotide
  Target: SCNA; (-) strand; PAM type: NNNNGHTT; PAM sequence: TAAGGATT
cagagatggttttcctgaga

SEQ ID NO: 11672 - DNA, 20 bp, Artificial Sequence
  Description of Artificial Sequence: Synthetic oligonucleotide
  Target: SCNA; (-) strand; PAM type: NNNNGHTT; PAM sequence: GATGGTTT
gtgtatgtattcatagcaga

SEQ ID NO: 11673 - DNA, 20 bp, Artificial Sequence
  Description of Artificial Sequence: Synthetic oligonucleotide
  Target: SCNA; (-) strand; PAM type: NNNNGHTT; PAM sequence: ACAAGTTT
aataataacctctattttga

SEQ ID NO: 11674 - DNA, 20 bp, Artificial Sequence
  Description of Artificial Sequence: Synthetic oligonucleotide
  Target: SCNA; (-) strand; PAM type: NNNNGHTT; PAM sequence: AAGAGATT
atcattgacctttatttaat

SEQ ID NO: 11675 - DNA, 20 bp, Artificial Sequence
  Description of Artificial Sequence: Synthetic oligonucleotide
  Target: SCNA; (-) strand; PAM type: NNNNGHTT; PAM sequence: AACAGCTT
aaaagccaccaaaggaaacc

SEQ ID NO: 11676 - DNA, 20 bp, Artificial Sequence
  Description of Artificial Sequence: Synthetic oligonucleotide
  Target: SCNA; (-) strand; PAM type: NNNNGHTT; PAM sequence: CATTGCTT
aggggaggtgattcccattg

SEQ ID NO: 11677 - DNA, 20 bp, Artificial Sequence
  Description of Artificial Sequence: Synthetic oligonucleotide
  Target: SCNA; (-) strand; PAM type: NNNNGHTT; PAM sequence: AGGTGATT
tggggaagagacaccagggg

SEQ ID NO: 11678 - DNA, 20 bp, Artificial Sequence
  Description of Artificial Sequence: Synthetic oligonucleotide
  Target: SCNA; (-) strand; PAM type: NNNNGHTT; PAM sequence: ATGAGTTT
gctggaaaatttcaatcagc

SEQ ID NO: 11679 - DNA, 20 bp, Artificial Sequence
  Description of Artificial Sequence: Synthetic oligonucleotide
  Target: SCNA; (-) strand; PAM type: NNNNGHTT; PAM sequence: ACTTGTTT
aaggtagccaggtaaaaatt

SEQ ID NO: 11680 - DNA, 20 bp, Artificial Sequence
  Description of Artificial Sequence: Synthetic oligonucleotide
  Target: SCNA; (-) strand; PAM type: NNNNGHTT; PAM sequence: GTAAGTTT
cttccccttctgctatgatt

SEQ ID NO: 11681 - DNA, 20 bp, Artificial Sequence
  Description of Artificial Sequence: Synthetic oligonucleotide
  Target: SCNA; (-) strand; PAM type: NNNNGHTT; PAM sequence: CTATGATT
tgcttccccttccccttctg

SEQ ID NO: 11682 - DNA, 20 bp, Artificial Sequence
  Description of Artificial Sequence: Synthetic oligonucleotide
  Target: SCNA; (-) strand; PAM type: NNNNGHTT; PAM sequence: CCTTGCTT
ctcctgccatgtgaggtgtg

SEQ ID NO: 11683 - DNA, 20 bp, Artificial Sequence
  Description of Artificial Sequence: Synthetic oligonucleotide
  Target: SCNA; (-) strand; PAM type: NNNNGHTT; PAM sequence: AATGGTTT
aatgagttctcataagatct

SEQ ID NO: 11684 - DNA, 20 bp, Artificial Sequence
  Description of Artificial Sequence: Synthetic oligonucleotide
  Target: SCNA; (-) strand; PAM type: NNNNGHTT; PAM sequence: GGTAGTTT
ggaggtgattggatcatggg

SEQ ID NO: 11685 - DNA, 20 bp, Artificial Sequence
  Description of Artificial Sequence: Synthetic oligonucleotide
  Target: SCNA; (-) strand; PAM type: NNNNGHTT; PAM sequence: AGGTGATT
tgagggagggaccttatggg

SEQ ID NO: 11686 - DNA, 20 bp, Artificial Sequence
  Description of Artificial Sequence: Synthetic oligonucleotide
  Target: SCNA; (-) strand; PAM type: NNNNGHTT; PAM sequence: TTTGGCTT
taccatccatagtgatacgg

SEQ ID NO: 11687 - DNA, 20 bp, Artificial Sequence
  Description of Artificial Sequence: Synthetic oligonucleotide
  Target: SCNA; (-) strand; PAM type: NNNNGHTT; PAM sequence: TACGGTTT
gatactaccatccatagtga

SEQ ID NO: 11688 - DNA, 20 bp, Artificial Sequence
  Description of Artificial Sequence: Synthetic oligonucleotide
  Target: SCNA; (-) strand; PAM type: NNNNGHTT; PAM sequence: TGAGGTTT
cggaaagcccttctcatttt

SEQ ID NO: 11689 - DNA, 20 bp, Artificial Sequence
  Description of Artificial Sequence: Synthetic oligonucleotide
  Target: SCNA; (-) strand; PAM type: NNNNGHTT; PAM sequence: ATTTGCTT
tcctagtgcaagttaaaaag

SEQ ID NO: 11690 - DNA, 20 bp, Artificial Sequence
  Description of Artificial Sequence: Synthetic oligonucleotide
  Target: SCNA; (-) strand; PAM type: NNNNGHTT; PAM sequence: AAAAGATT
gatgttcctagtgcaagtta

SEQ ID NO: 11691 - DNA, 20 bp, Artificial Sequence
  Description of Artificial Sequence: Synthetic oligonucleotide
  Target: SCNA; (-) strand; PAM type: NNNNGHTT; PAM sequence: CTTTGTTT
aatgtttaaattctatatgt

SEQ ID NO: 11692 - DNA, 20 bp, Artificial Sequence
  Description of Artificial Sequence: Synthetic oligonucleotide
  Target: SCNA; (-) strand; PAM type: NNNNGHTT; PAM sequence: TAATGTTT
attctacaaataaacacaga

SEQ ID NO: 11693 - DNA, 20 bp, Artificial Sequence
  Description of Artificial Sequence: Synthetic oligonucleotide
  Target: SCNA; (-) strand; PAM type: NNNNGHTT; PAM sequence: CACTGATT
tgttaaattgcatagctctc

SEQ ID NO: 11694 - DNA, 20 bp, Artificial Sequence
  Description of Artificial Sequence: Synthetic oligonucleotide
  Target: SCNA; (-) strand; PAM type: NNNNGHTT; PAM sequence: CTAAGATT
atgtgttactctaaggatct

SEQ ID NO: 11695 - DNA, 20 bp, Artificial Sequence
  Description of Artificial Sequence: Synthetic oligonucleotide
  Target: SCNA; (-) strand; PAM type: NNNNGHTT; PAM sequence: CCCTGTTT
aagtcacttctactcgtata

SEQ ID NO: 11696 - DNA, 20 bp, Artificial Sequence
  Description of Artificial Sequence: Synthetic oligonucleotide
  Target: SCNA; (-) strand; PAM type: NNNNGHTT; PAM sequence: TATGGATT
accctgttgtacccctagct

SEQ ID NO: 11697 - DNA, 20 bp, Artificial Sequence
  Description of Artificial Sequence: Synthetic oligonucleotide
  Target: SCNA; (-) strand; PAM type: NNNNGHTT; PAM sequence: CCTAGCTT
cctaatgaccctgttgtacc

SEQ ID NO: 11698 - DNA, 20 bp, Artificial Sequence
  Description of Artificial Sequence: Synthetic oligonucleotide
  Target: SCNA; (-) strand; PAM type: NNNNGHTT; PAM sequence: GAATGATT
aatttggaagagtgtccaca

SEQ ID NO: 11699 - DNA, 20 bp, Artificial Sequence
  Description of Artificial Sequence: Synthetic oligonucleotide
  Target: SCNA; (-) strand; PAM type: NNNNGHTT; PAM sequence: GATTGTTT
tgccaggagtaatccaagga

SEQ ID NO: 11700 - DNA, 20 bp, Artificial Sequence
  Description of Artificial Sequence: Synthetic oligonucleotide
  Target: SCNA; (-) strand; PAM type: NNNNGHTT; PAM sequence: AGGAGATT
gctgtgccaggagtaatcca

SEQ ID NO: 11701 - DNA, 20 bp, Artificial Sequence
  Description of Artificial Sequence: Synthetic oligonucleotide
  Target: SCNA; (-) strand; PAM type: NNNNGHTT; PAM sequence: AGGGGATT
ctagtgtcagagtcatgacc

SEQ ID NO: 11702 - DNA, 20 bp, Artificial Sequence
  Description of Artificial Sequence: Synthetic oligonucleotide
  Target: SCNA; (-) strand; PAM type: NNNNGHTT; PAM sequence: AAGAGATT
aaaggcatgatgaaaagatc

SEQ ID NO: 11703 - DNA, 20 bp, Artificial Sequence
  Description of Artificial Sequence: Synthetic oligonucleotide
  Target: SCNA; (-) strand; PAM type: NNNNGHTT; PAM sequence: GTTTGTTT
agaggaaaatgcaagctaag

SEQ ID NO: 11704 - DNA, 20 bp, Artificial Sequence
  Description of Artificial Sequence: Synthetic oligonucleotide
  Target: SCNA; (-) strand; PAM type: NNNNGHTT; PAM sequence: TAAGGTTT
tttaagaggaaaatgcaagc

SEQ ID NO: 11705 - DNA, 20 bp, Artificial Sequence
  Description of Artificial Sequence: Synthetic oligonucleotide
  Target: SCNA; (-) strand; PAM type: NNNNGHTT; PAM sequence: GTGGGCTT
acaaaactgtgagatccatg

SEQ ID NO: 11706 - DNA, 20 bp, Artificial Sequence
  Description of Artificial Sequence: Synthetic oligonucleotide
  Target: SCNA; (-) strand; PAM type: NNNNGHTT; PAM sequence: CCAAGATT
gagtcggaggttgcagtgag

SEQ ID NO: 11707 - DNA, 20 bp, Artificial Sequence
  Description of Artificial Sequence: Synthetic oligonucleotide
  Target: SCNA; (-) strand; PAM type: NNNNGHTT; PAM sequence: ATTGGATT
aaaggcaaactaaatgtttt

SEQ ID NO: 11708 - DNA, 20 bp, Artificial Sequence
  Description of Artificial Sequence: Synthetic oligonucleotide
  Target: SCNA; (-) strand; PAM type: NNNNGHTT; PAM sequence: AAATGTTT
attccaaataaaggcaaact

SEQ ID NO: 11709 - DNA, 20 bp, Artificial Sequence
  Description of Artificial Sequence: Synthetic oligonucleotide
  Target: SCNA; (-) strand; PAM type: NNNNGHTT; PAM sequence: ATGTGTTT
ttgtaaatgctaggcaaata

SEQ ID NO: 11710 - DNA, 20 bp, Artificial Sequence
  Description of Artificial Sequence: Synthetic oligonucleotide
  Target: SCNA; (-) strand; PAM type: NNNNGHTT; PAM sequence: GACAGATT
gaagctggaaaaggcaagga

SEQ ID NO: 11711 - DNA, 20 bp, Artificial Sequence
  Description of Artificial Sequence: Synthetic oligonucleotide
  Target: SCNA; (-) strand; PAM type: NNNNGHTT; PAM sequence: TGTTGATT
ctcattcatttattaaccta

SEQ ID NO: 11712 - DNA, 20 bp, Artificial Sequence
  Description of Artificial Sequence: Synthetic oligonucleotide
  Target: SCNA; (-) strand; PAM type: NNNNGHTT; PAM sequence: CCAAGTTT
ggcatgttgatatcaatacc

SEQ ID NO: 11713 - DNA, 20 bp, Artificial Sequence
  Description of Artificial Sequence: Synthetic oligonucleotide
  Target: SCNA; (-) strand; PAM type: NNNNGHTT; PAM sequence: CAATGTTT
tttaataaataataataata

SEQ ID NO: 11714 - DNA, 20 bp, Artificial Sequence
  Description of Artificial Sequence: Synthetic oligonucleotide
  Target: SCNA; (-) strand; PAM type: NNNNGHTT; PAM sequence: ACATGATT
tcccaagcttcttttcctac

SEQ ID NO: 11715 - DNA, 20 bp, Artificial Sequence
  Description of Artificial Sequence: Synthetic oligonucleotide
  Target: SCNA; (-) strand; PAM type: NNNNGHTT; PAM sequence: CCAAGCTT
tgggtggtagaataacattc

SEQ ID NO: 11716 - DNA, 20 bp, Artificial Sequence
  Description of Artificial Sequence: Synthetic oligonucleotide
  Target: SCNA; (-) strand; PAM type: NNNNGHTT; PAM sequence: TCGAGCTT
acttctactgtagggagaga

SEQ ID NO: 11717 - DNA, 20 bp, Artificial Sequence
  Description of Artificial Sequence: Synthetic oligonucleotide
  Target: SCNA; (-) strand; PAM type: NNNNGHTT; PAM sequence: GATGGCTT
ccagtatcgagggaagtgtg

SEQ ID NO: 11718 - DNA, 20 bp, Artificial Sequence
  Description of Artificial Sequence: Synthetic oligonucleotide
  Target: SCNA; (-) strand; PAM type: NNNNGHTT; PAM sequence: ATATGTTT
gtgtctcagtgggcccttgg

SEQ ID NO: 11719 - DNA, 20 bp, Artificial Sequence
  Description of Artificial Sequence: Synthetic oligonucleotide
  Target: SCNA; (-) strand; PAM type: NNNNGHTT; PAM sequence: CTTGGCTT
actctccaaaatactattta

SEQ ID NO: 11720 - DNA, 20 bp, Artificial Sequence
  Description of Artificial Sequence: Synthetic oligonucleotide
  Target: SCNA; (-) strand; PAM type: NNNNGHTT; PAM sequence: AAGTGTTT
tggacttatttctttcttca

SEQ ID NO: 11721 - DNA, 20 bp, Artificial Sequence
  Description of Artificial Sequence: Synthetic oligonucleotide
  Target: SCNA; (-) strand; PAM type: NNNNGHTT; PAM sequence: AACAGCTT
ataaatgcgatgagaactaa

SEQ ID NO: 11722 - DNA, 20 bp, Artificial Sequence
  Description of Artificial Sequence: Synthetic oligonucleotide
  Target: SCNA; (-) strand; PAM type: NNNNGHTT; PAM sequence: AGCTGCTT
ctactttatgtgaagtgaac

SEQ ID NO: 11723 - DNA, 20 bp, Artificial Sequence
  Description of Artificial Sequence: Synthetic oligonucleotide
  Target: SCNA; (-) strand; PAM type: NNNNGHTT; PAM sequence: ACAAGATT
gtaaccttcatccacagtga

SEQ ID NO: 11724 - DNA, 20 bp, Artificial Sequence
  Description of Artificial Sequence: Synthetic oligonucleotide
  Target: SCNA; (-) strand; PAM type: NNNNGHTT; PAM sequence: TGGAGTTT
tctgtgtttagatggcaata

SEQ ID NO: 11725 - DNA, 20 bp, Artificial Sequence
  Description of Artificial Sequence: Synthetic oligonucleotide
  Target: SCNA; (-) strand; PAM type: NNNNGHTT; PAM sequence: CTGTGTTT
ataccattacagaaaagctt

SEQ ID NO: 11726 - DNA, 20 bp, Artificial Sequence
  Description of Artificial Sequence: Synthetic oligonucleotide
  Target: SCNA; (-) strand; PAM type: NNNNGHTT; PAM sequence: AAAAGCTT
tcactggaataccattacag

SEQ ID NO: 11727 - DNA, 20 bp, Artificial Sequence
  Description of Artificial Sequence: Synthetic oligonucleotide
  Target: SCNA; (-) strand; PAM type: NNNNGHTT; PAM sequence: AAGAGATT
caaaataatagaaaaaaatt

SEQ ID NO: 11728 - DNA, 20 bp, Artificial Sequence
  Description of Artificial Sequence: Synthetic oligonucleotide
  Target: SCNA; (-) strand; PAM type: NNNNGHTT; PAM sequence: CCGGGTTT
tatatgtaaaataaataatg

SEQ ID NO: 11729 - DNA, 20 bp, Artificial Sequence
  Description of Artificial Sequence: Synthetic oligonucleotide
  Target: SCNA; (-) strand; PAM type: NNNNGHTT; PAM sequence: TATAGTTT
ttgcttctcttttgttttaa

SEQ ID NO: 11730 - DNA, 20 bp, Artificial Sequence
  Description of Artificial Sequence: Synthetic oligonucleotide
  Target: SCNA; (-) strand; PAM type: NNNNGHTT; PAM sequence: TTTTGTTT
tatttagtgggttgcttctc

SEQ ID NO: 11731 - DNA, 20 bp, Artificial Sequence
  Description of Artificial Sequence: Synthetic oligonucleotide
  Target: SCNA; (-) strand; PAM type: NNNNGHTT; PAM sequence: GGTTGCTT
taatcaattattatttagtg

SEQ ID NO: 11732 - DNA, 20 bp, Artificial Sequence
  Description of Artificial Sequence: Synthetic oligonucleotide
  Target: SCNA; (-) strand; PAM type: NNNNGHTT; PAM sequence: CAGTGTTT
aaaaaaaattagtgaatcct

SEQ ID NO: 11733 - DNA, 20 bp, Artificial Sequence
  Description of Artificial Sequence: Synthetic oligonucleotide
  Target: SCNA; (-) strand; PAM type: NNNNGHTT; PAM sequence: CTGTGATT
atggttgaggttgcagtgag

SEQ ID NO: 11734 - DNA, 20 bp, Artificial Sequence
  Description of Artificial Sequence: Synthetic oligonucleotide
  Target: SCNA; (-) strand; PAM type: NNNNGHTT; PAM sequence: CTTTGTTT
tgacttattatgcctataaa

SEQ ID NO: 11735 - DNA, 20 bp, Artificial Sequence
  Description of Artificial Sequence: Synthetic oligonucleotide
  Target: SCNA; (-) strand; PAM type: NNNNGHTT; PAM sequence: TCAGGCTT
acctggctctgtgttctagc

SEQ ID NO: 11736 - DNA, 20 bp, Artificial Sequence
  Description of Artificial Sequence: Synthetic oligonucleotide
  Target: SCNA; (-) strand; PAM type: NNNNGHTT; PAM sequence: TTCAGATT
ctgacagagttgttcctgcc

SEQ ID NO: 11737 - DNA, 20 bp, Artificial Sequence
  Description of Artificial Sequence: Synthetic oligonucleotide
  Target: SCNA; (-) strand; PAM type: NNNNGHTT; PAM sequence: CTCTGCTT
tagataattgcacgactaat

SEQ ID NO: 11738 - DNA, 20 bp, Artificial Sequence
  Description of Artificial Sequence: Synthetic oligonucleotide
  Target: SCNA; (-) strand; PAM type: NNNNGHTT; PAM sequence: CACTGCTT
ctggaattacaggtgtgagc

SEQ ID NO: 11739 - DNA, 20 bp, Artificial Sequence
  Description of Artificial Sequence: Synthetic oligonucleotide
  Target: SCNA; (-) strand; PAM type: NNNNGHTT; PAM sequence: TGGGGTTT
ttttgtattttcagtagaga

SEQ ID NO: 11740 - DNA, 20 bp, Artificial Sequence
  Description of Artificial Sequence: Synthetic oligonucleotide
  Target: SCNA; (-) strand; PAM type: NNNNGHTT; PAM sequence: CTGGGATT
tagttcagcctcctgagtag

SEQ ID NO: 11741 - DNA, 20 bp, Artificial Sequence
  Description of Artificial Sequence: Synthetic oligonucleotide
  Target: SCNA; (-) strand; PAM type: NNNNGHTT; PAM sequence: AAGCGATT
agcctctgccacccaggttc

SEQ ID NO: 11742 - DNA, 20 bp, Artificial Sequence
  Description of Artificial Sequence: Synthetic oligonucleotide
  Target: SCNA; (-) strand; PAM type: NNNNGHTT; PAM sequence: TACAGTTT
tctagtcaatcacaaagtcc

SEQ ID NO: 11743 - DNA, 20 bp, Artificial Sequence
  Description of Artificial Sequence: Synthetic oligonucleotide
  Target: SCNA; (-) strand; PAM type: NNNNGHTT; PAM sequence: TATTGTTT
ttgatcctcttcctgtaatc

SEQ ID NO: 11744 - DNA, 20 bp, Artificial Sequence
  Description of Artificial Sequence: Synthetic oligonucleotide
  Target: SCNA; (-) strand; PAM type: NNNNGHTT; PAM sequence: TATTGATT
gaacatgtggaattaagttg

SEQ ID NO: 11745 - DNA, 20 bp, Artificial Sequence
  Description of Artificial Sequence: Synthetic oligonucleotide
  Target: SCNA; (-) strand; PAM type: NNNNGHTT; PAM sequence: CATAGATT
atagttaattttttaaaaat

SEQ ID NO: 11746 - DNA, 20 bp, Artificial Sequence
  Description of Artificial Sequence: Synthetic oligonucleotide
  Target: SCNA; (-) strand; PAM type: NNNNGHTT; PAM sequence: ATATGATT
tgtacatttaaaatgagtgc

SEQ ID NO: 11747 - DNA, 20 bp, Artificial Sequence
  Description of Artificial Sequence: Synthetic oligonucleotide
  Target: SCNA; (-) strand; PAM type: NNNNGHTT; PAM sequence: ATGGGTTT
tcaattgtggtggtcgttac

SEQ ID NO: 11748 - DNA, 20 bp, Artificial Sequence
  Description of Artificial Sequence: Synthetic oligonucleotide
  Target: SCNA; (-) strand; PAM type: NNNNGHTT; PAM sequence: ATATGATT
ttggggaaaataatgaagat

SEQ ID NO: 11749 - DNA, 20 bp, Artificial Sequence
  Description of Artificial Sequence: Synthetic oligonucleotide
  Target: SCNA; (-) strand; PAM type: NNNNGHTT; PAM sequence: TGTAGTTT
ttaggcagacatgtctgggc

SEQ ID NO: 11750 - DNA, 20 bp, Artificial Sequence
  Description of Artificial Sequence: Synthetic oligonucleotide
  Target: SCNA; (-) strand; PAM type: NNNNGHTT; PAM sequence: CTTGGCTT
cagtgcagttacaagaaagt

SEQ ID NO: 11751 - DNA, 20 bp, Artificial Sequence
  Description of Artificial Sequence: Synthetic oligonucleotide
  Target: SCNA; (-) strand; PAM type: NNNNGHTT; PAM sequence: CACAGATT
gagaattgggtaggaatagc

SEQ ID NO: 11752 - DNA, 20 bp, Artificial Sequence
  Description of Artificial Sequence: Synthetic oligonucleotide
  Target: SCNA; (-) strand; PAM type: NNNNGHTT; PAM sequence: AAGAGATT
ttagaattacaaccatccac

SEQ ID NO: 11753 - DNA, 20 bp, Artificial Sequence
  Description of Artificial Sequence: Synthetic oligonucleotide
  Target: SCNA; (-) strand; PAM type: NNNNGHTT; PAM sequence: AGCTGATT
atcagttcagtcattcagga

SEQ ID NO: 11754 - DNA, 20 bp, Artificial Sequence
  Description of Artificial Sequence: Synthetic oligonucleotide
  Target: SCNA; (-) strand; PAM type: NNNNGHTT; PAM sequence: CCATGCTT
atccatggtaacaacaagat

SEQ ID NO: 11755 - DNA, 20 bp, Artificial Sequence
  Description of Artificial Sequence: Synthetic oligonucleotide
  Target: SCNA; (-) strand; PAM type: NNNNGHTT; PAM sequence: TTAAGATT
ttctacccctaggtatttac

SEQ ID NO: 11756 - DNA, 20 bp, Artificial Sequence
  Description of Artificial Sequence: Synthetic oligonucleotide
  Target: SCNA; (-) strand; PAM type: NNNNGHTT; PAM sequence: TTCTGTTT
aagtcacttacatgctgtac

SEQ ID NO: 11757 - DNA, 20 bp, Artificial Sequence
  Description of Artificial Sequence: Synthetic oligonucleotide
  Target: SCNA; (-) strand; PAM type: NNNNGHTT; PAM sequence: CATAGATT
tacggcataggagttaagag

SEQ ID NO: 11758 - DNA, 20 bp, Artificial Sequence
  Description of Artificial Sequence: Synthetic oligonucleotide
  Target: SCNA; (-) strand; PAM type: NNNNGHTT; PAM sequence: AATAGCTT
agtttaaatgggtcaagaaa

SEQ ID NO: 11759 - DNA, 20 bp, Artificial Sequence
  Description of Artificial Sequence: Synthetic oligonucleotide
  Target: SCNA; (-) strand; PAM type: NNNNGHTT; PAM sequence: GAAAGTTT
tattttgattaaacattatg

SEQ ID NO: 11760 - DNA, 20 bp, Artificial Sequence
  Description of Artificial Sequence: Synthetic oligonucleotide
  Target: SCNA; (-) strand; PAM type: NNNNGHTT; PAM sequence: TTTTGATT
tttaacttaaatattgaata

SEQ ID NO: 11761 - DNA, 20 bp, Artificial Sequence
  Description of Artificial Sequence: Synthetic oligonucleotide
  Target: SCNA; (-) strand; PAM type: NNNNGHTT; PAM sequence: TGCTGTTT
acaccttgtatcccagattt

SEQ ID NO: 11762 - DNA, 20 bp, Artificial Sequence
  Description of Artificial Sequence: Synthetic oligonucleotide
  Target: SCNA; (-) strand; PAM type: NNNNGHTT; PAM sequence: CCCAGATT
gaggttggtacaccttgtat

SEQ ID NO: 11763 - DNA, 20 bp, Artificial Sequence
  Description of Artificial Sequence: Synthetic oligonucleotide
  Target: SCNA; (-) strand; PAM type: NNNNGHTT; PAM sequence: GCATGTTT
tctacttttccaaacacctg

SEQ ID NO: 11764 - DNA, 20 bp, Artificial Sequence
  Description of Artificial Sequence: Synthetic oligonucleotide
  Target: SCNA; (-) strand; PAM type: NNNNGHTT; PAM sequence: CACAGTTT
cattctacatgtaactattg

SEQ ID NO: 11765 - DNA, 20 bp, Artificial Sequence
  Description of Artificial Sequence: Synthetic oligonucleotide
  Target: SCNA; (-) strand; PAM type: NNNNGHTT; PAM sequence: TGTGGTTT
tgattatcttttcatagcac

SEQ ID NO: 11766 - DNA, 20 bp, Artificial Sequence
  Description of Artificial Sequence: Synthetic oligonucleotide
  Target: SCNA; (-) strand; PAM type: NNNNGHTT; PAM sequence: CTATGATT
ttcaaatttatccttgtttt

SEQ ID NO: 11767 - DNA, 20 bp, Artificial Sequence
  Description of Artificial Sequence: Synthetic oligonucleotide
  Target: SCNA; (-) strand; PAM type: NNNNGHTT; PAM sequence: CCTTGTTT
tatgtggtattcaaatttat

SEQ ID NO: 11768 - DNA, 20 bp, Artificial Sequence
  Description of Artificial Sequence: Synthetic oligonucleotide
  Target: SCNA; (-) strand; PAM type: NNNNGHTT; PAM sequence: ACTTGCTT
aggatgtttatatgccatca

SEQ ID NO: 11769 - DNA, 20 bp, Artificial Sequence
  Description of Artificial Sequence: Synthetic oligonucleotide
  Target: SCNA; (-) strand; PAM type: NNNNGHTT; PAM sequence: GGATGTTT
attcacttgaagaatttcaa

SEQ ID NO: 11770 - DNA, 20 bp, Artificial Sequence
  Description of Artificial Sequence: Synthetic oligonucleotide
  Target: SCNA; (-) strand; PAM type: NNNNGHTT; PAM sequence: GAATGCTT
gagaaggacccaaattatct

SEQ ID NO: 11771 - DNA, 20 bp, Artificial Sequence
  Description of Artificial Sequence: Synthetic oligonucleotide
  Target: SCNA; (-) strand; PAM type: NNNNGHTT; PAM sequence: GCTTGATT
gacggtaatgagagagggca

SEQ ID NO: 11772 - DNA, 20 bp, Artificial Sequence
  Description of Artificial Sequence: Synthetic oligonucleotide
  Target: SCNA; (-) strand; PAM type: NNNNGHTT; PAM sequence: GGCAGCTT
taacgacggtaatgagagag

SEQ ID NO: 11773 - DNA, 20 bp, Artificial Sequence
  Description of Artificial Sequence: Synthetic oligonucleotide
  Target: SCNA; (-) strand; PAM type: NNNNGHTT; PAM sequence: TGCAGTTT
tcgattattatgtctaccta

SEQ ID NO: 11774 - DNA, 20 bp, Artificial Sequence
  Description of Artificial Sequence: Synthetic oligonucleotide
  Target: SCNA; (-) strand; PAM type: NNNNGHTT; PAM sequence: AGTCGATT
gtttgatggtacattattca

SEQ ID NO: 11775 - DNA, 20 bp, Artificial Sequence
  Description of Artificial Sequence: Synthetic oligonucleotide
  Target: SCNA; (-) strand; PAM type: NNNNGHTT; PAM sequence: TGTTGTTT
tgatctgatagactatttaa

SEQ ID NO: 11776 - DNA, 20 bp, Artificial Sequence
  Description of Artificial Sequence: Synthetic oligonucleotide
  Target: SCNA; (-) strand; PAM type: NNNNGHTT; PAM sequence: CCCTGCTT
gaagccaaaagactggacaa

SEQ ID NO: 11777 - DNA, 20 bp, Artificial Sequence
  Description of Artificial Sequence: Synthetic oligonucleotide
  Target: SCNA; (-) strand; PAM type: NNNNGHTT; PAM sequence: TTTTGTTT
gaattttttgtttgttttgt

SEQ ID NO: 11778 - DNA, 20 bp, Artificial Sequence
  Description of Artificial Sequence: Synthetic oligonucleotide
  Target: SCNA; (-) strand; PAM type: NNNNGHTT; PAM sequence: TTTTGTTT
cattatgaattttttgtttg

SEQ ID NO: 11779 - DNA, 20 bp, Artificial Sequence
  Description of Artificial Sequence: Synthetic oligonucleotide
  Target: SCNA; (-) strand; PAM type: NNNNGHTT; PAM sequence: GTTTGTTT
taaaacattatgaatttttt

SEQ ID NO: 11780 - DNA, 20 bp, Artificial Sequence
  Description of Artificial Sequence: Synthetic oligonucleotide
  Target: SCNA; (-) strand; PAM type: NNNNGHTT; PAM sequence: TTTTGTTT
tccttaaaacattatgaatt

SEQ ID NO: 11781 - DNA, 20 bp, Artificial Sequence
  Description of Artificial Sequence: Synthetic oligonucleotide
  Target: SCNA; (-) strand; PAM type: NNNNGHTT; PAM sequence: GATGGTTT
atgggccacaagcggcccag

SEQ ID NO: 11782 - DNA, 20 bp, Artificial Sequence
  Description of Artificial Sequence: Synthetic oligonucleotide
  Target: SCNA; (-) strand; PAM type: NNNNGHTT; PAM sequence: TCAAGTTT
atggatggtattgctttaga

SEQ ID NO: 11783 - DNA, 20 bp, Artificial Sequence
  Description of Artificial Sequence: Synthetic oligonucleotide
  Target: SCNA; (-) strand; PAM type: NNNNGHTT; PAM sequence: TATTGCTT
agaataattataatggatgg

SEQ ID NO: 11784 - DNA, 20 bp, Artificial Sequence
  Description of Artificial Sequence: Synthetic oligonucleotide
  Target: SCNA; (-) strand; PAM type: NNNNGHTT; PAM sequence: TATAGATT
aaatttctcagtaatttttt

SEQ ID NO: 11785 - DNA, 20 bp, Artificial Sequence
  Description of Artificial Sequence: Synthetic oligonucleotide
  Target: SCNA; (-) strand; PAM type: NNNNGHTT; PAM sequence: AACAGATT
gatataggggtaaaatacac

SEQ ID NO: 11786 - DNA, 20 bp, Artificial Sequence
  Description of Artificial Sequence: Synthetic oligonucleotide
  Target: SCNA; (-) strand; PAM type: NNNNGHTT; PAM sequence: AAATGTTT
ttcttatataggtactcaat

SEQ ID NO: 11787 - DNA, 20 bp, Artificial Sequence
  Description of Artificial Sequence: Synthetic oligonucleotide
  Target: SCNA; (-) strand; PAM type: NNNNGHTT; PAM sequence: TTTGGTTT
tacagatgactttttttctt

SEQ ID NO: 11788 - DNA, 20 bp, Artificial Sequence
  Description of Artificial Sequence: Synthetic oligonucleotide
  Target: SCNA; (-) strand; PAM type: NNNNGHTT; PAM sequence: GTATGTTT
caggcttctcctgcctttat

SEQ ID NO: 11789 - DNA, 20 bp, Artificial Sequence
  Description of Artificial Sequence: Synthetic oligonucleotide
  Target: SCNA; (-) strand; PAM type: NNNNGHTT; PAM sequence: GCAGGCTT
tccattgtcaccagagcata

SEQ ID NO: 11790 - DNA, 20 bp, Artificial Sequence
  Description of Artificial Sequence: Synthetic oligonucleotide
  Target: SCNA; (-) strand; PAM type: NNNNGHTT; PAM sequence: TAAAGATT
ttgtcgtttgactgatattt

SEQ ID NO: 11791 - DNA, 20 bp, Artificial Sequence
  Description of Artificial Sequence: Synthetic oligonucleotide
  Target: SCNA; (-) strand; PAM type: NNNNGHTT; PAM sequence: TGTCGTTT
attcataagaagctggaatt

SEQ ID NO: 11792 - DNA, 20 bp, Artificial Sequence
  Description of Artificial Sequence: Synthetic oligonucleotide
  Target: SCNA; (-) strand; PAM type: NNNNGHTT; PAM sequence: TTTAGCTT
ctgagcctgtgcagcggtag

SEQ ID NO: 11793 - DNA, 20 bp, Artificial Sequence
  Description of Artificial Sequence: Synthetic oligonucleotide
  Target: SCNA; (-) strand; PAM type: NNNNGHTT; PAM sequence: GGTAGTTT
agatgctgagcctgtgcagc

SEQ ID NO: 11794 - DNA, 20 bp, Artificial Sequence
  Description of Artificial Sequence: Synthetic oligonucleotide
  Target: SCNA; (-) strand; PAM type: NNNNGHTT; PAM sequence: CCTAGATT
tggataggacacaactcatg

SEQ ID NO: 11795 - DNA, 20 bp, Artificial Sequence
  Description of Artificial Sequence: Synthetic oligonucleotide
  Target: SCNA; (-) strand; PAM type: NNNNGHTT; PAM sequence: GAAGGTTT
tcccccatctcttccattat

SEQ ID NO: 11796 - DNA, 20 bp, Artificial Sequence
  Description of Artificial Sequence: Synthetic oligonucleotide
  Target: SCNA; (-) strand; PAM type: NNNNGHTT; PAM sequence: CCTTGTTT
ccataagatgattttaggat

SEQ ID NO: 11797 - DNA, 20 bp, Artificial Sequence
  Description of Artificial Sequence: Synthetic oligonucleotide
  Target: SCNA; (-) strand; PAM type: NNNNGHTT; PAM sequence: AGATGATT
ccctctcaaatttagccata

SEQ ID NO: 11798 - DNA, 20 bp, Artificial Sequence
  Description of Artificial Sequence: Synthetic oligonucleotide
  Target: SCNA; (-) strand; PAM type: NNNNGHTT; PAM sequence: CTCAGTTT
ctactttgatttcaacaggt

SEQ ID NO: 11799 - DNA, 20 bp, Artificial Sequence
  Description of Artificial Sequence: Synthetic oligonucleotide
  Target: SCNA; (-) strand; PAM type: NNNNGHTT; PAM sequence: CTTTGATT
atttagatatcacactacta

SEQ ID NO: 11800 - DNA, 20 bp, Artificial Sequence
  Description of Artificial Sequence: Synthetic oligonucleotide
  Target: SCNA; (-) strand; PAM type: NNNNGHTT; PAM sequence: CCAAGCTT
gtggatttctgactcattct

SEQ ID NO: 11801 - DNA, 20 bp, Artificial Sequence
  Description of Artificial Sequence: Synthetic oligonucleotide
  Target: SCNA; (-) strand; PAM type: NNNNGHTT; PAM sequence: TGTGGATT
cttaaatctttaatctattg

SEQ ID NO: 11802 - DNA, 20 bp, Artificial Sequence
  Description of Artificial Sequence: Synthetic oligonucleotide
  Target: SCNA; (-) strand; PAM type: NNNNGHTT; PAM sequence: GGTTGATT
gatgcatgccctttctacct

SEQ ID NO: 11803 - DNA, 20 bp, Artificial Sequence
  Description of Artificial Sequence: Synthetic oligonucleotide
  Target: SCNA; (-) strand; PAM type: NNNNGHTT; PAM sequence: ACATGTTT
cttgacattcatgcagctat

SEQ ID NO: 11804 - DNA, 20 bp, Artificial Sequence
  Description of Artificial Sequence: Synthetic oligonucleotide
  Target: SCNA; (-) strand; PAM type: NNNNGHTT; PAM sequence: TATAGTTT
acttacgtactatgaaaggc

SEQ ID NO: 11805 - DNA, 20 bp, Artificial Sequence
  Description of Artificial Sequence: Synthetic oligonucleotide
  Target: SCNA; (-) strand; PAM type: NNNNGHTT; PAM sequence: TAATGCTT
ggactacacagataatcctc

SEQ ID NO: 11806 - DNA, 20 bp, Artificial Sequence
  Description of Artificial Sequence: Synthetic oligonucleotide
  Target: SCNA; (-) strand; PAM type: NNNNGHTT; PAM sequence: AAAGGATT
ggacaatgtgatgtattcac

SEQ ID NO: 11807 - DNA, 20 bp, Artificial Sequence
  Description of Artificial Sequence: Synthetic oligonucleotide
  Target: SCNA; (-) strand; PAM type: NNNNGHTT; PAM sequence: CAAGGATT
aaatccttgtggggtttata

SEQ ID NO: 11808 - DNA, 20 bp, Artificial Sequence
  Description of Artificial Sequence: Synthetic oligonucleotide
  Target: SCNA; (-) strand; PAM type: NNNNGHTT; PAM sequence: TGGGGTTT
tgtctttagagaaatccttg

SEQ ID NO: 11809 - DNA, 20 bp, Artificial Sequence
  Description of Artificial Sequence: Synthetic oligonucleotide
  Target: SCNA; (-) strand; PAM type: NNNNGHTT; PAM sequence: CCAGGTTT
agtgagtaatatttagcaag

SEQ ID NO: 11810 - DNA, 20 bp, Artificial Sequence
  Description of Artificial Sequence: Synthetic oligonucleotide
  Target: SCNA; (-) strand; PAM type: NNNNGHTT; PAM sequence: TAGTGTTT
agtctcaggaatatatctga

SEQ ID NO: 11811 - DNA, 20 bp, Artificial Sequence
  Description of Artificial Sequence: Synthetic oligonucleotide
  Target: SCNA; (-) strand; PAM type: NNNNGHTT; PAM sequence: GAGGGATT
gagtgctactatgattcact

SEQ ID NO: 11812 - DNA, 20 bp, Artificial Sequence
  Description of Artificial Sequence: Synthetic oligonucleotide
  Target: SCNA; (-) strand; PAM type: NNNNGHTT; PAM sequence: CTATGATT
gggagaggagtggagtgcta

SEQ ID NO: 11813 - DNA, 20 bp, Artificial Sequence
  Description of Artificial Sequence: Synthetic oligonucleotide
  Target: SCNA; (-) strand; PAM type: NNNNGHTT; PAM sequence: TGGTGTTT
ccctccctgtttcctctttg

SEQ ID NO: 11814 - DNA, 20 bp, Artificial Sequence
  Description of Artificial Sequence: Synthetic oligonucleotide
  Target: SCNA; (-) strand; PAM type: NNNNGHTT; PAM sequence: CCCTGTTT
ctgaccttactttcctccct

SEQ ID NO: 11815 - DNA, 20 bp, Artificial Sequence
  Description of Artificial Sequence: Synthetic oligonucleotide
  Target: SCNA; (-) strand; PAM type: NNNNGHTT; PAM sequence: GGGAGATT
caaaatgaactaaatgaaca

SEQ ID NO: 11816 - DNA, 20 bp, Artificial Sequence
  Description of Artificial Sequence: Synthetic oligonucleotide
  Target: SCNA; (-) strand; PAM type: NNNNGHTT; PAM sequence: GAAGGTTT
tttataaagggactaattac

SEQ ID NO: 11817 - DNA, 20 bp, Artificial Sequence
  Description of Artificial Sequence: Synthetic oligonucleotide
  Target: SCNA; (-) strand; PAM type: NNNNGHTT; PAM sequence: TTTTGCTT
aaacatctcaatatttggaa

SEQ ID NO: 11818 - DNA, 20 bp, Artificial Sequence
  Description of Artificial Sequence: Synthetic oligonucleotide
  Target: SCNA; (-) strand; PAM type: NNNNGHTT; PAM sequence: CAATGATT
gttgtatgcacaaaacattc

SEQ ID NO: 11819 - DNA, 20 bp, Artificial Sequence
  Description of Artificial Sequence: Synthetic oligonucleotide
  Target: SCNA; (-) strand; PAM type: NNNNGHTT; PAM sequence: CAGTGATT
tatgaaaataatataggtgt

SEQ ID NO: 11820 - DNA, 20 bp, Artificial Sequence
  Description of Artificial Sequence: Synthetic oligonucleotide
  Target: SCNA; (-) strand; PAM type: NNNNGHTT; PAM sequence: TCTTGTTT
caaggaagtattttaaatga

SEQ ID NO: 11821 - DNA, 20 bp, Artificial Sequence
  Description of Artificial Sequence: Synthetic oligonucleotide
  Target: SCNA; (-) strand; PAM type: NNNNGHTT; PAM sequence: CCCTGCTT
gtacacatctatttgtactt

SEQ ID NO: 11822 - DNA, 20 bp, Artificial Sequence
  Description of Artificial Sequence: Synthetic oligonucleotide
  Target: SCNA; (-) strand; PAM type: NNNNGHTT; PAM sequence: AATTGATT
caaaaacaattggcctcaag

SEQ ID NO: 11823 - DNA, 20 bp, Artificial Sequence
  Description of Artificial Sequence: Synthetic oligonucleotide
  Target: SCNA; (-) strand; PAM type: NNNNGHTT; PAM sequence: CTCAGATT
gtgtagattgtaaattcttc

SEQ ID NO: 11824 - DNA, 20 bp, Artificial Sequence
  Description of Artificial Sequence: Synthetic oligonucleotide
  Target: SCNA; (-) strand; PAM type: NNNNGHTT; PAM sequence: TGTAGATT
tccttgttttttcatgcctg

SEQ ID NO: 11825 - DNA, 20 bp, Artificial Sequence
  Description of Artificial Sequence: Synthetic oligonucleotide
  Target: SCNA; (-) strand; PAM type: NNNNGHTT; PAM sequence: CCTTGTTT
tccctttcacctacactctt

SEQ ID NO: 11826 - DNA, 20 bp, Artificial Sequence
  Description of Artificial Sequence: Synthetic oligonucleotide
  Target: SCNA; (-) strand; PAM type: NNNNGHTT; PAM sequence: TGGTGATT
ggagacatgctttgtgacct

SEQ ID NO: 11827 - DNA, 20 bp, Artificial Sequence
  Description of Artificial Sequence: Synthetic oligonucleotide
  Target: SCNA; (-) strand; PAM type: NNNNGHTT; PAM sequence: ACATGCTT
ccttcgctagcactgaggag

SEQ ID NO: 11828 - DNA, 20 bp, Artificial Sequence
  Description of Artificial Sequence: Synthetic oligonucleotide
  Target: SCNA; (-) strand; PAM type: NNNNGHTT; PAM sequence: TTCTGCTT
acatagcattgtgagacatt

SEQ ID NO: 11829 - DNA, 20 bp, Artificial Sequence
  Description of Artificial Sequence: Synthetic oligonucleotide
  Target: SCNA; (-) strand; PAM type: NNNNGHTT; PAM sequence: TATAGATT
cagttaatgtttcatttaat

SEQ ID NO: 11830 - DNA, 20 bp, Artificial Sequence
  Description of Artificial Sequence: Synthetic oligonucleotide
  Target: SCNA; (-) strand; PAM type: NNNNGHTT; PAM sequence: TAATGTTT
gtagccattaataaagcagt

SEQ ID NO: 11831 - DNA, 20 bp, Artificial Sequence
  Description of Artificial Sequence: Synthetic oligonucleotide
  Target: SCNA; (-) strand; PAM type: NNNNGHTT; PAM sequence: GTAAGATT
cagaatccaaatatgtgaat

SEQ ID NO: 11832 - DNA, 20 bp, Artificial Sequence
  Description of Artificial Sequence: Synthetic oligonucleotide
  Target: SCNA; (-) strand; PAM type: NNNNGHTT; PAM sequence: GTGAGATT
aaggtggaggttgcagtagg

SEQ ID NO: 11833 - DNA, 20 bp, Artificial Sequence
  Description of Artificial Sequence: Synthetic oligonucleotide
  Target: SCNA; (-) strand; PAM type: NNNNGHTT; PAM sequence: TCATGCTT
agaaagacagatgcggttgc

SEQ ID NO: 11834 - DNA, 20 bp, Artificial Sequence
  Description of Artificial Sequence: Synthetic oligonucleotide
  Target: SCNA; (-) strand; PAM type: NNNNGHTT; PAM sequence: GATGGCTT
acaagctattggtcaggtgt

SEQ ID NO: 11835 - DNA, 20 bp, Artificial Sequence
  Description of Artificial Sequence: Synthetic oligonucleotide
  Target: SCNA; (-) strand; PAM type: NNNNGHTT; PAM sequence: ATAAGTTT
taaggtatcaatgttatttc

SEQ ID NO: 11836 - DNA, 20 bp, Artificial Sequence
  Description of Artificial Sequence: Synthetic oligonucleotide
  Target: SCNA; (-) strand; PAM type: NNNNGHTT; PAM sequence: GCATGTTT
atgaatgggtgaagcacatg

SEQ ID NO: 11837 - DNA, 20 bp, Artificial Sequence
  Description of Artificial Sequence: Synthetic oligonucleotide
  Target: SCNA; (-) strand; PAM type: NNNNGHTT; PAM sequence: CAGTGATT
tctggagacagtaaaaagat

SEQ ID NO: 11838 - DNA, 20 bp, Artificial Sequence
  Description of Artificial Sequence: Synthetic oligonucleotide
  Target: SCNA; (-) strand; PAM type: NNNNGHTT; PAM sequence: ATATGATT
agtttgaaaggttgcattct

SEQ ID NO: 11839 - DNA, 20 bp, Artificial Sequence
  Description of Artificial Sequence: Synthetic oligonucleotide
  Target: SCNA; (-) strand; PAM type: NNNNGHTT; PAM sequence: GCCAGTTT
gagaaaacttaggtacgtaa

SEQ ID NO: 11840 - DNA, 20 bp, Artificial Sequence
  Description of Artificial Sequence: Synthetic oligonucleotide
  Target: SCNA; (-) strand; PAM type: NNNNGHTT; PAM sequence: AGCAGCTT
acctgcacatgcacgtttat

SEQ ID NO: 11841 - DNA, 20 bp, Artificial Sequence
  Description of Artificial Sequence: Synthetic oligonucleotide
  Target: SCNA; (-) strand; PAM type: NNNNGHTT; PAM sequence: GCACGTTT
ccacaccaaaacctgcacat

SEQ ID NO: 11842 - DNA, 20 bp, Artificial Sequence
  Description of Artificial Sequence: Synthetic oligonucleotide
  Target: SCNA; (-) strand; PAM type: NNNNGHTT; PAM sequence: ATGAGATT
tatggggattataattcaag

SEQ ID NO: 11843 - DNA, 20 bp, Artificial Sequence
  Description of Artificial Sequence: Synthetic oligonucleotide
  Target: SCNA; (-) strand; PAM type: NNNNGHTT; PAM sequence: TGGGGATT
cccttgacatgtggggatta

SEQ ID NO: 11844 - DNA, 20 bp, Artificial Sequence
  Description of Artificial Sequence: Synthetic oligonucleotide
  Target: SCNA; (-) strand; PAM type: NNNNGHTT; PAM sequence: TGGGGATT
ctggtctctcccttgacatg

SEQ ID NO: 11845 - DNA, 20 bp, Artificial Sequence
  Description of Artificial Sequence: Synthetic oligonucleotide
  Target: SCNA; (-) strand; PAM type: NNNNGHTT; PAM sequence: GAAAGCTT
gcatggctgaggaggcctca

SEQ ID NO: 11846 - DNA, 20 bp, Artificial Sequence
  Description of Artificial Sequence: Synthetic oligonucleotide
  Target: SCNA; (-) strand; PAM type: NNNNGHTT; PAM sequence: AGAGGTTT
ctgggaaatttataaaggaa

SEQ ID NO: 11847 - DNA, 20 bp, Artificial Sequence
  Description of Artificial Sequence: Synthetic oligonucleotide
  Target: SCNA; (-) strand; PAM type: NNNNGHTT; PAM sequence: GCCAGTTT
tgttctttgcttggatactt

SEQ ID NO: 11848 - DNA, 20 bp, Artificial Sequence
  Description of Artificial Sequence: Synthetic oligonucleotide
  Target: SCNA; (-) strand; PAM type: NNNNGHTT; PAM sequence: CTTTGCTT
caaacctccagttctctgtt

SEQ ID NO: 11849 - DNA, 20 bp, Artificial Sequence
  Description of Artificial Sequence: Synthetic oligonucleotide
  Target: SCNA; (-) strand; PAM type: NNNNGHTT; PAM sequence: ATTAGTTT
acttttttcaatcactcatt

SEQ ID NO: 11850 - DNA, 20 bp, Artificial Sequence
  Description of Artificial Sequence: Synthetic oligonucleotide
  Target: SCNA; (-) strand; PAM type: NNNNGHTT; PAM sequence: AAAGGTTT
ccatgaaagagaggacaatg

SEQ ID NO: 11851 - DNA, 20 bp, Artificial Sequence
  Description of Artificial Sequence: Synthetic oligonucleotide
  Target: SCNA; (-) strand; PAM type: NNNNGHTT; PAM sequence: ATATGATT
ttacacaatccaggtgtatc

SEQ ID NO: 11852 - DNA, 20 bp, Artificial Sequence
  Description of Artificial Sequence: Synthetic oligonucleotide
  Target: SCNA; (-) strand; PAM type: NNNNGHTT; PAM sequence: CACTGATT
agaagaaacaaattgtaatt

SEQ ID NO: 11853 - DNA, 20 bp, Artificial Sequence
  Description of Artificial Sequence: Synthetic oligonucleotide
  Target: SCNA; (-) strand; PAM type: NNNNGHTT; PAM sequence: AACAGCTT
attgtcaatattattattac

SEQ ID NO: 11854 - DNA, 20 bp, Artificial Sequence
  Description of Artificial Sequence: Synthetic oligonucleotide
  Target: SCNA; (-) strand; PAM type: NNNNGHTT; PAM sequence: AATTGCTT
ataatttcaaatacacagta

SEQ ID NO: 11855 - DNA, 20 bp, Artificial Sequence
  Description of Artificial Sequence: Synthetic oligonucleotide
  Target: SCNA; (-) strand; PAM type: NNNNGHTT; PAM sequence: AATTGTTT
atatagtgctatgattttca

SEQ ID NO: 11856 - DNA, 20 bp, Artificial Sequence
  Description of Artificial Sequence: Synthetic oligonucleotide
  Target: SCNA; (-) strand; PAM type: NNNNGHTT; PAM sequence: CTATGATT
acgttacattttatatagtg

SEQ ID NO: 11857 - DNA, 20 bp, Artificial Sequence
  Description of Artificial Sequence: Synthetic oligonucleotide
  Target: SCNA; (-) strand; PAM type: NNNNGHTT; PAM sequence: TACAGCTT
aattgtgccgtggttagttg

SEQ ID NO: 11858 - DNA, 20 bp, Artificial Sequence
  Description of Artificial Sequence: Synthetic oligonucleotide
  Target: SCNA; (-) strand; PAM type: NNNNGHTT; PAM sequence: TATTGCTT
cgtatactctaaaggaagtt

SEQ ID NO: 11859 - DNA, 20 bp, Artificial Sequence
  Description of Artificial Sequence: Synthetic oligonucleotide
  Target: SCNA; (-) strand; PAM type: NNNNGHTT; PAM sequence: GGAAGTTT
atttctccgtatactctaaa

SEQ ID NO: 11860 - DNA, 20 bp, Artificial Sequence
  Description of Artificial Sequence: Synthetic oligonucleotide
  Target: SCNA; (-) strand; PAM type: NNNNGHTT; PAM sequence: AAGGGCTT
ggtcccagagcctggcacaa

SEQ ID NO: 11861 - DNA, 20 bp, Artificial Sequence
  Description of Artificial Sequence: Synthetic oligonucleotide
  Target: SCNA; (-) strand; PAM type: NNNNGHTT; PAM sequence: ACTTGCTT
tagctgtgtgaccatggaca

SEQ ID NO: 11862 - DNA, 20 bp, Artificial Sequence
  Description of Artificial Sequence: Synthetic oligonucleotide
  Target: SCNA; (-) strand; PAM type: NNNNGHTT; PAM sequence: TCCAGTTT
ggatatataatgtggccgtc

SEQ ID NO: 11863 - DNA, 20 bp, Artificial Sequence
  Description of Artificial Sequence: Synthetic oligonucleotide
  Target: SCNA; (-) strand; PAM type: NNNNGHTT; PAM sequence: ATTTGATT
gtgtggcttgaattctagaa

SEQ ID NO: 11864 - DNA, 20 bp, Artificial Sequence
  Description of Artificial Sequence: Synthetic oligonucleotide
  Target: SCNA; (-) strand; PAM type: NNNNGHTT; PAM sequence: TGTGGCTT
gggtaatatattgtatgtgg

SEQ ID NO: 11865 - DNA, 20 bp, Artificial Sequence
  Description of Artificial Sequence: Synthetic oligonucleotide
  Target: SCNA; (-) strand; PAM type: NNNNGHTT; PAM sequence: CATTGATT
agcacagagtgaatgtctaa

SEQ ID NO: 11866 - DNA, 20 bp, Artificial Sequence
  Description of Artificial Sequence: Synthetic oligonucleotide
  Target: SCNA; (-) strand; PAM type: NNNNGHTT; PAM sequence: GTTTGTTT
aaataaggtggttgtttttt

SEQ ID NO: 11867 - DNA, 20 bp, Artificial Sequence
  Description of Artificial Sequence: Synthetic oligonucleotide
  Target: SCNA; (-) strand; PAM type: NNNNGHTT; PAM sequence: TTTTGTTT
agtaaaataaggtggttgtt

SEQ ID NO: 11868 - DNA, 20 bp, Artificial Sequence
  Description of Artificial Sequence: Synthetic oligonucleotide
  Target: SCNA; (-) strand; PAM type: NNNNGHTT; PAM sequence: GGTTGTTT
ggtcacaagtaaaataaggt

SEQ ID NO: 11869 - DNA, 20 bp, Artificial Sequence
  Description of Artificial Sequence: Synthetic oligonucleotide
  Target: SCNA; (-) strand; PAM type: NNNNGHTT; PAM sequence: TAATGATT
gatccctagatagcaaccag

SEQ ID NO: 11870 - DNA, 20 bp, Artificial Sequence
  Description of Artificial Sequence: Synthetic oligonucleotide
  Target: SCNA; (-) strand; PAM type: NNNNGHTT; PAM sequence: AGGGGTTT
tttgaacattgtattttgaa

SEQ ID NO: 11871 - DNA, 20 bp, Artificial Sequence
  Description of Artificial Sequence: Synthetic oligonucleotide
  Target: SCNA; (-) strand; PAM type: NNNNGHTT; PAM sequence: CCTTGTTT
tgtgagccattgtgccaggc

SEQ ID NO: 11872 - DNA, 20 bp, Artificial Sequence
  Description of Artificial Sequence: Synthetic oligonucleotide
  Target: SCNA; (-) strand; PAM type: NNNNGHTT; PAM sequence: ATTTGTTT
tagaaatgcattttaacagc

SEQ ID NO: 11873 - DNA, 20 bp, Artificial Sequence
  Description of Artificial Sequence: Synthetic oligonucleotide
  Target: SCNA; (-) strand; PAM type: NNNNGHTT; PAM sequence: CATTGTTT
tgatatatataaaaacttgc

SEQ ID NO: 11874 - DNA, 20 bp, Artificial Sequence
  Description of Artificial Sequence: Synthetic oligonucleotide
  Target: SCNA; (-) strand; PAM type: NNNNGHTT; PAM sequence: GTCTGATT
ttgtttctgagaacaccatt

SEQ ID NO: 11875 - DNA, 20 bp, Artificial Sequence
  Description of Artificial Sequence: Synthetic oligonucleotide
  Target: SCNA; (-) strand; PAM type: NNNNGHTT; PAM sequence: CATTGTTT
atattaactcttctaagatg

SEQ ID NO: 11876 - DNA, 20 bp, Artificial Sequence
  Description of Artificial Sequence: Synthetic oligonucleotide
  Target: SCNA; (-) strand; PAM type: NNNNGHTT; PAM sequence: CATTGTTT
actttttcttgttagagata

SEQ ID NO: 11877 - DNA, 20 bp, Artificial Sequence
  Description of Artificial Sequence: Synthetic oligonucleotide
  Target: SCNA; (-) strand; PAM type: NNNNGHTT; PAM sequence: ATGTGTTT
tatatttgttaccttaggga

SEQ ID NO: 11878 - DNA, 20 bp, Artificial Sequence
  Description of Artificial Sequence: Synthetic oligonucleotide
  Target: SCNA; (-) strand; PAM type: NNNNGHTT; PAM sequence: TTAGGCTT
ctggattattaaaagattta

SEQ ID NO: 11879 - DNA, 20 bp, Artificial Sequence
  Description of Artificial Sequence: Synthetic oligonucleotide
  Target: SCNA; (-) strand; PAM type: NNNNGHTT; PAM sequence: AAAAGATT
atgtttctttctggattatt

SEQ ID NO: 11880 - DNA, 20 bp, Artificial Sequence
  Description of Artificial Sequence: Synthetic oligonucleotide
  Target: SCNA; (-) strand; PAM type: NNNNGHTT; PAM sequence: TCTGGATT
atgtcttctaaatgtttctt

SEQ ID NO: 11881 - DNA, 20 bp, Artificial Sequence
  Description of Artificial Sequence: Synthetic oligonucleotide
  Target: SCNA; (-) strand; PAM type: NNNNGHTT; PAM sequence: AAATGTTT
tgtctttcttaatgtcttct

SEQ ID NO: 11882 - DNA, 20 bp, Artificial Sequence
  Description of Artificial Sequence: Synthetic oligonucleotide
  Target: SCNA; (-) strand; PAM type: NNNNGHTT; PAM sequence: ATGAGCTT
tgctttttatgttagctttt

SEQ ID NO: 11883 - DNA, 20 bp, Artificial Sequence
  Description of Artificial Sequence: Synthetic oligonucleotide
  Target: SCNA; (-) strand; PAM type: NNNNGHTT; PAM sequence: GTTAGCTT
atttttaacctgctttttat

SEQ ID NO: 11884 - DNA, 20 bp, Artificial Sequence
  Description of Artificial Sequence: Synthetic oligonucleotide
  Target: SCNA; (-) strand; PAM type: NNNNGHTT; PAM sequence: ACCTGCTT
cttgtagaaattgattttta

SEQ ID NO: 11885 - DNA, 20 bp, Artificial Sequence
  Description of Artificial Sequence: Synthetic oligonucleotide
  Target: SCNA; (-) strand; PAM type: NNNNGHTT; PAM sequence: AATTGATT
gtctatatttttcttgtaga

SEQ ID NO: 11886 - DNA, 20 bp, Artificial Sequence
  Description of Artificial Sequence: Synthetic oligonucleotide
  Target: SCNA; (-) strand; PAM type: NNNNGHTT; PAM sequence: GTTTGATT
gttatgtatttccccctttt

SEQ ID NO: 11887 - DNA, 20 bp, Artificial Sequence
  Description of Artificial Sequence: Synthetic oligonucleotide
  Target: SCNA; (-) strand; PAM type: NNNNGHTT; PAM sequence: TTTTGTTT
gtttgttatgtatttccccc

SEQ ID NO: 11888 - DNA, 20 bp, Artificial Sequence
  Description of Artificial Sequence: Synthetic oligonucleotide
  Target: SCNA; (-) strand; PAM type: NNNNGHTT; PAM sequence: TAGTGTTT
tttgaaaatttgcattcgtc

SEQ ID NO: 11889 - DNA, 20 bp, Artificial Sequence
  Description of Artificial Sequence: Synthetic oligonucleotide
  Target: SCNA; (-) strand; PAM type: NNNNGHTT; PAM sequence: TATAGCTT
acttttaaaatttggtaaaa

SEQ ID NO: 11890 - DNA, 20 bp, Artificial Sequence
  Description of Artificial Sequence: Synthetic oligonucleotide
  Target: SCNA; (-) strand; PAM type: NNNNGHTT; PAM sequence: CATGGATT
aaatcagccagacacacaga

SEQ ID NO: 11891 - DNA, 20 bp, Artificial Sequence
  Description of Artificial Sequence: Synthetic oligonucleotide
  Target: SCNA; (-) strand; PAM type: NNNNGHTT; PAM sequence: CCAAGATT
ttcacttaagtgttctctac

SEQ ID NO: 11892 - DNA, 20 bp, Artificial Sequence
  Description of Artificial Sequence: Synthetic oligonucleotide
  Target: SCNA; (-) strand; PAM type: NNNNGHTT; PAM sequence: ATTAGCTT
cttaccagacaaatttggat

SEQ ID NO: 11893 - DNA, 20 bp, Artificial Sequence
  Description of Artificial Sequence: Synthetic oligonucleotide
  Target: SCNA; (-) strand; PAM type: NNNNGHTT; PAM sequence: CATAGCTT
gagctagatggcttgagggt

SEQ ID NO: 11894 - DNA, 20 bp, Artificial Sequence
  Description of Artificial Sequence: Synthetic oligonucleotide
  Target: SCNA; (-) strand; PAM type: NNNNGHTT; PAM sequence: GATGGCTT
cagtgaaatcgtttgagcta

SEQ ID NO: 11895 - DNA, 20 bp, Artificial Sequence
  Description of Artificial Sequence: Synthetic oligonucleotide
  Target: SCNA; (-) strand; PAM type: NNNNGHTT; PAM sequence: AATCGTTT
cagatcctagatgccagtga

SEQ ID NO: 11896 - DNA, 20 bp, Artificial Sequence
  Description of Artificial Sequence: Synthetic oligonucleotide
  Target: SCNA; (-) strand; PAM type: NNNNGHTT; PAM sequence: CTGTGTTT
acatccaatgcaaattttgc

SEQ ID NO: 11897 - DNA, 20 bp, Artificial Sequence
  Description of Artificial Sequence: Synthetic oligonucleotide
  Target: SCNA; (-) strand; PAM type: NNNNGHTT; PAM sequence: ATTAGCTT
caaaattatgtggaagggcc

SEQ ID NO: 11898 - DNA, 20 bp, Artificial Sequence
  Description of Artificial Sequence: Synthetic oligonucleotide
  Target: SCNA; (-) strand; PAM type: NNNNGHTT; PAM sequence: TTTAGCTT
tttgatctggttgaaaccat

SEQ ID NO: 11899 - DNA, 20 bp, Artificial Sequence
  Description of Artificial Sequence: Synthetic oligonucleotide
  Target: SCNA; (-) strand; PAM type: NNNNGHTT; PAM sequence: TAATGTTT
ctgaaaaactctgcttactt

SEQ ID NO: 11900 - DNA, 20 bp, Artificial Sequence
  Description of Artificial Sequence: Synthetic oligonucleotide
  Target: SCNA; (-) strand; PAM type: NNNNGHTT; PAM sequence: CTCTGCTT
tagtcaaatctactgaaaaa

SEQ ID NO: 11901 - DNA, 20 bp, Artificial Sequence
  Description of Artificial Sequence: Synthetic oligonucleotide
  Target: SCNA; (-) strand; PAM type: NNNNGHTT; PAM sequence: TACTGATT
cttcttttatccatagtcta

SEQ ID NO: 11902 - DNA, 20 bp, Artificial Sequence
  Description of Artificial Sequence: Synthetic oligonucleotide
  Target: SCNA; (-) strand; PAM type: NNNNGHTT; PAM sequence: TCAAGATT
tagtcatctctgaatattga

SEQ ID NO: 11903 - DNA, 20 bp, Artificial Sequence
  Description of Artificial Sequence: Synthetic oligonucleotide
  Target: SCNA; (-) strand; PAM type: NNNNGHTT; PAM sequence: ATTAGCTT
gagaaaaatgtgaaaaacga

SEQ ID NO: 11904 - DNA, 20 bp, Artificial Sequence
  Description of Artificial Sequence: Synthetic oligonucleotide
  Target: SCNA; (-) strand; PAM type: NNNNGHTT; PAM sequence: AAAAGATT
ttcttcagaaacttcagcaa

SEQ ID NO: 11905 - DNA, 20 bp, Artificial Sequence
  Description of Artificial Sequence: Synthetic oligonucleotide
  Target: SCNA; (-) strand; PAM type: NNNNGHTT; PAM sequence: CCAGGCTT
gtgtggaactctgagaggca

SEQ ID NO: 11906 - DNA, 20 bp, Artificial Sequence
  Description of Artificial Sequence: Synthetic oligonucleotide
  Target: SCNA; (-) strand; PAM type: NNNNGHTT; PAM sequence: GTACGTTT
tgacagctatgaaatgtaca

SEQ ID NO: 11907 - DNA, 20 bp, Artificial Sequence
  Description of Artificial Sequence: Synthetic oligonucleotide
  Target: SCNA; (-) strand; PAM type: NNNNGHTT; PAM sequence: AAATGTTT
gatatataaaaaataaagta

SEQ ID NO: 11908 - DNA, 20 bp, Artificial Sequence
  Description of Artificial Sequence: Synthetic oligonucleotide
  Target: SCNA; (-) strand; PAM type: NNNNGHTT; PAM sequence: AATAGTTT
ttttatatctaaacttactc

SEQ ID NO: 11909 - DNA, 20 bp, Artificial Sequence
  Description of Artificial Sequence: Synthetic oligonucleotide
  Target: SCNA; (-) strand; PAM type: NNNNGHTT; PAM sequence: CTCTGTTT
atgccttccaaaacaaagtt

SEQ ID NO: 11910 - DNA, 20 bp, Artificial Sequence
  Description of Artificial Sequence: Synthetic oligonucleotide
  Target: SCNA; (-) strand; PAM type: NNNNGHTT; PAM sequence: GGGAGCTT
agattaggaatatcaaggca

SEQ ID NO: 11911 - DNA, 20 bp, Artificial Sequence
  Description of Artificial Sequence: Synthetic oligonucleotide
  Target: SCNA; (-) strand; PAM type: NNNNGHTT; PAM sequence: AGAAGATT
gtgagcataagatgccagaa

SEQ ID NO: 11912 - DNA, 20 bp, Artificial Sequence
  Description of Artificial Sequence: Synthetic oligonucleotide
  Target: SCNA; (-) strand; PAM type: NNNNGHTT; PAM sequence: TGAAGATT
ttcactcatgagataaatct

SEQ ID NO: 11913 - DNA, 20 bp, Artificial Sequence
  Description of Artificial Sequence: Synthetic oligonucleotide
  Target: SCNA; (-) strand; PAM type: NNNNGHTT; PAM sequence: ATATGTTT
tcatgatagctcattttctt

SEQ ID NO: 11914 - DNA, 20 bp, Artificial Sequence
  Description of Artificial Sequence: Synthetic oligonucleotide
  Target: SCNA; (-) strand; PAM type: NNNNGHTT; PAM sequence: ATATGATT
attcactacttcagaattct

SEQ ID NO: 11915 - DNA, 20 bp, Artificial Sequence
  Description of Artificial Sequence: Synthetic oligonucleotide
  Target: SCNA; (-) strand; PAM type: NNNNGHTT; PAM sequence: TCCTGATT
aacaactaactgcccagaat

SEQ ID NO: 11916 - DNA, 20 bp, Artificial Sequence
  Description of Artificial Sequence: Synthetic oligonucleotide
  Target: SCNA; (-) strand; PAM type: NNNNGHTT; PAM sequence: GACTGTTT
tgaattgtttgttaaatgta

SEQ ID NO: 11917 - DNA, 20 bp, Artificial Sequence
  Description of Artificial Sequence: Synthetic oligonucleotide
  Target: SCNA; (-) strand; PAM type: NNNNGHTT; PAM sequence: AATTGTTT
caattaatatgtagaaaatg

SEQ ID NO: 11918 - DNA, 20 bp, Artificial Sequence
  Description of Artificial Sequence: Synthetic oligonucleotide
  Target: SCNA; (-) strand; PAM type: NNNNGHTT; PAM sequence: CTGTGTTT
gaatgaaatgcaaatcttta

SEQ ID NO: 11919 - DNA, 20 bp, Artificial Sequence
  Description of Artificial Sequence: Synthetic oligonucleotide
  Target: SCNA; (-) strand; PAM type: NNNNGHTT; PAM sequence: GCCTGCTT
cctaacctctgaactgatct

SEQ ID NO: 11920 - DNA, 20 bp, Artificial Sequence
  Description of Artificial Sequence: Synthetic oligonucleotide
  Target: SCNA; (-) strand; PAM type: NNNNGHTT; PAM sequence: GAAGGCTT
aataactgtcttaccactaa

SEQ ID NO: 11921 - DNA, 20 bp, Artificial Sequence
  Description of Artificial Sequence: Synthetic oligonucleotide
  Target: SCNA; (-) strand; PAM type: NNNNGHTT; PAM sequence: CCTTGTTT
cctactcttgttactcaggg

SEQ ID NO: 11922 - DNA, 20 bp, Artificial Sequence
  Description of Artificial Sequence: Synthetic oligonucleotide
  Target: SCNA; (-) strand; PAM type: NNNNGHTT; PAM sequence: AGTGGTTT
ttagttacaaaaaattagcc

SEQ ID NO: 11923 - DNA, 20 bp, Artificial Sequence
  Description of Artificial Sequence: Synthetic oligonucleotide
  Target: SCNA; (-) strand; PAM type: NNNNGHTT; PAM sequence: GCCAGATT
tggaaatctggaaatttcta

SEQ ID NO: 11924 - DNA, 20 bp, Artificial Sequence
  Description of Artificial Sequence: Synthetic oligonucleotide
  Target: SCNA; (-) strand; PAM type: NNNNGHTT; PAM sequence: AAATGTTT
ctctatttttggaatccatg

SEQ ID NO: 11925 - DNA, 20 bp, Artificial Sequence
  Description of Artificial Sequence: Synthetic oligonucleotide
  Target: SCNA; (-) strand; PAM type: NNNNGHTT; PAM sequence: ATCTGCTT
atggtagtgttgtttcagaa

SEQ ID NO: 11926 - DNA, 20 bp, Artificial Sequence
  Description of Artificial Sequence: Synthetic oligonucleotide
  Target: SCNA; (-) strand; PAM type: NNNNGHTT; PAM sequence: TGTTGTTT
tataatgaaatatatggtag

SEQ ID NO: 11927 - DNA, 20 bp, Artificial Sequence
  Description of Artificial Sequence: Synthetic oligonucleotide
  Target: SCNA; (-) strand; PAM type: NNNNGHTT; PAM sequence: TTGTGTTT
ttgttacagctaacaaatat

SEQ ID NO: 11928 - DNA, 20 bp, Artificial Sequence
  Description of Artificial Sequence: Synthetic oligonucleotide
  Target: SCNA; (-) strand; PAM type: NNNNGHTT; PAM sequence: AAATGATT
ttcatgtgataaatatcatg

SEQ ID NO: 11929 - DNA, 20 bp, Artificial Sequence
  Description of Artificial Sequence: Synthetic oligonucleotide
  Target: SCNA; (-) strand; PAM type: NNNNGHTT; PAM sequence: GAAGGCTT
ctcactatatatgaaaaaat

SEQ ID NO: 11930 - DNA, 20 bp, Artificial Sequence
  Description of Artificial Sequence: Synthetic oligonucleotide
  Target: SCNA; (-) strand; PAM type: NNNNGHTT; PAM sequence: GGTTGTTT
ttcaactgtaaatagaaatt

SEQ ID NO: 11931 - DNA, 20 bp, Artificial Sequence
  Description of Artificial Sequence: Synthetic oligonucleotide
  Target: SCNA; (-) strand; PAM type: NNNNGHTT; PAM sequence: GTATGTTT
acaaggattgagtcatagtt

SEQ ID NO: 11932 - DNA, 20 bp, Artificial Sequence
  Description of Artificial Sequence: Synthetic oligonucleotide
  Target: SCNA; (-) strand; PAM type: NNNNGHTT; PAM sequence: CAAGGATT
aacagtttattgaaaggtaa

SEQ ID NO: 11933 - DNA, 20 bp, Artificial Sequence
  Description of Artificial Sequence: Synthetic oligonucleotide
  Target: SCNA; (-) strand; PAM type: NNNNGHTT; PAM sequence: AACAGTTT
taagttatatctttgggctt

SEQ ID NO: 11934 - DNA, 20 bp, Artificial Sequence
  Description of Artificial Sequence: Synthetic oligonucleotide
  Target: SCNA; (-) strand; PAM type: NNNNGHTT; PAM sequence: TTGGGCTT
ttttaaaataagttatatct

SEQ ID NO: 11935 - DNA, 20 bp, Artificial Sequence
  Description of Artificial Sequence: Synthetic oligonucleotide
  Target: SCNA; (-) strand; PAM type: NNNNGHTT; PAM sequence: TAGTGCTT
tttgggtcatttttattcat

SEQ ID NO: 11936 - DNA, 20 bp, Artificial Sequence
  Description of Artificial Sequence: Synthetic oligonucleotide
  Target: SCNA; (-) strand; PAM type: NNNNGHTT; PAM sequence: TATAGTTT
gtatgaacaaagactttata

SEQ ID NO: 11937 - DNA, 20 bp, Artificial Sequence
  Description of Artificial Sequence: Synthetic oligonucleotide
  Target: SCNA; (-) strand; PAM type: NNNNGHTT; PAM sequence: ATGTGTTT
gagaaccccatccatagtgc

SEQ ID NO: 11938 - DNA, 20 bp, Artificial Sequence
  Description of Artificial Sequence: Synthetic oligonucleotide
  Target: SCNA; (-) strand; PAM type: NNNNGHTT; PAM sequence: GCCCGTTT
ttttgatacactctttagct

SEQ ID NO: 11939 - DNA, 20 bp, Artificial Sequence
  Description of Artificial Sequence: Synthetic oligonucleotide
  Target: SCNA; (-) strand; PAM type: NNNNGHTT; PAM sequence: TGCAGTTT
tatataggaaactgtaaaag

SEQ ID NO: 11940 - DNA, 20 bp, Artificial Sequence
  Description of Artificial Sequence: Synthetic oligonucleotide
  Target: SCNA; (-) strand; PAM type: NNNNGHTT; PAM sequence: TTACGATT
taatactatcacgttggtta

SEQ ID NO: 11941 - DNA, 20 bp, Artificial Sequence
  Description of Artificial Sequence: Synthetic oligonucleotide
  Target: SCNA; (-) strand; PAM type: NNNNGHTT; PAM sequence: ATCTGTTT
ctgagaaagctgttgtctta

SEQ ID NO: 11942 - DNA, 20 bp, Artificial Sequence
  Description of Artificial Sequence: Synthetic oligonucleotide
  Target: SCNA; (-) strand; PAM type: NNNNGHTT; PAM sequence: AAATGTTT
ttgcaaattcttactattat

SEQ ID NO: 11943 - DNA, 20 bp, Artificial Sequence
  Description of Artificial Sequence: Synthetic oligonucleotide
  Target: SCNA; (-) strand; PAM type: NNNNGHTT; PAM sequence: GTTTGATT
catttgaggccttactcatt

SEQ ID NO: 11944 - DNA, 20 bp, Artificial Sequence
  Description of Artificial Sequence: Synthetic oligonucleotide
  Target: SCNA; (-) strand; PAM type: NNNNGHTT; PAM sequence: CATTGTTT
tgatcatttgaggccttact

SEQ ID NO: 11945 - DNA, 20 bp, Artificial Sequence
  Description of Artificial Sequence: Synthetic oligonucleotide
  Target: SCNA; (-) strand; PAM type: NNNNGHTT; PAM sequence: GAGTGATT
ttgtcttgcccaagtgaatt

SEQ ID NO: 11946 - DNA, 20 bp, Artificial Sequence
  Description of Artificial Sequence: Synthetic oligonucleotide
  Target: SCNA; (-) strand; PAM type: NNNNGHTT; PAM sequence: AATGGATT
aacaaaaattttagacgaat

SEQ ID NO: 11947 - DNA, 20 bp, Artificial Sequence
  Description of Artificial Sequence: Synthetic oligonucleotide
  Target: SCNA; (-) strand; PAM type: NNNNGHTT; PAM sequence: TGAGGTTT
tcttcccattaagtttgaag

SEQ ID NO: 11948 - DNA, 20 bp, Artificial Sequence
  Description of Artificial Sequence: Synthetic oligonucleotide
  Target: SCNA; (-) strand; PAM type: NNNNGHTT; PAM sequence: TTAAGTTT
ccaatctttttctcttccca

SEQ ID NO: 11949 - DNA, 20 bp, Artificial Sequence
  Description of Artificial Sequence: Synthetic oligonucleotide
  Target: SCNA; (-) strand; PAM type: NNNNGHTT; PAM sequence: CTGTGCTT
ctatctatcaatattatgga

SEQ ID NO: 11950 - DNA, 20 bp, Artificial Sequence
  Description of Artificial Sequence: Synthetic oligonucleotide
  Target: SCNA; (-) strand; PAM type: NNNNGHTT; PAM sequence: TGGAGTTT
aatcgctcgaacccaggaga

SEQ ID NO: 11951 - DNA, 20 bp, Artificial Sequence
  Description of Artificial Sequence: Synthetic oligonucleotide
  Target: SCNA; (-) strand; PAM type: NNNNGHTT; PAM sequence: AGGTGTTT
cgggtggatcacctgaagtc

SEQ ID NO: 11952 - DNA, 20 bp, Artificial Sequence
  Description of Artificial Sequence: Synthetic oligonucleotide
  Target: SCNA; (-) strand; PAM type: NNNNGHTT; PAM sequence: TTTAGCTT
tcgactgattcaaaagtcat

SEQ ID NO: 11953 - DNA, 20 bp, Artificial Sequence
  Description of Artificial Sequence: Synthetic oligonucleotide
  Target: SCNA; (-) strand; PAM type: NNNNGHTT; PAM sequence: GACTGATT
gttcccacgtacattcattc

SEQ ID NO: 11954 - DNA, 20 bp, Artificial Sequence
  Description of Artificial Sequence: Synthetic oligonucleotide
  Target: SCNA; (-) strand; PAM type: NNNNGHTT; PAM sequence: TGCTGCTT
acttatgtaaataagcattc

SEQ ID NO: 11955 - DNA, 20 bp, Artificial Sequence
  Description of Artificial Sequence: Synthetic oligonucleotide
  Target: SCNA; (-) strand; PAM type: NNNNGHTT; PAM sequence: ACTGGATT
attccctttaataagcatgt

SEQ ID NO: 11956 - DNA, 20 bp, Artificial Sequence
  Description of Artificial Sequence: Synthetic oligonucleotide
  Target: SCNA; (-) strand; PAM type: NNNNGHTT; PAM sequence: TCTGGATT
tactgggtcctagattacag

SEQ ID NO: 11957 - DNA, 20 bp, Artificial Sequence
  Description of Artificial Sequence: Synthetic oligonucleotide
  Target: SCNA; (-) strand; PAM type: NNNNGHTT; PAM sequence: CCTAGATT
ctaagtaactattactgggt

SEQ ID NO: 11958 - DNA, 20 bp, Artificial Sequence
  Description of Artificial Sequence: Synthetic oligonucleotide
  Target: SCNA; (-) strand; PAM type: NNNNGHTT; PAM sequence: GGATGTTT
gagaactctcattcattgta

SEQ ID NO: 11959 - DNA, 20 bp, Artificial Sequence
  Description of Artificial Sequence: Synthetic oligonucleotide
  Target: SCNA; (-) strand; PAM type: NNNNGHTT; PAM sequence: CTCAGTTT
tggaataaatgcacaaggta

SEQ ID NO: 11960 - DNA, 20 bp, Artificial Sequence
  Description of Artificial Sequence: Synthetic oligonucleotide
  Target: SCNA; (-) strand; PAM type: NNNNGHTT; PAM sequence: TGTGGCTT
ttattttttaaaaacctgta

SEQ ID NO: 11961 - DNA, 20 bp, Artificial Sequence
  Description of Artificial Sequence: Synthetic oligonucleotide
  Target: SCNA; (-) strand; PAM type: NNNNGHTT; PAM sequence: AGCAGTTT
gtgaaaagaacaaattacaa

SEQ ID NO: 11962 - DNA, 20 bp, Artificial Sequence
  Description of Artificial Sequence: Synthetic oligonucleotide
  Target: SCNA; (-) strand; PAM type: NNNNGHTT; PAM sequence: AGTGGTTT
gcattatggttgatccatgc

SEQ ID NO: 11963 - DNA, 20 bp, Artificial Sequence
  Description of Artificial Sequence: Synthetic oligonucleotide
  Target: SCNA; (-) strand; PAM type: NNNNGHTT; PAM sequence: AGAAGTTT
aaattgaaaaaaatagtgct

SEQ ID NO: 11964 - DNA, 20 bp, Artificial Sequence
  Description of Artificial Sequence: Synthetic oligonucleotide
  Target: SCNA; (-) strand; PAM type: NNNNGHTT; PAM sequence: AATTGATT
tatgaagatgtttatcacag

SEQ ID NO: 11965 - DNA, 20 bp, Artificial Sequence
  Description of Artificial Sequence: Synthetic oligonucleotide
  Target: SCNA; (-) strand; PAM type: NNNNGHTT; PAM sequence: AGATGTTT
gatcataagtttaaatatga

SEQ ID NO: 11966 - DNA, 20 bp, Artificial Sequence
  Description of Artificial Sequence: Synthetic oligonucleotide
  Target: SCNA; (-) strand; PAM type: NNNNGHTT; PAM sequence: ATAAGTTT
ctaagaatttaaatatgatc

SEQ ID NO: 11967 - DNA, 20 bp, Artificial Sequence
  Description of Artificial Sequence: Synthetic oligonucleotide
  Target: SCNA; (-) strand; PAM type: NNNNGHTT; PAM sequence: TGATGTTT
cagggtcacagtgcctcagc

SEQ ID NO: 11968 - DNA, 20 bp, Artificial Sequence
  Description of Artificial Sequence: Synthetic oligonucleotide
  Target: SCNA; (-) strand; PAM type: NNNNGHTT; PAM sequence: CATGGTTT
cttggaatttagaattgata

SEQ ID NO: 11969 - DNA, 20 bp, Artificial Sequence
  Description of Artificial Sequence: Synthetic oligonucleotide
  Target: SCNA; (-) strand; PAM type: NNNNGHTT; PAM sequence: TCCTGCTT
gggagtaagacccaagtcct

SEQ ID NO: 11970 - DNA, 20 bp, Artificial Sequence
  Description of Artificial Sequence: Synthetic oligonucleotide
  Target: SCNA; (-) strand; PAM type: NNNNGHTT; PAM sequence: GAATGTTT
gtcagcccccacgtctgtat

SEQ ID NO: 11971 - DNA, 20 bp, Artificial Sequence
  Description of Artificial Sequence: Synthetic oligonucleotide
  Target: SCNA; (-) strand; PAM type: NNNNGHTT; PAM sequence: TCTGGTTT
tatccctacccttcagagag

SEQ ID NO: 11972 - DNA, 20 bp, Artificial Sequence
  Description of Artificial Sequence: Synthetic oligonucleotide
  Target: SCNA; (-) strand; PAM type: NNNNGHTT; PAM sequence: GATGGTTT
ccaagttcatttgaaagtgg

SEQ ID NO: 11973 - DNA, 20 bp, Artificial Sequence
  Description of Artificial Sequence: Synthetic oligonucleotide
  Target: SCNA; (-) strand; PAM type: NNNNGHTT; PAM sequence: CAGAGTTT
tccattaaggggaaggaggg

SEQ ID NO: 11974 - DNA, 20 bp, Artificial Sequence
  Description of Artificial Sequence: Synthetic oligonucleotide
  Target: SCNA; (-) strand; PAM type: NNNNGHTT; PAM sequence: AGTAGATT
cctagatgggggcaggtcta

SEQ ID NO: 11975 - DNA, 20 bp, Artificial Sequence
  Description of Artificial Sequence: Synthetic oligonucleotide
  Target: SCNA; (-) strand; PAM type: NNNNGHTT; PAM sequence: ATAGGCTT
aaatgaccatcttcattcac

SEQ ID NO: 11976 - DNA, 20 bp, Artificial Sequence
  Description of Artificial Sequence: Synthetic oligonucleotide
  Target: SCNA; (-) strand; PAM type: NNNNGHTT; PAM sequence: GAGAGATT
tcctagatgaaagacattta

SEQ ID NO: 11977 - DNA, 20 bp, Artificial Sequence
  Description of Artificial Sequence: Synthetic oligonucleotide
  Target: SCNA; (-) strand; PAM type: NNNNGHTT; PAM sequence: GGCTGATT
tttctctttttcttaataat

SEQ ID NO: 11978 - DNA, 20 bp, Artificial Sequence
  Description of Artificial Sequence: Synthetic oligonucleotide
  Target: SCNA; (-) strand; PAM type: NNNNGHTT; PAM sequence: CACAGATT
gttctaggtgttcagtaaaa

SEQ ID NO: 11979 - DNA, 20 bp, Artificial Sequence
  Description of Artificial Sequence: Synthetic oligonucleotide
  Target: SCNA; (-) strand; PAM type: NNNNGHTT; PAM sequence: CAAAGTTT
ttgggaaacatttaaattaa

SEQ ID NO: 11980 - DNA, 20 bp, Artificial Sequence
  Description of Artificial Sequence: Synthetic oligonucleotide
  Target: SCNA; (-) strand; PAM type: NNNNGHTT; PAM sequence: AATGGATT
tatgcacatggtataattag

SEQ ID NO: 11981 - DNA, 20 bp, Artificial Sequence
  Description of Artificial Sequence: Synthetic oligonucleotide
  Target: SCNA; (-) strand; PAM type: NNNNGHTT; PAM sequence: ATGTGATT
cctctgatttccccaaagtc

SEQ ID NO: 11982 - DNA, 20 bp, Artificial Sequence
  Description of Artificial Sequence: Synthetic oligonucleotide
  Target: SCNA; (-) strand; PAM type: NNNNGHTT; PAM sequence: CTCTGATT
tgtaatcactattagttttc

SEQ ID NO: 11983 - DNA, 20 bp, Artificial Sequence
  Description of Artificial Sequence: Synthetic oligonucleotide
  Target: SCNA; (-) strand; PAM type: NNNNGHTT; PAM sequence: ATTAGTTT
ctaaataaaatgtaatcact

SEQ ID NO: 11984 - DNA, 20 bp, Artificial Sequence
  Description of Artificial Sequence: Synthetic oligonucleotide
  Target: SCNA; (-) strand; PAM type: NNNNGHTT; PAM sequence: TGCCGTTT
gggaaaagcatcactgaaca

SEQ ID NO: 11985 - DNA, 20 bp, Artificial Sequence
  Description of Artificial Sequence: Synthetic oligonucleotide
  Target: SCNA; (-) strand; PAM type: NNNNGHTT; PAM sequence: TGTAGTTT
aaatcttttccatattcctt

SEQ ID NO: 11986 - DNA, 20 bp, Artificial Sequence
  Description of Artificial Sequence: Synthetic oligonucleotide
  Target: SCNA; (-) strand; PAM type: NNNNGHTT; PAM sequence: AAAAGATT
tgaaataagataatgcagac

SEQ ID NO: 11987 - DNA, 20 bp, Artificial Sequence
  Description of Artificial Sequence: Synthetic oligonucleotide
  Target: SCNA; (-) strand; PAM type: NNNNGHTT; PAM sequence: AATAGCTT
aatgctttcagtctgtgttt

SEQ ID NO: 11988 - DNA, 20 bp, Artificial Sequence
  Description of Artificial Sequence: Synthetic oligonucleotide
  Target: SCNA; (-) strand; PAM type: NNNNGHTT; PAM sequence: CTGTGTTT
gagttcaaaatgctttcagt

SEQ ID NO: 11989 - DNA, 20 bp, Artificial Sequence
  Description of Artificial Sequence: Synthetic oligonucleotide
  Target: SCNA; (-) strand; PAM type: NNNNGHTT; PAM sequence: AAATGCTT
tgttgaattaaatgagttca

SEQ ID NO: 11990 - DNA, 20 bp, Artificial Sequence
  Description of Artificial Sequence: Synthetic oligonucleotide
  Target: SCNA; (-) strand; PAM type: NNNNGHTT; PAM sequence: ATGAGTTT
gtcatctcccctctctaagc

SEQ ID NO: 11991 - DNA, 20 bp, Artificial Sequence
  Description of Artificial Sequence: Synthetic oligonucleotide
  Target: SCNA; (-) strand; PAM type: NNNNGHTT; PAM sequence: ATGGGCTT
catggcatggtgtggagggc

SEQ ID NO: 11992 - DNA, 20 bp, Artificial Sequence
  Description of Artificial Sequence: Synthetic oligonucleotide
  Target: SCNA; (-) strand; PAM type: NNNNGHTT; PAM sequence: TTTTGTTT
ctcgtggtttaactgcacca

SEQ ID NO: 11993 - DNA, 20 bp, Artificial Sequence
  Description of Artificial Sequence: Synthetic oligonucleotide
  Target: SCNA; (-) strand; PAM type: NNNNGHTT; PAM sequence: CGTGGTTT
ccctcctgtgcatgacggct

SEQ ID NO: 11994 - DNA, 20 bp, Artificial Sequence
  Description of Artificial Sequence: Synthetic oligonucleotide
  Target: SCNA; (-) strand; PAM type: NNNNGHTT; PAM sequence: TGCTGTTT
tgctagagatggtctatatc

SEQ ID NO: 11995 - DNA, 20 bp, Artificial Sequence
  Description of Artificial Sequence: Synthetic oligonucleotide
  Target: SCNA; (-) strand; PAM type: NNNNGHTT; PAM sequence: ATGAGTTT
acaaaggtatactaacattt

SEQ ID NO: 11996 - DNA, 20 bp, Artificial Sequence
  Description of Artificial Sequence: Synthetic oligonucleotide
  Target: SCNA; (-) strand; PAM type: NNNNGHTT; PAM sequence: GACTGCTT
aatctccactaaatactaat

SEQ ID NO: 11997 - DNA, 20 bp, Artificial Sequence
  Description of Artificial Sequence: Synthetic oligonucleotide
  Target: SCNA; (-) strand; PAM type: NNNNGHTT; PAM sequence: TTGGGATT
cctacttatgtcaggtaact

SEQ ID NO: 11998 - DNA, 20 bp, Artificial Sequence
  Description of Artificial Sequence: Synthetic oligonucleotide
  Target: SCNA; (-) strand; PAM type: NNNNGHTT; PAM sequence: ATGTGCTT
tgctatatatcagaagaggc

SEQ ID NO: 11999 - DNA, 20 bp, Artificial Sequence
  Description of Artificial Sequence: Synthetic oligonucleotide
  Target: SCNA; (-) strand; PAM type: NNNNGHTT; PAM sequence: AGTGGATT
tgaggttccaatttttgctc

SEQ ID NO: 12000 - DNA, 20 bp, Artificial Sequence
  Description of Artificial Sequence: Synthetic oligonucleotide
  Target: SCNA; (-) strand; PAM type: NNNNGHTT; PAM sequence: TACAGCTT
agattttctgaggttgtaca

SEQ ID NO: 12001 - DNA, 20 bp, Artificial Sequence
  Description of Artificial Sequence: Synthetic oligonucleotide
  Target: SCNA; (-) strand; PAM type: NNNNGHTT; PAM sequence: CACAGATT
cgttacggtatttcatgcca

SEQ ID NO: 12002 - DNA, 20 bp, Artificial Sequence
  Description of Artificial Sequence: Synthetic oligonucleotide
  Target: SCNA; (-) strand; PAM type: NNNNGHTT; PAM sequence: CTATGCTT
atcaaatagattttaactat

SEQ ID NO: 12003 - DNA, 20 bp, Artificial Sequence
  Description of Artificial Sequence: Synthetic oligonucleotide
  Target: SCNA; (-) strand; PAM type: NNNNGHTT; PAM sequence: AATAGATT
cttttaatttaatgaaatca

SEQ ID NO: 12004 - DNA, 20 bp, Artificial Sequence
  Description of Artificial Sequence: Synthetic oligonucleotide
  Target: SCNA; (-) strand; PAM type: NNNNGHTT; PAM sequence: TATGGATT
aggaatgaattcagttacat

SEQ ID NO: 12005 - DNA, 20 bp, Artificial Sequence
  Description of Artificial Sequence: Synthetic oligonucleotide
  Target: SCNA; (-) strand; PAM type: NNNNGHTT; PAM sequence: TCCTGCTT
aacggatatatattttatct

SEQ ID NO: 12006 - DNA, 20 bp, Artificial Sequence
  Description of Artificial Sequence: Synthetic oligonucleotide
  Target: SCNA; (-) strand; PAM type: NNNNGHTT; PAM sequence: AATAGATT
gaaattatgcttgttgaata

SEQ ID NO: 12007 - DNA, 20 bp, Artificial Sequence
  Description of Artificial Sequence: Synthetic oligonucleotide
  Target: SCNA; (-) strand; PAM type: NNNNGHTT; PAM sequence: TTATGCTT
aaagaatactgagccagaaa

SEQ ID NO: 12008 - DNA, 20 bp, Artificial Sequence
  Description of Artificial Sequence: Synthetic oligonucleotide
  Target: SCNA; (-) strand; PAM type: NNNNGHTT; PAM sequence: AGGTGATT
tttaaatatccccttctacc

SEQ ID NO: 12009 - DNA, 20 bp, Artificial Sequence
  Description of Artificial Sequence: Synthetic oligonucleotide
  Target: SCNA; (-) strand; PAM type: NNNNGHTT; PAM sequence: TTTGGATT
tattaaaacttttaacaaca

SEQ ID NO: 12010 - DNA, 20 bp, Artificial Sequence
  Description of Artificial Sequence: Synthetic oligonucleotide
  Target: SCNA; (-) strand; PAM type: NNNNGHTT; PAM sequence: ATATGTTT
tatttaaaaatcaggacaaa

SEQ ID NO: 12011 - DNA, 20 bp, Artificial Sequence
  Description of Artificial Sequence: Synthetic oligonucleotide
  Target: SCNA; (-) strand; PAM type: NNNNGHTT; PAM sequence: ATTTGCTT
agggagacattgatgatgct

SEQ ID NO: 12012 - DNA, 20 bp, Artificial Sequence
  Description of Artificial Sequence: Synthetic oligonucleotide
  Target: SCNA; (-) strand; PAM type: NNNNGHTT; PAM sequence: TTAAGTTT
caagcataggctgttagctt

SEQ ID NO: 12013 - DNA, 20 bp, Artificial Sequence
  Description of Artificial Sequence: Synthetic oligonucleotide
  Target: SCNA; (-) strand; PAM type: NNNNGHTT; PAM sequence: GTTAGCTT
tgccccttcaagcataggct

SEQ ID NO: 12014 - DNA, 20 bp, Artificial Sequence
  Description of Artificial Sequence: Synthetic oligonucleotide
  Target: SCNA; (-) strand; PAM type: NNNNGHTT; PAM sequence: ACCTGTTT
tccaactacaatgataaaca

SEQ ID NO: 12015 - DNA, 20 bp, Artificial Sequence
  Description of Artificial Sequence: Synthetic oligonucleotide
  Target: SCNA; (-) strand; PAM type: NNNNGHTT; PAM sequence: ATGTGTTT
acgggcataaataggataag

SEQ ID NO: 12016 - DNA, 20 bp, Artificial Sequence
  Description of Artificial Sequence: Synthetic oligonucleotide
  Target: SCNA; (-) strand; PAM type: NNNNGHTT; PAM sequence: ATATGTTT
aacttggaaaaatagcactt

SEQ ID NO: 12017 - DNA, 20 bp, Artificial Sequence
  Description of Artificial Sequence: Synthetic oligonucleotide
  Target: SCNA; (-) strand; PAM type: NNNNGHTT; PAM sequence: GTTTGTTT
actcatcttacatgacttag

SEQ ID NO: 12018 - DNA, 20 bp, Artificial Sequence
  Description of Artificial Sequence: Synthetic oligonucleotide
  Target: SCNA; (-) strand; PAM type: NNNNGHTT; PAM sequence: TTAGGTTT
acttactcatcttacatgac

SEQ ID NO: 12019 - DNA, 20 bp, Artificial Sequence
  Description of Artificial Sequence: Synthetic oligonucleotide
  Target: SCNA; (-) strand; PAM type: NNNNGHTT; PAM sequence: CTTTGCTT
acccatcatcatatggttat

SEQ ID NO: 12020 - DNA, 20 bp, Artificial Sequence
  Description of Artificial Sequence: Synthetic oligonucleotide
  Target: SCNA; (-) strand; PAM type: NNNNGHTT; PAM sequence: AAGTGATT
taatatacacacgtatataa

SEQ ID NO: 12021 - DNA, 20 bp, Artificial Sequence
  Description of Artificial Sequence: Synthetic oligonucleotide
  Target: SCNA; (-) strand; PAM type: NNNNGHTT; PAM sequence: TGATGTTT
tacatttaagttgtacagca

SEQ ID NO: 12022 - DNA, 20 bp, Artificial Sequence
  Description of Artificial Sequence: Synthetic oligonucleotide
  Target: SCNA; (-) strand; PAM type: NNNNGHTT; PAM sequence: GCTGGTTT
aaagatggcatgataatttt

SEQ ID NO: 12023 - DNA, 20 bp, Artificial Sequence
  Description of Artificial Sequence: Synthetic oligonucleotide
  Target: SCNA; (-) strand; PAM type: NNNNGHTT; PAM sequence: CATAGCTT
gttccttcataaatgtttaa

SEQ ID NO: 12024 - DNA, 20 bp, Artificial Sequence
  Description of Artificial Sequence: Synthetic oligonucleotide
  Target: SCNA; (-) strand; PAM type: NNNNGHTT; PAM sequence: AAATGTTT
cacttcccttgttccttcat

SEQ ID NO: 12025 - DNA, 20 bp, Artificial Sequence
  Description of Artificial Sequence: Synthetic oligonucleotide
  Target: SCNA; (-) strand; PAM type: NNNNGHTT; PAM sequence: ATAGGTTT
gcatcacgttacaccaacaa

SEQ ID NO: 12026 - DNA, 20 bp, Artificial Sequence
  Description of Artificial Sequence: Synthetic oligonucleotide
  Target: SCNA; (-) strand; PAM type: NNNNGHTT; PAM sequence: TTTTGTTT
agaactgattgcgatgatag

SEQ ID NO: 12027 - DNA, 20 bp, Artificial Sequence
  Description of Artificial Sequence: Synthetic oligonucleotide
  Target: SCNA; (-) strand; PAM type: NNNNGHTT; PAM sequence: GATAGTTT
ttcaaagaactgattgcgat

SEQ ID NO: 12028 - DNA, 20 bp, Artificial Sequence
  Description of Artificial Sequence: Synthetic oligonucleotide
  Target: SCNA; (-) strand; PAM type: NNNNGHTT; PAM sequence: AACTGATT
tccaattttaatattcaaag

SEQ ID NO: 12029 - DNA, 20 bp, Artificial Sequence
  Description of Artificial Sequence: Synthetic oligonucleotide
  Target: SCNA; (-) strand; PAM type: NNNNGHTT; PAM sequence: AGCTGCTT
gatagtagccatgatatttt

SEQ ID NO: 12030 - DNA, 20 bp, Artificial Sequence
  Description of Artificial Sequence: Synthetic oligonucleotide
  Target: SCNA; (-) strand; PAM type: NNNNGHTT; PAM sequence: TTGTGTTT
aataaatatcatacattaaa

SEQ ID NO: 12031 - DNA, 20 bp, Artificial Sequence
  Description of Artificial Sequence: Synthetic oligonucleotide
  Target: SCNA; (-) strand; PAM type: NNNNGHTT; PAM sequence: AAGAGATT
atatatccatcatggaaaaa

SEQ ID NO: 12032 - DNA, 20 bp, Artificial Sequence
  Description of Artificial Sequence: Synthetic oligonucleotide
  Target: SCNA; (-) strand; PAM type: NNNNGHTT; PAM sequence: TATGGTTT
gctgtggtctctgagaacaa

SEQ ID NO: 12033 - DNA, 20 bp, Artificial Sequence
  Description of Artificial Sequence: Synthetic oligonucleotide
  Target: SCNA; (-) strand; PAM type: NNNNGHTT; PAM sequence: CTATGTTT
taaggaaaataggcttactg

SEQ ID NO: 12034 - DNA, 20 bp, Artificial Sequence
  Description of Artificial Sequence: Synthetic oligonucleotide
  Target: SCNA; (-) strand; PAM type: NNNNGHTT; PAM sequence: ATAGGCTT
tgtataaaattataaggaaa

SEQ ID NO: 12035 - DNA, 20 bp, Artificial Sequence
  Description of Artificial Sequence: Synthetic oligonucleotide
  Target: SCNA; (-) strand; PAM type: NNNNGHTT; PAM sequence: ATTTGTTT
taaagaaaaatttaagattg

SEQ ID NO: 12036 - DNA, 20 bp, Artificial Sequence
  Description of Artificial Sequence: Synthetic oligonucleotide
  Target: SCNA; (-) strand; PAM type: NNNNGHTT; PAM sequence: GATTGATT
attattaaagaaaaatttaa

SEQ ID NO: 12037 - DNA, 20 bp, Artificial Sequence
  Description of Artificial Sequence: Synthetic oligonucleotide
  Target: SCNA; (-) strand; PAM type: NNNNGHTT; PAM sequence: TTAAGATT
tgtgattattaaagaaaaat

SEQ ID NO: 12038 - DNA, 20 bp, Artificial Sequence
  Description of Artificial Sequence: Synthetic oligonucleotide
  Target: SCNA; (-) strand; PAM type: NNNNGHTT; PAM sequence: CTGTGATT
taatcttagattaaagcata

SEQ ID NO: 12039 - DNA, 20 bp, Artificial Sequence
  Description of Artificial Sequence: Synthetic oligonucleotide
  Target: SCNA; (-) strand; PAM type: NNNNGHTT; PAM sequence: CTTAGATT
actattactggcactataat

SEQ ID NO: 12040 - DNA, 20 bp, Artificial Sequence
  Description of Artificial Sequence: Synthetic oligonucleotide
  Target: SCNA; (-) strand; PAM type: NNNNGHTT; PAM sequence: TTGTGTTT
atgaattgcctgatttgtat

SEQ ID NO: 12041 - DNA, 20 bp, Artificial Sequence
  Description of Artificial Sequence: Synthetic oligonucleotide
  Target: SCNA; (-) strand; PAM type: NNNNGHTT; PAM sequence: GCCTGATT
gctttgagacacaatgaatt

SEQ ID NO: 12042 - DNA, 20 bp, Artificial Sequence
  Description of Artificial Sequence: Synthetic oligonucleotide
  Target: SCNA; (-) strand; PAM type: NNNNGHTT; PAM sequence: AAAAGCTT
ggtatatttagacctaaatt

SEQ ID NO: 12043 - DNA, 20 bp, Artificial Sequence
  Description of Artificial Sequence: Synthetic oligonucleotide
  Target: SCNA; (-) strand; PAM type: NNNNGHTT; PAM sequence: TTGTGCTT
taaaagtttggttcttgtcc

SEQ ID NO: 12044 - DNA, 20 bp, Artificial Sequence
  Description of Artificial Sequence: Synthetic oligonucleotide
  Target: SCNA; (-) strand; PAM type: NNNNGHTT; PAM sequence: AAAAGTTT
atacattgcctcaaataatt

SEQ ID NO: 12045 - DNA, 20 bp, Artificial Sequence
  Description of Artificial Sequence: Synthetic oligonucleotide
  Target: SCNA; (-) strand; PAM type: NNNNGHTT; PAM sequence: GTAAGCTT
gagaaatattttaatttata

SEQ ID NO: 12046 - DNA, 20 bp, Artificial Sequence
  Description of Artificial Sequence: Synthetic oligonucleotide
  Target: SCNA; (-) strand; PAM type: NNNNGHTT; PAM sequence: TTCAGATT
gcacaggtcacaggcaacat

SEQ ID NO: 12047 - DNA, 20 bp, Artificial Sequence
  Description of Artificial Sequence: Synthetic oligonucleotide
  Target: SCNA; (-) strand; PAM type: NNNNGHTT; PAM sequence: TGTTGATT
ccatcagctgaatcatttaa

SEQ ID NO: 12048 - DNA, 20 bp, Artificial Sequence
  Description of Artificial Sequence: Synthetic oligonucleotide
  Target: SCNA; (-) strand; PAM type: NNNNGHTT; PAM sequence: AAATGATT
gtgttatggaccctctgatt

SEQ ID NO: 12049 - DNA, 20 bp, Artificial Sequence
  Description of Artificial Sequence: Synthetic oligonucleotide
  Target: SCNA; (-) strand; PAM type: NNNNGHTT; PAM sequence: CTCTGATT
acacttgagtgttatggacc

SEQ ID NO: 12050 - DNA, 20 bp, Artificial Sequence
  Description of Artificial Sequence: Synthetic oligonucleotide
  Target: SCNA; (-) strand; PAM type: NNNNGHTT; PAM sequence: TTGGGCTT
gacttactatggctgtcatg

SEQ ID NO: 12051 - DNA, 20 bp, Artificial Sequence
  Description of Artificial Sequence: Synthetic oligonucleotide
  Target: SCNA; (-) strand; PAM type: NNNNGHTT; PAM sequence: TCAGGTTT
aaaaagcaggttttaaaatg

SEQ ID NO: 12052 - DNA, 20 bp, Artificial Sequence
  Description of Artificial Sequence: Synthetic oligonucleotide
  Target: SCNA; (-) strand; PAM type: NNNNGHTT; PAM sequence: GCAGGTTT
gctagatgaataaaaaaaaa

SEQ ID NO: 12053 - DNA, 20 bp, Artificial Sequence
  Description of Artificial Sequence: Synthetic oligonucleotide
  Target: SCNA; (-) strand; PAM type: NNNNGHTT; PAM sequence: AATGGATT
ttttttaaatcttgatttca

SEQ ID NO: 12054 - DNA, 20 bp, Artificial Sequence
  Description of Artificial Sequence: Synthetic oligonucleotide
  Target: SCNA; (-) strand; PAM type: NNNNGHTT; PAM sequence: TCTTGATT
tatgaacaactttttttaaa

SEQ ID NO: 12055 - DNA, 20 bp, Artificial Sequence
  Description of Artificial Sequence: Synthetic oligonucleotide
  Target: SCNA; (-) strand; PAM type: NNNNGHTT; PAM sequence: ATAAGCTT
taatagttttcacgcaagaa

SEQ ID NO: 12056 - DNA, 20 bp, Artificial Sequence
  Description of Artificial Sequence: Synthetic oligonucleotide
  Target: SCNA; (-) strand; PAM type: NNNNGHTT; PAM sequence: AATAGTTT
gacttatctacatgatgatt

SEQ ID NO: 12057 - DNA, 20 bp, Artificial Sequence
  Description of Artificial Sequence: Synthetic oligonucleotide
  Target: SCNA; (-) strand; PAM type: NNNNGHTT; PAM sequence: TGATGATT
tgagacacgacttatctaca

SEQ ID NO: 12058 - DNA, 20 bp, Artificial Sequence
  Description of Artificial Sequence: Synthetic oligonucleotide
  Target: SCNA; (-) strand; PAM type: NNNNGHTT; PAM sequence: GTCAGCTT
gcctgacaaataatacagca

SEQ ID NO: 12059 - DNA, 20 bp, Artificial Sequence
  Description of Artificial Sequence: Synthetic oligonucleotide
  Target: SCNA; (-) strand; PAM type: NNNNGHTT; PAM sequence: TGGAGTTT
tttatatttttgtaattttc

SEQ ID NO: 12060 - DNA, 20 bp, Artificial Sequence
  Description of Artificial Sequence: Synthetic oligonucleotide
  Target: SCNA; (-) strand; PAM type: NNNNGHTT; PAM sequence: TGAAGTTT
gctctaaaagagttggatcc

SEQ ID NO: 12061 - DNA, 20 bp, Artificial Sequence
  Description of Artificial Sequence: Synthetic oligonucleotide
  Target: SCNA; (-) strand; PAM type: NNNNGHTT; PAM sequence: TCTTGCTT
atcccagctcctcaacagtg

SEQ ID NO: 12062 - DNA, 20 bp, Artificial Sequence
  Description of Artificial Sequence: Synthetic oligonucleotide
  Target: SCNA; (-) strand; PAM type: NNNNGHTT; PAM sequence: ATCTGCTT
acttctattgaagaagaaag

SEQ ID NO: 12063 - DNA, 20 bp, Artificial Sequence
  Description of Artificial Sequence: Synthetic oligonucleotide
  Target: SCNA; (-) strand; PAM type: NNNNGHTT; PAM sequence: TTGTGTTT
ttacagaacaatattaactc

SEQ ID NO: 12064 - DNA, 20 bp, Artificial Sequence
  Description of Artificial Sequence: Synthetic oligonucleotide
  Target: SCNA; (-) strand; PAM type: NNNNGHTT; PAM sequence: TTTTGTTT
agttatcttgaattataaga

SEQ ID NO: 12065 - DNA, 20 bp, Artificial Sequence
  Description of Artificial Sequence: Synthetic oligonucleotide
  Target: SCNA; (-) strand; PAM type: NNNNGHTT; PAM sequence: ATAAGATT
caaatgagttatcttgaatt

SEQ ID NO: 12066 - DNA, 20 bp, Artificial Sequence
  Description of Artificial Sequence: Synthetic oligonucleotide
  Target: SCNA; (-) strand; PAM type: NNNNGHTT; PAM sequence: ACCTGTTT
gagagtaaatcaaagcagat

SEQ ID NO: 12067 - DNA, 20 bp, Artificial Sequence
  Description of Artificial Sequence: Synthetic oligonucleotide
  Target: SCNA; (-) strand; PAM type: NNNNGHTT; PAM sequence: ACCGGTTT
cactgaaagggagtaatggc

SEQ ID NO: 12068 - DNA, 20 bp, Artificial Sequence
  Description of Artificial Sequence: Synthetic oligonucleotide
  Target: SCNA; (-) strand; PAM type: NNNNGHTT; PAM sequence: CTCTGCTT
ttgtagaagtggattaatgg

SEQ ID NO: 12069 - DNA, 20 bp, Artificial Sequence
  Description of Artificial Sequence: Synthetic oligonucleotide
  Target: SCNA; (-) strand; PAM type: NNNNGHTT; PAM sequence: AGTGGATT
ctggatgtctagcttgtaga

SEQ ID NO: 12070 - DNA, 20 bp, Artificial Sequence
  Description of Artificial Sequence: Synthetic oligonucleotide
  Target: SCNA; (-) strand; PAM type: NNNNGHTT; PAM sequence: TCTAGCTT
acaagtaggggtactggatg

SEQ ID NO: 12071 - DNA, 20 bp, Artificial Sequence
  Description of Artificial Sequence: Synthetic oligonucleotide
  Target: SCNA; (-) strand; PAM type: NNNNGHTT; PAM sequence: GAATGTTT
ctcattcatcattcaagaaa

SEQ ID NO: 12072 - DNA, 20 bp, Artificial Sequence
  Description of Artificial Sequence: Synthetic oligonucleotide
  Target: SCNA; (-) strand; PAM type: NNNNGHTT; PAM sequence: AAATGCTT
aagcaaactctttttgcttg

SEQ ID NO: 12073 - DNA, 20 bp, Artificial Sequence
  Description of Artificial Sequence: Synthetic oligonucleotide
  Target: SCNA; (-) strand; PAM type: NNNNGHTT; PAM sequence: TTTTGCTT
aatagaaataagcaaactct

SEQ ID NO: 12074 - DNA, 20 bp, Artificial Sequence
  Description of Artificial Sequence: Synthetic oligonucleotide
  Target: SCNA; (-) strand; PAM type: NNNNGHTT; PAM sequence: GATGGTTT
atgggatgctaaaaaatctg

SEQ ID NO: 12075 - DNA, 20 bp, Artificial Sequence
  Description of Artificial Sequence: Synthetic oligonucleotide
  Target: SCNA; (-) strand; PAM type: NNNNGHTT; PAM sequence: CTGAGTTT
tctaatttagcaataaagtt

SEQ ID NO: 12076 - DNA, 20 bp, Artificial Sequence
  Description of Artificial Sequence: Synthetic oligonucleotide
  Target: SCNA; (-) strand; PAM type: NNNNGHTT; PAM sequence: TACTGATT
ttataggtagtatagtttct

SEQ ID NO: 12077 - DNA, 20 bp, Artificial Sequence
  Description of Artificial Sequence: Synthetic oligonucleotide
  Target: SCNA; (-) strand; PAM type: NNNNGHTT; PAM sequence: TATAGTTT
gatatttcccttataggtag

SEQ ID NO: 12078 - DNA, 20 bp, Artificial Sequence
  Description of Artificial Sequence: Synthetic oligonucleotide
  Target: SCNA; (-) strand; PAM type: NNNNGHTT; PAM sequence: GTTTGCTT
ttaatcttttacaaaactgg

SEQ ID NO: 12079 - DNA, 20 bp, Artificial Sequence
  Description of Artificial Sequence: Synthetic oligonucleotide
  Target: SCNA; (-) strand; PAM type: NNNNGHTT; PAM sequence: CTGGGTTT
gtgcttaatcttttacaaaa

SEQ ID NO: 12080 - DNA, 20 bp, Artificial Sequence
  Description of Artificial Sequence: Synthetic oligonucleotide
  Target: SCNA; (-) strand; PAM type: NNNNGHTT; PAM sequence: AAGTGCTT
aaattgcaaatggagcatga

SEQ ID NO: 12081 - DNA, 20 bp, Artificial Sequence
  Description of Artificial Sequence: Synthetic oligonucleotide
  Target: SCNA; (-) strand; PAM type: NNNNGHTT; PAM sequence: TATTGCTT
tagatttaactagaggattt

SEQ ID NO: 12082 - DNA, 20 bp, Artificial Sequence
  Description of Artificial Sequence: Synthetic oligonucleotide
  Target: SCNA; (-) strand; PAM type: NNNNGHTT; PAM sequence: AGAGGATT
atggacaactagatttaact

SEQ ID NO: 12083 - DNA, 20 bp, Artificial Sequence
  Description of Artificial Sequence: Synthetic oligonucleotide
  Target: SCNA; (-) strand; PAM type: NNNNGHTT; PAM sequence: ACTAGATT
tatacattcagttatggaca

SEQ ID NO: 12084 - DNA, 20 bp, Artificial Sequence
  Description of Artificial Sequence: Synthetic oligonucleotide
  Target: SCNA; (-) strand; PAM type: NNNNGHTT; PAM sequence: CCAAGATT
ctacagaggaagtgggtagt

SEQ ID NO: 12085 - DNA, 20 bp, Artificial Sequence
  Description of Artificial Sequence: Synthetic oligonucleotide
  Target: SCNA; (-) strand; PAM type: NNNNGHTT; PAM sequence: TTCTGATT
accctctgttcagatcaatc

SEQ ID NO: 12086 - DNA, 20 bp, Artificial Sequence
  Description of Artificial Sequence: Synthetic oligonucleotide
  Target: SCNA; (-) strand; PAM type: NNNNGHTT; PAM sequence: AAGAGCTT
gcactcacatacgcacatca

SEQ ID NO: 12087 - DNA, 20 bp, Artificial Sequence
  Description of Artificial Sequence: Synthetic oligonucleotide
  Target: SCNA; (-) strand; PAM type: NNNNGHTT; PAM sequence: CTTAGCTT
taatagaagctatagaccct

SEQ ID NO: 12088 - DNA, 20 bp, Artificial Sequence
  Description of Artificial Sequence: Synthetic oligonucleotide
  Target: SCNA; (-) strand; PAM type: NNNNGHTT; PAM sequence: ATCAGTTT
aattagtacacaggcaatta

SEQ ID NO: 12089 - DNA, 20 bp, Artificial Sequence
  Description of Artificial Sequence: Synthetic oligonucleotide
  Target: SCNA; (-) strand; PAM type: NNNNGHTT; PAM sequence: CTCAGATT
tttcacaagttaagagggac

SEQ ID NO: 12090 - DNA, 20 bp, Artificial Sequence
  Description of Artificial Sequence: Synthetic oligonucleotide
  Target: SCNA; (-) strand; PAM type: NNNNGHTT; PAM sequence: GTAAGATT
ttaattctatttatagcttc

SEQ ID NO: 12091 - DNA, 20 bp, Artificial Sequence
  Description of Artificial Sequence: Synthetic oligonucleotide
  Target: SCNA; (-) strand; PAM type: NNNNGHTT; PAM sequence: TATAGCTT
tctaaaattttaattctatt

SEQ ID NO: 12092 - DNA, 20 bp, Artificial Sequence
  Description of Artificial Sequence: Synthetic oligonucleotide
  Target: SCNA; (-) strand; PAM type: NNNNGHTT; PAM sequence: CCTGGTTT
ggataataattatattaatt

SEQ ID NO: 12093 - DNA, 20 bp, Artificial Sequence
  Description of Artificial Sequence: Synthetic oligonucleotide
  Target: SCNA; (-) strand; PAM type: NNNNGHTT; PAM sequence: ATATGCTT
gtggtacccctttgtacaaa

SEQ ID NO: 12094 - DNA, 20 bp, Artificial Sequence
  Description of Artificial Sequence: Synthetic oligonucleotide
  Target: SCNA; (-) strand; PAM type: NNNNGHTT; PAM sequence: TAATGTTT
ttctagtgaagttcttcagc

SEQ ID NO: 12095 - DNA, 20 bp, Artificial Sequence
  Description of Artificial Sequence: Synthetic oligonucleotide
  Target: SCNA; (-) strand; PAM type: NNNNGHTT; PAM sequence: CTGGGCTT
ctaatgatggcaaatcctta

SEQ ID NO: 12096 - DNA, 20 bp, Artificial Sequence
  Description of Artificial Sequence: Synthetic oligonucleotide
  Target: SCNA; (-) strand; PAM type: NNNNGHTT; PAM sequence: TTTAGATT
acaaaaatatctgtgatata

SEQ ID NO: 12097 - DNA, 20 bp, Artificial Sequence
  Description of Artificial Sequence: Synthetic oligonucleotide
  Target: SCNA; (-) strand; PAM type: NNNNGHTT; PAM sequence: GGTTGTTT
tttgctggcaaactattctg

SEQ ID NO: 12098 - DNA, 20 bp, Artificial Sequence
  Description of Artificial Sequence: Synthetic oligonucleotide
  Target: SCNA; (-) strand; PAM type: NNNNGHTT; PAM sequence: AGAAGTTT
tatcttgaaaattgtgagaa

SEQ ID NO: 12099 - DNA, 20 bp, Artificial Sequence
  Description of Artificial Sequence: Synthetic oligonucleotide
  Target: SCNA; (-) strand; PAM type: NNNNGHTT; PAM sequence: AAATGATT
ctatccaaaagttacaatca

SEQ ID NO: 12100 - DNA, 20 bp, Artificial Sequence
  Description of Artificial Sequence: Synthetic oligonucleotide
  Target: SCNA; (-) strand; PAM type: NNNNGHTT; PAM sequence: ATATGCTT
tttctgggtcttttataatc

SEQ ID NO: 12101 - DNA, 20 bp, Artificial Sequence
  Description of Artificial Sequence: Synthetic oligonucleotide
  Target: SCNA; (-) strand; PAM type: NNNNGHTT; PAM sequence: GAGAGTTT
gatatttcacaagtgtctgg

SEQ ID NO: 12102 - DNA, 20 bp, Artificial Sequence
  Description of Artificial Sequence: Synthetic oligonucleotide
  Target: SCNA; (-) strand; PAM type: NNNNGHTT; PAM sequence: GTATGATT
cataatgtgcttactttaat

SEQ ID NO: 12103 - DNA, 20 bp, Artificial Sequence
  Description of Artificial Sequence: Synthetic oligonucleotide
  Target: SCNA; (-) strand; PAM type: NNNNGHTT; PAM sequence: ATGTGCTT
acctttaaatataatacata

SEQ ID NO: 12104 - DNA, 20 bp, Artificial Sequence
  Description of Artificial Sequence: Synthetic oligonucleotide
  Target: SCNA; (-) strand; PAM type: NNNNGHTT; PAM sequence: TCTTGCTT
ctttctttctcttttttctt

SEQ ID NO: 12105 - DNA, 20 bp, Artificial Sequence
  Description of Artificial Sequence: Synthetic oligonucleotide
  Target: SCNA; (-) strand; PAM type: NNNNGHTT; PAM sequence: TTTTGCTT
cactacaacagcaaaataat

SEQ ID NO: 12106 - DNA, 20 bp, Artificial Sequence
  Description of Artificial Sequence: Synthetic oligonucleotide
  Target: SCNA; (-) strand; PAM type: NNNNGHTT; PAM sequence: TGAAGTTT
gtatgaggtgtcaacaacgt

SEQ ID NO: 12107 - DNA, 20 bp, Artificial Sequence
  Description of Artificial Sequence: Synthetic oligonucleotide
  Target: SCNA; (-) strand; PAM type: NNNNGHTT; PAM sequence: ATAAGATT
ttgacaaacatgggacacga

SEQ ID NO: 12108 - DNA, 20 bp, Artificial Sequence
  Description of Artificial Sequence: Synthetic oligonucleotide
  Target: SCNA; (-) strand; PAM type: NNNNGHTT; PAM sequence: GGTAGATT
aaccagagatatagttttga

SEQ ID NO: 12109 - DNA, 20 bp, Artificial Sequence
  Description of Artificial Sequence: Synthetic oligonucleotide
  Target: SCNA; (-) strand; PAM type: NNNNGHTT; PAM sequence: TATAGTTT
aaatacataccaaccagaga

SEQ ID NO: 12110 - DNA, 20 bp, Artificial Sequence
  Description of Artificial Sequence: Synthetic oligonucleotide
  Target: SCNA; (-) strand; PAM type: NNNNGHTT; PAM sequence: GAGGGCTT
agtgacatttcagaaagaat

SEQ ID NO: 12111 - DNA, 20 bp, Artificial Sequence
  Description of Artificial Sequence: Synthetic oligonucleotide
  Target: SCNA; (-) strand; PAM type: NNNNGHTT; PAM sequence: GATTGTTT
gcaaattttataattattat

SEQ ID NO: 12112 - DNA, 20 bp, Artificial Sequence
  Description of Artificial Sequence: Synthetic oligonucleotide
  Target: SCNA; (-) strand; PAM type: NNNNGHTT; PAM sequence: TTATGATT
ccatgcaaattttataatta

SEQ ID NO: 12113 - DNA, 20 bp, Artificial Sequence
  Description of Artificial Sequence: Synthetic oligonucleotide
  Target: SCNA; (-) strand; PAM type: NNNNGHTT; PAM sequence: GCTTGTTT
gctacctttatattggtctt

SEQ ID NO: 12114 - DNA, 20 bp, Artificial Sequence
  Description of Artificial Sequence: Synthetic oligonucleotide
  Target: SCNA; (-) strand; PAM type: NNNNGHTT; PAM sequence: TCTTGCTT
aagtgctacctttatattgg

SEQ ID NO: 12115 - DNA, 20 bp, Artificial Sequence
  Description of Artificial Sequence: Synthetic oligonucleotide
  Target: SCNA; (-) strand; PAM type: NNNNGHTT; PAM sequence: GTGAGATT
tgtgttacatttataagctg

SEQ ID NO: 12116 - DNA, 20 bp, Artificial Sequence
  Description of Artificial Sequence: Synthetic oligonucleotide
  Target: SCNA; (-) strand; PAM type: NNNNGHTT; PAM sequence: GTACGTTT
gttgggcaaggtatggctgt

SEQ ID NO: 12117 - DNA, 20 bp, Artificial Sequence
  Description of Artificial Sequence: Synthetic oligonucleotide
  Target: SCNA; (-) strand; PAM type: NNNNGHTT; PAM sequence: ACTGGCTT
cagggagcattgcagcagcc

SEQ ID NO: 12118 - DNA, 20 bp, Artificial Sequence
  Description of Artificial Sequence: Synthetic oligonucleotide
  Target: SCNA; (-) strand; PAM type: NNNNGHTT; PAM sequence: GAATGATT
gccgatggctagtggaagtg

SEQ ID NO: 12119 - DNA, 20 bp, Artificial Sequence
  Description of Artificial Sequence: Synthetic oligonucleotide
  Target: SCNA; (-) strand; PAM type: NNNNGHTT; PAM sequence: TTTTGTTT
cacttggacatcttggtggc

SEQ ID NO: 12120 - DNA, 20 bp, Artificial Sequence
  Description of Artificial Sequence: Synthetic oligonucleotide
  Target: SCNA; (-) strand; PAM type: NNNNGHTT; PAM sequence: GGTGGCTT
cacactcacttggacatctt

SEQ ID NO: 12121 - DNA, 20 bp, Artificial Sequence
  Description of Artificial Sequence: Synthetic oligonucleotide
  Target: SCNA; (-) strand; PAM type: NNNNGHTT; PAM sequence: CAATGTTT
aaaatatcttagccaagatt

SEQ ID NO: 12122 - DNA, 20 bp, Artificial Sequence
  Description of Artificial Sequence: Synthetic oligonucleotide
  Target: SCNA; (-) strand; PAM type: NNNNGHTT; PAM sequence: CCAAGATT
ctttagccaaaatatcttag

SEQ ID NO: 12123 - DNA, 20 bp, Artificial Sequence
  Description of Artificial Sequence: Synthetic oligonucleotide
  Target: SCNA; (-) strand; PAM type: NNNNGHTT; PAM sequence: CATGGCTT
taaaccaaatccaaatcact

SEQ ID NO: 12124 - DNA, 20 bp, Artificial Sequence
  Description of Artificial Sequence: Synthetic oligonucleotide
  Target: SCNA; (-) strand; PAM type: NNNNGHTT; PAM sequence: AATTGCTT
aatataactgcacctgtaag

SEQ ID NO: 12125 - DNA, 20 bp, Artificial Sequence
  Description of Artificial Sequence: Synthetic oligonucleotide
  Target: SCNA; (-) strand; PAM type: NNNNGHTT; PAM sequence: AAAGGATT
ttaacttgctgagtgagatc

SEQ ID NO: 12126 - DNA, 20 bp, Artificial Sequence
  Description of Artificial Sequence: Synthetic oligonucleotide
  Target: SCNA; (-) strand; PAM type: NNNNGHTT; PAM sequence: TGTTGCTT
ataaatagaagtatgtattg

SEQ ID NO: 12127 - DNA, 20 bp, Artificial Sequence
  Description of Artificial Sequence: Synthetic oligonucleotide
  Target: SCNA; (-) strand; PAM type: NNNNGHTT; PAM sequence: CTGAGATT
gaggcggaggttgctgtgag

SEQ ID NO: 12128 - DNA, 20 bp, Artificial Sequence
  Description of Artificial Sequence: Synthetic oligonucleotide
  Target: SCNA; (-) strand; PAM type: NNNNGHTT; PAM sequence: AATAGCTT
tcgggagactgaggcaggag

SEQ ID NO: 12129 - DNA, 20 bp, Artificial Sequence
  Description of Artificial Sequence: Synthetic oligonucleotide
  Target: SCNA; (-) strand; PAM type: NNNNGHTT; PAM sequence: CCCTGTTT
gcctggccaacatgatgaaa

SEQ ID NO: 12130 - DNA, 20 bp, Artificial Sequence
  Description of Artificial Sequence: Synthetic oligonucleotide
  Target: SCNA; (-) strand; PAM type: NNNNGHTT; PAM sequence: AACCGTTT
aaagatccaagttccttcac

SEQ ID NO: 12131 - DNA, 20 bp, Artificial Sequence
  Description of Artificial Sequence: Synthetic oligonucleotide
  Target: SCNA; (-) strand; PAM type: NNNNGHTT; PAM sequence: CTTTGTTT
aatttagctttttaagaacc

SEQ ID NO: 12132 - DNA, 20 bp, Artificial Sequence
  Description of Artificial Sequence: Synthetic oligonucleotide
  Target: SCNA; (-) strand; PAM type: NNNNGHTT; PAM sequence: TTTAGCTT
cctattaaaattactgcaaa

SEQ ID NO: 12133 - DNA, 20 bp, Artificial Sequence
  Description of Artificial Sequence: Synthetic oligonucleotide
  Target: SCNA; (-) strand; PAM type: NNNNGHTT; PAM sequence: TTTTGTTT
tactgaatgaccgtatctca

SEQ ID NO: 12134 - DNA, 20 bp, Artificial Sequence
  Description of Artificial Sequence: Synthetic oligonucleotide
  Target: SCNA; (-) strand; PAM type: NNNNGHTT; PAM sequence: TTCTGCTT
tttttgacatgaaattaaac

SEQ ID NO: 12135 - DNA, 20 bp, Artificial Sequence
  Description of Artificial Sequence: Synthetic oligonucleotide
  Target: SCNA; (-) strand; PAM type: NNNNGHTT; PAM sequence: GAAAGTTT
tggcttatttaactgaacaa

SEQ ID NO: 12136 - DNA, 20 bp, Artificial Sequence
  Description of Artificial Sequence: Synthetic oligonucleotide
  Target: SCNA; (-) strand; PAM type: NNNNGHTT; PAM sequence: TCTGGCTT
tggttgtttgcctttctgtt

SEQ ID NO: 12137 - DNA, 20 bp, Artificial Sequence
  Description of Artificial Sequence: Synthetic oligonucleotide
  Target: SCNA; (-) strand; PAM type: NNNNGHTT; PAM sequence: TTCTGTTT
gatcatgtggttgtttgcct

SEQ ID NO: 12138 - DNA, 20 bp, Artificial Sequence
  Description of Artificial Sequence: Synthetic oligonucleotide
  Target: SCNA; (-) strand; PAM type: NNNNGHTT; PAM sequence: GGTTGTTT
ccacatgagtgagatcatgt

SEQ ID NO: 12139 - DNA, 20 bp, Artificial Sequence
  Description of Artificial Sequence: Synthetic oligonucleotide
  Target: SCNA; (-) strand; PAM type: NNNNGHTT; PAM sequence: TTTAGATT
gatatcaacttttctttttc

SEQ ID NO: 12140 - DNA, 20 bp, Artificial Sequence
  Description of Artificial Sequence: Synthetic oligonucleotide
  Target: SCNA; (-) strand; PAM type: NNNNGHTT; PAM sequence: CTCTGCTT
ctctcctccactgttctcct

SEQ ID NO: 12141 - DNA, 20 bp, Artificial Sequence
  Description of Artificial Sequence: Synthetic oligonucleotide
  Target: SCNA; (-) strand; PAM type: NNNNGHTT; PAM sequence: TGAGGCTT
tggtgtaactcctctcagac

SEQ ID NO: 12142 - DNA, 20 bp, Artificial Sequence
  Description of Artificial Sequence: Synthetic oligonucleotide
  Target: SCNA; (-) strand; PAM type: NNNNGHTT; PAM sequence: ATTGGCTT
aaataaataaataagtaaat

SEQ ID NO: 12143 - DNA, 20 bp, Artificial Sequence
  Description of Artificial Sequence: Synthetic oligonucleotide
  Target: SCNA; (-) strand; PAM type: NNNNGHTT; PAM sequence: CGGAGTTT
aatggcctgaacccgggagt

SEQ ID NO: 12144 - DNA, 20 bp, Artificial Sequence
  Description of Artificial Sequence: Synthetic oligonucleotide
  Target: SCNA; (-) strand; PAM type: NNNNGHTT; PAM sequence: ATTGGCTT
tttgtccacaccatttaaat

SEQ ID NO: 12145 - DNA, 20 bp, Artificial Sequence
  Description of Artificial Sequence: Synthetic oligonucleotide
  Target: SCNA; (-) strand; PAM type: NNNNGHTT; PAM sequence: AATTGCTT
acatagtctatttgaaaaca

SEQ ID NO: 12146 - DNA, 20 bp, Artificial Sequence
  Description of Artificial Sequence: Synthetic oligonucleotide
  Target: SCNA; (-) strand; PAM type: NNNNGHTT; PAM sequence: CTTAGCTT
ctcttgtccttacagacccc

SEQ ID NO: 12147 - DNA, 20 bp, Artificial Sequence
  Description of Artificial Sequence: Synthetic oligonucleotide
  Target: SCNA; (-) strand; PAM type: NNNNGHTT; PAM sequence: TCAGGCTT
tcttgggctgtgtggctatg

SEQ ID NO: 12148 - DNA, 20 bp, Artificial Sequence
  Description of Artificial Sequence: Synthetic oligonucleotide
  Target: SCNA; (-) strand; PAM type: NNNNGHTT; PAM sequence: GACCGTTT
tagggagcaacactactgtg

SEQ ID NO: 12149 - DNA, 20 bp, Artificial Sequence
  Description of Artificial Sequence: Synthetic oligonucleotide
  Target: SCNA; (-) strand; PAM type: NNNNGHTT; PAM sequence: TACAGCTT
ttaaaacataagattttcag

SEQ ID NO: 12150 - DNA, 20 bp, Artificial Sequence
  Description of Artificial Sequence: Synthetic oligonucleotide
  Target: SCNA; (-) strand; PAM type: NNNNGHTT; PAM sequence: ATAAGATT
tttcagaaatgttttaaaac

SEQ ID NO: 12151 - DNA, 20 bp, Artificial Sequence
  Description of Artificial Sequence: Synthetic oligonucleotide
  Target: SCNA; (-) strand; PAM type: NNNNGHTT; PAM sequence: AAATGTTT
ttaaaggatcaacatttcag

SEQ ID NO: 12152 - DNA, 20 bp, Artificial Sequence
  Description of Artificial Sequence: Synthetic oligonucleotide
  Target: SCNA; (-) strand; PAM type: NNNNGHTT; PAM sequence: GTTCGTTT
agattttataacaagaaaat

SEQ ID NO: 12153 - DNA, 20 bp, Artificial Sequence
  Description of Artificial Sequence: Synthetic oligonucleotide
  Target: SCNA; (-) strand; PAM type: NNNNGHTT; PAM sequence: TTGAGATT
aacctatttttaatctcgct

SEQ ID NO: 12154 - DNA, 20 bp, Artificial Sequence
  Description of Artificial Sequence: Synthetic oligonucleotide
  Target: SCNA; (-) strand; PAM type: NNNNGHTT; PAM sequence: TCTCGCTT
aattcaaaacctatttttaa

SEQ ID NO: 12155 - DNA, 20 bp, Artificial Sequence
  Description of Artificial Sequence: Synthetic oligonucleotide
  Target: SCNA; (-) strand; PAM type: NNNNGHTT; PAM sequence: ACTAGATT
gtgcagtgtattgcattaaa

SEQ ID NO: 12156 - DNA, 20 bp, Artificial Sequence
  Description of Artificial Sequence: Synthetic oligonucleotide
  Target: SCNA; (-) strand; PAM type: NNNNGHTT; PAM sequence: TTATGATT
ttgtaatgtagccattttat

SEQ ID NO: 12157 - DNA, 20 bp, Artificial Sequence
  Description of Artificial Sequence: Synthetic oligonucleotide
  Target: SCNA; (-) strand; PAM type: NNNNGHTT; PAM sequence: TGTCGATT
tacagaaatgtttttaaatg

SEQ ID NO: 12158 - DNA, 20 bp, Artificial Sequence
  Description of Artificial Sequence: Synthetic oligonucleotide
  Target: SCNA; (-) strand; PAM type: NNNNGHTT; PAM sequence: AAATGTTT
tagagaaatcagttctacag

SEQ ID NO: 12159 - DNA, 20 bp, Artificial Sequence
  Description of Artificial Sequence: Synthetic oligonucleotide
  Target: SCNA; (-) strand; PAM type: NNNNGHTT; PAM sequence: TTTTGTTT
tatgagtgtgtctcttttcc

SEQ ID NO: 12160 - DNA, 20 bp, Artificial Sequence
  Description of Artificial Sequence: Synthetic oligonucleotide
  Target: SCNA; (-) strand; PAM type: NNNNGHTT; PAM sequence: CCCTGATT
aaagaaaaataaagcagaat

SEQ ID NO: 12161 - DNA, 20 bp, Artificial Sequence
  Description of Artificial Sequence: Synthetic oligonucleotide
  Target: SCNA; (-) strand; PAM type: NNNNGHTT; PAM sequence: GTTAGATT
aattttgtttaatgtcaaag

SEQ ID NO: 12162 - DNA, 20 bp, Artificial Sequence
  Description of Artificial Sequence: Synthetic oligonucleotide
  Target: SCNA; (-) strand; PAM type: NNNNGHTT; PAM sequence: TTTTGTTT
accatatattaattttataa

SEQ ID NO: 12163 - DNA, 20 bp, Artificial Sequence
  Description of Artificial Sequence: Synthetic oligonucleotide
  Target: SCNA; (-) strand; PAM type: NNNNGHTT; PAM sequence: AATTGTTT
tgatttaaatttccttagta

SEQ ID NO: 12164 - DNA, 20 bp, Artificial Sequence
  Description of Artificial Sequence: Synthetic oligonucleotide
  Target: SCNA; (-) strand; PAM type: NNNNGHTT; PAM sequence: TTATGATT
caaaactaattttcaacata

SEQ ID NO: 12165 - DNA, 20 bp, Artificial Sequence
  Description of Artificial Sequence: Synthetic oligonucleotide
  Target: SCNA; (-) strand; PAM type: NNNNGHTT; PAM sequence: TTTTGATT
cactggagattttctgaagg

SEQ ID NO: 12166 - DNA, 20 bp, Artificial Sequence
  Description of Artificial Sequence: Synthetic oligonucleotide
  Target: SCNA; (-) strand; PAM type: NNNNGHTT; PAM sequence: GAAGGTTT
tctaacactggagattttct

SEQ ID NO: 12167 - DNA, 20 bp, Artificial Sequence
  Description of Artificial Sequence: Synthetic oligonucleotide
  Target: SCNA; (-) strand; PAM type: NNNNGHTT; PAM sequence: TGGAGATT
tataaagaaatttctaacac

SEQ ID NO: 12168 - DNA, 20 bp, Artificial Sequence
  Description of Artificial Sequence: Synthetic oligonucleotide
  Target: SCNA; (-) strand; PAM type: NNNNGHTT; PAM sequence: ATATGTTT
ttaattaaacttactgaatg

SEQ ID NO: 12169 - DNA, 20 bp, Artificial Sequence
  Description of Artificial Sequence: Synthetic oligonucleotide
  Target: SCNA; (-) strand; PAM type: NNNNGHTT; PAM sequence: ATGTGTTT
tattatagaaatatatgaaa

SEQ ID NO: 12170 - DNA, 20 bp, Artificial Sequence
  Description of Artificial Sequence: Synthetic oligonucleotide
  Target: SCNA; (-) strand; PAM type: NNNNGHTT; PAM sequence: GGCTGTTT
aatccaccaacttaaatcct

SEQ ID NO: 12171 - DNA, 20 bp, Artificial Sequence
  Description of Artificial Sequence: Synthetic oligonucleotide
  Target: SCNA; (-) strand; PAM type: NNNNGHTT; PAM sequence: ATTAGCTT
atttcccctaaattcatccc

SEQ ID NO: 12172 - DNA, 20 bp, Artificial Sequence
  Description of Artificial Sequence: Synthetic oligonucleotide
  Target: SCNA; (-) strand; PAM type: NNNNGHTT; PAM sequence: AAATGTTT
tgcatattatgcctgatgta

SEQ ID NO: 12173 - DNA, 20 bp, Artificial Sequence
  Description of Artificial Sequence: Synthetic oligonucleotide
  Target: SCNA; (-) strand; PAM type: NNNNGHTT; PAM sequence: AAGTGCTT
gaatagggttatttaatata

SEQ ID NO: 12174 - DNA, 20 bp, Artificial Sequence
  Description of Artificial Sequence: Synthetic oligonucleotide
  Target: SCNA; (-) strand; PAM type: NNNNGHTT; PAM sequence: CAGCGATT
ttcagcatgtgcaatattta

SEQ ID NO: 12175 - DNA, 20 bp, Artificial Sequence
  Description of Artificial Sequence: Synthetic oligonucleotide
  Target: SCNA; (-) strand; PAM type: NNNNGHTT; PAM sequence: TGGTGATT
gttgctaggcagtaaggaca

SEQ ID NO: 12176 - DNA, 20 bp, Artificial Sequence
  Description of Artificial Sequence: Synthetic oligonucleotide
  Target: SCNA; (-) strand; PAM type: NNNNGHTT; PAM sequence: TTTTGATT
aaatcagggttattcaaact

SEQ ID NO: 12177 - DNA, 20 bp, Artificial Sequence
  Description of Artificial Sequence: Synthetic oligonucleotide
  Target: SCNA; (-) strand; PAM type: NNNNGHTT; PAM sequence: TTAAGTTT
aaggacagtggctcacaatc

SEQ ID NO: 12178 - DNA, 20 bp, Artificial Sequence
  Description of Artificial Sequence: Synthetic oligonucleotide
  Target: SCNA; (-) strand; PAM type: NNNNGHTT; PAM sequence: AAATGTTT
gtacaattagacattttata

SEQ ID NO: 12179 - DNA, 20 bp, Artificial Sequence
  Description of Artificial Sequence: Synthetic oligonucleotide
  Target: SCNA; (-) strand; PAM type: NNNNGHTT; PAM sequence: TGAAGTTT
tgtgagagagagagagagac

SEQ ID NO: 12180 - DNA, 20 bp, Artificial Sequence
  Description of Artificial Sequence: Synthetic oligonucleotide
  Target: SCNA; (-) strand; PAM type: NNNNGHTT; PAM sequence: TGAGGTTT
agtagttgaggaagaaccca

SEQ ID NO: 12181 - DNA, 20 bp, Artificial Sequence
  Description of Artificial Sequence: Synthetic oligonucleotide
  Target: SCNA; (-) strand; PAM type: NNNNGHTT; PAM sequence: GCATGATT
tataaatatgatattgtgaa

SEQ ID NO: 12182 - DNA, 20 bp, Artificial Sequence
  Description of Artificial Sequence: Synthetic oligonucleotide
  Target: SCNA; (-) strand; PAM type: NNNNGHTT; PAM sequence: TTTTGATT
atatttctttaaatgaatac

SEQ ID NO: 12183 - DNA, 20 bp, Artificial Sequence
  Description of Artificial Sequence: Synthetic oligonucleotide
  Target: SCNA; (-) strand; PAM type: NNNNGHTT; PAM sequence: TATAGTTT
tgtattttataagtgttact

SEQ ID NO: 12184 - DNA, 20 bp, Artificial Sequence
  Description of Artificial Sequence: Synthetic oligonucleotide
  Target: SCNA; (-) strand; PAM type: NNNNGHTT; PAM sequence: TTTAGCTT
gattcttcacctctgtgtga

SEQ ID NO: 12185 - DNA, 20 bp, Artificial Sequence
  Description of Artificial Sequence: Synthetic oligonucleotide
  Target: SCNA; (-) strand; PAM type: NNNNGHTT; PAM sequence: GTGTGATT
ttgcaagattcttcacctct

SEQ ID NO: 12186 - DNA, 20 bp, Artificial Sequence
  Description of Artificial Sequence: Synthetic oligonucleotide
  Target: SCNA; (-) strand; PAM type: NNNNGHTT; PAM sequence: GCAAGATT
ttaccagctgtgtgtttttt

SEQ ID NO: 12187 - DNA, 20 bp, Artificial Sequence
  Description of Artificial Sequence: Synthetic oligonucleotide
  Target: SCNA; (-) strand; PAM type: NNNNGHTT; PAM sequence: GTGTGTTT
ctgcttactccttaccagct

SEQ ID NO: 12188 - DNA, 20 bp, Artificial Sequence
  Description of Artificial Sequence: Synthetic oligonucleotide
  Target: SCNA; (-) strand; PAM type: NNNNGHTT; PAM sequence: TCCTGCTT
cagatcttcttggttcaact

SEQ ID NO: 12189 - DNA, 20 bp, Artificial Sequence
  Description of Artificial Sequence: Synthetic oligonucleotide
  Target: SCNA; (-) strand; PAM type: NNNNGHTT; PAM sequence: CCACGTTT
agttttctgttgtaagtact

SEQ ID NO: 12190 - DNA, 20 bp, Artificial Sequence
  Description of Artificial Sequence: Synthetic oligonucleotide
  Target: SCNA; (-) strand; PAM type: NNNNGHTT; PAM sequence: TTAAGTTT
agcccacagacttgctgtaa

SEQ ID NO: 12191 - DNA, 20 bp, Artificial Sequence
  Description of Artificial Sequence: Synthetic oligonucleotide
  Target: SCNA; (-) strand; PAM type: NNNNGHTT; PAM sequence: TTAGGTTT
cgagaatttgaacaagtcaa

SEQ ID NO: 12192 - DNA, 20 bp, Artificial Sequence
  Description of Artificial Sequence: Synthetic oligonucleotide
  Target: SCNA; (-) strand; PAM type: NNNNGHTT; PAM sequence: TTCTGATT
ttattgtgcaattattacat

SEQ ID NO: 12193 - DNA, 20 bp, Artificial Sequence
  Description of Artificial Sequence: Synthetic oligonucleotide
  Target: SCNA; (-) strand; PAM type: NNNNGHTT; PAM sequence: AAATGTTT
acacccttggacagtcagta

SEQ ID NO: 12194 - DNA, 20 bp, Artificial Sequence
  Description of Artificial Sequence: Synthetic oligonucleotide
  Target: SCNA; (-) strand; PAM type: NNNNGHTT; PAM sequence: TGTTGATT
aatattttgaccttaaatta

SEQ ID NO: 12195 - DNA, 20 bp, Artificial Sequence
  Description of Artificial Sequence: Synthetic oligonucleotide
  Target: SCNA; (-) strand; PAM type: NNNNGHTT; PAM sequence: TGTTGATT
tttaaaaaaagtaaaatttc

SEQ ID NO: 12196 - DNA, 20 bp, Artificial Sequence
  Description of Artificial Sequence: Synthetic oligonucleotide
  Target: SCNA; (-) strand; PAM type: NNNNGHTT; PAM sequence: CTATGTTT
gagggctttgaattgataag

SEQ ID NO: 12197 - DNA, 20 bp, Artificial Sequence
  Description of Artificial Sequence: Synthetic oligonucleotide
  Target: SCNA; (-) strand; PAM type: NNNNGHTT; PAM sequence: GAGGGCTT
atatacttgccaagaataat

SEQ ID NO: 12198 - DNA, 20 bp, Artificial Sequence
  Description of Artificial Sequence: Synthetic oligonucleotide
  Target: SCNA; (-) strand; PAM type: NNNNGHTT; PAM sequence: TATTGATT
agtatttttaaataggtaaa

SEQ ID NO: 12199 - DNA, 20 bp, Artificial Sequence
  Description of Artificial Sequence: Synthetic oligonucleotide
  Target: SCNA; (-) strand; PAM type: NNNNGHTT; PAM sequence: TCAAGATT
tgattagtgtggcccagtat

SEQ ID NO: 12200 - DNA, 20 bp, Artificial Sequence
  Description of Artificial Sequence: Synthetic oligonucleotide
  Target: SCNA; (-) strand; PAM type: NNNNGHTT; PAM sequence: TAGTGATT
aagatgatatttaaagtatc

SEQ ID NO: 12201 - DNA, 20 bp, Artificial Sequence
  Description of Artificial Sequence: Synthetic oligonucleotide
  Target: SCNA; (-) strand; PAM type: NNNNGHTT; PAM sequence: TTGTGCTT
gtggcaacaggtaagctcca

SEQ ID NO: 12202 - DNA, 20 bp, Artificial Sequence
  Description of Artificial Sequence: Synthetic oligonucleotide
  Target: SCNA; (-) strand; PAM type: NNNNGHTT; PAM sequence: ATTTGTTT
gcttgagacttatgtcttga

SEQ ID NO: 12203 - DNA, 20 bp, Artificial Sequence
  Description of Artificial Sequence: Synthetic oligonucleotide
  Target: SCNA; (-) strand; PAM type: NNNNGHTT; PAM sequence: GCTAGCTT
tagctaatcagcaatttaag

SEQ ID NO: 12204 - DNA, 20 bp, Artificial Sequence
  Description of Artificial Sequence: Synthetic oligonucleotide
  Target: SCNA; (-) strand; PAM type: NNNNGHTT; PAM sequence: TTGAGATT
aatatatatacttctgaaga

SEQ ID NO: 12205 - DNA, 20 bp, Artificial Sequence
  Description of Artificial Sequence: Synthetic oligonucleotide
  Target: SCNA; (-) strand; PAM type: NNNNGHTT; PAM sequence: TGAAGATT
tataataatatatatacttc

SEQ ID NO: 12206 - DNA, 20 bp, Artificial Sequence
  Description of Artificial Sequence: Synthetic oligonucleotide
  Target: SCNA; (-) strand; PAM type: NNNNGHTT; PAM sequence: TCTAGTTT
tggttactggagttccttct

SEQ ID NO: 12207 - DNA, 20 bp, Artificial Sequence
  Description of Artificial Sequence: Synthetic oligonucleotide
  Target: SCNA; (-) strand; PAM type: NNNNGHTT; PAM sequence: CTGGGCTT
tggagaggacctcctgttag

SEQ ID NO: 12208 - DNA, 20 bp, Artificial Sequence
  Description of Artificial Sequence: Synthetic oligonucleotide
  Target: SCNA; (-) strand; PAM type: NNNNGHTT; PAM sequence: TAAAGCTT
tgtctctagtgctgtacttt

SEQ ID NO: 12209 - DNA, 20 bp, Artificial Sequence
  Description of Artificial Sequence: Synthetic oligonucleotide
  Target: SCNA; (-) strand; PAM type: NNNNGHTT; PAM sequence: TTTTGTTT
ttctctccatccttcttccc

SEQ ID NO: 12210 - DNA, 20 bp, Artificial Sequence
  Description of Artificial Sequence: Synthetic oligonucleotide
  Target: SCNA; (-) strand; PAM type: NNNNGHTT; PAM sequence: AAATGTTT
gagccactgcgcccagccta

SEQ ID NO: 12211 - DNA, 20 bp, Artificial Sequence
  Description of Artificial Sequence: Synthetic oligonucleotide
  Target: SCNA; (-) strand; PAM type: NNNNGHTT; PAM sequence: CTGGGATT
cacctcggcctcccaaattg

SEQ ID NO: 12212 - DNA, 20 bp, Artificial Sequence
  Description of Artificial Sequence: Synthetic oligonucleotide
  Target: SCNA; (-) strand; PAM type: NNNNGHTT; PAM sequence: TGGGGTTT
ttttgtatttttggtagaga

SEQ ID NO: 12213 - DNA, 20 bp, Artificial Sequence
  Description of Artificial Sequence: Synthetic oligonucleotide
  Target: SCNA; (-) strand; PAM type: NNNNGHTT; PAM sequence: GTTTGTTT
gtttgtttgtttgtttgtct

SEQ ID NO: 12214 - DNA, 20 bp, Artificial Sequence
  Description of Artificial Sequence: Synthetic oligonucleotide
  Target: SCNA; (-) strand; PAM type: NNNNGHTT; PAM sequence: GTCTGTTT
ttttgtttgtttgtttgttt

SEQ ID NO: 12215 - DNA, 20 bp, Artificial Sequence
  Description of Artificial Sequence: Synthetic oligonucleotide
  Target: SCNA; (-) strand; PAM type: NNNNGHTT; PAM sequence: GTTTGTTT
aatgtgttttttgtttgttt

SEQ ID NO: 12216 - DNA, 20 bp, Artificial Sequence
  Description of Artificial Sequence: Synthetic oligonucleotide
  Target: SCNA; (-) strand; PAM type: NNNNGHTT; PAM sequence: GTTTGTTT
gtaaaatgtgttttttgttt

SEQ ID NO: 12217 - DNA, 20 bp, Artificial Sequence
  Description of Artificial Sequence: Synthetic oligonucleotide
  Target: SCNA; (-) strand; PAM type: NNNNGHTT; PAM sequence: GTTTGTTT
atatgtaaaatgtgtttttt

SEQ ID NO: 12218 - DNA, 20 bp, Artificial Sequence
  Description of Artificial Sequence: Synthetic oligonucleotide
  Target: SCNA; (-) strand; PAM type: NNNNGHTT; PAM sequence: TTTTGTTT
gatgatatgtaaaatgtgtt

SEQ ID NO: 12219 - DNA, 20 bp, Artificial Sequence
  Description of Artificial Sequence: Synthetic oligonucleotide
  Target: SCNA; (-) strand; PAM type: NNNNGHTT; PAM sequence: ATGTGTTT
taaataagatgatatgtaaa

SEQ ID NO: 12220 - DNA, 20 bp, Artificial Sequence
  Description of Artificial Sequence: Synthetic oligonucleotide
  Target: SCNA; (-) strand; PAM type: NNNNGHTT; PAM sequence: TGAAGATT
actatattaaatggctgtta

SEQ ID NO: 12221 - DNA, 20 bp, Artificial Sequence
  Description of Artificial Sequence: Synthetic oligonucleotide
  Target: SCNA; (-) strand; PAM type: NNNNGHTT; PAM sequence: CTCGGATT
atgttacataaattacttaa

SEQ ID NO: 12222 - DNA, 20 bp, Artificial Sequence
  Description of Artificial Sequence: Synthetic oligonucleotide
  Target: SCNA; (-) strand; PAM type: NNNNGHTT; PAM sequence: ATGTGCTT
gtgtagagaccctagtttga

SEQ ID NO: 12223 - DNA, 20 bp, Artificial Sequence
  Description of Artificial Sequence: Synthetic oligonucleotide
  Target: SCNA; (-) strand; PAM type: NNNNGHTT; PAM sequence: CCTAGTTT
ttctgatcctgtgtagagac

SEQ ID NO: 12224 - DNA, 20 bp, Artificial Sequence
  Description of Artificial Sequence: Synthetic oligonucleotide
  Target: SCNA; (-) strand; PAM type: NNNNGHTT; PAM sequence: CAAGGTTT
tattcaagtttagtaatgtt

SEQ ID NO: 12225 - DNA, 20 bp, Artificial Sequence
  Description of Artificial Sequence: Synthetic oligonucleotide
  Target: SCNA; (-) strand; PAM type: NNNNGHTT; PAM sequence: TCAAGTTT
cacataataattatttgtat

SEQ ID NO: 12226 - DNA, 20 bp, Artificial Sequence
  Description of Artificial Sequence: Synthetic oligonucleotide
  Target: SCNA; (-) strand; PAM type: NNNNGHTT; PAM sequence: TGCCGATT
tctgtaaaacataaaaatca

SEQ ID NO: 12227 - DNA, 20 bp, Artificial Sequence
  Description of Artificial Sequence: Synthetic oligonucleotide
  Target: SCNA; (-) strand; PAM type: NNNNGHTT; PAM sequence: TGATGTTT
ctcccagtggtgagcccatg

SEQ ID NO: 12228 - DNA, 20 bp, Artificial Sequence
  Description of Artificial Sequence: Synthetic oligonucleotide
  Target: SCNA; (-) strand; PAM type: NNNNGHTT; PAM sequence: GGTTGCTT
ttcaaagctttttggagatt

SEQ ID NO: 12229 - DNA, 20 bp, Artificial Sequence
  Description of Artificial Sequence: Synthetic oligonucleotide
  Target: SCNA; (-) strand; PAM type: NNNNGHTT; PAM sequence: TGGAGATT
gcacttctttcaaagctttt

SEQ ID NO: 12230 - DNA, 20 bp, Artificial Sequence
  Description of Artificial Sequence: Synthetic oligonucleotide
  Target: SCNA; (-) strand; PAM type: NNNNGHTT; PAM sequence: CAAAGCTT
caaaaccacagcacttcttt

SEQ ID NO: 12231 - DNA, 20 bp, Artificial Sequence
  Description of Artificial Sequence: Synthetic oligonucleotide
  Target: SCNA; (-) strand; PAM type: NNNNGHTT; PAM sequence: TAGAGATT
caggtggtgaggatgagaga

SEQ ID NO: 12232 - DNA, 20 bp, Artificial Sequence
  Description of Artificial Sequence: Synthetic oligonucleotide
  Target: SCNA; (-) strand; PAM type: NNNNGHTT; PAM sequence: ATATGTTT
ctcattgtctttgatttaga

SEQ ID NO: 12233 - DNA, 20 bp, Artificial Sequence
  Description of Artificial Sequence: Synthetic oligonucleotide
  Target: SCNA; (-) strand; PAM type: NNNNGHTT; PAM sequence: CTTTGATT
ctctacttctatctcattgt

SEQ ID NO: 12234 - DNA, 20 bp, Artificial Sequence
  Description of Artificial Sequence: Synthetic oligonucleotide
  Target: SCNA; (-) strand; PAM type: NNNNGHTT; PAM sequence: TCTAGATT
aaaaattaaaaattctctct

SEQ ID NO: 12235 - DNA, 20 bp, Artificial Sequence
  Description of Artificial Sequence: Synthetic oligonucleotide
  Target: SCNA; (-) strand; PAM type: NNNNGHTT; PAM sequence: GAGGGATT
ttgtggatctacacccagaa

SEQ ID NO: 12236 - DNA, 20 bp, Artificial Sequence
  Description of Artificial Sequence: Synthetic oligonucleotide
  Target: SCNA; (-) strand; PAM type: NNNNGHTT; PAM sequence: CTGGGATT
tgcctcagcctcccaaagca

SEQ ID NO: 12237 - DNA, 20 bp, Artificial Sequence
  Description of Artificial Sequence: Synthetic oligonucleotide
  Target: SCNA; (-) strand; PAM type: NNNNGHTT; PAM sequence: TAGTGTTT
aaataaataaatattagttt

SEQ ID NO: 12238 - DNA, 20 bp, Artificial Sequence
  Description of Artificial Sequence: Synthetic oligonucleotide
  Target: SCNA; (-) strand; PAM type: NNNNGHTT; PAM sequence: ATTAGTTT
ggtttgctaaataaataaat

SEQ ID NO: 12239 - DNA, 20 bp, Artificial Sequence
  Description of Artificial Sequence: Synthetic oligonucleotide
  Target: SCNA; (-) strand; PAM type: NNNNGHTT; PAM sequence: TCTGGTTT
taatttctaatgttttaaat

SEQ ID NO: 12240 - DNA, 20 bp, Artificial Sequence
  Description of Artificial Sequence: Synthetic oligonucleotide
  Target: SCNA; (-) strand; PAM type: NNNNGHTT; PAM sequence: TAATGTTT
aaataaaacactttaatttc

SEQ ID NO: 12241 - DNA, 20 bp, Artificial Sequence
  Description of Artificial Sequence: Synthetic oligonucleotide
  Target: SCNA; (-) strand; PAM type: NNNNGHTT; PAM sequence: ATAAGTTT
cactatttacattactcttg

SEQ ID NO: 12242 - DNA, 20 bp, Artificial Sequence
  Description of Artificial Sequence: Synthetic oligonucleotide
  Target: SCNA; (-) strand; PAM type: NNNNGHTT; PAM sequence: TTATGTTT
agacactttagttgtggcta

SEQ ID NO: 12243 - DNA, 20 bp, Artificial Sequence
  Description of Artificial Sequence: Synthetic oligonucleotide
  Target: SCNA; (-) strand; PAM type: NNNNGHTT; PAM sequence: TCTTGTTT
ccatgttgtaaatggtagga

SEQ ID NO: 12244 - DNA, 20 bp, Artificial Sequence
  Description of Artificial Sequence: Synthetic oligonucleotide
  Target: SCNA; (-) strand; PAM type: NNNNGHTT; PAM sequence: TTTGGCTT
gtaatatttttctttctgtg

SEQ ID NO: 12245 - DNA, 20 bp, Artificial Sequence
  Description of Artificial Sequence: Synthetic oligonucleotide
  Target: SCNA; (-) strand; PAM type: NNNNGHTT; PAM sequence: CTGTGTTT
ataatgtaatatttttcttt

SEQ ID NO: 12246 - DNA, 20 bp, Artificial Sequence
  Description of Artificial Sequence: Synthetic oligonucleotide
  Target: SCNA; (-) strand; PAM type: NNNNGHTT; PAM sequence: TCAAGCTT
ctgtatatttgaattttgtt

SEQ ID NO: 12247 - DNA, 20 bp, Artificial Sequence
  Description of Artificial Sequence: Synthetic oligonucleotide
  Target: SCNA; (-) strand; PAM type: NNNNGHTT; PAM sequence: TTTTGTTT
gtagtctctgtatatttgaa

SEQ ID NO: 12248 - DNA, 20 bp, Artificial Sequence
  Description of Artificial Sequence: Synthetic oligonucleotide
  Target: SCNA; (-) strand; PAM type: NNNNGHTT; PAM sequence: CCCTGTTT
tacttttccacccctattaa

SEQ ID NO: 12249 - DNA, 20 bp, Artificial Sequence
  Description of Artificial Sequence: Synthetic oligonucleotide
  Target: SCNA; (-) strand; PAM type: NNNNGHTT; PAM sequence: ACTTGCTT
tttcatcttacacatctgct

SEQ ID NO: 12250 - DNA, 20 bp, Artificial Sequence
  Description of Artificial Sequence: Synthetic oligonucleotide
  Target: SCNA; (-) strand; PAM type: NNNNGHTT; PAM sequence: TGTTGTTT
tctctcatagttaccttttt

SEQ ID NO: 12251 - DNA, 20 bp, Artificial Sequence
  Description of Artificial Sequence: Synthetic oligonucleotide
  Target: SCNA; (-) strand; PAM type: NNNNGHTT; PAM sequence: CTGGGATT
gacctcggcctcccaaaatg

SEQ ID NO: 12252 - DNA, 20 bp, Artificial Sequence
  Description of Artificial Sequence: Synthetic oligonucleotide
  Target: SCNA; (-) strand; PAM type: NNNNGHTT; PAM sequence: TGGGGTTT
ttttgtatttttagtagaga

SEQ ID NO: 12253 - DNA, 20 bp, Artificial Sequence
  Description of Artificial Sequence: Synthetic oligonucleotide
  Target: SCNA; (-) strand; PAM type: NNNNGHTT; PAM sequence: TGTGGTTT
ttaattataagttctaatgg

SEQ ID NO: 12254 - DNA, 20 bp, Artificial Sequence
  Description of Artificial Sequence: Synthetic oligonucleotide
  Target: SCNA; (-) strand; PAM type: NNNNGHTT; PAM sequence: TCTCGTTT
cttatgaggactctcattta

SEQ ID NO: 12255 - DNA, 20 bp, Artificial Sequence
  Description of Artificial Sequence: Synthetic oligonucleotide
  Target: SCNA; (-) strand; PAM type: NNNNGHTT; PAM sequence: ATTGGTTT
atgacctcaaagaacaactg

SEQ ID NO: 12256 - DNA, 20 bp, Artificial Sequence
  Description of Artificial Sequence: Synthetic oligonucleotide
  Target: SCNA; (-) strand; PAM type: NNNNGHTT; PAM sequence: AACTGATT
taattatgacctcaaagaac

SEQ ID NO: 12257 - DNA, 20 bp, Artificial Sequence
  Description of Artificial Sequence: Synthetic oligonucleotide
  Target: SCNA; (-) strand; PAM type: NNNNGHTT; PAM sequence: TACAGATT
attaaaggctaaccatcaat

SEQ ID NO: 12258 - DNA, 20 bp, Artificial Sequence
  Description of Artificial Sequence: Synthetic oligonucleotide
  Target: SCNA; (-) strand; PAM type: NNNNGHTT; PAM sequence: TACAGATT
tgtaggtgtacgttatcaat

SEQ ID NO: 12259 - DNA, 20 bp, Artificial Sequence
  Description of Artificial Sequence: Synthetic oligonucleotide
  Target: SCNA; (-) strand; PAM type: NNNNGHTT; PAM sequence: ATGTGCTT
tagcaaattctcaagtcaaa

SEQ ID NO: 12260 - DNA, 20 bp, Artificial Sequence
  Description of Artificial Sequence: Synthetic oligonucleotide
  Target: SCNA; (-) strand; PAM type: NNNNGHTT; PAM sequence: GAAAGATT
tagatctaaatccaaaagca

SEQ ID NO: 12261 - DNA, 20 bp, Artificial Sequence
  Description of Artificial Sequence: Synthetic oligonucleotide
  Target: SCNA; (-) strand; PAM type: NNNNGHTT; PAM sequence: ATGGGTTT
taatgatcagtgttattttt

SEQ ID NO: 12262 - DNA, 20 bp, Artificial Sequence
  Description of Artificial Sequence: Synthetic oligonucleotide
  Target: SCNA; (-) strand; PAM type: NNNNGHTT; PAM sequence: AGATGTTT
ataatttcacttatggctga

SEQ ID NO: 12263 - DNA, 20 bp, Artificial Sequence
  Description of Artificial Sequence: Synthetic oligonucleotide
  Target: SCNA; (-) strand; PAM type: NNNNGHTT; PAM sequence: GAAAGATT
cttcattacataactagttt

SEQ ID NO: 12264 - DNA, 20 bp, Artificial Sequence
  Description of Artificial Sequence: Synthetic oligonucleotide
  Target: SCNA; (-) strand; PAM type: NNNNGHTT; PAM sequence: ACTAGTTT
cttttatccttcattacata

SEQ ID NO: 12265 - DNA, 20 bp, Artificial Sequence
  Description of Artificial Sequence: Synthetic oligonucleotide
  Target: SCNA; (-) strand; PAM type: NNNNGHTT; PAM sequence: ACACGTTT
acggaataattactttgcca

SEQ ID NO: 12266 - DNA, 20 bp, Artificial Sequence
  Description of Artificial Sequence: Synthetic oligonucleotide
  Target: SCNA; (-) strand; PAM type: NNNNGHTT; PAM sequence: TGCAGTTT
ttagaaaactgcaactacct

SEQ ID NO: 12267 - DNA, 20 bp, Artificial Sequence
  Description of Artificial Sequence: Synthetic oligonucleotide
  Target: SCNA; (-) strand; PAM type: NNNNGHTT; PAM sequence: ATATGATT
acttccctgattagtaaaaa

SEQ ID NO: 12268 - DNA, 20 bp, Artificial Sequence
  Description of Artificial Sequence: Synthetic oligonucleotide
  Target: SCNA; (-) strand; PAM type: NNNNGHTT; PAM sequence: CCCTGATT
aacatctctgagcatcactt

SEQ ID NO: 12269 - DNA, 20 bp, Artificial Sequence
  Description of Artificial Sequence: Synthetic oligonucleotide
  Target: SCNA; (-) strand; PAM type: NNNNGHTT; PAM sequence: CAAAGTTT
catgcactaatcacacaaac

SEQ ID NO: 12270 - DNA, 20 bp, Artificial Sequence
  Description of Artificial Sequence: Synthetic oligonucleotide
  Target: SCNA; (-) strand; PAM type: NNNNGHTT; PAM sequence: TGTAGCTT
gctggaattgtcttgtatgt

SEQ ID NO: 12271 - DNA, 20 bp, Artificial Sequence
  Description of Artificial Sequence: Synthetic oligonucleotide
  Target: SCNA; (-) strand; PAM type: NNNNGHTT; PAM sequence: GATGGCTT
ccaggaggctgaggtaggag

SEQ ID NO: 12272 - DNA, 20 bp, Artificial Sequence
  Description of Artificial Sequence: Synthetic oligonucleotide
  Target: SCNA; (-) strand; PAM type: NNNNGHTT; PAM sequence: AGGGGTTT
ctggtggatcacttgagccc

SEQ ID NO: 12273 - DNA, 20 bp, Artificial Sequence
  Description of Artificial Sequence: Synthetic oligonucleotide
  Target: SCNA; (-) strand; PAM type: NNNNGHTT; PAM sequence: CAGGGATT
gaagacacaatagtatagtc

SEQ ID NO: 12274 - DNA, 20 bp, Artificial Sequence
  Description of Artificial Sequence: Synthetic oligonucleotide
  Target: SCNA; (-) strand; PAM type: NNNNGHTT; PAM sequence: ACAAGTTT
gatttccaagttctgcaagc

SEQ ID NO: 12275 - DNA, 20 bp, Artificial Sequence
  Description of Artificial Sequence: Synthetic oligonucleotide
  Target: SCNA; (-) strand; PAM type: NNNNGHTT; PAM sequence: CTCAGATT
tcaatatctttccgtttgtc

SEQ ID NO: 12276 - DNA, 20 bp, Artificial Sequence
  Description of Artificial Sequence: Synthetic oligonucleotide
  Target: SCNA; (-) strand; PAM type: NNNNGHTT; PAM sequence: TTCCGTTT
catgcagtttatcaatatct

SEQ ID NO: 12277 - DNA, 20 bp, Artificial Sequence
  Description of Artificial Sequence: Synthetic oligonucleotide
  Target: SCNA; (-) strand; PAM type: NNNNGHTT; PAM sequence: TGCAGTTT
ggaatactgaatcagtgaca

SEQ ID NO: 12278 - DNA, 20 bp, Artificial Sequence
  Description of Artificial Sequence: Synthetic oligonucleotide
  Target: SCNA; (-) strand; PAM type: NNNNGHTT; PAM sequence: CCAGGATT
cacctcagcctcctgagtag

SEQ ID NO: 12279 - DNA, 20 bp, Artificial Sequence
  Description of Artificial Sequence: Synthetic oligonucleotide
  Target: SCNA; (-) strand; PAM type: NNNNGHTT; PAM sequence: TTCAGTTT
ttttttttcagttttttatt

SEQ ID NO: 12280 - DNA, 20 bp, Artificial Sequence
  Description of Artificial Sequence: Synthetic oligonucleotide
  Target: SCNA; (-) strand; PAM type: NNNNGHTT; PAM sequence: TTCAGTTT
agttcacaacacattttttt

SEQ ID NO: 12281 - DNA, 20 bp, Artificial Sequence
  Description of Artificial Sequence: Synthetic oligonucleotide
  Target: SCNA; (-) strand; PAM type: NNNNGHTT; PAM sequence: GGATGATT
tgggggaaattttatacttg

SEQ ID NO: 12282 - DNA, 20 bp, Artificial Sequence
  Description of Artificial Sequence: Synthetic oligonucleotide
  Target: SCNA; (-) strand; PAM type: NNNNGHTT; PAM sequence: CTGAGCTT
cttcctctcttctttctcct

SEQ ID NO: 12283 - DNA, 20 bp, Artificial Sequence
  Description of Artificial Sequence: Synthetic oligonucleotide
  Target: SCNA; (-) strand; PAM type: NNNNGHTT; PAM sequence: TGATGCTT
tactaaaagaataaagaaat

SEQ ID NO: 12284 - DNA, 20 bp, Artificial Sequence
  Description of Artificial Sequence: Synthetic oligonucleotide
  Target: SCNA; (-) strand; PAM type: NNNNGHTT; PAM sequence: AAGTGCTT
tgaacactgaggacagagaa

SEQ ID NO: 12285 - DNA, 20 bp, Artificial Sequence
  Description of Artificial Sequence: Synthetic oligonucleotide
  Target: SCNA; (-) strand; PAM type: NNNNGHTT; PAM sequence: AACAGATT
tgtggccctaaaatggaaag

SEQ ID NO: 12286 - DNA, 20 bp, Artificial Sequence
  Description of Artificial Sequence: Synthetic oligonucleotide
  Target: SCNA; (-) strand; PAM type: NNNNGHTT; PAM sequence: TTCTGATT
tgtttgtcaattttaatcca

SEQ ID NO: 12287 - DNA, 20 bp, Artificial Sequence
  Description of Artificial Sequence: Synthetic oligonucleotide
  Target: SCNA; (-) strand; PAM type: NNNNGHTT; PAM sequence: AAATGTTT
atttcttttaccatcatgaa

SEQ ID NO: 12288 - DNA, 20 bp, Artificial Sequence
  Description of Artificial Sequence: Synthetic oligonucleotide
  Target: SCNA; (-) strand; PAM type: NNNNGHTT; PAM sequence: CTGTGATT
aatcaaaatcattgatggat

SEQ ID NO: 12289 - DNA, 20 bp, Artificial Sequence
  Description of Artificial Sequence: Synthetic oligonucleotide
  Target: SCNA; (-) strand; PAM type: NNNNGHTT; PAM sequence: AACAGTTT
tacataattctatttcagag

SEQ ID NO: 12290 - DNA, 20 bp, Artificial Sequence
  Description of Artificial Sequence: Synthetic oligonucleotide
  Target: SCNA; (-) strand; PAM type: NNNNGHTT; PAM sequence: GAATGTTT
atttatgactttttaaaaat

SEQ ID NO: 12291 - DNA, 20 bp, Artificial Sequence
  Description of Artificial Sequence: Synthetic oligonucleotide
  Target: SCNA; (-) strand; PAM type: NNNNGHTT; PAM sequence: TCCAGATT
aaaatgcgactgtttgcttt

SEQ ID NO: 12292 - DNA, 20 bp, Artificial Sequence
  Description of Artificial Sequence: Synthetic oligonucleotide
  Target: SCNA; (-) strand; PAM type: NNNNGHTT; PAM sequence: GTTTGCTT
taatagtaaaaaatgcgact

SEQ ID NO: 12293 - DNA, 20 bp, Artificial Sequence
  Description of Artificial Sequence: Synthetic oligonucleotide
  Target: SCNA; (-) strand; PAM type: NNNNGHTT; PAM sequence: GACTGTTT
gagctaatagtaaaaaatgc

SEQ ID NO: 12294 - DNA, 20 bp, Artificial Sequence
  Description of Artificial Sequence: Synthetic oligonucleotide
  Target: SCNA; (-) strand; PAM type: NNNNGHTT; PAM sequence: CATTGCTT
ctcttgattcatttttgcat

SEQ ID NO: 12295 - DNA, 20 bp, Artificial Sequence
  Description of Artificial Sequence: Synthetic oligonucleotide
  Target: SCNA; (-) strand; PAM type: NNNNGHTT; PAM sequence: TCTTGATT
taaatgctggtagttctctc

SEQ ID NO: 12296 - DNA, 20 bp, Artificial Sequence
  Description of Artificial Sequence: Synthetic oligonucleotide
  Target: SCNA; (-) strand; PAM type: NNNNGHTT; PAM sequence: TGGTGCTT
gtaaaccccaaatgtcagtt

SEQ ID NO: 12297 - DNA, 20 bp, Artificial Sequence
  Description of Artificial Sequence: Synthetic oligonucleotide
  Target: SCNA; (-) strand; PAM type: NNNNGHTT; PAM sequence: GTCAGTTT
taggtaggtaaaccccaaat

SEQ ID NO: 12298 - DNA, 20 bp, Artificial Sequence
  Description of Artificial Sequence: Synthetic oligonucleotide
  Target: SCNA; (-) strand; PAM type: NNNNGHTT; PAM sequence: TTATGTTT
gttctcattcaaagtgtatt

SEQ ID NO: 12299 - DNA, 20 bp, Artificial Sequence
  Description of Artificial Sequence: Synthetic oligonucleotide
  Target: SCNA; (-) strand; PAM type: NNNNGHTT; PAM sequence: TTTTGTTT
tctcatgatttttcagtgtt

SEQ ID NO: 12300 - DNA, 20 bp, Artificial Sequence
  Description of Artificial Sequence: Synthetic oligonucleotide
  Target: SCNA; (-) strand; PAM type: NNNNGHTT; PAM sequence: CAGTGTTT
gagggtttctcatgattttt

SEQ ID NO: 12301 - DNA, 20 bp, Artificial Sequence
  Description of Artificial Sequence: Synthetic oligonucleotide
  Target: SCNA; (-) strand; PAM type: NNNNGHTT; PAM sequence: TCATGATT
ctcacactttggagggtttc

SEQ ID NO: 12302 - DNA, 20 bp, Artificial Sequence
  Description of Artificial Sequence: Synthetic oligonucleotide
  Target: SCNA; (-) strand; PAM type: NNNNGHTT; PAM sequence: GAGGGTTT
taaaagagtctcacactttg

SEQ ID NO: 12303 - DNA, 20 bp, Artificial Sequence
  Description of Artificial Sequence: Synthetic oligonucleotide
  Target: SCNA; (-) strand; PAM type: NNNNGHTT; PAM sequence: GTCTGCTT
ttaatgccagagctaaaaat

SEQ ID NO: 12304 - DNA, 20 bp, Artificial Sequence
  Description of Artificial Sequence: Synthetic oligonucleotide
  Target: SCNA; (-) strand; PAM type: NNNNGHTT; PAM sequence: AGAGGATT
aaatgcagtaataacaactc

SEQ ID NO: 12305 - DNA, 20 bp, Artificial Sequence
  Description of Artificial Sequence: Synthetic oligonucleotide
  Target: SCNA; (-) strand; PAM type: NNNNGHTT; PAM sequence: CCATGCTT
tgaccctaagcctccagctt

SEQ ID NO: 12306 - DNA, 20 bp, Artificial Sequence
  Description of Artificial Sequence: Synthetic oligonucleotide
  Target: SCNA; (-) strand; PAM type: NNNNGHTT; PAM sequence: TCCAGCTT
gatacccctgaccctaagcc

SEQ ID NO: 12307 - DNA, 20 bp, Artificial Sequence
  Description of Artificial Sequence: Synthetic oligonucleotide
  Target: SCNA; (-) strand; PAM type: NNNNGHTT; PAM sequence: CTGGGATT
atcaacctgttagccttctt

SEQ ID NO: 12308 - DNA, 20 bp, Artificial Sequence
  Description of Artificial Sequence: Synthetic oligonucleotide
  Target: SCNA; (-) strand; PAM type: NNNNGHTT; PAM sequence: CTGAGTTT
cacttgggcctgctgtttgc

SEQ ID NO: 12309 - DNA, 20 bp, Artificial Sequence
  Description of Artificial Sequence: Synthetic oligonucleotide
  Target: SCNA; (-) strand; PAM type: NNNNGHTT; PAM sequence: TGCTGTTT
agaaccatcacacttgggcc

SEQ ID NO: 12310 - DNA, 20 bp, Artificial Sequence
  Description of Artificial Sequence: Synthetic oligonucleotide
  Target: SCNA; (-) strand; PAM type: NNNNGHTT; PAM sequence: GATGGATT
gagggcgggggtggatgttg

SEQ ID NO: 12311 - DNA, 20 bp, Artificial Sequence
  Description of Artificial Sequence: Synthetic oligonucleotide
  Target: SCNA; (-) strand; PAM type: NNNNGHTT; PAM sequence: CTGCGTTT
ttctctgtaaagtaagcaag

SEQ ID NO: 12312 - DNA, 20 bp, Artificial Sequence
  Description of Artificial Sequence: Synthetic oligonucleotide
  Target: SCNA; (-) strand; PAM type: NNNNGHTT; PAM sequence: CTTGGTTT
aaaatctgtctgcccgctct

SEQ ID NO: 12313 - DNA, 20 bp, Artificial Sequence
  Description of Artificial Sequence: Synthetic oligonucleotide
  Target: SCNA; (-) strand; PAM type: NNNNGHTT; PAM sequence: ATCCGCTT
gattaggctgcttctccggg

SEQ ID NO: 12314 - DNA, 20 bp, Artificial Sequence
  Description of Artificial Sequence: Synthetic oligonucleotide
  Target: SCNA; (-) strand; PAM type: NNNNGHTT; PAM sequence: GGCTGCTT
ccacaagggctgagagatta

SEQ ID NO: 12315 - DNA, 20 bp, Artificial Sequence
  Description of Artificial Sequence: Synthetic oligonucleotide
  Target: SCNA; (-) strand; PAM type: NNNNGHTT; PAM sequence: GAGAGATT
ttcccttctccacaagggct

SEQ ID NO: 12316 - DNA, 20 bp, Artificial Sequence
  Description of Artificial Sequence: Synthetic oligonucleotide
  Target: SCNA; (-) strand; PAM type: NNNNGHTT; PAM sequence: TCCTGCTT
gagacttgacctggctttcg

SEQ ID NO: 12317 - DNA, 20 bp, Artificial Sequence
  Description of Artificial Sequence: Synthetic oligonucleotide
  Target: SCNA; (-) strand; PAM type: NNNNGHTT; PAM sequence: CCTGGCTT
gcctaaggaaagagacttga

SEQ ID NO: 12318 - DNA, 20 bp, Artificial Sequence
  Description of Artificial Sequence: Synthetic oligonucleotide
  Target: SCNA; (-) strand; PAM type: NNNNGHTT; PAM sequence: AATTGTTT
cctattaaatattatttggg

SEQ ID NO: 12319 - DNA, 20 bp, Artificial Sequence
  Description of Artificial Sequence: Synthetic oligonucleotide
  Target: SCNA; (-) strand; PAM type: NNNNGHTT; PAM sequence: GCGGGTTT
ggccattcgacgacaggtta

SEQ ID NO: 12320 - DNA, 20 bp, Artificial Sequence
  Description of Artificial Sequence: Synthetic oligonucleotide
  Target: SCNA; (-) strand; PAM type: NNNNGHTT; PAM sequence: CCGTGATT
cctaacgttgtaacctgtga

SEQ ID NO: 12321 - DNA, 20 bp, Artificial Sequence
  Description of Artificial Sequence: Synthetic oligonucleotide
  Target: SCNA; (-) strand; PAM type: NNNNGHTT; PAM sequence: CCTAGATT
caggaccctttccggctctt

SEQ ID NO: 12322 - DNA, 20 bp, Artificial Sequence
  Description of Artificial Sequence: Synthetic oligonucleotide
  Target: SCNA; (-) strand; PAM type: NNNNGHTT; PAM sequence: AGAGGATT
atggtgatagtggcgtggaa

SEQ ID NO: 12323 - DNA, 20 bp, Artificial Sequence
  Description of Artificial Sequence: Synthetic oligonucleotide
  Target: SCNA; (-) strand; PAM type: NNNNGHTT; PAM sequence: CGCTGATT
gaaaatcagcgtctggcagg

SEQ ID NO: 12324 - DNA, 20 bp, Artificial Sequence
  Description of Artificial Sequence: Synthetic oligonucleotide
  Target: SCNA; (-) strand; PAM type: NNNNGHTT; PAM sequence: GCTTGTTT
gagcgaaaagccttaggacc

SEQ ID NO: 12325 - DNA, 20 bp, Artificial Sequence
  Description of Artificial Sequence: Synthetic oligonucleotide
  Target: SCNA; (-) strand; PAM type: NNNNGHTT; PAM sequence: GACCGCTT
tctagagcgaaaagccttag

SEQ ID NO: 12326 - DNA, 20 bp, Artificial Sequence
  Description of Artificial Sequence: Synthetic oligonucleotide
  Target: SCNA; (-) strand; PAM type: NNNNGHTT; PAM sequence: GCTGGATT
ggtccggtaggctaaatcac

SEQ ID NO: 12327 - DNA, 20 bp, Artificial Sequence
  Description of Artificial Sequence: Synthetic oligonucleotide
  Target: SCNA; (-) strand; PAM type: NNNNGHTT; PAM sequence: GCTTGCTT
gctttctgctagtgggagga

SEQ ID NO: 12328 - DNA, 20 bp, Artificial Sequence
  Description of Artificial Sequence: Synthetic oligonucleotide
  Target: SCNA; (-) strand; PAM type: NNNNGHTT; PAM sequence: AGGAGCTT
aaaggctttctgctagtggg

SEQ ID NO: 12329 - DNA, 20 bp, Artificial Sequence
  Description of Artificial Sequence: Synthetic oligonucleotide
  Target: SCNA; (-) strand; PAM type: NNNNGHTT; PAM sequence: AAAGGCTT
cgaatccaggcacagaaagc

SEQ ID NO: 12330 - DNA, 20 bp, Artificial Sequence
  Description of Artificial Sequence: Synthetic oligonucleotide
  Target: SCNA; (-) strand; PAM type: NNNNGHTT; PAM sequence: CAGTGCTT
ttgtttcccccctcctcttc

SEQ ID NO: 12331 - DNA, 20 bp, Artificial Sequence
  Description of Artificial Sequence: Synthetic oligonucleotide
  Target: SCNA; (-) strand; PAM type: NNNNGHTT; PAM sequence: TGTTGTTT
aacatacagcaaaaacgagt

SEQ ID NO: 12332 - DNA, 20 bp, Artificial Sequence
  Description of Artificial Sequence: Synthetic oligonucleotide
  Target: SCNA; (-) strand; PAM type: NNNNGHTT; PAM sequence: ATTTGATT
aagttgttttgtatgtttaa

SEQ ID NO: 12333 - DNA, 20 bp, Artificial Sequence
  Description of Artificial Sequence: Synthetic oligonucleotide
  Target: SCNA; (-) strand; PAM type: NNNNGHTT; PAM sequence: GTATGTTT
tgtggttttaaagttgtttt

SEQ ID NO: 12334 - DNA, 20 bp, Artificial Sequence
  Description of Artificial Sequence: Synthetic oligonucleotide
  Target: SCNA; (-) strand; PAM type: NNNNGHTT; PAM sequence: AGTTGTTT
cctgttccttgtggttttaa

SEQ ID NO: 12335 - DNA, 20 bp, Artificial Sequence
  Description of Artificial Sequence: Synthetic oligonucleotide
  Target: SCNA; (-) strand; PAM type: NNNNGHTT; PAM sequence: TGTGGTTT
atcatttgcttcctgttcct

SEQ ID NO: 12336 - DNA, 20 bp, Artificial Sequence
  Description of Artificial Sequence: Synthetic oligonucleotide
  Target: SCNA; (-) strand; PAM type: NNNNGHTT; PAM sequence: ATTTGCTT
tatgtcttttatgtataatc

SEQ ID NO: 12337 - DNA, 20 bp, Artificial Sequence
  Description of Artificial Sequence: Synthetic oligonucleotide
  Target: SCNA; (-) strand; PAM type: NNNNGHTT; PAM sequence: TCATGCTT
aaatatttgtgatcttactt

SEQ ID NO: 12338 - DNA, 20 bp, Artificial Sequence
  Description of Artificial Sequence: Synthetic oligonucleotide
  Target: SCNA; (-) strand; PAM type: NNNNGHTT; PAM sequence: AAGAGTTT
ggcagaccaatagttcaagg

SEQ ID NO: 12339 - DNA, 20 bp, Artificial Sequence
  Description of Artificial Sequence: Synthetic oligonucleotide
  Target: SCNA; (-) strand; PAM type: NNNNGHTT; PAM sequence: GTCTGCTT
gagctactgcattaaggaaa

SEQ ID NO: 12340 - DNA, 20 bp, Artificial Sequence
  Description of Artificial Sequence: Synthetic oligonucleotide
  Target: SCNA; (-) strand; PAM type: NNNNGHTT; PAM sequence: ATATGTTT
tttattctgtctacttttgc

SEQ ID NO: 12341 - DNA, 20 bp, Artificial Sequence
  Description of Artificial Sequence: Synthetic oligonucleotide
  Target: SCNA; (-) strand; PAM type: NNNNGHTT; PAM sequence: GGAGGATT
taaaaaaaaaaaaaaaagag

SEQ ID NO: 12342 - DNA, 20 bp, Artificial Sequence
  Description of Artificial Sequence: Synthetic oligonucleotide
  Target: SCNA; (-) strand; PAM type: NNNNGHTT; PAM sequence: TAAAGCTT
tacagctgaaaagatatata

SEQ ID NO: 12343 - DNA, 20 bp, Artificial Sequence
  Description of Artificial Sequence: Synthetic oligonucleotide
  Target: SCNA; (-) strand; PAM type: NNNNGHTT; PAM sequence: GAATGTTT
aaattttgtggatgcatact

SEQ ID NO: 12344 - DNA, 20 bp, Artificial Sequence
  Description of Artificial Sequence: Synthetic oligonucleotide
  Target: SCNA; (-) strand; PAM type: NNNNGHTT; PAM sequence: AACTGATT
ctaatgcatggctttttcaa

SEQ ID NO: 12345 - DNA, 20 bp, Artificial Sequence
  Description of Artificial Sequence: Synthetic oligonucleotide
  Target: SCNA; (-) strand; PAM type: NNNNGHTT; PAM sequence: CATGGCTT
tagtgtgggttacactaatg

SEQ ID NO: 12346 - DNA, 20 bp, Artificial Sequence
  Description of Artificial Sequence: Synthetic oligonucleotide
  Target: SCNA; (-) strand; PAM type: NNNNGHTT; PAM sequence: ACGTGATT
tataaaacaaagtttatact

SEQ ID NO: 12347 - DNA, 20 bp, Artificial Sequence
  Description of Artificial Sequence: Synthetic oligonucleotide
  Target: SCNA; (-) strand; PAM type: NNNNGHTT; PAM sequence: CAAAGTTT
gaagtcagacaaatataaaa

SEQ ID NO: 12348 - DNA, 20 bp, Artificial Sequence
  Description of Artificial Sequence: Synthetic oligonucleotide
  Target: SCNA; (-) strand; PAM type: NNNNGHTT; PAM sequence: AAACGTTT
taaaagtttggaatcatgtt

SEQ ID NO: 12349 - DNA, 20 bp, Artificial Sequence
  Description of Artificial Sequence: Synthetic oligonucleotide
  Target: SCNA; (-) strand; PAM type: NNNNGHTT; PAM sequence: AAAAGTTT
ggactaacaaattaccaaat

SEQ ID NO: 12350 - DNA, 20 bp, Artificial Sequence
  Description of Artificial Sequence: Synthetic oligonucleotide
  Target: SCNA; (-) strand; PAM type: NNNNGHTT; PAM sequence: ATCTGCTT
agttacataaaatgtaattg

SEQ ID NO: 12351 - DNA, 20 bp, Artificial Sequence
  Description of Artificial Sequence: Synthetic oligonucleotide
  Target: SCNA; (-) strand; PAM type: NNNNGHTT; PAM sequence: CTCAGTTT
tatcaccaaaactcttggag

SEQ ID NO: 12352 - DNA, 20 bp, Artificial Sequence
  Description of Artificial Sequence: Synthetic oligonucleotide
  Target: SCNA; (-) strand; PAM type: NNNNGHTT; PAM sequence: AACAGTTT
gagacaattgtgccttctgt

SEQ ID NO: 12353 - DNA, 20 bp, Artificial Sequence
  Description of Artificial Sequence: Synthetic oligonucleotide
  Target: SCNA; (-) strand; PAM type: NNNNGHTT; PAM sequence: TGAGGCTT
tctttaccacacccaatctg

SEQ ID NO: 12354 - DNA, 20 bp, Artificial Sequence
  Description of Artificial Sequence: Synthetic oligonucleotide
  Target: SCNA; (-) strand; PAM type: NNNNGHTT; PAM sequence: TCTTGATT
ttcataataacataagttct

SEQ ID NO: 12355 - DNA, 20 bp, Artificial Sequence
  Description of Artificial Sequence: Synthetic oligonucleotide
  Target: SCNA; (-) strand; PAM type: NNNNGHTT; PAM sequence: AACTGTTT
caaaactttaaatatgaatg

SEQ ID NO: 12356 - DNA, 20 bp, Artificial Sequence
  Description of Artificial Sequence: Synthetic oligonucleotide
  Target: SCNA; (-) strand; PAM type: NNNNGHTT; PAM sequence: TACAGTTT
aaatgacaacgaaattagtt

SEQ ID NO: 12357 - DNA, 20 bp, Artificial Sequence
  Description of Artificial Sequence: Synthetic oligonucleotide
  Target: SCNA; (-) strand; PAM type: NNNNGHTT; PAM sequence: ATTAGTTT
taattcaaaatgacaacgaa

SEQ ID NO: 12358 - DNA, 20 bp, Artificial Sequence
  Description of Artificial Sequence: Synthetic oligonucleotide
  Target: SCNA; (-) strand; PAM type: NNNNGHTT; PAM sequence: GGATGTTT
tgtgtaattaaaagttcatt

SEQ ID NO: 12359 - DNA, 20 bp, Artificial Sequence
  Description of Artificial Sequence: Synthetic oligonucleotide
  Target: SCNA; (-) strand; PAM type: NNNNGHTT; PAM sequence: AGCAGCTT
agttcccttctttgtacttg

SEQ ID NO: 12360 - DNA, 20 bp, Artificial Sequence
  Description of Artificial Sequence: Synthetic oligonucleotide
  Target: SCNA; (-) strand; PAM type: NNNNGHTT; PAM sequence: TAAAGATT
aacgttatattcagagaggc

SEQ ID NO: 12361 - DNA, 20 bp, Artificial Sequence
  Description of Artificial Sequence: Synthetic oligonucleotide
  Target: SCNA; (-) strand; PAM type: NNNNGHTT; PAM sequence: ATTAGTTT
tatgaggtacaagccattca

SEQ ID NO: 12362 - DNA, 20 bp, Artificial Sequence
  Description of Artificial Sequence: Synthetic oligonucleotide
  Target: SCNA; (-) strand; PAM type: NNNNGHTT; PAM sequence: TAATGCTT
gaacagaatatgcatgttag

SEQ ID NO: 12363 - DNA, 20 bp, Artificial Sequence
  Description of Artificial Sequence: Synthetic oligonucleotide
  Target: SCNA; (-) strand; PAM type: NNNNGHTT; PAM sequence: ACAAGTTT
tctgctgtctttgctatagc

SEQ ID NO: 12364 - DNA, 20 bp, Artificial Sequence
  Description of Artificial Sequence: Synthetic oligonucleotide
  Target: SCNA; (-) strand; PAM type: NNNNGHTT; PAM sequence: ACAGGTTT
ctcactacctcgtctctctc

SEQ ID NO: 12365 - DNA, 20 bp, Artificial Sequence
  Description of Artificial Sequence: Synthetic oligonucleotide
  Target: SCNA; (-) strand; PAM type: NNNNGHTT; PAM sequence: TTAGGCTT
tgatctcccaacagtatgca

SEQ ID NO: 12366 - DNA, 20 bp, Artificial Sequence
  Description of Artificial Sequence: Synthetic oligonucleotide
  Target: SCNA; (-) strand; PAM type: NNNNGHTT; PAM sequence: CCTTGATT
aatctgaatactatgcttct

SEQ ID NO: 12367 - DNA, 20 bp, Artificial Sequence
  Description of Artificial Sequence: Synthetic oligonucleotide
  Target: SCNA; (-) strand; PAM type: NNNNGHTT; PAM sequence: CTATGCTT
caaattagagaatctgaata

SEQ ID NO: 12368 - DNA, 20 bp, Artificial Sequence
  Description of Artificial Sequence: Synthetic oligonucleotide
  Target: SCNA; (-) strand; PAM type: NNNNGHTT; PAM sequence: TCTGGCTT
atatttaaatatcttttcta

SEQ ID NO: 12369 - DNA, 20 bp, Artificial Sequence
  Description of Artificial Sequence: Synthetic oligonucleotide
  Target: SCNA; (-) strand; PAM type: NNNNGHTT; PAM sequence: GTTAGATT
aactaaagtcatttgaactt

SEQ ID NO: 12370 - DNA, 20 bp, Artificial Sequence
  Description of Artificial Sequence: Synthetic oligonucleotide
  Target: SCNA; (-) strand; PAM type: NNNNGHTT; PAM sequence: ATGTGTTT
tgtatttcttgggctcatta

SEQ ID NO: 12371 - DNA, 20 bp, Artificial Sequence
  Description of Artificial Sequence: Synthetic oligonucleotide
  Target: SCNA; (-) strand; PAM type: NNNNGHTT; PAM sequence: TAGAGCTT
gagtcactagtaatgagtag

SEQ ID NO: 12372 - DNA, 20 bp, Artificial Sequence
  Description of Artificial Sequence: Synthetic oligonucleotide
  Target: SCNA; (-) strand; PAM type: NNNNGHTT; PAM sequence: TAGAGATT
ccattttttaatgagaaaac

SEQ ID NO: 12373 - DNA, 20 bp, Artificial Sequence
  Description of Artificial Sequence: Synthetic oligonucleotide
  Target: SCNA; (-) strand; PAM type: NNNNGHTT; PAM sequence: GAGAGCTT
taacaatagctacttgtact

SEQ ID NO: 12374 - DNA, 20 bp, Artificial Sequence
  Description of Artificial Sequence: Synthetic oligonucleotide
  Target: SCNA; (-) strand; PAM type: NNNNGHTT; PAM sequence: TTTTGCTT
tccatccctggttggaaatt

SEQ ID NO: 12375 - DNA, 20 bp, Artificial Sequence
  Description of Artificial Sequence: Synthetic oligonucleotide
  Target: SCNA; (-) strand; PAM type: NNNNGHTT; PAM sequence: TTGAGCTT
atgatccctatcaatgctcc

SEQ ID NO: 12376 - DNA, 20 bp, Artificial Sequence
  Description of Artificial Sequence: Synthetic oligonucleotide
  Target: SCNA; (-) strand; PAM type: NNNNGHTT; PAM sequence: GGTAGATT
agggagagaaagagatgttt

SEQ ID NO: 12377 - DNA, 20 bp, Artificial Sequence
  Description of Artificial Sequence: Synthetic oligonucleotide
  Target: SCNA; (-) strand; PAM type: NNNNGHTT; PAM sequence: AGATGTTT
cgcacattagggagagaaag

SEQ ID NO: 12378 - DNA, 20 bp, Artificial Sequence
  Description of Artificial Sequence: Synthetic oligonucleotide
  Target: SCNA; (-) strand; PAM type: NNNNGHTT; PAM sequence: AACTGCTT
ttcttcaagctgtggctgca

SEQ ID NO: 12379 - DNA, 20 bp, Artificial Sequence
  Description of Artificial Sequence: Synthetic oligonucleotide
  Target: SCNA; (-) strand; PAM type: NNNNGHTT; PAM sequence: CAAGGTTT
ccagtgtcttttgaaagaaa

SEQ ID NO: 12380 - DNA, 20 bp, Artificial Sequence
  Description of Artificial Sequence: Synthetic oligonucleotide
  Target: SCNA; (-) strand; PAM type: NNNNGHTT; PAM sequence: GACTGATT
cactaatctgaaatattagg

SEQ ID NO: 12381 - DNA, 20 bp, Artificial Sequence
  Description of Artificial Sequence: Synthetic oligonucleotide
  Target: SCNA; (-) strand; PAM type: NNNNGHTT; PAM sequence: TGTTGATT
aatacaaatgctgttcagtc

SEQ ID NO: 12382 - DNA, 20 bp, Artificial Sequence
  Description of Artificial Sequence: Synthetic oligonucleotide
  Target: SCNA; (-) strand; PAM type: NNNNGHTT; PAM sequence: CTCTGTTT
atacttatttgctgtatata

SEQ ID NO: 12383 - DNA, 20 bp, Artificial Sequence
  Description of Artificial Sequence: Synthetic oligonucleotide
  Target: SCNA; (-) strand; PAM type: NNNNGHTT; PAM sequence: ATTAGATT
ttatctagaaaggaaaacgt

SEQ ID NO: 12384 - DNA, 20 bp, Artificial Sequence
  Description of Artificial Sequence: Synthetic oligonucleotide
  Target: SCNA; (-) strand; PAM type: NNNNGHTT; PAM sequence: AAAAGTTT
gagccaccatgcccgaccta

SEQ ID NO: 12385 - DNA, 20 bp, Artificial Sequence
  Description of Artificial Sequence: Synthetic oligonucleotide
  Target: SCNA; (-) strand; PAM type: NNNNGHTT; PAM sequence: CTGAGATT
cacctcagcctcccaaagtg

SEQ ID NO: 12386 - DNA, 20 bp, Artificial Sequence
  Description of Artificial Sequence: Synthetic oligonucleotide
  Target: SCNA; (-) strand; PAM type: NNNNGHTT; PAM sequence: CGGGGTTT
ttttgtatttttagtagaga

SEQ ID NO: 12387 - DNA, 20 bp, Artificial Sequence
  Description of Artificial Sequence: Synthetic oligonucleotide
  Target: SCNA; (-) strand; PAM type: NNNNGHTT; PAM sequence: AGCTGATT
aggcacctgccaccacgtcc

SEQ ID NO: 12388 - DNA, 20 bp, Artificial Sequence
  Description of Artificial Sequence: Synthetic oligonucleotide
  Target: SCNA; (-) strand; PAM type: NNNNGHTT; PAM sequence: CTGGGATT
tgcctcagccccccaagtag

SEQ ID NO: 12389 - DNA, 20 bp, Artificial Sequence
  Description of Artificial Sequence: Synthetic oligonucleotide
  Target: SCNA; (-) strand; PAM type: NNNNGHTT; PAM sequence: AAAAGTTT
gtgctttttatatggtgtta

SEQ ID NO: 12390 - DNA, 20 bp, Artificial Sequence
  Description of Artificial Sequence: Synthetic oligonucleotide
  Target: SCNA; (-) strand; PAM type: NNNNGHTT; PAM sequence: ATGTGCTT
aagttttcaaaccattagtg

SEQ ID NO: 12391 - DNA, 20 bp, Artificial Sequence
  Description of Artificial Sequence: Synthetic oligonucleotide
  Target: SCNA; (-) strand; PAM type: NNNNGHTT; PAM sequence: CCAAGTTT
ttccagctttatatggaaca

SEQ ID NO: 12392 - DNA, 20 bp, Artificial Sequence
  Description of Artificial Sequence: Synthetic oligonucleotide
  Target: SCNA; (-) strand; PAM type: NNNNGHTT; PAM sequence: TCCAGCTT
atttcttaactacataaatt

SEQ ID NO: 12393 - DNA, 20 bp, Artificial Sequence
  Description of Artificial Sequence: Synthetic oligonucleotide
  Target: SCNA; (-) strand; PAM type: NNNNGHTT; PAM sequence: ATTTGCTT
agagataacttctttgaata

SEQ ID NO: 12394 - DNA, 20 bp, Artificial Sequence
  Description of Artificial Sequence: Synthetic oligonucleotide
  Target: SCNA; (-) strand; PAM type: NNNNGHTT; PAM sequence: AAGTGTTT
atggatatgtttttatacta

SEQ ID NO: 12395 - DNA, 20 bp, Artificial Sequence
  Description of Artificial Sequence: Synthetic oligonucleotide
  Target: SCNA; (-) strand; PAM type: NNNNGHTT; PAM sequence: ATATGTTT
atccatatttattgacatgg

SEQ ID NO: 12396 - DNA, 20 bp, Artificial Sequence
  Description of Artificial Sequence: Synthetic oligonucleotide
  Target: SCNA; (-) strand; PAM type: NNNNGHTT; PAM sequence: TAACGTTT
aataaatatatgatacagta

SEQ ID NO: 12397 - DNA, 20 bp, Artificial Sequence
  Description of Artificial Sequence: Synthetic oligonucleotide
  Target: SCNA; (-) strand; PAM type: NNNNGHTT; PAM sequence: AAGCGTTT
attagactgggtatatagac

SEQ ID NO: 12398 - DNA, 20 bp, Artificial Sequence
  Description of Artificial Sequence: Synthetic oligonucleotide
  Target: SCNA; (-) strand; PAM type: NNNNGHTT; PAM sequence: TTAAGATT
tctattatagagaagttgat

SEQ ID NO: 12399 - DNA, 20 bp, Artificial Sequence
  Description of Artificial Sequence: Synthetic oligonucleotide
  Target: SCNA; (-) strand; PAM type: NNNNGHTT; PAM sequence: AGTTGATT
atcattgtctattatagaga

SEQ ID NO: 12400 - DNA, 20 bp, Artificial Sequence
  Description of Artificial Sequence: Synthetic oligonucleotide
  Target: SCNA; (+) strand; PAM type: NNNNGHTT; PAM sequence: TTTGGATT
gagctgttcttaaacataac

SEQ ID NO: 12401 - DNA, 20 bp, Artificial Sequence
  Description of Artificial Sequence: Synthetic oligonucleotide
  Target: SCNA; (+) strand; PAM type: NNNNGHTT; PAM sequence: TTTTGCTT
tccttcagagatatgtcttc

SEQ ID NO: 12402 - DNA, 20 bp, Artificial Sequence
  Description of Artificial Sequence: Synthetic oligonucleotide
  Target: SCNA; (+) strand; PAM type: NNNNGHTT; PAM sequence: GATGGATT
aaacagctaaggatgcccaa

SEQ ID NO: 12403 - DNA, 20 bp, Artificial Sequence
  Description of Artificial Sequence: Synthetic oligonucleotide
  Target: SCNA; (+) strand; PAM type: NNNNGHTT; PAM sequence: GGAAGTTT
tgcccaagatggatttccaa

SEQ ID NO: 12404 - DNA, 20 bp, Artificial Sequence
  Description of Artificial Sequence: Synthetic oligonucleotide
  Target: SCNA; (+) strand; PAM type: NNNNGHTT; PAM sequence: GCCAGATT
gaagtttgccaaaaagactt

SEQ ID NO: 12405 - DNA, 20 bp, Artificial Sequence
  Description of Artificial Sequence: Synthetic oligonucleotide
  Target: SCNA; (+) strand; PAM type: NNNNGHTT; PAM sequence: TAATGTTT
agtcagtgctgccacattac

SEQ ID NO: 12406 - DNA, 20 bp, Artificial Sequence
  Description of Artificial Sequence: Synthetic oligonucleotide
  Target: SCNA; (+) strand; PAM type: NNNNGHTT; PAM sequence: ACTTGCTT
atgtttggcagcctctcaaa

SEQ ID NO: 12407 - DNA, 20 bp, Artificial Sequence
  Description of Artificial Sequence: Synthetic oligonucleotide
  Target: SCNA; (+) strand; PAM type: NNNNGHTT; PAM sequence: TAGAGATT
acttgctttgaccatttcca

SEQ ID NO: 12408 - DNA, 20 bp, Artificial Sequence
  Description of Artificial Sequence: Synthetic oligonucleotide
  Target: SCNA; (+) strand; PAM type: NNNNGHTT; PAM sequence: ATTTGTTT
tctgtccatatttagtcttc

SEQ ID NO: 12409 - DNA, 20 bp, Artificial Sequence
  Description of Artificial Sequence: Synthetic oligonucleotide
  Target: SCNA; (+) strand; PAM type: NNNNGHTT; PAM sequence: AGTTGATT
ttcatttgtttttttacaag

SEQ ID NO: 12410 - DNA, 20 bp, Artificial Sequence
  Description of Artificial Sequence: Synthetic oligonucleotide
  Target: SCNA; (+) strand; PAM type: NNNNGHTT; PAM sequence: CATTGCTT
agtagaaattgtcaggtaaa

SEQ ID NO: 12411 - DNA, 20 bp, Artificial Sequence
  Description of Artificial Sequence: Synthetic oligonucleotide
  Target: SCNA; (+) strand; PAM type: NNNNGHTT; PAM sequence: ATGAGATT
gggaagataatgggaaataa

SEQ ID NO: 12412 - DNA, 20 bp, Artificial Sequence
  Description of Artificial Sequence: Synthetic oligonucleotide
  Target: SCNA; (+) strand; PAM type: NNNNGHTT; PAM sequence: AGTGGTTT
gagaaatcagtggaggttca

SEQ ID NO: 12413 - DNA, 20 bp, Artificial Sequence
  Description of Artificial Sequence: Synthetic oligonucleotide
  Target: SCNA; (+) strand; PAM type: NNNNGHTT; PAM sequence: CTCTGTTT
ttcttttgtagttgataata

SEQ ID NO: 12414 - DNA, 20 bp, Artificial Sequence
  Description of Artificial Sequence: Synthetic oligonucleotide
  Target: SCNA; (+) strand; PAM type: NNNNGHTT; PAM sequence: GTGAGTTT
taatactctgttttaaatca

SEQ ID NO: 12415 - DNA, 20 bp, Artificial Sequence
  Description of Artificial Sequence: Synthetic oligonucleotide
  Target: SCNA; (+) strand; PAM type: NNNNGHTT; PAM sequence: ATATGCTT
aatcagtgagttttacttat

SEQ ID NO: 12416 - DNA, 20 bp, Artificial Sequence
  Description of Artificial Sequence: Synthetic oligonucleotide
  Target: SCNA; (+) strand; PAM type: NNNNGHTT; PAM sequence: TAGTGTTT
ttagatgtgttccataaaca

SEQ ID NO: 12417 - DNA, 20 bp, Artificial Sequence
  Description of Artificial Sequence: Synthetic oligonucleotide
  Target: SCNA; (+) strand; PAM type: NNNNGHTT; PAM sequence: AATAGCTT
tgctcccctagctattagta

SEQ ID NO: 12418 - DNA, 20 bp, Artificial Sequence
  Description of Artificial Sequence: Synthetic oligonucleotide
  Target: SCNA; (+) strand; PAM type: NNNNGHTT; PAM sequence: TCTTGATT
tatctctaccattatcctga

SEQ ID NO: 12419 - DNA, 20 bp, Artificial Sequence
  Description of Artificial Sequence: Synthetic oligonucleotide
  Target: SCNA; (+) strand; PAM type: NNNNGHTT; PAM sequence: AATAGTTT
tcgaagttccatagtctatt

SEQ ID NO: 12420 - DNA, 20 bp, Artificial Sequence
  Description of Artificial Sequence: Synthetic oligonucleotide
  Target: SCNA; (+) strand; PAM type: NNNNGHTT; PAM sequence: ATTTGTTT
aaaacatgacttgctactat

SEQ ID NO: 12421 - DNA, 20 bp, Artificial Sequence
  Description of Artificial Sequence: Synthetic oligonucleotide
  Target: SCNA; (+) strand; PAM type: NNNNGHTT; PAM sequence: TTTGGATT
atgacttgctactatatttg

SEQ ID NO: 12422 - DNA, 20 bp, Artificial Sequence
  Description of Artificial Sequence: Synthetic oligonucleotide
  Target: SCNA; (+) strand; PAM type: NNNNGHTT; PAM sequence: TTCAGCTT
tgctactatatttgtttgga

SEQ ID NO: 12423 - DNA, 20 bp, Artificial Sequence
  Description of Artificial Sequence: Synthetic oligonucleotide
  Target: SCNA; (+) strand; PAM type: NNNNGHTT; PAM sequence: CACAGCTT
tggattcagctttactggaa

SEQ ID NO: 12424 - DNA, 20 bp, Artificial Sequence
  Description of Artificial Sequence: Synthetic oligonucleotide
  Target: SCNA; (+) strand; PAM type: NNNNGHTT; PAM sequence: CTTAGCTT
tcagctttactggaacacag

SEQ ID NO: 12425 - DNA, 20 bp, Artificial Sequence
  Description of Artificial Sequence: Synthetic oligonucleotide
  Target: SCNA; (+) strand; PAM type: NNNNGHTT; PAM sequence: TTAGGTTT
ttgacatttacagacatggg

SEQ ID NO: 12426 - DNA, 20 bp, Artificial Sequence
  Description of Artificial Sequence: Synthetic oligonucleotide
  Target: SCNA; (+) strand; PAM type: NNNNGHTT; PAM sequence: TTTAGTTT
agataaaaggcaatctgata

SEQ ID NO: 12427 - DNA, 20 bp, Artificial Sequence
  Description of Artificial Sequence: Synthetic oligonucleotide
  Target: SCNA; (+) strand; PAM type: NNNNGHTT; PAM sequence: CGAGGATT
ctgtgttgccatagaaacaa

SEQ ID NO: 12428 - DNA, 20 bp, Artificial Sequence
  Description of Artificial Sequence: Synthetic oligonucleotide
  Target: SCNA; (+) strand; PAM type: NNNNGHTT; PAM sequence: TGTGGTTT
ctaagggctctttgaaggaa

SEQ ID NO: 12429 - DNA, 20 bp, Artificial Sequence
  Description of Artificial Sequence: Synthetic oligonucleotide
  Target: SCNA; (+) strand; PAM type: NNNNGHTT; PAM sequence: AACTGCTT
tctttgaaggaatgtggttt

SEQ ID NO: 12430 - DNA, 20 bp, Artificial Sequence
  Description of Artificial Sequence: Synthetic oligonucleotide
  Target: SCNA; (+) strand; PAM type: NNNNGHTT; PAM sequence: ATAAGATT
gtggtttaactgcttccaat

SEQ ID NO: 12431 - DNA, 20 bp, Artificial Sequence
  Description of Artificial Sequence: Synthetic oligonucleotide
  Target: SCNA; (+) strand; PAM type: NNNNGHTT; PAM sequence: AAAAGCTT
tagcagcaaaaacattaaag

SEQ ID NO: 12432 - DNA, 20 bp, Artificial Sequence
  Description of Artificial Sequence: Synthetic oligonucleotide
  Target: SCNA; (+) strand; PAM type: NNNNGHTT; PAM sequence: AATAGTTT
gaactaaaatcatatttagg

SEQ ID NO: 12433 - DNA, 20 bp, Artificial Sequence
  Description of Artificial Sequence: Synthetic oligonucleotide
  Target: SCNA; (+) strand; PAM type: NNNNGHTT; PAM sequence: CTAGGCTT
gcattttgggttcttcaatt

SEQ ID NO: 12434 - DNA, 20 bp, Artificial Sequence
  Description of Artificial Sequence: Synthetic oligonucleotide
  Target: SCNA; (+) strand; PAM type: NNNNGHTT; PAM sequence: TATAGATT
ttgctaatattatttatacc

SEQ ID NO: 12435 - DNA, 20 bp, Artificial Sequence
  Description of Artificial Sequence: Synthetic oligonucleotide
  Target: SCNA; (+) strand; PAM type: NNNNGHTT; PAM sequence: CCATGATT
acataagccaagtacccatg

SEQ ID NO: 12436 - DNA, 20 bp, Artificial Sequence
  Description of Artificial Sequence: Synthetic oligonucleotide
  Target: SCNA; (+) strand; PAM type: NNNNGHTT; PAM sequence: CCCGGTTT
agttctataatcaggatatg

SEQ ID NO: 12437 - DNA, 20 bp, Artificial Sequence
  Description of Artificial Sequence: Synthetic oligonucleotide
  Target: SCNA; (+) strand; PAM type: NNNNGHTT; PAM sequence: GGTGGATT
cactttgggaggccgaggta

SEQ ID NO: 12438 - DNA, 20 bp, Artificial Sequence
  Description of Artificial Sequence: Synthetic oligonucleotide
  Target: SCNA; (+) strand; PAM type: NNNNGHTT; PAM sequence: AGGAGTTT
taggtggattacctgaggtc

SEQ ID NO: 12439 - DNA, 20 bp, Artificial Sequence
  Description of Artificial Sequence: Synthetic oligonucleotide
  Target: SCNA; (+) strand; PAM type: NNNNGHTT; PAM sequence: AATCGCTT
tcgagaggctgaggcaggag

SEQ ID NO: 12440 - DNA, 20 bp, Artificial Sequence
  Description of Artificial Sequence: Synthetic oligonucleotide
  Target: SCNA; (+) strand; PAM type: NNNNGHTT; PAM sequence: CTGAGATT
gaggcggaggttgcagtgaa

SEQ ID NO: 12441 - DNA, 20 bp, Artificial Sequence
  Description of Artificial Sequence: Synthetic oligonucleotide
  Target: SCNA; (+) strand; PAM type: NNNNGHTT; PAM sequence: ATATGTTT
atatgtatctatagatatag

SEQ ID NO: 12442 - DNA, 20 bp, Artificial Sequence
  Description of Artificial Sequence: Synthetic oligonucleotide
  Target: SCNA; (+) strand; PAM type: NNNNGHTT; PAM sequence: GTGTGTTT
tatatagatacacattttgt

SEQ ID NO: 12443 - DNA, 20 bp, Artificial Sequence
  Description of Artificial Sequence: Synthetic oligonucleotide
  Target: SCNA; (+) strand; PAM type: NNNNGHTT; PAM sequence: ATATGTTT
ttgtgtgtgtgtgtgtgtgt

SEQ ID NO: 12444 - DNA, 20 bp, Artificial Sequence
  Description of Artificial Sequence: Synthetic oligonucleotide
  Target: SCNA; (+) strand; PAM type: NNNNGHTT; PAM sequence: GGAAGTTT
accccatttcctagacttct

SEQ ID NO: 12445 - DNA, 20 bp, Artificial Sequence
  Description of Artificial Sequence: Synthetic oligonucleotide
  Target: SCNA; (+) strand; PAM type: NNNNGHTT; PAM sequence: TGCCGCTT
aatgttgggcctcttggctc

SEQ ID NO: 12446 - DNA, 20 bp, Artificial Sequence
  Description of Artificial Sequence: Synthetic oligonucleotide
  Target: SCNA; (+) strand; PAM type: NNNNGHTT; PAM sequence: TTTGGCTT
tctagcctgtgggtgcctcc

SEQ ID NO: 12447 - DNA, 20 bp, Artificial Sequence
  Description of Artificial Sequence: Synthetic oligonucleotide
  Target: SCNA; (+) strand; PAM type: NNNNGHTT; PAM sequence: GGTTGTTT
atcataatggaacctattaa

SEQ ID NO: 12448 - DNA, 20 bp, Artificial Sequence
  Description of Artificial Sequence: Synthetic oligonucleotide
  Target: SCNA; (+) strand; PAM type: NNNNGHTT; PAM sequence: TCAGGTTT
gtgtggacagaggcagtctg

SEQ ID NO: 12449 - DNA, 20 bp, Artificial Sequence
  Description of Artificial Sequence: Synthetic oligonucleotide
  Target: SCNA; (+) strand; PAM type: NNNNGHTT; PAM sequence: TACAGATT
cagaggcagtctgtcaggtt

SEQ ID NO: 12450 - DNA, 20 bp, Artificial Sequence
  Description of Artificial Sequence: Synthetic oligonucleotide
  Target: SCNA; (+) strand; PAM type: NNNNGHTT; PAM sequence: ATGTGTTT
tttacagatttgaaaagaaa

SEQ ID NO: 12451 - DNA, 20 bp, Artificial Sequence
  Description of Artificial Sequence: Synthetic oligonucleotide
  Target: SCNA; (+) strand; PAM type: NNNNGHTT; PAM sequence: TATGGATT
aaatgtgttttcttcctcag

SEQ ID NO: 12452 - DNA, 20 bp, Artificial Sequence
  Description of Artificial Sequence: Synthetic oligonucleotide
  Target: SCNA; (+) strand; PAM type: NNNNGHTT; PAM sequence: GTGTGTTT
tgagatgtgtgaatgcatga

SEQ ID NO: 12453 - DNA, 20 bp, Artificial Sequence
  Description of Artificial Sequence: Synthetic oligonucleotide
  Target: SCNA; (+) strand; PAM type: NNNNGHTT; PAM sequence: GTTTGTTT
atgtgtgaatgcatgagtgt

SEQ ID NO: 12454 - DNA, 20 bp, Artificial Sequence
  Description of Artificial Sequence: Synthetic oligonucleotide
  Target: SCNA; (+) strand; PAM type: NNNNGHTT; PAM sequence: CGCTGTTT
atctagtagtgaaaaggaaa

SEQ ID NO: 12455 - DNA, 20 bp, Artificial Sequence
  Description of Artificial Sequence: Synthetic oligonucleotide
  Target: SCNA; (+) strand; PAM type: NNNNGHTT; PAM sequence: GTGTGTTT
acaccacatgtgtgtgtggg

SEQ ID NO: 12456 - DNA, 20 bp, Artificial Sequence
  Description of Artificial Sequence: Synthetic oligonucleotide
  Target: SCNA; (+) strand; PAM type: NNNNGHTT; PAM sequence: CTCAGTTT
attgacccacaggttaagga

SEQ ID NO: 12457 - DNA, 20 bp, Artificial Sequence
  Description of Artificial Sequence: Synthetic oligonucleotide
  Target: SCNA; (+) strand; PAM type: NNNNGHTT; PAM sequence: ACAAGATT
caggttaaggactcagtttt

SEQ ID NO: 12458 - DNA, 20 bp, Artificial Sequence
  Description of Artificial Sequence: Synthetic oligonucleotide
  Target: SCNA; (+) strand; PAM type: NNNNGHTT; PAM sequence: CATAGCTT
caatgagtcctcatgttact

SEQ ID NO: 12459 - DNA, 20 bp, Artificial Sequence
  Description of Artificial Sequence: Synthetic oligonucleotide
  Target: SCNA; (+) strand; PAM type: NNNNGHTT; PAM sequence: TTCTGTTT
gtcctcatgttactcatagc

SEQ ID NO: 12460 - DNA, 20 bp, Artificial Sequence
  Description of Artificial Sequence: Synthetic oligonucleotide
  Target: SCNA; (+) strand; PAM type: NNNNGHTT; PAM sequence: TCAGGTTT
aggtctccacggccctctcc

SEQ ID NO: 12461 - DNA, 20 bp, Artificial Sequence
  Description of Artificial Sequence: Synthetic oligonucleotide
  Target: SCNA; (+) strand; PAM type: NNNNGHTT; PAM sequence: GTGTGATT
tcaggtttgataatttgcta

SEQ ID NO: 12462 - DNA, 20 bp, Artificial Sequence
  Description of Artificial Sequence: Synthetic oligonucleotide
  Target: SCNA; (+) strand; PAM type: NNNNGHTT; PAM sequence: AACAGTTT
tgattcacagacttcaggaa

SEQ ID NO: 12463 - DNA, 20 bp, Artificial Sequence
  Description of Artificial Sequence: Synthetic oligonucleotide
  Target: SCNA; (+) strand; PAM type: NNNNGHTT; PAM sequence: GTTTGCTT
tcacagacttcaggaaaaca

SEQ ID NO: 12464 - DNA, 20 bp, Artificial Sequence
  Description of Artificial Sequence: Synthetic oligonucleotide
  Target: SCNA; (+) strand; PAM type: NNNNGHTT; PAM sequence: ACTAGATT
ttcaggaaaacagtttgctt

SEQ ID NO: 12465 - DNA, 20 bp, Artificial Sequence
  Description of Artificial Sequence: Synthetic oligonucleotide
  Target: SCNA; (+) strand; PAM type: NNNNGHTT; PAM sequence: ACCAGTTT
aacagtttgcttactagatt

SEQ ID NO: 12466 - DNA, 20 bp, Artificial Sequence
  Description of Artificial Sequence: Synthetic oligonucleotide
  Target: SCNA; (+) strand; PAM type: NNNNGHTT; PAM sequence: GGGAGCTT
aaaggtatgggggaggcgtg

SEQ ID NO: 12467 - DNA, 20 bp, Artificial Sequence
  Description of Artificial Sequence: Synthetic oligonucleotide
  Target: SCNA; (+) strand; PAM type: NNNNGHTT; PAM sequence: TAGGGATT
gcactctgaatcctgtcttt

SEQ ID NO: 12468 - DNA, 20 bp, Artificial Sequence
  Description of Artificial Sequence: Synthetic oligonucleotide
  Target: SCNA; (+) strand; PAM type: NNNNGHTT; PAM sequence: TGTTGCTT
agtcttcatcatggaagcat

SEQ ID NO: 12469 - DNA, 20 bp, Artificial Sequence
  Description of Artificial Sequence: Synthetic oligonucleotide
  Target: SCNA; (+) strand; PAM type: NNNNGHTT; PAM sequence: AAAAGCTT
cagaagatgtgaatggggcc

SEQ ID NO: 12470 - DNA, 20 bp, Artificial Sequence
  Description of Artificial Sequence: Synthetic oligonucleotide
  Target: SCNA; (+) strand; PAM type: NNNNGHTT; PAM sequence: TCAAGCTT
tgtgaatggggccaaaagct

SEQ ID NO: 12471 - DNA, 20 bp, Artificial Sequence
  Description of Artificial Sequence: Synthetic oligonucleotide
  Target: SCNA; (+) strand; PAM type: NNNNGHTT; PAM sequence: CATGGCTT
aaaagcttcaagcttcttat

SEQ ID NO: 12472 - DNA, 20 bp, Artificial Sequence
  Description of Artificial Sequence: Synthetic oligonucleotide
  Target: SCNA; (+) strand; PAM type: NNNNGHTT; PAM sequence: AAGGGTTT
cctactactcaggaaattac

SEQ ID NO: 12473 - DNA, 20 bp, Artificial Sequence
  Description of Artificial Sequence: Synthetic oligonucleotide
  Target: SCNA; (+) strand; PAM type: NNNNGHTT; PAM sequence: ACATGTTT
taagccagaaagatgaggaa

SEQ ID NO: 12474 - DNA, 20 bp, Artificial Sequence
  Description of Artificial Sequence: Synthetic oligonucleotide
  Target: SCNA; (+) strand; PAM type: NNNNGHTT; PAM sequence: CAGAGATT
gtttgcatctcacactagtg

SEQ ID NO: 12475 - DNA, 20 bp, Artificial Sequence
  Description of Artificial Sequence: Synthetic oligonucleotide
  Target: SCNA; (+) strand; PAM type: NNNNGHTT; PAM sequence: ATTAGATT
cttggaataccaaaccacac

SEQ ID NO: 12476 - DNA, 20 bp, Artificial Sequence
  Description of Artificial Sequence: Synthetic oligonucleotide
  Target: SCNA; (+) strand; PAM type: NNNNGHTT; PAM sequence: AACTGTTT
gtgtgccaaagtgcactctg

SEQ ID NO: 12477 - DNA, 20 bp, Artificial Sequence
  Description of Artificial Sequence: Synthetic oligonucleotide
  Target: SCNA; (+) strand; PAM type: NNNNGHTT; PAM sequence: ACTGGATT
gtctgcaaaataaacctagg

SEQ ID NO: 12478 - DNA, 20 bp, Artificial Sequence
  Description of Artificial Sequence: Synthetic oligonucleotide
  Target: SCNA; (+) strand; PAM type: NNNNGHTT; PAM sequence: ACAAGCTT
gtctcgggagtgaatatgag

SEQ ID NO: 12479 - DNA, 20 bp, Artificial Sequence
  Description of Artificial Sequence: Synthetic oligonucleotide
  Target: SCNA; (+) strand; PAM type: NNNNGHTT; PAM sequence: AAAGGCTT
atatgagacaagcttcctga

SEQ ID NO: 12480 - DNA, 20 bp, Artificial Sequence
  Description of Artificial Sequence: Synthetic oligonucleotide
  Target: SCNA; (+) strand; PAM type: NNNNGHTT; PAM sequence: TTTTGTTT
cttatatgacttaaagaact

SEQ ID NO: 12481 - DNA, 20 bp, Artificial Sequence
  Description of Artificial Sequence: Synthetic oligonucleotide
  Target: SCNA; (+) strand; PAM type: NNNNGHTT; PAM sequence: AAGTGTTT
acttaaagaactttttgttt

SEQ ID NO: 12482 - DNA, 20 bp, Artificial Sequence
  Description of Artificial Sequence: Synthetic oligonucleotide
  Target: SCNA; (+) strand; PAM type: NNNNGHTT; PAM sequence: TGCTGCTT
acttttaaatttttaaaata

SEQ ID NO: 12483 - DNA, 20 bp, Artificial Sequence
  Description of Artificial Sequence: Synthetic oligonucleotide
  Target: SCNA; (+) strand; PAM type: NNNNGHTT; PAM sequence: GGTAGATT
ttttaaaatatgctgcttta

SEQ ID NO: 12484 - DNA, 20 bp, Artificial Sequence
  Description of Artificial Sequence: Synthetic oligonucleotide
  Target: SCNA; (+) strand; PAM type: NNNNGHTT; PAM sequence: CCTTGCTT
tgttcaataacaaatccttt

SEQ ID NO: 12485 - DNA, 20 bp, Artificial Sequence
  Description of Artificial Sequence: Synthetic oligonucleotide
  Target: SCNA; (+) strand; PAM type: NNNNGHTT; PAM sequence: TGCAGCTT
ctctagtgtaagatgacaca

SEQ ID NO: 12486 - DNA, 20 bp, Artificial Sequence
  Description of Artificial Sequence: Synthetic oligonucleotide
  Target: SCNA; (+) strand; PAM type: NNNNGHTT; PAM sequence: GGAAGTTT
ctcttcaattaggtaaaaaa

SEQ ID NO: 12487 - DNA, 20 bp, Artificial Sequence
  Description of Artificial Sequence: Synthetic oligonucleotide
  Target: SCNA; (+) strand; PAM type: NNNNGHTT; PAM sequence: CAGAGTTT
aatttttaaattaatttata

SEQ ID NO: 12488 - DNA, 20 bp, Artificial Sequence
  Description of Artificial Sequence: Synthetic oligonucleotide
  Target: SCNA; (+) strand; PAM type: NNNNGHTT; PAM sequence: TCAAGTTT
ttatacagagtttttcacca

SEQ ID NO: 12489 - DNA, 20 bp, Artificial Sequence
  Description of Artificial Sequence: Synthetic oligonucleotide
  Target: SCNA; (+) strand; PAM type: NNNNGHTT; PAM sequence: CGATGTTT
ggtgactctggtagttccaa

SEQ ID NO: 12490 - DNA, 20 bp, Artificial Sequence
  Description of Artificial Sequence: Synthetic oligonucleotide
  Target: SCNA; (+) strand; PAM type: NNNNGHTT; PAM sequence: TGATGATT
agagagagagagagaatttc

SEQ ID NO: 12491 - DNA, 20 bp, Artificial Sequence
  Description of Artificial Sequence: Synthetic oligonucleotide
  Target: SCNA; (+) strand; PAM type: NNNNGHTT; PAM sequence: CACTGCTT
gtagtcaaaatcatcttcta

SEQ ID NO: 12492 - DNA, 20 bp, Artificial Sequence
  Description of Artificial Sequence: Synthetic oligonucleotide
  Target: SCNA; (+) strand; PAM type: NNNNGHTT; PAM sequence: AATAGATT
ttcacaccaatatcagacaa

SEQ ID NO: 12493 - DNA, 20 bp, Artificial Sequence
  Description of Artificial Sequence: Synthetic oligonucleotide
  Target: SCNA; (+) strand; PAM type: NNNNGHTT; PAM sequence: ACAGGATT
aatacgtaaagcaaacattg

SEQ ID NO: 12494 - DNA, 20 bp, Artificial Sequence
  Description of Artificial Sequence: Synthetic oligonucleotide
  Target: SCNA; (+) strand; PAM type: NNNNGHTT; PAM sequence: TGTTGCTT
ccaaaacacacttctggcag

SEQ ID NO: 12495 - DNA, 20 bp, Artificial Sequence
  Description of Artificial Sequence: Synthetic oligonucleotide
  Target: SCNA; (+) strand; PAM type: NNNNGHTT; PAM sequence: TGTTGCTT
ttgtgtcagttcttaattca

SEQ ID NO: 12496 - DNA, 20 bp, Artificial Sequence
  Description of Artificial Sequence: Synthetic oligonucleotide
  Target: SCNA; (+) strand; PAM type: NNNNGHTT; PAM sequence: GCATGATT
ttaattcatgttgcttataa

SEQ ID NO: 12497 - DNA, 20 bp, Artificial Sequence
  Description of Artificial Sequence: Synthetic oligonucleotide
  Target: SCNA; (+) strand; PAM type: NNNNGHTT; PAM sequence: TAACGTTT
aaaatatttttgcaatgaga

SEQ ID NO: 12498 - DNA, 20 bp, Artificial Sequence
  Description of Artificial Sequence: Synthetic oligonucleotide
  Target: SCNA; (+) strand; PAM type: NNNNGHTT; PAM sequence: CATAGTTT
atatttagtatttataggtg

SEQ ID NO: 12499 - DNA, 20 bp, Artificial Sequence
  Description of Artificial Sequence: Synthetic oligonucleotide
  Target: SCNA; (+) strand; PAM type: NNNNGHTT; PAM sequence: TGAGGATT
caacagcaacaaaaaaatag

SEQ ID NO: 12500 - DNA, 20 bp, Artificial Sequence
  Description of Artificial Sequence: Synthetic oligonucleotide
  Target: SCNA; (+) strand; PAM type: NNNNGHTT; PAM sequence: AGGTGTTT
gaaataagtggtagtcactt

SEQ ID NO: 12501 - DNA, 20 bp, Artificial Sequence
  Description of Artificial Sequence: Synthetic oligonucleotide
  Target: SCNA; (+) strand; PAM type: NNNNGHTT; PAM sequence: ATTTGTTT
tagtcacttaggtgttttta

SEQ ID NO: 12502 - DNA, 20 bp, Artificial Sequence
  Description of Artificial Sequence: Synthetic oligonucleotide
  Target: SCNA; (+) strand; PAM type: NNNNGHTT; PAM sequence: CGTAGATT
tttttaatttgttttaacat

SEQ ID NO: 12503 - DNA, 20 bp, Artificial Sequence
  Description of Artificial Sequence: Synthetic oligonucleotide
  Target: SCNA; (+) strand; PAM type: NNNNGHTT; PAM sequence: TTAGGCTT
actgggagcaaagatatttc

SEQ ID NO: 12504 - DNA, 20 bp, Artificial Sequence
  Description of Artificial Sequence: Synthetic oligonucleotide
  Target: SCNA; (+) strand; PAM type: NNNNGHTT; PAM sequence: ATAAGTTT
agacagcacacactgttagt

SEQ ID NO: 12505 - DNA, 20 bp, Artificial Sequence
  Description of Artificial Sequence: Synthetic oligonucleotide
  Target: SCNA; (+) strand; PAM type: NNNNGHTT; PAM sequence: CAATGTTT
cttacactaaaatttacaat

SEQ ID NO: 12506 - DNA, 20 bp, Artificial Sequence
  Description of Artificial Sequence: Synthetic oligonucleotide
  Target: SCNA; (+) strand; PAM type: NNNNGHTT; PAM sequence: CCTAGTTT
caccatttaatgatcatata

SEQ ID NO: 12507 - DNA, 20 bp, Artificial Sequence
  Description of Artificial Sequence: Synthetic oligonucleotide
  Target: SCNA; (+) strand; PAM type: NNNNGHTT; PAM sequence: CTCAGTTT
ataagttggactgtctggtt

SEQ ID NO: 12508 - DNA, 20 bp, Artificial Sequence
  Description of Artificial Sequence: Synthetic oligonucleotide
  Target: SCNA; (+) strand; PAM type: NNNNGHTT; PAM sequence: AGATGTTT
taattctcagaaggaaatta

SEQ ID NO: 12509 - DNA, 20 bp, Artificial Sequence
  Description of Artificial Sequence: Synthetic oligonucleotide
  Target: SCNA; (+) strand; PAM type: NNNNGHTT; PAM sequence: TATGGCTT
ttgaaaatttcgtcttcatc

SEQ ID NO: 12510 - DNA, 20 bp, Artificial Sequence
  Description of Artificial Sequence: Synthetic oligonucleotide
  Target: SCNA; (+) strand; PAM type: NNNNGHTT; PAM sequence: AATGGATT
gcatccacaacacaaatatt

SEQ ID NO: 12511 - DNA, 20 bp, Artificial Sequence
  Description of Artificial Sequence: Synthetic oligonucleotide
  Target: SCNA; (+) strand; PAM type: NNNNGHTT; PAM sequence: ATCAGATT
taatggatttaattaaaggg

SEQ ID NO: 12512 - DNA, 20 bp, Artificial Sequence
  Description of Artificial Sequence: Synthetic oligonucleotide
  Target: SCNA; (+) strand; PAM type: NNNNGHTT; PAM sequence: TCAGGATT
aaagagcaactctaataata

SEQ ID NO: 12513 - DNA, 20 bp, Artificial Sequence
  Description of Artificial Sequence: Synthetic oligonucleotide
  Target: SCNA; (+) strand; PAM type: NNNNGHTT; PAM sequence: TTCTGCTT
caactctaataatatcagga

SEQ ID NO: 12514 - DNA, 20 bp, Artificial Sequence
  Description of Artificial Sequence: Synthetic oligonucleotide
  Target: SCNA; (+) strand; PAM type: NNNNGHTT; PAM sequence: AGTTGTTT
agcataacttcaataactca

SEQ ID NO: 12515 - DNA, 20 bp, Artificial Sequence
  Description of Artificial Sequence: Synthetic oligonucleotide
  Target: SCNA; (+) strand; PAM type: NNNNGHTT; PAM sequence: ACAAGATT
atagaatacaagctgaaatg

SEQ ID NO: 12516 - DNA, 20 bp, Artificial Sequence
  Description of Artificial Sequence: Synthetic oligonucleotide
  Target: SCNA; (+) strand; PAM type: NNNNGHTT; PAM sequence: CTAAGCTT
tatcaccattttccttgttc

SEQ ID NO: 12517 - DNA, 20 bp, Artificial Sequence
  Description of Artificial Sequence: Synthetic oligonucleotide
  Target: SCNA; (+) strand; PAM type: NNNNGHTT; PAM sequence: CTTTGCTT
gcatgctcagacatacatgc

SEQ ID NO: 12518 - DNA, 20 bp, Artificial Sequence
  Description of Artificial Sequence: Synthetic oligonucleotide
  Target: SCNA; (+) strand; PAM type: NNNNGHTT; PAM sequence: CTCTGTTT
ttcccttgtgccagaatgtc

SEQ ID NO: 12519 - DNA, 20 bp, Artificial Sequence
  Description of Artificial Sequence: Synthetic oligonucleotide
  Target: SCNA; (+) strand; PAM type: NNNNGHTT; PAM sequence: GTTTGTTT
cttgtgccagaatgtcctct

SEQ ID NO: 12520 - DNA, 20 bp, Artificial Sequence
  Description of Artificial Sequence: Synthetic oligonucleotide
  Target: SCNA; (+) strand; PAM type: NNNNGHTT; PAM sequence: TCCTGATT
tacctcctcaataaaacttc

SEQ ID NO: 12521 - DNA, 20 bp, Artificial Sequence
  Description of Artificial Sequence: Synthetic oligonucleotide
  Target: SCNA; (+) strand; PAM type: NNNNGHTT; PAM sequence: GATTGATT
tcctcaataaaacttctcct

SEQ ID NO: 12522 - DNA, 20 bp, Artificial Sequence
  Description of Artificial Sequence: Synthetic oligonucleotide
  Target: SCNA; (+) strand; PAM type: NNNNGHTT; PAM sequence: AAATGTTT
ttgattgaaacagatcttta

SEQ ID NO: 12523 - DNA, 20 bp, Artificial Sequence
  Description of Artificial Sequence: Synthetic oligonucleotide
  Target: SCNA; (+) strand; PAM type: NNNNGHTT; PAM sequence: TTATGTTT
ggtacatcgaagacaatcaa

SEQ ID NO: 12524 - DNA, 20 bp, Artificial Sequence
  Description of Artificial Sequence: Synthetic oligonucleotide
  Target: SCNA; (+) strand; PAM type: NNNNGHTT; PAM sequence: TATAGTTT
cctggtaatgtcaattactc

SEQ ID NO: 12525 - DNA, 20 bp, Artificial Sequence
  Description of Artificial Sequence: Synthetic oligonucleotide
  Target: SCNA; (+) strand; PAM type: NNNNGHTT; PAM sequence: TTGTGTTT
aattactctatagttttcca

SEQ ID NO: 12526 - DNA, 20 bp, Artificial Sequence
  Description of Artificial Sequence: Synthetic oligonucleotide
  Target: SCNA; (+) strand; PAM type: NNNNGHTT; PAM sequence: CCAAGATT
gagacagtcttgctctgtta

SEQ ID NO: 12527 - DNA, 20 bp, Artificial Sequence
  Description of Artificial Sequence: Synthetic oligonucleotide
  Target: SCNA; (+) strand; PAM type: NNNNGHTT; PAM sequence: TGGGGTTT
ttttgtatttttagtagaga

SEQ ID NO: 12528 - DNA, 20 bp, Artificial Sequence
  Description of Artificial Sequence: Synthetic oligonucleotide
  Target: SCNA; (+) strand; PAM type: NNNNGHTT; PAM sequence: GCGGGATT
gccactttggctcacaaagt

SEQ ID NO: 12529 - DNA, 20 bp, Artificial Sequence
  Description of Artificial Sequence: Synthetic oligonucleotide
  Target: SCNA; (+) strand; PAM type: NNNNGHTT; PAM sequence: TATAGTTT
aatttttaatggagccatta

SEQ ID NO: 12530 - DNA, 20 bp, Artificial Sequence
  Description of Artificial Sequence: Synthetic oligonucleotide
  Target: SCNA; (+) strand; PAM type: NNNNGHTT; PAM sequence: TTTGGTTT
cttttcttgtgatatcttca

SEQ ID NO: 12531 - DNA, 20 bp, Artificial Sequence
  Description of Artificial Sequence: Synthetic oligonucleotide
  Target: SCNA; (+) strand; PAM type: NNNNGHTT; PAM sequence: TTTTGATT
cttgtgatatcttcatttgg

SEQ ID NO: 12532 - DNA, 20 bp, Artificial Sequence
  Description of Artificial Sequence: Synthetic oligonucleotide
  Target: SCNA; (+) strand; PAM type: NNNNGHTT; PAM sequence: TTCTGTTT
tagttgggaaatgtctcctc

SEQ ID NO: 12533 - DNA, 20 bp, Artificial Sequence
  Description of Artificial Sequence: Synthetic oligonucleotide
  Target: SCNA; (+) strand; PAM type: NNNNGHTT; PAM sequence: AAATGTTT
attagtattaattcctcttt

SEQ ID NO: 12534 - DNA, 20 bp, Artificial Sequence
  Description of Artificial Sequence: Synthetic oligonucleotide
  Target: SCNA; (+) strand; PAM type: NNNNGHTT; PAM sequence: CTGGGATT
accagtgatgccatctcggc

SEQ ID NO: 12535 - DNA, 20 bp, Artificial Sequence
  Description of Artificial Sequence: Synthetic oligonucleotide
  Target: SCNA; (+) strand; PAM type: NNNNGHTT; PAM sequence: GTAGGTTT
gcctgggattttctttgcag

SEQ ID NO: 12536 - DNA, 20 bp, Artificial Sequence
  Description of Artificial Sequence: Synthetic oligonucleotide
  Target: SCNA; (+) strand; PAM type: NNNNGHTT; PAM sequence: TTCAGATT
ttcgctgtgttacaaatcta

SEQ ID NO: 12537 - DNA, 20 bp, Artificial Sequence
  Description of Artificial Sequence: Synthetic oligonucleotide
  Target: SCNA; (+) strand; PAM type: NNNNGHTT; PAM sequence: TACTGTTT
gttacaaatctattcagatt

SEQ ID NO: 12538 - DNA, 20 bp, Artificial Sequence
  Description of Artificial Sequence: Synthetic oligonucleotide
  Target: SCNA; (+) strand; PAM type: NNNNGHTT; PAM sequence: GCCAGTTT
gatttactgtttcttcttgg

SEQ ID NO: 12539 - DNA, 20 bp, Artificial Sequence
  Description of Artificial Sequence: Synthetic oligonucleotide
  Target: SCNA; (+) strand; PAM type: NNNNGHTT; PAM sequence: TGTTGTTT
taaaattaacaatcatattg

SEQ ID NO: 12540 - DNA, 20 bp, Artificial Sequence
  Description of Artificial Sequence: Synthetic oligonucleotide
  Target: SCNA; (+) strand; PAM type: NNNNGHTT; PAM sequence: CATTGATT
ataaccttcctttggcattc

SEQ ID NO: 12541 - DNA, 20 bp, Artificial Sequence
  Description of Artificial Sequence: Synthetic oligonucleotide
  Target: SCNA; (+) strand; PAM type: NNNNGHTT; PAM sequence: TAAAGTTT
tagaaatttattttagaatg

SEQ ID NO: 12542 - DNA, 20 bp, Artificial Sequence
  Description of Artificial Sequence: Synthetic oligonucleotide
  Target: SCNA; (+) strand; PAM type: NNNNGHTT; PAM sequence: ATATGATT
tattaagctatgtggactac

SEQ ID NO: 12543 - DNA, 20 bp, Artificial Sequence
  Description of Artificial Sequence: Synthetic oligonucleotide
  Target: SCNA; (+) strand; PAM type: NNNNGHTT; PAM sequence: AAATGATT
gtaatgagcatgtagagagc

SEQ ID NO: 12544 - DNA, 20 bp, Artificial Sequence
  Description of Artificial Sequence: Synthetic oligonucleotide
  Target: SCNA; (+) strand; PAM type: NNNNGHTT; PAM sequence: ACAGGTTT
gaaagagaaatgtgacaatg

SEQ ID NO: 12545 - DNA, 20 bp, Artificial Sequence
  Description of Artificial Sequence: Synthetic oligonucleotide
  Target: SCNA; (+) strand; PAM type: NNNNGHTT; PAM sequence: GAAAGATT
tttttggtactgtcttgtta

SEQ ID NO: 12546 - DNA, 20 bp, Artificial Sequence
  Description of Artificial Sequence: Synthetic oligonucleotide
  Target: SCNA; (+) strand; PAM type: NNNNGHTT; PAM sequence: TTCAGCTT
gtactgtcttgttagaaaga

SEQ ID NO: 12547 - DNA, 20 bp, Artificial Sequence
  Description of Artificial Sequence: Synthetic oligonucleotide
  Target: SCNA; (+) strand; PAM type: NNNNGHTT; PAM sequence: CCATGTTT
ttcacttttaaaaatcagaa

SEQ ID NO: 12548 - DNA, 20 bp, Artificial Sequence
  Description of Artificial Sequence: Synthetic oligonucleotide
  Target: SCNA; (+) strand; PAM type: NNNNGHTT; PAM sequence: CTGTGATT
ctgggtgcagtggttcactc

SEQ ID NO: 12549 - DNA, 20 bp, Artificial Sequence
  Description of Artificial Sequence: Synthetic oligonucleotide
  Target: SCNA; (+) strand; PAM type: NNNNGHTT; PAM sequence: AGTAGATT
aaattatcattcaactactc

SEQ ID NO: 12550 - DNA, 20 bp, Artificial Sequence
  Description of Artificial Sequence: Synthetic oligonucleotide
  Target: SCNA; (+) strand; PAM type: NNNNGHTT; PAM sequence: AAAAGTTT
agaattcagacgcaaaggta

SEQ ID NO: 12551 - DNA, 20 bp, Artificial Sequence
  Description of Artificial Sequence: Synthetic oligonucleotide
  Target: SCNA; (+) strand; PAM type: NNNNGHTT; PAM sequence: AAGTGTTT
gttattttgactttttttct

SEQ ID NO: 12552 - DNA, 20 bp, Artificial Sequence
  Description of Artificial Sequence: Synthetic oligonucleotide
  Target: SCNA; (+) strand; PAM type: NNNNGHTT; PAM sequence: CATGGCTT
aaaactcagcctgaaatggt

SEQ ID NO: 12553 - DNA, 20 bp, Artificial Sequence
  Description of Artificial Sequence: Synthetic oligonucleotide
  Target: SCNA; (+) strand; PAM type: NNNNGHTT; PAM sequence: TGTTGCTT
attcttcactaaataccttt

SEQ ID NO: 12554 - DNA, 20 bp, Artificial Sequence
  Description of Artificial Sequence: Synthetic oligonucleotide
  Target: SCNA; (+) strand; PAM type: NNNNGHTT; PAM sequence: GGCTGATT
aataatccctcagccaacgc

SEQ ID NO: 12555 - DNA, 20 bp, Artificial Sequence
  Description of Artificial Sequence: Synthetic oligonucleotide
  Target: SCNA; (+) strand; PAM type: NNNNGHTT; PAM sequence: AAAAGCTT
caacaacatgtctgatgtaa

SEQ ID NO: 12556 - DNA, 20 bp, Artificial Sequence
  Description of Artificial Sequence: Synthetic oligonucleotide
  Target: SCNA; (+) strand; PAM type: NNNNGHTT; PAM sequence: TCATGCTT
agaaaaggtcacactaaaga

SEQ ID NO: 12557 - DNA, 20 bp, Artificial Sequence
  Description of Artificial Sequence: Synthetic oligonucleotide
  Target: SCNA; (+) strand; PAM type: NNNNGHTT; PAM sequence: AGAAGCTT
tgcttatggtaggtgggcag

SEQ ID NO: 12558 - DNA, 20 bp, Artificial Sequence
  Description of Artificial Sequence: Synthetic oligonucleotide
  Target: SCNA; (+) strand; PAM type: NNNNGHTT; PAM sequence: TACTGTTT
tttaaaatgtggagtaaaca

SEQ ID NO: 12559 - DNA, 20 bp, Artificial Sequence
  Description of Artificial Sequence: Synthetic oligonucleotide
  Target: SCNA; (+) strand; PAM type: NNNNGHTT; PAM sequence: TAGTGTTT
gagtaaacatactgttttcg

SEQ ID NO: 12560 - DNA, 20 bp, Artificial Sequence
  Description of Artificial Sequence: Synthetic oligonucleotide
  Target: SCNA; (+) strand; PAM type: NNNNGHTT; PAM sequence: CCTAGCTT
cacaggacttgagctcaagt

SEQ ID NO: 12561 - DNA, 20 bp, Artificial Sequence
  Description of Artificial Sequence: Synthetic oligonucleotide
  Target: SCNA; (+) strand; PAM type: NNNNGHTT; PAM sequence: CAGAGCTT
gtcctagcttctctagatga

SEQ ID NO: 12562 - DNA, 20 bp, Artificial Sequence
  Description of Artificial Sequence: Synthetic oligonucleotide
  Target: SCNA; (+) strand; PAM type: NNNNGHTT; PAM sequence: AGAAGTTT
acagagcttttgtgatgctg

SEQ ID NO: 12563 - DNA, 20 bp, Artificial Sequence
  Description of Artificial Sequence: Synthetic oligonucleotide
  Target: SCNA; (+) strand; PAM type: NNNNGHTT; PAM sequence: CTATGCTT
ttgtgatgctgagaagtttc

SEQ ID NO: 12564 - DNA, 20 bp, Artificial Sequence
  Description of Artificial Sequence: Synthetic oligonucleotide
  Target: SCNA; (+) strand; PAM type: NNNNGHTT; PAM sequence: TTTAGATT
cattaactttctcattaata

SEQ ID NO: 12565 - DNA, 20 bp, Artificial Sequence
  Description of Artificial Sequence: Synthetic oligonucleotide
  Target: SCNA; (+) strand; PAM type: NNNNGHTT; PAM sequence: CCATGATT
gaaataaggcaaattttttt

SEQ ID NO: 12566 - DNA, 20 bp, Artificial Sequence
  Description of Artificial Sequence: Synthetic oligonucleotide
  Target: SCNA; (+) strand; PAM type: NNNNGHTT; PAM sequence: CAGAGATT
ttccatgattttgaaactga

SEQ ID NO: 12567 - DNA, 20 bp, Artificial Sequence
  Description of Artificial Sequence: Synthetic oligonucleotide
  Target: SCNA; (+) strand; PAM type: NNNNGHTT; PAM sequence: ATTTGATT
tgattttgaaactgacagag

SEQ ID NO: 12568 - DNA, 20 bp, Artificial Sequence
  Description of Artificial Sequence: Synthetic oligonucleotide
  Target: SCNA; (+) strand; PAM type: NNNNGHTT; PAM sequence: CCCTGTTT
aagtaaatatggcagaccta

SEQ ID NO: 12569 - DNA, 20 bp, Artificial Sequence
  Description of Artificial Sequence: Synthetic oligonucleotide
  Target: SCNA; (+) strand; PAM type: NNNNGHTT; PAM sequence: TGTTGTTT
tatggcagacctaccctgtt

SEQ ID NO: 12570 - DNA, 20 bp, Artificial Sequence
  Description of Artificial Sequence: Synthetic oligonucleotide
  Target: SCNA; (+) strand; PAM type: NNNNGHTT; PAM sequence: ACTGGATT
aactaagactgatggatatt

SEQ ID NO: 12571 - DNA, 20 bp, Artificial Sequence
  Description of Artificial Sequence: Synthetic oligonucleotide
  Target: SCNA; (+) strand; PAM type: NNNNGHTT; PAM sequence: ATTTGTTT
agactgatggatattactgg

SEQ ID NO: 12572 - DNA, 20 bp, Artificial Sequence
  Description of Artificial Sequence: Synthetic oligonucleotide
  Target: SCNA; (+) strand; PAM type: NNNNGHTT; PAM sequence: ACTTGTTT
ataattaggtaagttatttg

SEQ ID NO: 12573 - DNA, 20 bp, Artificial Sequence
  Description of Artificial Sequence: Synthetic oligonucleotide
  Target: SCNA; (+) strand; PAM type: NNNNGHTT; PAM sequence: CAATGTTT
tatatagctcacattaattt

SEQ ID NO: 12574 - DNA, 20 bp, Artificial Sequence
  Description of Artificial Sequence: Synthetic oligonucleotide
  Target: SCNA; (+) strand; PAM type: NNNNGHTT; PAM sequence: AAGTGATT
atttcaatgtttaatgtcag

SEQ ID NO: 12575 - DNA, 20 bp, Artificial Sequence
  Description of Artificial Sequence: Synthetic oligonucleotide
  Target: SCNA; (+) strand; PAM type: NNNNGHTT; PAM sequence: AGGAGTTT
gaagtgatttatctttattt

SEQ ID NO: 12576 - DNA, 20 bp, Artificial Sequence
  Description of Artificial Sequence: Synthetic oligonucleotide
  Target: SCNA; (+) strand; PAM type: NNNNGHTT; PAM sequence: TGGTGTTT
atctttatttaggagtttga

SEQ ID NO: 12577 - DNA, 20 bp, Artificial Sequence
  Description of Artificial Sequence: Synthetic oligonucleotide
  Target: SCNA; (+) strand; PAM type: NNNNGHTT; PAM sequence: TCTTGCTT
aatttgccataggacttaat

SEQ ID NO: 12578 - DNA, 20 bp, Artificial Sequence
  Description of Artificial Sequence: Synthetic oligonucleotide
  Target: SCNA; (+) strand; PAM type: NNNNGHTT; PAM sequence: ACTGGTTT
atcaattagccaatggtaaa

SEQ ID NO: 12579 - DNA, 20 bp, Artificial Sequence
  Description of Artificial Sequence: Synthetic oligonucleotide
  Target: SCNA; (+) strand; PAM type: NNNNGHTT; PAM sequence: TGTTGTTT
gtaaaactggttttgttata

SEQ ID NO: 12580 - DNA, 20 bp, Artificial Sequence
  Description of Artificial Sequence: Synthetic oligonucleotide
  Target: SCNA; (+) strand; PAM type: NNNNGHTT; PAM sequence: TTTTGCTT
actggttttgttatatgttg

SEQ ID NO: 12581 - DNA, 20 bp, Artificial Sequence
  Description of Artificial Sequence: Synthetic oligonucleotide
  Target: SCNA; (+) strand; PAM type: NNNNGHTT; PAM sequence: CACAGTTT
tatgttgttttgcttcaagt

SEQ ID NO: 12582 - DNA, 20 bp, Artificial Sequence
  Description of Artificial Sequence: Synthetic oligonucleotide
  Target: SCNA; (+) strand; PAM type: NNNNGHTT; PAM sequence: TGAGGATT
aaactattgatgaagttaag

SEQ ID NO: 12583 - DNA, 20 bp, Artificial Sequence
  Description of Artificial Sequence: Synthetic oligonucleotide
  Target: SCNA; (+) strand; PAM type: NNNNGHTT; PAM sequence: ACTAGTTT
ccatcttaaactaagactgt

SEQ ID NO: 12584 - DNA, 20 bp, Artificial Sequence
  Description of Artificial Sequence: Synthetic oligonucleotide
  Target: SCNA; (+) strand; PAM type: NNNNGHTT; PAM sequence: TAGGGTTT
tctagagtccaaatcgacaa

SEQ ID NO: 12585 - DNA, 20 bp, Artificial Sequence
  Description of Artificial Sequence: Synthetic oligonucleotide
  Target: SCNA; (+) strand; PAM type: NNNNGHTT; PAM sequence: GTTCGTTT
tggtgtaactgctattaaag

SEQ ID NO: 12586 - DNA, 20 bp, Artificial Sequence
  Description of Artificial Sequence: Synthetic oligonucleotide
  Target: SCNA; (+) strand; PAM type: NNNNGHTT; PAM sequence: TGGAGATT
aatcacttgaacccgggagg

SEQ ID NO: 12587 - DNA, 20 bp, Artificial Sequence
  Description of Artificial Sequence: Synthetic oligonucleotide
  Target: SCNA; (+) strand; PAM type: NNNNGHTT; PAM sequence: ATTTGATT
cctacgtgatccgaatttga

SEQ ID NO: 12588 - DNA, 20 bp, Artificial Sequence
  Description of Artificial Sequence: Synthetic oligonucleotide
  Target: SCNA; (+) strand; PAM type: NNNNGHTT; PAM sequence: CATTGCTT
aaggtggtgaaaaacatgtt

SEQ ID NO: 12589 - DNA, 20 bp, Artificial Sequence
  Description of Artificial Sequence: Synthetic oligonucleotide
  Target: SCNA; (+) strand; PAM type: NNNNGHTT; PAM sequence: TGCCGCTT
aaaagaagttagtgggaacc

SEQ ID NO: 12590 - DNA, 20 bp, Artificial Sequence
  Description of Artificial Sequence: Synthetic oligonucleotide
  Target: SCNA; (+) strand; PAM type: NNNNGHTT; PAM sequence: TATTGTTT
ctgacttgatatttaagaat

SEQ ID NO: 12591 - DNA, 20 bp, Artificial Sequence
  Description of Artificial Sequence: Synthetic oligonucleotide
  Target: SCNA; (+) strand; PAM type: NNNNGHTT; PAM sequence: TGCAGTTT
ctttaggtgtgatgatatat

SEQ ID NO: 12592 - DNA, 20 bp, Artificial Sequence
  Description of Artificial Sequence: Synthetic oligonucleotide
  Target: SCNA; (+) strand; PAM type: NNNNGHTT; PAM sequence: AAATGTTT
ttaacttttacaaattaatt

SEQ ID NO: 12593 - DNA, 20 bp, Artificial Sequence
  Description of Artificial Sequence: Synthetic oligonucleotide
  Target: SCNA; (+) strand; PAM type: NNNNGHTT; PAM sequence: CTAGGTTT
agatcaaataagatatctat

SEQ ID NO: 12594 - DNA, 20 bp, Artificial Sequence
  Description of Artificial Sequence: Synthetic oligonucleotide
  Target: SCNA; (+) strand; PAM type: NNNNGHTT; PAM sequence: ATGAGTTT
gggtgggatatagaagaaac

SEQ ID NO: 12595 - DNA, 20 bp, Artificial Sequence
  Description of Artificial Sequence: Synthetic oligonucleotide
  Target: SCNA; (+) strand; PAM type: NNNNGHTT; PAM sequence: ATCAGTTT
aaacatgagtttaatatttc

SEQ ID NO: 12596 - DNA, 20 bp, Artificial Sequence
  Description of Artificial Sequence: Synthetic oligonucleotide
  Target: SCNA; (+) strand; PAM type: NNNNGHTT; PAM sequence: CGTGGTTT
tacagtagtctccttttatc

SEQ ID NO: 12597 - DNA, 20 bp, Artificial Sequence
  Description of Artificial Sequence: Synthetic oligonucleotide
  Target: SCNA; (+) strand; PAM type: NNNNGHTT; PAM sequence: TTTTGTTT
tagtctccttttatccgtgg

SEQ ID NO: 12598 - DNA, 20 bp, Artificial Sequence
  Description of Artificial Sequence: Synthetic oligonucleotide
  Target: SCNA; (+) strand; PAM type: NNNNGHTT; PAM sequence: CATGGTTT
ttatccgtggttttgttttc

SEQ ID NO: 12599 - DNA, 20 bp, Artificial Sequence
  Description of Artificial Sequence: Synthetic oligonucleotide
  Target: SCNA; (+) strand; PAM type: NNNNGHTT; PAM sequence: CCTAGTTT
gttgttaatctcttactgtg

SEQ ID NO: 12600 - DNA, 20 bp, Artificial Sequence
  Description of Artificial Sequence: Synthetic oligonucleotide
  Target: SCNA; (+) strand; PAM type: NNNNGHTT; PAM sequence: TAGGGTTT
attggaaaaaacagtatatg

SEQ ID NO: 12601 - DNA, 20 bp, Artificial Sequence
  Description of Artificial Sequence: Synthetic oligonucleotide
  Target: SCNA; (+) strand; PAM type: NNNNGHTT; PAM sequence: GGGGGTTT
gcaatttcaggtgtcctagt

SEQ ID NO: 12602 - DNA, 20 bp, Artificial Sequence
  Description of Artificial Sequence: Synthetic oligonucleotide
  Target: SCNA; (+) strand; PAM type: NNNNGHTT; PAM sequence: CTATGTTT
ttcaatagttagttctctaa

SEQ ID NO: 12603 - DNA, 20 bp, Artificial Sequence
  Description of Artificial Sequence: Synthetic oligonucleotide
  Target: SCNA; (+) strand; PAM type: NNNNGHTT; PAM sequence: CGTAGATT
tttgttgactctatcacatt

SEQ ID NO: 12604 - DNA, 20 bp, Artificial Sequence
  Description of Artificial Sequence: Synthetic oligonucleotide
  Target: SCNA; (+) strand; PAM type: NNNNGHTT; PAM sequence: TACTGTTT
tatccctatacctgtatatt

SEQ ID NO: 12605 - DNA, 20 bp, Artificial Sequence
  Description of Artificial Sequence: Synthetic oligonucleotide
  Target: SCNA; (+) strand; PAM type: NNNNGHTT; PAM sequence: TATAGTTT
caatttacaactgtgcctaa

SEQ ID NO: 12606 - DNA, 20 bp, Artificial Sequence
  Description of Artificial Sequence: Synthetic oligonucleotide
  Target: SCNA; (+) strand; PAM type: NNNNGHTT; PAM sequence: ACTTGTTT
gcattttatgagtattcatg

SEQ ID NO: 12607 - DNA, 20 bp, Artificial Sequence
  Description of Artificial Sequence: Synthetic oligonucleotide
  Target: SCNA; (+) strand; PAM type: NNNNGHTT; PAM sequence: TCTGGATT
taaaataaatgagaaaaacg

SEQ ID NO: 12608 - DNA, 20 bp, Artificial Sequence
  Description of Artificial Sequence: Synthetic oligonucleotide
  Target: SCNA; (+) strand; PAM type: NNNNGHTT; PAM sequence: GTATGCTT
ctggattttggtatatgcct

SEQ ID NO: 12609 - DNA, 20 bp, Artificial Sequence
  Description of Artificial Sequence: Synthetic oligonucleotide
  Target: SCNA; (+) strand; PAM type: NNNNGHTT; PAM sequence: ATGGGATT
tgtagacttttttttttcaa

SEQ ID NO: 12610 - DNA, 20 bp, Artificial Sequence
  Description of Artificial Sequence: Synthetic oligonucleotide
  Target: SCNA; (+) strand; PAM type: NNNNGHTT; PAM sequence: GATTGTTT
gacttttttttttcaaatgg

SEQ ID NO: 12611 - DNA, 20 bp, Artificial Sequence
  Description of Artificial Sequence: Synthetic oligonucleotide
  Target: SCNA; (+) strand; PAM type: NNNNGHTT; PAM sequence: AAAAGCTT
gactgacctctttctcccta

SEQ ID NO: 12612 - DNA, 20 bp, Artificial Sequence
  Description of Artificial Sequence: Synthetic oligonucleotide
  Target: SCNA; (+) strand; PAM type: NNNNGHTT; PAM sequence: AACTGATT
tagggttgaatagctgatat

SEQ ID NO: 12613 - DNA, 20 bp, Artificial Sequence
  Description of Artificial Sequence: Synthetic oligonucleotide
  Target: SCNA; (+) strand; PAM type: NNNNGHTT; PAM sequence: CGAAGCTT
ctataaaacagatcatgaga

SEQ ID NO: 12614 - DNA, 20 bp, Artificial Sequence
  Description of Artificial Sequence: Synthetic oligonucleotide
  Target: SCNA; (+) strand; PAM type: NNNNGHTT; PAM sequence: AATAGCTT
acgaagcttccttcactgct

SEQ ID NO: 12615 - DNA, 20 bp, Artificial Sequence
  Description of Artificial Sequence: Synthetic oligonucleotide
  Target: SCNA; (+) strand; PAM type: NNNNGHTT; PAM sequence: TCCTGTTT
ttacataatctttttaaatt

SEQ ID NO: 12616 - DNA, 20 bp, Artificial Sequence
  Description of Artificial Sequence: Synthetic oligonucleotide
  Target: SCNA; (+) strand; PAM type: NNNNGHTT; PAM sequence: AATTGCTT
tgacacataataaaggcaaa

SEQ ID NO: 12617 - DNA, 20 bp, Artificial Sequence
  Description of Artificial Sequence: Synthetic oligonucleotide
  Target: SCNA; (+) strand; PAM type: NNNNGHTT; PAM sequence: GCAGGTTT
ctagggcccttgttaaaaat

SEQ ID NO: 12618 - DNA, 20 bp, Artificial Sequence
  Description of Artificial Sequence: Synthetic oligonucleotide
  Target: SCNA; (+) strand; PAM type: NNNNGHTT; PAM sequence: AATTGTTT
aaccactgcccgacatcacc

SEQ ID NO: 12619 - DNA, 20 bp, Artificial Sequence
  Description of Artificial Sequence: Synthetic oligonucleotide
  Target: SCNA; (+) strand; PAM type: NNNNGHTT; PAM sequence: CAAGGTTT
catggtgatcgttaaaatag

SEQ ID NO: 12620 - DNA, 20 bp, Artificial Sequence
  Description of Artificial Sequence: Synthetic oligonucleotide
  Target: SCNA; (+) strand; PAM type: NNNNGHTT; PAM sequence: CTATGCTT
tttcatcaattatctggtat

SEQ ID NO: 12621 - DNA, 20 bp, Artificial Sequence
  Description of Artificial Sequence: Synthetic oligonucleotide
  Target: SCNA; (+) strand; PAM type: NNNNGHTT; PAM sequence: GTAAGCTT
agaaaggttctggggagcta

SEQ ID NO: 12622 - DNA, 20 bp, Artificial Sequence
  Description of Artificial Sequence: Synthetic oligonucleotide
  Target: SCNA; (+) strand; PAM type: NNNNGHTT; PAM sequence: GCAAGTTT
aaattagtcctagagctgca

SEQ ID NO: 12623 - DNA, 20 bp, Artificial Sequence
  Description of Artificial Sequence: Synthetic oligonucleotide
  Target: SCNA; (+) strand; PAM type: NNNNGHTT; PAM sequence: TGATGTTT
attacacttttggagcaatg

SEQ ID NO: 12624 - DNA, 20 bp, Artificial Sequence
  Description of Artificial Sequence: Synthetic oligonucleotide
  Target: SCNA; (+) strand; PAM type: NNNNGHTT; PAM sequence: GAATGCTT
ggagcaatgtgatgtttctt

SEQ ID NO: 12625 - DNA, 20 bp, Artificial Sequence
  Description of Artificial Sequence: Synthetic oligonucleotide
  Target: SCNA; (+) strand; PAM type: NNNNGHTT; PAM sequence: CCAGGCTT
tttcttgaatgcttttcctc

SEQ ID NO: 12626 - DNA, 20 bp, Artificial Sequence
  Description of Artificial Sequence: Synthetic oligonucleotide
  Target: SCNA; (+) strand; PAM type: NNNNGHTT; PAM sequence: TCTTGATT
aatgcttttcctcccaggct

SEQ ID NO: 12627 - DNA, 20 bp, Artificial Sequence
  Description of Artificial Sequence: Synthetic oligonucleotide
  Target: SCNA; (+) strand; PAM type: NNNNGHTT; PAM sequence: GATTGTTT
cttttcctcccaggcttctt

SEQ ID NO: 12628 - DNA, 20 bp, Artificial Sequence
  Description of Artificial Sequence: Synthetic oligonucleotide
  Target: SCNA; (+) strand; PAM type: NNNNGHTT; PAM sequence: CACTGCTT
agcgcactttctcttttgcc

SEQ ID NO: 12629 - DNA, 20 bp, Artificial Sequence
  Description of Artificial Sequence: Synthetic oligonucleotide
  Target: SCNA; (+) strand; PAM type: NNNNGHTT; PAM sequence: CATTGTTT
gaagatattttgggtagaac

SEQ ID NO: 12630 - DNA, 20 bp, Artificial Sequence
  Description of Artificial Sequence: Synthetic oligonucleotide
  Target: SCNA; (+) strand; PAM type: NNNNGHTT; PAM sequence: AGACGTTT
tatttaaataaaaatagcat

SEQ ID NO: 12631 - DNA, 20 bp, Artificial Sequence
  Description of Artificial Sequence: Synthetic oligonucleotide
  Target: SCNA; (+) strand; PAM type: NNNNGHTT; PAM sequence: ATCTGATT
tggggtggggagcaaagggc

SEQ ID NO: 12632 - DNA, 20 bp, Artificial Sequence
  Description of Artificial Sequence: Synthetic oligonucleotide
  Target: SCNA; (+) strand; PAM type: NNNNGHTT; PAM sequence: CTCTGATT
attaaagcaaactttggata

SEQ ID NO: 12633 - DNA, 20 bp, Artificial Sequence
  Description of Artificial Sequence: Synthetic oligonucleotide
  Target: SCNA; (+) strand; PAM type: NNNNGHTT; PAM sequence: TCTTGTTT
tcttaaacgaattattgagg

SEQ ID NO: 12634 - DNA, 20 bp, Artificial Sequence
  Description of Artificial Sequence: Synthetic oligonucleotide
  Target: SCNA; (+) strand; PAM type: NNNNGHTT; PAM sequence: ATAAGATT
tagatattttgttaaaaaat

SEQ ID NO: 12635 - DNA, 20 bp, Artificial Sequence
  Description of Artificial Sequence: Synthetic oligonucleotide
  Target: SCNA; (+) strand; PAM type: NNNNGHTT; PAM sequence: TAATGATT
agaacaatataaaaataatg

SEQ ID NO: 12636 - DNA, 20 bp, Artificial Sequence
  Description of Artificial Sequence: Synthetic oligonucleotide
  Target: SCNA; (+) strand; PAM type: NNNNGHTT; PAM sequence: TATTGTTT
aataatgtaatgattacatt

SEQ ID NO: 12637 - DNA, 20 bp, Artificial Sequence
  Description of Artificial Sequence: Synthetic oligonucleotide
  Target: SCNA; (+) strand; PAM type: NNNNGHTT; PAM sequence: TATGGCTT
aatttttgggaaagtatagt

SEQ ID NO: 12638 - DNA, 20 bp, Artificial Sequence
  Description of Artificial Sequence: Synthetic oligonucleotide
  Target: SCNA; (+) strand; PAM type: NNNNGHTT; PAM sequence: TTAGGTTT
tatttcaatgtagcagtatt

SEQ ID NO: 12639 - DNA, 20 bp, Artificial Sequence
  Description of Artificial Sequence: Synthetic oligonucleotide
  Target: SCNA; (+) strand; PAM type: NNNNGHTT; PAM sequence: CCAAGTTT
ttacaacaagataaaaaatt

SEQ ID NO: 12640 - DNA, 20 bp, Artificial Sequence
  Description of Artificial Sequence: Synthetic oligonucleotide
  Target: SCNA; (+) strand; PAM type: NNNNGHTT; PAM sequence: CTGTGTTT
tttaacaatgtagtgaccta

SEQ ID NO: 12641 - DNA, 20 bp, Artificial Sequence
  Description of Artificial Sequence: Synthetic oligonucleotide
  Target: SCNA; (+) strand; PAM type: NNNNGHTT; PAM sequence: CTAGGCTT
tgtggctcctgggtcatatg

SEQ ID NO: 12642 - DNA, 20 bp, Artificial Sequence
  Description of Artificial Sequence: Synthetic oligonucleotide
  Target: SCNA; (+) strand; PAM type: NNNNGHTT; PAM sequence: TACAGATT
cattatacataatccatacc

SEQ ID NO: 12643 - DNA, 20 bp, Artificial Sequence
  Description of Artificial Sequence: Synthetic oligonucleotide
  Target: SCNA; (+) strand; PAM type: NNNNGHTT; PAM sequence: CTTTGTTT
tagaagccatttatgctcta

SEQ ID NO: 12644 - DNA, 20 bp, Artificial Sequence
  Description of Artificial Sequence: Synthetic oligonucleotide
  Target: SCNA; (+) strand; PAM type: NNNNGHTT; PAM sequence: TTTTGTTT
tatgctctactttgtttatc

SEQ ID NO: 12645 - DNA, 20 bp, Artificial Sequence
  Description of Artificial Sequence: Synthetic oligonucleotide
  Target: SCNA; (+) strand; PAM type: NNNNGHTT; PAM sequence: ATAGGCTT
cctcccaaatagctgggact

SEQ ID NO: 12646 - DNA, 20 bp, Artificial Sequence
  Description of Artificial Sequence: Synthetic oligonucleotide
  Target: SCNA; (+) strand; PAM type: NNNNGHTT; PAM sequence: TGAAGTTT
attttttttttttatagaga

SEQ ID NO: 12647 - DNA, 20 bp, Artificial Sequence
  Description of Artificial Sequence: Synthetic oligonucleotide
  Target: SCNA; (+) strand; PAM type: NNNNGHTT; PAM sequence: CTGGGATT
tgcgtcagcctccgaaagtg

SEQ ID NO: 12648 - DNA, 20 bp, Artificial Sequence
  Description of Artificial Sequence: Synthetic oligonucleotide
  Target: SCNA; (+) strand; PAM type: NNNNGHTT; PAM sequence: TACTGATT
tggataatctgttactatct

SEQ ID NO: 12649 - DNA, 20 bp, Artificial Sequence
  Description of Artificial Sequence: Synthetic oligonucleotide
  Target: SCNA; (+) strand; PAM type: NNNNGHTT; PAM sequence: AGCTGTTT
ttcttgtcttttgcccttct

SEQ ID NO: 12650 - DNA, 20 bp, Artificial Sequence
  Description of Artificial Sequence: Synthetic oligonucleotide
  Target: SCNA; (+) strand; PAM type: NNNNGHTT; PAM sequence: TTCAGTTT
atgaaataaaaacaatttat

SEQ ID NO: 12651 - DNA, 20 bp, Artificial Sequence
  Description of Artificial Sequence: Synthetic oligonucleotide
  Target: SCNA; (+) strand; PAM type: NNNNGHTT; PAM sequence: AAAGGTTT
aacaatttatttcagttttt

SEQ ID NO: 12652 - DNA, 20 bp, Artificial Sequence
  Description of Artificial Sequence: Synthetic oligonucleotide
  Target: SCNA; (+) strand; PAM type: NNNNGHTT; PAM sequence: ACTAGTTT
gttattttggggagctattt

SEQ ID NO: 12653 - DNA, 20 bp, Artificial Sequence
  Description of Artificial Sequence: Synthetic oligonucleotide
  Target: SCNA; (+) strand; PAM type: NNNNGHTT; PAM sequence: TCAGGTTT
tactagttttatctctgaat

SEQ ID NO: 12654 - DNA, 20 bp, Artificial Sequence
  Description of Artificial Sequence: Synthetic oligonucleotide
  Target: SCNA; (+) strand; PAM type: NNNNGHTT; PAM sequence: TGCTGCTT
tatatagcaaagaggtagta

SEQ ID NO: 12655 - DNA, 20 bp, Artificial Sequence
  Description of Artificial Sequence: Synthetic oligonucleotide
  Target: SCNA; (+) strand; PAM type: NNNNGHTT; PAM sequence: GCCAGCTT
ttcacagcgcagcaacaact

SEQ ID NO: 12656 - DNA, 20 bp, Artificial Sequence
  Description of Artificial Sequence: Synthetic oligonucleotide
  Target: SCNA; (+) strand; PAM type: NNNNGHTT; PAM sequence: ATTTGTTT
gtatgttaaactatattcaa

SEQ ID NO: 12657 - DNA, 20 bp, Artificial Sequence
  Description of Artificial Sequence: Synthetic oligonucleotide
  Target: SCNA; (+) strand; PAM type: NNNNGHTT; PAM sequence: TTAAGCTT
attcaaatttgtttactatt

SEQ ID NO: 12658 - DNA, 20 bp, Artificial Sequence
  Description of Artificial Sequence: Synthetic oligonucleotide
  Target: SCNA; (+) strand; PAM type: NNNNGHTT; PAM sequence: CATGGATT
tgtttactattttaagcttt

SEQ ID NO: 12659 - DNA, 20 bp, Artificial Sequence
  Description of Artificial Sequence: Synthetic oligonucleotide
  Target: SCNA; (+) strand; PAM type: NNNNGHTT; PAM sequence: AAAGGTTT
tgaagatgggtcaagctgag

SEQ ID NO: 12660 - DNA, 20 bp, Artificial Sequence
  Description of Artificial Sequence: Synthetic oligonucleotide
  Target: SCNA; (+) strand; PAM type: NNNNGHTT; PAM sequence: TCATGTTT
ctcagaatcaataagtcatt

SEQ ID NO: 12661 - DNA, 20 bp, Artificial Sequence
  Description of Artificial Sequence: Synthetic oligonucleotide
  Target: SCNA; (+) strand; PAM type: NNNNGHTT; PAM sequence: TCCTGCTT
ctcacgggatcacgccattc

SEQ ID NO: 12662 - DNA, 20 bp, Artificial Sequence
  Description of Artificial Sequence: Synthetic oligonucleotide
  Target: SCNA; (+) strand; PAM type: NNNNGHTT; PAM sequence: CAGGGTTT
ttttgtaattttagtagaga

SEQ ID NO: 12663 - DNA, 20 bp, Artificial Sequence
  Description of Artificial Sequence: Synthetic oligonucleotide
  Target: SCNA; (+) strand; PAM type: NNNNGHTT; PAM sequence: CTGGGATT
taccttggcctcccaaagtg

SEQ ID NO: 12664 - DNA, 20 bp, Artificial Sequence
  Description of Artificial Sequence: Synthetic oligonucleotide
  Target: SCNA; (+) strand; PAM type: NNNNGHTT; PAM sequence: GTAGGCTT
gtgagaaatcagtggggagg

SEQ ID NO: 12665 - DNA, 20 bp, Artificial Sequence
  Description of Artificial Sequence: Synthetic oligonucleotide
  Target: SCNA; (+) strand; PAM type: NNNNGHTT; PAM sequence: GTCTGCTT
gacaaagtaagagataaaga

SEQ ID NO: 12666 - DNA, 20 bp, Artificial Sequence
  Description of Artificial Sequence: Synthetic oligonucleotide
  Target: SCNA; (+) strand; PAM type: NNNNGHTT; PAM sequence: AGGAGTTT
atgttagtgagccaaggccc

SEQ ID NO: 12667 - DNA, 20 bp, Artificial Sequence
  Description of Artificial Sequence: Synthetic oligonucleotide
  Target: SCNA; (+) strand; PAM type: NNNNGHTT; PAM sequence: AATAGCTT
ctgaagcagagagtgaaggc

SEQ ID NO: 12668 - DNA, 20 bp, Artificial Sequence
  Description of Artificial Sequence: Synthetic oligonucleotide
  Target: SCNA; (+) strand; PAM type: NNNNGHTT; PAM sequence: GGTGGATT
aaggcaatagcttcaagatc

SEQ ID NO: 12669 - DNA, 20 bp, Artificial Sequence
  Description of Artificial Sequence: Synthetic oligonucleotide
  Target: SCNA; (+) strand; PAM type: NNNNGHTT; PAM sequence: AAAAGATT
aagtatcttctctaaaagat

SEQ ID NO: 12670 - DNA, 20 bp, Artificial Sequence
  Description of Artificial Sequence: Synthetic oligonucleotide
  Target: SCNA; (+) strand; PAM type: NNNNGHTT; PAM sequence: AAAGGCTT
ctaaaagataaaagattaag

SEQ ID NO: 12671 - DNA, 20 bp, Artificial Sequence
  Description of Artificial Sequence: Synthetic oligonucleotide
  Target: SCNA; (+) strand; PAM type: NNNNGHTT; PAM sequence: AGAAGTTT
atgtgataccacaaggttcc

SEQ ID NO: 12672 - DNA, 20 bp, Artificial Sequence
  Description of Artificial Sequence: Synthetic oligonucleotide
  Target: SCNA; (+) strand; PAM type: NNNNGHTT; PAM sequence: TGAAGTTT
taatagaaacagatactaag

SEQ ID NO: 12673 - DNA, 20 bp, Artificial Sequence
  Description of Artificial Sequence: Synthetic oligonucleotide
  Target: SCNA; (+) strand; PAM type: NNNNGHTT; PAM sequence: CTTTGCTT
caaccttcaggctggaatat

SEQ ID NO: 12674 - DNA, 20 bp, Artificial Sequence
  Description of Artificial Sequence: Synthetic oligonucleotide
  Target: SCNA; (+) strand; PAM type: NNNNGHTT; PAM sequence: GGTTGATT
cccagccagaggaccatagt

SEQ ID NO: 12675 - DNA, 20 bp, Artificial Sequence
  Description of Artificial Sequence: Synthetic oligonucleotide
  Target: SCNA; (+) strand; PAM type: NNNNGHTT; PAM sequence: TTAAGTTT
tcttgtaaattctctcattg

SEQ ID NO: 12676 - DNA, 20 bp, Artificial Sequence
  Description of Artificial Sequence: Synthetic oligonucleotide
  Target: SCNA; (+) strand; PAM type: NNNNGHTT; PAM sequence: CACAGTTT
ctctcattgttaagttttgt

SEQ ID NO: 12677 - DNA, 20 bp, Artificial Sequence
  Description of Artificial Sequence: Synthetic oligonucleotide
  Target: SCNA; (+) strand; PAM type: NNNNGHTT; PAM sequence: AAATGTTT
ctttctttcagttacctaga

SEQ ID NO: 12678 - DNA, 20 bp, Artificial Sequence
  Description of Artificial Sequence: Synthetic oligonucleotide
  Target: SCNA; (+) strand; PAM type: NNNNGHTT; PAM sequence: ACAAGATT
gataaaaaaggaatcatctt

SEQ ID NO: 12679 - DNA, 20 bp, Artificial Sequence
  Description of Artificial Sequence: Synthetic oligonucleotide
  Target: SCNA; (+) strand; PAM type: NNNNGHTT; PAM sequence: TAATGTTT
catggaataacaataacagt

SEQ ID NO: 12680 - DNA, 20 bp, Artificial Sequence
  Description of Artificial Sequence: Synthetic oligonucleotide
  Target: SCNA; (+) strand; PAM type: NNNNGHTT; PAM sequence: TGGTGCTT
aataacagttaatgtttatt

SEQ ID NO: 12681 - DNA, 20 bp, Artificial Sequence
  Description of Artificial Sequence: Synthetic oligonucleotide
  Target: SCNA; (+) strand; PAM type: NNNNGHTT; PAM sequence: AAGAGTTT
tctgtatttggtaccatttc

SEQ ID NO: 12682 - DNA, 20 bp, Artificial Sequence
  Description of Artificial Sequence: Synthetic oligonucleotide
  Target: SCNA; (+) strand; PAM type: NNNNGHTT; PAM sequence: TTACGTTT
ggctacttattaaggtaaaa

SEQ ID NO: 12683 - DNA, 20 bp, Artificial Sequence
  Description of Artificial Sequence: Synthetic oligonucleotide
  Target: SCNA; (+) strand; PAM type: NNNNGHTT; PAM sequence: AAATGTTT
ataaaataggaggttaaagg

SEQ ID NO: 12684 - DNA, 20 bp, Artificial Sequence
  Description of Artificial Sequence: Synthetic oligonucleotide
  Target: SCNA; (+) strand; PAM type: NNNNGHTT; PAM sequence: ATATGATT
atacatatctatgtgtatat

SEQ ID NO: 12685 - DNA, 20 bp, Artificial Sequence
  Description of Artificial Sequence: Synthetic oligonucleotide
  Target: SCNA; (+) strand; PAM type: NNNNGHTT; PAM sequence: ACCAGATT
gattttttgcaagggcaaaa

SEQ ID NO: 12686 - DNA, 20 bp, Artificial Sequence
  Description of Artificial Sequence: Synthetic oligonucleotide
  Target: SCNA; (+) strand; PAM type: NNNNGHTT; PAM sequence: TCAAGTTT
aatcattaaatctgcaaata

SEQ ID NO: 12687 - DNA, 20 bp, Artificial Sequence
  Description of Artificial Sequence: Synthetic oligonucleotide
  Target: SCNA; (+) strand; PAM type: NNNNGHTT; PAM sequence: AATAGTTT
aattttttgttacaggaaaa

SEQ ID NO: 12688 - DNA, 20 bp, Artificial Sequence
  Description of Artificial Sequence: Synthetic oligonucleotide
  Target: SCNA; (+) strand; PAM type: NNNNGHTT; PAM sequence: TCTGGTTT
aaattcaatgcatagcattt

SEQ ID NO: 12689 - DNA, 20 bp, Artificial Sequence
  Description of Artificial Sequence: Synthetic oligonucleotide
  Target: SCNA; (+) strand; PAM type: NNNNGHTT; PAM sequence: TTTTGTTT
tgtcagaaataaattgttca

SEQ ID NO: 12690 - DNA, 20 bp, Artificial Sequence
  Description of Artificial Sequence: Synthetic oligonucleotide
  Target: SCNA; (+) strand; PAM type: NNNNGHTT; PAM sequence: GTATGTTT
aaatatgtggcaaagacatt

SEQ ID NO: 12691 - DNA, 20 bp, Artificial Sequence
  Description of Artificial Sequence: Synthetic oligonucleotide
  Target: SCNA; (+) strand; PAM type: NNNNGHTT; PAM sequence: TTTTGTTT
tggcaaagacattgtatgtt

SEQ ID NO: 12692 - DNA, 20 bp, Artificial Sequence
  Description of Artificial Sequence: Synthetic oligonucleotide
  Target: SCNA; (+) strand; PAM type: NNNNGHTT; PAM sequence: GTTTGTTT
aaagacattgtatgtttttt

SEQ ID NO: 12693 - DNA, 20 bp, Artificial Sequence
  Description of Artificial Sequence: Synthetic oligonucleotide
  Target: SCNA; (+) strand; PAM type: NNNNGHTT; PAM sequence: GTTTGCTT
acattgtatgttttttgttt

SEQ ID NO: 12694 - DNA, 20 bp, Artificial Sequence
  Description of Artificial Sequence: Synthetic oligonucleotide
  Target: SCNA; (+) strand; PAM type: NNNNGHTT; PAM sequence: GCTTGTTT
tgtatgttttttgtttgttt

SEQ ID NO: 12695 - DNA, 20 bp, Artificial Sequence
  Description of Artificial Sequence: Synthetic oligonucleotide
  Target: SCNA; (+) strand; PAM type: NNNNGHTT; PAM sequence: GTTTGTTT
tgttttttgtttgtttgctt

SEQ ID NO: 12696 - DNA, 20 bp, Artificial Sequence
  Description of Artificial Sequence: Synthetic oligonucleotide
  Target: SCNA; (+) strand; PAM type: NNNNGHTT; PAM sequence: GTTTGTTT
ttttgtttgtttgcttgttt

SEQ ID NO: 12697 - DNA, 20 bp, Artificial Sequence
  Description of Artificial Sequence: Synthetic oligonucleotide
  Target: SCNA; (+) strand; PAM type: NNNNGHTT; PAM sequence: AATAGTTT
tgcttgtttgtttgttttag

SEQ ID NO: 12698 - DNA, 20 bp, Artificial Sequence
  Description of Artificial Sequence: Synthetic oligonucleotide
  Target: SCNA; (+) strand; PAM type: NNNNGHTT; PAM sequence: GAAAGCTT
caaaccttttgaccaaccaa

SEQ ID NO: 12699 - DNA, 20 bp, Artificial Sequence
  Description of Artificial Sequence: Synthetic oligonucleotide
  Target: SCNA; (+) strand; PAM type: NNNNGHTT; PAM sequence: ACAGGCTT
aagaaagcttttgcctgggc

SEQ ID NO: 12700 - DNA, 20 bp, Artificial Sequence
  Description of Artificial Sequence: Synthetic oligonucleotide
  Target: SCNA; (+) strand; PAM type: NNNNGHTT; PAM sequence: TTATGATT
aatccctcccaacaatttca

SEQ ID NO: 12701 - DNA, 20 bp, Artificial Sequence
  Description of Artificial Sequence: Synthetic oligonucleotide
  Target: SCNA; (+) strand; PAM type: NNNNGHTT; PAM sequence: AGATGTTT
atccattaagtccatggggc

SEQ ID NO: 12702 - DNA, 20 bp, Artificial Sequence
  Description of Artificial Sequence: Synthetic oligonucleotide
  Target: SCNA; (+) strand; PAM type: NNNNGHTT; PAM sequence: AAAAGATT
cagagaatttaaagaggaat

SEQ ID NO: 12703 - DNA, 20 bp, Artificial Sequence
  Description of Artificial Sequence: Synthetic oligonucleotide
  Target: SCNA; (+) strand; PAM type: NNNNGHTT; PAM sequence: AAATGTTT
ctttttctttaattggcact

SEQ ID NO: 12704 - DNA, 20 bp, Artificial Sequence
  Description of Artificial Sequence: Synthetic oligonucleotide
  Target: SCNA; (+) strand; PAM type: NNNNGHTT; PAM sequence: TCTGGATT
cttttaaggcatccattatt

SEQ ID NO: 12705 - DNA, 20 bp, Artificial Sequence
  Description of Artificial Sequence: Synthetic oligonucleotide
  Target: SCNA; (+) strand; PAM type: NNNNGHTT; PAM sequence: TGCTGTTT
ggttcatttgtatctccctt

SEQ ID NO: 12706 - DNA, 20 bp, Artificial Sequence
  Description of Artificial Sequence: Synthetic oligonucleotide
  Target: SCNA; (+) strand; PAM type: NNNNGHTT; PAM sequence: TTCTGATT
tgctgtttattgagtagaaa

SEQ ID NO: 12707 - DNA, 20 bp, Artificial Sequence
  Description of Artificial Sequence: Synthetic oligonucleotide
  Target: SCNA; (+) strand; PAM type: NNNNGHTT; PAM sequence: GTGGGCTT
tgtaggtggggtgcattcaa

SEQ ID NO: 12708 - DNA, 20 bp, Artificial Sequence
  Description of Artificial Sequence: Synthetic oligonucleotide
  Target: SCNA; (+) strand; PAM type: NNNNGHTT; PAM sequence: GGATGATT
gttggaagaatatatattga

SEQ ID NO: 12709 - DNA, 20 bp, Artificial Sequence
  Description of Artificial Sequence: Synthetic oligonucleotide
  Target: SCNA; (+) strand; PAM type: NNNNGHTT; PAM sequence: ATGAGATT
gaaaaagggcatttaagagc

SEQ ID NO: 12710 - DNA, 20 bp, Artificial Sequence
  Description of Artificial Sequence: Synthetic oligonucleotide
  Target: SCNA; (+) strand; PAM type: NNNNGHTT; PAM sequence: AAATGTTT
agtgagatcttgagcaacgt

SEQ ID NO: 12711 - DNA, 20 bp, Artificial Sequence
  Description of Artificial Sequence: Synthetic oligonucleotide
  Target: SCNA; (+) strand; PAM type: NNNNGHTT; PAM sequence: GCTAGATT
ttactgagcatctactatgt

SEQ ID NO: 12712 - DNA, 20 bp, Artificial Sequence
  Description of Artificial Sequence: Synthetic oligonucleotide
  Target: SCNA; (+) strand; PAM type: NNNNGHTT; PAM sequence: ATAAGATT
gtatatcatatattgtctta

SEQ ID NO: 12713 - DNA, 20 bp, Artificial Sequence
  Description of Artificial Sequence: Synthetic oligonucleotide
  Target: SCNA; (+) strand; PAM type: NNNNGHTT; PAM sequence: AAGAGATT
aatgggcggatcacaaggtc

SEQ ID NO: 12714 - DNA, 20 bp, Artificial Sequence
  Description of Artificial Sequence: Synthetic oligonucleotide
  Target: SCNA; (+) strand; PAM type: NNNNGHTT; PAM sequence: CTTCGTTT
aaaaggaaccttttgcctta

SEQ ID NO: 12715 - DNA, 20 bp, Artificial Sequence
  Description of Artificial Sequence: Synthetic oligonucleotide
  Target: SCNA; (+) strand; PAM type: NNNNGHTT; PAM sequence: CGGTGTTT
ttcaagtctgcaattaagct

SEQ ID NO: 12716 - DNA, 20 bp, Artificial Sequence
  Description of Artificial Sequence: Synthetic oligonucleotide
  Target: SCNA; (+) strand; PAM type: NNNNGHTT; PAM sequence: TCTTGTTT
ctcaaactgtgcacaggtcc

SEQ ID NO: 12717 - DNA, 20 bp, Artificial Sequence
  Description of Artificial Sequence: Synthetic oligonucleotide
  Target: SCNA; (+) strand; PAM type: NNNNGHTT; PAM sequence: TTGTGTTT
ttataggtgcaaactacaag

SEQ ID NO: 12718 - DNA, 20 bp, Artificial Sequence
  Description of Artificial Sequence: Synthetic oligonucleotide
  Target: SCNA; (+) strand; PAM type: NNNNGHTT; PAM sequence: ATTGGTTT
aaactacaagttgtgtttta

SEQ ID NO: 12719 - DNA, 20 bp, Artificial Sequence
  Description of Artificial Sequence: Synthetic oligonucleotide
  Target: SCNA; (+) strand; PAM type: NNNNGHTT; PAM sequence: TCATGATT
taatagcattagcaagagta

SEQ ID NO: 12720 - DNA, 20 bp, Artificial Sequence
  Description of Artificial Sequence: Synthetic oligonucleotide
  Target: SCNA; (+) strand; PAM type: NNNNGHTT; PAM sequence: CACTGATT
agagtatcatgattttcttg

SEQ ID NO: 12721 - DNA, 20 bp, Artificial Sequence
  Description of Artificial Sequence: Synthetic oligonucleotide
  Target: SCNA; (+) strand; PAM type: NNNNGHTT; PAM sequence: CTTTGCTT
aatggccagtaaagatgtcc

SEQ ID NO: 12722 - DNA, 20 bp, Artificial Sequence
  Description of Artificial Sequence: Synthetic oligonucleotide
  Target: SCNA; (+) strand; PAM type: NNNNGHTT; PAM sequence: TTTTGTTT
aggctgcaagcacacctgcc

SEQ ID NO: 12723 - DNA, 20 bp, Artificial Sequence
  Description of Artificial Sequence: Synthetic oligonucleotide
  Target: SCNA; (+) strand; PAM type: NNNNGHTT; PAM sequence: AAATGATT
gccttttgttttagaaggag

SEQ ID NO: 12724 - DNA, 20 bp, Artificial Sequence
  Description of Artificial Sequence: Synthetic oligonucleotide
  Target: SCNA; (+) strand; PAM type: NNNNGHTT; PAM sequence: ACTTGCTT
caaacaaaaggcagttactg

SEQ ID NO: 12725 - DNA, 20 bp, Artificial Sequence
  Description of Artificial Sequence: Synthetic oligonucleotide
  Target: SCNA; (+) strand; PAM type: NNNNGHTT; PAM sequence: CGCTGCTT
aaaaatgtgcagaaatgata

SEQ ID NO: 12726 - DNA, 20 bp, Artificial Sequence
  Description of Artificial Sequence: Synthetic oligonucleotide
  Target: SCNA; (+) strand; PAM type: NNNNGHTT; PAM sequence: AAATGATT
gacacagggacaaggagtaa

SEQ ID NO: 12727 - DNA, 20 bp, Artificial Sequence
  Description of Artificial Sequence: Synthetic oligonucleotide
  Target: SCNA; (+) strand; PAM type: NNNNGHTT; PAM sequence: TTAGGTTT
gggacaaggagtaaaaatga

SEQ ID NO: 12728 - DNA, 20 bp, Artificial Sequence
  Description of Artificial Sequence: Synthetic oligonucleotide
  Target: SCNA; (+) strand; PAM type: NNNNGHTT; PAM sequence: TTGAGCTT
ggagtaaaaatgattaggtt

SEQ ID NO: 12729 - DNA, 20 bp, Artificial Sequence
  Description of Artificial Sequence: Synthetic oligonucleotide
  Target: SCNA; (+) strand; PAM type: NNNNGHTT; PAM sequence: AGTAGATT
agtagagaaaaaaagaacaa

SEQ ID NO: 12730 - DNA, 20 bp, Artificial Sequence
  Description of Artificial Sequence: Synthetic oligonucleotide
  Target: SCNA; (+) strand; PAM type: NNNNGHTT; PAM sequence: ATGAGATT
cataaatataagttgaaaat

SEQ ID NO: 12731 - DNA, 20 bp, Artificial Sequence
  Description of Artificial Sequence: Synthetic oligonucleotide
  Target: SCNA; (+) strand; PAM type: NNNNGHTT; PAM sequence: GTCAGTTT
agtaattggtactactactt

SEQ ID NO: 12732 - DNA, 20 bp, Artificial Sequence
  Description of Artificial Sequence: Synthetic oligonucleotide
  Target: SCNA; (+) strand; PAM type: NNNNGHTT; PAM sequence: TTATGCTT
cactttcagtactatgtatt

SEQ ID NO: 12733 - DNA, 20 bp, Artificial Sequence
  Description of Artificial Sequence: Synthetic oligonucleotide
  Target: SCNA; (+) strand; PAM type: NNNNGHTT; PAM sequence: ACCTGTTT
tttatgcttcagggatgcat

SEQ ID NO: 12734 - DNA, 20 bp, Artificial Sequence
  Description of Artificial Sequence: Synthetic oligonucleotide
  Target: SCNA; (+) strand; PAM type: NNNNGHTT; PAM sequence: GTATGTTT
tgcatacctgtttaacaaaa

SEQ ID NO: 12735 - DNA, 20 bp, Artificial Sequence
  Description of Artificial Sequence: Synthetic oligonucleotide
  Target: SCNA; (+) strand; PAM type: NNNNGHTT; PAM sequence: TGGGGATT
ttaattttgagggtaacaat

SEQ ID NO: 12736 - DNA, 20 bp, Artificial Sequence
  Description of Artificial Sequence: Synthetic oligonucleotide
  Target: SCNA; (+) strand; PAM type: NNNNGHTT; PAM sequence: AGTAGATT
gggtaacaattggggatttg

SEQ ID NO: 12737 - DNA, 20 bp, Artificial Sequence
  Description of Artificial Sequence: Synthetic oligonucleotide
  Target: SCNA; (+) strand; PAM type: NNNNGHTT; PAM sequence: TTTTGCTT
attggggatttgagtagatt

SEQ ID NO: 12738 - DNA, 20 bp, Artificial Sequence
  Description of Artificial Sequence: Synthetic oligonucleotide
  Target: SCNA; (+) strand; PAM type: NNNNGHTT; PAM sequence: AATTGTTT
attttttgcttctgttcttt

SEQ ID NO: 12739 - DNA, 20 bp, Artificial Sequence
  Description of Artificial Sequence: Synthetic oligonucleotide
  Target: SCNA; (+) strand; PAM type: NNNNGHTT; PAM sequence: CAGAGTTT
gactgttaatgtagtaggag

SEQ ID NO: 12740 - DNA, 20 bp, Artificial Sequence
  Description of Artificial Sequence: Synthetic oligonucleotide
  Target: SCNA; (+) strand; PAM type: NNNNGHTT; PAM sequence: TGATGTTT
aatggagccaataacagaga

SEQ ID NO: 12741 - DNA, 20 bp, Artificial Sequence
  Description of Artificial Sequence: Synthetic oligonucleotide
  Target: SCNA; (+) strand; PAM type: NNNNGHTT; PAM sequence: ATGAGCTT
catgagtccagagaactaaa

SEQ ID NO: 12742 - DNA, 20 bp, Artificial Sequence
  Description of Artificial Sequence: Synthetic oligonucleotide
  Target: SCNA; (+) strand; PAM type: NNNNGHTT; PAM sequence: AGGTGTTT
cgataagacataaatgtcag

SEQ ID NO: 12743 - DNA, 20 bp, Artificial Sequence
  Description of Artificial Sequence: Synthetic oligonucleotide
  Target: SCNA; (+) strand; PAM type: NNNNGHTT; PAM sequence: CTGGGTTT
taaaaaattcgatagtcaag

SEQ ID NO: 12744 - DNA, 20 bp, Artificial Sequence
  Description of Artificial Sequence: Synthetic oligonucleotide
  Target: SCNA; (+) strand; PAM type: NNNNGHTT; PAM sequence: GCATGTTT
catatcagtcttacgtcaaa

SEQ ID NO: 12745 - DNA, 20 bp, Artificial Sequence
  Description of Artificial Sequence: Synthetic oligonucleotide
  Target: SCNA; (+) strand; PAM type: NNNNGHTT; PAM sequence: TTGTGATT
ttttaattgctgttgtgtgg

SEQ ID NO: 12746 - DNA, 20 bp, Artificial Sequence
  Description of Artificial Sequence: Synthetic oligonucleotide
  Target: SCNA; (+) strand; PAM type: NNNNGHTT; PAM sequence: AAGAGTTT
tgtgattttaagggaagaag

SEQ ID NO: 12747 - DNA, 20 bp, Artificial Sequence
  Description of Artificial Sequence: Synthetic oligonucleotide
  Target: SCNA; (+) strand; PAM type: NNNNGHTT; PAM sequence: TCCTGATT
ttaaactaaccagtccaata

SEQ ID NO: 12748 - DNA, 20 bp, Artificial Sequence
  Description of Artificial Sequence: Synthetic oligonucleotide
  Target: SCNA; (+) strand; PAM type: NNNNGHTT; PAM sequence: CCAGGTTT
agctgcagaccattttgttg

SEQ ID NO: 12749 - DNA, 20 bp, Artificial Sequence
  Description of Artificial Sequence: Synthetic oligonucleotide
  Target: SCNA; (+) strand; PAM type: NNNNGHTT; PAM sequence: GGTGGCTT
ttgccaggtttctcctccag

SEQ ID NO: 12750 - DNA, 20 bp, Artificial Sequence
  Description of Artificial Sequence: Synthetic oligonucleotide
  Target: SCNA; (+) strand; PAM type: NNNNGHTT; PAM sequence: GCTAGTTT
tcctccagggtggctttcca

SEQ ID NO: 12751 - DNA, 20 bp, Artificial Sequence
  Description of Artificial Sequence: Synthetic oligonucleotide
  Target: SCNA; (+) strand; PAM type: NNNNGHTT; PAM sequence: ACTGGCTT
aataacatatgtgtgtgcaa

SEQ ID NO: 12752 - DNA, 20 bp, Artificial Sequence
  Description of Artificial Sequence: Synthetic oligonucleotide
  Target: SCNA; (+) strand; PAM type: NNNNGHTT; PAM sequence: GCTTGCTT
acatatgtgtgtgcaaactg

SEQ ID NO: 12753 - DNA, 20 bp, Artificial Sequence
  Description of Artificial Sequence: Synthetic oligonucleotide
  Target: SCNA; (+) strand; PAM type: NNNNGHTT; PAM sequence: ATGGGTTT
atataaaggagactgtgcat

SEQ ID NO: 12754 - DNA, 20 bp, Artificial Sequence
  Description of Artificial Sequence: Synthetic oligonucleotide
  Target: SCNA; (+) strand; PAM type: NNNNGHTT; PAM sequence: TTGAGATT
tgaaaattgaaatttgatct

SEQ ID NO: 12755 - DNA, 20 bp, Artificial Sequence
  Description of Artificial Sequence: Synthetic oligonucleotide
  Target: SCNA; (+) strand; PAM type: NNNNGHTT; PAM sequence: ATTTGCTT
atttttctgaaaaatattgt

SEQ ID NO: 12756 - DNA, 20 bp, Artificial Sequence
  Description of Artificial Sequence: Synthetic oligonucleotide
  Target: SCNA; (+) strand; PAM type: NNNNGHTT; PAM sequence: TATTGTTT
cctcttgctatacaaactta

SEQ ID NO: 12757 - DNA, 20 bp, Artificial Sequence
  Description of Artificial Sequence: Synthetic oligonucleotide
  Target: SCNA; (+) strand; PAM type: NNNNGHTT; PAM sequence: TTTTGCTT
tgctatacaaacttatattg

SEQ ID NO: 12758 - DNA, 20 bp, Artificial Sequence
  Description of Artificial Sequence: Synthetic oligonucleotide
  Target: SCNA; (+) strand; PAM type: NNNNGHTT; PAM sequence: GAATGATT
ctctgaatttaaagtctaga

SEQ ID NO: 12759 - DNA, 20 bp, Artificial Sequence
  Description of Artificial Sequence: Synthetic oligonucleotide
  Target: SCNA; (+) strand; PAM type: NNNNGHTT; PAM sequence: TTTTGTTT
atcttttccagtgctagtat

SEQ ID NO: 12760 - DNA, 20 bp, Artificial Sequence
  Description of Artificial Sequence: Synthetic oligonucleotide
  Target: SCNA; (+) strand; PAM type: NNNNGHTT; PAM sequence: TGTGGTTT
tagtatttttgtttttgagc

SEQ ID NO: 12761 - DNA, 20 bp, Artificial Sequence
  Description of Artificial Sequence: Synthetic oligonucleotide
  Target: SCNA; (+) strand; PAM type: NNNNGHTT; PAM sequence: AGGTGCTT
tgaagacgtaggcagcacaa

SEQ ID NO: 12762 - DNA, 20 bp, Artificial Sequence
  Description of Artificial Sequence: Synthetic oligonucleotide
  Target: SCNA; (+) strand; PAM type: NNNNGHTT; PAM sequence: GAATGTTT
tacaatatttgaaagtcact

SEQ ID NO: 12763 - DNA, 20 bp, Artificial Sequence
  Description of Artificial Sequence: Synthetic oligonucleotide
  Target: SCNA; (+) strand; PAM type: NNNNGHTT; PAM sequence: ATGTGTTT
agaactgtgttattgttctc

SEQ ID NO: 12764 - DNA, 20 bp, Artificial Sequence
  Description of Artificial Sequence: Synthetic oligonucleotide
  Target: SCNA; (+) strand; PAM type: NNNNGHTT; PAM sequence: TGGAGCTT
tgcccagaaaataagcagac

SEQ ID NO: 12765 - DNA, 20 bp, Artificial Sequence
  Description of Artificial Sequence: Synthetic oligonucleotide
  Target: SCNA; (+) strand; PAM type: NNNNGHTT; PAM sequence: CTAAGATT
ataagcagactggagcttct

SEQ ID NO: 12766 - DNA, 20 bp, Artificial Sequence
  Description of Artificial Sequence: Synthetic oligonucleotide
  Target: SCNA; (+) strand; PAM type: NNNNGHTT; PAM sequence: CCCAGATT
aaacagtattacaattccag

SEQ ID NO: 12767 - DNA, 20 bp, Artificial Sequence
  Description of Artificial Sequence: Synthetic oligonucleotide
  Target: SCNA; (+) strand; PAM type: NNNNGHTT; PAM sequence: AATAGATT
gaaaagaaaatatctgtgta

SEQ ID NO: 12768 - DNA, 20 bp, Artificial Sequence
  Description of Artificial Sequence: Synthetic oligonucleotide
  Target: SCNA; (+) strand; PAM type: NNNNGHTT; PAM sequence: AAGCGATT
atatctgtgtaaatagatta

SEQ ID NO: 12769 - DNA, 20 bp, Artificial Sequence
  Description of Artificial Sequence: Synthetic oligonucleotide
  Target: SCNA; (+) strand; PAM type: NNNNGHTT; PAM sequence: GAATGCTT
gccaccgtgatgaactaaat

SEQ ID NO: 12770 - DNA, 20 bp, Artificial Sequence
  Description of Artificial Sequence: Synthetic oligonucleotide
  Target: SCNA; (+) strand; PAM type: NNNNGHTT; PAM sequence: CACTGATT
ggcatgacataatggtatat

SEQ ID NO: 12771 - DNA, 20 bp, Artificial Sequence
  Description of Artificial Sequence: Synthetic oligonucleotide
  Target: SCNA; (+) strand; PAM type: NNNNGHTT; PAM sequence: TGAAGCTT
catttagtgagcatctaaac

SEQ ID NO: 12772 - DNA, 20 bp, Artificial Sequence
  Description of Artificial Sequence: Synthetic oligonucleotide
  Target: SCNA; (+) strand; PAM type: NNNNGHTT; PAM sequence: TTCAGTTT
tctaaactgaagcttagaac

SEQ ID NO: 12773 - DNA, 20 bp, Artificial Sequence
  Description of Artificial Sequence: Synthetic oligonucleotide
  Target: SCNA; (+) strand; PAM type: NNNNGHTT; PAM sequence: AGGAGTTT
caggcggatcacttgaggtc

SEQ ID NO: 12774 - DNA, 20 bp, Artificial Sequence
  Description of Artificial Sequence: Synthetic oligonucleotide
  Target: SCNA; (+) strand; PAM type: NNNNGHTT; PAM sequence: AATCGCTT
tcaggtggctgaggcagaag

SEQ ID NO: 12775 - DNA, 20 bp, Artificial Sequence
  Description of Artificial Sequence: Synthetic oligonucleotide
  Target: SCNA; (+) strand; PAM type: NNNNGHTT; PAM sequence: TGGAGATT
aatcgcttgaacctgggtgg

SEQ ID NO: 12776 - DNA, 20 bp, Artificial Sequence
  Description of Artificial Sequence: Synthetic oligonucleotide
  Target: SCNA; (+) strand; PAM type: NNNNGHTT; PAM sequence: AACAGATT
atgagttaacaaattaatga

SEQ ID NO: 12777 - DNA, 20 bp, Artificial Sequence
  Description of Artificial Sequence: Synthetic oligonucleotide
  Target: SCNA; (+) strand; PAM type: NNNNGHTT; PAM sequence: TATTGCTT
ctatttctggcaggtaagac

SEQ ID NO: 12778 - DNA, 20 bp, Artificial Sequence
  Description of Artificial Sequence: Synthetic oligonucleotide
  Target: SCNA; (+) strand; PAM type: NNNNGHTT; PAM sequence: AGGTGTTT
tcagtcattaaaagaaaata

SEQ ID NO: 12779 - DNA, 20 bp, Artificial Sequence
  Description of Artificial Sequence: Synthetic oligonucleotide
  Target: SCNA; (+) strand; PAM type: NNNNGHTT; PAM sequence: TCTTGCTT
cttaatacaaagcaaagcat

SEQ ID NO: 12780 - DNA, 20 bp, Artificial Sequence
  Description of Artificial Sequence: Synthetic oligonucleotide
  Target: SCNA; (+) strand; PAM type: NNNNGHTT; PAM sequence: GAGGGTTT
ttgagagctcaatttctaag

SEQ ID NO: 12781 - DNA, 20 bp, Artificial Sequence
  Description of Artificial Sequence: Synthetic oligonucleotide
  Target: SCNA; (+) strand; PAM type: NNNNGHTT; PAM sequence: AGGAGATT
ctctatcttgaggcacacca

SEQ ID NO: 12782 - DNA, 20 bp, Artificial Sequence
  Description of Artificial Sequence: Synthetic oligonucleotide
  Target: SCNA; (+) strand; PAM type: NNNNGHTT; PAM sequence: TTGAGTTT
cttgaggcacaccaaggaga

SEQ ID NO: 12783 - DNA, 20 bp, Artificial Sequence
  Description of Artificial Sequence: Synthetic oligonucleotide
  Target: SCNA; (+) strand; PAM type: NNNNGHTT; PAM sequence: ACCAGTTT
acaccaaggagattgagttt

SEQ ID NO: 12784 - DNA, 20 bp, Artificial Sequence
  Description of Artificial Sequence: Synthetic oligonucleotide
  Target: SCNA; (+) strand; PAM type: NNNNGHTT; PAM sequence: GGAAGATT
aagtcagggagagggctgat

SEQ ID NO: 12785 - DNA, 20 bp, Artificial Sequence
  Description of Artificial Sequence: Synthetic oligonucleotide
  Target: SCNA; (+) strand; PAM type: NNNNGHTT; PAM sequence: AAAAGATT
agggctgatggaagattttt

SEQ ID NO: 12786 - DNA, 20 bp, Artificial Sequence
  Description of Artificial Sequence: Synthetic oligonucleotide
  Target: SCNA; (+) strand; PAM type: NNNNGHTT; PAM sequence: GCTGGCTT
ttaaaagatcatgagggcaa

SEQ ID NO: 12787 - DNA, 20 bp, Artificial Sequence
  Description of Artificial Sequence: Synthetic oligonucleotide
  Target: SCNA; (+) strand; PAM type: NNNNGHTT; PAM sequence: TGTGGCTT
aacaaaacaaaatatttcca

SEQ ID NO: 12788 - DNA, 20 bp, Artificial Sequence
  Description of Artificial Sequence: Synthetic oligonucleotide
  Target: SCNA; (+) strand; PAM type: NNNNGHTT; PAM sequence: TGAAGTTT
cattatttgactatcagttg

SEQ ID NO: 12789 - DNA, 20 bp, Artificial Sequence
  Description of Artificial Sequence: Synthetic oligonucleotide
  Target: SCNA; (+) strand; PAM type: NNNNGHTT; PAM sequence: AAAAGATT
atcagttgtgaagtttagta

SEQ ID NO: 12790 - DNA, 20 bp, Artificial Sequence
  Description of Artificial Sequence: Synthetic oligonucleotide
  Target: SCNA; (+) strand; PAM type: NNNNGHTT; PAM sequence: GGTGGTTT
taaaaagattttcactaatg

SEQ ID NO: 12791 - DNA, 20 bp, Artificial Sequence
  Description of Artificial Sequence: Synthetic oligonucleotide
  Target: SCNA; (+) strand; PAM type: NNNNGHTT; PAM sequence: CAATGTTT
atggttcagcaaattttctc

SEQ ID NO: 12792 - DNA, 20 bp, Artificial Sequence
  Description of Artificial Sequence: Synthetic oligonucleotide
  Target: SCNA; (+) strand; PAM type: NNNNGHTT; PAM sequence: CAATGCTT
tgctactattttttctttgc

SEQ ID NO: 12793 - DNA, 20 bp, Artificial Sequence
  Description of Artificial Sequence: Synthetic oligonucleotide
  Target: SCNA; (+) strand; PAM type: NNNNGHTT; PAM sequence: ATACGTTT
atgcttaatacttattttga

SEQ ID NO: 12794 - DNA, 20 bp, Artificial Sequence
  Description of Artificial Sequence: Synthetic oligonucleotide
  Target: SCNA; (+) strand; PAM type: NNNNGHTT; PAM sequence: GTAGGATT
tcagtcctgttattctcact

SEQ ID NO: 12795 - DNA, 20 bp, Artificial Sequence
  Description of Artificial Sequence: Synthetic oligonucleotide
  Target: SCNA; (+) strand; PAM type: NNNNGHTT; PAM sequence: CAATGTTT
tccttcaactgtgaattcag

SEQ ID NO: 12796 - DNA, 20 bp, Artificial Sequence
  Description of Artificial Sequence: Synthetic oligonucleotide
  Target: SCNA; (+) strand; PAM type: NNNNGHTT; PAM sequence: CAGGGATT
ttcagcaatgttttgagttc

SEQ ID NO: 12797 - DNA, 20 bp, Artificial Sequence
  Description of Artificial Sequence: Synthetic oligonucleotide
  Target: SCNA; (+) strand; PAM type: NNNNGHTT; PAM sequence: GGGTGTTT
ataagaggtcaaattttcca

SEQ ID NO: 12798 - DNA, 20 bp, Artificial Sequence
  Description of Artificial Sequence: Synthetic oligonucleotide
  Target: SCNA; (+) strand; PAM type: NNNNGHTT; PAM sequence: AGAAGATT
gagaaaaagaaccactaaga

SEQ ID NO: 12799 - DNA, 20 bp, Artificial Sequence
  Description of Artificial Sequence: Synthetic oligonucleotide
  Target: SCNA; (+) strand; PAM type: NNNNGHTT; PAM sequence: GATTGCTT
aaaagaaccactaagaagaa

SEQ ID NO: 12800 - DNA, 20 bp, Artificial Sequence
  Description of Artificial Sequence: Synthetic oligonucleotide
  Target: SCNA; (+) strand; PAM type: NNNNGHTT; PAM sequence: ATCTGATT
acctgtaatgtacttctctg

SEQ ID NO: 12801 - DNA, 20 bp, Artificial Sequence
  Description of Artificial Sequence: Synthetic oligonucleotide
  Target: SCNA; (+) strand; PAM type: NNNNGHTT; PAM sequence: AGGTGCTT
ctaataaaaaaatacaaatc

SEQ ID NO: 12802 - DNA, 20 bp, Artificial Sequence
  Description of Artificial Sequence: Synthetic oligonucleotide
  Target: SCNA; (+) strand; PAM type: NNNNGHTT; PAM sequence: CACTGCTT
agatgctaaagttatattta

SEQ ID NO: 12803 - DNA, 20 bp, Artificial Sequence
  Description of Artificial Sequence: Synthetic oligonucleotide
  Target: SCNA; (+) strand; PAM type: NNNNGHTT; PAM sequence: TAAAGCTT
gcttcataaatgtaaggtgt

SEQ ID NO: 12804 - DNA, 20 bp, Artificial Sequence
  Description of Artificial Sequence: Synthetic oligonucleotide
  Target: SCNA; (+) strand; PAM type: NNNNGHTT; PAM sequence: AATTGATT
gagacaagaagtaaactgat

SEQ ID NO: 12805 - DNA, 20 bp, Artificial Sequence
  Description of Artificial Sequence: Synthetic oligonucleotide
  Target: SCNA; (+) strand; PAM type: NNNNGHTT; PAM sequence: CTCAGTTT
ataataaataaaccgagtga

SEQ ID NO: 12806 - DNA, 20 bp, Artificial Sequence
  Description of Artificial Sequence: Synthetic oligonucleotide
  Target: SCNA; (+) strand; PAM type: NNNNGHTT; PAM sequence: CGTTGATT
tacctttcctaagaattctt

SEQ ID NO: 12807 - DNA, 20 bp, Artificial Sequence
  Description of Artificial Sequence: Synthetic oligonucleotide
  Target: SCNA; (+) strand; PAM type: NNNNGHTT; PAM sequence: CCATGTTT
actgagttcagcataaactg

SEQ ID NO: 12808 - DNA, 20 bp, Artificial Sequence
  Description of Artificial Sequence: Synthetic oligonucleotide
  Target: SCNA; (+) strand; PAM type: NNNNGHTT; PAM sequence: AGATGATT
gcataaactgccatgttttg

SEQ ID NO: 12809 - DNA, 20 bp, Artificial Sequence
  Description of Artificial Sequence: Synthetic oligonucleotide
  Target: SCNA; (+) strand; PAM type: NNNNGHTT; PAM sequence: ACATGCTT
tctaagagcaggacaacatc

SEQ ID NO: 12810 - DNA, 20 bp, Artificial Sequence
  Description of Artificial Sequence: Synthetic oligonucleotide
  Target: SCNA; (+) strand; PAM type: NNNNGHTT; PAM sequence: AATTGTTT
aaaaaccactaactccattt

SEQ ID NO: 12811 - DNA, 20 bp, Artificial Sequence
  Description of Artificial Sequence: Synthetic oligonucleotide
  Target: SCNA; (+) strand; PAM type: NNNNGHTT; PAM sequence: TTAGGATT
tcagtgatacctagccaaaa

SEQ ID NO: 12812 - DNA, 20 bp, Artificial Sequence
  Description of Artificial Sequence: Synthetic oligonucleotide
  Target: SCNA; (+) strand; PAM type: NNNNGHTT; PAM sequence: TCAAGTTT
ctaaactgttataccacatt

SEQ ID NO: 12813 - DNA, 20 bp, Artificial Sequence
  Description of Artificial Sequence: Synthetic oligonucleotide
  Target: SCNA; (+) strand; PAM type: NNNNGHTT; PAM sequence: TGTTGATT
tgcatggctatcacctgagg

SEQ ID NO: 12814 - DNA, 20 bp, Artificial Sequence
  Description of Artificial Sequence: Synthetic oligonucleotide
  Target: SCNA; (+) strand; PAM type: NNNNGHTT; PAM sequence: CTAGGCTT
ttgattgtaaattcacattc

SEQ ID NO: 12815 - DNA, 20 bp, Artificial Sequence
  Description of Artificial Sequence: Synthetic oligonucleotide
  Target: SCNA; (+) strand; PAM type: NNNNGHTT; PAM sequence: AGGTGATT
attttaaaaataaggtcttc

SEQ ID NO: 12816 - DNA, 20 bp, Artificial Sequence
  Description of Artificial Sequence: Synthetic oligonucleotide
  Target: SCNA; (+) strand; PAM type: NNNNGHTT; PAM sequence: AACTGCTT
attctcatgcatctaaagat

SEQ ID NO: 12817 - DNA, 20 bp, Artificial Sequence
  Description of Artificial Sequence: Synthetic oligonucleotide
  Target: SCNA; (+) strand; PAM type: NNNNGHTT; PAM sequence: TGAGGATT
gaaacccaaagagggacact

SEQ ID NO: 12818 - DNA, 20 bp, Artificial Sequence
  Description of Artificial Sequence: Synthetic oligonucleotide
  Target: SCNA; (+) strand; PAM type: NNNNGHTT; PAM sequence: CAGAGATT
tttcaatatatcttcttttg

SEQ ID NO: 12819 - DNA, 20 bp, Artificial Sequence
  Description of Artificial Sequence: Synthetic oligonucleotide
  Target: SCNA; (+) strand; PAM type: NNNNGHTT; PAM sequence: TGTTGTTT
ttgcagagattaatagtgaa

SEQ ID NO: 12820 - DNA, 20 bp, Artificial Sequence
  Description of Artificial Sequence: Synthetic oligonucleotide
  Target: SCNA; (+) strand; PAM type: NNNNGHTT; PAM sequence: TGCTGTTT
atagtgaatgttgttttatc

SEQ ID NO: 12821 - DNA, 20 bp, Artificial Sequence
  Description of Artificial Sequence: Synthetic oligonucleotide
  Target: SCNA; (+) strand; PAM type: NNNNGHTT; PAM sequence: AAAGGCTT
acatcttcttttactgacaa

SEQ ID NO: 12822 - DNA, 20 bp, Artificial Sequence
  Description of Artificial Sequence: Synthetic oligonucleotide
  Target: SCNA; (+) strand; PAM type: NNNNGHTT; PAM sequence: GGCAGCTT
ttctctggagaaaataaaaa

SEQ ID NO: 12823 - DNA, 20 bp, Artificial Sequence
  Description of Artificial Sequence: Synthetic oligonucleotide
  Target: SCNA; (+) strand; PAM type: NNNNGHTT; PAM sequence: GAGTGATT
atccatatgactctaagaca

SEQ ID NO: 12824 - DNA, 20 bp, Artificial Sequence
  Description of Artificial Sequence: Synthetic oligonucleotide
  Target: SCNA; (+) strand; PAM type: NNNNGHTT; PAM sequence: AGGGGCTT
agtccttactttcttgcaaa

SEQ ID NO: 12825 - DNA, 20 bp, Artificial Sequence
  Description of Artificial Sequence: Synthetic oligonucleotide
  Target: SCNA; (+) strand; PAM type: NNNNGHTT; PAM sequence: GGATGCTT
tattactggtgttatcaatg

SEQ ID NO: 12826 - DNA, 20 bp, Artificial Sequence
  Description of Artificial Sequence: Synthetic oligonucleotide
  Target: SCNA; (+) strand; PAM type: NNNNGHTT; PAM sequence: AGCAGCTT
gttatcaatgggatgcttgc

SEQ ID NO: 12827 - DNA, 20 bp, Artificial Sequence
  Description of Artificial Sequence: Synthetic oligonucleotide
  Target: SCNA; (+) strand; PAM type: NNNNGHTT; PAM sequence: CCATGCTT
atgtctgtatgtgtgggggc

SEQ ID NO: 12828 - DNA, 20 bp, Artificial Sequence
  Description of Artificial Sequence: Synthetic oligonucleotide
  Target: SCNA; (+) strand; PAM type: NNNNGHTT; PAM sequence: CAATGTTT
tgtgttatttatgttgaaac

SEQ ID NO: 12829 - DNA, 20 bp, Artificial Sequence
  Description of Artificial Sequence: Synthetic oligonucleotide
  Target: SCNA; (+) strand; PAM type: NNNNGHTT; PAM sequence: AAAAGTTT
tttgtattttctaaaccatt

SEQ ID NO: 12830 - DNA, 20 bp, Artificial Sequence
  Description of Artificial Sequence: Synthetic oligonucleotide
  Target: SCNA; (+) strand; PAM type: NNNNGHTT; PAM sequence: GTATGATT
aggggtaaactttcataact

SEQ ID NO: 12831 - DNA, 20 bp, Artificial Sequence
  Description of Artificial Sequence: Synthetic oligonucleotide
  Target: SCNA; (+) strand; PAM type: NNNNGHTT; PAM sequence: CAAGGTTT
acacaagtacaagaaatatt

SEQ ID NO: 12832 - DNA, 20 bp, Artificial Sequence
  Description of Artificial Sequence: Synthetic oligonucleotide
  Target: SCNA; (+) strand; PAM type: NNNNGHTT; PAM sequence: CTGGGATT
tgcctcagcctccgtagtag

SEQ ID NO: 12833 - DNA, 20 bp, Artificial Sequence
  Description of Artificial Sequence: Synthetic oligonucleotide
  Target: SCNA; (+) strand; PAM type: NNNNGHTT; PAM sequence: ATGGGTTT
ttttgtatttttggtagaga

SEQ ID NO: 12834 - DNA, 20 bp, Artificial Sequence
  Description of Artificial Sequence: Synthetic oligonucleotide
  Target: SCNA; (+) strand; PAM type: NNNNGHTT; PAM sequence: GCTGGATT
ccgccttggcctcccaaagt

SEQ ID NO: 12835 - DNA, 20 bp, Artificial Sequence
  Description of Artificial Sequence: Synthetic oligonucleotide
  Target: SCNA; (+) strand; PAM type: NNNNGHTT; PAM sequence: TCAAGTTT
ccaccgcgcctggccaatat

SEQ ID NO: 12836 - DNA, 20 bp, Artificial Sequence
  Description of Artificial Sequence: Synthetic oligonucleotide
  Target: SCNA; (+) strand; PAM type: NNNNGHTT; PAM sequence: TCTGGATT
ctcataagcctctagttctc

SEQ ID NO: 12837 - DNA, 20 bp, Artificial Sequence
  Description of Artificial Sequence: Synthetic oligonucleotide
  Target: SCNA; (+) strand; PAM type: NNNNGHTT; PAM sequence: GAGAGATT
aaaaaactgaatacaatgga

SEQ ID NO: 12838 - DNA, 20 bp, Artificial Sequence
  Description of Artificial Sequence: Synthetic oligonucleotide
  Target: SCNA; (+) strand; PAM type: NNNNGHTT; PAM sequence: ATATGCTT
acacaaaagcagatatatat

SEQ ID NO: 12839 - DNA, 20 bp, Artificial Sequence
  Description of Artificial Sequence: Synthetic oligonucleotide
  Target: SCNA; (+) strand; PAM type: NNNNGHTT; PAM sequence: GAATGCTT
atgctttcttgcaggtgata

SEQ ID NO: 12840 - DNA, 20 bp, Artificial Sequence
  Description of Artificial Sequence: Synthetic oligonucleotide
  Target: SCNA; (+) strand; PAM type: NNNNGHTT; PAM sequence: GGTGGTTT
tgatagaatgcttttttgga

SEQ ID NO: 12841 - DNA, 20 bp, Artificial Sequence
  Description of Artificial Sequence: Synthetic oligonucleotide
  Target: SCNA; (+) strand; PAM type: NNNNGHTT; PAM sequence: AAAAGTTT
tgtctctattgttatatttt

SEQ ID NO: 12842 - DNA, 20 bp, Artificial Sequence
  Description of Artificial Sequence: Synthetic oligonucleotide
  Target: SCNA; (+) strand; PAM type: NNNNGHTT; PAM sequence: TTTTGTTT
ttatattttaaaagtttctt

SEQ ID NO: 12843 - DNA, 20 bp, Artificial Sequence
  Description of Artificial Sequence: Synthetic oligonucleotide
  Target: SCNA; (+) strand; PAM type: NNNNGHTT; PAM sequence: GTTTGTTT
attttaaaagtttctttttt

SEQ ID NO: 12844 - DNA, 20 bp, Artificial Sequence
  Description of Artificial Sequence: Synthetic oligonucleotide
  Target: SCNA; (+) strand; PAM type: NNNNGHTT; PAM sequence: GTTTGTTT
taaaagtttcttttttgttt

SEQ ID NO: 12845 - DNA, 20 bp, Artificial Sequence
  Description of Artificial Sequence: Synthetic oligonucleotide
  Target: SCNA; (+) strand; PAM type: NNNNGHTT; PAM sequence: GTTTGTTT
agtttcttttttgtttgttt

SEQ ID NO: 12846 - DNA, 20 bp, Artificial Sequence
  Description of Artificial Sequence: Synthetic oligonucleotide
  Target: SCNA; (+) strand; PAM type: NNNNGHTT; PAM sequence: CCAGGATT
tgcctcagcctccagagtag

SEQ ID NO: 12847 - DNA, 20 bp, Artificial Sequence
  Description of Artificial Sequence: Synthetic oligonucleotide
  Target: SCNA; (+) strand; PAM type: NNNNGHTT; PAM sequence: CAAGGTTT
ttttgtatttttagtagaga

SEQ ID NO: 12848 - DNA, 20 bp, Artificial Sequence
  Description of Artificial Sequence: Synthetic oligonucleotide
  Target: SCNA; (+) strand; PAM type: NNNNGHTT; PAM sequence: GCAGGCTT
gcgtcccaaagtgcaagact

SEQ ID NO: 12849 - DNA, 20 bp, Artificial Sequence
  Description of Artificial Sequence: Synthetic oligonucleotide
  Target: SCNA; (+) strand; PAM type: NNNNGHTT; PAM sequence: AAAAGTTT
ttgagccaccacgctccacc

SEQ ID NO: 12850 - DNA, 20 bp, Artificial Sequence
  Description of Artificial Sequence: Synthetic oligonucleotide
  Target: SCNA; (+) strand; PAM type: NNNNGHTT; PAM sequence: ACCAGATT
gaagttatctaagataaaac

SEQ ID NO: 12851 - DNA, 20 bp, Artificial Sequence
  Description of Artificial Sequence: Synthetic oligonucleotide
  Target: SCNA; (+) strand; PAM type: NNNNGHTT; PAM sequence: GGCTGCTT
tatatgtgcagatgtgcagt

SEQ ID NO: 12852 - DNA, 20 bp, Artificial Sequence
  Description of Artificial Sequence: Synthetic oligonucleotide
  Target: SCNA; (+) strand; PAM type: NNNNGHTT; PAM sequence: AAGAGCTT
gctgctttatttcccttttc

SEQ ID NO: 12853 - DNA, 20 bp, Artificial Sequence
  Description of Artificial Sequence: Synthetic oligonucleotide
  Target: SCNA; (+) strand; PAM type: NNNNGHTT; PAM sequence: AAGAGATT
ccacttgacatacaaaccca

SEQ ID NO: 12854 - DNA, 20 bp, Artificial Sequence
  Description of Artificial Sequence: Synthetic oligonucleotide
  Target: SCNA; (+) strand; PAM type: NNNNGHTT; PAM sequence: ACTAGATT
ctattattaatcaaatattt

SEQ ID NO: 12855 - DNA, 20 bp, Artificial Sequence
  Description of Artificial Sequence: Synthetic oligonucleotide
  Target: SCNA; (+) strand; PAM type: NNNNGHTT; PAM sequence: GACTGTTT
attctctttagaatttcttt

SEQ ID NO: 12856 - DNA, 20 bp, Artificial Sequence
  Description of Artificial Sequence: Synthetic oligonucleotide
  Target: SCNA; (+) strand; PAM type: NNNNGHTT; PAM sequence: ACCAGCTT
tattcctttaaaccagtctt

SEQ ID NO: 12857 - DNA, 20 bp, Artificial Sequence
  Description of Artificial Sequence: Synthetic oligonucleotide
  Target: SCNA; (+) strand; PAM type: NNNNGHTT; PAM sequence: ATGTGTTT
agttgaataaaatctttgaa

SEQ ID NO: 12858 - DNA, 20 bp, Artificial Sequence
  Description of Artificial Sequence: Synthetic oligonucleotide
  Target: SCNA; (+) strand; PAM type: NNNNGHTT; PAM sequence: TTATGTTT
ataaaatctttgaaatgtgt

SEQ ID NO: 12859 - DNA, 20 bp, Artificial Sequence
  Description of Artificial Sequence: Synthetic oligonucleotide
  Target: SCNA; (+) strand; PAM type: NNNNGHTT; PAM sequence: TTTAGTTT
actgaataattttttcctct

SEQ ID NO: 12860 - DNA, 20 bp, Artificial Sequence
  Description of Artificial Sequence: Synthetic oligonucleotide
  Target: SCNA; (+) strand; PAM type: NNNNGHTT; PAM sequence: AAATGCTT
aaattattttaaaactcaga

SEQ ID NO: 12861 - DNA, 20 bp, Artificial Sequence
  Description of Artificial Sequence: Synthetic oligonucleotide
  Target: SCNA; (+) strand; PAM type: NNNNGHTT; PAM sequence: AAAAGATT
tcctgaataggagttcaatg

SEQ ID NO: 12862 - DNA, 20 bp, Artificial Sequence
  Description of Artificial Sequence: Synthetic oligonucleotide
  Target: SCNA; (+) strand; PAM type: NNNNGHTT; PAM sequence: GGTAGATT
ggagttcaatgaaaagatta

SEQ ID NO: 12863 - DNA, 20 bp, Artificial Sequence
  Description of Artificial Sequence: Synthetic oligonucleotide
  Target: SCNA; (+) strand; PAM type: NNNNGHTT; PAM sequence: TACTGATT
taaggtacttttataaatta

SEQ ID NO: 12864 - DNA, 20 bp, Artificial Sequence
  Description of Artificial Sequence: Synthetic oligonucleotide
  Target: SCNA; (+) strand; PAM type: NNNNGHTT; PAM sequence: AAGAGCTT
gctgctgtatttcccttttc

SEQ ID NO: 12865 - DNA, 20 bp, Artificial Sequence
  Description of Artificial Sequence: Synthetic oligonucleotide
  Target: SCNA; (+) strand; PAM type: NNNNGHTT; PAM sequence: AAGAGATT
ccacttgacatacaaaccca

SEQ ID NO: 12866 - DNA, 20 bp, Artificial Sequence
  Description of Artificial Sequence: Synthetic oligonucleotide
  Target: SCNA; (+) strand; PAM type: NNNNGHTT; PAM sequence: AATTGTTT
tattgctcaaagccaaaaga

SEQ ID NO: 12867 - DNA, 20 bp, Artificial Sequence
  Description of Artificial Sequence: Synthetic oligonucleotide
  Target: SCNA; (+) strand; PAM type: NNNNGHTT; PAM sequence: AGAGGCTT
ggcaattatctgttatctta

SEQ ID NO: 12868 - DNA, 20 bp, Artificial Sequence
  Description of Artificial Sequence: Synthetic oligonucleotide
  Target: SCNA; (+) strand; PAM type: NNNNGHTT; PAM sequence: AATAGTTT
ggatctaaggaccctcaaca

SEQ ID NO: 12869 - DNA, 20 bp, Artificial Sequence
  Description of Artificial Sequence: Synthetic oligonucleotide
  Target: SCNA; (+) strand; PAM type: NNNNGHTT; PAM sequence: ATGGGATT
cttatttaggcacaaatagg

SEQ ID NO: 12870 - DNA, 20 bp, Artificial Sequence
  Description of Artificial Sequence: Synthetic oligonucleotide
  Target: SCNA; (+) strand; PAM type: NNNNGHTT; PAM sequence: ATAGGCTT
attttatataatacagttat

SEQ ID NO: 12871 - DNA, 20 bp, Artificial Sequence
  Description of Artificial Sequence: Synthetic oligonucleotide
  Target: SCNA; (+) strand; PAM type: NNNNGHTT; PAM sequence: GTCAGATT
gcttttttaaacaaaataca

SEQ ID NO: 12872 - DNA, 20 bp, Artificial Sequence
  Description of Artificial Sequence: Synthetic oligonucleotide
  Target: SCNA; (+) strand; PAM type: NNNNGHTT; PAM sequence: CCTTGTTT
cacaatttaaattcaagact

SEQ ID NO: 12873 - DNA, 20 bp, Artificial Sequence
  Description of Artificial Sequence: Synthetic oligonucleotide
  Target: SCNA; (+) strand; PAM type: NNNNGHTT; PAM sequence: AAATGTTT
ttgaagacatctatgaaagc

SEQ ID NO: 12874 - DNA, 20 bp, Artificial Sequence
  Description of Artificial Sequence: Synthetic oligonucleotide
  Target: SCNA; (+) strand; PAM type: NNNNGHTT; PAM sequence: TTCCGATT
cttggctgaatctgagtcca

SEQ ID NO: 12875 - DNA, 20 bp, Artificial Sequence
  Description of Artificial Sequence: Synthetic oligonucleotide
  Target: SCNA; (+) strand; PAM type: NNNNGHTT; PAM sequence: AGCAGATT
aatctgagtccattccgatt

SEQ ID NO: 12876 - DNA, 20 bp, Artificial Sequence
  Description of Artificial Sequence: Synthetic oligonucleotide
  Target: SCNA; (+) strand; PAM type: NNNNGHTT; PAM sequence: AGATGTTT
cattaactcaataggtattc

SEQ ID NO: 12877 - DNA, 20 bp, Artificial Sequence
  Description of Artificial Sequence: Synthetic oligonucleotide
  Target: SCNA; (+) strand; PAM type: NNNNGHTT; PAM sequence: TCAAGATT
ccaatattccccaataaact

SEQ ID NO: 12878 - DNA, 20 bp, Artificial Sequence
  Description of Artificial Sequence: Synthetic oligonucleotide
  Target: SCNA; (+) strand; PAM type: NNNNGHTT; PAM sequence: TTTGGTTT
ttattattattattattatt

SEQ ID NO: 12879 - DNA, 20 bp, Artificial Sequence
  Description of Artificial Sequence: Synthetic oligonucleotide
  Target: SCNA; (+) strand; PAM type: NNNNGHTT; PAM sequence: GTTTGTTT
tattattattattatttttg

SEQ ID NO: 12880 - DNA, 20 bp, Artificial Sequence
  Description of Artificial Sequence: Synthetic oligonucleotide
  Target: SCNA; (+) strand; PAM type: NNNNGHTT; PAM sequence: AATGGCTT
atctccttcttacaaaatcc

SEQ ID NO: 12881 - DNA, 20 bp, Artificial Sequence
  Description of Artificial Sequence: Synthetic oligonucleotide
  Target: SCNA; (+) strand; PAM type: NNNNGHTT; PAM sequence: TATAGCTT
ataatatgcaaatttcttac

SEQ ID NO: 12882 - DNA, 20 bp, Artificial Sequence
  Description of Artificial Sequence: Synthetic oligonucleotide
  Target: SCNA; (+) strand; PAM type: NNNNGHTT; PAM sequence: GCTAGATT
tcttttatgtcataaaatat

SEQ ID NO: 12883 - DNA, 20 bp, Artificial Sequence
  Description of Artificial Sequence: Synthetic oligonucleotide
  Target: SCNA; (+) strand; PAM type: NNNNGHTT; PAM sequence: ACGAGTTT
cacccttaaagccttcatat

SEQ ID NO: 12884 - DNA, 20 bp, Artificial Sequence
  Description of Artificial Sequence: Synthetic oligonucleotide
  Target: SCNA; (+) strand; PAM type: NNNNGHTT; PAM sequence: GCTGGCTT
cctgtataaactttccatga

SEQ ID NO: 12885 - DNA, 20 bp, Artificial Sequence
  Description of Artificial Sequence: Synthetic oligonucleotide
  Target: SCNA; (+) strand; PAM type: NNNNGHTT; PAM sequence: AATGGATT
ctgactgaacccaaatggct

SEQ ID NO: 12886 - DNA, 20 bp, Artificial Sequence
  Description of Artificial Sequence: Synthetic oligonucleotide
  Target: SCNA; (+) strand; PAM type: NNNNGHTT; PAM sequence: TGATGCTT
gttacatgctctctaattta

SEQ ID NO: 12887 - DNA, 20 bp, Artificial Sequence
  Description of Artificial Sequence: Synthetic oligonucleotide
  Target: SCNA; (+) strand; PAM type: NNNNGHTT; PAM sequence: CTTTGCTT
atgctctctaatttatgatg

SEQ ID NO: 12888 - DNA, 20 bp, Artificial Sequence
  Description of Artificial Sequence: Synthetic oligonucleotide
  Target: SCNA; (+) strand; PAM type: NNNNGHTT; PAM sequence: GTCTGTTT
ggggaaaatgagaggtggga

SEQ ID NO: 12889 - DNA, 20 bp, Artificial Sequence
  Description of Artificial Sequence: Synthetic oligonucleotide
  Target: SCNA; (+) strand; PAM type: NNNNGHTT; PAM sequence: AAACGCTT
gagagcactgcagtaactgc

SEQ ID NO: 12890 - DNA, 20 bp, Artificial Sequence
  Description of Artificial Sequence: Synthetic oligonucleotide
  Target: SCNA; (+) strand; PAM type: NNNNGHTT; PAM sequence: TTCTGTTT
actgcagtaactgcaaacgc

SEQ ID NO: 12891 - DNA, 20 bp, Artificial Sequence
  Description of Artificial Sequence: Synthetic oligonucleotide
  Target: SCNA; (+) strand; PAM type: NNNNGHTT; PAM sequence: TTTTGATT
agtaactgcaaacgcttctg

SEQ ID NO: 12892 - DNA, 20 bp, Artificial Sequence
  Description of Artificial Sequence: Synthetic oligonucleotide
  Target: SCNA; (+) strand; PAM type: NNNNGHTT; PAM sequence: GCATGATT
actggcaagggtagcagcag

SEQ ID NO: 12893 - DNA, 20 bp, Artificial Sequence
  Description of Artificial Sequence: Synthetic oligonucleotide
  Target: SCNA; (+) strand; PAM type: NNNNGHTT; PAM sequence: AGCAGATT
tcccttagtaattttaaagc

SEQ ID NO: 12894 - DNA, 20 bp, Artificial Sequence
  Description of Artificial Sequence: Synthetic oligonucleotide
  Target: SCNA; (+) strand; PAM type: NNNNGHTT; PAM sequence: AGCAGATT
aaaccaagcagatgaaagtg

SEQ ID NO: 12895 - DNA, 20 bp, Artificial Sequence
  Description of Artificial Sequence: Synthetic oligonucleotide
  Target: SCNA; (+) strand; PAM type: NNNNGHTT; PAM sequence: GGAGGCTT
atcactggagagactgtgaa

SEQ ID NO: 12896 - DNA, 20 bp, Artificial Sequence
  Description of Artificial Sequence: Synthetic oligonucleotide
  Target: SCNA; (+) strand; PAM type: NNNNGHTT; PAM sequence: TCGTGTTT
aagttagtgatggagggaaa

SEQ ID NO: 12897 - DNA, 20 bp, Artificial Sequence
  Description of Artificial Sequence: Synthetic oligonucleotide
  Target: SCNA; (+) strand; PAM type: NNNNGHTT; PAM sequence: TAGTGCTT
tgtcttgtcactcacccacg

SEQ ID NO: 12898 - DNA, 20 bp, Artificial Sequence
  Description of Artificial Sequence: Synthetic oligonucleotide
  Target: SCNA; (+) strand; PAM type: NNNNGHTT; PAM sequence: GTCTGTTT
tggtatcgtcatggaatttg

SEQ ID NO: 12899 - DNA, 20 bp, Artificial Sequence
  Description of Artificial Sequence: Synthetic oligonucleotide
  Target: SCNA; (+) strand; PAM type: NNNNGHTT; PAM sequence: ACTAGCTT
ggaatttggtctgttttcta

SEQ ID NO: 12900 - DNA, 20 bp, Artificial Sequence
  Description of Artificial Sequence: Synthetic oligonucleotide
  Target: SCNA; (+) strand; PAM type: NNNNGHTT; PAM sequence: AACTGATT
tttcaaccgtgaaaaattcc

SEQ ID NO: 12901 - DNA, 20 bp, Artificial Sequence
  Description of Artificial Sequence: Synthetic oligonucleotide
  Target: SCNA; (+) strand; PAM type: NNNNGHTT; PAM sequence: ATCTGTTT
tatgatgctgtcagtacaac

SEQ ID NO: 12902 - DNA, 20 bp, Artificial Sequence
  Description of Artificial Sequence: Synthetic oligonucleotide
  Target: SCNA; (+) strand; PAM type: NNNNGHTT; PAM sequence: TAGAGTTT
gatacaactgagaaggcagg

SEQ ID NO: 12903 - DNA, 20 bp, Artificial Sequence
  Description of Artificial Sequence: Synthetic oligonucleotide
  Target: SCNA; (+) strand; PAM type: NNNNGHTT; PAM sequence: CTAGGTTT
gtagagtttttggtcagtgg

SEQ ID NO: 12904 - DNA, 20 bp, Artificial Sequence
  Description of Artificial Sequence: Synthetic oligonucleotide
  Target: SCNA; (+) strand; PAM type: NNNNGHTT; PAM sequence: AACAGATT
aatatgaccacaattttttt

SEQ ID NO: 12905 - DNA, 20 bp, Artificial Sequence
  Description of Artificial Sequence: Synthetic oligonucleotide
  Target: SCNA; (+) strand; PAM type: NNNNGHTT; PAM sequence: TGCTGTTT
gtaactgaaatatgacaaat

SEQ ID NO: 12906 - DNA, 20 bp, Artificial Sequence
  Description of Artificial Sequence: Synthetic oligonucleotide
  Target: SCNA; (+) strand; PAM type: NNNNGHTT; PAM sequence: TGAGGATT
acaaattgctgttttaatca

SEQ ID NO: 12907 - DNA, 20 bp, Artificial Sequence
  Description of Artificial Sequence: Synthetic oligonucleotide
  Target: SCNA; (+) strand; PAM type: NNNNGHTT; PAM sequence: ACATGTTT
atttatatttaaatcacaca

SEQ ID NO: 12908 - DNA, 20 bp, Artificial Sequence
  Description of Artificial Sequence: Synthetic oligonucleotide
  Target: SCNA; (+) strand; PAM type: NNNNGHTT; PAM sequence: AAATGTTT
catgttttatcatgaataat

SEQ ID NO: 12909 - DNA, 20 bp, Artificial Sequence
  Description of Artificial Sequence: Synthetic oligonucleotide
  Target: SCNA; (+) strand; PAM type: NNNNGHTT; PAM sequence: TAAAGTTT
tcatgaataataaatgtttt

SEQ ID NO: 12910 - DNA, 20 bp, Artificial Sequence
  Description of Artificial Sequence: Synthetic oligonucleotide
  Target: SCNA; (+) strand; PAM type: NNNNGHTT; PAM sequence: ACATGATT
taccttgtgggtattcctga

SEQ ID NO: 12911 - DNA, 20 bp, Artificial Sequence
  Description of Artificial Sequence: Synthetic oligonucleotide
  Target: SCNA; (+) strand; PAM type: NNNNGHTT; PAM sequence: TTAGGATT
gtgggtattcctgaacatga

SEQ ID NO: 12912 - DNA, 20 bp, Artificial Sequence
  Description of Artificial Sequence: Synthetic oligonucleotide
  Target: SCNA; (+) strand; PAM type: NNNNGHTT; PAM sequence: ATAAGTTT
aatcaaaatgtcaaggctat

SEQ ID NO: 12913 - DNA, 20 bp, Artificial Sequence
  Description of Artificial Sequence: Synthetic oligonucleotide
  Target: SCNA; (+) strand; PAM type: NNNNGHTT; PAM sequence: CTAAGTTT
atcaagtgctaatttagcat

SEQ ID NO: 12914 - DNA, 20 bp, Artificial Sequence
  Description of Artificial Sequence: Synthetic oligonucleotide
  Target: SCNA; (+) strand; PAM type: NNNNGHTT; PAM sequence: TCCAGATT
ctcctgtggtgagctccatt

SEQ ID NO: 12915 - DNA, 20 bp, Artificial Sequence
  Description of Artificial Sequence: Synthetic oligonucleotide
  Target: SCNA; (+) strand; PAM type: NNNNGHTT; PAM sequence: GTGGGTTT
ggccatattgtgtagcaaca

SEQ ID NO: 12916 - DNA, 20 bp, Artificial Sequence
  Description of Artificial Sequence: Synthetic oligonucleotide
  Target: SCNA; (+) strand; PAM type: NNNNGHTT; PAM sequence: ATAAGATT
gcaacagtgggtttcgaata

SEQ ID NO: 12917 - DNA, 20 bp, Artificial Sequence
  Description of Artificial Sequence: Synthetic oligonucleotide
  Target: SCNA; (+) strand; PAM type: NNNNGHTT; PAM sequence: TTGTGATT
ggagctcaggcaacttcaat

SEQ ID NO: 12918 - DNA, 20 bp, Artificial Sequence
  Description of Artificial Sequence: Synthetic oligonucleotide
  Target: SCNA; (+) strand; PAM type: NNNNGHTT; PAM sequence: TAATGATT
gcaacttcaatttgtgatta

SEQ ID NO: 12919 - DNA, 20 bp, Artificial Sequence
  Description of Artificial Sequence: Synthetic oligonucleotide
  Target: SCNA; (+) strand; PAM type: NNNNGHTT; PAM sequence: GAACGTTT
gaaattcattggaaaatctt

SEQ ID NO: 12920 - DNA, 20 bp, Artificial Sequence
  Description of Artificial Sequence: Synthetic oligonucleotide
  Target: SCNA; (+) strand; PAM type: NNNNGHTT; PAM sequence: ATATGTTT
aatgcaaatataaaataaca

SEQ ID NO: 12921 - DNA, 20 bp, Artificial Sequence
  Description of Artificial Sequence: Synthetic oligonucleotide
  Target: SCNA; (+) strand; PAM type: NNNNGHTT; PAM sequence: GTAAGATT
tatatctatatgaccattgg

SEQ ID NO: 12922 - DNA, 20 bp, Artificial Sequence
  Description of Artificial Sequence: Synthetic oligonucleotide
  Target: SCNA; (+) strand; PAM type: NNNNGHTT; PAM sequence: TTATGATT
tgaccattgggtaagatttt

SEQ ID NO: 12923 - DNA, 20 bp, Artificial Sequence
  Description of Artificial Sequence: Synthetic oligonucleotide
  Target: SCNA; (+) strand; PAM type: NNNNGHTT; PAM sequence: GACTGTTT
tattagtatgggaaaattgt

SEQ ID NO: 12924 - DNA, 20 bp, Artificial Sequence
  Description of Artificial Sequence: Synthetic oligonucleotide
  Target: SCNA; (+) strand; PAM type: NNNNGHTT; PAM sequence: TAATGATT
aatatattaagtaatatatt

SEQ ID NO: 12925 - DNA, 20 bp, Artificial Sequence
  Description of Artificial Sequence: Synthetic oligonucleotide
  Target: SCNA; (+) strand; PAM type: NNNNGHTT; PAM sequence: TTAAGATT
taagtaatatatttaatgat

SEQ ID NO: 12926 - DNA, 20 bp, Artificial Sequence
  Description of Artificial Sequence: Synthetic oligonucleotide
  Target: SCNA; (+) strand; PAM type: NNNNGHTT; PAM sequence: ATAAGTTT
aatgttactttgtcctgaac

SEQ ID NO: 12927 - DNA, 20 bp, Artificial Sequence
  Description of Artificial Sequence: Synthetic oligonucleotide
  Target: SCNA; (+) strand; PAM type: NNNNGHTT; PAM sequence: TTAAGTTT
aacataagttttaaaagaat

SEQ ID NO: 12928 - DNA, 20 bp, Artificial Sequence
  Description of Artificial Sequence: Synthetic oligonucleotide
  Target: SCNA; (+) strand; PAM type: NNNNGHTT; PAM sequence: AAATGCTT
ttaagtttaaatattctcct

SEQ ID NO: 12929 - DNA, 20 bp, Artificial Sequence
  Description of Artificial Sequence: Synthetic oligonucleotide
  Target: SCNA; (+) strand; PAM type: NNNNGHTT; PAM sequence: AAAAGATT
aggggggcagtaaagaagca

SEQ ID NO: 12930 - DNA, 20 bp, Artificial Sequence
  Description of Artificial Sequence: Synthetic oligonucleotide
  Target: SCNA; (+) strand; PAM type: NNNNGHTT; PAM sequence: GATGGATT
ctattttctaaacagtaaat

SEQ ID NO: 12931 - DNA, 20 bp, Artificial Sequence
  Description of Artificial Sequence: Synthetic oligonucleotide
  Target: SCNA; (+) strand; PAM type: NNNNGHTT; PAM sequence: CAGAGTTT
tgggatggaaatgtggaatg

SEQ ID NO: 12932 - DNA, 20 bp, Artificial Sequence
  Description of Artificial Sequence: Synthetic oligonucleotide
  Target: SCNA; (+) strand; PAM type: NNNNGHTT; PAM sequence: CTAGGCTT
aaatgaatgttattgcaaac

SEQ ID NO: 12933 - DNA, 20 bp, Artificial Sequence
  Description of Artificial Sequence: Synthetic oligonucleotide
  Target: SCNA; (+) strand; PAM type: NNNNGHTT; PAM sequence: ATTTGTTT
ataatatttgcaaattatgc

SEQ ID NO: 12934 - DNA, 20 bp, Artificial Sequence
  Description of Artificial Sequence: Synthetic oligonucleotide
  Target: SCNA; (+) strand; PAM type: NNNNGHTT; PAM sequence: TGGAGTTT
ttttttttttttttttgaga

SEQ ID NO: 12935 - DNA, 20 bp, Artificial Sequence
  Description of Artificial Sequence: Synthetic oligonucleotide
  Target: SCNA; (+) strand; PAM type: NNNNGHTT; PAM sequence: AAACGATT
aaccaccgcctcctgggttc

SEQ ID NO: 12936 - DNA, 20 bp, Artificial Sequence
  Description of Artificial Sequence: Synthetic oligonucleotide
  Target: SCNA; (+) strand; PAM type: NNNNGHTT; PAM sequence: TTGGGATT
tgcctcagcctccccagtag

SEQ ID NO: 12937 - DNA, 20 bp, Artificial Sequence
  Description of Artificial Sequence: Synthetic oligonucleotide
  Target: SCNA; (+) strand; PAM type: NNNNGHTT; PAM sequence: TGGAGTTT
ttttgtatttttagtagaga

SEQ ID NO: 12938 - DNA, 20 bp, Artificial Sequence
  Description of Artificial Sequence: Synthetic oligonucleotide
  Target: SCNA; (+) strand; PAM type: NNNNGHTT; PAM sequence: CTGGGATT
cgccttggcctcccaaagtg

SEQ ID NO: 12939 - DNA, 20 bp, Artificial Sequence
  Description of Artificial Sequence: Synthetic oligonucleotide
  Target: SCNA; (+) strand; PAM type: NNNNGHTT; PAM sequence: GCCTGTTT
ggcctgagccaccgcgcctg

SEQ ID NO: 12940 - DNA, 20 bp, Artificial Sequence
  Description of Artificial Sequence: Synthetic oligonucleotide
  Target: SCNA; (+) strand; PAM type: NNNNGHTT; PAM sequence: CCCCGTTT
agcattttcaatacattccc

SEQ ID NO: 12941 - DNA, 20 bp, Artificial Sequence
  Description of Artificial Sequence: Synthetic oligonucleotide
  Target: SCNA; (+) strand; PAM type: NNNNGHTT; PAM sequence: CATTGTTT
catgagataggtattttatg

SEQ ID NO: 12942 - DNA, 20 bp, Artificial Sequence
  Description of Artificial Sequence: Synthetic oligonucleotide
  Target: SCNA; (+) strand; PAM type: NNNNGHTT; PAM sequence: AATGGTTT
agtgttctaataatagacat

SEQ ID NO: 12943 - DNA, 20 bp, Artificial Sequence
  Description of Artificial Sequence: Synthetic oligonucleotide
  Target: SCNA; (+) strand; PAM type: NNNNGHTT; PAM sequence: GGGTGCTT
gtgaattacatccaactaaa

SEQ ID NO: 12944 - DNA, 20 bp, Artificial Sequence
  Description of Artificial Sequence: Synthetic oligonucleotide
  Target: SCNA; (+) strand; PAM type: NNNNGHTT; PAM sequence: AAAAGATT
agaaggtatatagtaccagg

SEQ ID NO: 12945 - DNA, 20 bp, Artificial Sequence
  Description of Artificial Sequence: Synthetic oligonucleotide
  Target: SCNA; (+) strand; PAM type: NNNNGHTT; PAM sequence: GGTTGATT
cacatttacaccagtggttc

SEQ ID NO: 12946 - DNA, 20 bp, Artificial Sequence
  Description of Artificial Sequence: Synthetic oligonucleotide
  Target: SCNA; (+) strand; PAM type: NNNNGHTT; PAM sequence: TGATGTTT
aatgaaaaagttaaaaatat

SEQ ID NO: 12947 - DNA, 20 bp, Artificial Sequence
  Description of Artificial Sequence: Synthetic oligonucleotide
  Target: SCNA; (+) strand; PAM type: NNNNGHTT; PAM sequence: CAGCGATT
aaaaatattgatgtttattt

SEQ ID NO: 12948 - DNA, 20 bp, Artificial Sequence
  Description of Artificial Sequence: Synthetic oligonucleotide
  Target: SCNA; (+) strand; PAM type: NNNNGHTT; PAM sequence: AATGGTTT
gtttatttcagcgattctga

SEQ ID NO: 12949 - DNA, 20 bp, Artificial Sequence
  Description of Artificial Sequence: Synthetic oligonucleotide
  Target: SCNA; (+) strand; PAM type: NNNNGHTT; PAM sequence: GTGTGCTT
caaatgtgtcactttttaag

SEQ ID NO: 12950 - DNA, 20 bp, Artificial Sequence
  Description of Artificial Sequence: Synthetic oligonucleotide
  Target: SCNA; (+) strand; PAM type: NNNNGHTT; PAM sequence: GCTTGATT
tgtgtcactttttaaggtgt

SEQ ID NO: 12951 - DNA, 20 bp, Artificial Sequence
  Description of Artificial Sequence: Synthetic oligonucleotide
  Target: SCNA; (+) strand; PAM type: NNNNGHTT; PAM sequence: GACAGCTT
ggtgtgcttgattcacagct

SEQ ID NO: 12952 - DNA, 20 bp, Artificial Sequence
  Description of Artificial Sequence: Synthetic oligonucleotide
  Target: SCNA; (+) strand; PAM type: NNNNGHTT; PAM sequence: CTTTGATT
gcttgattcacagctgacag

SEQ ID NO: 12953 - DNA, 20 bp, Artificial Sequence
  Description of Artificial Sequence: Synthetic oligonucleotide
  Target: SCNA; (+) strand; PAM type: NNNNGHTT; PAM sequence: AAAAGCTT
cagtgcaatgaattctaacc

SEQ ID NO: 12954 - DNA, 20 bp, Artificial Sequence
  Description of Artificial Sequence: Synthetic oligonucleotide
  Target: SCNA; (+) strand; PAM type: NNNNGHTT; PAM sequence: GGAAGATT
aagatgttcatgggaggaat

SEQ ID NO: 12955 - DNA, 20 bp, Artificial Sequence
  Description of Artificial Sequence: Synthetic oligonucleotide
  Target: SCNA; (+) strand; PAM type: NNNNGHTT; PAM sequence: TTGAGTTT
atgatagttattatacacaa

SEQ ID NO: 12956 - DNA, 20 bp, Artificial Sequence
  Description of Artificial Sequence: Synthetic oligonucleotide
  Target: SCNA; (+) strand; PAM type: NNNNGHTT; PAM sequence: AACTGCTT
caagaaaatttatatcagga

SEQ ID NO: 12957 - DNA, 20 bp, Artificial Sequence
  Description of Artificial Sequence: Synthetic oligonucleotide
  Target: SCNA; (+) strand; PAM type: NNNNGHTT; PAM sequence: AGCTGTTT
agtctttctttcaccttatg

SEQ ID NO: 12958 - DNA, 20 bp, Artificial Sequence
  Description of Artificial Sequence: Synthetic oligonucleotide
  Target: SCNA; (+) strand; PAM type: NNNNGHTT; PAM sequence: AGGAGATT
tgtgtgtaacagggagcaag

SEQ ID NO: 12959 - DNA, 20 bp, Artificial Sequence
  Description of Artificial Sequence: Synthetic oligonucleotide
  Target: SCNA; (+) strand; PAM type: NNNNGHTT; PAM sequence: TGGTGTTT
tcacatttggcaaagggctc

SEQ ID NO: 12960 - DNA, 20 bp, Artificial Sequence
  Description of Artificial Sequence: Synthetic oligonucleotide
  Target: SCNA; (+) strand; PAM type: NNNNGHTT; PAM sequence: ACAGGTTT
gttttgagttctgctcagtg

SEQ ID NO: 12961 - DNA, 20 bp, Artificial Sequence
  Description of Artificial Sequence: Synthetic oligonucleotide
  Target: SCNA; (+) strand; PAM type: NNNNGHTT; PAM sequence: GTTTGTTT
tgagttctgctcagtgacag

SEQ ID NO: 12962 - DNA, 20 bp, Artificial Sequence
  Description of Artificial Sequence: Synthetic oligonucleotide
  Target: SCNA; (+) strand; PAM type: NNNNGHTT; PAM sequence: GTAAGATT
cagtgacaggtttgttttaa

SEQ ID NO: 12963 - DNA, 20 bp, Artificial Sequence
  Description of Artificial Sequence: Synthetic oligonucleotide
  Target: SCNA; (+) strand; PAM type: NNNNGHTT; PAM sequence: ACCTGATT
actccttttaaattttgtct

SEQ ID NO: 12964 - DNA, 20 bp, Artificial Sequence
  Description of Artificial Sequence: Synthetic oligonucleotide
  Target: SCNA; (+) strand; PAM type: NNNNGHTT; PAM sequence: TCAGGATT
aagaatgatctttaaaacat

SEQ ID NO: 12965 - DNA, 20 bp, Artificial Sequence
  Description of Artificial Sequence: Synthetic oligonucleotide
  Target: SCNA; (+) strand; PAM type: NNNNGHTT; PAM sequence: TATGGATT
acatagccaccaggacccaa

SEQ ID NO: 12966 - DNA, 20 bp, Artificial Sequence
  Description of Artificial Sequence: Synthetic oligonucleotide
  Target: SCNA; (+) strand; PAM type: NNNNGHTT; PAM sequence: AACAGATT
cacaattgagcaatacatgt

SEQ ID NO: 12967 - DNA, 20 bp, Artificial Sequence
  Description of Artificial Sequence: Synthetic oligonucleotide
  Target: SCNA; (+) strand; PAM type: NNNNGHTT; PAM sequence: AATTGCTT
gtgaaaaacaggtgctgctc

SEQ ID NO: 12968 - DNA, 20 bp, Artificial Sequence
  Description of Artificial Sequence: Synthetic oligonucleotide
  Target: SCNA; (+) strand; PAM type: NNNNGHTT; PAM sequence: ATTTGTTT
caattccttcccatcaccta

SEQ ID NO: 12969 - DNA, 20 bp, Artificial Sequence
  Description of Artificial Sequence: Synthetic oligonucleotide
  Target: SCNA; (+) strand; PAM type: NNNNGHTT; PAM sequence: TATGGTTT
gtatattaaaaagttcttat

SEQ ID NO: 12970 - DNA, 20 bp, Artificial Sequence
  Description of Artificial Sequence: Synthetic oligonucleotide
  Target: SCNA; (+) strand; PAM type: NNNNGHTT; PAM sequence: CTGGGTTT
ttttgtatttttagtaaaga

SEQ ID NO: 12971 - DNA, 20 bp, Artificial Sequence
  Description of Artificial Sequence: Synthetic oligonucleotide
  Target: SCNA; (+) strand; PAM type: NNNNGHTT; PAM sequence: TCATGATT
atggtctcgatctcctgacc

SEQ ID NO: 12972 - DNA, 20 bp, Artificial Sequence
  Description of Artificial Sequence: Synthetic oligonucleotide
  Target: SCNA; (+) strand; PAM type: NNNNGHTT; PAM sequence: CTGAGATT
caccttggcctcccaaaatg

SEQ ID NO: 12973 - DNA, 20 bp, Artificial Sequence
  Description of Artificial Sequence: Synthetic oligonucleotide
  Target: SCNA; (+) strand; PAM type: NNNNGHTT; PAM sequence: TTGTGCTT
tacattgcacatttttctaa

SEQ ID NO: 12974 - DNA, 20 bp, Artificial Sequence
  Description of Artificial Sequence: Synthetic oligonucleotide
  Target: SCNA; (+) strand; PAM type: NNNNGHTT; PAM sequence: AAATGCTT
ataataccaaacaagtgggc

SEQ ID NO: 12975 - DNA, 20 bp, Artificial Sequence
  Description of Artificial Sequence: Synthetic oligonucleotide
  Target: SCNA; (+) strand; PAM type: NNNNGHTT; PAM sequence: ATTGGTTT
atccctgagtacaatttcac

SEQ ID NO: 12976 - DNA, 20 bp, Artificial Sequence
  Description of Artificial Sequence: Synthetic oligonucleotide
  Target: SCNA; (+) strand; PAM type: NNNNGHTT; PAM sequence: TTTGGTTT
gagtacaatttcacattggt

SEQ ID NO: 12977 - DNA, 20 bp, Artificial Sequence
  Description of Artificial Sequence: Synthetic oligonucleotide
  Target: SCNA; (+) strand; PAM type: NNNNGHTT; PAM sequence: TGATGTTT
cccctggaaataaataatgc

SEQ ID NO: 12978 - DNA, 20 bp, Artificial Sequence
  Description of Artificial Sequence: Synthetic oligonucleotide
  Target: SCNA; (+) strand; PAM type: NNNNGHTT; PAM sequence: AGTAGTTT
attcttttgccgagaaaggt

SEQ ID NO: 12979 - DNA, 20 bp, Artificial Sequence
  Description of Artificial Sequence: Synthetic oligonucleotide
  Target: SCNA; (+) strand; PAM type: NNNNGHTT; PAM sequence: ACAAGCTT
gtagtagtttgccaggaact

SEQ ID NO: 12980 - DNA, 20 bp, Artificial Sequence
  Description of Artificial Sequence: Synthetic oligonucleotide
  Target: SCNA; (+) strand; PAM type: NNNNGHTT; PAM sequence: CCATGTTT
gatattttcatacaatactg

SEQ ID NO: 12981 - DNA, 20 bp, Artificial Sequence
  Description of Artificial Sequence: Synthetic oligonucleotide
  Target: SCNA; (+) strand; PAM type: NNNNGHTT; PAM sequence: AGCTGTTT
gctggctgcaggttctggag

SEQ ID NO: 12982 - DNA, 20 bp, Artificial Sequence
  Description of Artificial Sequence: Synthetic oligonucleotide
  Target: SCNA; (+) strand; PAM type: NNNNGHTT; PAM sequence: GGTGGATT
aaagggtcagttggttgcct

SEQ ID NO: 12983 - DNA, 20 bp, Artificial Sequence
  Description of Artificial Sequence: Synthetic oligonucleotide
  Target: SCNA; (+) strand; PAM type: NNNNGHTT; PAM sequence: AGAAGTTT
agtcacataagtagaggact

SEQ ID NO: 12984 - DNA, 20 bp, Artificial Sequence
  Description of Artificial Sequence: Synthetic oligonucleotide
  Target: SCNA; (+) strand; PAM type: NNNNGHTT; PAM sequence: GTGTGCTT
gagtgaaaagtagactagat

SEQ ID NO: 12985 - DNA, 20 bp, Artificial Sequence
  Description of Artificial Sequence: Synthetic oligonucleotide
  Target: SCNA; (+) strand; PAM type: NNNNGHTT; PAM sequence: TATGGCTT
agactagatgtgtgctttga

SEQ ID NO: 12986 - DNA, 20 bp, Artificial Sequence
  Description of Artificial Sequence: Synthetic oligonucleotide
  Target: SCNA; (+) strand; PAM type: NNNNGHTT; PAM sequence: ATCAGCTT
aaataggcatatgttctagc

SEQ ID NO: 12987 - DNA, 20 bp, Artificial Sequence
  Description of Artificial Sequence: Synthetic oligonucleotide
  Target: SCNA; (+) strand; PAM type: NNNNGHTT; PAM sequence: ATCTGTTT
attttatgttacatctaatt

SEQ ID NO: 12988 - DNA, 20 bp, Artificial Sequence
  Description of Artificial Sequence: Synthetic oligonucleotide
  Target: SCNA; (+) strand; PAM type: NNNNGHTT; PAM sequence: ATATGCTT
tctgtttttcagttagataa

SEQ ID NO: 12989 - DNA, 20 bp, Artificial Sequence
  Description of Artificial Sequence: Synthetic oligonucleotide
  Target: SCNA; (+) strand; PAM type: NNNNGHTT; PAM sequence: AGCAGTTT
acattgctcagagttcatgt

SEQ ID NO: 12990 - DNA, 20 bp, Artificial Sequence
  Description of Artificial Sequence: Synthetic oligonucleotide
  Target: SCNA; (+) strand; PAM type: NNNNGHTT; PAM sequence: ATGAGCTT
atcagggtagcagctgtgca

SEQ ID NO: 12991 - DNA, 20 bp, Artificial Sequence
  Description of Artificial Sequence: Synthetic oligonucleotide
  Target: SCNA; (+) strand; PAM type: NNNNGHTT; PAM sequence: TACTGTTT
catcctaaatgtgaaatatc

SEQ ID NO: 12992 - DNA, 20 bp, Artificial Sequence
  Description of Artificial Sequence: Synthetic oligonucleotide
  Target: SCNA; (+) strand; PAM type: NNNNGHTT; PAM sequence: CCTAGCTT
ccatatgataactcacactg

SEQ ID NO: 12993 - DNA, 20 bp, Artificial Sequence
  Description of Artificial Sequence: Synthetic oligonucleotide
  Target: SCNA; (+) strand; PAM type: NNNNGHTT; PAM sequence: ATTTGTTT
cattgcaggcactcacaaac

SEQ ID NO: 12994 - DNA, 20 bp, Artificial Sequence
  Description of Artificial Sequence: Synthetic oligonucleotide
  Target: SCNA; (+) strand; PAM type: NNNNGHTT; PAM sequence: AATGGTTT
aattacactgttgaatttac

SEQ ID NO: 12995 - DNA, 20 bp, Artificial Sequence
  Description of Artificial Sequence: Synthetic oligonucleotide
  Target: SCNA; (+) strand; PAM type: NNNNGHTT; PAM sequence: TGTTGATT
tagaggtacatctctaaatt

SEQ ID NO: 12996 - DNA, 20 bp, Artificial Sequence
  Description of Artificial Sequence: Synthetic oligonucleotide
  Target: SCNA; (+) strand; PAM type: NNNNGHTT; PAM sequence: TTAGGATT
ctctaaatttgttgatttat

SEQ ID NO: 12997 - DNA, 20 bp, Artificial Sequence
  Description of Artificial Sequence: Synthetic oligonucleotide
  Target: SCNA; (+) strand; PAM type: NNNNGHTT; PAM sequence: GAGAGTTT
attaaagaaaggcagtgttg

SEQ ID NO: 12998 - DNA, 20 bp, Artificial Sequence
  Description of Artificial Sequence: Synthetic oligonucleotide
  Target: SCNA; (+) strand; PAM type: NNNNGHTT; PAM sequence: TCATGTTT
acttctaatatactcagaca

SEQ ID NO: 12999 - DNA, 20 bp, Artificial Sequence
  Description of Artificial Sequence: Synthetic oligonucleotide
  Target: SCNA; (+) strand; PAM type: NNNNGHTT; PAM sequence: TAAAGTTT
aatataaactctccaacatt

SEQ ID NO: 13000 - DNA, 20 bp, Artificial Sequence
  Description of Artificial Sequence: Synthetic oligonucleotide
  Target: SCNA; (+) strand; PAM type: NNNNGHTT; PAM sequence: AGTAGCTT
ttaagaaatgacagatcaat

SEQ ID NO: 13001 - DNA, 20 bp, Artificial Sequence
  Description of Artificial Sequence: Synthetic oligonucleotide
  Target: SCNA; (+) strand; PAM type: NNNNGHTT; PAM sequence: TTATGATT
agaaatctataggagtaaaa

SEQ ID NO: 13002 - DNA, 20 bp, Artificial Sequence
  Description of Artificial Sequence: Synthetic oligonucleotide
  Target: SCNA; (+) strand; PAM type: NNNNGHTT; PAM sequence: AACAGCTT
acagacttaaacaaacaaat

SEQ ID NO: 13003 - DNA, 20 bp, Artificial Sequence
  Description of Artificial Sequence: Synthetic oligonucleotide
  Target: SCNA; (+) strand; PAM type: NNNNGHTT; PAM sequence: TTAAGTTT
aaacaaataacagctttcaa

SEQ ID NO: 13004 - DNA, 20 bp, Artificial Sequence
  Description of Artificial Sequence: Synthetic oligonucleotide
  Target: SCNA; (+) strand; PAM type: NNNNGHTT; PAM sequence: AATTGATT
aaagctatggttagtaatat

SEQ ID NO: 13005 - DNA, 20 bp, Artificial Sequence
  Description of Artificial Sequence: Synthetic oligonucleotide
  Target: SCNA; (+) strand; PAM type: NNNNGHTT; PAM sequence: ATTTGTTT
gctgccctacctacaaacta

SEQ ID NO: 13006 - DNA, 20 bp, Artificial Sequence
  Description of Artificial Sequence: Synthetic oligonucleotide
  Target: SCNA; (+) strand; PAM type: NNNNGHTT; PAM sequence: TAATGTTT
cccttttaactttagctaaa

SEQ ID NO: 13007 - DNA, 20 bp, Artificial Sequence
  Description of Artificial Sequence: Synthetic oligonucleotide
  Target: SCNA; (+) strand; PAM type: NNNNGHTT; PAM sequence: TTCAGTTT
aatatgagcattccctgtag

SEQ ID NO: 13008 - DNA, 20 bp, Artificial Sequence
  Description of Artificial Sequence: Synthetic oligonucleotide
  Target: SCNA; (+) strand; PAM type: NNNNGHTT; PAM sequence: AAAGGCTT
ggtgttcaaatgtagtagtt

SEQ ID NO: 13009 - DNA, 20 bp, Artificial Sequence
  Description of Artificial Sequence: Synthetic oligonucleotide
  Target: SCNA; (+) strand; PAM type: NNNNGHTT; PAM sequence: GCTTGATT
ttcaaatgtagtagttaaag

SEQ ID NO: 13010 - DNA, 20 bp, Artificial Sequence
  Description of Artificial Sequence: Synthetic oligonucleotide
  Target: SCNA; (+) strand; PAM type: NNNNGHTT; PAM sequence: GTAGGCTT
gagatggaatttacccccta

SEQ ID NO: 13011 - DNA, 20 bp, Artificial Sequence
  Description of Artificial Sequence: Synthetic oligonucleotide
  Target: SCNA; (+) strand; PAM type: NNNNGHTT; PAM sequence: CTCAGATT
ctttatcctttttcacttgt

SEQ ID NO: 13012 - DNA, 20 bp, Artificial Sequence
  Description of Artificial Sequence: Synthetic oligonucleotide
  Target: SCNA; (+) strand; PAM type: NNNNGHTT; PAM sequence: AAAAGATT
aaacttaaattttaacaatt

SEQ ID NO: 13013 - DNA, 20 bp, Artificial Sequence
  Description of Artificial Sequence: Synthetic oligonucleotide
  Target: SCNA; (+) strand; PAM type: NNNNGHTT; PAM sequence: GGGAGTTT
ccacggctgcctgtcatttt

SEQ ID NO: 13014 - DNA, 20 bp, Artificial Sequence
  Description of Artificial Sequence: Synthetic oligonucleotide
  Target: SCNA; (+) strand; PAM type: NNNNGHTT; PAM sequence: TATAGATT
ctgtcattttgggagtttct

SEQ ID NO: 13015 - DNA, 20 bp, Artificial Sequence
  Description of Artificial Sequence: Synthetic oligonucleotide
  Target: SCNA; (+) strand; PAM type: NNNNGHTT; PAM sequence: AATTGCTT
atgttaaaaccagatgctag

SEQ ID NO: 13016 - DNA, 20 bp, Artificial Sequence
  Description of Artificial Sequence: Synthetic oligonucleotide
  Target: SCNA; (+) strand; PAM type: NNNNGHTT; PAM sequence: CCCAGTTT
aattgctttaatttttattc

SEQ ID NO: 13017 - DNA, 20 bp, Artificial Sequence
  Description of Artificial Sequence: Synthetic oligonucleotide
  Target: SCNA; (+) strand; PAM type: NNNNGHTT; PAM sequence: ATCTGTTT
aaaacatgaatagccttttg

SEQ ID NO: 13018 - DNA, 20 bp, Artificial Sequence
  Description of Artificial Sequence: Synthetic oligonucleotide
  Target: SCNA; (+) strand; PAM type: NNNNGHTT; PAM sequence: GCAGGTTT
acttcattctttctgttatt

SEQ ID NO: 13019 - DNA, 20 bp, Artificial Sequence
  Description of Artificial Sequence: Synthetic oligonucleotide
  Target: SCNA; (+) strand; PAM type: NNNNGHTT; PAM sequence: GCCAGCTT
ggtctgtctgacagtagaga

SEQ ID NO: 13020 - DNA, 20 bp, Artificial Sequence
  Description of Artificial Sequence: Synthetic oligonucleotide
  Target: SCNA; (+) strand; PAM type: NNNNGHTT; PAM sequence: TTCAGCTT
tggtctatacatttgggctc

SEQ ID NO: 13021 - DNA, 20 bp, Artificial Sequence
  Description of Artificial Sequence: Synthetic oligonucleotide
  Target: SCNA; (+) strand; PAM type: NNNNGHTT; PAM sequence: CTAGGTTT
tctatcatgcaggcatgaca

SEQ ID NO: 13022 - DNA, 20 bp, Artificial Sequence
  Description of Artificial Sequence: Synthetic oligonucleotide
  Target: SCNA; (+) strand; PAM type: NNNNGHTT; PAM sequence: AGAGGCTT
agttcctgaatgtgttagta

SEQ ID NO: 13023 - DNA, 20 bp, Artificial Sequence
  Description of Artificial Sequence: Synthetic oligonucleotide
  Target: SCNA; (+) strand; PAM type: NNNNGHTT; PAM sequence: CTTAGATT
ctgaatgtgttagtaagagg

SEQ ID NO: 13024 - DNA, 20 bp, Artificial Sequence
  Description of Artificial Sequence: Synthetic oligonucleotide
  Target: SCNA; (+) strand; PAM type: NNNNGHTT; PAM sequence: TGGAGATT
gcattgtggagagatctaat

SEQ ID NO: 13025 - DNA, 20 bp, Artificial Sequence
  Description of Artificial Sequence: Synthetic oligonucleotide
  Target: SCNA; (+) strand; PAM type: NNNNGHTT; PAM sequence: GCAAGCTT
cctaaactgtgataatgttg

SEQ ID NO: 13026 - DNA, 20 bp, Artificial Sequence
  Description of Artificial Sequence: Synthetic oligonucleotide
  Target: SCNA; (+) strand; PAM type: NNNNGHTT; PAM sequence: CTGTGATT
taagtgacatttctaggccc

SEQ ID NO: 13027 - DNA, 20 bp, Artificial Sequence
  Description of Artificial Sequence: Synthetic oligonucleotide
  Target: SCNA; (+) strand; PAM type: NNNNGHTT; PAM sequence: AGGTGTTT
ctggaggatgagcaggtgag

SEQ ID NO: 13028 - DNA, 20 bp, Artificial Sequence
  Description of Artificial Sequence: Synthetic oligonucleotide
  Target: SCNA; (+) strand; PAM type: NNNNGHTT; PAM sequence: GTTTGTTT
aggatgagcaggtgagaggt

SEQ ID NO: 13029 - DNA, 20 bp, Artificial Sequence
  Description of Artificial Sequence: Synthetic oligonucleotide
  Target: SCNA; (+) strand; PAM type: NNNNGHTT; PAM sequence: AAGTGATT
agaggtgtttgttttgaaaa

SEQ ID NO: 13030 - DNA, 20 bp, Artificial Sequence
  Description of Artificial Sequence: Synthetic oligonucleotide
  Target: SCNA; (+) strand; PAM type: NNNNGHTT; PAM sequence: AAAAGATT
gattttgaagagaggtcaga

SEQ ID NO: 13031 - DNA, 20 bp, Artificial Sequence
  Description of Artificial Sequence: Synthetic oligonucleotide
  Target: SCNA; (+) strand; PAM type: NNNNGHTT; PAM sequence: GGGTGCTT
acagagaccagacacacagt

SEQ ID NO: 13032 - DNA, 20 bp, Artificial Sequence
  Description of Artificial Sequence: Synthetic oligonucleotide
  Target: SCNA; (+) strand; PAM type: NNNNGHTT; PAM sequence: GAATGATT
gtgcttcatggatagctgtt

SEQ ID NO: 13033 - DNA, 20 bp, Artificial Sequence
  Description of Artificial Sequence: Synthetic oligonucleotide
  Target: SCNA; (+) strand; PAM type: NNNNGHTT; PAM sequence: GAGGGTTT
gaaaatcagatagcagtggt

SEQ ID NO: 13034 - DNA, 20 bp, Artificial Sequence
  Description of Artificial Sequence: Synthetic oligonucleotide
  Target: SCNA; (+) strand; PAM type: NNNNGHTT; PAM sequence: TGTGGCTT
tcaaggtgccatatctgagt

SEQ ID NO: 13035 - DNA, 20 bp, Artificial Sequence
  Description of Artificial Sequence: Synthetic oligonucleotide
  Target: SCNA; (+) strand; PAM type: NNNNGHTT; PAM sequence: AACTGCTT
ccacaagttataagaattga

SEQ ID NO: 13036 - DNA, 20 bp, Artificial Sequence
  Description of Artificial Sequence: Synthetic oligonucleotide
  Target: SCNA; (+) strand; PAM type: NNNNGHTT; PAM sequence: AATTGCTT
tgaaactgcttagaaggaac

SEQ ID NO: 13037 - DNA, 20 bp, Artificial Sequence
  Description of Artificial Sequence: Synthetic oligonucleotide
  Target: SCNA; (+) strand; PAM type: NNNNGHTT; PAM sequence: AAAGGTTT
gagtgtctacctcctccaga

SEQ ID NO: 13038 - DNA, 20 bp, Artificial Sequence
  Description of Artificial Sequence: Synthetic oligonucleotide
  Target: SCNA; (+) strand; PAM type: NNNNGHTT; PAM sequence: AGAGGATT
ttctccatttctgtcactta

SEQ ID NO: 13039 - DNA, 20 bp, Artificial Sequence
  Description of Artificial Sequence: Synthetic oligonucleotide
  Target: SCNA; (+) strand; PAM type: NNNNGHTT; PAM sequence: TGCAGCTT
taactttgagaattccattc

SEQ ID NO: 13040 - DNA, 20 bp, Artificial Sequence
  Description of Artificial Sequence: Synthetic oligonucleotide
  Target: SCNA; (+) strand; PAM type: NNNNGHTT; PAM sequence: GTGGGCTT
aatacaatccaatactcata

SEQ ID NO: 13041 - DNA, 20 bp, Artificial Sequence
  Description of Artificial Sequence: Synthetic oligonucleotide
  Target: SCNA; (+) strand; PAM type: NNNNGHTT; PAM sequence: TATAGCTT
tttccaaacattctacttgt

SEQ ID NO: 13042 - DNA, 20 bp, Artificial Sequence
  Description of Artificial Sequence: Synthetic oligonucleotide
  Target: SCNA; (+) strand; PAM type: NNNNGHTT; PAM sequence: GGGAGATT
attcttatcattctccattt

SEQ ID NO: 13043 - DNA, 20 bp, Artificial Sequence
  Description of Artificial Sequence: Synthetic oligonucleotide
  Target: SCNA; (+) strand; PAM type: NNNNGHTT; PAM sequence: TATTGTTT
cagcagtaaaaccctgagac

SEQ ID NO: 13044 - DNA, 20 bp, Artificial Sequence
  Description of Artificial Sequence: Synthetic oligonucleotide
  Target: SCNA; (+) strand; PAM type: NNNNGHTT; PAM sequence: ATGTGTTT
accctgagactattgtttta

SEQ ID NO: 13045 - DNA, 20 bp, Artificial Sequence
  Description of Artificial Sequence: Synthetic oligonucleotide
  Target: SCNA; (+) strand; PAM type: NNNNGHTT; PAM sequence: ATATGCTT
attttaagtagttataggac

SEQ ID NO: 13046 - DNA, 20 bp, Artificial Sequence
  Description of Artificial Sequence: Synthetic oligonucleotide
  Target: SCNA; (+) strand; PAM type: NNNNGHTT; PAM sequence: CAGAGATT
actttttatgaacttttcat

SEQ ID NO: 13047 - DNA, 20 bp, Artificial Sequence
  Description of Artificial Sequence: Synthetic oligonucleotide
  Target: SCNA; (+) strand; PAM type: NNNNGHTT; PAM sequence: TGTTGTTT
atcagagatttttttttaat

SEQ ID NO: 13048 - DNA, 20 bp, Artificial Sequence
  Description of Artificial Sequence: Synthetic oligonucleotide
  Target: SCNA; (+) strand; PAM type: NNNNGHTT; PAM sequence: GAATGCTT
taaatggcctctgttcactg

SEQ ID NO: 13049 - DNA, 20 bp, Artificial Sequence
  Description of Artificial Sequence: Synthetic oligonucleotide
  Target: SCNA; (+) strand; PAM type: NNNNGHTT; PAM sequence: ACATGCTT
tctgttcactggaatgcttc

SEQ ID NO: 13050 - DNA, 20 bp, Artificial Sequence
  Description of Artificial Sequence: Synthetic oligonucleotide
  Target: SCNA; (+) strand; PAM type: NNNNGHTT; PAM sequence: GTGTGTTT
gcttcctctctcagttgtag

SEQ ID NO: 13051 - DNA, 20 bp, Artificial Sequence
  Description of Artificial Sequence: Synthetic oligonucleotide
  Target: SCNA; (+) strand; PAM type: NNNNGHTT; PAM sequence: AACAGTTT
cctatgggtatctgcaaatt

SEQ ID NO: 13052 - DNA, 20 bp, Artificial Sequence
  Description of Artificial Sequence: Synthetic oligonucleotide
  Target: SCNA; (+) strand; PAM type: NNNNGHTT; PAM sequence: TAAAGTTT
ataaaaccacattttgaaaa

SEQ ID NO: 13053 - DNA, 20 bp, Artificial Sequence
  Description of Artificial Sequence: Synthetic oligonucleotide
  Target: SCNA; (+) strand; PAM type: NNNNGHTT; PAM sequence: CTAAGCTT
ttagtatcacattggcgata

SEQ ID NO: 13054 - DNA, 20 bp, Artificial Sequence
  Description of Artificial Sequence: Synthetic oligonucleotide
  Target: SCNA; (+) strand; PAM type: NNNNGHTT; PAM sequence: ACTTGCTT
ttggcgatactaagcttatg

SEQ ID NO: 13055 - DNA, 20 bp, Artificial Sequence
  Description of Artificial Sequence: Synthetic oligonucleotide
  Target: SCNA; (+) strand; PAM type: NNNNGHTT; PAM sequence: TTTGGATT
cttatgacttgcttttaata

SEQ ID NO: 13056 - DNA, 20 bp, Artificial Sequence
  Description of Artificial Sequence: Synthetic oligonucleotide
  Target: SCNA; (+) strand; PAM type: NNNNGHTT; PAM sequence: ATGGGCTT
gtacaataatagcgaaaagc

SEQ ID NO: 13057 - DNA, 20 bp, Artificial Sequence
  Description of Artificial Sequence: Synthetic oligonucleotide
  Target: SCNA; (+) strand; PAM type: NNNNGHTT; PAM sequence: ATTCGATT
cgaatatcttattattggat

SEQ ID NO: 13058 - DNA, 20 bp, Artificial Sequence
  Description of Artificial Sequence: Synthetic oligonucleotide
  Target: SCNA; (+) strand; PAM type: NNNNGHTT; PAM sequence: ATTTGATT
cagaatagtaattatgttgt

SEQ ID NO: 13059 - DNA, 20 bp, Artificial Sequence
  Description of Artificial Sequence: Synthetic oligonucleotide
  Target: SCNA; (+) strand; PAM type: NNNNGHTT; PAM sequence: CTGAGATT
tgttgtatttgattcagtgg

SEQ ID NO: 13060 - DNA, 20 bp, Artificial Sequence
  Description of Artificial Sequence: Synthetic oligonucleotide
  Target: SCNA; (+) strand; PAM type: NNNNGHTT; PAM sequence: TATTGATT
accaacagaggagaagatat

SEQ ID NO: 13061 - DNA, 20 bp, Artificial Sequence
  Description of Artificial Sequence: Synthetic oligonucleotide
  Target: SCNA; (+) strand; PAM type: NNNNGHTT; PAM sequence: TAAAGATT
gaagatattattgattgttc

SEQ ID NO: 13062 - DNA, 20 bp, Artificial Sequence
  Description of Artificial Sequence: Synthetic oligonucleotide
  Target: SCNA; (+) strand; PAM type: NNNNGHTT; PAM sequence: CAAAGCTT
tgttctaaagatttatcctc

SEQ ID NO: 13063 - DNA, 20 bp, Artificial Sequence
  Description of Artificial Sequence: Synthetic oligonucleotide
  Target: SCNA; (+) strand; PAM type: NNNNGHTT; PAM sequence: CTATGCTT
atgcagggaagagtaagatg

SEQ ID NO: 13064 - DNA, 20 bp, Artificial Sequence
  Description of Artificial Sequence: Synthetic oligonucleotide
  Target: SCNA; (+) strand; PAM type: NNNNGHTT; PAM sequence: GATGGATT
tggaaataatacagaggaga

SEQ ID NO: 13065 - DNA, 20 bp, Artificial Sequence
  Description of Artificial Sequence: Synthetic oligonucleotide
  Target: SCNA; (+) strand; PAM type: NNNNGHTT; PAM sequence: GCATGCTT
atttgaagagttctcttgtt

SEQ ID NO: 13066 - DNA, 20 bp, Artificial Sequence
  Description of Artificial Sequence: Synthetic oligonucleotide
  Target: SCNA; (+) strand; PAM type: NNNNGHTT; PAM sequence: GACAGTTT
gtgcctagccactagtagat

SEQ ID NO: 13067 - DNA, 20 bp, Artificial Sequence
  Description of Artificial Sequence: Synthetic oligonucleotide
  Target: SCNA; (+) strand; PAM type: NNNNGHTT; PAM sequence: TACTGTTT
aatttcttagataaaaagta

SEQ ID NO: 13068 - DNA, 20 bp, Artificial Sequence
  Description of Artificial Sequence: Synthetic oligonucleotide
  Target: SCNA; (+) strand; PAM type: NNNNGHTT; PAM sequence: AAGCGATT
aacctccacctcccgggttc

SEQ ID NO: 13069 - DNA, 20 bp, Artificial Sequence
  Description of Artificial Sequence: Synthetic oligonucleotide
  Target: SCNA; (+) strand; PAM type: NNNNGHTT; PAM sequence: TGGGGTTT
ttttgtatttttagtagaga

SEQ ID NO: 13070 - DNA, 20 bp, Artificial Sequence
  Description of Artificial Sequence: Synthetic oligonucleotide
  Target: SCNA; (+) strand; PAM type: NNNNGHTT; PAM sequence: CTGGGATT
cgcctcagcctcccaaagtg

SEQ ID NO: 13071 - DNA, 20 bp, Artificial Sequence
  Description of Artificial Sequence: Synthetic oligonucleotide
  Target: SCNA; (+) strand; PAM type: NNNNGHTT; PAM sequence: TCCTGTTT
tagctagttcattgtatgtg

SEQ ID NO: 13072 - DNA, 20 bp, Artificial Sequence
  Description of Artificial Sequence: Synthetic oligonucleotide
  Target: SCNA; (+) strand; PAM type: NNNNGHTT; PAM sequence: AGATGCTT
aggtgtataaattatagtca

SEQ ID NO: 13073 - DNA, 20 bp, Artificial Sequence
  Description of Artificial Sequence: Synthetic oligonucleotide
  Target: SCNA; (+) strand; PAM type: NNNNGHTT; PAM sequence: GAATGATT
gcttacaattgatgaaggaa

SEQ ID NO: 13074 - DNA, 20 bp, Artificial Sequence
  Description of Artificial Sequence: Synthetic oligonucleotide
  Target: SCNA; (+) strand; PAM type: NNNNGHTT; PAM sequence: TTCTGTTT
tcctccatgaataactggca

SEQ ID NO: 13075 - DNA, 20 bp, Artificial Sequence
  Description of Artificial Sequence: Synthetic oligonucleotide
  Target: SCNA; (+) strand; PAM type: NNNNGHTT; PAM sequence: ATGTGTTT
attgtatattaggttgaaat

SEQ ID NO: 13076 - DNA, 20 bp, Artificial Sequence
  Description of Artificial Sequence: Synthetic oligonucleotide
  Target: SCNA; (+) strand; PAM type: NNNNGHTT; PAM sequence: CAGTGTTT
atatgtgtttttgtcattac

SEQ ID NO: 13077 - DNA, 20 bp, Artificial Sequence
  Description of Artificial Sequence: Synthetic oligonucleotide
  Target: SCNA; (+) strand; PAM type: NNNNGHTT; PAM sequence: GTGAGATT
aacagaaaaaatattggcta

SEQ ID NO: 13078 - DNA, 20 bp, Artificial Sequence
  Description of Artificial Sequence: Synthetic oligonucleotide
  Target: SCNA; (+) strand; PAM type: NNNNGHTT; PAM sequence: AAAAGTTT
tggctgcaaaagagacctta

SEQ ID NO: 13079 - DNA, 20 bp, Artificial Sequence
  Description of Artificial Sequence: Synthetic oligonucleotide
  Target: SCNA; (+) strand; PAM type: NNNNGHTT; PAM sequence: AATTGCTT
tcaagaggctgaggcaggag

SEQ ID NO: 13080 - DNA, 20 bp, Artificial Sequence
  Description of Artificial Sequence: Synthetic oligonucleotide
  Target: SCNA; (+) strand; PAM type: NNNNGHTT; PAM sequence: GAAAGTTT
aagactctgtctcaaaaaaa

SEQ ID NO: 13081 - DNA, 20 bp, Artificial Sequence
  Description of Artificial Sequence: Synthetic oligonucleotide
  Target: SCNA; (+) strand; PAM type: NNNNGHTT; PAM sequence: ACTTGATT
tatcagtctattaagaatat

SEQ ID NO: 13082 - DNA, 20 bp, Artificial Sequence
  Description of Artificial Sequence: Synthetic oligonucleotide
  Target: SCNA; (+) strand; PAM type: NNNNGHTT; PAM sequence: AATTGCTT
tgatttttacaagaagaatc

SEQ ID NO: 13083 - DNA, 20 bp, Artificial Sequence
  Description of Artificial Sequence: Synthetic oligonucleotide
  Target: SCNA; (+) strand; PAM type: NNNNGHTT; PAM sequence: CTCTGCTT
gctcaggtatctttaacttt

SEQ ID NO: 13084 - DNA, 20 bp, Artificial Sequence
  Description of Artificial Sequence: Synthetic oligonucleotide
  Target: SCNA; (+) strand; PAM type: NNNNGHTT; PAM sequence: TCAAGATT
agagacacagaaactcatct

SEQ ID NO: 13085 - DNA, 20 bp, Artificial Sequence
  Description of Artificial Sequence: Synthetic oligonucleotide
  Target: SCNA; (+) strand; PAM type: NNNNGHTT; PAM sequence: ACACGTTT
caccaaattaagtgttaagc

SEQ ID NO: 13086 - DNA, 20 bp, Artificial Sequence
  Description of Artificial Sequence: Synthetic oligonucleotide
  Target: SCNA; (+) strand; PAM type: NNNNGHTT; PAM sequence: CAAGGTTT
cccacatctacttgacatta

SEQ ID NO: 13087 - DNA, 20 bp, Artificial Sequence
  Description of Artificial Sequence: Synthetic oligonucleotide
  Target: SCNA; (+) strand; PAM type: NNNNGHTT; PAM sequence: CAGTGTTT
tactactttcagaaattctc

SEQ ID NO: 13088 - DNA, 20 bp, Artificial Sequence
  Description of Artificial Sequence: Synthetic oligonucleotide
  Target: SCNA; (+) strand; PAM type: NNNNGHTT; PAM sequence: AATGGTTT
tgtaatgcaatgaaaaccac

SEQ ID NO: 13089 - DNA, 20 bp, Artificial Sequence
  Description of Artificial Sequence: Synthetic oligonucleotide
  Target: SCNA; (+) strand; PAM type: NNNNGHTT; PAM sequence: TCGAGATT
atttggctccaaaaatatgc

SEQ ID NO: 13090 - DNA, 20 bp, Artificial Sequence
  Description of Artificial Sequence: Synthetic oligonucleotide
  Target: SCNA; (+) strand; PAM type: NNNNGHTT; PAM sequence: TATTGCTT
aaccaactctcagagcccag

SEQ ID NO: 13091 - DNA, 20 bp, Artificial Sequence
  Description of Artificial Sequence: Synthetic oligonucleotide
  Target: SCNA; (+) strand; PAM type: NNNNGHTT; PAM sequence: ATTGGTTT
tgacatttccaaaccacgta

SEQ ID NO: 13092 - DNA, 20 bp, Artificial Sequence
  Description of Artificial Sequence: Synthetic oligonucleotide
  Target: SCNA; (+) strand; PAM type: NNNNGHTT; PAM sequence: TGTTGTTT
aagttagagaagtattttgt

SEQ ID NO: 13093 - DNA, 20 bp, Artificial Sequence
  Description of Artificial Sequence: Synthetic oligonucleotide
  Target: SCNA; (+) strand; PAM type: NNNNGHTT; PAM sequence: GTTTGTTT
tagagaagtattttgttgtt

SEQ ID NO: 13094 - DNA, 20 bp, Artificial Sequence
  Description of Artificial Sequence: Synthetic oligonucleotide
  Target: SCNA; (+) strand; PAM type: NNNNGHTT; PAM sequence: TTTTGTTT
aagtattttgttgttgtttg

SEQ ID NO: 13095 - DNA, 20 bp, Artificial Sequence
  Description of Artificial Sequence: Synthetic oligonucleotide
  Target: SCNA; (+) strand; PAM type: NNNNGHTT; PAM sequence: CTGAGTTT
actttaagactttccttaga

SEQ ID NO: 13096 - DNA, 20 bp, Artificial Sequence
  Description of Artificial Sequence: Synthetic oligonucleotide
  Target: SCNA; (+) strand; PAM type: NNNNGHTT; PAM sequence: TTTGGTTT
aaaattcagtcttttctttc

SEQ ID NO: 13097 - DNA, 20 bp, Artificial Sequence
  Description of Artificial Sequence: Synthetic oligonucleotide
  Target: SCNA; (+) strand; PAM type: NNNNGHTT; PAM sequence: TGCAGTTT
ttccttttatgtgtaattag

SEQ ID NO: 13098 - DNA, 20 bp, Artificial Sequence
  Description of Artificial Sequence: Synthetic oligonucleotide
  Target: SCNA; (+) strand; PAM type: NNNNGHTT; PAM sequence: ATTTGCTT
tgtagctgaatttcttcagc

SEQ ID NO: 13099 - DNA, 20 bp, Artificial Sequence
  Description of Artificial Sequence: Synthetic oligonucleotide
  Target: SCNA; (+) strand; PAM type: NNNNGHTT; PAM sequence: TAGTGTTT
gacctgttatttaaaagata

SEQ ID NO: 13100 - DNA, 20 bp, Artificial Sequence
  Description of Artificial Sequence: Synthetic oligonucleotide
  Target: SCNA; (+) strand; PAM type: NNNNGHTT; PAM sequence: TTTTGTTT
aaatatatttcccttgaaat

SEQ ID NO: 13101 - DNA, 20 bp, Artificial Sequence
  Description of Artificial Sequence: Synthetic oligonucleotide
  Target: SCNA; (+) strand; PAM type: NNNNGHTT; PAM sequence: TTCTGTTT
ctttctgtgtggtatgttct

SEQ ID NO: 13102 - DNA, 20 bp, Artificial Sequence
  Description of Artificial Sequence: Synthetic oligonucleotide
  Target: SCNA; (+) strand; PAM type: NNNNGHTT; PAM sequence: GTCAGCTT
ctatagttgtcatcctgcat

SEQ ID NO: 13103 - DNA, 20 bp, Artificial Sequence
  Description of Artificial Sequence: Synthetic oligonucleotide
  Target: SCNA; (+) strand; PAM type: NNNNGHTT; PAM sequence: CTGTGTTT
catggtaaccagtgtgtgga

SEQ ID NO: 13104 - DNA, 20 bp, Artificial Sequence
  Description of Artificial Sequence: Synthetic oligonucleotide
  Target: SCNA; (+) strand; PAM type: NNNNGHTT; PAM sequence: TTTTGTTT
accagtgtgtggactgtgtt

SEQ ID NO: 13105 - DNA, 20 bp, Artificial Sequence
  Description of Artificial Sequence: Synthetic oligonucleotide
  Target: SCNA; (+) strand; PAM type: NNNNGHTT; PAM sequence: CAGAGTTT
tttgtttttttattttgaga

SEQ ID NO: 13106 - DNA, 20 bp, Artificial Sequence
  Description of Artificial Sequence: Synthetic oligonucleotide
  Target: SCNA; (+) strand; PAM type: NNNNGHTT; PAM sequence: AAGTGATT
aacctatgcctcctgagttc

SEQ ID NO: 13107 - DNA, 20 bp, Artificial Sequence
  Description of Artificial Sequence: Synthetic oligonucleotide
  Target: SCNA; (+) strand; PAM type: NNNNGHTT; PAM sequence: CTGGGATT
tttctcaactgcctgagtag

SEQ ID NO: 13108 - DNA, 20 bp, Artificial Sequence
  Description of Artificial Sequence: Synthetic oligonucleotide
  Target: SCNA; (+) strand; PAM type: NNNNGHTT; PAM sequence: ACAGGATT
tttttgtacttttagtagaa

SEQ ID NO: 13109 - DNA, 20 bp, Artificial Sequence
  Description of Artificial Sequence: Synthetic oligonucleotide
  Target: SCNA; (+) strand; PAM type: NNNNGHTT; PAM sequence: AGGTGATT
ggtcttgaactcctgacctc

SEQ ID NO: 13110 - DNA, 20 bp, Artificial Sequence
  Description of Artificial Sequence: Synthetic oligonucleotide
  Target: SCNA; (+) strand; PAM type: NNNNGHTT; PAM sequence: CTCGGCTT
acctcaggtgattcacccac

SEQ ID NO: 13111 - DNA, 20 bp, Artificial Sequence
  Description of Artificial Sequence: Synthetic oligonucleotide
  Target: SCNA; (+) strand; PAM type: NNNNGHTT; PAM sequence: CTAGGATT
cacctcggcttcccaaaggg

SEQ ID NO: 13112 - DNA, 20 bp, Artificial Sequence
  Description of Artificial Sequence: Synthetic oligonucleotide
  Target: SCNA; (+) strand; PAM type: NNNNGHTT; PAM sequence: CACTGTTT
taccacatccggccggtaac

SEQ ID NO: 13113 - DNA, 20 bp, Artificial Sequence
  Description of Artificial Sequence: Synthetic oligonucleotide
  Target: SCNA; (+) strand; PAM type: NNNNGHTT; PAM sequence: TTTAGATT
ttatatttgaactttttctt

SEQ ID NO: 13114 - DNA, 20 bp, Artificial Sequence
  Description of Artificial Sequence: Synthetic oligonucleotide
  Target: SCNA; (+) strand; PAM type: NNNNGHTT; PAM sequence: GTGAGATT
tttttagattccacatataa

SEQ ID NO: 13115 - DNA, 20 bp, Artificial Sequence
  Description of Artificial Sequence: Synthetic oligonucleotide
  Target: SCNA; (+) strand; PAM type: NNNNGHTT; PAM sequence: CACAGCTT
tgtgtgttggacttatttcc

SEQ ID NO: 13116 - DNA, 20 bp, Artificial Sequence
  Description of Artificial Sequence: Synthetic oligonucleotide
  Target: SCNA; (+) strand; PAM type: NNNNGHTT; PAM sequence: CACAGTTT
tccattgtatatacatatac

SEQ ID NO: 13117 - DNA, 20 bp, Artificial Sequence
  Description of Artificial Sequence: Synthetic oligonucleotide
  Target: SCNA; (+) strand; PAM type: NNNNGHTT; PAM sequence: GGTGGTTT
catgcaccaacacataccta

SEQ ID NO: 13118 - DNA, 20 bp, Artificial Sequence
  Description of Artificial Sequence: Synthetic oligonucleotide
  Target: SCNA; (+) strand; PAM type: NNNNGHTT; PAM sequence: TGATGATT
gtgcagatatctttatgagg

SEQ ID NO: 13119 - DNA, 20 bp, Artificial Sequence
  Description of Artificial Sequence: Synthetic oligonucleotide
  Target: SCNA; (+) strand; PAM type: NNNNGHTT; PAM sequence: GAGGGATT
tcctttgggtacatccagag

SEQ ID NO: 13120 - DNA, 20 bp, Artificial Sequence
  Description of Artificial Sequence: Synthetic oligonucleotide
  Target: SCNA; (+) strand; PAM type: NNNNGHTT; PAM sequence: TAGAGATT
attgggcattatcagtaatc

SEQ ID NO: 13121 - DNA, 20 bp, Artificial Sequence
  Description of Artificial Sequence: Synthetic oligonucleotide
  Target: SCNA; (+) strand; PAM type: NNNNGHTT; PAM sequence: ACTGGTTT
caacctttctggcaccaggg

SEQ ID NO: 13122 - DNA, 20 bp, Artificial Sequence
  Description of Artificial Sequence: Synthetic oligonucleotide
  Target: SCNA; (+) strand; PAM type: NNNNGHTT; PAM sequence: AAATGTTT
agggactggttttctggaag

SEQ ID NO: 13123 - DNA, 20 bp, Artificial Sequence
  Description of Artificial Sequence: Synthetic oligonucleotide
  Target: SCNA; (+) strand; PAM type: NNNNGHTT; PAM sequence: AATGGTTT
gggatggtgaggggaagggg

SEQ ID NO: 13124 - DNA, 20 bp, Artificial Sequence
  Description of Artificial Sequence: Synthetic oligonucleotide
  Target: SCNA; (+) strand; PAM type: NNNNGHTT; PAM sequence: GGATGATT
ggggaaggggaatggttttg

SEQ ID NO: 13125 - DNA, 20 bp, Artificial Sequence
  Description of Artificial Sequence: Synthetic oligonucleotide
  Target: SCNA; (+) strand; PAM type: NNNNGHTT; PAM sequence: ATTAGATT
tcaagcacattacatttatc

SEQ ID NO: 13126 - DNA, 20 bp, Artificial Sequence
  Description of Artificial Sequence: Synthetic oligonucleotide
  Target: SCNA; (+) strand; PAM type: NNNNGHTT; PAM sequence: CCCTGATT
atggccctggggttggggac

SEQ ID NO: 13127 - DNA, 20 bp, Artificial Sequence
  Description of Artificial Sequence: Synthetic oligonucleotide
  Target: SCNA; (+) strand; PAM type: NNNNGHTT; PAM sequence: AGGGGCTT
atactaagccattttataac

SEQ ID NO: 13128 - DNA, 20 bp, Artificial Sequence
  Description of Artificial Sequence: Synthetic oligonucleotide
  Target: SCNA; (+) strand; PAM type: NNNNGHTT; PAM sequence: TGCAGATT
ataacaggggcttaggcatc

SEQ ID NO: 13129 - DNA, 20 bp, Artificial Sequence
  Description of Artificial Sequence: Synthetic oligonucleotide
  Target: SCNA; (+) strand; PAM type: NNNNGHTT; PAM sequence: ATCTGTTT
tcttaacagaaaaaaacaaa

SEQ ID NO: 13130 - DNA, 20 bp, Artificial Sequence
  Description of Artificial Sequence: Synthetic oligonucleotide
  Target: SCNA; (+) strand; PAM type: NNNNGHTT; PAM sequence: TTAAGATT
ctctggaatttagttagaaa

SEQ ID NO: 13131 - DNA, 20 bp, Artificial Sequence
  Description of Artificial Sequence: Synthetic oligonucleotide
  Target: SCNA; (+) strand; PAM type: NNNNGHTT; PAM sequence: AGTGGTTT
gcatttgtatttcatctgag

SEQ ID NO: 13132 - DNA, 20 bp, Artificial Sequence
  Description of Artificial Sequence: Synthetic oligonucleotide
  Target: SCNA; (+) strand; PAM type: NNNNGHTT; PAM sequence: GGCTGATT
tatggttcttccccataagt

SEQ ID NO: 13133 - DNA, 20 bp, Artificial Sequence
  Description of Artificial Sequence: Synthetic oligonucleotide
  Target: SCNA; (+) strand; PAM type: NNNNGHTT; PAM sequence: TTGTGTTT
taccttttatcttaacagac

SEQ ID NO: 13134 - DNA, 20 bp, Artificial Sequence
  Description of Artificial Sequence: Synthetic oligonucleotide
  Target: SCNA; (+) strand; PAM type: NNNNGHTT; PAM sequence: CCCAGCTT
cgatcttggctcactgcagc

SEQ ID NO: 13135 - DNA, 20 bp, Artificial Sequence
  Description of Artificial Sequence: Synthetic oligonucleotide
  Target: SCNA; (+) strand; PAM type: NNNNGHTT; PAM sequence: TCCTGCTT
cttccgggttcaagcaattc

SEQ ID NO: 13136 - DNA, 20 bp, Artificial Sequence
  Description of Artificial Sequence: Synthetic oligonucleotide
  Target: SCNA; (+) strand; PAM type: NNNNGHTT; PAM sequence: TTCAGTTT
ggttcaagcaattctcctgc

SEQ ID NO: 13137 - DNA, 20 bp, Artificial Sequence
  Description of Artificial Sequence: Synthetic oligonucleotide
  Target: SCNA; (+) strand; PAM type: NNNNGHTT; PAM sequence: CTGGGATT
tgcttcagtttcttgagtag

SEQ ID NO: 13138 - DNA, 20 bp, Artificial Sequence
  Description of Artificial Sequence: Synthetic oligonucleotide
  Target: SCNA; (+) strand; PAM type: NNNNGHTT; PAM sequence: ATGGGTTT
tttctgtatttttagtagag

SEQ ID NO: 13139 - DNA, 20 bp, Artificial Sequence
  Description of Artificial Sequence: Synthetic oligonucleotide
  Target: SCNA; (+) strand; PAM type: NNNNGHTT; PAM sequence: CTAGGCTT
gatgggtttcaccatgttgg

SEQ ID NO: 13140 - DNA, 20 bp, Artificial Sequence
  Description of Artificial Sequence: Synthetic oligonucleotide
  Target: SCNA; (+) strand; PAM type: NNNNGHTT; PAM sequence: CTGGGATT
caacttgacctccaaaagtg

SEQ ID NO: 13141 - DNA, 20 bp, Artificial Sequence
  Description of Artificial Sequence: Synthetic oligonucleotide
  Target: SCNA; (+) strand; PAM type: NNNNGHTT; PAM sequence: GTATGTTT
tctttaggcacttcttcttt

SEQ ID NO: 13142 - DNA, 20 bp, Artificial Sequence
  Description of Artificial Sequence: Synthetic oligonucleotide
  Target: SCNA; (+) strand; PAM type: NNNNGHTT; PAM sequence: TTACGTTT
gtagttatatagttatatat

SEQ ID NO: 13143 - DNA, 20 bp, Artificial Sequence
  Description of Artificial Sequence: Synthetic oligonucleotide
  Target: SCNA; (+) strand; PAM type: NNNNGHTT; PAM sequence: AAAGGATT
aatattctacatgaagtgat

SEQ ID NO: 13144 - DNA, 20 bp, Artificial Sequence
  Description of Artificial Sequence: Synthetic oligonucleotide
  Target: SCNA; (+) strand; PAM type: NNNNGHTT; PAM sequence: CCTTGTTT
ctgaaattatgaaaagtctg

SEQ ID NO: 13145 - DNA, 20 bp, Artificial Sequence
  Description of Artificial Sequence: Synthetic oligonucleotide
  Target: SCNA; (+) strand; PAM type: NNNNGHTT; PAM sequence: GAAGGCTT
ttgtcttttatttaagggaa

SEQ ID NO: 13146 - DNA, 20 bp, Artificial Sequence
  Description of Artificial Sequence: Synthetic oligonucleotide
  Target: SCNA; (+) strand; PAM type: NNNNGHTT; PAM sequence: TTTAGATT
tattaccaaaaaggccaact

SEQ ID NO: 13147 - DNA, 20 bp, Artificial Sequence
  Description of Artificial Sequence: Synthetic oligonucleotide
  Target: SCNA; (+) strand; PAM type: NNNNGHTT; PAM sequence: TTCAGATT
gaaacttttttggaatgacc

SEQ ID NO: 13148 - DNA, 20 bp, Artificial Sequence
  Description of Artificial Sequence: Synthetic oligonucleotide
  Target: SCNA; (+) strand; PAM type: NNNNGHTT; PAM sequence: CACTGTTT
accttcagatttgagatgac

SEQ ID NO: 13149 - DNA, 20 bp, Artificial Sequence
  Description of Artificial Sequence: Synthetic oligonucleotide
  Target: SCNA; (+) strand; PAM type: NNNNGHTT; PAM sequence: ATTTGATT
ctctatattcatttagggaa

SEQ ID NO: 13150 - DNA, 20 bp, Artificial Sequence
  Description of Artificial Sequence: Synthetic oligonucleotide
  Target: SCNA; (+) strand; PAM type: NNNNGHTT; PAM sequence: AATAGCTT
atttgattctgaaaaataca

SEQ ID NO: 13151 - DNA, 20 bp, Artificial Sequence
  Description of Artificial Sequence: Synthetic oligonucleotide
  Target: SCNA; (+) strand; PAM type: NNNNGHTT; PAM sequence: TGTAGATT
gtatttagaagggaataaat

SEQ ID NO: 13152 - DNA, 20 bp, Artificial Sequence
  Description of Artificial Sequence: Synthetic oligonucleotide
  Target: SCNA; (+) strand; PAM type: NNNNGHTT; PAM sequence: TGTAGATT
gtgctacgacacagtagcaa

SEQ ID NO: 13153 - DNA, 20 bp, Artificial Sequence
  Description of Artificial Sequence: Synthetic oligonucleotide
  Target: SCNA; (+) strand; PAM type: NNNNGHTT; PAM sequence: GAAGGCTT
acacagtagcaatgtagatt

SEQ ID NO: 13154 - DNA, 20 bp, Artificial Sequence
  Description of Artificial Sequence: Synthetic oligonucleotide
  Target: SCNA; (+) strand; PAM type: NNNNGHTT; PAM sequence: CATAGATT
agagaattatttgtattaat

SEQ ID NO: 13155 - DNA, 20 bp, Artificial Sequence
  Description of Artificial Sequence: Synthetic oligonucleotide
  Target: SCNA; (+) strand; PAM type: NNNNGHTT; PAM sequence: AGCAGATT
atcatgttcaaaaatcacaa

SEQ ID NO: 13156 - DNA, 20 bp, Artificial Sequence
  Description of Artificial Sequence: Synthetic oligonucleotide
  Target: SCNA; (+) strand; PAM type: NNNNGHTT; PAM sequence: CCAAGTTT
attgccagcaaaaaattgaa

SEQ ID NO: 13157 - DNA, 20 bp, Artificial Sequence
  Description of Artificial Sequence: Synthetic oligonucleotide
  Target: SCNA; (+) strand; PAM type: NNNNGHTT; PAM sequence: ACTAGCTT
aagtttttccccttcagaaa

SEQ ID NO: 13158 - DNA, 20 bp, Artificial Sequence
  Description of Artificial Sequence: Synthetic oligonucleotide
  Target: SCNA; (+) strand; PAM type: NNNNGHTT; PAM sequence: AATTGATT
aaaaaatttcctaatattta

SEQ ID NO: 13159 - DNA, 20 bp, Artificial Sequence
  Description of Artificial Sequence: Synthetic oligonucleotide
  Target: SCNA; (+) strand; PAM type: NNNNGHTT; PAM sequence: ACACGTTT
cctaatatttaaattgattc

SEQ ID NO: 13160 - DNA, 20 bp, Artificial Sequence
  Description of Artificial Sequence: Synthetic oligonucleotide
  Target: SCNA; (+) strand; PAM type: NNNNGHTT; PAM sequence: AAGGGTTT
tcacacgtttataactatac

SEQ ID NO: 13161 - DNA, 20 bp, Artificial Sequence
  Description of Artificial Sequence: Synthetic oligonucleotide
  Target: SCNA; (+) strand; PAM type: NNNNGHTT; PAM sequence: CCTTGTTT
ttataactatacaagggttt

SEQ ID NO: 13162 - DNA, 20 bp, Artificial Sequence
  Description of Artificial Sequence: Synthetic oligonucleotide
  Target: SCNA; (+) strand; PAM type: NNNNGHTT; PAM sequence: GAATGTTT
gaaataagtatgaatgagca

SEQ ID NO: 13163 - DNA, 20 bp, Artificial Sequence
  Description of Artificial Sequence: Synthetic oligonucleotide
  Target: SCNA; (+) strand; PAM type: NNNNGHTT; PAM sequence: AAAAGTTT
tgagcagaatgttttagtat

SEQ ID NO: 13164 - DNA, 20 bp, Artificial Sequence
  Description of Artificial Sequence: Synthetic oligonucleotide
  Target: SCNA; (+) strand; PAM type: NNNNGHTT; PAM sequence: CAAAGTTT
tgttttagtataaaagttta

SEQ ID NO: 13165 - DNA, 20 bp, Artificial Sequence
  Description of Artificial Sequence: Synthetic oligonucleotide
  Target: SCNA; (+) strand; PAM type: NNNNGHTT; PAM sequence: TCTCGTTT
tgaattcttttccccatccc

SEQ ID NO: 13166 - DNA, 20 bp, Artificial Sequence
  Description of Artificial Sequence: Synthetic oligonucleotide
  Target: SCNA; (+) strand; PAM type: NNNNGHTT; PAM sequence: AGTAGCTT
ccttttaatgatatatcata

SEQ ID NO: 13167 - DNA, 20 bp, Artificial Sequence
  Description of Artificial Sequence: Synthetic oligonucleotide
  Target: SCNA; (+) strand; PAM type: NNNNGHTT; PAM sequence: TCATGCTT
atgatatatcataagtagct

SEQ ID NO: 13168 - DNA, 20 bp, Artificial Sequence
  Description of Artificial Sequence: Synthetic oligonucleotide
  Target: SCNA; (+) strand; PAM type: NNNNGHTT; PAM sequence: TTTAGTTT
atcaaaatagtctttctgtc

SEQ ID NO: 13169 - DNA, 20 bp, Artificial Sequence
  Description of Artificial Sequence: Synthetic oligonucleotide
  Target: SCNA; (+) strand; PAM type: NNNNGHTT; PAM sequence: AGATGATT
gctctaaaatacaaatgtta

SEQ ID NO: 13170 - DNA, 20 bp, Artificial Sequence
  Description of Artificial Sequence: Synthetic oligonucleotide
  Target: SCNA; (+) strand; PAM type: NNNNGHTT; PAM sequence: AGGAGCTT
aaatgttaagatgattcttc

SEQ ID NO: 13171 - DNA, 20 bp, Artificial Sequence
  Description of Artificial Sequence: Synthetic oligonucleotide
  Target: SCNA; (+) strand; PAM type: NNNNGHTT; PAM sequence: TGTGGTTT
tgtcttttcctgaattaata

SEQ ID NO: 13172 - DNA, 20 bp, Artificial Sequence
  Description of Artificial Sequence: Synthetic oligonucleotide
  Target: SCNA; (+) strand; PAM type: NNNNGHTT; PAM sequence: CCATGCTT
attaatatgtggtttttgcc

SEQ ID NO: 13173 - DNA, 20 bp, Artificial Sequence
  Description of Artificial Sequence: Synthetic oligonucleotide
  Target: SCNA; (+) strand; PAM type: NNNNGHTT; PAM sequence: CACTGTTT
attctcgccacttctggatg

SEQ ID NO: 13174 - DNA, 20 bp, Artificial Sequence
  Description of Artificial Sequence: Synthetic oligonucleotide
  Target: SCNA; (+) strand; PAM type: NNNNGHTT; PAM sequence: ATGAGCTT
ttctggatgcactgtttctt

SEQ ID NO: 13175 - DNA, 20 bp, Artificial Sequence
  Description of Artificial Sequence: Synthetic oligonucleotide
  Target: SCNA; (+) strand; PAM type: NNNNGHTT; PAM sequence: TTTTGCTT
tccttaaatatgctgtgcct

SEQ ID NO: 13176 - DNA, 20 bp, Artificial Sequence
  Description of Artificial Sequence: Synthetic oligonucleotide
  Target: SCNA; (+) strand; PAM type: NNNNGHTT; PAM sequence: AGGAGATT
atctccagtgccaaagtaag

SEQ ID NO: 13177 - DNA, 20 bp, Artificial Sequence
  Description of Artificial Sequence: Synthetic oligonucleotide
  Target: SCNA; (+) strand; PAM type: NNNNGHTT; PAM sequence: GGCTGTTT
aatgggagacaggagctaat

SEQ ID NO: 13178 - DNA, 20 bp, Artificial Sequence
  Description of Artificial Sequence: Synthetic oligonucleotide
  Target: SCNA; (+) strand; PAM type: NNNNGHTT; PAM sequence: CTTCGTTT
acaggagctaatggctgttt

SEQ ID NO: 13179 - DNA, 20 bp, Artificial Sequence
  Description of Artificial Sequence: Synthetic oligonucleotide
  Target: SCNA; (+) strand; PAM type: NNNNGHTT; PAM sequence: CAATGCTT
atccagaaaaccaatctgca

SEQ ID NO: 13180 - DNA, 20 bp, Artificial Sequence
  Description of Artificial Sequence: Synthetic oligonucleotide
  Target: SCNA; (+) strand; PAM type: NNNNGHTT; PAM sequence: ATTGGCTT
cctcaatgcagtacctttat

SEQ ID NO: 13181 - DNA, 20 bp, Artificial Sequence
  Description of Artificial Sequence: Synthetic oligonucleotide
  Target: SCNA; (+) strand; PAM type: NNNNGHTT; PAM sequence: TCCTGTTT
tctccttattcatcacatgc

SEQ ID NO: 13182 - DNA, 20 bp, Artificial Sequence
  Description of Artificial Sequence: Synthetic oligonucleotide
  Target: SCNA; (+) strand; PAM type: NNNNGHTT; PAM sequence: CCGAGATT
tcatcacatgctcctgtttc

SEQ ID NO: 13183 - DNA, 20 bp, Artificial Sequence
  Description of Artificial Sequence: Synthetic oligonucleotide
  Target: SCNA; (+) strand; PAM type: NNNNGHTT; PAM sequence: TTTTGTTT
agctaaaggcaaaatccaac

SEQ ID NO: 13184 - DNA, 20 bp, Artificial Sequence
  Description of Artificial Sequence: Synthetic oligonucleotide
  Target: SCNA; (+) strand; PAM type: NNNNGHTT; PAM sequence: TCCTGCTT
tccaacttttgtttaactca

SEQ ID NO: 13185 - DNA, 20 bp, Artificial Sequence
  Description of Artificial Sequence: Synthetic oligonucleotide
  Target: SCNA; (+) strand; PAM type: NNNNGHTT; PAM sequence: ATGAGATT
ttatagaaagttatttaagc

SEQ ID NO: 13186 - DNA, 20 bp, Artificial Sequence
  Description of Artificial Sequence: Synthetic oligonucleotide
  Target: SCNA; (+) strand; PAM type: NNNNGHTT; PAM sequence: TCTAGTTT
ttatttaagcatgagatttc

SEQ ID NO: 13187 - DNA, 20 bp, Artificial Sequence
  Description of Artificial Sequence: Synthetic oligonucleotide
  Target: SCNA; (+) strand; PAM type: NNNNGHTT; PAM sequence: TGGTGATT
aaagctgttcagttaatgtg

SEQ ID NO: 13188 - DNA, 20 bp, Artificial Sequence
  Description of Artificial Sequence: Synthetic oligonucleotide
  Target: SCNA; (+) strand; PAM type: NNNNGHTT; PAM sequence: GTAAGTTT
taggcatgtaaaatgcacct

SEQ ID NO: 13189 - DNA, 20 bp, Artificial Sequence
  Description of Artificial Sequence: Synthetic oligonucleotide
  Target: SCNA; (+) strand; PAM type: NNNNGHTT; PAM sequence: CCAGGCTT
aacaaaattggcaccttttc

SEQ ID NO: 13190 - DNA, 20 bp, Artificial Sequence
  Description of Artificial Sequence: Synthetic oligonucleotide
  Target: SCNA; (+) strand; PAM type: NNNNGHTT; PAM sequence: GACAGATT
ctttcttttactatctctca

SEQ ID NO: 13191 - DNA, 20 bp, Artificial Sequence
  Description of Artificial Sequence: Synthetic oligonucleotide
  Target: SCNA; (+) strand; PAM type: NNNNGHTT; PAM sequence: TCTTGTTT
ggtactaggactctgaccat

SEQ ID NO: 13192 - DNA, 20 bp, Artificial Sequence
  Description of Artificial Sequence: Synthetic oligonucleotide
  Target: SCNA; (+) strand; PAM type: NNNNGHTT; PAM sequence: AAGTGATT
aacctctgcctcccgggttc

SEQ ID NO: 13193 - DNA, 20 bp, Artificial Sequence
  Description of Artificial Sequence: Synthetic oligonucleotide
  Target: SCNA; (+) strand; PAM type: NNNNGHTT; PAM sequence: CAGGGTTT
ttttgtatttttagtagaga

SEQ ID NO: 13194 - DNA, 20 bp, Artificial Sequence
  Description of Artificial Sequence: Synthetic oligonucleotide
  Target: SCNA; (+) strand; PAM type: NNNNGHTT; PAM sequence: CTGGGATT
ccttggcctcccacaaagtg

SEQ ID NO: 13195 - DNA, 20 bp, Artificial Sequence
  Description of Artificial Sequence: Synthetic oligonucleotide
  Target: SCNA; (+) strand; PAM type: NNNNGHTT; PAM sequence: CCAAGTTT
ctatatgcatctagtgttcc

SEQ ID NO: 13196 - DNA, 20 bp, Artificial Sequence
  Description of Artificial Sequence: Synthetic oligonucleotide
  Target: SCNA; (+) strand; PAM type: NNNNGHTT; PAM sequence: GAGTGTTT
attccaggaaaacagatatt

SEQ ID NO: 13197 - DNA, 20 bp, Artificial Sequence
  Description of Artificial Sequence: Synthetic oligonucleotide
  Target: SCNA; (+) strand; PAM type: NNNNGHTT; PAM sequence: CTCTGTTT
agttccatatccttttgacc

SEQ ID NO: 13198 - DNA, 20 bp, Artificial Sequence
  Description of Artificial Sequence: Synthetic oligonucleotide
  Target: SCNA; (+) strand; PAM type: NNNNGHTT; PAM sequence: GCCAGCTT
ttgaccctctgtttgctgta

SEQ ID NO: 13199 - DNA, 20 bp, Artificial Sequence
  Description of Artificial Sequence: Synthetic oligonucleotide
  Target: SCNA; (+) strand; PAM type: NNNNGHTT; PAM sequence: CTTTGATT
cctctgtttgctgtagccag

SEQ ID NO: 13200 - DNA, 20 bp, Artificial Sequence
  Description of Artificial Sequence: Synthetic oligonucleotide
  Target: SCNA; (+) strand; PAM type: NNNNGHTT; PAM sequence: TTTGGATT
gctgtagccagctttgattc

SEQ ID NO: 13201 - DNA, 20 bp, Artificial Sequence
  Description of Artificial Sequence: Synthetic oligonucleotide
  Target: SCNA; (+) strand; PAM type: NNNNGHTT; PAM sequence: CAGGGTTT
gtaatgtataacaatcaact

SEQ ID NO: 13202 - DNA, 20 bp, Artificial Sequence
  Description of Artificial Sequence: Synthetic oligonucleotide
  Target: SCNA; (+) strand; PAM type: NNNNGHTT; PAM sequence: ATAAGCTT
acaatctttatcaatgttct

SEQ ID NO: 13203 - DNA, 20 bp, Artificial Sequence
  Description of Artificial Sequence: Synthetic oligonucleotide
  Target: SCNA; (+) strand; PAM type: NNNNGHTT; PAM sequence: TTCAGTTT
attcagaagtaaatgtggac

SEQ ID NO: 13204 - DNA, 20 bp, Artificial Sequence
  Description of Artificial Sequence: Synthetic oligonucleotide
  Target: SCNA; (+) strand; PAM type: NNNNGHTT; PAM sequence: AGGGGTTT
tggacttcagttttgtgggc

SEQ ID NO: 13205 - DNA, 20 bp, Artificial Sequence
  Description of Artificial Sequence: Synthetic oligonucleotide
  Target: SCNA; (+) strand; PAM type: NNNNGHTT; PAM sequence: GTATGTTT
gtgggcaggggtttacagaa

SEQ ID NO: 13206 - DNA, 20 bp, Artificial Sequence
  Description of Artificial Sequence: Synthetic oligonucleotide
  Target: SCNA; (+) strand; PAM type: NNNNGHTT; PAM sequence: TAAAGTTT
tttacagaagtatgttttac

SEQ ID NO: 13207 - DNA, 20 bp, Artificial Sequence
  Description of Artificial Sequence: Synthetic oligonucleotide
  Target: SCNA; (+) strand; PAM type: NNNNGHTT; PAM sequence: CAAAGTTT
tattagaaatagttaaaaga

SEQ ID NO: 13208 - DNA, 20 bp, Artificial Sequence
  Description of Artificial Sequence: Synthetic oligonucleotide
  Target: SCNA; (+) strand; PAM type: NNNNGHTT; PAM sequence: ATGTGTTT
aatattgttgtaaaatttct

SEQ ID NO: 13209 - DNA, 20 bp, Artificial Sequence
  Description of Artificial Sequence: Synthetic oligonucleotide
  Target: SCNA; (+) strand; PAM type: NNNNGHTT; PAM sequence: ATTTGTTT
attttcaacttagagaaaca

SEQ ID NO: 13210 - DNA, 20 bp, Artificial Sequence
  Description of Artificial Sequence: Synthetic oligonucleotide
  Target: SCNA; (+) strand; PAM type: NNNNGHTT; PAM sequence: ACATGATT
agttcttcccacactttgac

SEQ ID NO: 13211 - DNA, 20 bp, Artificial Sequence
  Description of Artificial Sequence: Synthetic oligonucleotide
  Target: SCNA; (+) strand; PAM type: NNNNGHTT; PAM sequence: GTAAGATT
tgattagaaaaaaaaaggca

SEQ ID NO: 13212 - DNA, 20 bp, Artificial Sequence
  Description of Artificial Sequence: Synthetic oligonucleotide
  Target: SCNA; (+) strand; PAM type: NNNNGHTT; PAM sequence: TTGTGTTT
tggggttaagtagaattcac

SEQ ID NO: 13213 - DNA, 20 bp, Artificial Sequence
  Description of Artificial Sequence: Synthetic oligonucleotide
  Target: SCNA; (+) strand; PAM type: NNNNGHTT; PAM sequence: GCTGGATT
tggaatttggaggcaatggg

SEQ ID NO: 13214 - DNA, 20 bp, Artificial Sequence
  Description of Artificial Sequence: Synthetic oligonucleotide
  Target: SCNA; (+) strand; PAM type: NNNNGHTT; PAM sequence: AAGAGTTT
cacttgaaataacaatttgc

SEQ ID NO: 13215 - DNA, 20 bp, Artificial Sequence
  Description of Artificial Sequence: Synthetic oligonucleotide
  Target: SCNA; (+) strand; PAM type: NNNNGHTT; PAM sequence: TTTTGCTT
gaaataacaatttgcaagag

SEQ ID NO: 13216 - DNA, 20 bp, Artificial Sequence
  Description of Artificial Sequence: Synthetic oligonucleotide
  Target: SCNA; (+) strand; PAM type: NNNNGHTT; PAM sequence: GCCTGATT
tttgctttgctcaatattag

SEQ ID NO: 13217 - DNA, 20 bp, Artificial Sequence
  Description of Artificial Sequence: Synthetic oligonucleotide
  Target: SCNA; (+) strand; PAM type: NNNNGHTT; PAM sequence: ATGTGTTT
caattttttctaaacccaaa

SEQ ID NO: 13218 - DNA, 20 bp, Artificial Sequence
  Description of Artificial Sequence: Synthetic oligonucleotide
  Target: SCNA; (+) strand; PAM type: NNNNGHTT; PAM sequence: ACCAGCTT
agtcattcactacttggaca

SEQ ID NO: 13219 - DNA, 20 bp, Artificial Sequence
  Description of Artificial Sequence: Synthetic oligonucleotide
  Target: SCNA; (+) strand; PAM type: NNNNGHTT; PAM sequence: AGAAGATT
taataagccagggaaggaag

SEQ ID NO: 13220 - DNA, 20 bp, Artificial Sequence
  Description of Artificial Sequence: Synthetic oligonucleotide
  Target: SCNA; (+) strand; PAM type: NNNNGHTT; PAM sequence: GCAAGATT
aaagagcccacatagccaaa

SEQ ID NO: 13221 - DNA, 20 bp, Artificial Sequence
  Description of Artificial Sequence: Synthetic oligonucleotide
  Target: SCNA; (+) strand; PAM type: NNNNGHTT; PAM sequence: ACCTGCTT
aaatctggaggcatcacatt

SEQ ID NO: 13222 - DNA, 20 bp, Artificial Sequence
  Description of Artificial Sequence: Synthetic oligonucleotide
  Target: SCNA; (+) strand; PAM type: NNNNGHTT; PAM sequence: GATCGATT
gtattgtatgggttacataa

SEQ ID NO: 13223 - DNA, 20 bp, Artificial Sequence
  Description of Artificial Sequence: Synthetic oligonucleotide
  Target: SCNA; (+) strand; PAM type: NNNNGHTT; PAM sequence: GTGAGATT
atttgatgtcccaaactatt

SEQ ID NO: 13224 - DNA, 20 bp, Artificial Sequence
  Description of Artificial Sequence: Synthetic oligonucleotide
  Target: SCNA; (+) strand; PAM type: NNNNGHTT; PAM sequence: TGCTGATT
taaaaaatagcaaactaccc

SEQ ID NO: 13225 - DNA, 20 bp, Artificial Sequence
  Description of Artificial Sequence: Synthetic oligonucleotide
  Target: SCNA; (+) strand; PAM type: NNNNGHTT; PAM sequence: TGAAGCTT
actaccctgctgatttccca

SEQ ID NO: 13226 - DNA, 20 bp, Artificial Sequence
  Description of Artificial Sequence: Synthetic oligonucleotide
  Target: SCNA; (+) strand; PAM type: NNNNGHTT; PAM sequence: AACAGCTT
cttaagcctctacatactta

SEQ ID NO: 13227 - DNA, 20 bp, Artificial Sequence
  Description of Artificial Sequence: Synthetic oligonucleotide
  Target: SCNA; (+) strand; PAM type: NNNNGHTT; PAM sequence: GACAGCTT
agcttcaaatgcctatctga

SEQ ID NO: 13228 - DNA, 20 bp, Artificial Sequence
  Description of Artificial Sequence: Synthetic oligonucleotide
  Target: SCNA; (+) strand; PAM type: NNNNGHTT; PAM sequence: CCCTGTTT
gctttgtaatgggtctctgc

SEQ ID NO: 13229 - DNA, 20 bp, Artificial Sequence
  Description of Artificial Sequence: Synthetic oligonucleotide
  Target: SCNA; (+) strand; PAM type: NNNNGHTT; PAM sequence: GTCTGTTT
ctaagtctctgttaatgttg

SEQ ID NO: 13230 - DNA, 20 bp, Artificial Sequence
  Description of Artificial Sequence: Synthetic oligonucleotide
  Target: SCNA; (+) strand; PAM type: NNNNGHTT; PAM sequence: GGGTGCTT
tatgaggcctttcctgagag

SEQ ID NO: 13231 - DNA, 20 bp, Artificial Sequence
  Description of Artificial Sequence: Synthetic oligonucleotide
  Target: SCNA; (+) strand; PAM type: NNNNGHTT; PAM sequence: CTCAGTTT
agttcccctgccccaggtgc

SEQ ID NO: 13232 - DNA, 20 bp, Artificial Sequence
  Description of Artificial Sequence: Synthetic oligonucleotide
  Target: SCNA; (+) strand; PAM type: NNNNGHTT; PAM sequence: CTTAGTTT
atgacaagtatctgtactca

SEQ ID NO: 13233 - DNA, 20 bp, Artificial Sequence
  Description of Artificial Sequence: Synthetic oligonucleotide
  Target: SCNA; (+) strand; PAM type: NNNNGHTT; PAM sequence: GGATGCTT
tactccttgatggccttcca

SEQ ID NO: 13234 - DNA, 20 bp, Artificial Sequence
  Description of Artificial Sequence: Synthetic oligonucleotide
  Target: SCNA; (+) strand; PAM type: NNNNGHTT; PAM sequence: GTATGTTT
ggatgtccgtgtgtgtgtgt

SEQ ID NO: 13235 - DNA, 20 bp, Artificial Sequence
  Description of Artificial Sequence: Synthetic oligonucleotide
  Target: SCNA; (+) strand; PAM type: NNNNGHTT; PAM sequence: TTTGGTTT
tccgtgtgtgtgtgtgtatg

SEQ ID NO: 13236 - DNA, 20 bp, Artificial Sequence
  Description of Artificial Sequence: Synthetic oligonucleotide
  Target: SCNA; (+) strand; PAM type: NNNNGHTT; PAM sequence: ACTGGATT
tgtgtgtatgtttggttttt

SEQ ID NO: 13237 - DNA, 20 bp, Artificial Sequence
  Description of Artificial Sequence: Synthetic oligonucleotide
  Target: SCNA; (+) strand; PAM type: NNNNGHTT; PAM sequence: ATGTGCTT
ccttccactgaacttcattc

SEQ ID NO: 13238 - DNA, 20 bp, Artificial Sequence
  Description of Artificial Sequence: Synthetic oligonucleotide
  Target: SCNA; (+) strand; PAM type: NNNNGHTT; PAM sequence: TCTAGTTT
aaatgtaaacctctggtgcc

SEQ ID NO: 13239 - DNA, 20 bp, Artificial Sequence
  Description of Artificial Sequence: Synthetic oligonucleotide
  Target: SCNA; (+) strand; PAM type: NNNNGHTT; PAM sequence: AAGAGTTT
taaagatgacgaatattctg

SEQ ID NO: 13240 - DNA, 20 bp, Artificial Sequence
  Description of Artificial Sequence: Synthetic oligonucleotide
  Target: SCNA; (+) strand; PAM type: NNNNGHTT; PAM sequence: AATTGTTT
agagttttcaggacacacag

SEQ ID NO: 13241 - DNA, 20 bp, Artificial Sequence
  Description of Artificial Sequence: Synthetic oligonucleotide
  Target: SCNA; (+) strand; PAM type: NNNNGHTT; PAM sequence: AAAAGATT
cacctgggaaattcaatgca

SEQ ID NO: 13242 - DNA, 20 bp, Artificial Sequence
  Description of Artificial Sequence: Synthetic oligonucleotide
  Target: SCNA; (+) strand; PAM type: NNNNGHTT; PAM sequence: AGCAGATT
tatcctataaaagaaaacat

SEQ ID NO: 13243 - DNA, 20 bp, Artificial Sequence
  Description of Artificial Sequence: Synthetic oligonucleotide
  Target: SCNA; (+) strand; PAM type: NNNNGHTT; PAM sequence: AGCAGATT
agaaaacatagcagattaat

SEQ ID NO: 13244 - DNA, 20 bp, Artificial Sequence
  Description of Artificial Sequence: Synthetic oligonucleotide
  Target: SCNA; (+) strand; PAM type: NNNNGHTT; PAM sequence: AAGAGATT
gcataaaccctgctagccag

SEQ ID NO: 13245 - DNA, 20 bp, Artificial Sequence
  Description of Artificial Sequence: Synthetic oligonucleotide
  Target: SCNA; (+) strand; PAM type: NNNNGHTT; PAM sequence: CTAAGCTT
gaattttgtatccagtgaaa

SEQ ID NO: 13246 - DNA, 20 bp, Artificial Sequence
  Description of Artificial Sequence: Synthetic oligonucleotide
  Target: SCNA; (+) strand; PAM type: NNNNGHTT; PAM sequence: AAAAGATT
gcaattcttatatcagacaa

SEQ ID NO: 13247 - DNA, 20 bp, Artificial Sequence
  Description of Artificial Sequence: Synthetic oligonucleotide
  Target: SCNA; (+) strand; PAM type: NNNNGHTT; PAM sequence: CTGAGCTT
aaagagcacaaatagacaat

SEQ ID NO: 13248 - DNA, 20 bp, Artificial Sequence
  Description of Artificial Sequence: Synthetic oligonucleotide
  Target: SCNA; (+) strand; PAM type: NNNNGHTT; PAM sequence: AGGAGTTT
caggcggatcaccataagtc

SEQ ID NO: 13249 - DNA, 20 bp, Artificial Sequence
  Description of Artificial Sequence: Synthetic oligonucleotide
  Target: SCNA; (+) strand; PAM type: NNNNGHTT; PAM sequence: ACCTGCTT
aaaagataaatgaaacaaaa

SEQ ID NO: 13250 - DNA, 20 bp, Artificial Sequence
  Description of Artificial Sequence: Synthetic oligonucleotide
  Target: SCNA; (+) strand; PAM type: NNNNGHTT; PAM sequence: GCAAGATT
acaaaatcaatagaccattg

SEQ ID NO: 13251 - DNA, 20 bp, Artificial Sequence
  Description of Artificial Sequence: Synthetic oligonucleotide
  Target: SCNA; (+) strand; PAM type: NNNNGHTT; PAM sequence: AAAAGATT
aactgataccacagaaataa

SEQ ID NO: 13252 - DNA, 20 bp, Artificial Sequence
  Description of Artificial Sequence: Synthetic oligonucleotide
  Target: SCNA; (+) strand; PAM type: NNNNGHTT; PAM sequence: CCTAGATT
tcctgcatatatacaaacct

SEQ ID NO: 13253 - DNA, 20 bp, Artificial Sequence
  Description of Artificial Sequence: Synthetic oligonucleotide
  Target: SCNA; (+) strand; PAM type: NNNNGHTT; PAM sequence: GATGGATT
acaaaaaaagtctaggacca

SEQ ID NO: 13254 - DNA, 20 bp, Artificial Sequence
  Description of Artificial Sequence: Synthetic oligonucleotide
  Target: SCNA; (+) strand; PAM type: NNNNGHTT; PAM sequence: GTGGGTTT
agataatccaccatgatcag

SEQ ID NO: 13255 - DNA, 20 bp, Artificial Sequence
  Description of Artificial Sequence: Synthetic oligonucleotide
  Target: SCNA; (+) strand; PAM type: NNNNGHTT; PAM sequence: GGTTGCTT
gtttcataccggggatgcag

SEQ ID NO: 13256 - DNA, 20 bp, Artificial Sequence
  Description of Artificial Sequence: Synthetic oligonucleotide
  Target: SCNA; (+) strand; PAM type: NNNNGHTT; PAM sequence: TATTGCTT
aagcatttgacaaaattcag

SEQ ID NO: 13257 - DNA, 20 bp, Artificial Sequence
  Description of Artificial Sequence: Synthetic oligonucleotide
  Target: SCNA; (+) strand; PAM type: NNNNGHTT; PAM sequence: TTATGATT
tgacaaaattcagtattgct

SEQ ID NO: 13258 - DNA, 20 bp, Artificial Sequence
  Description of Artificial Sequence: Synthetic oligonucleotide
  Target: SCNA; (+) strand; PAM type: NNNNGHTT; PAM sequence: GCCTGCTT
aactggaataagacaagaat

SEQ ID NO: 13259 - DNA, 20 bp, Artificial Sequence
  Description of Artificial Sequence: Synthetic oligonucleotide
  Target: SCNA; (+) strand; PAM type: NNNNGHTT; PAM sequence: ATATGTTT
actgttgctctttgccgatg

SEQ ID NO: 13260 - DNA, 20 bp, Artificial Sequence
  Description of Artificial Sequence: Synthetic oligonucleotide
  Target: SCNA; (+) strand; PAM type: NNNNGHTT; PAM sequence: TAAAGTTT
gatctgataagttaattcag

SEQ ID NO: 13261 - DNA, 20 bp, Artificial Sequence
  Description of Artificial Sequence: Synthetic oligonucleotide
  Target: SCNA; (+) strand; PAM type: NNNNGHTT; PAM sequence: AAATGCTT
acaacagctgcaaaaaaaaa

SEQ ID NO: 13262 - DNA, 20 bp, Artificial Sequence
  Description of Artificial Sequence: Synthetic oligonucleotide
  Target: SCNA; (+) strand; PAM type: NNNNGHTT; PAM sequence: CATGGATT
atgaaaacacatcccttatt

SEQ ID NO: 13263 - DNA, 20 bp, Artificial Sequence
  Description of Artificial Sequence: Synthetic oligonucleotide
  Target: SCNA; (+) strand; PAM type: NNNNGHTT; PAM sequence: ACTAGATT
aaaataacaaatctggaggc

SEQ ID NO: 13264 - DNA, 20 bp, Artificial Sequence
  Description of Artificial Sequence: Synthetic oligonucleotide
  Target: SCNA; (+) strand; PAM type: NNNNGHTT; PAM sequence: ACTGGCTT
ttggtaaaactcttctagac

SEQ ID NO: 13265 - DNA, 20 bp, Artificial Sequence
  Description of Artificial Sequence: Synthetic oligonucleotide
  Target: SCNA; (+) strand; PAM type: NNNNGHTT; PAM sequence: TAAAGCTT
atagatgggacctaaaacta

SEQ ID NO: 13266 - DNA, 20 bp, Artificial Sequence
  Description of Artificial Sequence: Synthetic oligonucleotide
  Target: SCNA; (+) strand; PAM type: NNNNGHTT; PAM sequence: TGGAGATT
caaccaccatggaaaagtta

SEQ ID NO: 13267 - DNA, 20 bp, Artificial Sequence
  Description of Artificial Sequence: Synthetic oligonucleotide
  Target: SCNA; (+) strand; PAM type: NNNNGHTT; PAM sequence: GCATGTTT
tgaaaaagacacttgcacat

SEQ ID NO: 13268 - DNA, 20 bp, Artificial Sequence
  Description of Artificial Sequence: Synthetic oligonucleotide
  Target: SCNA; (+) strand; PAM type: NNNNGHTT; PAM sequence: AAGTGATT
caactgagtagaggcccaat

SEQ ID NO: 13269 - DNA, 20 bp, Artificial Sequence
  Description of Artificial Sequence: Synthetic oligonucleotide
  Target: SCNA; (+) strand; PAM type: NNNNGHTT; PAM sequence: CATCGATT
gaatccactacaaatcactt

SEQ ID NO: 13270 - DNA, 20 bp, Artificial Sequence
  Description of Artificial Sequence: Synthetic oligonucleotide
  Target: SCNA; (+) strand; PAM type: NNNNGHTT; PAM sequence: CAAGGTTT
caactggctgtactttgtaa

SEQ ID NO: 13271 - DNA, 20 bp, Artificial Sequence
  Description of Artificial Sequence: Synthetic oligonucleotide
  Target: SCNA; (+) strand; PAM type: NNNNGHTT; PAM sequence: GGAAGTTT
taatctgtgaaaatgcaact

SEQ ID NO: 13272 - DNA, 20 bp, Artificial Sequence
  Description of Artificial Sequence: Synthetic oligonucleotide
  Target: SCNA; (+) strand; PAM type: NNNNGHTT; PAM sequence: TGTGGCTT
gaaaatgcaactggaagttt

SEQ ID NO: 13273 - DNA, 20 bp, Artificial Sequence
  Description of Artificial Sequence: Synthetic oligonucleotide
  Target: SCNA; (+) strand; PAM type: NNNNGHTT; PAM sequence: CCTAGTTT
aactggaagttttgtggctt

SEQ ID NO: 13274 - DNA, 20 bp, Artificial Sequence
  Description of Artificial Sequence: Synthetic oligonucleotide
  Target: SCNA; (+) strand; PAM type: NNNNGHTT; PAM sequence: CATAGTTT
aggcaaaacctttatagacc

SEQ ID NO: 13275 - DNA, 20 bp, Artificial Sequence
  Description of Artificial Sequence: Synthetic oligonucleotide
  Target: SCNA; (+) strand; PAM type: NNNNGHTT; PAM sequence: TCCTGATT
gtgtccaaatgagtgcagaa

SEQ ID NO: 13276 - DNA, 20 bp, Artificial Sequence
  Description of Artificial Sequence: Synthetic oligonucleotide
  Target: SCNA; (+) strand; PAM type: NNNNGHTT; PAM sequence: AGAGGATT
aggtaagtgactctgtaata

SEQ ID NO: 13277 - DNA, 20 bp, Artificial Sequence
  Description of Artificial Sequence: Synthetic oligonucleotide
  Target: SCNA; (+) strand; PAM type: NNNNGHTT; PAM sequence: AACAGCTT
ggattgtgtagcatttacct

SEQ ID NO: 13278 - DNA, 20 bp, Artificial Sequence
  Description of Artificial Sequence: Synthetic oligonucleotide
  Target: SCNA; (+) strand; PAM type: NNNNGHTT; PAM sequence: GCTAGTTT
gagccaaataactgacttct

SEQ ID NO: 13279 - DNA, 20 bp, Artificial Sequence
  Description of Artificial Sequence: Synthetic oligonucleotide
  Target: SCNA; (+) strand; PAM type: NNNNGHTT; PAM sequence: CACTGTTT
cctttctctatcccagagcg

SEQ ID NO: 13280 - DNA, 20 bp, Artificial Sequence
  Description of Artificial Sequence: Synthetic oligonucleotide
  Target: SCNA; (+) strand; PAM type: NNNNGHTT; PAM sequence: GTGTGATT
taaaaataataatgtagaag

SEQ ID NO: 13281 - DNA, 20 bp, Artificial Sequence
  Description of Artificial Sequence: Synthetic oligonucleotide
  Target: SCNA; (+) strand; PAM type: NNNNGHTT; PAM sequence: TACAGTTT
aatgtagaaggtgtgatttt

SEQ ID NO: 13282 - DNA, 20 bp, Artificial Sequence
  Description of Artificial Sequence: Synthetic oligonucleotide
  Target: SCNA; (+) strand; PAM type: NNNNGHTT; PAM sequence: TTTCGATT
atctagaaaagaaaaatatc

SEQ ID NO: 13283 - DNA, 20 bp, Artificial Sequence
  Description of Artificial Sequence: Synthetic oligonucleotide
  Target: SCNA; (+) strand; PAM type: NNNNGHTT; PAM sequence: CAGTGATT
atggttaataataatcatga

SEQ ID NO: 13284 - DNA, 20 bp, Artificial Sequence
  Description of Artificial Sequence: Synthetic oligonucleotide
  Target: SCNA; (+) strand; PAM type: NNNNGHTT; PAM sequence: ACTTGTTT
gttaatgacctacatgctaa

SEQ ID NO: 13285 - DNA, 20 bp, Artificial Sequence
  Description of Artificial Sequence: Synthetic oligonucleotide
  Target: SCNA; (+) strand; PAM type: NNNNGHTT; PAM sequence: CCCTGCTT
gccattactaactgaaaact

SEQ ID NO: 13286 - DNA, 20 bp, Artificial Sequence
  Description of Artificial Sequence: Synthetic oligonucleotide
  Target: SCNA; (+) strand; PAM type: NNNNGHTT; PAM sequence: AAGTGTTT
tagctgaaccaacacttaac

SEQ ID NO: 13287 - DNA, 20 bp, Artificial Sequence
  Description of Artificial Sequence: Synthetic oligonucleotide
  Target: SCNA; (+) strand; PAM type: NNNNGHTT; PAM sequence: GCTAGTTT
ttcagagaagttctcctgct

SEQ ID NO: 13288 - DNA, 20 bp, Artificial Sequence
  Description of Artificial Sequence: Synthetic oligonucleotide
  Target: SCNA; (+) strand; PAM type: NNNNGHTT; PAM sequence: GGTTGTTT
ataagcatccacatgaaatt

SEQ ID NO: 13289 - DNA, 20 bp, Artificial Sequence
  Description of Artificial Sequence: Synthetic oligonucleotide
  Target: SCNA; (+) strand; PAM type: NNNNGHTT; PAM sequence: ACATGTTT
gtttccgcatgcacgggcaa

SEQ ID NO: 13290 - DNA, 20 bp, Artificial Sequence
  Description of Artificial Sequence: Synthetic oligonucleotide
  Target: SCNA; (+) strand; PAM type: NNNNGHTT; PAM sequence: TTAGGCTT
gaatcgggtaagacaaaaag

SEQ ID NO: 13291 - DNA, 20 bp, Artificial Sequence
  Description of Artificial Sequence: Synthetic oligonucleotide
  Target: SCNA; (+) strand; PAM type: NNNNGHTT; PAM sequence: GAAAGATT
agttatcaatagaatattaa

SEQ ID NO: 13292 - DNA, 20 bp, Artificial Sequence
  Description of Artificial Sequence: Synthetic oligonucleotide
  Target: SCNA; (+) strand; PAM type: NNNNGHTT; PAM sequence: GACGGATT
tttcaccagaaaataggaaa

SEQ ID NO: 13293 - DNA, 20 bp, Artificial Sequence
  Description of Artificial Sequence: Synthetic oligonucleotide
  Target: SCNA; (+) strand; PAM type: NNNNGHTT; PAM sequence: TATTGTTT
cattatctgttgctatgtgc

SEQ ID NO: 13294 - DNA, 20 bp, Artificial Sequence
  Description of Artificial Sequence: Synthetic oligonucleotide
  Target: SCNA; (+) strand; PAM type: NNNNGHTT; PAM sequence: TTTTGCTT
tggcaatcaagccaaacaaa

SEQ ID NO: 13295 - DNA, 20 bp, Artificial Sequence
  Description of Artificial Sequence: Synthetic oligonucleotide
  Target: SCNA; (+) strand; PAM type: NNNNGHTT; PAM sequence: ACCCGATT
caaacaaattttgcttttac

SEQ ID NO: 13296 - DNA, 20 bp, Artificial Sequence
  Description of Artificial Sequence: Synthetic oligonucleotide
  Target: SCNA; (+) strand; PAM type: NNNNGHTT; PAM sequence: CACGGCTT
ttttagcattaatctacaga

SEQ ID NO: 13297 - DNA, 20 bp, Artificial Sequence
  Description of Artificial Sequence: Synthetic oligonucleotide
  Target: SCNA; (+) strand; PAM type: NNNNGHTT; PAM sequence: AAATGTTT
ttaaagctacattttgggaa

SEQ ID NO: 13298 - DNA, 20 bp, Artificial Sequence
  Description of Artificial Sequence: Synthetic oligonucleotide
  Target: SCNA; (+) strand; PAM type: NNNNGHTT; PAM sequence: GTAGGATT
gttcacttgtgggatgaaaa

SEQ ID NO: 13299 - DNA, 20 bp, Artificial Sequence
  Description of Artificial Sequence: Synthetic oligonucleotide
  Target: SCNA; (+) strand; PAM type: NNNNGHTT; PAM sequence: TTGTGTTT
ctaaatggatgctaagacaa

SEQ ID NO: 13300 - DNA, 20 bp, Artificial Sequence
  Description of Artificial Sequence: Synthetic oligonucleotide
  Target: SCNA; (+) strand; PAM type: NNNNGHTT; PAM sequence: GTGGGCTT
aagacaattgtgtttcaact

SEQ ID NO: 13301 - DNA, 20 bp, Artificial Sequence
  Description of Artificial Sequence: Synthetic oligonucleotide
  Target: SCNA; (+) strand; PAM type: NNNNGHTT; PAM sequence: ATGAGTTT
tgagaaactcatttatgatc

SEQ ID NO: 13302 - DNA, 20 bp, Artificial Sequence
  Description of Artificial Sequence: Synthetic oligonucleotide
  Target: SCNA; (+) strand; PAM type: NNNNGHTT; PAM sequence: GATGGATT
ttccaggatggacatataaa

SEQ ID NO: 13303 - DNA, 20 bp, Artificial Sequence
  Description of Artificial Sequence: Synthetic oligonucleotide
  Target: SCNA; (+) strand; PAM type: NNNNGHTT; PAM sequence: TATAGTTT
tataatacaatatacagtat

SEQ ID NO: 13304 - DNA, 20 bp, Artificial Sequence
  Description of Artificial Sequence: Synthetic oligonucleotide
  Target: SCNA; (+) strand; PAM type: NNNNGHTT; PAM sequence: CTGTGATT
acagtattatagtttatggt

SEQ ID NO: 13305 - DNA, 20 bp, Artificial Sequence
  Description of Artificial Sequence: Synthetic oligonucleotide
  Target: SCNA; (+) strand; PAM type: NNNNGHTT; PAM sequence: TGTGGCTT
aaaagaagagaagagtatgt

SEQ ID NO: 13306 - DNA, 20 bp, Artificial Sequence
  Description of Artificial Sequence: Synthetic oligonucleotide
  Target: SCNA; (+) strand; PAM type: NNNNGHTT; PAM sequence: GAATGTTT
ggatggatgaatgcatggat

SEQ ID NO: 13307 - DNA, 20 bp, Artificial Sequence
  Description of Artificial Sequence: Synthetic oligonucleotide
  Target: SCNA; (+) strand; PAM type: NNNNGHTT; PAM sequence: ACATGCTT
gtcttagataatactatatg

SEQ ID NO: 13308 - DNA, 20 bp, Artificial Sequence
  Description of Artificial Sequence: Synthetic oligonucleotide
  Target: SCNA; (+) strand; PAM type: NNNNGHTT; PAM sequence: CTCAGATT
gagaccctgggaccacaaag

SEQ ID NO: 13309 - DNA, 20 bp, Artificial Sequence
  Description of Artificial Sequence: Synthetic oligonucleotide
  Target: SCNA; (+) strand; PAM type: NNNNGHTT; PAM sequence: GAAAGCTT
tatttctactaatgaacaga

SEQ ID NO: 13310 - DNA, 20 bp, Artificial Sequence
  Description of Artificial Sequence: Synthetic oligonucleotide
  Target: SCNA; (+) strand; PAM type: NNNNGHTT; PAM sequence: TATTGTTT
cctgtaattttttctttaaa

SEQ ID NO: 13311 - DNA, 20 bp, Artificial Sequence
  Description of Artificial Sequence: Synthetic oligonucleotide
  Target: SCNA; (+) strand; PAM type: NNNNGHTT; PAM sequence: GCAAGTTT
tgtgttggaaatggggagtt

SEQ ID NO: 13312 - DNA, 20 bp, Artificial Sequence
  Description of Artificial Sequence: Synthetic oligonucleotide
  Target: SCNA; (+) strand; PAM type: NNNNGHTT; PAM sequence: CATTGCTT
gagttgcaagtttgtatttc

SEQ ID NO: 13313 - DNA, 20 bp, Artificial Sequence
  Description of Artificial Sequence: Synthetic oligonucleotide
  Target: SCNA; (+) strand; PAM type: NNNNGHTT; PAM sequence: AGAAGATT
agatatcatcagcagaacat

SEQ ID NO: 13314 - DNA, 20 bp, Artificial Sequence
  Description of Artificial Sequence: Synthetic oligonucleotide
  Target: SCNA; (+) strand; PAM type: NNNNGHTT; PAM sequence: TGGTGCTT
gttacatctggaaactccac

SEQ ID NO: 13315 - DNA, 20 bp, Artificial Sequence
  Description of Artificial Sequence: Synthetic oligonucleotide
  Target: SCNA; (+) strand; PAM type: NNNNGHTT; PAM sequence: TGGAGCTT
ggaaactccactggtgcttt

SEQ ID NO: 13316 - DNA, 20 bp, Artificial Sequence
  Description of Artificial Sequence: Synthetic oligonucleotide
  Target: SCNA; (+) strand; PAM type: NNNNGHTT; PAM sequence: CAATGTTT
atcaatcggtacttatgaag

SEQ ID NO: 13317 - DNA, 20 bp, Artificial Sequence
  Description of Artificial Sequence: Synthetic oligonucleotide
  Target: SCNA; (+) strand; PAM type: NNNNGHTT; PAM sequence: AAGGGATT
gtaaaagtcttgcaacacaa

SEQ ID NO: 13318 - DNA, 20 bp, Artificial Sequence
  Description of Artificial Sequence: Synthetic oligonucleotide
  Target: SCNA; (+) strand; PAM type: NNNNGHTT; PAM sequence: ATAGGTTT
agggattgttctcacaaatc

SEQ ID NO: 13319 - DNA, 20 bp, Artificial Sequence
  Description of Artificial Sequence: Synthetic oligonucleotide
  Target: SCNA; (+) strand; PAM type: NNNNGHTT; PAM sequence: CATTGTTT
gagatggggtggcaaaatct

SEQ ID NO: 13320 - DNA, 20 bp, Artificial Sequence
  Description of Artificial Sequence: Synthetic oligonucleotide
  Target: SCNA; (+) strand; PAM type: NNNNGHTT; PAM sequence: CCTGGTTT
tgagcaagaacactgaattc

SEQ ID NO: 13321 - DNA, 20 bp, Artificial Sequence
  Description of Artificial Sequence: Synthetic oligonucleotide
  Target: SCNA; (+) strand; PAM type: NNNNGHTT; PAM sequence: CAGAGATT
tgatactttcggcagaattc

SEQ ID NO: 13322 - DNA, 20 bp, Artificial Sequence
  Description of Artificial Sequence: Synthetic oligonucleotide
  Target: SCNA; (+) strand; PAM type: NNNNGHTT; PAM sequence: GATGGTTT
cagaattccagagattctca

SEQ ID NO: 13323 - DNA, 20 bp, Artificial Sequence
  Description of Artificial Sequence: Synthetic oligonucleotide
  Target: SCNA; (+) strand; PAM type: NNNNGHTT; PAM sequence: TTAGGTTT
taaaaactgtaccatatgag

SEQ ID NO: 13324 - DNA, 20 bp, Artificial Sequence
  Description of Artificial Sequence: Synthetic oligonucleotide
  Target: SCNA; (+) strand; PAM type: NNNNGHTT; PAM sequence: GGAAGCTT
cccctcttagatatttctgg

SEQ ID NO: 13325 - DNA, 20 bp, Artificial Sequence
  Description of Artificial Sequence: Synthetic oligonucleotide
  Target: SCNA; (+) strand; PAM type: NNNNGHTT; PAM sequence: AAGAGCTT
tcataaatcagtcctctata

SEQ ID NO: 13326 - DNA, 20 bp, Artificial Sequence
  Description of Artificial Sequence: Synthetic oligonucleotide
  Target: SCNA; (+) strand; PAM type: NNNNGHTT; PAM sequence: ATATGTTT
ctactgtaaaaatataccta

SEQ ID NO: 13327 - DNA, 20 bp, Artificial Sequence
  Description of Artificial Sequence: Synthetic oligonucleotide
  Target: SCNA; (+) strand; PAM type: NNNNGHTT; PAM sequence: TAATGATT
gtacaatctgaagttaaaac

SEQ ID NO: 13328 - DNA, 20 bp, Artificial Sequence
  Description of Artificial Sequence: Synthetic oligonucleotide
  Target: SCNA; (+) strand; PAM type: NNNNGHTT; PAM sequence: CTCTGCTT
ccatttgactctcacaataa

SEQ ID NO: 13329 - DNA, 20 bp, Artificial Sequence
  Description of Artificial Sequence: Synthetic oligonucleotide
  Target: SCNA; (+) strand; PAM type: NNNNGHTT; PAM sequence: GTAAGATT
taataaccctcttactatat

SEQ ID NO: 13330 - DNA, 20 bp, Artificial Sequence
  Description of Artificial Sequence: Synthetic oligonucleotide
  Target: SCNA; (+) strand; PAM type: NNNNGHTT; PAM sequence: TAGTGATT
aggactcttaaattatgtgc

SEQ ID NO: 13331 - DNA, 20 bp, Artificial Sequence
  Description of Artificial Sequence: Synthetic oligonucleotide
  Target: SCNA; (+) strand; PAM type: NNNNGHTT; PAM sequence: GCTGGCTT
acattatttctataggatca

SEQ ID NO: 13332 - DNA, 20 bp, Artificial Sequence
  Description of Artificial Sequence: Synthetic oligonucleotide
  Target: SCNA; (+) strand; PAM type: NNNNGHTT; PAM sequence: AAAAGATT
cagctggcttcactgatatc

SEQ ID NO: 13333 - DNA, 20 bp, Artificial Sequence
  Description of Artificial Sequence: Synthetic oligonucleotide
  Target: SCNA; (+) strand; PAM type: NNNNGHTT; PAM sequence: TCAGGATT
cataatgcatttattttgca

SEQ ID NO: 13334 - DNA, 20 bp, Artificial Sequence
  Description of Artificial Sequence: Synthetic oligonucleotide
  Target: SCNA; (+) strand; PAM type: NNNNGHTT; PAM sequence: CAACGTTT
tattttgcatcaggattttt

SEQ ID NO: 13335 - DNA, 20 bp, Artificial Sequence
  Description of Artificial Sequence: Synthetic oligonucleotide
  Target: SCNA; (+) strand; PAM type: NNNNGHTT; PAM sequence: CCAAGATT
agaattgatgaaaatgtaaa

SEQ ID NO: 13336 - DNA, 20 bp, Artificial Sequence
  Description of Artificial Sequence: Synthetic oligonucleotide
  Target: SCNA; (+) strand; PAM type: NNNNGHTT; PAM sequence: ACATGATT
aaactgaaaccagagagatc

SEQ ID NO: 13337 - DNA, 20 bp, Artificial Sequence
  Description of Artificial Sequence: Synthetic oligonucleotide
  Target: SCNA; (+) strand; PAM type: NNNNGHTT; PAM sequence: AATGGTTT
cacactccaactatgggacc

SEQ ID NO: 13338 - DNA, 20 bp, Artificial Sequence
  Description of Artificial Sequence: Synthetic oligonucleotide
  Target: SCNA; (+) strand; PAM type: NNNNGHTT; PAM sequence: CATTGTTT
atgggaccaatggtttgccc

SEQ ID NO: 13339 - DNA, 20 bp, Artificial Sequence
  Description of Artificial Sequence: Synthetic oligonucleotide
  Target: SCNA; (+) strand; PAM type: NNNNGHTT; PAM sequence: ATGGGTTT
attgtttattgcctatggta

SEQ ID NO: 13340 - DNA, 20 bp, Artificial Sequence
  Description of Artificial Sequence: Synthetic oligonucleotide
  Target: SCNA; (+) strand; PAM type: NNNNGHTT; PAM sequence: AATAGATT
aaagatgggatgggtgggta

SEQ ID NO: 13341 - DNA, 20 bp, Artificial Sequence
  Description of Artificial Sequence: Synthetic oligonucleotide
  Target: SCNA; (+) strand; PAM type: NNNNGHTT; PAM sequence: AGTAGATT
agattacagcagaaccaagc

SEQ ID NO: 13342 - DNA, 20 bp, Artificial Sequence
  Description of Artificial Sequence: Synthetic oligonucleotide
  Target: SCNA; (+) strand; PAM type: NNNNGHTT; PAM sequence: CTATGCTT
gctctggcagaaactaaaaa

SEQ ID NO: 13343 - DNA, 20 bp, Artificial Sequence
  Description of Artificial Sequence: Synthetic oligonucleotide
  Target: SCNA; (+) strand; PAM type: NNNNGHTT; PAM sequence: TGGAGCTT
aacagaacgactgagtgaaa

SEQ ID NO: 13344 - DNA, 20 bp, Artificial Sequence
  Description of Artificial Sequence: Synthetic oligonucleotide
  Target: SCNA; (+) strand; PAM type: NNNNGHTT; PAM sequence: AAATGCTT
agttctgagctgacatccat

SEQ ID NO: 13345 - DNA, 20 bp, Artificial Sequence
  Description of Artificial Sequence: Synthetic oligonucleotide
  Target: SCNA; (+) strand; PAM type: NNNNGHTT; PAM sequence: CAGTGATT
acacgtggccagatcaatcc

SEQ ID NO: 13346 - DNA, 20 bp, Artificial Sequence
  Description of Artificial Sequence: Synthetic oligonucleotide
  Target: SCNA; (+) strand; PAM type: NNNNGHTT; PAM sequence: GTGTGATT
tcttccatgcaaatatgtta

SEQ ID NO: 13347 - DNA, 20 bp, Artificial Sequence
  Description of Artificial Sequence: Synthetic oligonucleotide
  Target: SCNA; (+) strand; PAM type: NNNNGHTT; PAM sequence: AGTTGATT
gcaaatatgttagtgtgatt

SEQ ID NO: 13348 - DNA, 20 bp, Artificial Sequence
  Description of Artificial Sequence: Synthetic oligonucleotide
  Target: SCNA; (+) strand; PAM type: NNNNGHTT; PAM sequence: ATATGTTT
atgtggcatttgcattacta

SEQ ID NO: 13349 - DNA, 20 bp, Artificial Sequence
  Description of Artificial Sequence: Synthetic oligonucleotide
  Target: SCNA; (+) strand; PAM type: NNNNGHTT; PAM sequence: ATATGTTT
ataaatgttagcaagtataa

SEQ ID NO: 13350 - DNA, 20 bp, Artificial Sequence
  Description of Artificial Sequence: Synthetic oligonucleotide
  Target: SCNA; (+) strand; PAM type: NNNNGHTT; PAM sequence: AACTGTTT
taagactaaacaagaataaa

SEQ ID NO: 13351 - DNA, 20 bp, Artificial Sequence
  Description of Artificial Sequence: Synthetic oligonucleotide
  Target: SCNA; (+) strand; PAM type: NNNNGHTT; PAM sequence: ACATGATT
cttgacacaataacattcaa

SEQ ID NO: 13352 - DNA, 20 bp, Artificial Sequence
  Description of Artificial Sequence: Synthetic oligonucleotide
  Target: SCNA; (+) strand; PAM type: NNNNGHTT; PAM sequence: TAATGTTT
ttgctaaattgtactcaaaa

SEQ ID NO: 13353 - DNA, 20 bp, Artificial Sequence
  Description of Artificial Sequence: Synthetic oligonucleotide
  Target: SCNA; (+) strand; PAM type: NNNNGHTT; PAM sequence: GTATGATT
gtggcacaagccccctgtag

SEQ ID NO: 13354 - DNA, 20 bp, Artificial Sequence
  Description of Artificial Sequence: Synthetic oligonucleotide
  Target: SCNA; (+) strand; PAM type: NNNNGHTT; PAM sequence: TCTAGCTT
aaatttctatactcccatga

SEQ ID NO: 13355 - DNA, 20 bp, Artificial Sequence
  Description of Artificial Sequence: Synthetic oligonucleotide
  Target: SCNA; (+) strand; PAM type: NNNNGHTT; PAM sequence: CTTAGTTT
tctatactcccatgatctag

SEQ ID NO: 13356 - DNA, 20 bp, Artificial Sequence
  Description of Artificial Sequence: Synthetic oligonucleotide
  Target: SCNA; (+) strand; PAM type: NNNNGHTT; PAM sequence: TTCAGTTT
tttcaaccaaataaacggca

SEQ ID NO: 13357 - DNA, 20 bp, Artificial Sequence
  Description of Artificial Sequence: Synthetic oligonucleotide
  Target: SCNA; (+) strand; PAM type: NNNNGHTT; PAM sequence: CAGTGCTT
agttagcatctatccacaca

SEQ ID NO: 13358 - DNA, 20 bp, Artificial Sequence
  Description of Artificial Sequence: Synthetic oligonucleotide
  Target: SCNA; (+) strand; PAM type: NNNNGHTT; PAM sequence: AACAGATT
atccacacacagtgcttaat

SEQ ID NO: 13359 - DNA, 20 bp, Artificial Sequence
  Description of Artificial Sequence: Synthetic oligonucleotide
  Target: SCNA; (+) strand; PAM type: NNNNGHTT; PAM sequence: CAGAGTTT
tgcttaataacagattgtat

SEQ ID NO: 13360 - DNA, 20 bp, Artificial Sequence
  Description of Artificial Sequence: Synthetic oligonucleotide
  Target: SCNA; (+) strand; PAM type: NNNNGHTT; PAM sequence: CTGTGTTT
tgaatgagaatcaacctcta

SEQ ID NO: 13361 - DNA, 20 bp, Artificial Sequence
  Description of Artificial Sequence: Synthetic oligonucleotide
  Target: SCNA; (+) strand; PAM type: NNNNGHTT; PAM sequence: TTAAGTTT
gtagatgttcactaaatgaa

SEQ ID NO: 13362 - DNA, 20 bp, Artificial Sequence
  Description of Artificial Sequence: Synthetic oligonucleotide
  Target: SCNA; (+) strand; PAM type: NNNNGHTT; PAM sequence: TGTAGTTT
cactaaatgaattaagtttt

SEQ ID NO: 13363 - DNA, 20 bp, Artificial Sequence
  Description of Artificial Sequence: Synthetic oligonucleotide
  Target: SCNA; (+) strand; PAM type: NNNNGHTT; PAM sequence: GTTTGATT
aaatgaattaagtttttgta

SEQ ID NO: 13364 - DNA, 20 bp, Artificial Sequence
  Description of Artificial Sequence: Synthetic oligonucleotide
  Target: SCNA; (+) strand; PAM type: NNNNGHTT; PAM sequence: AGAAGTTT
gaaacagatcaaatgtatag

SEQ ID NO: 13365 - DNA, 20 bp, Artificial Sequence
  Description of Artificial Sequence: Synthetic oligonucleotide
  Target: SCNA; (+) strand; PAM type: NNNNGHTT; PAM sequence: CAAGGATT
cagtaagtacctctctaaag

SEQ ID NO: 13366 - DNA, 20 bp, Artificial Sequence
  Description of Artificial Sequence: Synthetic oligonucleotide
  Target: SCNA; (+) strand; PAM type: NNNNGHTT; PAM sequence: GGATGATT
acactgccatccaagccaga

SEQ ID NO: 13367 - DNA, 20 bp, Artificial Sequence
  Description of Artificial Sequence: Synthetic oligonucleotide
  Target: SCNA; (+) strand; PAM type: NNNNGHTT; PAM sequence: ATGTGCTT
cagaggatgattaaattatt

SEQ ID NO: 13368 - DNA, 20 bp, Artificial Sequence
  Description of Artificial Sequence: Synthetic oligonucleotide
  Target: SCNA; (+) strand; PAM type: NNNNGHTT; PAM sequence: CCTGGCTT
atcataaccaccataatcat

SEQ ID NO: 13369 - DNA, 20 bp, Artificial Sequence
  Description of Artificial Sequence: Synthetic oligonucleotide
  Target: SCNA; (+) strand; PAM type: NNNNGHTT; PAM sequence: CTCTGCTT
ctgggcacactgccattgac

SEQ ID NO: 13370 - DNA, 20 bp, Artificial Sequence
  Description of Artificial Sequence: Synthetic oligonucleotide
  Target: SCNA; (+) strand; PAM type: NNNNGHTT; PAM sequence: CAGTGTTT
cttgctcagacatcaaccac

SEQ ID NO: 13371 - DNA, 20 bp, Artificial Sequence
  Description of Artificial Sequence: Synthetic oligonucleotide
  Target: SCNA; (+) strand; PAM type: NNNNGHTT; PAM sequence: CTGAGTTT
atttaaattcattaaaaatt

SEQ ID NO: 13372 - DNA, 20 bp, Artificial Sequence
  Description of Artificial Sequence: Synthetic oligonucleotide
  Target: SCNA; (+) strand; PAM type: NNNNGHTT; PAM sequence: CTTGGATT
acacaaaactgaattcttca

SEQ ID NO: 13373 - DNA, 20 bp, Artificial Sequence
  Description of Artificial Sequence: Synthetic oligonucleotide
  Target: SCNA; (+) strand; PAM type: NNNNGHTT; PAM sequence: CTTTGCTT
gaatcttccttctcttattc

SEQ ID NO: 13374 - DNA, 20 bp, Artificial Sequence
  Description of Artificial Sequence: Synthetic oligonucleotide
  Target: SCNA; (+) strand; PAM type: NNNNGHTT; PAM sequence: CTAGGCTT
tttgcttataaaatatcttc

SEQ ID NO: 13375 - DNA, 20 bp, Artificial Sequence
  Description of Artificial Sequence: Synthetic oligonucleotide
  Target: SCNA; (+) strand; PAM type: NNNNGHTT; PAM sequence: CACTGCTT
atcctttatcacaaaccaaa

SEQ ID NO: 13376 - DNA, 20 bp, Artificial Sequence
  Description of Artificial Sequence: Synthetic oligonucleotide
  Target: SCNA; (+) strand; PAM type: NNNNGHTT; PAM sequence: CAAAGATT
cataattttttttgtcaaag

SEQ ID NO: 13377 - DNA, 20 bp, Artificial Sequence
  Description of Artificial Sequence: Synthetic oligonucleotide
  Target: SCNA; (+) strand; PAM type: NNNNGHTT; PAM sequence: AGGGGCTT
aaatatagctacagaagaaa

SEQ ID NO: 13378 - DNA, 20 bp, Artificial Sequence
  Description of Artificial Sequence: Synthetic oligonucleotide
  Target: SCNA; (+) strand; PAM type: NNNNGHTT; PAM sequence: TTTTGTTT
atagtacacattcagaaaca

SEQ ID NO: 13379 - DNA, 20 bp, Artificial Sequence
  Description of Artificial Sequence: Synthetic oligonucleotide
  Target: SCNA; (+) strand; PAM type: NNNNGHTT; PAM sequence: GGATGTTT
tcagaaacattttgtttcat

SEQ ID NO: 13380 - DNA, 20 bp, Artificial Sequence
  Description of Artificial Sequence: Synthetic oligonucleotide
  Target: SCNA; (+) strand; PAM type: NNNNGHTT; PAM sequence: AAATGCTT
tgtttcatggatgtttcagt

SEQ ID NO: 13381 - DNA, 20 bp, Artificial Sequence
  Description of Artificial Sequence: Synthetic oligonucleotide
  Target: SCNA; (+) strand; PAM type: NNNNGHTT; PAM sequence: ATAAGATT
ttcatttctatgtaggaggt

SEQ ID NO: 13382 - DNA, 20 bp, Artificial Sequence
  Description of Artificial Sequence: Synthetic oligonucleotide
  Target: SCNA; (+) strand; PAM type: NNNNGHTT; PAM sequence: AATAGCTT
tcccttccctgaatattcac

SEQ ID NO: 13383 - DNA, 20 bp, Artificial Sequence
  Description of Artificial Sequence: Synthetic oligonucleotide
  Target: SCNA; (+) strand; PAM type: NNNNGHTT; PAM sequence: AACTGATT
tcacaaatgaataaagacag

SEQ ID NO: 13384 - DNA, 20 bp, Artificial Sequence
  Description of Artificial Sequence: Synthetic oligonucleotide
  Target: SCNA; (+) strand; PAM type: NNNNGHTT; PAM sequence: TCAGGTTT
ctacttaatacaataataat

SEQ ID NO: 13385 - DNA, 20 bp, Artificial Sequence
  Description of Artificial Sequence: Synthetic oligonucleotide
  Target: SCNA; (+) strand; PAM type: NNNNGHTT; PAM sequence: AAAGGTTT
tgatgaattaagaggaaggt

SEQ ID NO: 13386 - DNA, 20 bp, Artificial Sequence
  Description of Artificial Sequence: Synthetic oligonucleotide
  Target: SCNA; (+) strand; PAM type: NNNNGHTT; PAM sequence: CTTAGTTT
gttatctaggacactgtctc

SEQ ID NO: 13387 - DNA, 20 bp, Artificial Sequence
  Description of Artificial Sequence: Synthetic oligonucleotide
  Target: SCNA; (+) strand; PAM type: NNNNGHTT; PAM sequence: TAATGTTT
gacactgtctccttagtttt

SEQ ID NO: 13388 - DNA, 20 bp, Artificial Sequence
  Description of Artificial Sequence: Synthetic oligonucleotide
  Target: SCNA; (+) strand; PAM type: NNNNGHTT; PAM sequence: ATGGGTTT
ttttaatgtttcttccccag

SEQ ID NO: 13389 - DNA, 20 bp, Artificial Sequence
  Description of Artificial Sequence: Synthetic oligonucleotide
  Target: SCNA; (+) strand; PAM type: NNNNGHTT; PAM sequence: CCCAGATT
aaaaatccattcccaagaga

SEQ ID NO: 13390 - DNA, 20 bp, Artificial Sequence
  Description of Artificial Sequence: Synthetic oligonucleotide
  Target: SCNA; (+) strand; PAM type: NNNNGHTT; PAM sequence: GTAAGTTT
tgtactagttattctcagcg

SEQ ID NO: 13391 - DNA, 20 bp, Artificial Sequence
  Description of Artificial Sequence: Synthetic oligonucleotide
  Target: SCNA; (+) strand; PAM type: NNNNGHTT; PAM sequence: TACTGATT
tcatcaggtatcaatttaat

SEQ ID NO: 13392 - DNA, 20 bp, Artificial Sequence
  Description of Artificial Sequence: Synthetic oligonucleotide
  Target: SCNA; (+) strand; PAM type: NNNNGHTT; PAM sequence: TCCGGATT
ttattcagtatcttcagctg

SEQ ID NO: 13393 - DNA, 20 bp, Artificial Sequence
  Description of Artificial Sequence: Synthetic oligonucleotide
  Target: SCNA; (+) strand; PAM type: NNNNGHTT; PAM sequence: AATGGTTT
tgtactctacatatttaggt

SEQ ID NO: 13394 - DNA, 20 bp, Artificial Sequence
  Description of Artificial Sequence: Synthetic oligonucleotide
  Target: SCNA; (+) strand; PAM type: NNNNGHTT; PAM sequence: TAACGATT
gtttggtatacagctgctat

SEQ ID NO: 13395 - DNA, 20 bp, Artificial Sequence
  Description of Artificial Sequence: Synthetic oligonucleotide
  Target: SCNA; (+) strand; PAM type: NNNNGHTT; PAM sequence: CAATGATT
atctcttattaaataaaggt

SEQ ID NO: 13396 - DNA, 20 bp, Artificial Sequence
  Description of Artificial Sequence: Synthetic oligonucleotide
  Target: SCNA; (+) strand; PAM type: NNNNGHTT; PAM sequence: ATTTGTTT
gtagtatagtcattgaatta

SEQ ID NO: 13397 - DNA, 20 bp, Artificial Sequence
  Description of Artificial Sequence: Synthetic oligonucleotide
  Target: SCNA; (+) strand; PAM type: NNNNGHTT; PAM sequence: GTTGGTTT
cagtgtgagaggagcaagct

SEQ ID NO: 13398 - DNA, 20 bp, Artificial Sequence
  Description of Artificial Sequence: Synthetic oligonucleotide
  Target: SCNA; (+) strand; PAM type: NNNNGHTT; PAM sequence: GGTGGCTT
gcaagctgttggtttccttt

SEQ ID NO: 13399 - DNA, 20 bp, Artificial Sequence
  Description of Artificial Sequence: Synthetic oligonucleotide
  Target: SCNA; (+) strand; PAM type: NNNNGHTT; PAM sequence: CTGTGATT
aattaataaattctgcatag

SEQ ID NO: 13400 - DNA, 20 bp, Artificial Sequence
  Description of Artificial Sequence: Synthetic oligonucleotide
  Target: SCNA; (+) strand; PAM type: NNNNGHTT; PAM sequence: CTCTGTTT
caaaaatgaagaacctgtgc

SEQ ID NO: 13401 - DNA, 20 bp, Artificial Sequence
  Description of Artificial Sequence: Synthetic oligonucleotide
  Target: SCNA; (+) strand; PAM type: NNNNGHTT; PAM sequence: TGTTGCTT
cataaaaggtgatgataaat

SEQ ID NO: 13402 - DNA, 20 bp, Artificial Sequence
  Description of Artificial Sequence: Synthetic oligonucleotide
  Target: SCNA; (+) strand; PAM type: NNNNGHTT; PAM sequence: TGCTGATT
aaattgttgcttcaaactca

SEQ ID NO: 13403 - DNA, 20 bp, Artificial Sequence
  Description of Artificial Sequence: Synthetic oligonucleotide
  Target: SCNA; (+) strand; PAM type: NNNNGHTT; PAM sequence: ACTGGATT
atttttaaataacccccact

SEQ ID NO: 13404 - DNA, 20 bp, Artificial Sequence
  Description of Artificial Sequence: Synthetic oligonucleotide
  Target: SCNA; (+) strand; PAM type: NNNNGHTT; PAM sequence: TCTTGCTT
ataacccccactactggatt

SEQ ID NO: 13405 - DNA, 20 bp, Artificial Sequence
  Description of Artificial Sequence: Synthetic oligonucleotide
  Target: SCNA; (+) strand; PAM type: NNNNGHTT; PAM sequence: CAATGCTT
cttgcttctatgttatatga

SEQ ID NO: 13406 - DNA, 20 bp, Artificial Sequence
  Description of Artificial Sequence: Synthetic oligonucleotide
  Target: SCNA; (+) strand; PAM type: NNNNGHTT; PAM sequence: AGAAGTTT
ttttttttttttataaagaa

SEQ ID NO: 13407 - DNA, 20 bp, Artificial Sequence
  Description of Artificial Sequence: Synthetic oligonucleotide
  Target: SCNA; (+) strand; PAM type: NNNNGHTT; PAM sequence: CCATGATT
agagagagcaaaaggaagtg

SEQ ID NO: 13408 - DNA, 20 bp, Artificial Sequence
  Description of Artificial Sequence: Synthetic oligonucleotide
  Target: SCNA; (+) strand; PAM type: NNNNGHTT; PAM sequence: ATGAGATT
catgggggttacaattcaag

SEQ ID NO: 13409 - DNA, 20 bp, Artificial Sequence
  Description of Artificial Sequence: Synthetic oligonucleotide
  Target: SCNA; (+) strand; PAM type: NNNNGHTT; PAM sequence: CTCTGATT
atgcatctttttttttttct

SEQ ID NO: 13410 - DNA, 20 bp, Artificial Sequence
  Description of Artificial Sequence: Synthetic oligonucleotide
  Target: SCNA; (+) strand; PAM type: NNNNGHTT; PAM sequence: TTAAGTTT
ctttttttttaaattatact

SEQ ID NO: 13411 - DNA, 20 bp, Artificial Sequence
  Description of Artificial Sequence: Synthetic oligonucleotide
  Target: SCNA; (+) strand; PAM type: NNNNGHTT; PAM sequence: AAATGCTT
gatggatattgactcctcca

SEQ ID NO: 13412 - DNA, 20 bp, Artificial Sequence
  Description of Artificial Sequence: Synthetic oligonucleotide
  Target: SCNA; (+) strand; PAM type: NNNNGHTT; PAM sequence: AAGGGCTT
aaaaaaacctcaaaaatgag

SEQ ID NO: 13413 - DNA, 20 bp, Artificial Sequence
  Description of Artificial Sequence: Synthetic oligonucleotide
  Target: SCNA; (+) strand; PAM type: NNNNGHTT; PAM sequence: GATGGTTT
cgacattttcttgcctctta

SEQ ID NO: 13414 - DNA, 20 bp, Artificial Sequence
  Description of Artificial Sequence: Synthetic oligonucleotide
  Target: SCNA; (+) strand; PAM type: NNNNGHTT; PAM sequence: GGATGCTT
tcttagatggtttgtatttt

SEQ ID NO: 13415 - DNA, 20 bp, Artificial Sequence
  Description of Artificial Sequence: Synthetic oligonucleotide
  Target: SCNA; (+) strand; PAM type: NNNNGHTT; PAM sequence: CTGTGTTT
atatagaatttaaacattat

SEQ ID NO: 13416 - DNA, 20 bp, Artificial Sequence
  Description of Artificial Sequence: Synthetic oligonucleotide
  Target: SCNA; (+) strand; PAM type: NNNNGHTT; PAM sequence: TTTTGTTT
tagaatacttattttttgta

SEQ ID NO: 13417 - DNA, 20 bp, Artificial Sequence
  Description of Artificial Sequence: Synthetic oligonucleotide
  Target: SCNA; (+) strand; PAM type: NNNNGHTT; PAM sequence: CTTGGATT
ttccaaattgaaacaatctc

SEQ ID NO: 13418 - DNA, 20 bp, Artificial Sequence
  Description of Artificial Sequence: Synthetic oligonucleotide
  Target: SCNA; (+) strand; PAM type: NNNNGHTT; PAM sequence: CACAGCTT
tctccttggattactcctgg

SEQ ID NO: 13419 - DNA, 20 bp, Artificial Sequence
  Description of Artificial Sequence: Synthetic oligonucleotide
  Target: SCNA; (+) strand; PAM type: NNNNGHTT; PAM sequence: CTTAGCTT
tactcagagtctaaacaaac

SEQ ID NO: 13420 - DNA, 20 bp, Artificial Sequence
  Description of Artificial Sequence: Synthetic oligonucleotide
  Target: SCNA; (+) strand; PAM type: NNNNGHTT; PAM sequence: CACAGTTT
taaaagcccaccatggatct

SEQ ID NO: 13421 - DNA, 20 bp, Artificial Sequence
  Description of Artificial Sequence: Synthetic oligonucleotide
  Target: SCNA; (+) strand; PAM type: NNNNGHTT; PAM sequence: AAGTGATT
ctccgactccttggttgttc

SEQ ID NO: 13422 - DNA, 20 bp, Artificial Sequence
  Description of Artificial Sequence: Synthetic oligonucleotide
  Target: SCNA; (+) strand; PAM type: NNNNGHTT; PAM sequence: CTGAGATT
tgcctcagcctcccaaatag

SEQ ID NO: 13423 - DNA, 20 bp, Artificial Sequence
  Description of Artificial Sequence: Synthetic oligonucleotide
  Target: SCNA; (+) strand; PAM type: NNNNGHTT; PAM sequence: CAGCGTTT
ttttgtatttttagtagaga

SEQ ID NO: 13424 - DNA, 20 bp, Artificial Sequence
  Description of Artificial Sequence: Synthetic oligonucleotide
  Target: SCNA; (+) strand; PAM type: NNNNGHTT; PAM sequence: CTGGGATT
cacctcagccttccaaagtg

SEQ ID NO: 13425 - DNA, 20 bp, Artificial Sequence
  Description of Artificial Sequence: Synthetic oligonucleotide
  Target: SCNA; (+) strand; PAM type: NNNNGHTT; PAM sequence: TGTAGTTT
agccaccgcgcccggcctct

SEQ ID NO: 13426 - DNA, 20 bp, Artificial Sequence
  Description of Artificial Sequence: Synthetic oligonucleotide
  Target: SCNA; (+) strand; PAM type: NNNNGHTT; PAM sequence: TTTAGTTT
aaatttaatccaataaaaca

SEQ ID NO: 13427 - DNA, 20 bp, Artificial Sequence
  Description of Artificial Sequence: Synthetic oligonucleotide
  Target: SCNA; (+) strand; PAM type: NNNNGHTT; PAM sequence: ATCTGCTT
cagcaaggaaattttcttac

SEQ ID NO: 13428 - DNA, 20 bp, Artificial Sequence
  Description of Artificial Sequence: Synthetic oligonucleotide
  Target: SCNA; (+) strand; PAM type: NNNNGHTT; PAM sequence: AAGTGCTT
tttacgttgaacattggcct

SEQ ID NO: 13429 - DNA, 20 bp, Artificial Sequence
  Description of Artificial Sequence: Synthetic oligonucleotide
  Target: SCNA; (+) strand; PAM type: NNNNGHTT; PAM sequence: ATTTGTTT
ttttcttgttctatgatata

SEQ ID NO: 13430 - DNA, 20 bp, Artificial Sequence
  Description of Artificial Sequence: Synthetic oligonucleotide
  Target: SCNA; (+) strand; PAM type: NNNNGHTT; PAM sequence: ATTAGTTT
ataatttgttttgatatcgt

SEQ ID NO: 13431 - DNA, 20 bp, Artificial Sequence
  Description of Artificial Sequence: Synthetic oligonucleotide
  Target: SCNA; (+) strand; PAM type: NNNNGHTT; PAM sequence: GTGGGATT
taccacaaatttattacatt

SEQ ID NO: 13432 - DNA, 20 bp, Artificial Sequence
  Description of Artificial Sequence: Synthetic oligonucleotide
  Target: SCNA; (+) strand; PAM type: NNNNGHTT; PAM sequence: TTCTGTTT
aaggtgtcggcaggactgtg

SEQ ID NO: 13433 - DNA, 20 bp, Artificial Sequence
  Description of Artificial Sequence: Synthetic oligonucleotide
  Target: SCNA; (+) strand; PAM type: NNNNGHTT; PAM sequence: TCCAGCTT
aaatctgtctccttgccttt

SEQ ID NO: 13434 - DNA, 20 bp, Artificial Sequence
  Description of Artificial Sequence: Synthetic oligonucleotide
  Target: SCNA; (+) strand; PAM type: NNNNGHTT; PAM sequence: CATAGCTT
tccagcttcttgatgccatt

SEQ ID NO: 13435 - DNA, 20 bp, Artificial Sequence
  Description of Artificial Sequence: Synthetic oligonucleotide
  Target: SCNA; (+) strand; PAM type: NNNNGHTT; PAM sequence: TTCTGATT
tcctatacgttatacttatt

SEQ ID NO: 13436 - DNA, 20 bp, Artificial Sequence
  Description of Artificial Sequence: Synthetic oligonucleotide
  Target: SCNA; (+) strand; PAM type: NNNNGHTT; PAM sequence: CAGAGATT
agatattaattatttgaggg

SEQ ID NO: 13437 - DNA, 20 bp, Artificial Sequence
  Description of Artificial Sequence: Synthetic oligonucleotide
  Target: SCNA; (+) strand; PAM type: NNNNGHTT; PAM sequence: ATTTGTTT
atttgagggcagagattttt

SEQ ID NO: 13438 - DNA, 20 bp, Artificial Sequence
  Description of Artificial Sequence: Synthetic oligonucleotide
  Target: SCNA; (+) strand; PAM type: NNNNGHTT; PAM sequence: AAAAGTTT
ggttaataaatgaatgagca

SEQ ID NO: 13439 - DNA, 20 bp, Artificial Sequence
  Description of Artificial Sequence: Synthetic oligonucleotide
  Target: SCNA; (+) strand; PAM type: NNNNGHTT; PAM sequence: TGAGGATT
ttgatatcaacatgccattt

SEQ ID NO: 13440 - DNA, 20 bp, Artificial Sequence
  Description of Artificial Sequence: Synthetic oligonucleotide
  Target: SCNA; (+) strand; PAM type: NNNNGHTT; PAM sequence: TTTTGTTT
tattatttattaaaatggca

SEQ ID NO: 13441 - DNA, 20 bp, Artificial Sequence
  Description of Artificial Sequence: Synthetic oligonucleotide
  Target: SCNA; (+) strand; PAM type: NNNNGHTT; PAM sequence: TTCTGTTT
gacactatccaaattgcctt

SEQ ID NO: 13442 - DNA, 20 bp, Artificial Sequence
  Description of Artificial Sequence: Synthetic oligonucleotide
  Target: SCNA; (+) strand; PAM type: NNNNGHTT; PAM sequence: AATTGTTT
tttctttttacttatttctt

SEQ ID NO: 13443 - DNA, 20 bp, Artificial Sequence
  Description of Artificial Sequence: Synthetic oligonucleotide
  Target: SCNA; (+) strand; PAM type: NNNNGHTT; PAM sequence: GTATGCTT
tttcacaaaggcagagtctt

SEQ ID NO: 13444 - DNA, 20 bp, Artificial Sequence
  Description of Artificial Sequence: Synthetic oligonucleotide
  Target: SCNA; (+) strand; PAM type: NNNNGHTT; PAM sequence: GCCTGTTT
tctttagtacctagaatagt

SEQ ID NO: 13445 - DNA, 20 bp, Artificial Sequence
  Description of Artificial Sequence: Synthetic oligonucleotide
  Target: SCNA; (+) strand; PAM type: NNNNGHTT; PAM sequence: AAATGTTT
tttaaaagtaggagctgaat

SEQ ID NO: 13446 - DNA, 20 bp, Artificial Sequence
  Description of Artificial Sequence: Synthetic oligonucleotide
  Target: SCNA; (+) strand; PAM type: NNNNGHTT; PAM sequence: AGAAGCTT
tattaatcatgtgtaggaaa

SEQ ID NO: 13447 - DNA, 20 bp, Artificial Sequence
  Description of Artificial Sequence: Synthetic oligonucleotide
  Target: SCNA; (+) strand; PAM type: NNNNGHTT; PAM sequence: GGTTGTTT
gctgtgcccactattatgat

SEQ ID NO: 13448 - DNA, 20 bp, Artificial Sequence
  Description of Artificial Sequence: Synthetic oligonucleotide
  Target: SCNA; (+) strand; PAM type: NNNNGHTT; PAM sequence: CAAGGATT
ttgttttgtgtgttctttct

SEQ ID NO: 13449 - DNA, 20 bp, Artificial Sequence
  Description of Artificial Sequence: Synthetic oligonucleotide
  Target: SCNA; (+) strand; PAM type: NNNNGHTT; PAM sequence: AAGTGCTT
tcgatctctccctacagtag

SEQ ID NO: 13450 - DNA, 20 bp, Artificial Sequence
  Description of Artificial Sequence: Synthetic oligonucleotide
  Target: SCNA; (+) strand; PAM type: NNNNGHTT; PAM sequence: CATTGATT
ctgagacactgaagatgacc

SEQ ID NO: 13451 - DNA, 20 bp, Artificial Sequence
  Description of Artificial Sequence: Synthetic oligonucleotide
  Target: SCNA; (+) strand; PAM type: NNNNGHTT; PAM sequence: CTCTGATT
tttaatacatatttgcaagg

SEQ ID NO: 13452 - DNA, 20 bp, Artificial Sequence
  Description of Artificial Sequence: Synthetic oligonucleotide
  Target: SCNA; (+) strand; PAM type: NNNNGHTT; PAM sequence: AGGCGCTT
ctgattgagaacctctggac

SEQ ID NO: 13453 - DNA, 20 bp, Artificial Sequence
  Description of Artificial Sequence: Synthetic oligonucleotide
  Target: SCNA; (+) strand; PAM type: NNNNGHTT; PAM sequence: CACAGTTT
acagtgtgtgactaacacga

SEQ ID NO: 13454 - DNA, 20 bp, Artificial Sequence
  Description of Artificial Sequence: Synthetic oligonucleotide
  Target: SCNA; (+) strand; PAM type: NNNNGHTT; PAM sequence: TTAGGATT
tgtgactaacacgacacagt

SEQ ID NO: 13455 - DNA, 20 bp, Artificial Sequence
  Description of Artificial Sequence: Synthetic oligonucleotide
  Target: SCNA; (+) strand; PAM type: NNNNGHTT; PAM sequence: GAGAGATT
acacggtggaattggagtga

SEQ ID NO: 13456 - DNA, 20 bp, Artificial Sequence
  Description of Artificial Sequence: Synthetic oligonucleotide
  Target: SCNA; (+) strand; PAM type: NNNNGHTT; PAM sequence: TGTAGATT
acttcaatattattatcctg

SEQ ID NO: 13457 - DNA, 20 bp, Artificial Sequence
  Description of Artificial Sequence: Synthetic oligonucleotide
  Target: SCNA; (+) strand; PAM type: NNNNGHTT; PAM sequence: AGCTGTTT
tatttcccacataaaattaa

SEQ ID NO: 13458 - DNA, 20 bp, Artificial Sequence
  Description of Artificial Sequence: Synthetic oligonucleotide
  Target: SCNA; (+) strand; PAM type: NNNNGHTT; PAM sequence: AACTGCTT
cttaatacatgttcccaagg

SEQ ID NO: 13459 - DNA, 20 bp, Artificial Sequence
  Description of Artificial Sequence: Synthetic oligonucleotide
  Target: SCNA; (+) strand; PAM type: NNNNGHTT; PAM sequence: AAAGGTTT
tgcttcaattaccactgcac

SEQ ID NO: 13460 - DNA, 20 bp, Artificial Sequence
  Description of Artificial Sequence: Synthetic oligonucleotide
  Target: SCNA; (+) strand; PAM type: NNNNGHTT; PAM sequence: GTTTGTTT
tcaattaccactgcacaaag

SEQ ID NO: 13461 - DNA, 20 bp, Artificial Sequence
  Description of Artificial Sequence: Synthetic oligonucleotide
  Target: SCNA; (+) strand; PAM type: NNNNGHTT; PAM sequence: GTTTGTTT
ttaccactgcacaaaggttt

SEQ ID NO: 13462 - DNA, 20 bp, Artificial Sequence
  Description of Artificial Sequence: Synthetic oligonucleotide
  Target: SCNA; (+) strand; PAM type: NNNNGHTT; PAM sequence: TACTGCTT
acttcacataaagtagccgc

SEQ ID NO: 13463 - DNA, 20 bp, Artificial Sequence
  Description of Artificial Sequence: Synthetic oligonucleotide
  Target: SCNA; (+) strand; PAM type: NNNNGHTT; PAM sequence: AGAAGCTT
ccatattgccatctaaacac

SEQ ID NO: 13464 - DNA, 20 bp, Artificial Sequence
  Description of Artificial Sequence: Synthetic oligonucleotide
  Target: SCNA; (+) strand; PAM type: NNNNGHTT; PAM sequence: GGAAGATT
actttatggaaaaatattta

SEQ ID NO: 13465 - DNA, 20 bp, Artificial Sequence
  Description of Artificial Sequence: Synthetic oligonucleotide
  Target: SCNA; (+) strand; PAM type: NNNNGHTT; PAM sequence: TCTAGTTT
aatttttaggaagtagcgtc

SEQ ID NO: 13466 - DNA, 20 bp, Artificial Sequence
  Description of Artificial Sequence: Synthetic oligonucleotide
  Target: SCNA; (+) strand; PAM type: NNNNGHTT; PAM sequence: AATTGATT
gaagcaacccactaaataat

SEQ ID NO: 13467 - DNA, 20 bp, Artificial Sequence
  Description of Artificial Sequence: Synthetic oligonucleotide
  Target: SCNA; (+) strand; PAM type: NNNNGHTT; PAM sequence: CTATGTTT
taatttcatttggaggtctt

SEQ ID NO: 13468 - DNA, 20 bp, Artificial Sequence
  Description of Artificial Sequence: Synthetic oligonucleotide
  Target: SCNA; (+) strand; PAM type: NNNNGHTT; PAM sequence: GTATGTTT
ttggaggtcttctatgttta

SEQ ID NO: 13469 - DNA, 20 bp, Artificial Sequence
  Description of Artificial Sequence: Synthetic oligonucleotide
  Target: SCNA; (+) strand; PAM type: NNNNGHTT; PAM sequence: TGAGGATT
tttatggactttttaaacac

SEQ ID NO: 13470 - DNA, 20 bp, Artificial Sequence
  Description of Artificial Sequence: Synthetic oligonucleotide
  Target: SCNA; (+) strand; PAM type: NNNNGHTT; PAM sequence: GTGGGATT
ccaccttagcctcccaaagt

SEQ ID NO: 13471 - DNA, 20 bp, Artificial Sequence
  Description of Artificial Sequence: Synthetic oligonucleotide
  Target: SCNA; (+) strand; PAM type: NNNNGHTT; PAM sequence: ATTTGCTT
agccaccatgccaggcgaga

SEQ ID NO: 13472 - DNA, 20 bp, Artificial Sequence
  Description of Artificial Sequence: Synthetic oligonucleotide
  Target: SCNA; (+) strand; PAM type: NNNNGHTT; PAM sequence: CAAAGTTT
tttagaaataaataattaaa

SEQ ID NO: 13473 - DNA, 20 bp, Artificial Sequence
  Description of Artificial Sequence: Synthetic oligonucleotide
  Target: SCNA; (+) strand; PAM type: NNNNGHTT; PAM sequence: CAGAGATT
aggctgctgggagagaaaag

SEQ ID NO: 13474 - DNA, 20 bp, Artificial Sequence
  Description of Artificial Sequence: Synthetic oligonucleotide
  Target: SCNA; (+) strand; PAM type: NNNNGHTT; PAM sequence: AATCGCTT
tcaggaggctgaactaggag

SEQ ID NO: 13475 - DNA, 20 bp, Artificial Sequence
  Description of Artificial Sequence: Synthetic oligonucleotide
  Target: SCNA; (+) strand; PAM type: NNNNGHTT; PAM sequence: CTGAGATT
gtggcagaggctgctgtgag

SEQ ID NO: 13476 - DNA, 20 bp, Artificial Sequence
  Description of Artificial Sequence: Synthetic oligonucleotide
  Target: SCNA; (+) strand; PAM type: NNNNGHTT; PAM sequence: TTGTGATT
gaaagtgaaactgtaggact

SEQ ID NO: 13477 - DNA, 20 bp, Artificial Sequence
  Description of Artificial Sequence: Synthetic oligonucleotide
  Target: SCNA; (+) strand; PAM type: NNNNGHTT; PAM sequence: AATAGATT
gagttgaagatgatggaaac

SEQ ID NO: 13478 - DNA, 20 bp, Artificial Sequence
  Description of Artificial Sequence: Synthetic oligonucleotide
  Target: SCNA; (+) strand; PAM type: NNNNGHTT; PAM sequence: TAATGTTT
ttttacttctctggacctct

SEQ ID NO: 13479 - DNA, 20 bp, Artificial Sequence
  Description of Artificial Sequence: Synthetic oligonucleotide
  Target: SCNA; (+) strand; PAM type: NNNNGHTT; PAM sequence: TGATGTTT
tggacctcttaatgtttctt

SEQ ID NO: 13480 - DNA, 20 bp, Artificial Sequence
  Description of Artificial Sequence: Synthetic oligonucleotide
  Target: SCNA; (+) strand; PAM type: NNNNGHTT; PAM sequence: TGCAGTTT
gcctttgtaggtgatatttt

SEQ ID NO: 13481 - DNA, 20 bp, Artificial Sequence
  Description of Artificial Sequence: Synthetic oligonucleotide
  Target: SCNA; (+) strand; PAM type: NNNNGHTT; PAM sequence: TTAAGTTT
ctctgctgatcacaaggtaa

SEQ ID NO: 13482 - DNA, 20 bp, Artificial Sequence
  Description of Artificial Sequence: Synthetic oligonucleotide
  Target: SCNA; (+) strand; PAM type: NNNNGHTT; PAM sequence: TTAGGTTT
ttttggagtggaggagtgtc

SEQ ID NO: 13483 - DNA, 20 bp, Artificial Sequence
  Description of Artificial Sequence: Synthetic oligonucleotide
  Target: SCNA; (+) strand; PAM type: NNNNGHTT; PAM sequence: CTATGATT
tgcattaaatataaagaaat

SEQ ID NO: 13484 - DNA, 20 bp, Artificial Sequence
  Description of Artificial Sequence: Synthetic oligonucleotide
  Target: SCNA; (+) strand; PAM type: NNNNGHTT; PAM sequence: TTGAGTTT
tcattttaaatgtacatttc

SEQ ID NO: 13485 - DNA, 20 bp, Artificial Sequence
  Description of Artificial Sequence: Synthetic oligonucleotide
  Target: SCNA; (+) strand; PAM type: NNNNGHTT; PAM sequence: TGTGGTTT
aagtgatatcacaactacat

SEQ ID NO: 13486 - DNA, 20 bp, Artificial Sequence
  Description of Artificial Sequence: Synthetic oligonucleotide
  Target: SCNA; (+) strand; PAM type: NNNNGHTT; PAM sequence: CCTGGTTT
tacattgtggtttttccttg

SEQ ID NO: 13487 - DNA, 20 bp, Artificial Sequence
  Description of Artificial Sequence: Synthetic oligonucleotide
  Target: SCNA; (+) strand; PAM type: NNNNGHTT; PAM sequence: ATCAGCTT
aattctaacaccatcttgga

SEQ ID NO: 13488 - DNA, 20 bp, Artificial Sequence
  Description of Artificial Sequence: Synthetic oligonucleotide
  Target: SCNA; (+) strand; PAM type: NNNNGHTT; PAM sequence: TACTGATT
ttttctggaattatagtatg

SEQ ID NO: 13489 - DNA, 20 bp, Artificial Sequence
  Description of Artificial Sequence: Synthetic oligonucleotide
  Target: SCNA; (+) strand; PAM type: NNNNGHTT; PAM sequence: GATAGTTT
tgcctggcatcacacagcat

SEQ ID NO: 13490 - DNA, 20 bp, Artificial Sequence
  Description of Artificial Sequence: Synthetic oligonucleotide
  Target: SCNA; (+) strand; PAM type: NNNNGHTT; PAM sequence: TTGAGATT
catcacacagcatgatagtt

SEQ ID NO: 13491 - DNA, 20 bp, Artificial Sequence
  Description of Artificial Sequence: Synthetic oligonucleotide
  Target: SCNA; (+) strand; PAM type: NNNNGHTT; PAM sequence: TGTTGATT
ctgtatgaatacagcacaat

SEQ ID NO: 13492 - DNA, 20 bp, Artificial Sequence
  Description of Artificial Sequence: Synthetic oligonucleotide
  Target: SCNA; (+) strand; PAM type: NNNNGHTT; PAM sequence: GATTGATT
atgaatacagcacaattgtt

SEQ ID NO: 13493 - DNA, 20 bp, Artificial Sequence
  Description of Artificial Sequence: Synthetic oligonucleotide
  Target: SCNA; (+) strand; PAM type: NNNNGHTT; PAM sequence: ATATGCTT
gtacaagtcattgtatgaac

SEQ ID NO: 13494 - DNA, 20 bp, Artificial Sequence
  Description of Artificial Sequence: Synthetic oligonucleotide
  Target: SCNA; (+) strand; PAM type: NNNNGHTT; PAM sequence: ACAGGTTT
actttgcacaagtaggcagc

SEQ ID NO: 13495 - DNA, 20 bp, Artificial Sequence
  Description of Artificial Sequence: Synthetic oligonucleotide
  Target: SCNA; (+) strand; PAM type: NNNNGHTT; PAM sequence: TAATGTTT
tgacccatttaaactttcca

SEQ ID NO: 13496 - DNA, 20 bp, Artificial Sequence
  Description of Artificial Sequence: Synthetic oligonucleotide
  Target: SCNA; (+) strand; PAM type: NNNNGHTT; PAM sequence: AGGTGTTT
caacctcaagtaaacatgcc

SEQ ID NO: 13497 - DNA, 20 bp, Artificial Sequence
  Description of Artificial Sequence: Synthetic oligonucleotide
  Target: SCNA; (+) strand; PAM type: NNNNGHTT; PAM sequence: CACTGCTT
ttaaatagtctatcagatca

SEQ ID NO: 13498 - DNA, 20 bp, Artificial Sequence
  Description of Artificial Sequence: Synthetic oligonucleotide
  Target: SCNA; (+) strand; PAM type: NNNNGHTT; PAM sequence: ATATGCTT
atagtacacattaactactc

SEQ ID NO: 13499 - DNA, 20 bp, Artificial Sequence
  Description of Artificial Sequence: Synthetic oligonucleotide
  Target: SCNA; (+) strand; PAM type: NNNNGHTT; PAM sequence: TTTGGCTT
aaagcagggttgtccagtct

SEQ ID NO: 13500 - DNA, 20 bp, Artificial Sequence
  Description of Artificial Sequence: Synthetic oligonucleotide
  Target: SCNA; (+) strand; PAM type: NNNNGHTT; PAM sequence: TAATGTTT
caaaacaaacaaaaaattca

SEQ ID NO: 13501 - DNA, 20 bp, Artificial Sequence
  Description of Artificial Sequence: Synthetic oligonucleotide
  Target: SCNA; (+) strand; PAM type: NNNNGHTT; PAM sequence: GGCCGCTT
tctcattcaaaaccatcctg

SEQ ID NO: 13502 - DNA, 20 bp, Artificial Sequence
  Description of Artificial Sequence: Synthetic oligonucleotide
  Target: SCNA; (+) strand; PAM type: NNNNGHTT; PAM sequence: TATAGTTT
atacaacttattcaaaatgt

SEQ ID NO: 13503 - DNA, 20 bp, Artificial Sequence
  Description of Artificial Sequence: Synthetic oligonucleotide
  Target: SCNA; (+) strand; PAM type: NNNNGHTT; PAM sequence: ATGGGTTT
aaaaattactgagaaatttt

SEQ ID NO: 13504 - DNA, 20 bp, Artificial Sequence
  Description of Artificial Sequence: Synthetic oligonucleotide
  Target: SCNA; (+) strand; PAM type: NNNNGHTT; PAM sequence: AAATGCTT
actcaggctagctacttttg

SEQ ID NO: 13505 - DNA, 20 bp, Artificial Sequence
  Description of Artificial Sequence: Synthetic oligonucleotide
  Target: SCNA; (+) strand; PAM type: NNNNGHTT; PAM sequence: AGAAGTTT
aagaaaaaaagtcatctgta

SEQ ID NO: 13506 - DNA, 20 bp, Artificial Sequence
  Description of Artificial Sequence: Synthetic oligonucleotide
  Target: SCNA; (+) strand; PAM type: NNNNGHTT; PAM sequence: AACAGATT
ttagcaggagcaacacagtg

SEQ ID NO: 13507 - DNA, 20 bp, Artificial Sequence
  Description of Artificial Sequence: Synthetic oligonucleotide
  Target: SCNA; (+) strand; PAM type: NNNNGHTT; PAM sequence: CAGAGATT
acacagtgaacagattccag

SEQ ID NO: 13508 - DNA, 20 bp, Artificial Sequence
  Description of Artificial Sequence: Synthetic oligonucleotide
  Target: SCNA; (+) strand; PAM type: NNNNGHTT; PAM sequence: CAGAGATT
gattccagcagagattatgg

SEQ ID NO: 13509 - DNA, 20 bp, Artificial Sequence
  Description of Artificial Sequence: Synthetic oligonucleotide
  Target: SCNA; (+) strand; PAM type: NNNNGHTT; PAM sequence: TTAAGATT
aaagtgtgtatcttaggaat

SEQ ID NO: 13510 - DNA, 20 bp, Artificial Sequence
  Description of Artificial Sequence: Synthetic oligonucleotide
  Target: SCNA; (+) strand; PAM type: NNNNGHTT; PAM sequence: TTAAGTTT
gctcagtggttagctaagtc

SEQ ID NO: 13511 - DNA, 20 bp, Artificial Sequence
  Description of Artificial Sequence: Synthetic oligonucleotide
  Target: SCNA; (+) strand; PAM type: NNNNGHTT; PAM sequence: TCCAGCTT
atatcagtcaaacgacaaat

SEQ ID NO: 13512 - DNA, 20 bp, Artificial Sequence
  Description of Artificial Sequence: Synthetic oligonucleotide
  Target: SCNA; (+) strand; PAM type: NNNNGHTT; PAM sequence: ATACGTTT
atgaatgaagagccagttaa

SEQ ID NO: 13513 - DNA, 20 bp, Artificial Sequence
  Description of Artificial Sequence: Synthetic oligonucleotide
  Target: SCNA; (+) strand; PAM type: NNNNGHTT; PAM sequence: GAGAGATT
agatgggggagagaatgaaa

SEQ ID NO: 13514 - DNA, 20 bp, Artificial Sequence
  Description of Artificial Sequence: Synthetic oligonucleotide
  Target: SCNA; (+) strand; PAM type: NNNNGHTT; PAM sequence: CAGTGATT
ggagggaactatggaggcat

SEQ ID NO: 13515 - DNA, 20 bp, Artificial Sequence
  Description of Artificial Sequence: Synthetic oligonucleotide
  Target: SCNA; (+) strand; PAM type: NNNNGHTT; PAM sequence: TATGGTTT
atggaggcatcagtgattta

SEQ ID NO: 13516 - DNA, 20 bp, Artificial Sequence
  Description of Artificial Sequence: Synthetic oligonucleotide
  Target: SCNA; (+) strand; PAM type: NNNNGHTT; PAM sequence: CCTTGCTT
ataactgatatgaagggact

SEQ ID NO: 13517 - DNA, 20 bp, Artificial Sequence
  Description of Artificial Sequence: Synthetic oligonucleotide
  Target: SCNA; (+) strand; PAM type: NNNNGHTT; PAM sequence: AAAAGCTT
ggcattgcggagggaagagg

SEQ ID NO: 13518 - DNA, 20 bp, Artificial Sequence
  Description of Artificial Sequence: Synthetic oligonucleotide
  Target: SCNA; (+) strand; PAM type: NNNNGHTT; PAM sequence: AATAGATT
aatgagtcagaaatccacac

SEQ ID NO: 13519 - DNA, 20 bp, Artificial Sequence
  Description of Artificial Sequence: Synthetic oligonucleotide
  Target: SCNA; (+) strand; PAM type: NNNNGHTT; PAM sequence: TAAAGATT
cagaaatccacacaatagat

SEQ ID NO: 13520 - DNA, 20 bp, Artificial Sequence
  Description of Artificial Sequence: Synthetic oligonucleotide
  Target: SCNA; (+) strand; PAM type: NNNNGHTT; PAM sequence: GAAAGTTT
attaaagatttaagttgtga

SEQ ID NO: 13521 - DNA, 20 bp, Artificial Sequence
  Description of Artificial Sequence: Synthetic oligonucleotide
  Target: SCNA; (+) strand; PAM type: NNNNGHTT; PAM sequence: TAGAGATT
gagtgttctggggaataaat

SEQ ID NO: 13522 - DNA, 20 bp, Artificial Sequence
  Description of Artificial Sequence: Synthetic oligonucleotide
  Target: SCNA; (+) strand; PAM type: NNNNGHTT; PAM sequence: TCAAGTTT
catgtatagctgcatgaatg

SEQ ID NO: 13523 - DNA, 20 bp, Artificial Sequence
  Description of Artificial Sequence: Synthetic oligonucleotide
  Target: SCNA; (+) strand; PAM type: NNNNGHTT; PAM sequence: AGAGGATT
agtacgtaagtgaaagcatt

SEQ ID NO: 13524 - DNA, 20 bp, Artificial Sequence
  Description of Artificial Sequence: Synthetic oligonucleotide
  Target: SCNA; (+) strand; PAM type: NNNNGHTT; PAM sequence: CCATGTTT
ttgtcctattacattcttgc

SEQ ID NO: 13525 - DNA, 20 bp, Artificial Sequence
  Description of Artificial Sequence: Synthetic oligonucleotide
  Target: SCNA; (+) strand; PAM type: NNNNGHTT; PAM sequence: CAAGGATT
aaatccttgtataaacccca

SEQ ID NO: 13526 - DNA, 20 bp, Artificial Sequence
  Description of Artificial Sequence: Synthetic oligonucleotide
  Target: SCNA; (+) strand; PAM type: NNNNGHTT; PAM sequence: CCTGGCTT
aggatttctctaaagacaaa

SEQ ID NO: 13527 - DNA, 20 bp, Artificial Sequence
  Description of Artificial Sequence: Synthetic oligonucleotide
  Target: SCNA; (+) strand; PAM type: NNNNGHTT; PAM sequence: GCTGGTTT
tggttacttttgtggggtgt

SEQ ID NO: 13528 - DNA, 20 bp, Artificial Sequence
  Description of Artificial Sequence: Synthetic oligonucleotide
  Target: SCNA; (+) strand; PAM type: NNNNGHTT; PAM sequence: CACGGTTT
atgaattgtactgactacac

SEQ ID NO: 13529 - DNA, 20 bp, Artificial Sequence
  Description of Artificial Sequence: Synthetic oligonucleotide
  Target: SCNA; (+) strand; PAM type: NNNNGHTT; PAM sequence: AGATGTTT
aaggatgtcctgtgcattgt

SEQ ID NO: 13530 - DNA, 20 bp, Artificial Sequence
  Description of Artificial Sequence: Synthetic oligonucleotide
  Target: SCNA; (+) strand; PAM type: NNNNGHTT; PAM sequence: CCTGGATT
tccctgggagcacaattggc

SEQ ID NO: 13531 - DNA, 20 bp, Artificial Sequence
  Description of Artificial Sequence: Synthetic oligonucleotide
  Target: SCNA; (+) strand; PAM type: NNNNGHTT; PAM sequence: GTGAGTTT
gcactccttttgtctacgct

SEQ ID NO: 13532 - DNA, 20 bp, Artificial Sequence
  Description of Artificial Sequence: Synthetic oligonucleotide
  Target: SCNA; (+) strand; PAM type: NNNNGHTT; PAM sequence: ACTTGCTT
ggcagccgtcttcacatagg

SEQ ID NO: 13533 - DNA, 20 bp, Artificial Sequence
  Description of Artificial Sequence: Synthetic oligonucleotide
  Target: SCNA; (+) strand; PAM type: NNNNGHTT; PAM sequence: GTGTGTTT
ctaaagtattgcactattcc

SEQ ID NO: 13534 - DNA, 20 bp, Artificial Sequence
  Description of Artificial Sequence: Synthetic oligonucleotide
  Target: SCNA; (+) strand; PAM type: NNNNGHTT; PAM sequence: CACTGTTT
ccaactaccaaatttgtgtg

SEQ ID NO: 13535 - DNA, 20 bp, Artificial Sequence
  Description of Artificial Sequence: Synthetic oligonucleotide
  Target: SCNA; (+) strand; PAM type: NNNNGHTT; PAM sequence: GTTTGTTT
ctaccaaatttgtgtgcact

SEQ ID NO: 13536 - DNA, 20 bp, Artificial Sequence
  Description of Artificial Sequence: Synthetic oligonucleotide
  Target: SCNA; (+) strand; PAM type: NNNNGHTT; PAM sequence: AGATGTTT
aagcaaaattccaaatattg

SEQ ID NO: 13537 - DNA, 20 bp, Artificial Sequence
  Description of Artificial Sequence: Synthetic oligonucleotide
  Target: SCNA; (+) strand; PAM type: NNNNGHTT; PAM sequence: GAATGTTT
tgtattggccccaatcattg

SEQ ID NO: 13538 - DNA, 20 bp, Artificial Sequence
  Description of Artificial Sequence: Synthetic oligonucleotide
  Target: SCNA; (+) strand; PAM type: NNNNGHTT; PAM sequence: CTTTGATT
acacctatattattttcata

SEQ ID NO: 13539 - DNA, 20 bp, Artificial Sequence
  Description of Artificial Sequence: Synthetic oligonucleotide
  Target: SCNA; (+) strand; PAM type: NNNNGHTT; PAM sequence: TAGAGATT
ttatactcaaaaaagaagaa

SEQ ID NO: 13540 - DNA, 20 bp, Artificial Sequence
  Description of Artificial Sequence: Synthetic oligonucleotide
  Target: SCNA; (+) strand; PAM type: NNNNGHTT; PAM sequence: ATGAGATT
agaatagagattgtaaagaa

SEQ ID NO: 13541 - DNA, 20 bp, Artificial Sequence
  Description of Artificial Sequence: Synthetic oligonucleotide
  Target: SCNA; (+) strand; PAM type: NNNNGHTT; PAM sequence: AATTGTTT
gtcaatcaattcttgaggcc

SEQ ID NO: 13542 - DNA, 20 bp, Artificial Sequence
  Description of Artificial Sequence: Synthetic oligonucleotide
  Target: SCNA; (+) strand; PAM type: NNNNGHTT; PAM sequence: CACTGATT
aggccaattgtttttgaagg

SEQ ID NO: 13543 - DNA, 20 bp, Artificial Sequence
  Description of Artificial Sequence: Synthetic oligonucleotide
  Target: SCNA; (+) strand; PAM type: NNNNGHTT; PAM sequence: ATTTGTTT
tataataggctcacaaaaat

SEQ ID NO: 13544 - DNA, 20 bp, Artificial Sequence
  Description of Artificial Sequence: Synthetic oligonucleotide
  Target: SCNA; (+) strand; PAM type: NNNNGHTT; PAM sequence: AACTGCTT
ctataattaaatgaaacatt

SEQ ID NO: 13545 - DNA, 20 bp, Artificial Sequence
  Description of Artificial Sequence: Synthetic oligonucleotide
  Target: SCNA; (+) strand; PAM type: NNNNGHTT; PAM sequence: TAAGGATT
tttagaaggagtgcattcat

SEQ ID NO: 13546 - DNA, 20 bp, Artificial Sequence
  Description of Artificial Sequence: Synthetic oligonucleotide
  Target: SCNA; (+) strand; PAM type: NNNNGHTT; PAM sequence: TTTGGATT
ataaatcttacattcacata

SEQ ID NO: 13547 - DNA, 20 bp, Artificial Sequence
  Description of Artificial Sequence: Synthetic oligonucleotide
  Target: SCNA; (+) strand; PAM type: NNNNGHTT; PAM sequence: CTGAGTTT
tacattcacatatttggatt

SEQ ID NO: 13548 - DNA, 20 bp, Artificial Sequence
  Description of Artificial Sequence: Synthetic oligonucleotide
  Target: SCNA; (+) strand; PAM type: NNNNGHTT; PAM sequence: CTGAGCTT
attctggtactgtatctaga

SEQ ID NO: 13549 - DNA, 20 bp, Artificial Sequence
  Description of Artificial Sequence: Synthetic oligonucleotide
  Target: SCNA; (+) strand; PAM type: NNNNGHTT; PAM sequence: AATAGCTT
actgagctttacatattttt

SEQ ID NO: 13550 - DNA, 20 bp, Artificial Sequence
  Description of Artificial Sequence: Synthetic oligonucleotide
  Target: SCNA; (+) strand; PAM type: NNNNGHTT; PAM sequence: AGGCGATT
aacctccaccttctgagttc

SEQ ID NO: 13551 - DNA, 20 bp, Artificial Sequence
  Description of Artificial Sequence: Synthetic oligonucleotide
  Target: SCNA; (+) strand; PAM type: NNNNGHTT; PAM sequence: TTGTGATT
tgcctcagtctcccgagtag

SEQ ID NO: 13552 - DNA, 20 bp, Artificial Sequence
  Description of Artificial Sequence: Synthetic oligonucleotide
  Target: SCNA; (+) strand; PAM type: NNNNGHTT; PAM sequence: TTCTGTTT
ttctttctttctttctctct

SEQ ID NO: 13553 - DNA, 20 bp, Artificial Sequence
  Description of Artificial Sequence: Synthetic oligonucleotide
  Target: SCNA; (+) strand; PAM type: NNNNGHTT; PAM sequence: ACAGGATT
tttttgtatttttagtagag

SEQ ID NO: 13554 - DNA, 20 bp, Artificial Sequence
  Description of Artificial Sequence: Synthetic oligonucleotide
  Target: SCNA; (+) strand; PAM type: NNNNGHTT; PAM sequence: CTGAGATT
ggtcttgacttcccaaagtg

SEQ ID NO: 13555 - DNA, 20 bp, Artificial Sequence
  Description of Artificial Sequence: Synthetic oligonucleotide
  Target: SCNA; (+) strand; PAM type: NNNNGHTT; PAM sequence: AATAGCTT
ataagccatcacacctgacc

SEQ ID NO: 13556 - DNA, 20 bp, Artificial Sequence
  Description of Artificial Sequence: Synthetic oligonucleotide
  Target: SCNA; (+) strand; PAM type: NNNNGHTT; PAM sequence: AGAAGTTT
caatagcttgtatttttgaa

SEQ ID NO: 13557 - DNA, 20 bp, Artificial Sequence
  Description of Artificial Sequence: Synthetic oligonucleotide
  Target: SCNA; (+) strand; PAM type: NNNNGHTT; PAM sequence: TTAGGTTT
ttgtatttttgaaagaagtt

SEQ ID NO: 13558 - DNA, 20 bp, Artificial Sequence
  Description of Artificial Sequence: Synthetic oligonucleotide
  Target: SCNA; (+) strand; PAM type: NNNNGHTT; PAM sequence: CTGAGATT
aggtttgtggaataattgta

SEQ ID NO: 13559 - DNA, 20 bp, Artificial Sequence
  Description of Artificial Sequence: Synthetic oligonucleotide
  Target: SCNA; (+) strand; PAM type: NNNNGHTT; PAM sequence: CATAGTTT
accttattacaactaaagtc

SEQ ID NO: 13560 - DNA, 20 bp, Artificial Sequence
  Description of Artificial Sequence: Synthetic oligonucleotide
  Target: SCNA; (+) strand; PAM type: NNNNGHTT; PAM sequence: CTGAGTTT
tcactctgtattgtaaaatt

SEQ ID NO: 13561 - DNA, 20 bp, Artificial Sequence
  Description of Artificial Sequence: Synthetic oligonucleotide
  Target: SCNA; (+) strand; PAM type: NNNNGHTT; PAM sequence: AATAGTTT
accatgacagtatcatagag

SEQ ID NO: 13562 - DNA, 20 bp, Artificial Sequence
  Description of Artificial Sequence: Synthetic oligonucleotide
  Target: SCNA; (+) strand; PAM type: NNNNGHTT; PAM sequence: ATGTGCTT
ttcactgtcctaaacatgcc

SEQ ID NO: 13563 - DNA, 20 bp, Artificial Sequence
  Description of Artificial Sequence: Synthetic oligonucleotide
  Target: SCNA; (+) strand; PAM type: NNNNGHTT; PAM sequence: ACTGGCTT
tatagaatgcaacctttcaa

SEQ ID NO: 13564 - DNA, 20 bp, Artificial Sequence
  Description of Artificial Sequence: Synthetic oligonucleotide
  Target: SCNA; (+) strand; PAM type: NNNNGHTT; PAM sequence: CTAAGTTT
tttcaaactggcttacgtac

SEQ ID NO: 13565 - DNA, 20 bp, Artificial Sequence
  Description of Artificial Sequence: Synthetic oligonucleotide
  Target: SCNA; (+) strand; PAM type: NNNNGHTT; PAM sequence: ATGTGTTT
tacgtacctaagttttctcc

SEQ ID NO: 13566 - DNA, 20 bp, Artificial Sequence
  Description of Artificial Sequence: Synthetic oligonucleotide
  Target: SCNA; (+) strand; PAM type: NNNNGHTT; PAM sequence: TGTGGCTT
aagttttctccatgtgtttt

SEQ ID NO: 13567 - DNA, 20 bp, Artificial Sequence
  Description of Artificial Sequence: Synthetic oligonucleotide
  Target: SCNA; (+) strand; PAM type: NNNNGHTT; PAM sequence: GGTTGCTT
cacctattgaggaacatctt

SEQ ID NO: 13568 - DNA, 20 bp, Artificial Sequence
  Description of Artificial Sequence: Synthetic oligonucleotide
  Target: SCNA; (+) strand; PAM type: NNNNGHTT; PAM sequence: CCAAGTTT
gaggaacatcttggttgctt

SEQ ID NO: 13569 - DNA, 20 bp, Artificial Sequence
  Description of Artificial Sequence: Synthetic oligonucleotide
  Target: SCNA; (+) strand; PAM type: NNNNGHTT; PAM sequence: GCAGGTTT
gctgctataaacgtgcatgt

SEQ ID NO: 13570 - DNA, 20 bp, Artificial Sequence
  Description of Artificial Sequence: Synthetic oligonucleotide
  Target: SCNA; (+) strand; PAM type: NNNNGHTT; PAM sequence: CACAGTTT
tgtgcaggttttggtgtgga

SEQ ID NO: 13571 - DNA, 20 bp, Artificial Sequence
  Description of Artificial Sequence: Synthetic oligonucleotide
  Target: SCNA; (+) strand; PAM type: NNNNGHTT; PAM sequence: GCATGATT
ctttgggtgaatatcatgta

SEQ ID NO: 13572 - DNA, 20 bp, Artificial Sequence
  Description of Artificial Sequence: Synthetic oligonucleotide
  Target: SCNA; (+) strand; PAM type: NNNNGHTT; PAM sequence: TTAGGCTT
tggatcatatggtgatatgg

SEQ ID NO: 13573 - DNA, 20 bp, Artificial Sequence
  Description of Artificial Sequence: Synthetic oligonucleotide
  Target: SCNA; (+) strand; PAM type: NNNNGHTT; PAM sequence: AGCTGTTT
ggaggtaactagatcatgag

SEQ ID NO: 13574 - DNA, 20 bp, Artificial Sequence
  Description of Artificial Sequence: Synthetic oligonucleotide
  Target: SCNA; (+) strand; PAM type: NNNNGHTT; PAM sequence: AATGGTTT
agtgagttctcacgagagct

SEQ ID NO: 13575 - DNA, 20 bp, Artificial Sequence
  Description of Artificial Sequence: Synthetic oligonucleotide
  Target: SCNA; (+) strand; PAM type: NNNNGHTT; PAM sequence: ATGTGTTT
tcacgagagctaatggtttt

SEQ ID NO: 13576 - DNA, 20 bp, Artificial Sequence
  Description of Artificial Sequence: Synthetic oligonucleotide
  Target: SCNA; (+) strand; PAM type: NNNNGHTT; PAM sequence: CCTTGCTT
gtcaccttgtgaagtaggtg

SEQ ID NO: 13577 - DNA, 20 bp, Artificial Sequence
  Description of Artificial Sequence: Synthetic oligonucleotide
  Target: SCNA; (+) strand; PAM type: NNNNGHTT; PAM sequence: CCATGATT
tgcttccccttctccttcca

SEQ ID NO: 13578 - DNA, 20 bp, Artificial Sequence
  Description of Artificial Sequence: Synthetic oligonucleotide
  Target: SCNA; (+) strand; PAM type: NNNNGHTT; PAM sequence: ATAAGCTT
cttctccttccaccatgatt

SEQ ID NO: 13579 - DNA, 20 bp, Artificial Sequence
  Description of Artificial Sequence: Synthetic oligonucleotide
  Target: SCNA; (+) strand; PAM type: NNNNGHTT; PAM sequence: TATAGTTT
ggacaaatatatatgttaag

SEQ ID NO: 13580 - DNA, 20 bp, Artificial Sequence
  Description of Artificial Sequence: Synthetic oligonucleotide
  Target: SCNA; (+) strand; PAM type: NNNNGHTT; PAM sequence: TTTAGCTT
aatatatatgttaagtatag

SEQ ID NO: 13581 - DNA, 20 bp, Artificial Sequence
  Description of Artificial Sequence: Synthetic oligonucleotide
  Target: SCNA; (+) strand; PAM type: NNNNGHTT; PAM sequence: TGGTGTTT
tcaccagcatgctgtgctct

SEQ ID NO: 13582 - DNA, 20 bp, Artificial Sequence
  Description of Artificial Sequence: Synthetic oligonucleotide
  Target: SCNA; (+) strand; PAM type: NNNNGHTT; PAM sequence: TTTGGATT
gcatgctgtgctcttggtgt

SEQ ID NO: 13583 - DNA, 20 bp, Artificial Sequence
  Description of Artificial Sequence: Synthetic oligonucleotide
  Target: SCNA; (+) strand; PAM type: NNNNGHTT; PAM sequence: AAGTGTTT
tggattttagtcattttaat

SEQ ID NO: 13584 - DNA, 20 bp, Artificial Sequence
  Description of Artificial Sequence: Synthetic oligonucleotide
  Target: SCNA; (+) strand; PAM type: NNNNGHTT; PAM sequence: GTGAGCTT
gtcattttaataagtgtttt

SEQ ID NO: 13585 - DNA, 20 bp, Artificial Sequence
  Description of Artificial Sequence: Synthetic oligonucleotide
  Target: SCNA; (+) strand; PAM type: NNNNGHTT; PAM sequence: TACTGTTT
aataagtgttttgtgagctt

SEQ ID NO: 13586 - DNA, 20 bp, Artificial Sequence
  Description of Artificial Sequence: Synthetic oligonucleotide
  Target: SCNA; (+) strand; PAM type: NNNNGHTT; PAM sequence: GGAGGTTT
caagcaaagaacagagaact

SEQ ID NO: 13587 - DNA, 20 bp, Artificial Sequence
  Description of Artificial Sequence: Synthetic oligonucleotide
  Target: SCNA; (+) strand; PAM type: NNNNGHTT; PAM sequence: GTTTGCTT
caaagaacagagaactggag

SEQ ID NO: 13588 - DNA, 20 bp, Artificial Sequence
  Description of Artificial Sequence: Synthetic oligonucleotide
  Target: SCNA; (+) strand; PAM type: NNNNGHTT; PAM sequence: GAAAGTTT
gaaatatgttgagaatacag

SEQ ID NO: 13589 - DNA, 20 bp, Artificial Sequence
  Description of Artificial Sequence: Synthetic oligonucleotide
  Target: SCNA; (+) strand; PAM type: NNNNGHTT; PAM sequence: GAGTGATT
tttacagttaaactaataat

SEQ ID NO: 13590 - DNA, 20 bp, Artificial Sequence
  Description of Artificial Sequence: Synthetic oligonucleotide
  Target: SCNA; (+) strand; PAM type: NNNNGHTT; PAM sequence: TAAAGATT
ggtattaatatttcatttga

SEQ ID NO: 13591 - DNA, 20 bp, Artificial Sequence
  Description of Artificial Sequence: Synthetic oligonucleotide
  Target: SCNA; (+) strand; PAM type: NNNNGHTT; PAM sequence: TGTTGATT
tactaatgactatcagtatc

SEQ ID NO: 13592 - DNA, 20 bp, Artificial Sequence
  Description of Artificial Sequence: Synthetic oligonucleotide
  Target: SCNA; (+) strand; PAM type: NNNNGHTT; PAM sequence: CCTGGATT
gacaagaatcatatgataca

SEQ ID NO: 13593 - DNA, 20 bp, Artificial Sequence
  Description of Artificial Sequence: Synthetic oligonucleotide
  Target: SCNA; (+) strand; PAM type: NNNNGHTT; PAM sequence: ATTTGTTT
cttggaatcagtgaattaca

SEQ ID NO: 13594 - DNA, 20 bp, Artificial Sequence
  Description of Artificial Sequence: Synthetic oligonucleotide
  Target: SCNA; (+) strand; PAM type: NNNNGHTT; PAM sequence: TGGAGTTT
atgtaacgtcacattagtgt

SEQ ID NO: 13595 - DNA, 20 bp, Artificial Sequence
  Description of Artificial Sequence: Synthetic oligonucleotide
  Target: SCNA; (+) strand; PAM type: NNNNGHTT; PAM sequence: GGAGGATT
tagagtatacggagaaatgg

SEQ ID NO: 13596 - DNA, 20 bp, Artificial Sequence
  Description of Artificial Sequence: Synthetic oligonucleotide
  Target: SCNA; (+) strand; PAM type: NNNNGHTT; PAM sequence: CATAGCTT
ccacatacaatatattaccc

SEQ ID NO: 13597 - DNA, 20 bp, Artificial Sequence
  Description of Artificial Sequence: Synthetic oligonucleotide
  Target: SCNA; (+) strand; PAM type: NNNNGHTT; PAM sequence: GACAGATT
gaatatcaagataaatttgc

SEQ ID NO: 13598 - DNA, 20 bp, Artificial Sequence
  Description of Artificial Sequence: Synthetic oligonucleotide
  Target: SCNA; (+) strand; PAM type: NNNNGHTT; PAM sequence: AGAGGTTT
tcatggttgcccagaagtta

SEQ ID NO: 13599 - DNA, 20 bp, Artificial Sequence
  Description of Artificial Sequence: Synthetic oligonucleotide
  Target: SCNA; (+) strand; PAM type: NNNNGHTT; PAM sequence: GAATGATT
cccagaagttaagaggtttg

SEQ ID NO: 13600 - DNA, 20 bp, Artificial Sequence
  Description of Artificial Sequence: Synthetic oligonucleotide
  Target: SCNA; (+) strand; PAM type: NNNNGHTT; PAM sequence: TTTAGCTT
agatctgggatagctattac

SEQ ID NO: 13601 - DNA, 20 bp, Artificial Sequence
  Description of Artificial Sequence: Synthetic oligonucleotide
  Target: SCNA; (+) strand; PAM type: NNNNGHTT; PAM sequence: CTGAGATT
tagctattactttagctttt

SEQ ID NO: 13602 - DNA, 20 bp, Artificial Sequence
  Description of Artificial Sequence: Synthetic oligonucleotide
  Target: SCNA; (+) strand; PAM type: NNNNGHTT; PAM sequence: AGATGCTT
ttgaaataactattacacag

SEQ ID NO: 13603 - DNA, 20 bp, Artificial Sequence
  Description of Artificial Sequence: Synthetic oligonucleotide
  Target: SCNA; (+) strand; PAM type: NNNNGHTT; PAM sequence: TTTAGATT
attttcttataaaattactt

SEQ ID NO: 13604 - DNA, 20 bp, Artificial Sequence
  Description of Artificial Sequence: Synthetic oligonucleotide
  Target: SCNA; (+) strand; PAM type: NNNNGHTT; PAM sequence: GATTGTTT
tcttataaaattacttttta

SEQ ID NO: 13605 - DNA, 20 bp, Artificial Sequence
  Description of Artificial Sequence: Synthetic oligonucleotide
  Target: SCNA; (+) strand; PAM type: NNNNGHTT; PAM sequence: AATTGCTT
ttgggaggccgaggcaggag

SEQ ID NO: 13606 - DNA, 20 bp, Artificial Sequence
  Description of Artificial Sequence: Synthetic oligonucleotide
  Target: SCNA; (+) strand; PAM type: NNNNGHTT; PAM sequence: TCTAGCTT
aaatgctgttaaaatgcatt

SEQ ID NO: 13607 - DNA, 20 bp, Artificial Sequence
  Description of Artificial Sequence: Synthetic oligonucleotide
  Target: SCNA; (+) strand; PAM type: NNNNGHTT; PAM sequence: GCAAGTTT
aaatgggcatgtaaacaatg

SEQ ID NO: 13608 - DNA, 20 bp, Artificial Sequence
  Description of Artificial Sequence: Synthetic oligonucleotide
  Target: SCNA; (+) strand; PAM type: NNNNGHTT; PAM sequence: ACTGGCTT
ttgaaaaaagtattgactct

SEQ ID NO: 13609 - DNA, 20 bp, Artificial Sequence
  Description of Artificial Sequence: Synthetic oligonucleotide
  Target: SCNA; (+) strand; PAM type: NNNNGHTT; PAM sequence: GGCTGATT
aaatccatgtctgtgtgtct

SEQ ID NO: 13610 - DNA, 20 bp, Artificial Sequence
  Description of Artificial Sequence: Synthetic oligonucleotide
  Target: SCNA; (+) strand; PAM type: NNNNGHTT; PAM sequence: TTCTGATT
gtgggacagctctagggctc

SEQ ID NO: 13611 - DNA, 20 bp, Artificial Sequence
  Description of Artificial Sequence: Synthetic oligonucleotide
  Target: SCNA; (+) strand; PAM type: NNNNGHTT; PAM sequence: AAACGATT
accctcaagccatctagctc

SEQ ID NO: 13612 - DNA, 20 bp, Artificial Sequence
  Description of Artificial Sequence: Synthetic oligonucleotide
  Target: SCNA; (+) strand; PAM type: NNNNGHTT; PAM sequence: TTTGGATT
gcatctaggatctgatatat

SEQ ID NO: 13613 - DNA, 20 bp, Artificial Sequence
  Description of Artificial Sequence: Synthetic oligonucleotide
  Target: SCNA; (+) strand; PAM type: NNNNGHTT; PAM sequence: AATTGATT
taattttgctgtaggatatc

SEQ ID NO: 13614 - DNA, 20 bp, Artificial Sequence
  Description of Artificial Sequence: Synthetic oligonucleotide
  Target: SCNA; (+) strand; PAM type: NNNNGHTT; PAM sequence: CCCTGTTT
ctgtaggatatcaattgatt

SEQ ID NO: 13615 - DNA, 20 bp, Artificial Sequence
  Description of Artificial Sequence: Synthetic oligonucleotide
  Target: SCNA; (+) strand; PAM type: NNNNGHTT; PAM sequence: GAAGGATT
attgattccctgtttcagag

SEQ ID NO: 13616 - DNA, 20 bp, Artificial Sequence
  Description of Artificial Sequence: Synthetic oligonucleotide
  Target: SCNA; (+) strand; PAM type: NNNNGHTT; PAM sequence: AATGGTTT
aggaaggattgttaagctaa

SEQ ID NO: 13617 - DNA, 20 bp, Artificial Sequence
  Description of Artificial Sequence: Synthetic oligonucleotide
  Target: SCNA; (+) strand; PAM type: NNNNGHTT; PAM sequence: CAGAGTTT
agatcaaacattaaagtaag

SEQ ID NO: 13618 - DNA, 20 bp, Artificial Sequence
  Description of Artificial Sequence: Synthetic oligonucleotide
  Target: SCNA; (+) strand; PAM type: NNNNGHTT; PAM sequence: AGTAGATT
taaagtaagcagagtttttc

SEQ ID NO: 13619 - DNA, 20 bp, Artificial Sequence
  Description of Artificial Sequence: Synthetic oligonucleotide
  Target: SCNA; (+) strand; PAM type: NNNNGHTT; PAM sequence: ACTAGATT
agagtttttcagtagatttg

SEQ ID NO: 13620 - DNA, 20 bp, Artificial Sequence
  Description of Artificial Sequence: Synthetic oligonucleotide
  Target: SCNA; (+) strand; PAM type: NNNNGHTT; PAM sequence: ATTAGTTT
cacccgaaataccacctgaa

SEQ ID NO: 13621 - DNA, 20 bp, Artificial Sequence
  Description of Artificial Sequence: Synthetic oligonucleotide
  Target: SCNA; (+) strand; PAM type: NNNNGHTT; PAM sequence: ATTCGTTT
actccccatcacaaaagcta

SEQ ID NO: 13622 - DNA, 20 bp, Artificial Sequence
  Description of Artificial Sequence: Synthetic oligonucleotide
  Target: SCNA; (+) strand; PAM type: NNNNGHTT; PAM sequence: TGAAGTTT
cctaatgaaatcttttttgc

SEQ ID NO: 13623 - DNA, 20 bp, Artificial Sequence
  Description of Artificial Sequence: Synthetic oligonucleotide
  Target: SCNA; (+) strand; PAM type: NNNNGHTT; PAM sequence: GTAAGTTT
taaccatgagaaactattga

SEQ ID NO: 13624 - DNA, 20 bp, Artificial Sequence
  Description of Artificial Sequence: Synthetic oligonucleotide
  Target: SCNA; (+) strand; PAM type: NNNNGHTT; PAM sequence: CTTTGTTT
tttagatataaaacagagaa

SEQ ID NO: 13625 - DNA, 20 bp, Artificial Sequence
  Description of Artificial Sequence: Synthetic oligonucleotide
  Target: SCNA; (+) strand; PAM type: NNNNGHTT; PAM sequence: CAATGTTT
gagagtgaggagtgaagggt

SEQ ID NO: 13626 - DNA, 20 bp, Artificial Sequence
  Description of Artificial Sequence: Synthetic oligonucleotide
  Target: SCNA; (+) strand; PAM type: NNNNGHTT; PAM sequence: TGTGGTTT
ccaattgccattctaaatta

SEQ ID NO: 13627 - DNA, 20 bp, Artificial Sequence
  Description of Artificial Sequence: Synthetic oligonucleotide
  Target: SCNA; (+) strand; PAM type: NNNNGHTT; PAM sequence: AGTAGTTT
ataatgtataattaattata

SEQ ID NO: 13628 - DNA, 20 bp, Artificial Sequence
  Description of Artificial Sequence: Synthetic oligonucleotide
  Target: SCNA; (+) strand; PAM type: NNNNGHTT; PAM sequence: TCAAGATT
tataagtagtttttaaatct

SEQ ID NO: 13629 - DNA, 20 bp, Artificial Sequence
  Description of Artificial Sequence: Synthetic oligonucleotide
  Target: SCNA; (+) strand; PAM type: NNNNGHTT; PAM sequence: GGTTGCTT
atttatctcatgagtgaaat

SEQ ID NO: 13630 - DNA, 20 bp, Artificial Sequence
  Description of Artificial Sequence: Synthetic oligonucleotide
  Target: SCNA; (+) strand; PAM type: NNNNGHTT; PAM sequence: TTAAGTTT
gataagtatacagcatagag

SEQ ID NO: 13631 - DNA, 20 bp, Artificial Sequence
  Description of Artificial Sequence: Synthetic oligonucleotide
  Target: SCNA; (+) strand; PAM type: NNNNGHTT; PAM sequence: AATTGTTT
tatagaattctgaagtagtg

SEQ ID NO: 13632 - DNA, 20 bp, Artificial Sequence
  Description of Artificial Sequence: Synthetic oligonucleotide
  Target: SCNA; (+) strand; PAM type: NNNNGHTT; PAM sequence: TACTGTTT
gaagtagtgaattgtttcct

SEQ ID NO: 13633 - DNA, 20 bp, Artificial Sequence
  Description of Artificial Sequence: Synthetic oligonucleotide
  Target: SCNA; (+) strand; PAM type: NNNNGHTT; PAM sequence: TGCAGTTT
cttactgtttaacacattct

SEQ ID NO: 13634 - DNA, 20 bp, Artificial Sequence
  Description of Artificial Sequence: Synthetic oligonucleotide
  Target: SCNA; (+) strand; PAM type: NNNNGHTT; PAM sequence: AGTTGTTT
atcaggaattctgggcagtt

SEQ ID NO: 13635 - DNA, 20 bp, Artificial Sequence
  Description of Artificial Sequence: Synthetic oligonucleotide
  Target: SCNA; (+) strand; PAM type: NNNNGHTT; PAM sequence: CTTTGCTT
ttgaagacaatgtcatttat

SEQ ID NO: 13636 - DNA, 20 bp, Artificial Sequence
  Description of Artificial Sequence: Synthetic oligonucleotide
  Target: SCNA; (+) strand; PAM type: NNNNGHTT; PAM sequence: TAAAGATT
gtagggcctttaaaacacag

SEQ ID NO: 13637 - DNA, 20 bp, Artificial Sequence
  Description of Artificial Sequence: Synthetic oligonucleotide
  Target: SCNA; (+) strand; PAM type: NNNNGHTT; PAM sequence: TCTGGTTT
gggagcagagggggatgtga

SEQ ID NO: 13638 - DNA, 20 bp, Artificial Sequence
  Description of Artificial Sequence: Synthetic oligonucleotide
  Target: SCNA; (+) strand; PAM type: NNNNGHTT; PAM sequence: ATTAGCTT
attacagtgtaggtaaaatt

SEQ ID NO: 13639 - DNA, 20 bp, Artificial Sequence
  Description of Artificial Sequence: Synthetic oligonucleotide
  Target: SCNA; (+) strand; PAM type: NNNNGHTT; PAM sequence: CTGTGTTT
aatttcacatagtgaaatta

SEQ ID NO: 13640 - DNA, 20 bp, Artificial Sequence
  Description of Artificial Sequence: Synthetic oligonucleotide
  Target: SCNA; (+) strand; PAM type: NNNNGHTT; PAM sequence: GGAGGCTT
ggataactttttggagttct

SEQ ID NO: 13641 - DNA, 20 bp, Artificial Sequence
  Description of Artificial Sequence: Synthetic oligonucleotide
  Target: SCNA; (+) strand; PAM type: NNNNGHTT; PAM sequence: CCTTGATT
taacaagagtaggccttggg

SEQ ID NO: 13642 - DNA, 20 bp, Artificial Sequence
  Description of Artificial Sequence: Synthetic oligonucleotide
  Target: SCNA; (+) strand; PAM type: NNNNGHTT; PAM sequence: TCCAGATT
aactaatctggctagaaatt

SEQ ID NO: 13643 - DNA, 20 bp, Artificial Sequence
  Description of Artificial Sequence: Synthetic oligonucleotide
  Target: SCNA; (+) strand; PAM type: NNNNGHTT; PAM sequence: CATGGATT
agtactgccaaaaaacattt

SEQ ID NO: 13644 - DNA, 20 bp, Artificial Sequence
  Description of Artificial Sequence: Synthetic oligonucleotide
  Target: SCNA; (+) strand; PAM type: NNNNGHTT; PAM sequence: AGCAGATT
aatgaactctgggaagacca

SEQ ID NO: 13645 - DNA, 20 bp, Artificial Sequence
  Description of Artificial Sequence: Synthetic oligonucleotide
  Target: SCNA; (+) strand; PAM type: NNNNGHTT; PAM sequence: ATTAGTTT
taatttttataaaggcacca

SEQ ID NO: 13646 - DNA, 20 bp, Artificial Sequence
  Description of Artificial Sequence: Synthetic oligonucleotide
  Target: SCNA; (+) strand; PAM type: NNNNGHTT; PAM sequence: GGGAGATT
catgaaaaatgggtactttg

SEQ ID NO: 13647 - DNA, 20 bp, Artificial Sequence
  Description of Artificial Sequence: Synthetic oligonucleotide
  Target: SCNA; (+) strand; PAM type: NNNNGHTT; PAM sequence: CAGAGATT
tgtactaataaaatggtatt

SEQ ID NO: 13648 - DNA, 20 bp, Artificial Sequence
  Description of Artificial Sequence: Synthetic oligonucleotide
  Target: SCNA; (+) strand; PAM type: NNNNGHTT; PAM sequence: TACAGTTT
tgtatcaaaaactgcacttt

SEQ ID NO: 13649 - DNA, 20 bp, Artificial Sequence
  Description of Artificial Sequence: Synthetic oligonucleotide
  Target: SCNA; (+) strand; PAM type: NNNNGHTT; PAM sequence: CAAAGTTT
gtacattaaaatgagaaagg

SEQ ID NO: 13650 - DNA, 20 bp, Artificial Sequence
  Description of Artificial Sequence: Synthetic oligonucleotide
  Target: SCNA; (+) strand; PAM type: NNNNGHTT; PAM sequence: TGTTGTTT
agctatgagaaataaatttc

SEQ ID NO: 13651 - DNA, 20 bp, Artificial Sequence
  Description of Artificial Sequence: Synthetic oligonucleotide
  Target: SCNA; (+) strand; PAM type: NNNNGHTT; PAM sequence: AACAGATT
tattttgttataacagcaca

SEQ ID NO: 13652 - DNA, 20 bp, Artificial Sequence
  Description of Artificial Sequence: Synthetic oligonucleotide
  Target: SCNA; (+) strand; PAM type: NNNNGHTT; PAM sequence: AACAGCTT
cagcacaaacagattaagac

SEQ ID NO: 13653 - DNA, 20 bp, Artificial Sequence
  Description of Artificial Sequence: Synthetic oligonucleotide
  Target: SCNA; (+) strand; PAM type: NNNNGHTT; PAM sequence: TTCTGATT
taaaatttttgttaataatt

SEQ ID NO: 13654 - DNA, 20 bp, Artificial Sequence
  Description of Artificial Sequence: Synthetic oligonucleotide
  Target: SCNA; (+) strand; PAM type: NNNNGHTT; PAM sequence: CTCTGTTT
aaatttttttgttaatagtt

SEQ ID NO: 13655 - DNA, 20 bp, Artificial Sequence
  Description of Artificial Sequence: Synthetic oligonucleotide
  Target: SCNA; (+) strand; PAM type: NNNNGHTT; PAM sequence: TTTTGCTT
tttttgttaatagttctctg

SEQ ID NO: 13656 - DNA, 20 bp, Artificial Sequence
  Description of Artificial Sequence: Synthetic oligonucleotide
  Target: SCNA; (+) strand; PAM type: NNNNGHTT; PAM sequence: AATGGTTT
taccaatactggatatccaa

SEQ ID NO: 13657 - DNA, 20 bp, Artificial Sequence
  Description of Artificial Sequence: Synthetic oligonucleotide
  Target: SCNA; (+) strand; PAM type: NNNNGHTT; PAM sequence: CAGAGATT
ggaaagaaatgtactataac

SEQ ID NO: 13658 - DNA, 20 bp, Artificial Sequence
  Description of Artificial Sequence: Synthetic oligonucleotide
  Target: SCNA; (+) strand; PAM type: NNNNGHTT; PAM sequence: AAAAGATT
tcaaacttaatgggaagaga

SEQ ID NO: 13659 - DNA, 20 bp, Artificial Sequence
  Description of Artificial Sequence: Synthetic oligonucleotide
  Target: SCNA; (+) strand; PAM type: NNNNGHTT; PAM sequence: TGATGCTT
atatatcactatatttttta

SEQ ID NO: 13660 - DNA, 20 bp, Artificial Sequence
  Description of Artificial Sequence: Synthetic oligonucleotide
  Target: SCNA; (+) strand; PAM type: NNNNGHTT; PAM sequence: TTTTGTTT
gatgcttggcattgtatttt

SEQ ID NO: 13661 - DNA, 20 bp, Artificial Sequence
  Description of Artificial Sequence: Synthetic oligonucleotide
  Target: SCNA; (+) strand; PAM type: NNNNGHTT; PAM sequence: GTTTGTTT
cttggcattgtatttttttt

SEQ ID NO: 13662 - DNA, 20 bp, Artificial Sequence
  Description of Artificial Sequence: Synthetic oligonucleotide
  Target: SCNA; (+) strand; PAM type: NNNNGHTT; PAM sequence: GAGCGATT
aaactccatctcctgggttc

SEQ ID NO: 13663 - DNA, 20 bp, Artificial Sequence
  Description of Artificial Sequence: Synthetic oligonucleotide
  Target: SCNA; (+) strand; PAM type: NNNNGHTT; PAM sequence: CTGGGATT
tggttcagcctcctaagtag

SEQ ID NO: 13664 - DNA, 20 bp, Artificial Sequence
  Description of Artificial Sequence: Synthetic oligonucleotide
  Target: SCNA; (+) strand; PAM type: NNNNGHTT; PAM sequence: CAGGGTTT
ttttgtatttttagtagaga

SEQ ID NO: 13665 - DNA, 20 bp, Artificial Sequence
  Description of Artificial Sequence: Synthetic oligonucleotide
  Target: SCNA; (+) strand; PAM type: NNNNGHTT; PAM sequence: GAATGCTT
caattgtggctaaagcagca

SEQ ID NO: 13666 - DNA, 20 bp, Artificial Sequence
  Description of Artificial Sequence: Synthetic oligonucleotide
  Target: SCNA; (+) strand; PAM type: NNNNGHTT; PAM sequence: ATAAGTTT
gcagcagaatgcttatttac

SEQ ID NO: 13667 - DNA, 20 bp, Artificial Sequence
  Description of Artificial Sequence: Synthetic oligonucleotide
  Target: SCNA; (+) strand; PAM type: NNNNGHTT; PAM sequence: TGTTGTTT
aatattgtaattaccattta

SEQ ID NO: 13668 - DNA, 20 bp, Artificial Sequence
  Description of Artificial Sequence: Synthetic oligonucleotide
  Target: SCNA; (+) strand; PAM type: NNNNGHTT; PAM sequence: ACATGCTT
tgtttttttatgaatccagt

SEQ ID NO: 13669 - DNA, 20 bp, Artificial Sequence
  Description of Artificial Sequence: Synthetic oligonucleotide
  Target: SCNA; (+) strand; PAM type: NNNNGHTT; PAM sequence: TTGTGCTT
gcaatatgagagagaccatt

SEQ ID NO: 13670 - DNA, 20 bp, Artificial Sequence
  Description of Artificial Sequence: Synthetic oligonucleotide
  Target: SCNA; (+) strand; PAM type: NNNNGHTT; PAM sequence: CAGGGCTT
ggcgttaaagaggtaaggcc

SEQ ID NO: 13671 - DNA, 20 bp, Artificial Sequence
  Description of Artificial Sequence: Synthetic oligonucleotide
  Target: SCNA; (+) strand; PAM type: NNNNGHTT; PAM sequence: ATGGGCTT
tacccagcccaaaatgcaaa

SEQ ID NO: 13672 - DNA, 20 bp, Artificial Sequence
  Description of Artificial Sequence: Synthetic oligonucleotide
  Target: SCNA; (+) strand; PAM type: NNNNGHTT; PAM sequence: ACAGGTTT
tatatgtacataagccacat

SEQ ID NO: 13673 - DNA, 20 bp, Artificial Sequence
  Description of Artificial Sequence: Synthetic oligonucleotide
  Target: SCNA; (+) strand; PAM type: NNNNGHTT; PAM sequence: AACTGCTT
taaaaatattatgctgcaca

SEQ ID NO: 13674 - DNA, 20 bp, Artificial Sequence
  Description of Artificial Sequence: Synthetic oligonucleotide
  Target: SCNA; (+) strand; PAM type: NNNNGHTT; PAM sequence: TTTTGTTT
tctagcactatttttttcaa

SEQ ID NO: 13675 - DNA, 20 bp, Artificial Sequence
  Description of Artificial Sequence: Synthetic oligonucleotide
  Target: SCNA; (+) strand; PAM type: NNNNGHTT; PAM sequence: CAATGCTT
ggtcagagcatgcataattt

SEQ ID NO: 13676 - DNA, 20 bp, Artificial Sequence
  Description of Artificial Sequence: Synthetic oligonucleotide
  Target: SCNA; (+) strand; PAM type: NNNNGHTT; PAM sequence: ATTAGTTT
tgtcctcaaaaatgactttt

SEQ ID NO: 13677 - DNA, 20 bp, Artificial Sequence
  Description of Artificial Sequence: Synthetic oligonucleotide
  Target: SCNA; (+) strand; PAM type: NNNNGHTT; PAM sequence: TTCTGATT
tttattctctaaccatattg

SEQ ID NO: 13678 - DNA, 20 bp, Artificial Sequence
  Description of Artificial Sequence: Synthetic oligonucleotide
  Target: SCNA; (+) strand; PAM type: NNNNGHTT; PAM sequence: AAGGGATT
gtataaaaagaaagagggag

SEQ ID NO: 13679 - DNA, 20 bp, Artificial Sequence
  Description of Artificial Sequence: Synthetic oligonucleotide
  Target: SCNA; (+) strand; PAM type: NNNNGHTT; PAM sequence: TAGAGTTT
gggaagtattagtggaacat

SEQ ID NO: 13680 - DNA, 20 bp, Artificial Sequence
  Description of Artificial Sequence: Synthetic oligonucleotide
  Target: SCNA; (+) strand; PAM type: NNNNGHTT; PAM sequence: TGAGGCTT
ttcctctgagtggggactca

SEQ ID NO: 13681 - DNA, 20 bp, Artificial Sequence
  Description of Artificial Sequence: Synthetic oligonucleotide
  Target: SCNA; (+) strand; PAM type: NNNNGHTT; PAM sequence: CCCTGATT
cttcctgtcacccccataca

SEQ ID NO: 13682 - DNA, 20 bp, Artificial Sequence
  Description of Artificial Sequence: Synthetic oligonucleotide
  Target: SCNA; (+) strand; PAM type: NNNNGHTT; PAM sequence: TTAGGTTT
ggcagttgtggtaggggttc

SEQ ID NO: 13683 - DNA, 20 bp, Artificial Sequence
  Description of Artificial Sequence: Synthetic oligonucleotide
  Target: SCNA; (+) strand; PAM type: NNNNGHTT; PAM sequence: CTCAGATT
gttcttaggtttcccatggg

SEQ ID NO: 13684 - DNA, 20 bp, Artificial Sequence
  Description of Artificial Sequence: Synthetic oligonucleotide
  Target: SCNA; (+) strand; PAM type: NNNNGHTT; PAM sequence: GCACGTTT
tattagagaggatcagccag

SEQ ID NO: 13685 - DNA, 20 bp, Artificial Sequence
  Description of Artificial Sequence: Synthetic oligonucleotide
  Target: SCNA; (+) strand; PAM type: NNNNGHTT; PAM sequence: TGTAGATT
gaccatatgatgtatcatat

SEQ ID NO: 13686 - DNA, 20 bp, Artificial Sequence
  Description of Artificial Sequence: Synthetic oligonucleotide
  Target: SCNA; (+) strand; PAM type: NNNNGHTT; PAM sequence: GGGGGCTT
ttcaaatgaacttgggagga

SEQ ID NO: 13687 - DNA, 20 bp, Artificial Sequence
  Description of Artificial Sequence: Synthetic oligonucleotide
  Target: SCNA; (+) strand; PAM type: NNNNGHTT; PAM sequence: CTGTGCTT
tgggaggagggggctttgaa

SEQ ID NO: 13688 - DNA, 20 bp, Artificial Sequence
  Description of Artificial Sequence: Synthetic oligonucleotide
  Target: SCNA; (+) strand; PAM type: NNNNGHTT; PAM sequence: GGTTGTTT
gggctttgaactgtgcttgg

SEQ ID NO: 13689 - DNA, 20 bp, Artificial Sequence
  Description of Artificial Sequence: Synthetic oligonucleotide
  Target: SCNA; (+) strand; PAM type: NNNNGHTT; PAM sequence: AAATGCTT
tggggttgtttctcctctgg

SEQ ID NO: 13690 - DNA, 20 bp, Artificial Sequence
  Description of Artificial Sequence: Synthetic oligonucleotide
  Target: SCNA; (+) strand; PAM type: NNNNGHTT; PAM sequence: AATGGATT
acagaaaatgactataaaag

SEQ ID NO: 13691 - DNA, 20 bp, Artificial Sequence
  Description of Artificial Sequence: Synthetic oligonucleotide
  Target: SCNA; (+) strand; PAM type: NNNNGHTT; PAM sequence: AAAGGATT
ccattattaagaaaaagaga

SEQ ID NO: 13692 - DNA, 20 bp, Artificial Sequence
  Description of Artificial Sequence: Synthetic oligonucleotide
  Target: SCNA; (+) strand; PAM type: NNNNGHTT; PAM sequence: CTGTGTTT
taacctgtggcatcccaaat

SEQ ID NO: 13693 - DNA, 20 bp, Artificial Sequence
  Description of Artificial Sequence: Synthetic oligonucleotide
  Target: SCNA; (+) strand; PAM type: NNNNGHTT; PAM sequence: ATGGGTTT
aacacctagaactattctcc

SEQ ID NO: 13694 - DNA, 20 bp, Artificial Sequence
  Description of Artificial Sequence: Synthetic oligonucleotide
  Target: SCNA; (+) strand; PAM type: NNNNGHTT; PAM sequence: TTGAGATT
tacatacaatattaaggcct

SEQ ID NO: 13695 - DNA, 20 bp, Artificial Sequence
  Description of Artificial Sequence: Synthetic oligonucleotide
  Target: SCNA; (+) strand; PAM type: NNNNGHTT; PAM sequence: ATTTGCTT
acaatattaaggcctttgag

SEQ ID NO: 13696 - DNA, 20 bp, Artificial Sequence
  Description of Artificial Sequence: Synthetic oligonucleotide
  Target: SCNA; (+) strand; PAM type: NNNNGHTT; PAM sequence: TTCAGCTT
ttaaggcctttgagatttgc

SEQ ID NO: 13697 - DNA, 20 bp, Artificial Sequence
  Description of Artificial Sequence: Synthetic oligonucleotide
  Target: SCNA; (+) strand; PAM type: NNNNGHTT; PAM sequence: AAATGTTT
cttttaaactttgttaattt

SEQ ID NO: 13698 - DNA, 20 bp, Artificial Sequence
  Description of Artificial Sequence: Synthetic oligonucleotide
  Target: SCNA; (+) strand; PAM type: NNNNGHTT; PAM sequence: TAGTGATT
ggaaatcagaggaaaactaa

SEQ ID NO: 13699 - DNA, 20 bp, Artificial Sequence
  Description of Artificial Sequence: Synthetic oligonucleotide
  Target: SCNA; (+) strand; PAM type: NNNNGHTT; PAM sequence: TGATGCTT
aaataaaacggcatgttcag

SEQ ID NO: 13700 - DNA, 20 bp, Artificial Sequence
  Description of Artificial Sequence: Synthetic oligonucleotide
  Target: SCNA; (+) strand; PAM type: NNNNGHTT; PAM sequence: AAAAGATT
caaactacaaaggaatatgg

SEQ ID NO: 13701 - DNA, 20 bp, Artificial Sequence
  Description of Artificial Sequence: Synthetic oligonucleotide
  Target: SCNA; (+) strand; PAM type: NNNNGHTT; PAM sequence: TATGGTTT
gccagttacagatgagtagc

SEQ ID NO: 13702 - DNA, 20 bp, Artificial Sequence
  Description of Artificial Sequence: Synthetic oligonucleotide
  Target: SCNA; (+) strand; PAM type: NNNNGHTT; PAM sequence: TTAAGATT
gcataattgaatacattgtc

SEQ ID NO: 13703 - DNA, 20 bp, Artificial Sequence
  Description of Artificial Sequence: Synthetic oligonucleotide
  Target: SCNA; (+) strand; PAM type: NNNNGHTT; PAM sequence: TCATGCTT
tatttcacagataagaaaac

SEQ ID NO: 13704 - DNA, 20 bp, Artificial Sequence
  Description of Artificial Sequence: Synthetic oligonucleotide
  Target: SCNA; (+) strand; PAM type: NNNNGHTT; PAM sequence: CCATGTTT
cccatgccctccacaccatg

SEQ ID NO: 13705 - DNA, 20 bp, Artificial Sequence
  Description of Artificial Sequence: Synthetic oligonucleotide
  Target: SCNA; (+) strand; PAM type: NNNNGHTT; PAM sequence: CTTTGTTT
gcagaacacttgtgaattgc

SEQ ID NO: 13706 - DNA, 20 bp, Artificial Sequence
  Description of Artificial Sequence: Synthetic oligonucleotide
  Target: SCNA; (+) strand; PAM type: NNNNGHTT; PAM sequence: TGGAGATT
aagcagtcattagtatttag

SEQ ID NO: 13707 - DNA, 20 bp, Artificial Sequence
  Description of Artificial Sequence: Synthetic oligonucleotide
  Target: SCNA; (+) strand; PAM type: NNNNGHTT; PAM sequence: CTATGCTT
gatgaagtatttctatctat

SEQ ID NO: 13708 - DNA, 20 bp, Artificial Sequence
  Description of Artificial Sequence: Synthetic oligonucleotide
  Target: SCNA; (+) strand; PAM type: NNNNGHTT; PAM sequence: TTTCGATT
acgtacactgaaagggcaat

SEQ ID NO: 13709 - DNA, 20 bp, Artificial Sequence
  Description of Artificial Sequence: Synthetic oligonucleotide
  Target: SCNA; (+) strand; PAM type: NNNNGHTT; PAM sequence: TGAGGATT
agggcaattttcgatttttg

SEQ ID NO: 13710 - DNA, 20 bp, Artificial Sequence
  Description of Artificial Sequence: Synthetic oligonucleotide
  Target: SCNA; (+) strand; PAM type: NNNNGHTT; PAM sequence: TAAGGATT
aattggagatgacttgatat

SEQ ID NO: 13711 - DNA, 20 bp, Artificial Sequence
  Description of Artificial Sequence: Synthetic oligonucleotide
  Target: SCNA; (+) strand; PAM type: NNNNGHTT; PAM sequence: ATTTGATT
agcatagatagttaaaatct

SEQ ID NO: 13712 - DNA, 20 bp, Artificial Sequence
  Description of Artificial Sequence: Synthetic oligonucleotide
  Target: SCNA; (+) strand; PAM type: NNNNGHTT; PAM sequence: ATTAGATT
ttcctatgaactgaattcca

SEQ ID NO: 13713 - DNA, 20 bp, Artificial Sequence
  Description of Artificial Sequence: Synthetic oligonucleotide
  Target: SCNA; (+) strand; PAM type: NNNNGHTT; PAM sequence: AACTGCTT
actttggaattttcacaagt

SEQ ID NO: 13714 - DNA, 20 bp, Artificial Sequence
  Description of Artificial Sequence: Synthetic oligonucleotide
  Target: SCNA; (+) strand; PAM type: NNNNGHTT; PAM sequence: TAGTGATT
aattttcacaagtaactgct

SEQ ID NO: 13715 - DNA, 20 bp, Artificial Sequence
  Description of Artificial Sequence: Synthetic oligonucleotide
  Target: SCNA; (+) strand; PAM type: NNNNGHTT; PAM sequence: AAAAGTTT
ttaaaaatccaaatgttgtt

SEQ ID NO: 13716 - DNA, 20 bp, Artificial Sequence
  Description of Artificial Sequence: Synthetic oligonucleotide
  Target: SCNA; (+) strand; PAM type: NNNNGHTT; PAM sequence: TCCTGATT
tatcacgtaaacatattttg

SEQ ID NO: 13717 - DNA, 20 bp, Artificial Sequence
  Description of Artificial Sequence: Synthetic oligonucleotide
  Target: SCNA; (+) strand; PAM type: NNNNGHTT; PAM sequence: AATAGTTT
cctgatttttaaatactttg

SEQ ID NO: 13718 - DNA, 20 bp, Artificial Sequence
  Description of Artificial Sequence: Synthetic oligonucleotide
  Target: SCNA; (+) strand; PAM type: NNNNGHTT; PAM sequence: CTATGCTT
aaaacttaaaagctaacagc

SEQ ID NO: 13719 - DNA, 20 bp, Artificial Sequence
  Description of Artificial Sequence: Synthetic oligonucleotide
  Target: SCNA; (+) strand; PAM type: NNNNGHTT; PAM sequence: GGTTGTTT
ttactttttagggacaaaca

SEQ ID NO: 13720 - DNA, 20 bp, Artificial Sequence
  Description of Artificial Sequence: Synthetic oligonucleotide
  Target: SCNA; (+) strand; PAM type: NNNNGHTT; PAM sequence: CCAAGTTT
aacatataagtgctattttt

SEQ ID NO: 13721 - DNA, 20 bp, Artificial Sequence
  Description of Artificial Sequence: Synthetic oligonucleotide
  Target: SCNA; (+) strand; PAM type: NNNNGHTT; PAM sequence: TGAAGATT
taaagatctaatgtacaaca

SEQ ID NO: 13722 - DNA, 20 bp, Artificial Sequence
  Description of Artificial Sequence: Synthetic oligonucleotide
  Target: SCNA; (+) strand; PAM type: NNNNGHTT; PAM sequence: AGTAGATT
tactggtaatttttcaagaa

SEQ ID NO: 13723 - DNA, 20 bp, Artificial Sequence
  Description of Artificial Sequence: Synthetic oligonucleotide
  Target: SCNA; (+) strand; PAM type: NNNNGHTT; PAM sequence: ATTTGCTT
atatgatgatgggtatgtta

SEQ ID NO: 13724 - DNA, 20 bp, Artificial Sequence
  Description of Artificial Sequence: Synthetic oligonucleotide
  Target: SCNA; (+) strand; PAM type: NNNNGHTT; PAM sequence: CTAAGTTT
aaaataattttacaatacaa

SEQ ID NO: 13725 - DNA, 20 bp, Artificial Sequence
  Description of Artificial Sequence: Synthetic oligonucleotide
  Target: SCNA; (+) strand; PAM type: NNNNGHTT; PAM sequence: ATATGATT
ggaacaagggaagtgcacaa

SEQ ID NO: 13726 - DNA, 20 bp, Artificial Sequence
  Description of Artificial Sequence: Synthetic oligonucleotide
  Target: SCNA; (+) strand; PAM type: NNNNGHTT; PAM sequence: GTGGGATT
tgtatagtcatgcatatgtt

SEQ ID NO: 13727 - DNA, 20 bp, Artificial Sequence
  Description of Artificial Sequence: Synthetic oligonucleotide
  Target: SCNA; (+) strand; PAM type: NNNNGHTT; PAM sequence: TAATGCTT
atgcatatgttgtgggattg

SEQ ID NO: 13728 - DNA, 20 bp, Artificial Sequence
  Description of Artificial Sequence: Synthetic oligonucleotide
  Target: SCNA; (+) strand; PAM type: NNNNGHTT; PAM sequence: CTAAGATT
cagactattaaccactgatc

SEQ ID NO: 13729 - DNA, 20 bp, Artificial Sequence
  Description of Artificial Sequence: Synthetic oligonucleotide
  Target: SCNA; (+) strand; PAM type: NNNNGHTT; PAM sequence: CTCAGTTT
caggagccacccatatgtta

SEQ ID NO: 13730 - DNA, 20 bp, Artificial Sequence
  Description of Artificial Sequence: Synthetic oligonucleotide
  Target: SCNA; (+) strand; PAM type: NNNNGHTT; PAM sequence: TAATGATT
gcacatattaagtactcagt

SEQ ID NO: 13731 - DNA, 20 bp, Artificial Sequence
  Description of Artificial Sequence: Synthetic oligonucleotide
  Target: SCNA; (+) strand; PAM type: NNNNGHTT; PAM sequence: ACAGGATT
actttcccacctagaacctt

SEQ ID NO: 13732 - DNA, 20 bp, Artificial Sequence
  Description of Artificial Sequence: Synthetic oligonucleotide
  Target: SCNA; (+) strand; PAM type: NNNNGHTT; PAM sequence: TTGTGTTT
acaaagaaaggccataataa

SEQ ID NO: 13733 - DNA, 20 bp, Artificial Sequence
  Description of Artificial Sequence: Synthetic oligonucleotide
  Target: SCNA; (+) strand; PAM type: NNNNGHTT; PAM sequence: GACAGTTT
taattgtgtttctaagtggg

SEQ ID NO: 13734 - DNA, 20 bp, Artificial Sequence
  Description of Artificial Sequence: Synthetic oligonucleotide
  Target: SCNA; (+) strand; PAM type: NNNNGHTT; PAM sequence: GTATGCTT
atttttctttaataatcaca

SEQ ID NO: 13735 - DNA, 20 bp, Artificial Sequence
  Description of Artificial Sequence: Synthetic oligonucleotide
  Target: SCNA; (+) strand; PAM type: NNNNGHTT; PAM sequence: CTAAGATT
taatcacagtatgctttaat

SEQ ID NO: 13736 - DNA, 20 bp, Artificial Sequence
  Description of Artificial Sequence: Synthetic oligonucleotide
  Target: SCNA; (+) strand; PAM type: NNNNGHTT; PAM sequence: CAAAGCTT
tcaggcaattcattgtgtct

SEQ ID NO: 13737 - DNA, 20 bp, Artificial Sequence
  Description of Artificial Sequence: Synthetic oligonucleotide
  Target: SCNA; (+) strand; PAM type: NNNNGHTT; PAM sequence: GAAAGCTT
aattattagacacttaaggg

SEQ ID NO: 13738 - DNA, 20 bp, Artificial Sequence
  Description of Artificial Sequence: Synthetic oligonucleotide
  Target: SCNA; (+) strand; PAM type: NNNNGHTT; PAM sequence: TTAAGATT
taccttgttataaaattatt

SEQ ID NO: 13739 - DNA, 20 bp, Artificial Sequence
  Description of Artificial Sequence: Synthetic oligonucleotide
  Target: SCNA; (+) strand; PAM type: NNNNGHTT; PAM sequence: GTGTGCTT
agattatgcctgtgacctgt

SEQ ID NO: 13740 - DNA, 20 bp, Artificial Sequence
  Description of Artificial Sequence: Synthetic oligonucleotide
  Target: SCNA; (+) strand; PAM type: NNNNGHTT; PAM sequence: CTGTGCTT
tctgaaatgttgcctgtgac

SEQ ID NO: 13741 - DNA, 20 bp, Artificial Sequence
  Description of Artificial Sequence: Synthetic oligonucleotide
  Target: SCNA; (+) strand; PAM type: NNNNGHTT; PAM sequence: GCTTGTTT
aaatgttgcctgtgacctgt

SEQ ID NO: 13742 - DNA, 20 bp, Artificial Sequence
  Description of Artificial Sequence: Synthetic oligonucleotide
  Target: SCNA; (+) strand; PAM type: NNNNGHTT; PAM sequence: AAATGATT
ttgtttgtgaaatcaacatt

SEQ ID NO: 13743 - DNA, 20 bp, Artificial Sequence
  Description of Artificial Sequence: Synthetic oligonucleotide
  Target: SCNA; (+) strand; PAM type: NNNNGHTT; PAM sequence: ATCTGATT
agctgatggcaacatacatc

SEQ ID NO: 13744 - DNA, 20 bp, Artificial Sequence
  Description of Artificial Sequence: Synthetic oligonucleotide
  Target: SCNA; (+) strand; PAM type: NNNNGHTT; PAM sequence: AAGTGTTT
tcagagggtccataacactc

SEQ ID NO: 13745 - DNA, 20 bp, Artificial Sequence
  Description of Artificial Sequence: Synthetic oligonucleotide
  Target: SCNA; (+) strand; PAM type: NNNNGHTT; PAM sequence: ACCTGCTT
gtcaaacctgacattttaaa

SEQ ID NO: 13746 - DNA, 20 bp, Artificial Sequence
  Description of Artificial Sequence: Synthetic oligonucleotide
  Target: SCNA; (+) strand; PAM type: NNNNGHTT; PAM sequence: TCAGGATT
ctatccttttatgaattaag

SEQ ID NO: 13747 - DNA, 20 bp, Artificial Sequence
  Description of Artificial Sequence: Synthetic oligonucleotide
  Target: SCNA; (+) strand; PAM type: NNNNGHTT; PAM sequence: TCAAGATT
acgtgtcaatccatttgaaa

SEQ ID NO: 13748 - DNA, 20 bp, Artificial Sequence
  Description of Artificial Sequence: Synthetic oligonucleotide
  Target: SCNA; (+) strand; PAM type: NNNNGHTT; PAM sequence: CATTGCTT
atgtaatttttccaaaatgg

SEQ ID NO: 13749 - DNA, 20 bp, Artificial Sequence
  Description of Artificial Sequence: Synthetic oligonucleotide
  Target: SCNA; (+) strand; PAM type: NNNNGHTT; PAM sequence: TTCTGATT
ggcattgcttaggaacttca

SEQ ID NO: 13750 - DNA, 20 bp, Artificial Sequence
  Description of Artificial Sequence: Synthetic oligonucleotide
  Target: SCNA; (+) strand; PAM type: NNNNGHTT; PAM sequence: GGATGTTT
taaataacatcgctgaacct

SEQ ID NO: 13751 - DNA, 20 bp, Artificial Sequence
  Description of Artificial Sequence: Synthetic oligonucleotide
  Target: SCNA; (+) strand; PAM type: NNNNGHTT; PAM sequence: TCAAGCTT
tatccaaggcaacagacatt

SEQ ID NO: 13752 - DNA, 20 bp, Artificial Sequence
  Description of Artificial Sequence: Synthetic oligonucleotide
  Target: SCNA; (+) strand; PAM type: NNNNGHTT; PAM sequence: AGTGGCTT
tgctgtattatttgtcaggc

SEQ ID NO: 13753 - DNA, 20 bp, Artificial Sequence
  Description of Artificial Sequence: Synthetic oligonucleotide
  Target: SCNA; (+) strand; PAM type: NNNNGHTT; PAM sequence: CACAGTTT
tatttgtcaggcagtggctt

SEQ ID NO: 13754 - DNA, 20 bp, Artificial Sequence
  Description of Artificial Sequence: Synthetic oligonucleotide
  Target: SCNA; (+) strand; PAM type: NNNNGHTT; PAM sequence: CAAGGATT
agagatgctcattagttcag

SEQ ID NO: 13755 - DNA, 20 bp, Artificial Sequence
  Description of Artificial Sequence: Synthetic oligonucleotide
  Target: SCNA; (+) strand; PAM type: NNNNGHTT; PAM sequence: CGCTGATT
atagtagcattacagaataa

SEQ ID NO: 13756 - DNA, 20 bp, Artificial Sequence
  Description of Artificial Sequence: Synthetic oligonucleotide
  Target: SCNA; (+) strand; PAM type: NNNNGHTT; PAM sequence: TGTTGCTT
ttttctctatataacatcac

SEQ ID NO: 13757 - DNA, 20 bp, Artificial Sequence
  Description of Artificial Sequence: Synthetic oligonucleotide
  Target: SCNA; (+) strand; PAM type: NNNNGHTT; PAM sequence: ACCTGTTT
tttctgcctgtgcactttta

SEQ ID NO: 13758 - DNA, 20 bp, Artificial Sequence
  Description of Artificial Sequence: Synthetic oligonucleotide
  Target: SCNA; (+) strand; PAM type: NNNNGHTT; PAM sequence: ATCTGCTT
atcaaattaacaaaacaggt

SEQ ID NO: 13759 - DNA, 20 bp, Artificial Sequence
  Description of Artificial Sequence: Synthetic oligonucleotide
  Target: SCNA; (+) strand; PAM type: NNNNGHTT; PAM sequence: CTTTGATT
attaacaaaacaggtatctg

SEQ ID NO: 13760 - DNA, 20 bp, Artificial Sequence
  Description of Artificial Sequence: Synthetic oligonucleotide
  Target: SCNA; (+) strand; PAM type: NNNNGHTT; PAM sequence: TCTCGATT
aggtatctgctttgatttac

SEQ ID NO: 13761 - DNA, 20 bp, Artificial Sequence
  Description of Artificial Sequence: Synthetic oligonucleotide
  Target: SCNA; (+) strand; PAM type: NNNNGHTT; PAM sequence: CCAAGTTT
cttgtcacatccctcttcct

SEQ ID NO: 13762 - DNA, 20 bp, Artificial Sequence
  Description of Artificial Sequence: Synthetic oligonucleotide
  Target: SCNA; (+) strand; PAM type: NNNNGHTT; PAM sequence: AAGAGTTT
taataagcatttcaagcaaa

SEQ ID NO: 13763 - DNA, 20 bp, Artificial Sequence
  Description of Artificial Sequence: Synthetic oligonucleotide
  Target: SCNA; (+) strand; PAM type: NNNNGHTT; PAM sequence: GTTTGCTT
aagcatttcaagcaaaaaga

SEQ ID NO: 13764 - DNA, 20 bp, Artificial Sequence
  Description of Artificial Sequence: Synthetic oligonucleotide
  Target: SCNA; (+) strand; PAM type: NNNNGHTT; PAM sequence: CAAAGTTT
tttaccagggtcattttgat

SEQ ID NO: 13765 - DNA, 20 bp, Artificial Sequence
  Description of Artificial Sequence: Synthetic oligonucleotide
  Target: SCNA; (+) strand; PAM type: NNNNGHTT; PAM sequence: TCCAGATT
aaatactttcattgaaacca

SEQ ID NO: 13766 - DNA, 20 bp, Artificial Sequence
  Description of Artificial Sequence: Synthetic oligonucleotide
  Target: SCNA; (+) strand; PAM type: NNNNGHTT; PAM sequence: TAGAGCTT
agacttcaacaattttctag

SEQ ID NO: 13767 - DNA, 20 bp, Artificial Sequence
  Description of Artificial Sequence: Synthetic oligonucleotide
  Target: SCNA; (+) strand; PAM type: NNNNGHTT; PAM sequence: CAATGTTT
agccattttcactctcagtc

SEQ ID NO: 13768 - DNA, 20 bp, Artificial Sequence
  Description of Artificial Sequence: Synthetic oligonucleotide
  Target: SCNA; (+) strand; PAM type: NNNNGHTT; PAM sequence: TATGGCTT
atgctgcaatttctaggttc

SEQ ID NO: 13769 - DNA, 20 bp, Artificial Sequence
  Description of Artificial Sequence: Synthetic oligonucleotide
  Target: SCNA; (+) strand; PAM type: NNNNGHTT; PAM sequence: AAATGATT
cctataagggaaatatctcc

SEQ ID NO: 13770 - DNA, 20 bp, Artificial Sequence
  Description of Artificial Sequence: Synthetic oligonucleotide
  Target: SCNA; (+) strand; PAM type: NNNNGHTT; PAM sequence: CTTAGATT
tgattaattttgtcacatca

SEQ ID NO: 13771 - DNA, 20 bp, Artificial Sequence
  Description of Artificial Sequence: Synthetic oligonucleotide
  Target: SCNA; (+) strand; PAM type: NNNNGHTT; PAM sequence: TTCTGCTT
ttttgtcacatcacttagat

SEQ ID NO: 13772 - DNA, 20 bp, Artificial Sequence
  Description of Artificial Sequence: Synthetic oligonucleotide
  Target: SCNA; (+) strand; PAM type: NNNNGHTT; PAM sequence: CCCAGTTT
ttagatgggtggaaagcaaa

SEQ ID NO: 13773 - DNA, 20 bp, Artificial Sequence
  Description of Artificial Sequence: Synthetic oligonucleotide
  Target: SCNA; (+) strand; PAM type: NNNNGHTT; PAM sequence: AAAAGATT
gaaagcaaacccagttttgt

SEQ ID NO: 13774 - DNA, 20 bp, Artificial Sequence
  Description of Artificial Sequence: Synthetic oligonucleotide
  Target: SCNA; (+) strand; PAM type: NNNNGHTT; PAM sequence: ACATGTTT
gcaggtgaataaaagacggt

SEQ ID NO: 13775 - DNA, 20 bp, Artificial Sequence
  Description of Artificial Sequence: Synthetic oligonucleotide
  Target: SCNA; (+) strand; PAM type: NNNNGHTT; PAM sequence: TGTTGCTT
aaagacggtacatgtttccc

SEQ ID NO: 13776 - DNA, 20 bp, Artificial Sequence
  Description of Artificial Sequence: Synthetic oligonucleotide
  Target: SCNA; (+) strand; PAM type: NNNNGHTT; PAM sequence: GTAAGTTT
gtataaagacccaaaggaag

SEQ ID NO: 13777 - DNA, 20 bp, Artificial Sequence
  Description of Artificial Sequence: Synthetic oligonucleotide
  Target: SCNA; (+) strand; PAM type: NNNNGHTT; PAM sequence: AAGTGCTT
aaggaaggtaagttttgagg

SEQ ID NO: 13778 - DNA, 20 bp, Artificial Sequence
  Description of Artificial Sequence: Synthetic oligonucleotide
  Target: SCNA; (+) strand; PAM type: NNNNGHTT; PAM sequence: TGTAGATT
cttggactacccacttcctc

SEQ ID NO: 13779 - DNA, 20 bp, Artificial Sequence
  Description of Artificial Sequence: Synthetic oligonucleotide
  Target: SCNA; (+) strand; PAM type: NNNNGHTT; PAM sequence: TTCTGTTT
tacccacttcctctgtagat

SEQ ID NO: 13780 - DNA, 20 bp, Artificial Sequence
  Description of Artificial Sequence: Synthetic oligonucleotide
  Target: SCNA; (+) strand; PAM type: NNNNGHTT; PAM sequence: AGAAGATT
gtttcctcatctctacaatc

SEQ ID NO: 13781 - DNA, 20 bp, Artificial Sequence
  Description of Artificial Sequence: Synthetic oligonucleotide
  Target: SCNA; (+) strand; PAM type: NNNNGHTT; PAM sequence: TATAGCTT
tttctgaagctaagagggtc

SEQ ID NO: 13782 - DNA, 20 bp, Artificial Sequence
  Description of Artificial Sequence: Synthetic oligonucleotide
  Target: SCNA; (+) strand; PAM type: NNNNGHTT; PAM sequence: AACTGATT
gaaaagggtcggagacacaa

SEQ ID NO: 13783 - DNA, 20 bp, Artificial Sequence
  Description of Artificial Sequence: Synthetic oligonucleotide
  Target: SCNA; (+) strand; PAM type: NNNNGHTT; PAM sequence: ATAAGATT
taatataattattatcccta

SEQ ID NO: 13784 - DNA, 20 bp, Artificial Sequence
  Description of Artificial Sequence: Synthetic oligonucleotide
  Target: SCNA; (+) strand; PAM type: NNNNGHTT; PAM sequence: TAAGGATT
gaacttcactagaagcccag

SEQ ID NO: 13785 - DNA, 20 bp, Artificial Sequence
  Description of Artificial Sequence: Synthetic oligonucleotide
  Target: SCNA; (+) strand; PAM type: NNNNGHTT; PAM sequence: CAGAGTTT
ttgttctgcctttttattat

SEQ ID NO: 13786 - DNA, 20 bp, Artificial Sequence
  Description of Artificial Sequence: Synthetic oligonucleotide
  Target: SCNA; (+) strand; PAM type: NNNNGHTT; PAM sequence: TTAGGATT
tatcaaggtaaggctgctac

SEQ ID NO: 13787 - DNA, 20 bp, Artificial Sequence
  Description of Artificial Sequence: Synthetic oligonucleotide
  Target: SCNA; (+) strand; PAM type: NNNNGHTT; PAM sequence: AATAGTTT
atgaagtggaaacaacccag

SEQ ID NO: 13788 - DNA, 20 bp, Artificial Sequence
  Description of Artificial Sequence: Synthetic oligonucleotide
  Target: SCNA; (+) strand; PAM type: NNNNGHTT; PAM sequence: TTTTGATT
aagatattcatccaaaatca

SEQ ID NO: 13789 - DNA, 20 bp, Artificial Sequence
  Description of Artificial Sequence: Synthetic oligonucleotide
  Target: SCNA; (+) strand; PAM type: NNNNGHTT; PAM sequence: ATATGATT
gcactgttcttatactaagc

SEQ ID NO: 13790 - DNA, 20 bp, Artificial Sequence
  Description of Artificial Sequence: Synthetic oligonucleotide
  Target: SCNA; (+) strand; PAM type: NNNNGHTT; PAM sequence: TTGTGCTT
agacccagaaatgaaagttg

SEQ ID NO: 13791 - DNA, 20 bp, Artificial Sequence
  Description of Artificial Sequence: Synthetic oligonucleotide
  Target: SCNA; (+) strand; PAM type: NNNNGHTT; PAM sequence: AAATGTTT
ccttccctccttaatttaat

SEQ ID NO: 13792 - DNA, 20 bp, Artificial Sequence
  Description of Artificial Sequence: Synthetic oligonucleotide
  Target: SCNA; (+) strand; PAM type: NNNNGHTT; PAM sequence: TATAGATT
gaagaatggctccaatttta

SEQ ID NO: 13793 - DNA, 20 bp, Artificial Sequence
  Description of Artificial Sequence: Synthetic oligonucleotide
  Target: SCNA; (+) strand; PAM type: NNNNGHTT; PAM sequence: GTATGCTT
aagaacgtgtcagggcaagg

SEQ ID NO: 13794 - DNA, 20 bp, Artificial Sequence
  Description of Artificial Sequence: Synthetic oligonucleotide
  Target: SCNA; (+) strand; PAM type: NNNNGHTT; PAM sequence: GCTTGATT
acgtgtcagggcaagggtat

SEQ ID NO: 13795 - DNA, 20 bp, Artificial Sequence
  Description of Artificial Sequence: Synthetic oligonucleotide
  Target: SCNA; (+) strand; PAM type: NNNNGHTT; PAM sequence: TGATGTTT
ttattttgctgttgtagtgg

SEQ ID NO: 13796 - DNA, 20 bp, Artificial Sequence
  Description of Artificial Sequence: Synthetic oligonucleotide
  Target: SCNA; (+) strand; PAM type: NNNNGHTT; PAM sequence: CCATGTTT
ggtataatcttattcgtgtc

SEQ ID NO: 13797 - DNA, 20 bp, Artificial Sequence
  Description of Artificial Sequence: Synthetic oligonucleotide
  Target: SCNA; (+) strand; PAM type: NNNNGHTT; PAM sequence: AAGGGATT
aaattaggaaattaggcaca

SEQ ID NO: 13798 - DNA, 20 bp, Artificial Sequence
  Description of Artificial Sequence: Synthetic oligonucleotide
  Target: SCNA; (+) strand; PAM type: NNNNGHTT; PAM sequence: TTTTGTTT
ctttggcattttactacatt

SEQ ID NO: 13799 - DNA, 20 bp, Artificial Sequence
  Description of Artificial Sequence: Synthetic oligonucleotide
  Target: SCNA; (+) strand; PAM type: NNNNGHTT; PAM sequence: ACCAGCTT
tgaaaatgaaccgtaatctc

SEQ ID NO: 13800 - DNA, 20 bp, Artificial Sequence
  Description of Artificial Sequence: Synthetic oligonucleotide
  Target: SCNA; (+) strand; PAM type: NNNNGHTT; PAM sequence: AACAGATT
tggtacaaataaagagcaac

SEQ ID NO: 13801 - DNA, 20 bp, Artificial Sequence
  Description of Artificial Sequence: Synthetic oligonucleotide
  Target: SCNA; (+) strand; PAM type: NNNNGHTT; PAM sequence: ATCGGCTT
tcattccacttccactagcc

SEQ ID NO: 13802 - DNA, 20 bp, Artificial Sequence
  Description of Artificial Sequence: Synthetic oligonucleotide
  Target: SCNA; (+) strand; PAM type: NNNNGHTT; PAM sequence: AAGTGCTT
taaagtcatgcagtattaaa

SEQ ID NO: 13803 - DNA, 20 bp, Artificial Sequence
  Description of Artificial Sequence: Synthetic oligonucleotide
  Target: SCNA; (+) strand; PAM type: NNNNGHTT; PAM sequence: TCAAGTTT
atgcagtattaaaaagtgct

SEQ ID NO: 13804 - DNA, 20 bp, Artificial Sequence
  Description of Artificial Sequence: Synthetic oligonucleotide
  Target: SCNA; (+) strand; PAM type: NNNNGHTT; PAM sequence: GAGTGATT
gatcaggaatgtaaagccat

SEQ ID NO: 13805 - DNA, 20 bp, Artificial Sequence
  Description of Artificial Sequence: Synthetic oligonucleotide
  Target: SCNA; (+) strand; PAM type: NNNNGHTT; PAM sequence: TTTGGATT
gaatgtaaagccatgagtga

SEQ ID NO: 13806 - DNA, 20 bp, Artificial Sequence
  Description of Artificial Sequence: Synthetic oligonucleotide
  Target: SCNA; (+) strand; PAM type: NNNNGHTT; PAM sequence: TTTGGTTT
aaagccatgagtgatttgga

SEQ ID NO: 13807 - DNA, 20 bp, Artificial Sequence
  Description of Artificial Sequence: Synthetic oligonucleotide
  Target: SCNA; (+) strand; PAM type: NNNNGHTT; PAM sequence: GAAAGTTT
tggatttggtttatactatg

SEQ ID NO: 13808 - DNA, 20 bp, Artificial Sequence
  Description of Artificial Sequence: Synthetic oligonucleotide
  Target: SCNA; (+) strand; PAM type: NNNNGHTT; PAM sequence: TGGAGTTT
atttatttatttatttgaga

SEQ ID NO: 13809 - DNA, 20 bp, Artificial Sequence
  Description of Artificial Sequence: Synthetic oligonucleotide
  Target: SCNA; (+) strand; PAM type: NNNNGHTT; PAM sequence: CTGGGATT
tgcctcagtctcccgagtag

SEQ ID NO: 13810 - DNA, 20 bp, Artificial Sequence
  Description of Artificial Sequence: Synthetic oligonucleotide
  Target: SCNA; (+) strand; PAM type: NNNNGHTT; PAM sequence: CAGGGTTT
atttgtatttttagtagaaa

SEQ ID NO: 13811 - DNA, 20 bp, Artificial Sequence
  Description of Artificial Sequence: Synthetic oligonucleotide
  Target: SCNA; (+) strand; PAM type: NNNNGHTT; PAM sequence: CTAGGATT
cgccttagcctcccaaagtg

SEQ ID NO: 13812 - DNA, 20 bp, Artificial Sequence
  Description of Artificial Sequence: Synthetic oligonucleotide
  Target: SCNA; (+) strand; PAM type: NNNNGHTT; PAM sequence: AGTAGATT
aaaatgagatacggtcattc

SEQ ID NO: 13813 - DNA, 20 bp, Artificial Sequence
  Description of Artificial Sequence: Synthetic oligonucleotide
  Target: SCNA; (+) strand; PAM type: NNNNGHTT; PAM sequence: AATAGTTT
atttttgagaagacagtgta

SEQ ID NO: 13814 - DNA, 20 bp, Artificial Sequence
  Description of Artificial Sequence: Synthetic oligonucleotide
  Target: SCNA; (+) strand; PAM type: NNNNGHTT; PAM sequence: TTGAGTTT
gacagtgtaaatagtttgaa

SEQ ID NO: 13815 - DNA, 20 bp, Artificial Sequence
  Description of Artificial Sequence: Synthetic oligonucleotide
  Target: SCNA; (+) strand; PAM type: NNNNGHTT; PAM sequence: AGAAGTTT
tttgaattgagtttacaagc

SEQ ID NO: 13816 - DNA, 20 bp, Artificial Sequence
  Description of Artificial Sequence: Synthetic oligonucleotide
  Target: SCNA; (+) strand; PAM type: NNNNGHTT; PAM sequence: ACATGCTT
aatgaaggcacattttcttg

SEQ ID NO: 13817 - DNA, 20 bp, Artificial Sequence
  Description of Artificial Sequence: Synthetic oligonucleotide
  Target: SCNA; (+) strand; PAM type: NNNNGHTT; PAM sequence: AGCTGTTT
gagaggagttacaccatgtc

SEQ ID NO: 13818 - DNA, 20 bp, Artificial Sequence
  Description of Artificial Sequence: Synthetic oligonucleotide
  Target: SCNA; (+) strand; PAM type: NNNNGHTT; PAM sequence: ATAGGTTT
gctattcacatgactattgt

SEQ ID NO: 13819 - DNA, 20 bp, Artificial Sequence
  Description of Artificial Sequence: Synthetic oligonucleotide
  Target: SCNA; (+) strand; PAM type: NNNNGHTT; PAM sequence: CAGGGTTT
ttttatatttttagtagaga

SEQ ID NO: 13820 - DNA, 20 bp, Artificial Sequence
  Description of Artificial Sequence: Synthetic oligonucleotide
  Target: SCNA; (+) strand; PAM type: NNNNGHTT; PAM sequence: ATTTGTTT
taaatggtgtggacaaagca

SEQ ID NO: 13821 - DNA, 20 bp, Artificial Sequence
  Description of Artificial Sequence: Synthetic oligonucleotide
  Target: SCNA; (+) strand; PAM type: NNNNGHTT; PAM sequence: AGAGGCTT
taagggggtctgtaaggaca

SEQ ID NO: 13822 - DNA, 20 bp, Artificial Sequence
  Description of Artificial Sequence: Synthetic oligonucleotide
  Target: SCNA; (+) strand; PAM type: NNNNGHTT; PAM sequence: GTTCGATT
agagctatttacaattcaaa

SEQ ID NO: 13823 - DNA, 20 bp, Artificial Sequence
  Description of Artificial Sequence: Synthetic oligonucleotide
  Target: SCNA; (+) strand; PAM type: NNNNGHTT; PAM sequence: TTATGTTT
gaaaagctgtactgaaaatc

SEQ ID NO: 13824 - DNA, 20 bp, Artificial Sequence
  Description of Artificial Sequence: Synthetic oligonucleotide
  Target: SCNA; (+) strand; PAM type: NNNNGHTT; PAM sequence: ATGTGTTT
tcctttaaaaatagtcaatt

SEQ ID NO: 13825 - DNA, 20 bp, Artificial Sequence
  Description of Artificial Sequence: Synthetic oligonucleotide
  Target: SCNA; (+) strand; PAM type: NNNNGHTT; PAM sequence: TTTTGCTT
tcaaggacgtgaattgaaaa

SEQ ID NO: 13826 - DNA, 20 bp, Artificial Sequence
  Description of Artificial Sequence: Synthetic oligonucleotide
  Target: SCNA; (+) strand; PAM type: NNNNGHTT; PAM sequence: GCGAGATT
tcttgttataaaatctcaaa

SEQ ID NO: 13827 - DNA, 20 bp, Artificial Sequence
  Description of Artificial Sequence: Synthetic oligonucleotide
  Target: SCNA; (+) strand; PAM type: NNNNGHTT; PAM sequence: ATAGGTTT
atctcaaagcgagattaaaa

SEQ ID NO: 13828 - DNA, 20 bp, Artificial Sequence
  Description of Artificial Sequence: Synthetic oligonucleotide
  Target: SCNA; (+) strand; PAM type: NNNNGHTT; PAM sequence: TCTAGTTT
tatatatgtataaattttaa

SEQ ID NO: 13829 - DNA, 20 bp, Artificial Sequence
  Description of Artificial Sequence: Synthetic oligonucleotide
  Target: SCNA; (+) strand; PAM type: NNNNGHTT; PAM sequence: TGTTGTTT
tctacacattattataattt

SEQ ID NO: 13830 - DNA, 20 bp, Artificial Sequence
  Description of Artificial Sequence: Synthetic oligonucleotide
  Target: SCNA; (+) strand; PAM type: NNNNGHTT; PAM sequence: AACTGATT
atttaaaaacatttctgtag

SEQ ID NO: 13831 - DNA, 20 bp, Artificial Sequence
  Description of Artificial Sequence: Synthetic oligonucleotide
  Target: SCNA; (+) strand; PAM type: NNNNGHTT; PAM sequence: AACTGTTT
ttttgggtctaataaatggt

SEQ ID NO: 13832 - DNA, 20 bp, Artificial Sequence
  Description of Artificial Sequence: Synthetic oligonucleotide
  Target: SCNA; (+) strand; PAM type: NNNNGHTT; PAM sequence: CAGGGATT
gcaattgagttctttgaaat

SEQ ID NO: 13833 - DNA, 20 bp, Artificial Sequence
  Description of Artificial Sequence: Synthetic oligonucleotide
  Target: SCNA; (+) strand; PAM type: NNNNGHTT; PAM sequence: TTCTGCTT
gagttctttgaaatcaggga

SEQ ID NO: 13834 - DNA, 20 bp, Artificial Sequence
  Description of Artificial Sequence: Synthetic oligonucleotide
  Target: SCNA; (+) strand; PAM type: NNNNGHTT; PAM sequence: ATAGGTTT
tgtctgcattaatataaata

SEQ ID NO: 13835 - DNA, 20 bp, Artificial Sequence
  Description of Artificial Sequence: Synthetic oligonucleotide
  Target: SCNA; (+) strand; PAM type: NNNNGHTT; PAM sequence: TATGGTTT
acaaaattataaaattaata

SEQ ID NO: 13836 - DNA, 20 bp, Artificial Sequence
  Description of Artificial Sequence: Synthetic oligonucleotide
  Target: SCNA; (+) strand; PAM type: NNNNGHTT; PAM sequence: TATGGATT
tttaaatatacatatgtaaa

SEQ ID NO: 13837 - DNA, 20 bp, Artificial Sequence
  Description of Artificial Sequence: Synthetic oligonucleotide
  Target: SCNA; (+) strand; PAM type: NNNNGHTT; PAM sequence: ATTAGTTT
taaatcataatatgttgaaa

SEQ ID NO: 13838 - DNA, 20 bp, Artificial Sequence
  Description of Artificial Sequence: Synthetic oligonucleotide
  Target: SCNA; (+) strand; PAM type: NNNNGHTT; PAM sequence: CATAGTTT
aaaaataggtaactttatat

SEQ ID NO: 13839 - DNA, 20 bp, Artificial Sequence
  Description of Artificial Sequence: Synthetic oligonucleotide
  Target: SCNA; (+) strand; PAM type: NNNNGHTT; PAM sequence: GTAAGTTT
ctgaaaaaacatatcattca

SEQ ID NO: 13840 - DNA, 20 bp, Artificial Sequence
  Description of Artificial Sequence: Synthetic oligonucleotide
  Target: SCNA; (+) strand; PAM type: NNNNGHTT; PAM sequence: CCAGGATT
aatttcctgagatcaaacag

SEQ ID NO: 13841 - DNA, 20 bp, Artificial Sequence
  Description of Artificial Sequence: Synthetic oligonucleotide
  Target: SCNA; (+) strand; PAM type: NNNNGHTT; PAM sequence: GGTGGATT
aaacagccaggatttaagtt

SEQ ID NO: 13842 - DNA, 20 bp, Artificial Sequence
  Description of Artificial Sequence: Synthetic oligonucleotide
  Target: SCNA; (+) strand; PAM type: NNNNGHTT; PAM sequence: CCAAGTTT
gtaggtagaaagttcccagc

SEQ ID NO: 13843 - DNA, 20 bp, Artificial Sequence
  Description of Artificial Sequence: Synthetic oligonucleotide
  Target: SCNA; (+) strand; PAM type: NNNNGHTT; PAM sequence: AATTGTTT
aatgggatgaatttagggga

SEQ ID NO: 13844 - DNA, 20 bp, Artificial Sequence
  Description of Artificial Sequence: Synthetic oligonucleotide
  Target: SCNA; (+) strand; PAM type: NNNNGHTT; PAM sequence: TCTTGTTT
ttaggtactatgtaataatt

SEQ ID NO: 13845 - DNA, 20 bp, Artificial Sequence
  Description of Artificial Sequence: Synthetic oligonucleotide
  Target: SCNA; (+) strand; PAM type: NNNNGHTT; PAM sequence: GAATGATT
atttatctgatgtgggagag

SEQ ID NO: 13846 - DNA, 20 bp, Artificial Sequence
  Description of Artificial Sequence: Synthetic oligonucleotide
  Target: SCNA; (+) strand; PAM type: NNNNGHTT; PAM sequence: AGCCGATT
agaggaatgattatgatagc

SEQ ID NO: 13847 - DNA, 20 bp, Artificial Sequence
  Description of Artificial Sequence: Synthetic oligonucleotide
  Target: SCNA; (+) strand; PAM type: NNNNGHTT; PAM sequence: ATGTGTTT
atagcagccgatttatccca

SEQ ID NO: 13848 - DNA, 20 bp, Artificial Sequence
  Description of Artificial Sequence: Synthetic oligonucleotide
  Target: SCNA; (+) strand; PAM type: NNNNGHTT; PAM sequence: CATAGTTT
tactgcctagcaacatttcc

SEQ ID NO: 13849 - DNA, 20 bp, Artificial Sequence
  Description of Artificial Sequence: Synthetic oligonucleotide
  Target: SCNA; (+) strand; PAM type: NNNNGHTT; PAM sequence: ACTAGTTT
cccatagttttctgtggaac

SEQ ID NO: 13850 - DNA, 20 bp, Artificial Sequence
  Description of Artificial Sequence: Synthetic oligonucleotide
  Target: SCNA; (+) strand; PAM type: NNNNGHTT; PAM sequence: GAAAGTTT
caaccctagtaactaatgaa

SEQ ID NO: 13851 - DNA, 20 bp, Artificial Sequence
  Description of Artificial Sequence: Synthetic oligonucleotide
  Target: SCNA; (+) strand; PAM type: NNNNGHTT; PAM sequence: AAAAGTTT
aagaaagttttcaataatca

SEQ ID NO: 13852 - DNA, 20 bp, Artificial Sequence
  Description of Artificial Sequence: Synthetic oligonucleotide
  Target: SCNA; (+) strand; PAM type: NNNNGHTT; PAM sequence: CCCTGATT
taatcaaaaagtttgaataa

SEQ ID NO: 13853 - DNA, 20 bp, Artificial Sequence
  Description of Artificial Sequence: Synthetic oligonucleotide
  Target: SCNA; (+) strand; PAM type: NNNNGHTT; PAM sequence: CTCAGATT
atttctttactgtaggacat

SEQ ID NO: 13854 - DNA, 20 bp, Artificial Sequence
  Description of Artificial Sequence: Synthetic oligonucleotide
  Target: SCNA; (+) strand; PAM type: NNNNGHTT; PAM sequence: TTAAGATT
cattgtacaatgttagaaac

SEQ ID NO: 13855 - DNA, 20 bp, Artificial Sequence
  Description of Artificial Sequence: Synthetic oligonucleotide
  Target: SCNA; (+) strand; PAM type: NNNNGHTT; PAM sequence: ATGTGTTT
acacacacacacacacagat

SEQ ID NO: 13856 - DNA, 20 bp, Artificial Sequence
  Description of Artificial Sequence: Synthetic oligonucleotide
  Target: SCNA; (+) strand; PAM type: NNNNGHTT; PAM sequence: ACATGCTT
cactgactccagaacttgcc

SEQ ID NO: 13857 - DNA, 20 bp, Artificial Sequence
  Description of Artificial Sequence: Synthetic oligonucleotide
  Target: SCNA; (+) strand; PAM type: NNNNGHTT; PAM sequence: GTCTGCTT
ccagaacttgccacatgctt

SEQ ID NO: 13858 - DNA, 20 bp, Artificial Sequence
  Description of Artificial Sequence: Synthetic oligonucleotide
  Target: SCNA; (+) strand; PAM type: NNNNGHTT; PAM sequence: TCATGCTT
ttatctagttcttattataa

SEQ ID NO: 13859 - DNA, 20 bp, Artificial Sequence
  Description of Artificial Sequence: Synthetic oligonucleotide
  Target: SCNA; (+) strand; PAM type: NNNNGHTT; PAM sequence: GTTGGATT
acttacttaactacttctct

SEQ ID NO: 13860 - DNA, 20 bp, Artificial Sequence
  Description of Artificial Sequence: Synthetic oligonucleotide
  Target: SCNA; (+) strand; PAM type: NNNNGHTT; PAM sequence: ACTAGTTT
cacaattaacttctaacaga

SEQ ID NO: 13861 - DNA, 20 bp, Artificial Sequence
  Description of Artificial Sequence: Synthetic oligonucleotide
  Target: SCNA; (+) strand; PAM type: NNNNGHTT; PAM sequence: GTCTGTTT
acagaactagtttcaaagga

SEQ ID NO: 13862 - DNA, 20 bp, Artificial Sequence
  Description of Artificial Sequence: Synthetic oligonucleotide
  Target: SCNA; (+) strand; PAM type: NNNNGHTT; PAM sequence: CTCTGATT
gagtctgttttatttttaca

SEQ ID NO: 13863 - DNA, 20 bp, Artificial Sequence
  Description of Artificial Sequence: Synthetic oligonucleotide
  Target: SCNA; (+) strand; PAM type: NNNNGHTT; PAM sequence: TATTGTTT
agtaacacttataaaataca

SEQ ID NO: 13864 - DNA, 20 bp, Artificial Sequence
  Description of Artificial Sequence: Synthetic oligonucleotide
  Target: SCNA; (+) strand; PAM type: NNNNGHTT; PAM sequence: GTTTGCTT
acacttataaaatacatatt

SEQ ID NO: 13865 - DNA, 20 bp, Artificial Sequence
  Description of Artificial Sequence: Synthetic oligonucleotide
  Target: SCNA; (+) strand; PAM type: NNNNGHTT; PAM sequence: TTTTGTTT
ataaaatacatattgtttgc

SEQ ID NO: 13866 - DNA, 20 bp, Artificial Sequence
  Description of Artificial Sequence: Synthetic oligonucleotide
  Target: SCNA; (+) strand; PAM type: NNNNGHTT; PAM sequence: AGATGTTT
attgtttgcttttgttttcc

SEQ ID NO: 13867 - DNA, 20 bp, Artificial Sequence
  Description of Artificial Sequence: Synthetic oligonucleotide
  Target: SCNA; (+) strand; PAM type: NNNNGHTT; PAM sequence: CTGTGTTT
gaaccaagaagatctgactc

SEQ ID NO: 13868 - DNA, 20 bp, Artificial Sequence
  Description of Artificial Sequence: Synthetic oligonucleotide
  Target: SCNA; (+) strand; PAM type: NNNNGHTT; PAM sequence: TTAAGATT
gtcatatccacaacactgta

SEQ ID NO: 13869 - DNA, 20 bp, Artificial Sequence
  Description of Artificial Sequence: Synthetic oligonucleotide
  Target: SCNA; (+) strand; PAM type: NNNNGHTT; PAM sequence: TTGTGTTT
ttttatttgtataggcacta

SEQ ID NO: 13870 - DNA, 20 bp, Artificial Sequence
  Description of Artificial Sequence: Synthetic oligonucleotide
  Target: SCNA; (+) strand; PAM type: NNNNGHTT; PAM sequence: TAATGCTT
tgtataggcactattgtgtt

SEQ ID NO: 13871 - DNA, 20 bp, Artificial Sequence
  Description of Artificial Sequence: Synthetic oligonucleotide
  Target: SCNA; (+) strand; PAM type: NNNNGHTT; PAM sequence: TTCCGATT
gcactattgtgtttaatgct

SEQ ID NO: 13872 - DNA, 20 bp, Artificial Sequence
  Description of Artificial Sequence: Synthetic oligonucleotide
  Target: SCNA; (+) strand; PAM type: NNNNGHTT; PAM sequence: TTCTGATT
tccgattatataaattatat

SEQ ID NO: 13873 - DNA, 20 bp, Artificial Sequence
  Description of Artificial Sequence: Synthetic oligonucleotide
  Target: SCNA; (+) strand; PAM type: NNNNGHTT; PAM sequence: TTTTGCTT
attatatttctgattatatc

SEQ ID NO: 13874 - DNA, 20 bp, Artificial Sequence
  Description of Artificial Sequence: Synthetic oligonucleotide
  Target: SCNA; (+) strand; PAM type: NNNNGHTT; PAM sequence: GTGGGCTT
aacttaattacagcaagtct

SEQ ID NO: 13875 - DNA, 20 bp, Artificial Sequence
  Description of Artificial Sequence: Synthetic oligonucleotide
  Target: SCNA; (+) strand; PAM type: NNNNGHTT; PAM sequence: CTTTGATT
tttgttaaattttggttctc

SEQ ID NO: 13876 - DNA, 20 bp, Artificial Sequence
  Description of Artificial Sequence: Synthetic oligonucleotide
  Target: SCNA; (+) strand; PAM type: NNNNGHTT; PAM sequence: TGATGATT
tcatcttcctcaacatctga

SEQ ID NO: 13877 - DNA, 20 bp, Artificial Sequence
  Description of Artificial Sequence: Synthetic oligonucleotide
  Target: SCNA; (+) strand; PAM type: NNNNGHTT; PAM sequence: TCTTGATT
ttttcatcatttttgatatt

SEQ ID NO: 13878 - DNA, 20 bp, Artificial Sequence
  Description of Artificial Sequence: Synthetic oligonucleotide
  Target: SCNA; (+) strand; PAM type: NNNNGHTT; PAM sequence: GGGTGTTT
acattttactgactgtccaa

SEQ ID NO: 13879 - DNA, 20 bp, Artificial Sequence
  Description of Artificial Sequence: Synthetic oligonucleotide
  Target: SCNA; (+) strand; PAM type: NNNNGHTT; PAM sequence: AGCAGTTT
attcacattttatttttgtc

SEQ ID NO: 13880 - DNA, 20 bp, Artificial Sequence
  Description of Artificial Sequence: Synthetic oligonucleotide
  Target: SCNA; (+) strand; PAM type: NNNNGHTT; PAM sequence: CATAGCTT
cccacttactataaattaaa

SEQ ID NO: 13881 - DNA, 20 bp, Artificial Sequence
  Description of Artificial Sequence: Synthetic oligonucleotide
  Target: SCNA; (+) strand; PAM type: NNNNGHTT; PAM sequence: TTCAGTTT
taaaaatactttataaagaa

SEQ ID NO: 13882 - DNA, 20 bp, Artificial Sequence
  Description of Artificial Sequence: Synthetic oligonucleotide
  Target: SCNA; (+) strand; PAM type: NNNNGHTT; PAM sequence: CAGTGATT
tgatatgttcttagaatgct

SEQ ID NO: 13883 - DNA, 20 bp, Artificial Sequence
  Description of Artificial Sequence: Synthetic oligonucleotide
  Target: SCNA; (+) strand; PAM type: NNNNGHTT; PAM sequence: GATTGTTT
atgttcttagaatgctcagt

SEQ ID NO: 13884 - DNA, 20 bp, Artificial Sequence
  Description of Artificial Sequence: Synthetic oligonucleotide
  Target: SCNA; (+) strand; PAM type: NNNNGHTT; PAM sequence: TGGAGCTT
atctttggatataagcacaa

SEQ ID NO: 13885 - DNA, 20 bp, Artificial Sequence
  Description of Artificial Sequence: Synthetic oligonucleotide
  Target: SCNA; (+) strand; PAM type: NNNNGHTT; PAM sequence: CTTGGTTT
acaccatgcaccactccctc

SEQ ID NO: 13886 - DNA, 20 bp, Artificial Sequence
  Description of Artificial Sequence: Synthetic oligonucleotide
  Target: SCNA; (+) strand; PAM type: NNNNGHTT; PAM sequence: TGCTGATT
gtctcaagctagccttaaat

SEQ ID NO: 13887 - DNA, 20 bp, Artificial Sequence
  Description of Artificial Sequence: Synthetic oligonucleotide
  Target: SCNA; (+) strand; PAM type: NNNNGHTT; PAM sequence: GCTAGTTT
tagccttaaattgctgatta

SEQ ID NO: 13888 - DNA, 20 bp, Artificial Sequence
  Description of Artificial Sequence: Synthetic oligonucleotide
  Target: SCNA; (+) strand; PAM type: NNNNGHTT; PAM sequence: TTACGATT
taacaggaggtcctctccaa

SEQ ID NO: 13889 - DNA, 20 bp, Artificial Sequence
  Description of Artificial Sequence: Synthetic oligonucleotide
  Target: SCNA; (+) strand; PAM type: NNNNGHTT; PAM sequence: AGAAGCTT
aattttgaattcagaactgt

SEQ ID NO: 13890 - DNA, 20 bp, Artificial Sequence
  Description of Artificial Sequence: Synthetic oligonucleotide
  Target: SCNA; (+) strand; PAM type: NNNNGHTT; PAM sequence: GAAGGCTT
aaagggaagaaggatggaga

SEQ ID NO: 13891 - DNA, 20 bp, Artificial Sequence
  Description of Artificial Sequence: Synthetic oligonucleotide
  Target: SCNA; (+) strand; PAM type: NNNNGHTT; PAM sequence: CCAAGATT
gaggcagaacttgcagtgag

SEQ ID NO: 13892 - DNA, 20 bp, Artificial Sequence
  Description of Artificial Sequence: Synthetic oligonucleotide
  Target: SCNA; (+) strand; PAM type: NNNNGHTT; PAM sequence: TTATGCTT
tattatgtgtattattaaaa

SEQ ID NO: 13893 - DNA, 20 bp, Artificial Sequence
  Description of Artificial Sequence: Synthetic oligonucleotide
  Target: SCNA; (+) strand; PAM type: NNNNGHTT; PAM sequence: GTTGGATT
gtattcatatcctctctaat

SEQ ID NO: 13894 - DNA, 20 bp, Artificial Sequence
  Description of Artificial Sequence: Synthetic oligonucleotide
  Target: SCNA; (+) strand; PAM type: NNNNGHTT; PAM sequence: GCATGATT
ctgtataatttatggaatcg

SEQ ID NO: 13895 - DNA, 20 bp, Artificial Sequence
  Description of Artificial Sequence: Synthetic oligonucleotide
  Target: SCNA; (+) strand; PAM type: NNNNGHTT; PAM sequence: TTATGTTT
ttatggaatcggcatgattt

SEQ ID NO: 13896 - DNA, 20 bp, Artificial Sequence
  Description of Artificial Sequence: Synthetic oligonucleotide
  Target: SCNA; (+) strand; PAM type: NNNNGHTT; PAM sequence: TTAAGTTT
cagaattatcatactccttt

SEQ ID NO: 13897 - DNA, 20 bp, Artificial Sequence
  Description of Artificial Sequence: Synthetic oligonucleotide
  Target: SCNA; (+) strand; PAM type: NNNNGHTT; PAM sequence: ATCAGTTT
atactcctttttaagtttgg

SEQ ID NO: 13898 - DNA, 20 bp, Artificial Sequence
  Description of Artificial Sequence: Synthetic oligonucleotide
  Target: SCNA; (+) strand; PAM type: NNNNGHTT; PAM sequence: TTATGTTT
tacttcctgtatacatcaac

SEQ ID NO: 13899 - DNA, 20 bp, Artificial Sequence
  Description of Artificial Sequence: Synthetic oligonucleotide
  Target: SCNA; (+) strand; PAM type: NNNNGHTT; PAM sequence: GTTTGATT
tcctgtatacatcaacttat

SEQ ID NO: 13900 - DNA, 20 bp, Artificial Sequence
  Description of Artificial Sequence: Synthetic oligonucleotide
  Target: SCNA; (+) strand; PAM type: NNNNGHTT; PAM sequence: GAATGTTT
tgattcaaattttacttcca

SEQ ID NO: 13901 - DNA, 20 bp, Artificial Sequence
  Description of Artificial Sequence: Synthetic oligonucleotide
  Target: SCNA; (+) strand; PAM type: NNNNGHTT; PAM sequence: CTTTGTTT
cttccagaatgtttcacttc

SEQ ID NO: 13902 - DNA, 20 bp, Artificial Sequence
  Description of Artificial Sequence: Synthetic oligonucleotide
  Target: SCNA; (+) strand; PAM type: NNNNGHTT; PAM sequence: GCCAGTTT
ctactctttcatctttgctg

SEQ ID NO: 13903 - DNA, 20 bp, Artificial Sequence
  Description of Artificial Sequence: Synthetic oligonucleotide
  Target: SCNA; (+) strand; PAM type: NNNNGHTT; PAM sequence: TTTTGATT
ctttgctggccagtttcctc

SEQ ID NO: 13904 - DNA, 20 bp, Artificial Sequence
  Description of Artificial Sequence: Synthetic oligonucleotide
  Target: SCNA; (+) strand; PAM type: NNNNGHTT; PAM sequence: AAAAGCTT
tgtgaagcaaccaatctcca

SEQ ID NO: 13905 - DNA, 20 bp, Artificial Sequence
  Description of Artificial Sequence: Synthetic oligonucleotide
  Target: SCNA; (+) strand; PAM type: NNNNGHTT; PAM sequence: TGTGGTTT
aaaagctttgaaagaagtgc

SEQ ID NO: 13906 - DNA, 20 bp, Artificial Sequence
  Description of Artificial Sequence: Synthetic oligonucleotide
  Target: SCNA; (+) strand; PAM type: NNNNGHTT; PAM sequence: CACTGATT
aagaagtgctgtggttttgt

SEQ ID NO: 13907 - DNA, 20 bp, Artificial Sequence
  Description of Artificial Sequence: Synthetic oligonucleotide
  Target: SCNA; (+) strand; PAM type: NNNNGHTT; PAM sequence: ATGGGTTT
tggttttgtcactgattata

SEQ ID NO: 13908 - DNA, 20 bp, Artificial Sequence
  Description of Artificial Sequence: Synthetic oligonucleotide
  Target: SCNA; (+) strand; PAM type: NNNNGHTT; PAM sequence: TAATGATT
atgggtttctgttatttatg

SEQ ID NO: 13909 - DNA, 20 bp, Artificial Sequence
  Description of Artificial Sequence: Synthetic oligonucleotide
  Target: SCNA; (+) strand; PAM type: NNNNGHTT; PAM sequence: CAAAGTTT
gaaggctgaagagttagcag

SEQ ID NO: 13910 - DNA, 20 bp, Artificial Sequence
  Description of Artificial Sequence: Synthetic oligonucleotide
  Target: SCNA; (+) strand; PAM type: NNNNGHTT; PAM sequence: ATTTGTTT
aactaaccatagtacctgga

SEQ ID NO: 13911 - DNA, 20 bp, Artificial Sequence
  Description of Artificial Sequence: Synthetic oligonucleotide
  Target: SCNA; (+) strand; PAM type: NNNNGHTT; PAM sequence: ATATGTTT
aacagctgatatttaagaga

SEQ ID NO: 13912 - DNA, 20 bp, Artificial Sequence
  Description of Artificial Sequence: Synthetic oligonucleotide
  Target: SCNA; (+) strand; PAM type: NNNNGHTT; PAM sequence: TTATGATT
gatagaagtagagagtagaa

SEQ ID NO: 13913 - DNA, 20 bp, Artificial Sequence
  Description of Artificial Sequence: Synthetic oligonucleotide
  Target: SCNA; (+) strand; PAM type: NNNNGHTT; PAM sequence: AATAGTTT
tgtagggtgatatacttaac

SEQ ID NO: 13914 - DNA, 20 bp, Artificial Sequence
  Description of Artificial Sequence: Synthetic oligonucleotide
  Target: SCNA; (+) strand; PAM type: NNNNGHTT; PAM sequence: AAATGTTT
tcccaccacaaaggaatgat

SEQ ID NO: 13915 - DNA, 20 bp, Artificial Sequence
  Description of Artificial Sequence: Synthetic oligonucleotide
  Target: SCNA; (+) strand; PAM type: NNNNGHTT; PAM sequence: ATTTGATT
tggatatgttaattacccta

SEQ ID NO: 13916 - DNA, 20 bp, Artificial Sequence
  Description of Artificial Sequence: Synthetic oligonucleotide
  Target: SCNA; (+) strand; PAM type: NNNNGHTT; PAM sequence: AAAAGATT
tctgggtgtagatccacaag

SEQ ID NO: 13917 - DNA, 20 bp, Artificial Sequence
  Description of Artificial Sequence: Synthetic oligonucleotide
  Target: SCNA; (+) strand; PAM type: NNNNGHTT; PAM sequence: ATCTGTTT
acaagaaaagatttcagcat

SEQ ID NO: 13918 - DNA, 20 bp, Artificial Sequence
  Description of Artificial Sequence: Synthetic oligonucleotide
  Target: SCNA; (+) strand; PAM type: NNNNGHTT; PAM sequence: TCTTGCTT
aagggccccaacacagtggc

SEQ ID NO: 13919 - DNA, 20 bp, Artificial Sequence
  Description of Artificial Sequence: Synthetic oligonucleotide
  Target: SCNA; (+) strand; PAM type: NNNNGHTT; PAM sequence: CAGTGCTT
gtggctcttgcttggaatcc

SEQ ID NO: 13920 - DNA, 20 bp, Artificial Sequence
  Description of Artificial Sequence: Synthetic oligonucleotide
  Target: SCNA; (+) strand; PAM type: NNNNGHTT; PAM sequence: AAGTGTTT
atttaaaacattagaaatta

SEQ ID NO: 13921 - DNA, 20 bp, Artificial Sequence
  Description of Artificial Sequence: Synthetic oligonucleotide
  Target: SCNA; (+) strand; PAM type: NNNNGHTT; PAM sequence: TAGTGTTT
cttatcaagagtaatgtaaa

SEQ ID NO: 13922 - DNA, 20 bp, Artificial Sequence
  Description of Artificial Sequence: Synthetic oligonucleotide
  Target: SCNA; (+) strand; PAM type: NNNNGHTT; PAM sequence: ACATGTTT
taacttcctatacggagtgg

SEQ ID NO: 13923 - DNA, 20 bp, Artificial Sequence
  Description of Artificial Sequence: Synthetic oligonucleotide
  Target: SCNA; (+) strand; PAM type: NNNNGHTT; PAM sequence: AGGAGTTT
ctctattctaaatttgaatt

SEQ ID NO: 13924 - DNA, 20 bp, Artificial Sequence
  Description of Artificial Sequence: Synthetic oligonucleotide
  Target: SCNA; (+) strand; PAM type: NNNNGHTT; PAM sequence: AGAAGTTT
caggaggatctcttgagccc

SEQ ID NO: 13925 - DNA, 20 bp, Artificial Sequence
  Description of Artificial Sequence: Synthetic oligonucleotide
  Target: SCNA; (+) strand; PAM type: NNNNGHTT; PAM sequence: AAAAGATT
tactgatagataggtagata

SEQ ID NO: 13926 - DNA, 20 bp, Artificial Sequence
  Description of Artificial Sequence: Synthetic oligonucleotide
  Target: SCNA; (+) strand; PAM type: NNNNGHTT; PAM sequence: GGAAGCTT
acattatctcacatatatgt

SEQ ID NO: 13927 - DNA, 20 bp, Artificial Sequence
  Description of Artificial Sequence: Synthetic oligonucleotide
  Target: SCNA; (+) strand; PAM type: NNNNGHTT; PAM sequence: TTGAGATT
gtgataaaattgtactatat

SEQ ID NO: 13928 - DNA, 20 bp, Artificial Sequence
  Description of Artificial Sequence: Synthetic oligonucleotide
  Target: SCNA; (+) strand; PAM type: NNNNGHTT; PAM sequence: AGTGGATT
tttgagattcatgataaata

SEQ ID NO: 13929 - DNA, 20 bp, Artificial Sequence
  Description of Artificial Sequence: Synthetic oligonucleotide
  Target: SCNA; (+) strand; PAM type: NNNNGHTT; PAM sequence: GAGAGATT
acaacaaaaaaggtaactat

SEQ ID NO: 13930 - DNA, 20 bp, Artificial Sequence
  Description of Artificial Sequence: Synthetic oligonucleotide
  Target: SCNA; (+) strand; PAM type: NNNNGHTT; PAM sequence: ATTTGCTT
gagagattatgaatatatta

SEQ ID NO: 13931 - DNA, 20 bp, Artificial Sequence
  Description of Artificial Sequence: Synthetic oligonucleotide
  Target: SCNA; (+) strand; PAM type: NNNNGHTT; PAM sequence: GACAGATT
acttcagcctggagtgaaat

SEQ ID NO: 13932 - DNA, 20 bp, Artificial Sequence
  Description of Artificial Sequence: Synthetic oligonucleotide
  Target: SCNA; (+) strand; PAM type: NNNNGHTT; PAM sequence: GATGGCTT
gctgtagggacaccagagct

SEQ ID NO: 13933 - DNA, 20 bp, Artificial Sequence
  Description of Artificial Sequence: Synthetic oligonucleotide
  Target: SCNA; (+) strand; PAM type: NNNNGHTT; PAM sequence: GAGAGTTT
gaaggtcagaagtaatacct

SEQ ID NO: 13934 - DNA, 20 bp, Artificial Sequence
  Description of Artificial Sequence: Synthetic oligonucleotide
  Target: SCNA; (+) strand; PAM type: NNNNGHTT; PAM sequence: GTCAGCTT
gtgcatgttatgttgacttt

SEQ ID NO: 13935 - DNA, 20 bp, Artificial Sequence
  Description of Artificial Sequence: Synthetic oligonucleotide
  Target: SCNA; (+) strand; PAM type: NNNNGHTT; PAM sequence: TGCTGCTT
tcaatttcactgatggccac

SEQ ID NO: 13936 - DNA, 20 bp, Artificial Sequence
  Description of Artificial Sequence: Synthetic oligonucleotide
  Target: SCNA; (+) strand; PAM type: NNNNGHTT; PAM sequence: TTCTGCTT
atataaagataattaaatct

SEQ ID NO: 13937 - DNA, 20 bp, Artificial Sequence
  Description of Artificial Sequence: Synthetic oligonucleotide
  Target: SCNA; (+) strand; PAM type: NNNNGHTT; PAM sequence: TTTGGATT
gataattaaatctttctgct

SEQ ID NO: 13938 - DNA, 20 bp, Artificial Sequence
  Description of Artificial Sequence: Synthetic oligonucleotide
  Target: SCNA; (+) strand; PAM type: NNNNGHTT; PAM sequence: TGTTGATT
ttgtctattaaattgaagta

SEQ ID NO: 13939 - DNA, 20 bp, Artificial Sequence
  Description of Artificial Sequence: Synthetic oligonucleotide
  Target: SCNA; (+) strand; PAM type: NNNNGHTT; PAM sequence: ATGAGATT
aagtatattcttataaagga

SEQ ID NO: 13940 - DNA, 20 bp, Artificial Sequence
  Description of Artificial Sequence: Synthetic oligonucleotide
  Target: SCNA; (+) strand; PAM type: NNNNGHTT; PAM sequence: TGAGGCTT
gaatgagattacttttctta

SEQ ID NO: 13941 - DNA, 20 bp, Artificial Sequence
  Description of Artificial Sequence: Synthetic oligonucleotide
  Target: SCNA; (+) strand; PAM type: NNNNGHTT; PAM sequence: GAGAGTTT
gcaaagtaattattccgttg

SEQ ID NO: 13942 - DNA, 20 bp, Artificial Sequence
  Description of Artificial Sequence: Synthetic oligonucleotide
  Target: SCNA; (+) strand; PAM type: NNNNGHTT; PAM sequence: TGCAGTTT
cacaaaaactgcaaggtagt

SEQ ID NO: 13943 - DNA, 20 bp, Artificial Sequence
  Description of Artificial Sequence: Synthetic oligonucleotide
  Target: SCNA; (+) strand; PAM type: NNNNGHTT; PAM sequence: GTACGCTT
gtgatgctcagagatgttaa

SEQ ID NO: 13944 - DNA, 20 bp, Artificial Sequence
  Description of Artificial Sequence: Synthetic oligonucleotide
  Target: SCNA; (+) strand; PAM type: NNNNGHTT; PAM sequence: TTTGGTTT
gatgtagtctcaactaaaac

SEQ ID NO: 13945 - DNA, 20 bp, Artificial Sequence
  Description of Artificial Sequence: Synthetic oligonucleotide
  Target: SCNA; (+) strand; PAM type: NNNNGHTT; PAM sequence: GTGTGATT
ctcaactaaaactttggttt

SEQ ID NO: 13946 - DNA, 20 bp, Artificial Sequence
  Description of Artificial Sequence: Synthetic oligonucleotide
  Target: SCNA; (+) strand; PAM type: NNNNGHTT; PAM sequence: ACCTGTTT
caagacaattccagcccacc

SEQ ID NO: 13947 - DNA, 20 bp, Artificial Sequence
  Description of Artificial Sequence: Synthetic oligonucleotide
  Target: SCNA; (+) strand; PAM type: NNNNGHTT; PAM sequence: TGAAGTTT
ccaccacctgttttgataaa

SEQ ID NO: 13948 - DNA, 20 bp, Artificial Sequence
  Description of Artificial Sequence: Synthetic oligonucleotide
  Target: SCNA; (+) strand; PAM type: NNNNGHTT; PAM sequence: TATTGTTT
tgggacacagccacactagt

SEQ ID NO: 13949 - DNA, 20 bp, Artificial Sequence
  Description of Artificial Sequence: Synthetic oligonucleotide
  Target: SCNA; (+) strand; PAM type: NNNNGHTT; PAM sequence: CATAGATT
cttcaacagcagaattgaga

SEQ ID NO: 13950 - DNA, 20 bp, Artificial Sequence
  Description of Artificial Sequence: Synthetic oligonucleotide
  Target: SCNA; (+) strand; PAM type: NNNNGHTT; PAM sequence: CGTTGTTT
ccatacccggctaatttttg

SEQ ID NO: 13951 - DNA, 20 bp, Artificial Sequence
  Description of Artificial Sequence: Synthetic oligonucleotide
  Target: SCNA; (+) strand; PAM type: NNNNGHTT; PAM sequence: CAGGGTTT
ttttgcgttgtttgtagaca

SEQ ID NO: 13952 - DNA, 20 bp, Artificial Sequence
  Description of Artificial Sequence: Synthetic oligonucleotide
  Target: SCNA; (+) strand; PAM type: NNNNGHTT; PAM sequence: CTGGGATT
agcctcgggctctcaaagtg

SEQ ID NO: 13953 - DNA, 20 bp, Artificial Sequence
  Description of Artificial Sequence: Synthetic oligonucleotide
  Target: SCNA; (+) strand; PAM type: NNNNGHTT; PAM sequence: CATGGCTT
cctggccaagacatagatct

SEQ ID NO: 13954 - DNA, 20 bp, Artificial Sequence
  Description of Artificial Sequence: Synthetic oligonucleotide
  Target: SCNA; (+) strand; PAM type: NNNNGHTT; PAM sequence: ATCTGATT
catggcttaaaatacgtgct

SEQ ID NO: 13955 - DNA, 20 bp, Artificial Sequence
  Description of Artificial Sequence: Synthetic oligonucleotide
  Target: SCNA; (+) strand; PAM type: NNNNGHTT; PAM sequence: AAATGATT
aatgccatgagagacattga

SEQ ID NO: 13956 - DNA, 20 bp, Artificial Sequence
  Description of Artificial Sequence: Synthetic oligonucleotide
  Target: SCNA; (+) strand; PAM type: NNNNGHTT; PAM sequence: TTGTGCTT
ggtaactaagtcaaagaaac

SEQ ID NO: 13957 - DNA, 20 bp, Artificial Sequence
  Description of Artificial Sequence: Synthetic oligonucleotide
  Target: SCNA; (+) strand; PAM type: NNNNGHTT; PAM sequence: CACTGATT
gatattgataaactgcatgt

SEQ ID NO: 13958 - DNA, 20 bp, Artificial Sequence
  Description of Artificial Sequence: Synthetic oligonucleotide
  Target: SCNA; (+) strand; PAM type: NNNNGHTT; PAM sequence: ATATGTTT
atttcaatgactttctgaaa

SEQ ID NO: 13959 - DNA, 20 bp, Artificial Sequence
  Description of Artificial Sequence: Synthetic oligonucleotide
  Target: SCNA; (+) strand; PAM type: NNNNGHTT; PAM sequence: TGAAGATT
tagaaaaaaagtaatttaat

SEQ ID NO: 13960 - DNA, 20 bp, Artificial Sequence
  Description of Artificial Sequence: Synthetic oligonucleotide
  Target: SCNA; (+) strand; PAM type: NNNNGHTT; PAM sequence: GGAAGATT
aatttaattgaagatttgtg

SEQ ID NO: 13961 - DNA, 20 bp, Artificial Sequence
  Description of Artificial Sequence: Synthetic oligonucleotide
  Target: SCNA; (+) strand; PAM type: NNNNGHTT; PAM sequence: TGTAGCTT
gatctatgttgaagagatag

SEQ ID NO: 13962 - DNA, 20 bp, Artificial Sequence
  Description of Artificial Sequence: Synthetic oligonucleotide
  Target: SCNA; (+) strand; PAM type: NNNNGHTT; PAM sequence: ACATGTTT
tttgcagacatagacggagc

SEQ ID NO: 13963 - DNA, 20 bp, Artificial Sequence
  Description of Artificial Sequence: Synthetic oligonucleotide
  Target: SCNA; (+) strand; PAM type: NNNNGHTT; PAM sequence: AGTGGTTT
ttcttttccaaggaattcaa

SEQ ID NO: 13964 - DNA, 20 bp, Artificial Sequence
  Description of Artificial Sequence: Synthetic oligonucleotide
  Target: SCNA; (+) strand; PAM type: NNNNGHTT; PAM sequence: CAGAGTTT
caagttacagaaaagagagt

SEQ ID NO: 13965 - DNA, 20 bp, Artificial Sequence
  Description of Artificial Sequence: Synthetic oligonucleotide
  Target: SCNA; (+) strand; PAM type: NNNNGHTT; PAM sequence: AAATGTTT
atttgatggatgaactatac

SEQ ID NO: 13966 - DNA, 20 bp, Artificial Sequence
  Description of Artificial Sequence: Synthetic oligonucleotide
  Target: SCNA; (+) strand; PAM type: NNNNGHTT; PAM sequence: GAGAGATT
tgaactatacaaatgtttct

SEQ ID NO: 13967 - DNA, 20 bp, Artificial Sequence
  Description of Artificial Sequence: Synthetic oligonucleotide
  Target: SCNA; (+) strand; PAM type: NNNNGHTT; PAM sequence: AATGGATT
agtcatattttaaaaatcag

SEQ ID NO: 13968 - DNA, 20 bp, Artificial Sequence
  Description of Artificial Sequence: Synthetic oligonucleotide
  Target: SCNA; (+) strand; PAM type: NNNNGHTT; PAM sequence: CAATGATT
aaaagaaatcacagatccat

SEQ ID NO: 13969 - DNA, 20 bp, Artificial Sequence
  Description of Artificial Sequence: Synthetic oligonucleotide
  Target: SCNA; (+) strand; PAM type: NNNNGHTT; PAM sequence: TTTTGATT
aatcacagatccatcaatga

SEQ ID NO: 13970 - DNA, 20 bp, Artificial Sequence
  Description of Artificial Sequence: Synthetic oligonucleotide
  Target: SCNA; (+) strand; PAM type: NNNNGHTT; PAM sequence: TCTTGATT
attttgattcttaagaatat

SEQ ID NO: 13971 - DNA, 20 bp, Artificial Sequence
  Description of Artificial Sequence: Synthetic oligonucleotide
  Target: SCNA; (+) strand; PAM type: NNNNGHTT; PAM sequence: ATGAGTTT
tgattattttttaaaagact

SEQ ID NO: 13972 - DNA, 20 bp, Artificial Sequence
  Description of Artificial Sequence: Synthetic oligonucleotide
  Target: SCNA; (+) strand; PAM type: NNNNGHTT; PAM sequence: TATTGATT
agaactaccagcatttagag

SEQ ID NO: 13973 - DNA, 20 bp, Artificial Sequence
  Description of Artificial Sequence: Synthetic oligonucleotide
  Target: SCNA; (+) strand; PAM type: NNNNGHTT; PAM sequence: TGGGGTTT
acaagcaccaaactgacatt

SEQ ID NO: 13974 - DNA, 20 bp, Artificial Sequence
  Description of Artificial Sequence: Synthetic oligonucleotide
  Target: SCNA; (+) strand; PAM type: NNNNGHTT; PAM sequence: TGCTGCTT
acaccctcttttgtctttcc

SEQ ID NO: 13975 - DNA, 20 bp, Artificial Sequence
  Description of Artificial Sequence: Synthetic oligonucleotide
  Target: SCNA; (+) strand; PAM type: NNNNGHTT; PAM sequence: CCCTGTTT
ttcctgctgcttctgccaca

SEQ ID NO: 13976 - DNA, 20 bp, Artificial Sequence
  Description of Artificial Sequence: Synthetic oligonucleotide
  Target: SCNA; (+) strand; PAM type: NNNNGHTT; PAM sequence: TTTGGTTT
gctgcttctgccacaccctg

SEQ ID NO: 13977 - DNA, 20 bp, Artificial Sequence
  Description of Artificial Sequence: Synthetic oligonucleotide
  Target: SCNA; (+) strand; PAM type: NNNNGHTT; PAM sequence: CACGGATT
taaaagtctagccacctaac

SEQ ID NO: 13978 - DNA, 20 bp, Artificial Sequence
  Description of Artificial Sequence: Synthetic oligonucleotide
  Target: SCNA; (+) strand; PAM type: NNNNGHTT; PAM sequence: AAAAGATT
ttcagaagtggagttgcatg

SEQ ID NO: 13979 - DNA, 20 bp, Artificial Sequence
  Description of Artificial Sequence: Synthetic oligonucleotide
  Target: SCNA; (+) strand; PAM type: NNNNGHTT; PAM sequence: GGAGGCTT
gagttagaagcatggaagct

SEQ ID NO: 13980 - DNA, 20 bp, Artificial Sequence
  Description of Artificial Sequence: Synthetic oligonucleotide
  Target: SCNA; (+) strand; PAM type: NNNNGHTT; PAM sequence: CGCAGCTT
ccatttcattatttgccaaa

SEQ ID NO: 13981 - DNA, 20 bp, Artificial Sequence
  Description of Artificial Sequence: Synthetic oligonucleotide
  Target: SCNA; (+) strand; PAM type: NNNNGHTT; PAM sequence: GCTTGCTT
ttcattatttgccaaacgca

SEQ ID NO: 13982 - DNA, 20 bp, Artificial Sequence
  Description of Artificial Sequence: Synthetic oligonucleotide
  Target: SCNA; (+) strand; PAM type: NNNNGHTT; PAM sequence: GACAGATT
aaaaaccaagagagcgggca

SEQ ID NO: 13983 - DNA, 20 bp, Artificial Sequence
  Description of Artificial Sequence: Synthetic oligonucleotide
  Target: SCNA; (+) strand; PAM type: NNNNGHTT; PAM sequence: TCGCGTTT
tcacgctccatggagcatcc

SEQ ID NO: 13984 - DNA, 20 bp, Artificial Sequence
  Description of Artificial Sequence: Synthetic oligonucleotide
  Target: SCNA; (+) strand; PAM type: NNNNGHTT; PAM sequence: CCAGGATT
cgtctcccatccggcgttct

SEQ ID NO: 13985 - DNA, 20 bp, Artificial Sequence
  Description of Artificial Sequence: Synthetic oligonucleotide
  Target: SCNA; (+) strand; PAM type: NNNNGHTT; PAM sequence: GCCCGTTT
tctccaggatttccaaagac

SEQ ID NO: 13986 - DNA, 20 bp, Artificial Sequence
  Description of Artificial Sequence: Synthetic oligonucleotide
  Target: SCNA; (+) strand; PAM type: NNNNGHTT; PAM sequence: CTCTGCTT
acaggtacttacctgagtcc

SEQ ID NO: 13987 - DNA, 20 bp, Artificial Sequence
  Description of Artificial Sequence: Synthetic oligonucleotide
  Target: SCNA; (+) strand; PAM type: NNNNGHTT; PAM sequence: GAAGGCTT
ctcacgagggtggaaaggca

SEQ ID NO: 13988 - DNA, 20 bp, Artificial Sequence
  Description of Artificial Sequence: Synthetic oligonucleotide
  Target: SCNA; (+) strand; PAM type: NNNNGHTT; PAM sequence: CGCTGATT
cctcggctctccgcccccac

SEQ ID NO: 13989 - DNA, 20 bp, Artificial Sequence
  Description of Artificial Sequence: Synthetic oligonucleotide
  Target: SCNA; (+) strand; PAM type: NNNNGHTT; PAM sequence: CAGCGCTT
cgcccccaccgctgatttgt

SEQ ID NO: 13990 - DNA, 20 bp, Artificial Sequence
  Description of Artificial Sequence: Synthetic oligonucleotide
  Target: SCNA; (+) strand; PAM type: NNNNGHTT; PAM sequence: CGCTGCTT
cccgcccctctcccggcgct

SEQ ID NO: 13991 - DNA, 20 bp, Artificial Sequence
  Description of Artificial Sequence: Synthetic oligonucleotide
  Target: SCNA; (+) strand; PAM type: NNNNGHTT; PAM sequence: GGGCGCTT
cgcgcaaggcgggaaagtgg

SEQ ID NO: 13992 - DNA, 20 bp, Artificial Sequence
  Description of Artificial Sequence: Synthetic oligonucleotide
  Target: SCNA; (+) strand; PAM type: NNNNGHTT; PAM sequence: TTAAGTTT
gggcgcttttgcgcctcacg

SEQ ID NO: 13993 - DNA, 20 bp, Artificial Sequence
  Description of Artificial Sequence: Synthetic oligonucleotide
  Target: SCNA; (+) strand; PAM type: NNNNGHTT; PAM sequence: GAGCGCTT
ggctcacaccgcaccgccga

SEQ ID NO: 13994 - DNA, 20 bp, Artificial Sequence
  Description of Artificial Sequence: Synthetic oligonucleotide
  Target: SCNA; (+) strand; PAM type: NNNNGHTT; PAM sequence: GGTCGCTT
tcacaggttacaacgttagg

SEQ ID NO: 13995 - DNA, 20 bp, Artificial Sequence
  Description of Artificial Sequence: Synthetic oligonucleotide
  Target: SCNA; (+) strand; PAM type: NNNNGHTT; PAM sequence: CAAGGTTT
cgctttagttcaaatatctt

SEQ ID NO: 13996 - DNA, 20 bp, Artificial Sequence
  Description of Artificial Sequence: Synthetic oligonucleotide
  Target: SCNA; (+) strand; PAM type: NNNNGHTT; PAM sequence: TTTCGTTT
agttcaaatatcttcaaggt

SEQ ID NO: 13997 - DNA, 20 bp, Artificial Sequence
  Description of Artificial Sequence: Synthetic oligonucleotide
  Target: SCNA; (+) strand; PAM type: NNNNGHTT; PAM sequence: CGCTGATT
accaatcagcgcctgccaga

SEQ ID NO: 13998 - DNA, 20 bp, Artificial Sequence
  Description of Artificial Sequence: Synthetic oligonucleotide
  Target: SCNA; (+) strand; PAM type: NNNNGHTT; PAM sequence: TAAGGCTT
ccgtctaaaacaagcggtcc

SEQ ID NO: 13999 - DNA, 20 bp, Artificial Sequence
  Description of Artificial Sequence: Synthetic oligonucleotide
  Target: SCNA; (+) strand; PAM type: NNNNGHTT; PAM sequence: GCGTGATT
ttatctgggagacaaatcca

SEQ ID NO: 14000 - DNA, 20 bp, Artificial Sequence
  Description of Artificial Sequence: Synthetic oligonucleotide
  Target: SCNA; (+) strand; PAM type: NNNNGHTT; PAM sequence: TTCTGATT
acaccactcacctttctgac

SEQ ID NO: 14001 - DNA, 20 bp, Artificial Sequence
  Description of Artificial Sequence: Synthetic oligonucleotide
  Target: SCNA; (+) strand; PAM type: NNNNGHTT; PAM sequence: CATCGCTT
gaacttcaagacaatttttg

SEQ ID NO: 14002 - DNA, 20 bp, Artificial Sequence
  Description of Artificial Sequence: Synthetic oligonucleotide
  Target: SCNA; (+) strand; PAM type: NNNNGHTT; PAM sequence: CTTTGCTT
tcctcccactagcagaaagc

SEQ ID NO: 14003 - DNA, 20 bp, Artificial Sequence
  Description of Artificial Sequence: Synthetic oligonucleotide
  Target: SCNA; (+) strand; PAM type: NNNNGHTT; PAM sequence: CCTGGATT
gaaagcctttgctttctgtg

SEQ ID NO: 14004 - DNA, 20 bp, Artificial Sequence
  Description of Artificial Sequence: Synthetic oligonucleotide
  Target: SCNA; (+) strand; PAM type: NNNNGHTT; PAM sequence: GGAAGATT
tgctttctgtgcctggattc

SEQ ID NO: 14005 - DNA, 20 bp, Artificial Sequence
  Description of Artificial Sequence: Synthetic oligonucleotide
  Target: SCNA; (+) strand; PAM type: NNNNGHTT; PAM sequence: ACTCGTTT
agaggaggggggaaacaaca

SEQ ID NO: 14006 - DNA, 20 bp, Artificial Sequence
  Description of Artificial Sequence: Synthetic oligonucleotide
  Target: SCNA; (+) strand; PAM type: NNNNGHTT; PAM sequence: GTATGTTT
aacaacaactcgtttttgct

SEQ ID NO: 14007 - DNA, 20 bp, Artificial Sequence
  Description of Artificial Sequence: Synthetic oligonucleotide
  Target: SCNA; (+) strand; PAM type: NNNNGHTT; PAM sequence: AATTGTTT
ttgctgtatgtttttttttt

SEQ ID NO: 14008 - DNA, 20 bp, Artificial Sequence
  Description of Artificial Sequence: Synthetic oligonucleotide
  Target: SCNA; (+) strand; PAM type: NNNNGHTT; PAM sequence: TTATGCTT
gtttttatatttatagaaag

SEQ ID NO: 14009 - DNA, 20 bp, Artificial Sequence
  Description of Artificial Sequence: Synthetic oligonucleotide
  Target: SCNA; (+) strand; PAM type: NNNNGHTT; PAM sequence: GTCTGATT
tttatagaaagttatgcttt

SEQ ID NO: 14010 - DNA, 20 bp, Artificial Sequence
  Description of Artificial Sequence: Synthetic oligonucleotide
  Target: SCNA; (+) strand; PAM type: NNNNGHTT; PAM sequence: AAATGATT
aaccacaaggaacaggaagc

SEQ ID NO: 14011 - DNA, 20 bp, Artificial Sequence
  Description of Artificial Sequence: Synthetic oligonucleotide
  Target: SCNA; (+) strand; PAM type: NNNNGHTT; PAM sequence: TTTTGTTT
cagtagctcatattaatatt

SEQ ID NO: 14012 - DNA, 20 bp, Artificial Sequence
  Description of Artificial Sequence: Synthetic oligonucleotide
  Target: SCNA; (+) strand; PAM type: NNNNGHTT; PAM sequence: GTTTGCTT
agctcatattaatatttttt

SEQ ID NO: 14013 - DNA, 20 bp, Artificial Sequence
  Description of Artificial Sequence: Synthetic oligonucleotide
  Target: SCNA; (+) strand; PAM type: NNNNGHTT; PAM sequence: GCTAGTTT
caagaaggttggacttggga

SEQ ID NO: 14014 - DNA, 20 bp, Artificial Sequence
  Description of Artificial Sequence: Synthetic oligonucleotide
  Target: SCNA; (+) strand; PAM type: NNNNGHTT; PAM sequence: TCTGGCTT
acttgggagctagtttgctg

SEQ ID NO: 14015 - DNA, 20 bp, Artificial Sequence
  Description of Artificial Sequence: Synthetic oligonucleotide
  Target: SCNA; (+) strand; PAM type: NNNNGHTT; PAM sequence: ACAAGTTT
gtctggctttgagaccttga

SEQ ID NO: 14016 - DNA, 20 bp, Artificial Sequence
  Description of Artificial Sequence: Synthetic oligonucleotide
  Target: SCNA; (+) strand; PAM type: NNNNGHTT; PAM sequence: TTCTGTTT
ttgaacaagttttgttctcc

SEQ ID NO: 14017 - DNA, 20 bp, Artificial Sequence
  Description of Artificial Sequence: Synthetic oligonucleotide
  Target: SCNA; (+) strand; PAM type: NNNNGHTT; PAM sequence: TCCAGTTT
agttttgttctccttctgtt

SEQ ID NO: 14018 - DNA, 20 bp, Artificial Sequence
  Description of Artificial Sequence: Synthetic oligonucleotide
  Target: SCNA; (+) strand; PAM type: NNNNGHTT; PAM sequence: AGGAGATT
agttttcttttttgtaaatt

SEQ ID NO: 14019 - DNA, 20 bp, Artificial Sequence
  Description of Artificial Sequence: Synthetic oligonucleotide
  Target: SCNA; (+) strand; PAM type: NNNNGHTT; PAM sequence: TCAAGCTT
tttttttttttttaccaaat

SEQ ID NO: 14020 - DNA, 20 bp, Artificial Sequence
  Description of Artificial Sequence: Synthetic oligonucleotide
  Target: SCNA; (+) strand; PAM type: NNNNGHTT; PAM sequence: GACTGTTT
atgcatccacaaaatttaag

SEQ ID NO: 14021 - DNA, 20 bp, Artificial Sequence
  Description of Artificial Sequence: Synthetic oligonucleotide
  Target: SCNA; (+) strand; PAM type: NNNNGHTT; PAM sequence: AGATGATT
aaaataaccacaatatcatt

SEQ ID NO: 14022 - DNA, 20 bp, Artificial Sequence
  Description of Artificial Sequence: Synthetic oligonucleotide
  Target: SCNA; (+) strand; PAM type: NNNNGHTT; PAM sequence: ATCAGTTT
cagatgttgtgtccctttaa

SEQ ID NO: 14023 - DNA, 20 bp, Artificial Sequence
  Description of Artificial Sequence: Synthetic oligonucleotide
  Target: SCNA; (+) strand; PAM type: NNNNGHTT; PAM sequence: CTTTGTTT
atctaatcacgtagtataaa

SEQ ID NO: 14024 - DNA, 20 bp, Artificial Sequence
  Description of Artificial Sequence: Synthetic oligonucleotide
  Target: SCNA; (+) strand; PAM type: NNNNGHTT; PAM sequence: GGGTGTTT
gttcatgtcgttgcatgaat

SEQ ID NO: 14025 - DNA, 20 bp, Artificial Sequence
  Description of Artificial Sequence: Synthetic oligonucleotide
  Target: SCNA; (+) strand; PAM type: NNNNGHTT; PAM sequence: TTTTGTTT
tgtcgttgcatgaatgggtg

SEQ ID NO: 14026 - DNA, 20 bp, Artificial Sequence
  Description of Artificial Sequence: Synthetic oligonucleotide
  Target: SCNA; (+) strand; PAM type: NNNNGHTT; PAM sequence: TATTGCTT
tgaatgggtgttttgttttt

SEQ ID NO: 14027 - DNA, 20 bp, Artificial Sequence
  Description of Artificial Sequence: Synthetic oligonucleotide
  Target: SCNA; (+) strand; PAM type: NNNNGHTT; PAM sequence: TGTTGTTT
ttttgttttttattgctttt

SEQ ID NO: 14028 - DNA, 20 bp, Artificial Sequence
  Description of Artificial Sequence: Synthetic oligonucleotide
  Target: SCNA; (+) strand; PAM type: NNNNGHTT; PAM sequence: ATAAGTTT
tttttactactgttaatagt

SEQ ID NO: 14029 - DNA, 20 bp, Artificial Sequence
  Description of Artificial Sequence: Synthetic oligonucleotide
  Target: SCNA; (+) strand; PAM type: NNNNGHTT; PAM sequence: TAGTGCTT
accatgacctccttgagacc

SEQ ID NO: 14030 - DNA, 20 bp, Artificial Sequence
  Description of Artificial Sequence: Synthetic oligonucleotide
  Target: SCNA; (+) strand; PAM type: NNNNGHTT; PAM sequence: AAACGTTT
tggacagttgcacttcttat

SEQ ID NO: 14031 - DNA, 20 bp, Artificial Sequence
  Description of Artificial Sequence: Synthetic oligonucleotide
  Target: SCNA; (+) strand; PAM type: NNNNGHTT; PAM sequence: ACATGATT
gcacttcttataaacgttta

SEQ ID NO: 14032 - DNA, 20 bp, Artificial Sequence
  Description of Artificial Sequence: Synthetic oligonucleotide
  Target: SCNA; (+) strand; PAM type: NNNNGHTT; PAM sequence: AAGAGTTT
agacagagaaactgagctcc

SEQ ID NO: 14033 - DNA, 20 bp, Artificial Sequence
  Description of Artificial Sequence: Synthetic oligonucleotide
  Target: SCNA; (+) strand; PAM type: NNNNGHTT; PAM sequence: AGCAGTTT
gcacaattgtctcctgaatt

SEQ ID NO: 14034 - DNA, 20 bp, Artificial Sequence
  Description of Artificial Sequence: Synthetic oligonucleotide
  Target: SCNA; (+) strand; PAM type: NNNNGHTT; PAM sequence: CACAGATT
gcagtttgtgtctgaagcct

SEQ ID NO: 14035 - DNA, 20 bp, Artificial Sequence
  Description of Artificial Sequence: Synthetic oligonucleotide
  Target: SCNA; (+) strand; PAM type: NNNNGHTT; PAM sequence: TAAAGTTT
tgaaacagttcattcatatt

SEQ ID NO: 14036 - DNA, 20 bp, Artificial Sequence
  Description of Artificial Sequence: Synthetic oligonucleotide
  Target: SCNA; (+) strand; PAM type: NNNNGHTT; PAM sequence: AGATGATT
tggtattcctcaataggggg

SEQ ID NO: 14037 - DNA, 20 bp, Artificial Sequence
  Description of Artificial Sequence: Synthetic oligonucleotide
  Target: SCNA; (+) strand; PAM type: NNNNGHTT; PAM sequence: ATATGTTT
tgtcattttgaattacaact

SEQ ID NO: 14038 - DNA, 20 bp, Artificial Sequence
  Description of Artificial Sequence: Synthetic oligonucleotide
  Target: SCNA; (+) strand; PAM type: NNNNGHTT; PAM sequence: TAAAGTTT
aagggaactagaagttaaaa

SEQ ID NO: 14039 - DNA, 20 bp, Artificial Sequence
  Description of Artificial Sequence: Synthetic oligonucleotide
  Target: SCNA; (+) strand; PAM type: NNNNGHTT; PAM sequence: AATGGCTT
atataacgttaaactaattg

SEQ ID NO: 14040 - DNA, 20 bp, Artificial Sequence
  Description of Artificial Sequence: Synthetic oligonucleotide
  Target: SCNA; (+) strand; PAM type: NNNNGHTT; PAM sequence: TCATGTTT
tctgttcataactacaatat

SEQ ID NO: 14041 - DNA, 20 bp, Artificial Sequence
  Description of Artificial Sequence: Synthetic oligonucleotide
  Target: SCNA; (+) strand; PAM type: NNNNGHTT; PAM sequence: TTTTGTTT
tcataactacaatattcatg

SEQ ID NO: 14042 - DNA, 20 bp, Artificial Sequence
  Description of Artificial Sequence: Synthetic oligonucleotide
  Target: SCNA; (+) strand; PAM type: NNNNGHTT; PAM sequence: ATAGGATT
aaatattttaccagaccata

SEQ ID NO: 14043 - DNA, 20 bp, Artificial Sequence
  Description of Artificial Sequence: Synthetic oligonucleotide
  Target: SCNA; (+) strand; PAM type: NNNNGHTT; PAM sequence: TCTGGATT
accataataggattctttta

SEQ ID NO: 14044 - DNA, 20 bp, Artificial Sequence
  Description of Artificial Sequence: Synthetic oligonucleotide
  Target: SCNA; (+) strand; PAM type: NNNNGHTT; PAM sequence: TATAGATT
atttaattcattaattttgc

SEQ ID NO: 14045 - DNA, 20 bp, Artificial Sequence
  Description of Artificial Sequence: Synthetic oligonucleotide
  Target: SCNA; (+) strand; PAM type: NNNNGHTT; PAM sequence: ATATGCTT
agattaacattctatgaaat

SEQ ID NO: 14046 - DNA, 20 bp, Artificial Sequence
  Description of Artificial Sequence: Synthetic oligonucleotide
  Target: SCNA; (+) strand; PAM type: NNNNGHTT; PAM sequence: CTTTGTTT
aaatatatgcttaacctaga

SEQ ID NO: 14047 - DNA, 20 bp, Artificial Sequence
  Description of Artificial Sequence: Synthetic oligonucleotide
  Target: SCNA; (+) strand; PAM type: NNNNGHTT; PAM sequence: AATTGATT
taaagatgctgcccattaac

SEQ ID NO: 14048 - DNA, 20 bp, Artificial Sequence
  Description of Artificial Sequence: Synthetic oligonucleotide
  Target: SCNA; (+) strand; PAM type: NNNNGHTT; PAM sequence: GACTGATT
taacaattgattaaagagag

SEQ ID NO: 14049 - DNA, 20 bp, Artificial Sequence
  Description of Artificial Sequence: Synthetic oligonucleotide
  Target: SCNA; (+) strand; PAM type: NNNNGHTT; PAM sequence: ATGTGTTT
ttaaagagaggactgattta

SEQ ID NO: 14050 - DNA, 20 bp, Artificial Sequence
  Description of Artificial Sequence: Synthetic oligonucleotide
  Target: SCNA; (+) strand; PAM type: NNNNGHTT; PAM sequence: CAACGTTT
gtgtttaagttaagaaaata

SEQ ID NO: 14051 - DNA, 20 bp, Artificial Sequence
  Description of Artificial Sequence: Synthetic oligonucleotide
  Target: SCNA; (+) strand; PAM type: NNNNGHTT; PAM sequence: ACCTGCTT
gtaatgttgatgctggagcc

SEQ ID NO: 14052 - DNA, 20 bp, Artificial Sequence
  Description of Artificial Sequence: Synthetic oligonucleotide
  Target: SCNA; (+) strand; PAM type: NNNNGHTT; PAM sequence: GTGAGATT
cctgtgagagagacgaggta

SEQ ID NO: 14053 - DNA, 20 bp, Artificial Sequence
  Description of Artificial Sequence: Synthetic oligonucleotide
  Target: SCNA; (+) strand; PAM type: NNNNGHTT; PAM sequence: ATAGGCTT
gacgaggtagtgagattgcg

SEQ ID NO: 14054 - DNA, 20 bp, Artificial Sequence
  Description of Artificial Sequence: Synthetic oligonucleotide
  Target: SCNA; (+) strand; PAM type: NNNNGHTT; PAM sequence: GTATGATT
tactgttgggagatcattat

SEQ ID NO: 14055 - DNA, 20 bp, Artificial Sequence
  Description of Artificial Sequence: Synthetic oligonucleotide
  Target: SCNA; (+) strand; PAM type: NNNNGHTT; PAM sequence: TTCAGATT
aatcaaggagaagcatagta

SEQ ID NO: 14056 - DNA, 20 bp, Artificial Sequence
  Description of Artificial Sequence: Synthetic oligonucleotide
  Target: SCNA; (+) strand; PAM type: NNNNGHTT; PAM sequence: TATTGTTT
tgaccccatggccaacttca

SEQ ID NO: 14057 - DNA, 20 bp, Artificial Sequence
  Description of Artificial Sequence: Synthetic oligonucleotide
  Target: SCNA; (+) strand; PAM type: NNNNGHTT; PAM sequence: TGTGGTTT
gatatcattttaaatattcc

SEQ ID NO: 14058 - DNA, 20 bp, Artificial Sequence
  Description of Artificial Sequence: Synthetic oligonucleotide
  Target: SCNA; (+) strand; PAM type: NNNNGHTT; PAM sequence: GCAAGATT
tcctaagaatatgaaggcat

SEQ ID NO: 14059 - DNA, 20 bp, Artificial Sequence
  Description of Artificial Sequence: Synthetic oligonucleotide
  Target: SCNA; (+) strand; PAM type: NNNNGHTT; PAM sequence: CCAAGATT
atatgaaggcatgcaagatt

SEQ ID NO: 14060 - DNA, 20 bp, Artificial Sequence
  Description of Artificial Sequence: Synthetic oligonucleotide
  Target: SCNA; (+) strand; PAM type: NNNNGHTT; PAM sequence: TTTAGTTT
atctaacaagttcaaatgac

SEQ ID NO: 14061 - DNA, 20 bp, Artificial Sequence
  Description of Artificial Sequence: Synthetic oligonucleotide
  Target: SCNA; (+) strand; PAM type: NNNNGHTT; PAM sequence: TCTAGTTT
tatctataacctctctaatc

SEQ ID NO: 14062 - DNA, 20 bp, Artificial Sequence
  Description of Artificial Sequence: Synthetic oligonucleotide
  Target: SCNA; (+) strand; PAM type: NNNNGHTT; PAM sequence: TCTTGTTT
tgggcatgatattttacttg

SEQ ID NO: 14063 - DNA, 20 bp, Artificial Sequence
  Description of Artificial Sequence: Synthetic oligonucleotide
  Target: SCNA; (+) strand; PAM type: NNNNGHTT; PAM sequence: GTTTGATT
catgatattttacttgtctt

SEQ ID NO: 14064 - DNA, 20 bp, Artificial Sequence
  Description of Artificial Sequence: Synthetic oligonucleotide
  Target: SCNA; (+) strand; PAM type: NNNNGHTT; PAM sequence: CCATGTTT
ctattgttattatctagcct

SEQ ID NO: 14065 - DNA, 20 bp, Artificial Sequence
  Description of Artificial Sequence: Synthetic oligonucleotide
  Target: SCNA; (+) strand; PAM type: NNNNGHTT; PAM sequence: ACATGCTT
catgttttgggtgtcctagg

SEQ ID NO: 14066 - DNA, 20 bp, Artificial Sequence
  Description of Artificial Sequence: Synthetic oligonucleotide
  Target: SCNA; (+) strand; PAM type: NNNNGHTT; PAM sequence: AGTAGATT
tttttttttttttccattgc

SEQ ID NO: 14067 - DNA, 20 bp, Artificial Sequence
  Description of Artificial Sequence: Synthetic oligonucleotide
  Target: SCNA; (+) strand; PAM type: NNNNGHTT; PAM sequence: AGCAGTTT
gttacaataacatcactcaa

SEQ ID NO: 14068 - DNA, 20 bp, Artificial Sequence
  Description of Artificial Sequence: Synthetic oligonucleotide
  Target: SCNA; (+) strand; PAM type: NNNNGHTT; PAM sequence: CACAGCTT
cactcaaagcagtttgcagc

SEQ ID NO: 14069 - DNA, 20 bp, Artificial Sequence
  Description of Artificial Sequence: Synthetic oligonucleotide
  Target: SCNA; (+) strand; PAM type: NNNNGHTT; PAM sequence: CCTTGTTT
aacatttttactttcttaaa

SEQ ID NO: 14070 - DNA, 20 bp, Artificial Sequence
  Description of Artificial Sequence: Synthetic oligonucleotide
  Target: SCNA; (+) strand; PAM type: NNNNGHTT; PAM sequence: TGTGGATT
gcatagtcctgtatgaatta

SEQ ID NO: 14071 - DNA, 20 bp, Artificial Sequence
  Description of Artificial Sequence: Synthetic oligonucleotide
  Target: SCNA; (+) strand; PAM type: NNNNGHTT; PAM sequence: CCAAGTTT
atgatacaacaaatggtgtt

SEQ ID NO: 14072 - DNA, 20 bp, Artificial Sequence
  Description of Artificial Sequence: Synthetic oligonucleotide
  Target: SCNA; (+) strand; PAM type: NNNNGHTT; PAM sequence: AAAGGCTT
cctttgtgccagtggctctg

SEQ ID NO: 14073 - DNA, 20 bp, Artificial Sequence
  Description of Artificial Sequence: Synthetic oligonucleotide
  Target: SCNA; (+) strand; PAM type: NNNNGHTT; PAM sequence: TTCAGATT
cagaaatcagtccctaatat

SEQ ID NO: 14074 - DNA, 20 bp, Artificial Sequence
  Description of Artificial Sequence: Synthetic oligonucleotide
  Target: SCNA; (+) strand; PAM type: NNNNGHTT; PAM sequence: TAATGTTT
taaaatatcacgggaacttg

SEQ ID NO: 14075 - DNA, 20 bp, Artificial Sequence
  Description of Artificial Sequence: Synthetic oligonucleotide
  Target: SCNA; (+) strand; PAM type: NNNNGHTT; PAM sequence: TATTGTTT
ggaacttgtaatgttttgtg

SEQ ID NO: 14076 - DNA, 20 bp, Artificial Sequence
  Description of Artificial Sequence: Synthetic oligonucleotide
  Target: SCNA; (+) strand; PAM type: NNNNGHTT; PAM sequence: ATACGTTT
ccaaaatatccaggaatcta

SEQ ID NO: 14077 - DNA, 20 bp, Artificial Sequence
  Description of Artificial Sequence: Synthetic oligonucleotide
  Target: SCNA; (+) strand; PAM type: NNNNGHTT; PAM sequence: TGACGTTT
gataatttgagagtataaag

SEQ ID NO: 14078 - DNA, 20 bp, Artificial Sequence
  Description of Artificial Sequence: Synthetic oligonucleotide
  Target: SCNA; (+) strand; PAM type: NNNNGHTT; PAM sequence: GGCAGATT
cactttgggaggctgaggtg

SEQ ID NO: 14079 - DNA, 20 bp, Artificial Sequence
  Description of Artificial Sequence: Synthetic oligonucleotide
  Target: SCNA; (+) strand; PAM type: NNNNGHTT; PAM sequence: AATTGCTT
ttggggggctgaggcaggag

SEQ ID NO: 14080 - DNA, 20 bp, Artificial Sequence
  Description of Artificial Sequence: Synthetic oligonucleotide
  Target: SCNA; (+) strand; PAM type: NNNNGHTT; PAM sequence: AATGGTTT
catataaaaagcacatcact

SEQ ID NO: 14081 - DNA, 20 bp, Artificial Sequence
  Description of Artificial Sequence: Synthetic oligonucleotide
  Target: SCNA; (+) strand; PAM type: NNNNGHTT; PAM sequence: TATGGATT
aacatatccatgtcaataaa

SEQ ID NO: 14082 - DNA, 20 bp, Artificial Sequence
  Description of Artificial Sequence: Synthetic oligonucleotide
  Target: SCNA; (+) strand; PAM type: NNNNGHTT; PAM sequence: AAACGCTT
ctttttgtcttccaagaata

SEQ ID NO: 14083 - DNA, 20 bp, Artificial Sequence
  Description of Artificial Sequence: Synthetic oligonucleotide
  Target: SCNA; (+) strand; PAM type: NNNNGHTT; PAM sequence: TACTGATT
aatgatccttcactaagtct

SEQ ID NO: 14084 - DNA, 20 bp, Artificial Sequence
  Description of Artificial Sequence: Synthetic oligonucleotide
  Target: SCNA; (+) strand; PAM type: NNNNGHTT; PAM sequence: GGTTGCTT
agttaaagttgtatgtgcag

SEQ ID NO: 14085 - DNA, 20 bp, Artificial Sequence
  Description of Artificial Sequence: Synthetic oligonucleotide
  Target: SCNA; (-) strand; PAM type: NRG; PAM sequence: TAG
aggctgttaggtataggttt

SEQ ID NO: 14086 - DNA, 20 bp, Artificial Sequence
  Description of Artificial Sequence: Synthetic oligonucleotide
  Target: SCNA; (-) strand; PAM type: NRG; PAM sequence: AGG
acttccaggctgttaggtat

SEQ ID NO: 14087 - DNA, 20 bp, Artificial Sequence
  Description of Artificial Sequence: Synthetic oligonucleotide
  Target: SCNA; (-) strand; PAM type: NRG; PAM sequence: TAG
tacttccaggctgttaggta

SEQ ID NO: 14088 - DNA, 20 bp, Artificial Sequence
  Description of Artificial Sequence: Synthetic oligonucleotide
  Target: SCNA; (-) strand; PAM type: NRG; PAM sequence: AGG
agacctacttccaggctgtt

SEQ ID NO: 14089 - DNA, 20 bp, Artificial Sequence
  Description of Artificial Sequence: Synthetic oligonucleotide
  Target: SCNA; (-) strand; PAM type: NRG; PAM sequence: TAG
cagacctacttccaggctgt

SEQ ID NO: 14090 - DNA, 20 bp, Artificial Sequence
  Description of Artificial Sequence: Synthetic oligonucleotide
  Target: SCNA; (-) strand; PAM type: NRG; PAM sequence: AGG
tgatgatcagacctacttcc

SEQ ID NO: 14091 - DNA, 20 bp, Artificial Sequence
  Description of Artificial Sequence: Synthetic oligonucleotide
  Target: SCNA; (-) strand; PAM type: NRG; PAM sequence: CAG
ttgatgatcagacctacttc

SEQ ID NO: 14092 - DNA, 20 bp, Artificial Sequence
  Description of Artificial Sequence: Synthetic oligonucleotide
  Target: SCNA; (-) strand; PAM type: NRG; PAM sequence: CAG
ctgtgttggtttttgatgat

SEQ ID NO: 14093 - DNA, 20 bp, Artificial Sequence
  Description of Artificial Sequence: Synthetic oligonucleotide
  Target: SCNA; (-) strand; PAM type: NRG; PAM sequence: TGG
attcaaatgctacactgtgt

SEQ ID NO: 14094 - DNA, 20 bp, Artificial Sequence
  Description of Artificial Sequence: Synthetic oligonucleotide
  Target: SCNA; (-) strand; PAM type: NRG; PAM sequence: TAG
ttcactgcccatggtgagaa

SEQ ID NO: 14095 - DNA, 20 bp, Artificial Sequence
  Description of Artificial Sequence: Synthetic oligonucleotide
  Target: SCNA; (-) strand; PAM type: NRG; PAM sequence: GAG
gtgttttcactgcccatggt

SEQ ID NO: 14096 - DNA, 20 bp, Artificial Sequence
  Description of Artificial Sequence: Synthetic oligonucleotide
  Target: SCNA; (-) strand; PAM type: NRG; PAM sequence: TGG
ggctgtgttttcactgccca

SEQ ID NO: 14097 - DNA, 20 bp, Artificial Sequence
  Description of Artificial Sequence: Synthetic oligonucleotide
  Target: SCNA; (-) strand; PAM type: NRG; PAM sequence: TGG
tcaatattatggagtttcca

SEQ ID NO: 14098 - DNA, 20 bp, Artificial Sequence
  Description of Artificial Sequence: Synthetic oligonucleotide
  Target: SCNA; (-) strand; PAM type: NRG; PAM sequence: GAG
ctctgtacatcaatattatg

SEQ ID NO: 14099 - DNA, 20 bp, Artificial Sequence
  Description of Artificial Sequence: Synthetic oligonucleotide
  Target: SCNA; (-) strand; PAM type: NRG; PAM sequence: TGG
agctctgtacatcaatatta

SEQ ID NO: 14100 - DNA, 20 bp, Artificial Sequence
  Description of Artificial Sequence: Synthetic oligonucleotide
  Target: SCNA; (-) strand; PAM type: NRG; PAM sequence: CAG
tccaaagttatgtttaagaa

SEQ ID NO: 14101 - DNA, 20 bp, Artificial Sequence
  Description of Artificial Sequence: Synthetic oligonucleotide
  Target: SCNA; (-) strand; PAM type: NRG; PAM sequence: AAG
cacaatccaaagttatgttt

SEQ ID NO: 14102 - DNA, 20 bp, Artificial Sequence
  Description of Artificial Sequence: Synthetic oligonucleotide
  Target: SCNA; (-) strand; PAM type: NRG; PAM sequence: AAG
aaggagtccaacacaatcca

SEQ ID NO: 14103 - DNA, 20 bp, Artificial Sequence
  Description of Artificial Sequence: Synthetic oligonucleotide
  Target: SCNA; (-) strand; PAM type: NRG; PAM sequence: GAG
cttggtgccattctaagaag

SEQ ID NO: 14104 - DNA, 20 bp, Artificial Sequence
  Description of Artificial Sequence: Synthetic oligonucleotide
  Target: SCNA; (-) strand; PAM type: NRG; PAM sequence: AGG
tacttggtgccattctaaga

SEQ ID NO: 14105 - DNA, 20 bp, Artificial Sequence
  Description of Artificial Sequence: Synthetic oligonucleotide
  Target: SCNA; (-) strand; PAM type: NRG; PAM sequence: AAG
ttacttggtgccattctaag

SEQ ID NO: 14106 - DNA, 20 bp, Artificial Sequence
  Description of Artificial Sequence: Synthetic oligonucleotide
  Target: SCNA; (-) strand; PAM type: NRG; PAM sequence: AAG
tggttacttggtgccattct

SEQ ID NO: 14107 - DNA, 20 bp, Artificial Sequence
  Description of Artificial Sequence: Synthetic oligonucleotide
  Target: SCNA; (-) strand; PAM type: NRG; PAM sequence: TGG
ggtgaatactggtggttact

SEQ ID NO: 14108 - DNA, 20 bp, Artificial Sequence
  Description of Artificial Sequence: Synthetic oligonucleotide
  Target: SCNA; (-) strand; PAM type: NRG; PAM sequence: TGG
tgtttggaggtgaatactgg

SEQ ID NO: 14109 - DNA, 20 bp, Artificial Sequence
  Description of Artificial Sequence: Synthetic oligonucleotide
  Target: SCNA; (-) strand; PAM type: NRG; PAM sequence: TGG
caatgtttggaggtgaatac

SEQ ID NO: 14110 - DNA, 20 bp, Artificial Sequence
  Description of Artificial Sequence: Synthetic oligonucleotide
  Target: SCNA; (-) strand; PAM type: NRG; PAM sequence: AGG
attatcacagcaatgtttgg

SEQ ID NO: 14111 - DNA, 20 bp, Artificial Sequence
  Description of Artificial Sequence: Synthetic oligonucleotide
  Target: SCNA; (-) strand; PAM type: NRG; PAM sequence: GAG
gattatcacagcaatgtttg

SEQ ID NO: 14112 - DNA, 20 bp, Artificial Sequence
  Description of Artificial Sequence: Synthetic oligonucleotide
  Target: SCNA; (-) strand; PAM type: NRG; PAM sequence: TGG
ctgattatcacagcaatgtt

SEQ ID NO: 14113 - DNA, 20 bp, Artificial Sequence
  Description of Artificial Sequence: Synthetic oligonucleotide
  Target: SCNA; (-) strand; PAM type: NRG; PAM sequence: CAG
attctgagctctgattatca

SEQ ID NO: 14114 - DNA, 20 bp, Artificial Sequence
  Description of Artificial Sequence: Synthetic oligonucleotide
  Target: SCNA; (-) strand; PAM type: NRG; PAM sequence: GAG
tattgttaacaactgattct

SEQ ID NO: 14115 - DNA, 20 bp, Artificial Sequence
  Description of Artificial Sequence: Synthetic oligonucleotide
  Target: SCNA; (-) strand; PAM type: NRG; PAM sequence: AGG
aaaagaagacatatctctga

SEQ ID NO: 14116 - DNA, 20 bp, Artificial Sequence
  Description of Artificial Sequence: Synthetic oligonucleotide
  Target: SCNA; (-) strand; PAM type: NRG; PAM sequence: AAG
caaaagaagacatatctctg

SEQ ID NO: 14117 - DNA, 20 bp, Artificial Sequence
  Description of Artificial Sequence: Synthetic oligonucleotide
  Target: SCNA; (-) strand; PAM type: NRG; PAM sequence: AAG
gatctcatctaaagcaaaag

SEQ ID NO: 14118 - DNA, 20 bp, Artificial Sequence
  Description of Artificial Sequence: Synthetic oligonucleotide
  Target: SCNA; (-) strand; PAM type: NRG; PAM sequence: AAG
cttgatctcatctaaagcaa

SEQ ID NO: 14119 - DNA, 20 bp, Artificial Sequence
  Description of Artificial Sequence: Synthetic oligonucleotide
  Target: SCNA; (-) strand; PAM type: NRG; PAM sequence: AAG
aattttcttgatctcatcta

SEQ ID NO: 14120 - DNA, 20 bp, Artificial Sequence
  Description of Artificial Sequence: Synthetic oligonucleotide
  Target: SCNA; (-) strand; PAM type: NRG; PAM sequence: AAG
aaagggtaacagctgagaaa

SEQ ID NO: 14121 - DNA, 20 bp, Artificial Sequence
  Description of Artificial Sequence: Synthetic oligonucleotide
  Target: SCNA; (-) strand; PAM type: NRG; PAM sequence: GAG
tgggcaaaagggtaacagct

SEQ ID NO: 14122 - DNA, 20 bp, Artificial Sequence
  Description of Artificial Sequence: Synthetic oligonucleotide
  Target: SCNA; (-) strand; PAM type: NRG; PAM sequence: CAG
atcgatgggcaaaagggtaa

SEQ ID NO: 14123 - DNA, 20 bp, Artificial Sequence
  Description of Artificial Sequence: Synthetic oligonucleotide
  Target: SCNA; (-) strand; PAM type: NRG; PAM sequence: GGG
tcttagatcgatgggcaaaa

SEQ ID NO: 14124 - DNA, 20 bp, Artificial Sequence
  Description of Artificial Sequence: Synthetic oligonucleotide
  Target: SCNA; (-) strand; PAM type: NRG; PAM sequence: AGG
gtcttagatcgatgggcaaa

SEQ ID NO: 14125 - DNA, 20 bp, Artificial Sequence
  Description of Artificial Sequence: Synthetic oligonucleotide
  Target: SCNA; (-) strand; PAM type: NRG; PAM sequence: AAG
tgtcttagatcgatgggcaa

SEQ ID NO: 14126 - DNA, 20 bp, Artificial Sequence
  Description of Artificial Sequence: Synthetic oligonucleotide
  Target: SCNA; (-) strand; PAM type: NRG; PAM sequence: GGG
gccacttgtcttagatcgat

SEQ ID NO: 14127 - DNA, 20 bp, Artificial Sequence
  Description of Artificial Sequence: Synthetic oligonucleotide
  Target: SCNA; (-) strand; PAM type: NRG; PAM sequence: TGG
ggccacttgtcttagatcga

SEQ ID NO: 14128 - DNA, 20 bp, Artificial Sequence
  Description of Artificial Sequence: Synthetic oligonucleotide
  Target: SCNA; (-) strand; PAM type: NRG; PAM sequence: TAG
ctaggttaggccacttgtct

SEQ ID NO: 14129 - DNA, 20 bp, Artificial Sequence
  Description of Artificial Sequence: Synthetic oligonucleotide
  Target: SCNA; (-) strand; PAM type: NRG; PAM sequence: AGG
tgccatcctttagctaggtt

SEQ ID NO: 14130 - DNA, 20 bp, Artificial Sequence
  Description of Artificial Sequence: Synthetic oligonucleotide
  Target: SCNA; (-) strand; PAM type: NRG; PAM sequence: TAG
gtgccatcctttagctaggt

SEQ ID NO: 14131 - DNA, 20 bp, Artificial Sequence
  Description of Artificial Sequence: Synthetic oligonucleotide
  Target: SCNA; (-) strand; PAM type: NRG; PAM sequence: AGG
gtttgtgccatcctttagct

SEQ ID NO: 14132 - DNA, 20 bp, Artificial Sequence
  Description of Artificial Sequence: Synthetic oligonucleotide
  Target: SCNA; (-) strand; PAM type: NRG; PAM sequence: TAG
tgtttgtgccatcctttagc

SEQ ID NO: 14133 - DNA, 20 bp, Artificial Sequence
  Description of Artificial Sequence: Synthetic oligonucleotide
  Target: SCNA; (-) strand; PAM type: NRG; PAM sequence: TAG
tagctgtttgtgccatcctt

SEQ ID NO: 14134 - DNA, 20 bp, Artificial Sequence
  Description of Artificial Sequence: Synthetic oligonucleotide
  Target: SCNA; (-) strand; PAM type: NRG; PAM sequence: TAG
aaatccatcttgggcatcct

SEQ ID NO: 14135 - DNA, 20 bp, Artificial Sequence
  Description of Artificial Sequence: Synthetic oligonucleotide
  Target: SCNA; (-) strand; PAM type: NRG; PAM sequence: GGG
cttccttggaaatccatctt

SEQ ID NO: 14136 - DNA, 20 bp, Artificial Sequence
  Description of Artificial Sequence: Synthetic oligonucleotide
  Target: SCNA; (-) strand; PAM type: NRG; PAM sequence: TGG
acttccttggaaatccatct

SEQ ID NO: 14137 - DNA, 20 bp, Artificial Sequence
  Description of Artificial Sequence: Synthetic oligonucleotide
  Target: SCNA; (-) strand; PAM type: NRG; PAM sequence: TGG
gtctttttggcaaacttcct

SEQ ID NO: 14138 - DNA, 20 bp, Artificial Sequence
  Description of Artificial Sequence: Synthetic oligonucleotide
  Target: SCNA; (-) strand; PAM type: NRG; PAM sequence: TGG
agaaatctggcaagtctttt

SEQ ID NO: 14139 - DNA, 20 bp, Artificial Sequence
  Description of Artificial Sequence: Synthetic oligonucleotide
  Target: SCNA; (-) strand; PAM type: NRG; PAM sequence: AAG
tgaatgattagaaatctggc

SEQ ID NO: 14140 - DNA, 20 bp, Artificial Sequence
  Description of Artificial Sequence: Synthetic oligonucleotide
  Target: SCNA; (-) strand; PAM type: NRG; PAM sequence: TGG
atgttgaatgattagaaatc

SEQ ID NO: 14141 - DNA, 20 bp, Artificial Sequence
  Description of Artificial Sequence: Synthetic oligonucleotide
  Target: SCNA; (-) strand; PAM type: NRG; PAM sequence: TAG
gagtgtccatgttgaatgat

SEQ ID NO: 14142 - DNA, 20 bp, Artificial Sequence
  Description of Artificial Sequence: Synthetic oligonucleotide
  Target: SCNA; (-) strand; PAM type: NRG; PAM sequence: GAG
gactcctgctgttgaagatg

SEQ ID NO: 14143 - DNA, 20 bp, Artificial Sequence
  Description of Artificial Sequence: Synthetic oligonucleotide
  Target: SCNA; (-) strand; PAM type: NRG; PAM sequence: TGG
ctgactcctgctgttgaaga

SEQ ID NO: 14144 - DNA, 20 bp, Artificial Sequence
  Description of Artificial Sequence: Synthetic oligonucleotide
  Target: SCNA; (-) strand; PAM type: NRG; PAM sequence: AAG
agcactgactcctgctgttg

SEQ ID NO: 14145 - DNA, 20 bp, Artificial Sequence
  Description of Artificial Sequence: Synthetic oligonucleotide
  Target: SCNA; (-) strand; PAM type: NRG; PAM sequence: CAG
gccaaacattagtaatgtgg

SEQ ID NO: 14146 - DNA, 20 bp, Artificial Sequence
  Description of Artificial Sequence: Synthetic oligonucleotide
  Target: SCNA; (-) strand; PAM type: NRG; PAM sequence: TGG
gctgccaaacattagtaatg

SEQ ID NO: 14147 - DNA, 20 bp, Artificial Sequence
  Description of Artificial Sequence: Synthetic oligonucleotide
  Target: SCNA; (-) strand; PAM type: NRG; PAM sequence: TAG
tttgagaggctgccaaacat

SEQ ID NO: 14148 - DNA, 20 bp, Artificial Sequence
  Description of Artificial Sequence: Synthetic oligonucleotide
  Target: SCNA; (-) strand; PAM type: NRG; PAM sequence: AGG
tggtcaaagcaagttttgag

SEQ ID NO: 14149 - DNA, 20 bp, Artificial Sequence
  Description of Artificial Sequence: Synthetic oligonucleotide
  Target: SCNA; (-) strand; PAM type: NRG; PAM sequence: GAG
atggtcaaagcaagttttga

SEQ ID NO: 14150 - DNA, 20 bp, Artificial Sequence
  Description of Artificial Sequence: Synthetic oligonucleotide
  Target: SCNA; (-) strand; PAM type: NRG; PAM sequence: GAG
aaatggtcaaagcaagtttt

SEQ ID NO: 14151 - DNA, 20 bp, Artificial Sequence
  Description of Artificial Sequence: Synthetic oligonucleotide
  Target: SCNA; (-) strand; PAM type: NRG; PAM sequence: AAG
tctatggaaatggtcaaagc

SEQ ID NO: 14152 - DNA, 20 bp, Artificial Sequence
  Description of Artificial Sequence: Synthetic oligonucleotide
  Target: SCNA; (-) strand; PAM type: NRG; PAM sequence: AAG
aatctctatggaaatggtca

SEQ ID NO: 14153 - DNA, 20 bp, Artificial Sequence
  Description of Artificial Sequence: Synthetic oligonucleotide
  Target: SCNA; (-) strand; PAM type: NRG; PAM sequence: TGG
catccaaatctctatggaaa

SEQ ID NO: 14154 - DNA, 20 bp, Artificial Sequence
  Description of Artificial Sequence: Synthetic oligonucleotide
  Target: SCNA; (-) strand; PAM type: NRG; PAM sequence: TGG
aggcgtcatccaaatctcta

SEQ ID NO: 14155 - DNA, 20 bp, Artificial Sequence
  Description of Artificial Sequence: Synthetic oligonucleotide
  Target: SCNA; (-) strand; PAM type: NRG; PAM sequence: AGG
aacgtactacgtgttgtgta

SEQ ID NO: 14156 - DNA, 20 bp, Artificial Sequence
  Description of Artificial Sequence: Synthetic oligonucleotide
  Target: SCNA; (-) strand; PAM type: NRG; PAM sequence: AAG
gaacgtactacgtgttgtgt

SEQ ID NO: 14157 - DNA, 20 bp, Artificial Sequence
  Description of Artificial Sequence: Synthetic oligonucleotide
  Target: SCNA; (-) strand; PAM type: NRG; PAM sequence: TAG
aatatggacagatgagcctc

SEQ ID NO: 14158 - DNA, 20 bp, Artificial Sequence
  Description of Artificial Sequence: Synthetic oligonucleotide
  Target: SCNA; (-) strand; PAM type: NRG; PAM sequence: GAG
aagactaaatatggacagat

SEQ ID NO: 14159 - DNA, 20 bp, Artificial Sequence
  Description of Artificial Sequence: Synthetic oligonucleotide
  Target: SCNA; (-) strand; PAM type: NRG; PAM sequence: CAG
aaatgaagactaaatatgga

SEQ ID NO: 14160 - DNA, 20 bp, Artificial Sequence
  Description of Artificial Sequence: Synthetic oligonucleotide
  Target: SCNA; (-) strand; PAM type: NRG; PAM sequence: TGG
aaacaaatgaagactaaata

SEQ ID NO: 14161 - DNA, 20 bp, Artificial Sequence
  Description of Artificial Sequence: Synthetic oligonucleotide
  Target: SCNA; (-) strand; PAM type: NRG; PAM sequence: AAG
ctcttgtaaaaaaacaaatg

SEQ ID NO: 14162 - DNA, 20 bp, Artificial Sequence
  Description of Artificial Sequence: Synthetic oligonucleotide
  Target: SCNA; (-) strand; PAM type: NRG; PAM sequence: CAG
tacctaggaattgagagtag

SEQ ID NO: 14163 - DNA, 20 bp, Artificial Sequence
  Description of Artificial Sequence: Synthetic oligonucleotide
  Target: SCNA; (-) strand; PAM type: NRG; PAM sequence: TAG
gactacctaggaattgagag

SEQ ID NO: 14164 - DNA, 20 bp, Artificial Sequence
  Description of Artificial Sequence: Synthetic oligonucleotide
  Target: SCNA; (-) strand; PAM type: NRG; PAM sequence: GAG
tacgactacctaggaattga

SEQ ID NO: 14165 - DNA, 20 bp, Artificial Sequence
  Description of Artificial Sequence: Synthetic oligonucleotide
  Target: SCNA; (-) strand; PAM type: NRG; PAM sequence: GAG
tgtacgactacctaggaatt

SEQ ID NO: 14166 - DNA, 20 bp, Artificial Sequence
  Description of Artificial Sequence: Synthetic oligonucleotide
  Target: SCNA; (-) strand; PAM type: NRG; PAM sequence: AGG
tggacactgtacgactacct

SEQ ID NO: 14167 - DNA, 20 bp, Artificial Sequence
  Description of Artificial Sequence: Synthetic oligonucleotide
  Target: SCNA; (-) strand; PAM type: NRG; PAM sequence: TAG
ctggacactgtacgactacc

SEQ ID NO: 14168 - DNA, 20 bp, Artificial Sequence
  Description of Artificial Sequence: Synthetic oligonucleotide
  Target: SCNA; (-) strand; PAM type: NRG; PAM sequence: TGG
atacttgtccttttgccttc

SEQ ID NO: 14169 - DNA, 20 bp, Artificial Sequence
  Description of Artificial Sequence: Synthetic oligonucleotide
  Target: SCNA; (-) strand; PAM type: NRG; PAM sequence: CAG
tggaaagtaggtaagtaggg

SEQ ID NO: 14170 - DNA, 20 bp, Artificial Sequence
  Description of Artificial Sequence: Synthetic oligonucleotide
  Target: SCNA; (-) strand; PAM type: NRG; PAM sequence: GGG
gtgtggaaagtaggtaagta

SEQ ID NO: 14171 - DNA, 20 bp, Artificial Sequence
  Description of Artificial Sequence: Synthetic oligonucleotide
  Target: SCNA; (-) strand; PAM type: NRG; PAM sequence: AGG
agtgtggaaagtaggtaagt

SEQ ID NO: 14172 - DNA, 20 bp, Artificial Sequence
  Description of Artificial Sequence: Synthetic oligonucleotide
  Target: SCNA; (-) strand; PAM type: NRG; PAM sequence: TAG
cagtgtggaaagtaggtaag

SEQ ID NO: 14173 - DNA, 20 bp, Artificial Sequence
  Description of Artificial Sequence: Synthetic oligonucleotide
  Target: SCNA; (-) strand; PAM type: NRG; PAM sequence: AAG
cagcagtgtggaaagtaggt

SEQ ID NO: 14174 - DNA, 20 bp, Artificial Sequence
  Description of Artificial Sequence: Synthetic oligonucleotide
  Target: SCNA; (-) strand; PAM type: NRG; PAM sequence: AGG
tgtgcagcagtgtggaaagt

SEQ ID NO: 14175 - DNA, 20 bp, Artificial Sequence
  Description of Artificial Sequence: Synthetic oligonucleotide
  Target: SCNA; (-) strand; PAM type: NRG; PAM sequence: TAG
ctgtgcagcagtgtggaaag

SEQ ID NO: 14176 - DNA, 20 bp, Artificial Sequence
  Description of Artificial Sequence: Synthetic oligonucleotide
  Target: SCNA; (-) strand; PAM type: NRG; PAM sequence: AAG
ttcctgtgcagcagtgtgga

SEQ ID NO: 14177 - DNA, 20 bp, Artificial Sequence
  Description of Artificial Sequence: Synthetic oligonucleotide
  Target: SCNA; (-) strand; PAM type: NRG; PAM sequence: TGG
gattttcctgtgcagcagtg

SEQ ID NO: 14178 - DNA, 20 bp, Artificial Sequence
  Description of Artificial Sequence: Synthetic oligonucleotide
  Target: SCNA; (-) strand; PAM type: NRG; PAM sequence: CAG
tgtcagattttcctgtgcag

SEQ ID NO: 14179 - DNA, 20 bp, Artificial Sequence
  Description of Artificial Sequence: Synthetic oligonucleotide
  Target: SCNA; (-) strand; PAM type: NRG; PAM sequence: CAG
ctctgtcagattttcctgtg

SEQ ID NO: 14180 - DNA, 20 bp, Artificial Sequence
  Description of Artificial Sequence: Synthetic oligonucleotide
  Target: SCNA; (-) strand; PAM type: NRG; PAM sequence: CAG
tgtttgttattgtcctctgt

SEQ ID NO: 14181 - DNA, 20 bp, Artificial Sequence
  Description of Artificial Sequence: Synthetic oligonucleotide
  Target: SCNA; (-) strand; PAM type: NRG; PAM sequence: GAG
aaaagaacgcatgagctggt

SEQ ID NO: 14182 - DNA, 20 bp, Artificial Sequence
  Description of Artificial Sequence: Synthetic oligonucleotide
  Target: SCNA; (-) strand; PAM type: NRG; PAM sequence: TGG
tcaaaaaagaacgcatgagc

SEQ ID NO: 14183 - DNA, 20 bp, Artificial Sequence
  Description of Artificial Sequence: Synthetic oligonucleotide
  Target: SCNA; (-) strand; PAM type: NRG; PAM sequence: GAG
aggatcaaaaaagaacgcat

SEQ ID NO: 14184 - DNA, 20 bp, Artificial Sequence
  Description of Artificial Sequence: Synthetic oligonucleotide
  Target: SCNA; (-) strand; PAM type: NRG; PAM sequence: AAG
tctcggaattaggatcaaaa

SEQ ID NO: 14185 - DNA, 20 bp, Artificial Sequence
  Description of Artificial Sequence: Synthetic oligonucleotide
  Target: SCNA; (-) strand; PAM type: NRG; PAM sequence: AGG
ttggtgagtctctcggaatt

SEQ ID NO: 14186 - DNA, 20 bp, Artificial Sequence
  Description of Artificial Sequence: Synthetic oligonucleotide
  Target: SCNA; (-) strand; PAM type: NRG; PAM sequence: TAG
tttggtgagtctctcggaat

SEQ ID NO: 14187 - DNA, 20 bp, Artificial Sequence
  Description of Artificial Sequence: Synthetic oligonucleotide
  Target: SCNA; (-) strand; PAM type: NRG; PAM sequence: CGG
catgtctttggtgagtctct

SEQ ID NO: 14188 - DNA, 20 bp, Artificial Sequence
  Description of Artificial Sequence: Synthetic oligonucleotide
  Target: SCNA; (-) strand; PAM type: NRG; PAM sequence: GAG
tttctcttcatgtctttggt

SEQ ID NO: 14189 - DNA, 20 bp, Artificial Sequence
  Description of Artificial Sequence: Synthetic oligonucleotide
  Target: SCNA; (-) strand; PAM type: NRG; PAM sequence: TGG
ttgttttctcttcatgtctt

SEQ ID NO: 14190 - DNA, 20 bp, Artificial Sequence
  Description of Artificial Sequence: Synthetic oligonucleotide
  Target: SCNA; (-) strand; PAM type: NRG; PAM sequence: AAG
aattacaatatttccaagaa

SEQ ID NO: 14191 - DNA, 20 bp, Artificial Sequence
  Description of Artificial Sequence: Synthetic oligonucleotide
  Target: SCNA; (-) strand; PAM type: NRG; PAM sequence: AAG
ccagcaattacaatatttcc

SEQ ID NO: 14192 - DNA, 20 bp, Artificial Sequence
  Description of Artificial Sequence: Synthetic oligonucleotide
  Target: SCNA; (-) strand; PAM type: NRG; PAM sequence: CAG
tgccagaacaacaaatgtac

SEQ ID NO: 14193 - DNA, 20 bp, Artificial Sequence
  Description of Artificial Sequence: Synthetic oligonucleotide
  Target: SCNA; (-) strand; PAM type: NRG; PAM sequence: CAG
tgacaatttctactttatgc

SEQ ID NO: 14194 - DNA, 20 bp, Artificial Sequence
  Description of Artificial Sequence: Synthetic oligonucleotide
  Target: SCNA; (-) strand; PAM type: NRG; PAM sequence: AAG
tttctttttgatccaaaagg

SEQ ID NO: 14195 - DNA, 20 bp, Artificial Sequence
  Description of Artificial Sequence: Synthetic oligonucleotide
  Target: SCNA; (-) strand; PAM type: NRG; PAM sequence: AGG
aaatttctttttgatccaaa

SEQ ID NO: 14196 - DNA, 20 bp, Artificial Sequence
  Description of Artificial Sequence: Synthetic oligonucleotide
  Target: SCNA; (-) strand; PAM type: NRG; PAM sequence: AAG
taaatttctttttgatccaa

SEQ ID NO: 14197 - DNA, 20 bp, Artificial Sequence
  Description of Artificial Sequence: Synthetic oligonucleotide
  Target: SCNA; (-) strand; PAM type: NRG; PAM sequence: TGG
tcatacctcttgcatttatt

SEQ ID NO: 14198 - DNA, 20 bp, Artificial Sequence
  Description of Artificial Sequence: Synthetic oligonucleotide
  Target: SCNA; (-) strand; PAM type: NRG; PAM sequence: AAG
cagagtattatcaactacaa

SEQ ID NO: 14199 - DNA, 20 bp, Artificial Sequence
  Description of Artificial Sequence: Synthetic oligonucleotide
  Target: SCNA; (-) strand; PAM type: NRG; PAM sequence: GAG
aaactcactgatttaaaaca

SEQ ID NO: 14200 - DNA, 20 bp, Artificial Sequence
  Description of Artificial Sequence: Synthetic oligonucleotide
  Target: SCNA; (-) strand; PAM type: NRG; PAM sequence: CAG
taaaactcactgatttaaaa

SEQ ID NO: 14201 - DNA, 20 bp, Artificial Sequence
  Description of Artificial Sequence: Synthetic oligonucleotide
  Target: SCNA; (-) strand; PAM type: NRG; PAM sequence: AAG
aaaaaaggacaagcatatat

SEQ ID NO: 14202 - DNA, 20 bp, Artificial Sequence
  Description of Artificial Sequence: Synthetic oligonucleotide
  Target: SCNA; (-) strand; PAM type: NRG; PAM sequence: AAG
aactagaaaaaaaaaaggac

SEQ ID NO: 14203 - DNA, 20 bp, Artificial Sequence
  Description of Artificial Sequence: Synthetic oligonucleotide
  Target: SCNA; (-) strand; PAM type: NRG; PAM sequence: AGG
ctggtaactagaaaaaaaaa

SEQ ID NO: 14204 - DNA, 20 bp, Artificial Sequence
  Description of Artificial Sequence: Synthetic oligonucleotide
  Target: SCNA; (-) strand; PAM type: NRG; PAM sequence: AAG
tctggtaactagaaaaaaaa

SEQ ID NO: 14205 - DNA, 20 bp, Artificial Sequence
  Description of Artificial Sequence: Synthetic oligonucleotide
  Target: SCNA; (-) strand; PAM type: NRG; PAM sequence: TAG
ctgagtattgttctggtaac

SEQ ID NO: 14206 - DNA, 20 bp, Artificial Sequence
  Description of Artificial Sequence: Synthetic oligonucleotide
  Target: SCNA; (-) strand; PAM type: NRG; PAM sequence: TGG
aagttcactgagtattgttc

SEQ ID NO: 14207 - DNA, 20 bp, Artificial Sequence
  Description of Artificial Sequence: Synthetic oligonucleotide
  Target: SCNA; (-) strand; PAM type: NRG; PAM sequence: GAG
catatattcataagttcact

SEQ ID NO: 14208 - DNA, 20 bp, Artificial Sequence
  Description of Artificial Sequence: Synthetic oligonucleotide
  Target: SCNA; (-) strand; PAM type: NRG; PAM sequence: AAG
aatatttaccatatattcat

SEQ ID NO: 14209 - DNA, 20 bp, Artificial Sequence
  Description of Artificial Sequence: Synthetic oligonucleotide
  Target: SCNA; (-) strand; PAM type: NRG; PAM sequence: GGG
acatatcttctcatccaagt

SEQ ID NO: 14210 - DNA, 20 bp, Artificial Sequence
  Description of Artificial Sequence: Synthetic oligonucleotide
  Target: SCNA; (-) strand; PAM type: NRG; PAM sequence: TGG
cacatatcttctcatccaag

SEQ ID NO: 14211 - DNA, 20 bp, Artificial Sequence
  Description of Artificial Sequence: Synthetic oligonucleotide
  Target: SCNA; (-) strand; PAM type: NRG; PAM sequence: AAG
actcacatatcttctcatcc

SEQ ID NO: 14212 - DNA, 20 bp, Artificial Sequence
  Description of Artificial Sequence: Synthetic oligonucleotide
  Target: SCNA; (-) strand; PAM type: NRG; PAM sequence: TAG
aacacatctaactttagact

SEQ ID NO: 14213 - DNA, 20 bp, Artificial Sequence
  Description of Artificial Sequence: Synthetic oligonucleotide
  Target: SCNA; (-) strand; PAM type: NRG; PAM sequence: TAG
ttatggaacacatctaactt

SEQ ID NO: 14214 - DNA, 20 bp, Artificial Sequence
  Description of Artificial Sequence: Synthetic oligonucleotide
  Target: SCNA; (-) strand; PAM type: NRG; PAM sequence: TGG
ctccataaacactatgttta

SEQ ID NO: 14215 - DNA, 20 bp, Artificial Sequence
  Description of Artificial Sequence: Synthetic oligonucleotide
  Target: SCNA; (-) strand; PAM type: NRG; PAM sequence: AAG
agaaagtgtaacttactgag

SEQ ID NO: 14216 - DNA, 20 bp, Artificial Sequence
  Description of Artificial Sequence: Synthetic oligonucleotide
  Target: SCNA; (-) strand; PAM type: NRG; PAM sequence: GAG
ttaagaaagtgtaacttact

SEQ ID NO: 14217 - DNA, 20 bp, Artificial Sequence
  Description of Artificial Sequence: Synthetic oligonucleotide
  Target: SCNA; (-) strand; PAM type: NRG; PAM sequence: AAG
gcaccaaaaagaaattaaga

SEQ ID NO: 14218 - DNA, 20 bp, Artificial Sequence
  Description of Artificial Sequence: Synthetic oligonucleotide
  Target: SCNA; (-) strand; PAM type: NRG; PAM sequence: AAG
cctagcaccaaaaagaaatt

SEQ ID NO: 14219 - DNA, 20 bp, Artificial Sequence
  Description of Artificial Sequence: Synthetic oligonucleotide
  Target: SCNA; (-) strand; PAM type: NRG; PAM sequence: AAG
gaatatcacctagcaccaaa

SEQ ID NO: 14220 - DNA, 20 bp, Artificial Sequence
  Description of Artificial Sequence: Synthetic oligonucleotide
  Target: SCNA; (-) strand; PAM type: NRG; PAM sequence: TAG
gtacttagcagaatatcacc

SEQ ID NO: 14221 - DNA, 20 bp, Artificial Sequence
  Description of Artificial Sequence: Synthetic oligonucleotide
  Target: SCNA; (-) strand; PAM type: NRG; PAM sequence: CAG
ctatacttatgtgtacttag

SEQ ID NO: 14222 - DNA, 20 bp, Artificial Sequence
  Description of Artificial Sequence: Synthetic oligonucleotide
  Target: SCNA; (-) strand; PAM type: NRG; PAM sequence: TAG
ttactatacttatgtgtact

SEQ ID NO: 14223 - DNA, 20 bp, Artificial Sequence
  Description of Artificial Sequence: Synthetic oligonucleotide
  Target: SCNA; (-) strand; PAM type: NRG; PAM sequence: TAG
tagctaggggagcattttac

SEQ ID NO: 14224 - DNA, 20 bp, Artificial Sequence
  Description of Artificial Sequence: Synthetic oligonucleotide
  Target: SCNA; (-) strand; PAM type: NRG; PAM sequence: GAG
ctatttactaatagctaggg

SEQ ID NO: 14225 - DNA, 20 bp, Artificial Sequence
  Description of Artificial Sequence: Synthetic oligonucleotide
  Target: SCNA; (-) strand; PAM type: NRG; PAM sequence: GGG
agctatttactaatagctag

SEQ ID NO: 14226 - DNA, 20 bp, Artificial Sequence
  Description of Artificial Sequence: Synthetic oligonucleotide
  Target: SCNA; (-) strand; PAM type: NRG; PAM sequence: GGG
aagctatttactaatagcta

SEQ ID NO: 14227 - DNA, 20 bp, Artificial Sequence
  Description of Artificial Sequence: Synthetic oligonucleotide
  Target: SCNA; (-) strand; PAM type: NRG; PAM sequence: AGG
gaagctatttactaatagct

SEQ ID NO: 14228 - DNA, 20 bp, Artificial Sequence
  Description of Artificial Sequence: Synthetic oligonucleotide
  Target: SCNA; (-) strand; PAM type: NRG; PAM sequence: TAG
agaagctatttactaatagc

SEQ ID NO: 14229 - DNA, 20 bp, Artificial Sequence
  Description of Artificial Sequence: Synthetic oligonucleotide
  Target: SCNA; (-) strand; PAM type: NRG; PAM sequence: TAG
aggcagaagctatttactaa

SEQ ID NO: 14230 - DNA, 20 bp, Artificial Sequence
  Description of Artificial Sequence: Synthetic oligonucleotide
  Target: SCNA; (-) strand; PAM type: NRG; PAM sequence: AAG
attttggagacacaaggcag

SEQ ID NO: 14231 - DNA, 20 bp, Artificial Sequence
  Description of Artificial Sequence: Synthetic oligonucleotide
  Target: SCNA; (-) strand; PAM type: NRG; PAM sequence: CAG
gatattttggagacacaagg

SEQ ID NO: 14232 - DNA, 20 bp, Artificial Sequence
  Description of Artificial Sequence: Synthetic oligonucleotide
  Target: SCNA; (-) strand; PAM type: NRG; PAM sequence: AGG
agagatattttggagacaca

SEQ ID NO: 14233 - DNA, 20 bp, Artificial Sequence
  Description of Artificial Sequence: Synthetic oligonucleotide
  Target: SCNA; (-) strand; PAM type: NRG; PAM sequence: AAG
tagagatattttggagacac

SEQ ID NO: 14234 - DNA, 20 bp, Artificial Sequence
  Description of Artificial Sequence: Synthetic oligonucleotide
  Target: SCNA; (-) strand; PAM type: NRG; PAM sequence: GAG
ataatggtagagatattttg

SEQ ID NO: 14235 - DNA, 20 bp, Artificial Sequence
  Description of Artificial Sequence: Synthetic oligonucleotide
  Target: SCNA; (-) strand; PAM type: NRG; PAM sequence: TGG
ggataatggtagagatattt

SEQ ID NO: 14236 - DNA, 20 bp, Artificial Sequence
  Description of Artificial Sequence: Synthetic oligonucleotide
  Target: SCNA; (-) strand; PAM type: NRG; PAM sequence: GAG
tcaagatcaggataatggta

SEQ ID NO: 14237 - DNA, 20 bp, Artificial Sequence
  Description of Artificial Sequence: Synthetic oligonucleotide
  Target: SCNA; (-) strand; PAM type: NRG; PAM sequence: TAG
aatcaagatcaggataatgg

SEQ ID NO: 14238 - DNA, 20 bp, Artificial Sequence
  Description of Artificial Sequence: Synthetic oligonucleotide
  Target: SCNA; (-) strand; PAM type: NRG; PAM sequence: TGG
agcaatcaagatcaggataa

SEQ ID NO: 14239 - DNA, 20 bp, Artificial Sequence
  Description of Artificial Sequence: Synthetic oligonucleotide
  Target: SCNA; (-) strand; PAM type: NRG; PAM sequence: AGG
ataaaatagcaatcaagatc

SEQ ID NO: 14240 - DNA, 20 bp, Artificial Sequence
  Description of Artificial Sequence: Synthetic oligonucleotide
  Target: SCNA; (-) strand; PAM type: NRG; PAM sequence: CAG
tataaaatagcaatcaagat

SEQ ID NO: 14241 - DNA, 20 bp, Artificial Sequence
  Description of Artificial Sequence: Synthetic oligonucleotide
  Target: SCNA; (-) strand; PAM type: NRG; PAM sequence: AAG
tttaatataaaatagcaatc

SEQ ID NO: 14242 - DNA, 20 bp, Artificial Sequence
  Description of Artificial Sequence: Synthetic oligonucleotide
  Target: SCNA; (-) strand; PAM type: NRG; PAM sequence: TAG
tgtcttcttttaatataaaa

SEQ ID NO: 14243 - DNA, 20 bp, Artificial Sequence
  Description of Artificial Sequence: Synthetic oligonucleotide
  Target: SCNA; (-) strand; PAM type: NRG; PAM sequence: AAG
ctgtatttttaaaggtaaat

SEQ ID NO: 14244 - DNA, 20 bp, Artificial Sequence
  Description of Artificial Sequence: Synthetic oligonucleotide
  Target: SCNA; (-) strand; PAM type: NRG; PAM sequence: AGG
acagcacactgtatttttaa

SEQ ID NO: 14245 - DNA, 20 bp, Artificial Sequence
  Description of Artificial Sequence: Synthetic oligonucleotide
  Target: SCNA; (-) strand; PAM type: NRG; PAM sequence: AAG
tacagcacactgtattttta

SEQ ID NO: 14246 - DNA, 20 bp, Artificial Sequence
  Description of Artificial Sequence: Synthetic oligonucleotide
  Target: SCNA; (-) strand; PAM type: NRG; PAM sequence: CAG
tattagtagtagtactagta

SEQ ID NO: 14247 - DNA, 20 bp, Artificial Sequence
  Description of Artificial Sequence: Synthetic oligonucleotide
  Target: SCNA; (-) strand; PAM type: NRG; PAM sequence: TAG
ctatttattagtagtagtac

SEQ ID NO: 14248 - DNA, 20 bp, Artificial Sequence
  Description of Artificial Sequence: Synthetic oligonucleotide
  Target: SCNA; (-) strand; PAM type: NRG; PAM sequence: TAG
atgatgctatttattagtag

SEQ ID NO: 14249 - DNA, 20 bp, Artificial Sequence
  Description of Artificial Sequence: Synthetic oligonucleotide
  Target: SCNA; (-) strand; PAM type: NRG; PAM sequence: TAG
tcaatgatgctatttattag

SEQ ID NO: 14250 - DNA, 20 bp, Artificial Sequence
  Description of Artificial Sequence: Synthetic oligonucleotide
  Target: SCNA; (-) strand; PAM type: NRG; PAM sequence: TAG
gagtcaatgatgctatttat

SEQ ID NO: 14251 - DNA, 20 bp, Artificial Sequence
  Description of Artificial Sequence: Synthetic oligonucleotide
  Target: SCNA; (-) strand; PAM type: NRG; PAM sequence: GAG
gctgatagtaagtgatctat

SEQ ID NO: 14252 - DNA, 20 bp, Artificial Sequence
  Description of Artificial Sequence: Synthetic oligonucleotide
  Target: SCNA; (-) strand; PAM type: NRG; PAM sequence: AAG
aggactgcctggctgatagt

SEQ ID NO: 14253 - DNA, 20 bp, Artificial Sequence
  Description of Artificial Sequence: Synthetic oligonucleotide
  Target: SCNA; (-) strand; PAM type: NRG; PAM sequence: TAG
acttaggactgcctggctga

SEQ ID NO: 14254 - DNA, 20 bp, Artificial Sequence
  Description of Artificial Sequence: Synthetic oligonucleotide
  Target: SCNA; (-) strand; PAM type: NRG; PAM sequence: TGG
gtggaatacttaggactgcc

SEQ ID NO: 14255 - DNA, 20 bp, Artificial Sequence
  Description of Artificial Sequence: Synthetic oligonucleotide
  Target: SCNA; (-) strand; PAM type: NRG; PAM sequence: AGG
ttaatgtaagtggaatactt

SEQ ID NO: 14256 - DNA, 20 bp, Artificial Sequence
  Description of Artificial Sequence: Synthetic oligonucleotide
  Target: SCNA; (-) strand; PAM type: NRG; PAM sequence: TAG
gttaatgtaagtggaatact

SEQ ID NO: 14257 - DNA, 20 bp, Artificial Sequence
  Description of Artificial Sequence: Synthetic oligonucleotide
  Target: SCNA; (-) strand; PAM type: NRG; PAM sequence: TGG
attaagtgagttaatgtaag

SEQ ID NO: 14258 - DNA, 20 bp, Artificial Sequence
  Description of Artificial Sequence: Synthetic oligonucleotide
  Target: SCNA; (-) strand; PAM type: NRG; PAM sequence: AAG
tgcattaagtgagttaatgt

SEQ ID NO: 14259 - DNA, 20 bp, Artificial Sequence
  Description of Artificial Sequence: Synthetic oligonucleotide
  Target: SCNA; (-) strand; PAM type: NRG; PAM sequence: GAG
cattgttgcatgcattaagt

SEQ ID NO: 14260 - DNA, 20 bp, Artificial Sequence
  Description of Artificial Sequence: Synthetic oligonucleotide
  Target: SCNA; (-) strand; PAM type: NRG; PAM sequence: AAG
atagcattgttgcatgcatt

SEQ ID NO: 14261 - DNA, 20 bp, Artificial Sequence
  Description of Artificial Sequence: Synthetic oligonucleotide
  Target: SCNA; (-) strand; PAM type: NRG; PAM sequence: TAG
atgataaaaatagtgcctca

SEQ ID NO: 14262 - DNA, 20 bp, Artificial Sequence
  Description of Artificial Sequence: Synthetic oligonucleotide
  Target: SCNA; (-) strand; PAM type: NRG; PAM sequence: TAG
aaatatgcaaatgataaaaa

SEQ ID NO: 14263 - DNA, 20 bp, Artificial Sequence
  Description of Artificial Sequence: Synthetic oligonucleotide
  Target: SCNA; (-) strand; PAM type: NRG; PAM sequence: TAG
tgtctcttactacttaatat

SEQ ID NO: 14264 - DNA, 20 bp, Artificial Sequence
  Description of Artificial Sequence: Synthetic oligonucleotide
  Target: SCNA; (-) strand; PAM type: NRG; PAM sequence: TGG
ccaaaactattaatagacta

SEQ ID NO: 14265 - DNA, 20 bp, Artificial Sequence
  Description of Artificial Sequence: Synthetic oligonucleotide
  Target: SCNA; (-) strand; PAM type: NRG; PAM sequence: TAG
ctgaactccaaaactattaa

SEQ ID NO: 14266 - DNA, 20 bp, Artificial Sequence
  Description of Artificial Sequence: Synthetic oligonucleotide
  Target: SCNA; (-) strand; PAM type: NRG; PAM sequence: GAG
tgaggtaggttagagtaata

SEQ ID NO: 14267 - DNA, 20 bp, Artificial Sequence
  Description of Artificial Sequence: Synthetic oligonucleotide
  Target: SCNA; (-) strand; PAM type: NRG; PAM sequence: TAG
aatgaggtaggttagagtaa

SEQ ID NO: 14268 - DNA, 20 bp, Artificial Sequence
  Description of Artificial Sequence: Synthetic oligonucleotide
  Target: SCNA; (-) strand; PAM type: NRG; PAM sequence: GAG
ctgcttaatgaggtaggtta

SEQ ID NO: 14269 - DNA, 20 bp, Artificial Sequence
  Description of Artificial Sequence: Synthetic oligonucleotide
  Target: SCNA; (-) strand; PAM type: NRG; PAM sequence: TAG
tgctgcttaatgaggtaggt

SEQ ID NO: 14270 - DNA, 20 bp, Artificial Sequence
  Description of Artificial Sequence: Synthetic oligonucleotide
  Target: SCNA; (-) strand; PAM type: NRG; PAM sequence: AGG
aggatgctgcttaatgaggt

SEQ ID NO: 14271 - DNA, 20 bp, Artificial Sequence
  Description of Artificial Sequence: Synthetic oligonucleotide
  Target: SCNA; (-) strand; PAM type: NRG; PAM sequence: TAG
aaggatgctgcttaatgagg

SEQ ID NO: 14272 - DNA, 20 bp, Artificial Sequence
  Description of Artificial Sequence: Synthetic oligonucleotide
  Target: SCNA; (-) strand; PAM type: NRG; PAM sequence: AGG
gtcaaggatgctgcttaatg

SEQ ID NO: 14273 - DNA, 20 bp, Artificial Sequence
  Description of Artificial Sequence: Synthetic oligonucleotide
  Target: SCNA; (-) strand; PAM type: NRG; PAM sequence: GAG
agtcaaggatgctgcttaat

SEQ ID NO: 14274 - DNA, 20 bp, Artificial Sequence
  Description of Artificial Sequence: Synthetic oligonucleotide
  Target: SCNA; (-) strand; PAM type: NRG; PAM sequence: AGG
ctctttacctagaatagtca

SEQ ID NO: 14275 - DNA, 20 bp, Artificial Sequence
  Description of Artificial Sequence: Synthetic oligonucleotide
  Target: SCNA; (-) strand; PAM type: NRG; PAM sequence: AAG
actctttacctagaatagtc

SEQ ID NO: 14276 - DNA, 20 bp, Artificial Sequence
  Description of Artificial Sequence: Synthetic oligonucleotide
  Target: SCNA; (-) strand; PAM type: NRG; PAM sequence: TAG
acaatactctttacctagaa

SEQ ID NO: 14277 - DNA, 20 bp, Artificial Sequence
  Description of Artificial Sequence: Synthetic oligonucleotide
  Target: SCNA; (-) strand; PAM type: NRG; PAM sequence: TAG
agaatacaatactctttacc

SEQ ID NO: 14278 - DNA, 20 bp, Artificial Sequence
  Description of Artificial Sequence: Synthetic oligonucleotide
  Target: SCNA; (-) strand; PAM type: NRG; PAM sequence: AAG
gtcatgtttttatcttagaa

SEQ ID NO: 14279 - DNA, 20 bp, Artificial Sequence
  Description of Artificial Sequence: Synthetic oligonucleotide
  Target: SCNA; (-) strand; PAM type: NRG; PAM sequence: TAG
agcaagtcatgtttttatct

SEQ ID NO: 14280 - DNA, 20 bp, Artificial Sequence
  Description of Artificial Sequence: Synthetic oligonucleotide
  Target: SCNA; (-) strand; PAM type: NRG; PAM sequence: AAG
atccaaacaaatatagtagc

SEQ ID NO: 14281 - DNA, 20 bp, Artificial Sequence
  Description of Artificial Sequence: Synthetic oligonucleotide
  Target: SCNA; (-) strand; PAM type: NRG; PAM sequence: TAG
ctgaatccaaacaaatatag

SEQ ID NO: 14282 - DNA, 20 bp, Artificial Sequence
  Description of Artificial Sequence: Synthetic oligonucleotide
  Target: SCNA; (-) strand; PAM type: NRG; PAM sequence: TAG
aagctgaatccaaacaaata

SEQ ID NO: 14283 - DNA, 20 bp, Artificial Sequence
  Description of Artificial Sequence: Synthetic oligonucleotide
  Target: SCNA; (-) strand; PAM type: NRG; PAM sequence: AAG
agctaagctgtgttccagta

SEQ ID NO: 14284 - DNA, 20 bp, Artificial Sequence
  Description of Artificial Sequence: Synthetic oligonucleotide
  Target: SCNA; (-) strand; PAM type: NRG; PAM sequence: CAG
gtcaaagctaagctgtgttc

SEQ ID NO: 14285 - DNA, 20 bp, Artificial Sequence
  Description of Artificial Sequence: Synthetic oligonucleotide
  Target: SCNA; (-) strand; PAM type: NRG; PAM sequence: AAG
tgtctgtaaatgtcaaagct

SEQ ID NO: 14286 - DNA, 20 bp, Artificial Sequence
  Description of Artificial Sequence: Synthetic oligonucleotide
  Target: SCNA; (-) strand; PAM type: NRG; PAM sequence: AAG
acccatgtctgtaaatgtca

SEQ ID NO: 14287 - DNA, 20 bp, Artificial Sequence
  Description of Artificial Sequence: Synthetic oligonucleotide
  Target: SCNA; (-) strand; PAM type: NRG; PAM sequence: CAG
tttgcaggtaaactaaatat

SEQ ID NO: 14288 - DNA, 20 bp, Artificial Sequence
  Description of Artificial Sequence: Synthetic oligonucleotide
  Target: SCNA; (-) strand; PAM type: NRG; PAM sequence: AGG
gcttcctaactgccttttgc

SEQ ID NO: 14289 - DNA, 20 bp, Artificial Sequence
  Description of Artificial Sequence: Synthetic oligonucleotide
  Target: SCNA; (-) strand; PAM type: NRG; PAM sequence: CAG
ggcttcctaactgccttttg

SEQ ID NO: 14290 - DNA, 20 bp, Artificial Sequence
  Description of Artificial Sequence: Synthetic oligonucleotide
  Target: SCNA; (-) strand; PAM type: NRG; PAM sequence: GGG
attttaattaggttcctcta

SEQ ID NO: 14291 - DNA, 20 bp, Artificial Sequence
  Description of Artificial Sequence: Synthetic oligonucleotide
  Target: SCNA; (-) strand; PAM type: NRG; PAM sequence: AGG
cattttaattaggttcctct

SEQ ID NO: 14292 - DNA, 20 bp, Artificial Sequence
  Description of Artificial Sequence: Synthetic oligonucleotide
  Target: SCNA; (-) strand; PAM type: NRG; PAM sequence: TAG
gcattttaattaggttcctc

SEQ ID NO: 14293 - DNA, 20 bp, Artificial Sequence
  Description of Artificial Sequence: Synthetic oligonucleotide
  Target: SCNA; (-) strand; PAM type: NRG; PAM sequence: AGG
aaatgtgctgcattttaatt

SEQ ID NO: 14294 - DNA, 20 bp, Artificial Sequence
  Description of Artificial Sequence: Synthetic oligonucleotide
  Target: SCNA; (-) strand; PAM type: NRG; PAM sequence: TAG
gaaatgtgctgcattttaat

SEQ ID NO: 14295 - DNA, 20 bp, Artificial Sequence
  Description of Artificial Sequence: Synthetic oligonucleotide
  Target: SCNA; (-) strand; PAM type: NRG; PAM sequence: TGG
cacagcaagatatggtgcct

SEQ ID NO: 14296 - DNA, 20 bp, Artificial Sequence
  Description of Artificial Sequence: Synthetic oligonucleotide
  Target: SCNA; (-) strand; PAM type: NRG; PAM sequence: TGG
tatggcaacacagcaagata

SEQ ID NO: 14297 - DNA, 20 bp, Artificial Sequence
  Description of Artificial Sequence: Synthetic oligonucleotide
  Target: SCNA; (-) strand; PAM type: NRG; PAM sequence: AAG
tgtttctatggcaacacagc

SEQ ID NO: 14298 - DNA, 20 bp, Artificial Sequence
  Description of Artificial Sequence: Synthetic oligonucleotide
  Target: SCNA; (-) strand; PAM type: NRG; PAM sequence: CAG
tcgttgtttctatggcaaca

SEQ ID NO: 14299 - DNA, 20 bp, Artificial Sequence
  Description of Artificial Sequence: Synthetic oligonucleotide
  Target: SCNA; (-) strand; PAM type: NRG; PAM sequence: TGG
agaaatcctcgttgtttcta

SEQ ID NO: 14300 - DNA, 20 bp, Artificial Sequence
  Description of Artificial Sequence: Synthetic oligonucleotide
  Target: SCNA; (-) strand; PAM type: NRG; PAM sequence: CAG
ttccctggaaggtcagtgac

SEQ ID NO: 14301 - DNA, 20 bp, Artificial Sequence
  Description of Artificial Sequence: Synthetic oligonucleotide
  Target: SCNA; (-) strand; PAM type: NRG; PAM sequence: CAG
cctcagattccctggaaggt

SEQ ID NO: 14302 - DNA, 20 bp, Artificial Sequence
  Description of Artificial Sequence: Synthetic oligonucleotide
  Target: SCNA; (-) strand; PAM type: NRG; PAM sequence: AGG
acatcctcagattccctgga

SEQ ID NO: 14303 - DNA, 20 bp, Artificial Sequence
  Description of Artificial Sequence: Synthetic oligonucleotide
  Target: SCNA; (-) strand; PAM type: NRG; PAM sequence: AAG
tacatcctcagattccctgg

SEQ ID NO: 14304 - DNA, 20 bp, Artificial Sequence
  Description of Artificial Sequence: Synthetic oligonucleotide
  Target: SCNA; (-) strand; PAM type: NRG; PAM sequence: TGG
aaatacatcctcagattccc

SEQ ID NO: 14305 - DNA, 20 bp, Artificial Sequence
  Description of Artificial Sequence: Synthetic oligonucleotide
  Target: SCNA; (-) strand; PAM type: NRG; PAM sequence: CAG
accttatgaaaatacatcct

SEQ ID NO: 14306 - DNA, 20 bp, Artificial Sequence
  Description of Artificial Sequence: Synthetic oligonucleotide
  Target: SCNA; (-) strand; PAM type: NRG; PAM sequence: TGG
tataggttaacatactagga

SEQ ID NO: 14307 - DNA, 20 bp, Artificial Sequence
  Description of Artificial Sequence: Synthetic oligonucleotide
  Target: SCNA; (-) strand; PAM type: NRG; PAM sequence: AGG
caactataggttaacatact

SEQ ID NO: 14308 - DNA, 20 bp, Artificial Sequence
  Description of Artificial Sequence: Synthetic oligonucleotide
  Target: SCNA; (-) strand; PAM type: NRG; PAM sequence: TAG
gcaactataggttaacatac

SEQ ID NO: 14309 - DNA, 20 bp, Artificial Sequence
  Description of Artificial Sequence: Synthetic oligonucleotide
  Target: SCNA; (-) strand; PAM type: NRG; PAM sequence: AGG
tatagttgatctgcaactat

SEQ ID NO: 14310 - DNA, 20 bp, Artificial Sequence
  Description of Artificial Sequence: Synthetic oligonucleotide
  Target: SCNA; (-) strand; PAM type: NRG; PAM sequence: TAG
gtatagttgatctgcaacta

SEQ ID NO: 14311 - DNA, 20 bp, Artificial Sequence
  Description of Artificial Sequence: Synthetic oligonucleotide
  Target: SCNA; (-) strand; PAM type: NRG; PAM sequence: TAG
tagggaatttccataacgta

SEQ ID NO: 14312 - DNA, 20 bp, Artificial Sequence
  Description of Artificial Sequence: Synthetic oligonucleotide
  Target: SCNA; (-) strand; PAM type: NRG; PAM sequence: GGG
aaattggctagaattgcata

SEQ ID NO: 14313 - DNA, 20 bp, Artificial Sequence
  Description of Artificial Sequence: Synthetic oligonucleotide
  Target: SCNA; (-) strand; PAM type: NRG; PAM sequence: AGG
aaaattggctagaattgcat

SEQ ID NO: 14314 - DNA, 20 bp, Artificial Sequence
  Description of Artificial Sequence: Synthetic oligonucleotide
  Target: SCNA; (-) strand; PAM type: NRG; PAM sequence: TAG
taaaattggctagaattgca

SEQ ID NO: 14315 - DNA, 20 bp, Artificial Sequence
  Description of Artificial Sequence: Synthetic oligonucleotide
  Target: SCNA; (-) strand; PAM type: NRG; PAM sequence: TAG
aatttggttttaaaattggc

SEQ ID NO: 14316 - DNA, 20 bp, Artificial Sequence
  Description of Artificial Sequence: Synthetic oligonucleotide
  Target: SCNA; (-) strand; PAM type: NRG; PAM sequence: TGG
gtataatttggttttaaaat

SEQ ID NO: 14317 - DNA, 20 bp, Artificial Sequence
  Description of Artificial Sequence: Synthetic oligonucleotide
  Target: SCNA; (-) strand; PAM type: NRG; PAM sequence: TGG
taagttttgctagtataatt

SEQ ID NO: 14318 - DNA, 20 bp, Artificial Sequence
  Description of Artificial Sequence: Synthetic oligonucleotide
  Target: SCNA; (-) strand; PAM type: NRG; PAM sequence: TAG
gagcctctagtaagttttgc

SEQ ID NO: 14319 - DNA, 20 bp, Artificial Sequence
  Description of Artificial Sequence: Synthetic oligonucleotide
  Target: SCNA; (-) strand; PAM type: NRG; PAM sequence: AAG
ccttagtttgagcctctagt

SEQ ID NO: 14320 - DNA, 20 bp, Artificial Sequence
  Description of Artificial Sequence: Synthetic oligonucleotide
  Target: SCNA; (-) strand; PAM type: NRG; PAM sequence: TAG
gagcccttagtttgagcctc

SEQ ID NO: 14321 - DNA, 20 bp, Artificial Sequence
  Description of Artificial Sequence: Synthetic oligonucleotide
  Target: SCNA; (-) strand; PAM type: NRG; PAM sequence: GAG
cttcaaagagcccttagttt

SEQ ID NO: 14322 - DNA, 20 bp, Artificial Sequence
  Description of Artificial Sequence: Synthetic oligonucleotide
  Target: SCNA; (-) strand; PAM type: NRG; PAM sequence: TAG
acattccttcaaagagccct

SEQ ID NO: 14323 - DNA, 20 bp, Artificial Sequence
  Description of Artificial Sequence: Synthetic oligonucleotide
  Target: SCNA; (-) strand; PAM type: NRG; PAM sequence: GAG
ttaaaccacattccttcaaa

SEQ ID NO: 14324 - DNA, 20 bp, Artificial Sequence
  Description of Artificial Sequence: Synthetic oligonucleotide
  Target: SCNA; (-) strand; PAM type: NRG; PAM sequence: AAG
agttaaaccacattccttca

SEQ ID NO: 14325 - DNA, 20 bp, Artificial Sequence
  Description of Artificial Sequence: Synthetic oligonucleotide
  Target: SCNA; (-) strand; PAM type: NRG; PAM sequence: CAG
ttgaaatcttatattggaag

SEQ ID NO: 14326 - DNA, 20 bp, Artificial Sequence
  Description of Artificial Sequence: Synthetic oligonucleotide
  Target: SCNA; (-) strand; PAM type: NRG; PAM sequence: AAG
tatttgaaatcttatattgg

SEQ ID NO: 14327 - DNA, 20 bp, Artificial Sequence
  Description of Artificial Sequence: Synthetic oligonucleotide
  Target: SCNA; (-) strand; PAM type: NRG; PAM sequence: TGG
aattatttgaaatcttatat

SEQ ID NO: 14328 - DNA, 20 bp, Artificial Sequence
  Description of Artificial Sequence: Synthetic oligonucleotide
  Target: SCNA; (-) strand; PAM type: NRG; PAM sequence: CAG
taatgtttttgctgctacta

SEQ ID NO: 14329 - DNA, 20 bp, Artificial Sequence
  Description of Artificial Sequence: Synthetic oligonucleotide
  Target: SCNA; (-) strand; PAM type: NRG; PAM sequence: AAG
tgttctttgtgtaattacct

SEQ ID NO: 14330 - DNA, 20 bp, Artificial Sequence
  Description of Artificial Sequence: Synthetic oligonucleotide
  Target: SCNA; (-) strand; PAM type: NRG; PAM sequence: TAG
actattcctaaatatgattt

SEQ ID NO: 14331 - DNA, 20 bp, Artificial Sequence
  Description of Artificial Sequence: Synthetic oligonucleotide
  Target: SCNA; (-) strand; PAM type: NRG; PAM sequence: TAG
gaacccaaaatgcaatagaa

SEQ ID NO: 14332 - DNA, 20 bp, Artificial Sequence
  Description of Artificial Sequence: Synthetic oligonucleotide
  Target: SCNA; (-) strand; PAM type: NRG; PAM sequence: TAG
ttgaagaacccaaaatgcaa

SEQ ID NO: 14333 - DNA, 20 bp, Artificial Sequence
  Description of Artificial Sequence: Synthetic oligonucleotide
  Target: SCNA; (-) strand; PAM type: NRG; PAM sequence: AAG
tttgagtaagcctagaattg

SEQ ID NO: 14334 - DNA, 20 bp, Artificial Sequence
  Description of Artificial Sequence: Synthetic oligonucleotide
  Target: SCNA; (-) strand; PAM type: NRG; PAM sequence: TAG
ttttatcctttgagtaagcc

SEQ ID NO: 14335 - DNA, 20 bp, Artificial Sequence
  Description of Artificial Sequence: Synthetic oligonucleotide
  Target: SCNA; (-) strand; PAM type: NRG; PAM sequence: AAG
gttcgttttatcctttgagt

SEQ ID NO: 14336 - DNA, 20 bp, Artificial Sequence
  Description of Artificial Sequence: Synthetic oligonucleotide
  Target: SCNA; (-) strand; PAM type: NRG; PAM sequence: GAG
taatgttcgttttatccttt

SEQ ID NO: 14337 - DNA, 20 bp, Artificial Sequence
  Description of Artificial Sequence: Synthetic oligonucleotide
  Target: SCNA; (-) strand; PAM type: NRG; PAM sequence: CAG
ctaggtgtagttgattgatg

SEQ ID NO: 14338 - DNA, 20 bp, Artificial Sequence
  Description of Artificial Sequence: Synthetic oligonucleotide
  Target: SCNA; (-) strand; PAM type: NRG; PAM sequence: TAG
aaagtttgattttctaggtg

SEQ ID NO: 14339 - DNA, 20 bp, Artificial Sequence
  Description of Artificial Sequence: Synthetic oligonucleotide
  Target: SCNA; (-) strand; PAM type: NRG; PAM sequence: AGG
ataataaagtttgattttct

SEQ ID NO: 14340 - DNA, 20 bp, Artificial Sequence
  Description of Artificial Sequence: Synthetic oligonucleotide
  Target: SCNA; (-) strand; PAM type: NRG; PAM sequence: TAG
tataataaagtttgattttc

SEQ ID NO: 14341 - DNA, 20 bp, Artificial Sequence
  Description of Artificial Sequence: Synthetic oligonucleotide
  Target: SCNA; (-) strand; PAM type: NRG; PAM sequence: AAG
caacttaatattgtataata

SEQ ID NO: 14342 - DNA, 20 bp, Artificial Sequence
  Description of Artificial Sequence: Synthetic oligonucleotide
  Target: SCNA; (-) strand; PAM type: NRG; PAM sequence: TAG
tctataggtataaataatat

SEQ ID NO: 14343 - DNA, 20 bp, Artificial Sequence
  Description of Artificial Sequence: Synthetic oligonucleotide
  Target: SCNA; (-) strand; PAM type: NRG; PAM sequence: AGG
ggcatgaattaagaatctat

SEQ ID NO: 14344 - DNA, 20 bp, Artificial Sequence
  Description of Artificial Sequence: Synthetic oligonucleotide
  Target: SCNA; (-) strand; PAM type: NRG; PAM sequence: TAG
gggcatgaattaagaatcta

SEQ ID NO: 14345 - DNA, 20 bp, Artificial Sequence
  Description of Artificial Sequence: Synthetic oligonucleotide
  Target: SCNA; (-) strand; PAM type: NRG; PAM sequence: AAG
gatagtaaagggcatgaatt

SEQ ID NO: 14346 - DNA, 20 bp, Artificial Sequence
  Description of Artificial Sequence: Synthetic oligonucleotide
  Target: SCNA; (-) strand; PAM type: NRG; PAM sequence: GGG
atttataaatagatagtaaa

SEQ ID NO: 14347 - DNA, 20 bp, Artificial Sequence
  Description of Artificial Sequence: Synthetic oligonucleotide
  Target: SCNA; (-) strand; PAM type: NRG; PAM sequence: AGG
aatttataaatagatagtaa

SEQ ID NO: 14348 - DNA, 20 bp, Artificial Sequence
  Description of Artificial Sequence: Synthetic oligonucleotide
  Target: SCNA; (-) strand; PAM type: NRG; PAM sequence: AAG
gaatttataaatagatagta

SEQ ID NO: 14349 - DNA, 20 bp, Artificial Sequence
  Description of Artificial Sequence: Synthetic oligonucleotide
  Target: SCNA; (-) strand; PAM type: NRG; PAM sequence: TAG
tgaatgaatttataaataga

SEQ ID NO: 14350 - DNA, 20 bp, Artificial Sequence
  Description of Artificial Sequence: Synthetic oligonucleotide
  Target: SCNA; (-) strand; PAM type: NRG; PAM sequence: TAG
ggaatgaatgaatttataaa

SEQ ID NO: 14351 - DNA, 20 bp, Artificial Sequence
  Description of Artificial Sequence: Synthetic oligonucleotide
  Target: SCNA; (-) strand; PAM type: NRG; PAM sequence: TGG
caattatacatatttagtaa

SEQ ID NO: 14352 - DNA, 20 bp, Artificial Sequence
  Description of Artificial Sequence: Synthetic oligonucleotide
  Target: SCNA; (-) strand; PAM type: NRG; PAM sequence: TAG
gattgtcaattatacatatt

SEQ ID NO: 14353 - DNA, 20 bp, Artificial Sequence
  Description of Artificial Sequence: Synthetic oligonucleotide
  Target: SCNA; (-) strand; PAM type: NRG; PAM sequence: GGG
atataaattaaggtataact

SEQ ID NO: 14354 - DNA, 20 bp, Artificial Sequence
  Description of Artificial Sequence: Synthetic oligonucleotide
  Target: SCNA; (-) strand; PAM type: NRG; PAM sequence: TGG
aatataaattaaggtataac

SEQ ID NO: 14355 - DNA, 20 bp, Artificial Sequence
  Description of Artificial Sequence: Synthetic oligonucleotide
  Target: SCNA; (-) strand; PAM type: NRG; PAM sequence: AGG
agacaaaaaaatataaatta

SEQ ID NO: 14356 - DNA, 20 bp, Artificial Sequence
  Description of Artificial Sequence: Synthetic oligonucleotide
  Target: SCNA; (-) strand; PAM type: NRG; PAM sequence: AAG
tagacaaaaaaatataaatt

SEQ ID NO: 14357 - DNA, 20 bp, Artificial Sequence
  Description of Artificial Sequence: Synthetic oligonucleotide
  Target: SCNA; (-) strand; PAM type: NRG; PAM sequence: TAG
ggtacttggcttatgtcaaa

SEQ ID NO: 14358 - DNA, 20 bp, Artificial Sequence
  Description of Artificial Sequence: Synthetic oligonucleotide
  Target: SCNA; (-) strand; PAM type: NRG; PAM sequence: TGG
tgaatcatggcatgggtact

SEQ ID NO: 14359 - DNA, 20 bp, Artificial Sequence
  Description of Artificial Sequence: Synthetic oligonucleotide
  Target: SCNA; (-) strand; PAM type: NRG; PAM sequence: GGG
tctgtgttgaatcatggcat

SEQ ID NO: 14360 - DNA, 20 bp, Artificial Sequence
  Description of Artificial Sequence: Synthetic oligonucleotide
  Target: SCNA; (-) strand; PAM type: NRG; PAM sequence: TGG
ttctgtgttgaatcatggca

SEQ ID NO: 14361 - DNA, 20 bp, Artificial Sequence
  Description of Artificial Sequence: Synthetic oligonucleotide
  Target: SCNA; (-) strand; PAM type: NRG; PAM sequence: TGG
taattttctgtgttgaatca

SEQ ID NO: 14362 - DNA, 20 bp, Artificial Sequence
  Description of Artificial Sequence: Synthetic oligonucleotide
  Target: SCNA; (-) strand; PAM type: NRG; PAM sequence: GGG
gcagcagtctacagtaaggt

SEQ ID NO: 14363 - DNA, 20 bp, Artificial Sequence
  Description of Artificial Sequence: Synthetic oligonucleotide
  Target: SCNA; (-) strand; PAM type: NRG; PAM sequence: TGG
agcagcagtctacagtaagg

SEQ ID NO: 14364 - DNA, 20 bp, Artificial Sequence
  Description of Artificial Sequence: Synthetic oligonucleotide
  Target: SCNA; (-) strand; PAM type: NRG; PAM sequence: AGG
aagagcagcagtctacagta

SEQ ID NO: 14365 - DNA, 20 bp, Artificial Sequence
  Description of Artificial Sequence: Synthetic oligonucleotide
  Target: SCNA; (-) strand; PAM type: NRG; PAM sequence: AAG
taagagcagcagtctacagt

SEQ ID NO: 14366 - DNA, 20 bp, Artificial Sequence
  Description of Artificial Sequence: Synthetic oligonucleotide
  Target: SCNA; (-) strand; PAM type: NRG; PAM sequence: CAG
gcaataagagcagcagtcta

SEQ ID NO: 14367 - DNA, 20 bp, Artificial Sequence
  Description of Artificial Sequence: Synthetic oligonucleotide
  Target: SCNA; (-) strand; PAM type: NRG; PAM sequence: CAG
tgttgatgcaataagagcag

SEQ ID NO: 14368 - DNA, 20 bp, Artificial Sequence
  Description of Artificial Sequence: Synthetic oligonucleotide
  Target: SCNA; (-) strand; PAM type: NRG; PAM sequence: CAG
gaatgttgatgcaataagag

SEQ ID NO: 14369 - DNA, 20 bp, Artificial Sequence
  Description of Artificial Sequence: Synthetic oligonucleotide
  Target: SCNA; (-) strand; PAM type: NRG; PAM sequence: GAG
tacgaatgttgatgcaataa

SEQ ID NO: 14370 - DNA, 20 bp, Artificial Sequence
  Description of Artificial Sequence: Synthetic oligonucleotide
  Target: SCNA; (-) strand; PAM type: NRG; PAM sequence: AAG
gatacgaatgttgatgcaat

SEQ ID NO: 14371 - DNA, 20 bp, Artificial Sequence
  Description of Artificial Sequence: Synthetic oligonucleotide
  Target: SCNA; (-) strand; PAM type: NRG; PAM sequence: AAG
aagttaattattttccgtgg

SEQ ID NO: 14372 - DNA, 20 bp, Artificial Sequence
  Description of Artificial Sequence: Synthetic oligonucleotide
  Target: SCNA; (-) strand; PAM type: NRG; PAM sequence: TGG
actaagttaattattttccg

SEQ ID NO: 14373 - DNA, 20 bp, Artificial Sequence
  Description of Artificial Sequence: Synthetic oligonucleotide
  Target: SCNA; (-) strand; PAM type: NRG; PAM sequence: AAG
catatcctgattatagaact

SEQ ID NO: 14374 - DNA, 20 bp, Artificial Sequence
  Description of Artificial Sequence: Synthetic oligonucleotide
  Target: SCNA; (-) strand; PAM type: NRG; PAM sequence: TAG
aaccgggcatatcctgatta

SEQ ID NO: 14375 - DNA, 20 bp, Artificial Sequence
  Description of Artificial Sequence: Synthetic oligonucleotide
  Target: SCNA; (-) strand; PAM type: NRG; PAM sequence: GGG
tatttccttgtaaataaacc

SEQ ID NO: 14376 - DNA, 20 bp, Artificial Sequence
  Description of Artificial Sequence: Synthetic oligonucleotide
  Target: SCNA; (-) strand; PAM type: NRG; PAM sequence: CGG
gtatttccttgtaaataaac

SEQ ID NO: 14377 - DNA, 20 bp, Artificial Sequence
  Description of Artificial Sequence: Synthetic oligonucleotide
  Target: SCNA; (-) strand; PAM type: NRG; PAM sequence: AGG
aagagaaattagcacctgat

SEQ ID NO: 14378 - DNA, 20 bp, Artificial Sequence
  Description of Artificial Sequence: Synthetic oligonucleotide
  Target: SCNA; (-) strand; PAM type: NRG; PAM sequence: TAG
taagagaaattagcacctga

SEQ ID NO: 14379 - DNA, 20 bp, Artificial Sequence
  Description of Artificial Sequence: Synthetic oligonucleotide
  Target: SCNA; (-) strand; PAM type: NRG; PAM sequence: TAG
tttctaattctaagagaaat

SEQ ID NO: 14380 - DNA, 20 bp, Artificial Sequence
  Description of Artificial Sequence: Synthetic oligonucleotide
  Target: SCNA; (-) strand; PAM type: NRG; PAM sequence: GAG
gccaagatttctaattctaa

SEQ ID NO: 14381 - DNA, 20 bp, Artificial Sequence
  Description of Artificial Sequence: Synthetic oligonucleotide
  Target: SCNA; (-) strand; PAM type: NRG; PAM sequence: AAG
tggccaagatttctaattct

SEQ ID NO: 14382 - DNA, 20 bp, Artificial Sequence
  Description of Artificial Sequence: Synthetic oligonucleotide
  Target: SCNA; (-) strand; PAM type: NRG; PAM sequence: AAG
gtgagccaccatgcctggcc

SEQ ID NO: 14383 - DNA, 20 bp, Artificial Sequence
  Description of Artificial Sequence: Synthetic oligonucleotide
  Target: SCNA; (-) strand; PAM type: NRG; PAM sequence: TGG
caggtgtgagccaccatgcc

SEQ ID NO: 14384 - DNA, 20 bp, Artificial Sequence
  Description of Artificial Sequence: Synthetic oligonucleotide
  Target: SCNA; (-) strand; PAM type: NRG; PAM sequence: GAG
agtgctgggattacaggtgt

SEQ ID NO: 14385 - DNA, 20 bp, Artificial Sequence
  Description of Artificial Sequence: Synthetic oligonucleotide
  Target: SCNA; (-) strand; PAM type: NRG; PAM sequence: AGG
tcccaaagtgctgggattac

SEQ ID NO: 14386 - DNA, 20 bp, Artificial Sequence
  Description of Artificial Sequence: Synthetic oligonucleotide
  Target: SCNA; (-) strand; PAM type: NRG; PAM sequence: CAG
ctcccaaagtgctgggatta

SEQ ID NO: 14387 - DNA, 20 bp, Artificial Sequence
  Description of Artificial Sequence: Synthetic oligonucleotide
  Target: SCNA; (-) strand; PAM type: NRG; PAM sequence: GGG
cctcggcctcccaaagtgct

SEQ ID NO: 14388 - DNA, 20 bp, Artificial Sequence
  Description of Artificial Sequence: Synthetic oligonucleotide
  Target: SCNA; (-) strand; PAM type: NRG; PAM sequence: TGG
acctcggcctcccaaagtgc

SEQ ID NO: 14389 - DNA, 20 bp, Artificial Sequence
  Description of Artificial Sequence: Synthetic oligonucleotide
  Target: SCNA; (-) strand; PAM type: NRG; PAM sequence: AAG
ccacctacctcggcctccca

SEQ ID NO: 14390 - DNA, 20 bp, Artificial Sequence
  Description of Artificial Sequence: Synthetic oligonucleotide
  Target: SCNA; (-) strand; PAM type: NRG; PAM sequence: CGG
ctcaggtaatccacctacct

SEQ ID NO: 14391 - DNA, 20 bp, Artificial Sequence
  Description of Artificial Sequence: Synthetic oligonucleotide
  Target: SCNA; (-) strand; PAM type: NRG; PAM sequence: AGG
ggtctcaaactcctgacctc

SEQ ID NO: 14392 - DNA, 20 bp, Artificial Sequence
  Description of Artificial Sequence: Synthetic oligonucleotide
  Target: SCNA; (-) strand; PAM type: NRG; PAM sequence: CAG
tggtctcaaactcctgacct

SEQ ID NO: 14393 - DNA, 20 bp, Artificial Sequence
  Description of Artificial Sequence: Synthetic oligonucleotide
  Target: SCNA; (-) strand; PAM type: NRG; PAM sequence: TGG
gttcaccacgttggccaggc

SEQ ID NO: 14394 - DNA, 20 bp, Artificial Sequence
  Description of Artificial Sequence: Synthetic oligonucleotide
  Target: SCNA; (-) strand; PAM type: NRG; PAM sequence: AGG
cagggttcaccacgttggcc

SEQ ID NO: 14395 - DNA, 20 bp, Artificial Sequence
  Description of Artificial Sequence: Synthetic oligonucleotide
  Target: SCNA; (-) strand; PAM type: NRG; PAM sequence: CAG
acagggttcaccacgttggc

SEQ ID NO: 14396 - DNA, 20 bp, Artificial Sequence
  Description of Artificial Sequence: Synthetic oligonucleotide
  Target: SCNA; (-) strand; PAM type: NRG; PAM sequence: TGG
agagacagggttcaccacgt

SEQ ID NO: 14397 - DNA, 20 bp, Artificial Sequence
  Description of Artificial Sequence: Synthetic oligonucleotide
  Target: SCNA; (-) strand; PAM type: NRG; PAM sequence: GGG
ttgtatttttagtagagaca

SEQ ID NO: 14398 - DNA, 20 bp, Artificial Sequence
  Description of Artificial Sequence: Synthetic oligonucleotide
  Target: SCNA; (-) strand; PAM type: NRG; PAM sequence: AGG
tttgtatttttagtagagac

SEQ ID NO: 14399 - DNA, 20 bp, Artificial Sequence
  Description of Artificial Sequence: Synthetic oligonucleotide
  Target: SCNA; (-) strand; PAM type: NRG; PAM sequence: CAG
ttttgtatttttagtagaga

SEQ ID NO: 14400 - DNA, 20 bp, Artificial Sequence
  Description of Artificial Sequence: Synthetic oligonucleotide
  Target: SCNA; (-) strand; PAM type: NRG; PAM sequence: GAG
taatttttgtatttttagta

SEQ ID NO: 14401 - DNA, 20 bp, Artificial Sequence
  Description of Artificial Sequence: Synthetic oligonucleotide
  Target: SCNA; (-) strand; PAM type: NRG; PAM sequence: TAG
actaatttttgtatttttag

SEQ ID NO: 14402 - DNA, 20 bp, Artificial Sequence
  Description of Artificial Sequence: Synthetic oligonucleotide
  Target: SCNA; (-) strand; PAM type: NRG; PAM sequence: TAG
ccgactaatttttgtatttt

SEQ ID NO: 14403 - DNA, 20 bp, Artificial Sequence
  Description of Artificial Sequence: Synthetic oligonucleotide
  Target: SCNA; (-) strand; PAM type: NRG; PAM sequence: TAG
attacaggaacacaccacct

SEQ ID NO: 14404 - DNA, 20 bp, Artificial Sequence
  Description of Artificial Sequence: Synthetic oligonucleotide
  Target: SCNA; (-) strand; PAM type: NRG; PAM sequence: AGG
tctcgagtaggtgggattac

SEQ ID NO: 14405 - DNA, 20 bp, Artificial Sequence
  Description of Artificial Sequence: Synthetic oligonucleotide
  Target: SCNA; (-) strand; PAM type: NRG; PAM sequence: CAG
ctctcgagtaggtgggatta

SEQ ID NO: 14406 - DNA, 20 bp, Artificial Sequence
  Description of Artificial Sequence: Synthetic oligonucleotide
  Target: SCNA; (-) strand; PAM type: NRG; PAM sequence: GGG
cctcagcctctcgagtaggt

SEQ ID NO: 14407 - DNA, 20 bp, Artificial Sequence
  Description of Artificial Sequence: Synthetic oligonucleotide
  Target: SCNA; (-) strand; PAM type: NRG; PAM sequence: TGG
gcctcagcctctcgagtagg

SEQ ID NO: 14408 - DNA, 20 bp, Artificial Sequence
  Description of Artificial Sequence: Synthetic oligonucleotide
  Target: SCNA; (-) strand; PAM type: NRG; PAM sequence: AGG
cctgcctcagcctctcgagt

SEQ ID NO: 14409 - DNA, 20 bp, Artificial Sequence
  Description of Artificial Sequence: Synthetic oligonucleotide
  Target: SCNA; (-) strand; PAM type: NRG; PAM sequence: TAG
tcctgcctcagcctctcgag

SEQ ID NO: 14410 - DNA, 20 bp, Artificial Sequence
  Description of Artificial Sequence: Synthetic oligonucleotide
  Target: SCNA; (-) strand; PAM type: NRG; PAM sequence: GAG
ttctcctgcctcagcctctc

SEQ ID NO: 14411 - DNA, 20 bp, Artificial Sequence
  Description of Artificial Sequence: Synthetic oligonucleotide
  Target: SCNA; (-) strand; PAM type: NRG; PAM sequence: CAG
ttcaagcgattctcctgcct

SEQ ID NO: 14412 - DNA, 20 bp, Artificial Sequence
  Description of Artificial Sequence: Synthetic oligonucleotide
  Target: SCNA; (-) strand; PAM type: NRG; PAM sequence: AAG
aacctccgcctcccaggttc

SEQ ID NO: 14413 - DNA, 20 bp, Artificial Sequence
  Description of Artificial Sequence: Synthetic oligonucleotide
  Target: SCNA; (-) strand; PAM type: NRG; PAM sequence: AGG
cactgcaacctccgcctccc

SEQ ID NO: 14414 - DNA, 20 bp, Artificial Sequence
  Description of Artificial Sequence: Synthetic oligonucleotide
  Target: SCNA; (-) strand; PAM type: NRG; PAM sequence: CAG
tcactgcaacctccgcctcc

SEQ ID NO: 14415 - DNA, 20 bp, Artificial Sequence
  Description of Artificial Sequence: Synthetic oligonucleotide
  Target: SCNA; (-) strand; PAM type: NRG; PAM sequence: CAG
ggagtgcaatggcacaatct

SEQ ID NO: 14416 - DNA, 20 bp, Artificial Sequence
  Description of Artificial Sequence: Synthetic oligonucleotide
  Target: SCNA; (-) strand; PAM type: NRG; PAM sequence: TGG
ccacctaggctggagtgcaa

SEQ ID NO: 14417 - DNA, 20 bp, Artificial Sequence
  Description of Artificial Sequence: Synthetic oligonucleotide
  Target: SCNA; (-) strand; PAM type: NRG; PAM sequence: GAG
tgctcttgccacctaggctg

SEQ ID NO: 14418 - DNA, 20 bp, Artificial Sequence
  Description of Artificial Sequence: Synthetic oligonucleotide
  Target: SCNA; (-) strand; PAM type: NRG; PAM sequence: TGG
cttgctcttgccacctaggc

SEQ ID NO: 14419 - DNA, 20 bp, Artificial Sequence
  Description of Artificial Sequence: Synthetic oligonucleotide
  Target: SCNA; (-) strand; PAM type: NRG; PAM sequence: AGG
gagtcttgctcttgccacct

SEQ ID NO: 14420 - DNA, 20 bp, Artificial Sequence
  Description of Artificial Sequence: Synthetic oligonucleotide
  Target: SCNA; (-) strand; PAM type: NRG; PAM sequence: TAG
ggagtcttgctcttgccacc

SEQ ID NO: 14421 - DNA, 20 bp, Artificial Sequence
  Description of Artificial Sequence: Synthetic oligonucleotide
  Target: SCNA; (-) strand; PAM type: NRG; PAM sequence: GAG
ttttttttttttttgagatg

SEQ ID NO: 14422 - DNA, 20 bp, Artificial Sequence
  Description of Artificial Sequence: Synthetic oligonucleotide
  Target: SCNA; (-) strand; PAM type: NRG; PAM sequence: TGG
ctttttttttttttttgaga

SEQ ID NO: 14423 - DNA, 20 bp, Artificial Sequence
  Description of Artificial Sequence: Synthetic oligonucleotide
  Target: SCNA; (-) strand; PAM type: NRG; PAM sequence: GAG
atttcttttttttttttttt

SEQ ID NO: 14424 - DNA, 20 bp, Artificial Sequence
  Description of Artificial Sequence: Synthetic oligonucleotide
  Target: SCNA; (-) strand; PAM type: NRG; PAM sequence: GAG
tatctatagatacatataga

SEQ ID NO: 14425 - DNA, 20 bp, Artificial Sequence
  Description of Artificial Sequence: Synthetic oligonucleotide
  Target: SCNA; (-) strand; PAM type: NRG; PAM sequence: GAG
tatatctatagatacatata

SEQ ID NO: 14426 - DNA, 20 bp, Artificial Sequence
  Description of Artificial Sequence: Synthetic oligonucleotide
  Target: SCNA; (-) strand; PAM type: NRG; PAM sequence: TAG
tctatatctatagatacata

SEQ ID NO: 14427 - DNA, 20 bp, Artificial Sequence
  Description of Artificial Sequence: Synthetic oligonucleotide
  Target: SCNA; (-) strand; PAM type: NRG; PAM sequence: TAG
tataaacatatctatatcta

SEQ ID NO: 14428 - DNA, 20 bp, Artificial Sequence
  Description of Artificial Sequence: Synthetic oligonucleotide
  Target: SCNA; (-) strand; PAM type: NRG; PAM sequence: AAG
tgtttttcttcaggtgcctg

SEQ ID NO: 14429 - DNA, 20 bp, Artificial Sequence
  Description of Artificial Sequence: Synthetic oligonucleotide
  Target: SCNA; (-) strand; PAM type: NRG; PAM sequence: AGG
tagtacatctgtttttcttc

SEQ ID NO: 14430 - DNA, 20 bp, Artificial Sequence
  Description of Artificial Sequence: Synthetic oligonucleotide
  Target: SCNA; (-) strand; PAM type: NRG; PAM sequence: CAG
ctagtacatctgtttttctt

SEQ ID NO: 14431 - DNA, 20 bp, Artificial Sequence
  Description of Artificial Sequence: Synthetic oligonucleotide
  Target: SCNA; (-) strand; PAM type: NRG; PAM sequence: TAG
gagcctttagtaagttttgc

SEQ ID NO: 14432 - DNA, 20 bp, Artificial Sequence
  Description of Artificial Sequence: Synthetic oligonucleotide
  Target: SCNA; (-) strand; PAM type: NRG; PAM sequence: AAG
ctagagtttgagcctttagt

SEQ ID NO: 14433 - DNA, 20 bp, Artificial Sequence
  Description of Artificial Sequence: Synthetic oligonucleotide
  Target: SCNA; (-) strand; PAM type: NRG; PAM sequence: TAG
tttactagagtttgagcctt

SEQ ID NO: 14434 - DNA, 20 bp, Artificial Sequence
  Description of Artificial Sequence: Synthetic oligonucleotide
  Target: SCNA; (-) strand; PAM type: NRG; PAM sequence: GAG
aagaaaatttactagagttt

SEQ ID NO: 14435 - DNA, 20 bp, Artificial Sequence
  Description of Artificial Sequence: Synthetic oligonucleotide
  Target: SCNA; (-) strand; PAM type: NRG; PAM sequence: GAG
tacctaaagaaaatttacta

SEQ ID NO: 14436 - DNA, 20 bp, Artificial Sequence
  Description of Artificial Sequence: Synthetic oligonucleotide
  Target: SCNA; (-) strand; PAM type: NRG; PAM sequence: TAG
ggtacctaaagaaaatttac

SEQ ID NO: 14437 - DNA, 20 bp, Artificial Sequence
  Description of Artificial Sequence: Synthetic oligonucleotide
  Target: SCNA; (-) strand; PAM type: NRG; PAM sequence: AAG
tgtttttcttcaggtaccta

SEQ ID NO: 14438 - DNA, 20 bp, Artificial Sequence
  Description of Artificial Sequence: Synthetic oligonucleotide
  Target: SCNA; (-) strand; PAM type: NRG; PAM sequence: AGG
ttagatatttgtttttcttc

SEQ ID NO: 14439 - DNA, 20 bp, Artificial Sequence
  Description of Artificial Sequence: Synthetic oligonucleotide
  Target: SCNA; (-) strand; PAM type: NRG; PAM sequence: CAG
attagatatttgtttttctt

SEQ ID NO: 14440 - DNA, 20 bp, Artificial Sequence
  Description of Artificial Sequence: Synthetic oligonucleotide
  Target: SCNA; (-) strand; PAM type: NRG; PAM sequence: TAG
acttttctaggtataataat

SEQ ID NO: 14441 - DNA, 20 bp, Artificial Sequence
  Description of Artificial Sequence: Synthetic oligonucleotide
  Target: SCNA; (-) strand; PAM type: NRG; PAM sequence: AGG
ggtgatagccccacttttct

SEQ ID NO: 14442 - DNA, 20 bp, Artificial Sequence
  Description of Artificial Sequence: Synthetic oligonucleotide
  Target: SCNA; (-) strand; PAM type: NRG; PAM sequence: TAG
gggtgatagccccacttttc

SEQ ID NO: 14443 - DNA, 20 bp, Artificial Sequence
  Description of Artificial Sequence: Synthetic oligonucleotide
  Target: SCNA; (-) strand; PAM type: NRG; PAM sequence: TAG
aagtctaggaaatggggtga

SEQ ID NO: 14444 - DNA, 20 bp, Artificial Sequence
  Description of Artificial Sequence: Synthetic oligonucleotide
  Target: SCNA; (-) strand; PAM type: NRG; PAM sequence: GGG
ttccagaagtctaggaaatg

SEQ ID NO: 14445 - DNA, 20 bp, Artificial Sequence
  Description of Artificial Sequence: Synthetic oligonucleotide
  Target: SCNA; (-) strand; PAM type: NRG; PAM sequence: GGG
cttccagaagtctaggaaat

SEQ ID NO: 14446 - DNA, 20 bp, Artificial Sequence
  Description of Artificial Sequence: Synthetic oligonucleotide
  Target: SCNA; (-) strand; PAM type: NRG; PAM sequence: TGG
acttccagaagtctaggaaa

SEQ ID NO: 14447 - DNA, 20 bp, Artificial Sequence
  Description of Artificial Sequence: Synthetic oligonucleotide
  Target: SCNA; (-) strand; PAM type: NRG; PAM sequence: AGG
aagaaaacttccagaagtct

SEQ ID NO: 14448 - DNA, 20 bp, Artificial Sequence
  Description of Artificial Sequence: Synthetic oligonucleotide
  Target: SCNA; (-) strand; PAM type: NRG; PAM sequence: TAG
taagaaaacttccagaagtc

SEQ ID NO: 14449 - DNA, 20 bp, Artificial Sequence
  Description of Artificial Sequence: Synthetic oligonucleotide
  Target: SCNA; (-) strand; PAM type: NRG; PAM sequence: AAG
ctatttaagaaaacttccag

SEQ ID NO: 14450 - DNA, 20 bp, Artificial Sequence
  Description of Artificial Sequence: Synthetic oligonucleotide
  Target: SCNA; (-) strand; PAM type: NRG; PAM sequence: CAG
cagctatttaagaaaacttc

SEQ ID NO: 14451 - DNA, 20 bp, Artificial Sequence
  Description of Artificial Sequence: Synthetic oligonucleotide
  Target: SCNA; (-) strand; PAM type: NRG; PAM sequence: AAG
gtgaggacacacagctattt

SEQ ID NO: 14452 - DNA, 20 bp, Artificial Sequence
  Description of Artificial Sequence: Synthetic oligonucleotide
  Target: SCNA; (-) strand; PAM type: NRG; PAM sequence: CAG
agtgtcagagtgaggacaca

SEQ ID NO: 14453 - DNA, 20 bp, Artificial Sequence
  Description of Artificial Sequence: Synthetic oligonucleotide
  Target: SCNA; (-) strand; PAM type: NRG; PAM sequence: AGG
ggccacatagtgtcagagtg

SEQ ID NO: 14454 - DNA, 20 bp, Artificial Sequence
  Description of Artificial Sequence: Synthetic oligonucleotide
  Target: SCNA; (-) strand; PAM type: NRG; PAM sequence: GAG
tggccacatagtgtcagagt

SEQ ID NO: 14455 - DNA, 20 bp, Artificial Sequence
  Description of Artificial Sequence: Synthetic oligonucleotide
  Target: SCNA; (-) strand; PAM type: NRG; PAM sequence: GAG
cccttggccacatagtgtca

SEQ ID NO: 14456 - DNA, 20 bp, Artificial Sequence
  Description of Artificial Sequence: Synthetic oligonucleotide
  Target: SCNA; (-) strand; PAM type: NRG; PAM sequence: CAG
gccccttggccacatagtgt

SEQ ID NO: 14457 - DNA, 20 bp, Artificial Sequence
  Description of Artificial Sequence: Synthetic oligonucleotide
  Target: SCNA; (-) strand; PAM type: NRG; PAM sequence: TAG
ctctcagccccttggccaca

SEQ ID NO: 14458 - DNA, 20 bp, Artificial Sequence
  Description of Artificial Sequence: Synthetic oligonucleotide
  Target: SCNA; (-) strand; PAM type: NRG; PAM sequence: TGG
agtctgtgctctcagcccct

SEQ ID NO: 14459 - DNA, 20 bp, Artificial Sequence
  Description of Artificial Sequence: Synthetic oligonucleotide
  Target: SCNA; (-) strand; PAM type: NRG; PAM sequence: CAG
agcaccacagtctgtgctct

SEQ ID NO: 14460 - DNA, 20 bp, Artificial Sequence
  Description of Artificial Sequence: Synthetic oligonucleotide
  Target: SCNA; (-) strand; PAM type: NRG; PAM sequence: CAG
ggcccaacattacagcacca

SEQ ID NO: 14461 - DNA, 20 bp, Artificial Sequence
  Description of Artificial Sequence: Synthetic oligonucleotide
  Target: SCNA; (-) strand; PAM type: NRG; PAM sequence: CAG
agccaagaggcccaacatta

SEQ ID NO: 14462 - DNA, 20 bp, Artificial Sequence
  Description of Artificial Sequence: Synthetic oligonucleotide
  Target: SCNA; (-) strand; PAM type: NRG; PAM sequence: AGG
tagtaagcggcagagccaag

SEQ ID NO: 14463 - DNA, 20 bp, Artificial Sequence
  Description of Artificial Sequence: Synthetic oligonucleotide
  Target: SCNA; (-) strand; PAM type: NRG; PAM sequence: GAG
ctagtaagcggcagagccaa

SEQ ID NO: 14464 - DNA, 20 bp, Artificial Sequence
  Description of Artificial Sequence: Synthetic oligonucleotide
  Target: SCNA; (-) strand; PAM type: NRG; PAM sequence: AAG
agctagtaagcggcagagcc

SEQ ID NO: 14465 - DNA, 20 bp, Artificial Sequence
  Description of Artificial Sequence: Synthetic oligonucleotide
  Target: SCNA; (-) strand; PAM type: NRG; PAM sequence: GAG
cacacagctagtaagcggca

SEQ ID NO: 14466 - DNA, 20 bp, Artificial Sequence
  Description of Artificial Sequence: Synthetic oligonucleotide
  Target: SCNA; (-) strand; PAM type: NRG; PAM sequence: CAG
gccacacagctagtaagcgg

SEQ ID NO: 14467 - DNA, 20 bp, Artificial Sequence
  Description of Artificial Sequence: Synthetic oligonucleotide
  Target: SCNA; (-) strand; PAM type: NRG; PAM sequence: CGG
acggccacacagctagtaag

SEQ ID NO: 14468 - DNA, 20 bp, Artificial Sequence
  Description of Artificial Sequence: Synthetic oligonucleotide
  Target: SCNA; (-) strand; PAM type: NRG; PAM sequence: AAG
cccacggccacacagctagt

SEQ ID NO: 14469 - DNA, 20 bp, Artificial Sequence
  Description of Artificial Sequence: Synthetic oligonucleotide
  Target: SCNA; (-) strand; PAM type: NRG; PAM sequence: TAG
ctttcccacggccacacagc

SEQ ID NO: 14470 - DNA, 20 bp, Artificial Sequence
  Description of Artificial Sequence: Synthetic oligonucleotide
  Target: SCNA; (-) strand; PAM type: NRG; PAM sequence: CAG
ataactttcccacggccaca

SEQ ID NO: 14471 - DNA, 20 bp, Artificial Sequence
  Description of Artificial Sequence: Synthetic oligonucleotide
  Target: SCNA; (-) strand; PAM type: NRG; PAM sequence: CGG
caggctagataactttccca

SEQ ID NO: 14472 - DNA, 20 bp, Artificial Sequence
  Description of Artificial Sequence: Synthetic oligonucleotide
  Target: SCNA; (-) strand; PAM type: NRG; PAM sequence: TAG
caaaggaggcacccacaggc

SEQ ID NO: 14473 - DNA, 20 bp, Artificial Sequence
  Description of Artificial Sequence: Synthetic oligonucleotide
  Target: SCNA; (-) strand; PAM type: NRG; PAM sequence: AGG
aagccaaaggaggcacccac

SEQ ID NO: 14474 - DNA, 20 bp, Artificial Sequence
  Description of Artificial Sequence: Synthetic oligonucleotide
  Target: SCNA; (-) strand; PAM type: NRG; PAM sequence: CAG
taagccaaaggaggcaccca

SEQ ID NO: 14475 - DNA, 20 bp, Artificial Sequence
  Description of Artificial Sequence: Synthetic oligonucleotide
  Target: SCNA; (-) strand; PAM type: NRG; PAM sequence: AGG
ttttacacataagccaaagg

SEQ ID NO: 14476 - DNA, 20 bp, Artificial Sequence
  Description of Artificial Sequence: Synthetic oligonucleotide
  Target: SCNA; (-) strand; PAM type: NRG; PAM sequence: GAG
attttacacataagccaaag

SEQ ID NO: 14477 - DNA, 20 bp, Artificial Sequence
  Description of Artificial Sequence: Synthetic oligonucleotide
  Target: SCNA; (-) strand; PAM type: NRG; PAM sequence: AGG
taattttacacataagccaa

SEQ ID NO: 14478 - DNA, 20 bp, Artificial Sequence
  Description of Artificial Sequence: Synthetic oligonucleotide
  Target: SCNA; (-) strand; PAM type: NRG; PAM sequence: AAG
ctaattttacacataagcca

SEQ ID NO: 14479 - DNA, 20 bp, Artificial Sequence
  Description of Artificial Sequence: Synthetic oligonucleotide
  Target: SCNA; (-) strand; PAM type: NRG; PAM sequence: AAG
atgattctaattttacacat

SEQ ID NO: 14480 - DNA, 20 bp, Artificial Sequence
  Description of Artificial Sequence: Synthetic oligonucleotide
  Target: SCNA; (-) strand; PAM type: NRG; PAM sequence: AGG
attctcaaaacaaccttaat

SEQ ID NO: 14481 - DNA, 20 bp, Artificial Sequence
  Description of Artificial Sequence: Synthetic oligonucleotide
  Target: SCNA; (-) strand; PAM type: NRG; PAM sequence: TAG
aattctcaaaacaaccttaa

SEQ ID NO: 14482 - DNA, 20 bp, Artificial Sequence
  Description of Artificial Sequence: Synthetic oligonucleotide
  Target: SCNA; (-) strand; PAM type: NRG; PAM sequence: AAG
gtaagtgatttatcaatatt

SEQ ID NO: 14483 - DNA, 20 bp, Artificial Sequence
  Description of Artificial Sequence: Synthetic oligonucleotide
  Target: SCNA; (-) strand; PAM type: NRG; PAM sequence: AAG
tatgtgtcaaatatagatgt

SEQ ID NO: 14484 - DNA, 20 bp, Artificial Sequence
  Description of Artificial Sequence: Synthetic oligonucleotide
  Target: SCNA; (-) strand; PAM type: NRG; PAM sequence: TAG
aaattattatgtgtcaaata

SEQ ID NO: 14485 - DNA, 20 bp, Artificial Sequence
  Description of Artificial Sequence: Synthetic oligonucleotide
  Target: SCNA; (-) strand; PAM type: NRG; PAM sequence: TAG
ccctgttattggctatactt

SEQ ID NO: 14486 - DNA, 20 bp, Artificial Sequence
  Description of Artificial Sequence: Synthetic oligonucleotide
  Target: SCNA; (-) strand; PAM type: NRG; PAM sequence: TGG
atgagctctgtccctgttat

SEQ ID NO: 14487 - DNA, 20 bp, Artificial Sequence
  Description of Artificial Sequence: Synthetic oligonucleotide
  Target: SCNA; (-) strand; PAM type: NRG; PAM sequence: GAG
cagggctgacattttcatat

SEQ ID NO: 14488 - DNA, 20 bp, Artificial Sequence
  Description of Artificial Sequence: Synthetic oligonucleotide
  Target: SCNA; (-) strand; PAM type: NRG; PAM sequence: GGG
ggcagggcaagagtgcaaca

SEQ ID NO: 14489 - DNA, 20 bp, Artificial Sequence
  Description of Artificial Sequence: Synthetic oligonucleotide
  Target: SCNA; (-) strand; PAM type: NRG; PAM sequence: AGG
gggcagggcaagagtgcaac

SEQ ID NO: 14490 - DNA, 20 bp, Artificial Sequence
  Description of Artificial Sequence: Synthetic oligonucleotide
  Target: SCNA; (-) strand; PAM type: NRG; PAM sequence: CAG
tgggcagggcaagagtgcaa

SEQ ID NO: 14491 - DNA, 20 bp, Artificial Sequence
  Description of Artificial Sequence: Synthetic oligonucleotide
  Target: SCNA; (-) strand; PAM type: NRG; PAM sequence: GAG
ttctgtcttgggcagggcaa

SEQ ID NO: 14492 - DNA, 20 bp, Artificial Sequence
  Description of Artificial Sequence: Synthetic oligonucleotide
  Target: SCNA; (-) strand; PAM type: NRG; PAM sequence: AAG
ctttctgtcttgggcagggc

SEQ ID NO: 14493 - DNA, 20 bp, Artificial Sequence
  Description of Artificial Sequence: Synthetic oligonucleotide
  Target: SCNA; (-) strand; PAM type: NRG; PAM sequence: GGG
tgttctttctgtcttgggca

SEQ ID NO: 14494 - DNA, 20 bp, Artificial Sequence
  Description of Artificial Sequence: Synthetic oligonucleotide
  Target: SCNA; (-) strand; PAM type: NRG; PAM sequence: AGG
ttgttctttctgtcttgggc

SEQ ID NO: 14495 - DNA, 20 bp, Artificial Sequence
  Description of Artificial Sequence: Synthetic oligonucleotide
  Target: SCNA; (-) strand; PAM type: NRG; PAM sequence: CAG
tttgttctttctgtcttggg

SEQ ID NO: 14496 - DNA, 20 bp, Artificial Sequence
  Description of Artificial Sequence: Synthetic oligonucleotide
  Target: SCNA; (-) strand; PAM type: NRG; PAM sequence: GGG
cactttgttctttctgtctt

SEQ ID NO: 14497 - DNA, 20 bp, Artificial Sequence
  Description of Artificial Sequence: Synthetic oligonucleotide
  Target: SCNA; (-) strand; PAM type: NRG; PAM sequence: TGG
ccactttgttctttctgtct

SEQ ID NO: 14498 - DNA, 20 bp, Artificial Sequence
  Description of Artificial Sequence: Synthetic oligonucleotide
  Target: SCNA; (-) strand; PAM type: NRG; PAM sequence: TGG
tgcctctgtccacacactaa

SEQ ID NO: 14499 - DNA, 20 bp, Artificial Sequence
  Description of Artificial Sequence: Synthetic oligonucleotide
  Target: SCNA; (-) strand; PAM type: NRG; PAM sequence: CAG
tttcaaatctgtaaacctga

SEQ ID NO: 14500 - DNA, 20 bp, Artificial Sequence
  Description of Artificial Sequence: Synthetic oligonucleotide
  Target: SCNA; (-) strand; PAM type: NRG; PAM sequence: AAG
tgtctaaatccatactgagg

SEQ ID NO: 14501 - DNA, 20 bp, Artificial Sequence
  Description of Artificial Sequence: Synthetic oligonucleotide
  Target: SCNA; (-) strand; PAM type: NRG; PAM sequence: AGG
tgctgtctaaatccatactg

SEQ ID NO: 14502 - DNA, 20 bp, Artificial Sequence
  Description of Artificial Sequence: Synthetic oligonucleotide
  Target: SCNA; (-) strand; PAM type: NRG; PAM sequence: GAG
gtgctgtctaaatccatact

SEQ ID NO: 14503 - DNA, 20 bp, Artificial Sequence
  Description of Artificial Sequence: Synthetic oligonucleotide
  Target: SCNA; (-) strand; PAM type: NRG; PAM sequence: CAG
caactattaattctcaaaga

SEQ ID NO: 14504 - DNA, 20 bp, Artificial Sequence
  Description of Artificial Sequence: Synthetic oligonucleotide
  Target: SCNA; (-) strand; PAM type: NRG; PAM sequence: AAG
aagacaactattaattctca

SEQ ID NO: 14505 - DNA, 20 bp, Artificial Sequence
  Description of Artificial Sequence: Synthetic oligonucleotide
  Target: SCNA; (-) strand; PAM type: NRG; PAM sequence: AAG
tcatgcattcacacatctca

SEQ ID NO: 14506 - DNA, 20 bp, Artificial Sequence
  Description of Artificial Sequence: Synthetic oligonucleotide
  Target: SCNA; (-) strand; PAM type: NRG; PAM sequence: TAG
cagcgtttccttttcactac

SEQ ID NO: 14507 - DNA, 20 bp, Artificial Sequence
  Description of Artificial Sequence: Synthetic oligonucleotide
  Target: SCNA; (-) strand; PAM type: NRG; PAM sequence: CAG
tgagtgtatagaaagaaaaa

SEQ ID NO: 14508 - DNA, 20 bp, Artificial Sequence
  Description of Artificial Sequence: Synthetic oligonucleotide
  Target: SCNA; (-) strand; PAM type: NRG; PAM sequence: AAG
gttgtgagtgagtgtataga

SEQ ID NO: 14509 - DNA, 20 bp, Artificial Sequence
  Description of Artificial Sequence: Synthetic oligonucleotide
  Target: SCNA; (-) strand; PAM type: NRG; PAM sequence: TAG
gagtgttgtgagtgagtgta

SEQ ID NO: 14510 - DNA, 20 bp, Artificial Sequence
  Description of Artificial Sequence: Synthetic oligonucleotide
  Target: SCNA; (-) strand; PAM type: NRG; PAM sequence: GAG
aaatattgagtgttgtgagt

SEQ ID NO: 14511 - DNA, 20 bp, Artificial Sequence
  Description of Artificial Sequence: Synthetic oligonucleotide
  Target: SCNA; (-) strand; PAM type: NRG; PAM sequence: GAG
ccggaaatattgagtgttgt

SEQ ID NO: 14512 - DNA, 20 bp, Artificial Sequence
  Description of Artificial Sequence: Synthetic oligonucleotide
  Target: SCNA; (-) strand; PAM type: NRG; PAM sequence: GAG
tattgtgttccggaaatatt

SEQ ID NO: 14513 - DNA, 20 bp, Artificial Sequence
  Description of Artificial Sequence: Synthetic oligonucleotide
  Target: SCNA; (-) strand; PAM type: NRG; PAM sequence: CGG
gaaccggaaatattgtgttc

SEQ ID NO: 14514 - DNA, 20 bp, Artificial Sequence
  Description of Artificial Sequence: Synthetic oligonucleotide
  Target: SCNA; (-) strand; PAM type: NRG; PAM sequence: CGG
atgtggtgtcagaaatgaac

SEQ ID NO: 14515 - DNA, 20 bp, Artificial Sequence
  Description of Artificial Sequence: Synthetic oligonucleotide
  Target: SCNA; (-) strand; PAM type: NRG; PAM sequence: CAG
cccacacacacatgtggtgt

SEQ ID NO: 14516 - DNA, 20 bp, Artificial Sequence
  Description of Artificial Sequence: Synthetic oligonucleotide
  Target: SCNA; (-) strand; PAM type: NRG; PAM sequence: TGG
acacaccccacacacacatg

SEQ ID NO: 14517 - DNA, 20 bp, Artificial Sequence
  Description of Artificial Sequence: Synthetic oligonucleotide
  Target: SCNA; (-) strand; PAM type: NRG; PAM sequence: TAG
aatgggagaattgcttggtg

SEQ ID NO: 14518 - DNA, 20 bp, Artificial Sequence
  Description of Artificial Sequence: Synthetic oligonucleotide
  Target: SCNA; (-) strand; PAM type: NRG; PAM sequence: TGG
caaagaatgggagaattgct

SEQ ID NO: 14519 - DNA, 20 bp, Artificial Sequence
  Description of Artificial Sequence: Synthetic oligonucleotide
  Target: SCNA; (-) strand; PAM type: NRG; PAM sequence: GAG
ttggtagccacaaagaatgg

SEQ ID NO: 14520 - DNA, 20 bp, Artificial Sequence
  Description of Artificial Sequence: Synthetic oligonucleotide
  Target: SCNA; (-) strand; PAM type: NRG; PAM sequence: GGG
agttggtagccacaaagaat

SEQ ID NO: 14521 - DNA, 20 bp, Artificial Sequence
  Description of Artificial Sequence: Synthetic oligonucleotide
  Target: SCNA; (-) strand; PAM type: NRG; PAM sequence: TGG
cagttggtagccacaaagaa

SEQ ID NO: 14522 - DNA, 20 bp, Artificial Sequence
  Description of Artificial Sequence: Synthetic oligonucleotide
  Target: SCNA; (-) strand; PAM type: NRG; PAM sequence: AAG
acacccagttggtagccaca

SEQ ID NO: 14523 - DNA, 20 bp, Artificial Sequence
  Description of Artificial Sequence: Synthetic oligonucleotide
  Target: SCNA; (-) strand; PAM type: NRG; PAM sequence: TAG
attacgggacacccagttgg

SEQ ID NO: 14524 - DNA, 20 bp, Artificial Sequence
  Description of Artificial Sequence: Synthetic oligonucleotide
  Target: SCNA; (-) strand; PAM type: NRG; PAM sequence: TGG
tgaattacgggacacccagt

SEQ ID NO: 14525 - DNA, 20 bp, Artificial Sequence
  Description of Artificial Sequence: Synthetic oligonucleotide
  Target: SCNA; (-) strand; PAM type: NRG; PAM sequence: CAG
gatttgaattacgggacacc

SEQ ID NO: 14526 - DNA, 20 bp, Artificial Sequence
  Description of Artificial Sequence: Synthetic oligonucleotide
  Target: SCNA; (-) strand; PAM type: NRG; PAM sequence: GGG
tagtgtccgatttgaattac

SEQ ID NO: 14527 - DNA, 20 bp, Artificial Sequence
  Description of Artificial Sequence: Synthetic oligonucleotide
  Target: SCNA; (-) strand; PAM type: NRG; PAM sequence: CGG
atagtgtccgatttgaatta

SEQ ID NO: 14528 - DNA, 20 bp, Artificial Sequence
  Description of Artificial Sequence: Synthetic oligonucleotide
  Target: SCNA; (-) strand; PAM type: NRG; PAM sequence: TAG
caatgctaactccaggtaga

SEQ ID NO: 14529 - DNA, 20 bp, Artificial Sequence
  Description of Artificial Sequence: Synthetic oligonucleotide
  Target: SCNA; (-) strand; PAM type: NRG; PAM sequence: TAG
gggtcaatgctaactccagg

SEQ ID NO: 14530 - DNA, 20 bp, Artificial Sequence
  Description of Artificial Sequence: Synthetic oligonucleotide
  Target: SCNA; (-) strand; PAM type: NRG; PAM sequence: AGG
tgtgggtcaatgctaactcc

SEQ ID NO: 14531 - DNA, 20 bp, Artificial Sequence
  Description of Artificial Sequence: Synthetic oligonucleotide
  Target: SCNA; (-) strand; PAM type: NRG; PAM sequence: CAG
ctgtgggtcaatgctaactc

SEQ ID NO: 14532 - DNA, 20 bp, Artificial Sequence
  Description of Artificial Sequence: Synthetic oligonucleotide
  Target: SCNA; (-) strand; PAM type: NRG; PAM sequence: GGG
aaactgagtccttaacctgt

SEQ ID NO: 14533 - DNA, 20 bp, Artificial Sequence
  Description of Artificial Sequence: Synthetic oligonucleotide
  Target: SCNA; (-) strand; PAM type: NRG; PAM sequence: TGG
aaaactgagtccttaacctg

SEQ ID NO: 14534 - DNA, 20 bp, Artificial Sequence
  Description of Artificial Sequence: Synthetic oligonucleotide
  Target: SCNA; (-) strand; PAM type: NRG; PAM sequence: GAG
gggaaaaatcttgtaaaact

SEQ ID NO: 14535 - DNA, 20 bp, Artificial Sequence
  Description of Artificial Sequence: Synthetic oligonucleotide
  Target: SCNA; (-) strand; PAM type: NRG; PAM sequence: GGG
ttgtcatcttcagtgggaag

SEQ ID NO: 14536 - DNA, 20 bp, Artificial Sequence
  Description of Artificial Sequence: Synthetic oligonucleotide
  Target: SCNA; (-) strand; PAM type: NRG; PAM sequence: GGG
attgtcatcttcagtgggaa

SEQ ID NO: 14537 - DNA, 20 bp, Artificial Sequence
  Description of Artificial Sequence: Synthetic oligonucleotide
  Target: SCNA; (-) strand; PAM type: NRG; PAM sequence: AGG
gattgtcatcttcagtggga

SEQ ID NO: 14538 - DNA, 20 bp, Artificial Sequence
  Description of Artificial Sequence: Synthetic oligonucleotide
  Target: SCNA; (-) strand; PAM type: NRG; PAM sequence: AAG
tgattgtcatcttcagtggg

SEQ ID NO: 14539 - DNA, 20 bp, Artificial Sequence
  Description of Artificial Sequence: Synthetic oligonucleotide
  Target: SCNA; (-) strand; PAM type: NRG; PAM sequence: GGG
ttgtgattgtcatcttcagt

SEQ ID NO: 14540 - DNA, 20 bp, Artificial Sequence
  Description of Artificial Sequence: Synthetic oligonucleotide
  Target: SCNA; (-) strand; PAM type: NRG; PAM sequence: TGG
cttgtgattgtcatcttcag

SEQ ID NO: 14541 - DNA, 20 bp, Artificial Sequence
  Description of Artificial Sequence: Synthetic oligonucleotide
  Target: SCNA; (-) strand; PAM type: NRG; PAM sequence: CAG
ttgcttgtgattgtcatctt

SEQ ID NO: 14542 - DNA, 20 bp, Artificial Sequence
  Description of Artificial Sequence: Synthetic oligonucleotide
  Target: SCNA; (-) strand; PAM type: NRG; PAM sequence: AGG
cagaagctatgagtaacatg

SEQ ID NO: 14543 - DNA, 20 bp, Artificial Sequence
  Description of Artificial Sequence: Synthetic oligonucleotide
  Target: SCNA; (-) strand; PAM type: NRG; PAM sequence: GAG
acagaagctatgagtaacat

SEQ ID NO: 14544 - DNA, 20 bp, Artificial Sequence
  Description of Artificial Sequence: Synthetic oligonucleotide
  Target: SCNA; (-) strand; PAM type: NRG; PAM sequence: GAG
acaagtcaaacagaagctat

SEQ ID NO: 14545 - DNA, 20 bp, Artificial Sequence
  Description of Artificial Sequence: Synthetic oligonucleotide
  Target: SCNA; (-) strand; PAM type: NRG; PAM sequence: AAG
tttgtagacaagtcaaacag

SEQ ID NO: 14546 - DNA, 20 bp, Artificial Sequence
  Description of Artificial Sequence: Synthetic oligonucleotide
  Target: SCNA; (-) strand; PAM type: NRG; PAM sequence: CAG
ggatttgtagacaagtcaaa

SEQ ID NO: 14547 - DNA, 20 bp, Artificial Sequence
  Description of Artificial Sequence: Synthetic oligonucleotide
  Target: SCNA; (-) strand; PAM type: NRG; PAM sequence: AAG
gagaccttggatttgtagac

SEQ ID NO: 14548 - DNA, 20 bp, Artificial Sequence
  Description of Artificial Sequence: Synthetic oligonucleotide
  Target: SCNA; (-) strand; PAM type: NRG; PAM sequence: TAG
ccgtggagaccttggatttg

SEQ ID NO: 14549 - DNA, 20 bp, Artificial Sequence
  Description of Artificial Sequence: Synthetic oligonucleotide
  Target: SCNA; (-) strand; PAM type: NRG; PAM sequence: TGG
ggagagggccgtggagacct

SEQ ID NO: 14550 - DNA, 20 bp, Artificial Sequence
  Description of Artificial Sequence: Synthetic oligonucleotide
  Target: SCNA; (-) strand; PAM type: NRG; PAM sequence: GAG
aacctgaggagagggccgtg

SEQ ID NO: 14551 - DNA, 20 bp, Artificial Sequence
  Description of Artificial Sequence: Synthetic oligonucleotide
  Target: SCNA; (-) strand; PAM type: NRG; PAM sequence: TGG
caaacctgaggagagggccg

SEQ ID NO: 14552 - DNA, 20 bp, Artificial Sequence
  Description of Artificial Sequence: Synthetic oligonucleotide
  Target: SCNA; (-) strand; PAM type: NRG; PAM sequence: GGG
aattatcaaacctgaggaga

SEQ ID NO: 14553 - DNA, 20 bp, Artificial Sequence
  Description of Artificial Sequence: Synthetic oligonucleotide
  Target: SCNA; (-) strand; PAM type: NRG; PAM sequence: AGG
aaattatcaaacctgaggag

SEQ ID NO: 14554 - DNA, 20 bp, Artificial Sequence
  Description of Artificial Sequence: Synthetic oligonucleotide
  Target: SCNA; (-) strand; PAM type: NRG; PAM sequence: GAG
caaattatcaaacctgagga

SEQ ID NO: 14555 - DNA, 20 bp, Artificial Sequence
  Description of Artificial Sequence: Synthetic oligonucleotide
  Target: SCNA; (-) strand; PAM type: NRG; PAM sequence: GAG
agcaaattatcaaacctgag

SEQ ID NO: 14556 - DNA, 20 bp, Artificial Sequence
  Description of Artificial Sequence: Synthetic oligonucleotide
  Target: SCNA; (-) strand; PAM type: NRG; PAM sequence: AGG
ctagcaaattatcaaacctg

SEQ ID NO: 14557 - DNA, 20 bp, Artificial Sequence
  Description of Artificial Sequence: Synthetic oligonucleotide
  Target: SCNA; (-) strand; PAM type: NRG; PAM sequence: GAG
actagcaaattatcaaacct

SEQ ID NO: 14558 - DNA, 20 bp, Artificial Sequence
  Description of Artificial Sequence: Synthetic oligonucleotide
  Target: SCNA; (-) strand; PAM type: NRG; PAM sequence: TAG
ctgaagtctgtgaatcacac

SEQ ID NO: 14559 - DNA, 20 bp, Artificial Sequence
  Description of Artificial Sequence: Synthetic oligonucleotide
  Target: SCNA; (-) strand; PAM type: NRG; PAM sequence: AAG
gtaagcaaactgttttcctg

SEQ ID NO: 14560 - DNA, 20 bp, Artificial Sequence
  Description of Artificial Sequence: Synthetic oligonucleotide
  Target: SCNA; (-) strand; PAM type: NRG; PAM sequence: AAG
taacaaactggtaatctagt

SEQ ID NO: 14561 - DNA, 20 bp, Artificial Sequence
  Description of Artificial Sequence: Synthetic oligonucleotide
  Target: SCNA; (-) strand; PAM type: NRG; PAM sequence: TAG
tttataacaaactggtaatc

SEQ ID NO: 14562 - DNA, 20 bp, Artificial Sequence
  Description of Artificial Sequence: Synthetic oligonucleotide
  Target: SCNA; (-) strand; PAM type: NRG; PAM sequence: TGG
tgtatccttttataacaaac

SEQ ID NO: 14563 - DNA, 20 bp, Artificial Sequence
  Description of Artificial Sequence: Synthetic oligonucleotide
  Target: SCNA; (-) strand; PAM type: NRG; PAM sequence: GAG
tcttccatctggctgttcct

SEQ ID NO: 14564 - DNA, 20 bp, Artificial Sequence
  Description of Artificial Sequence: Synthetic oligonucleotide
  Target: SCNA; (-) strand; PAM type: NRG; PAM sequence: TGG
ccctgtgcatctcttccatc

SEQ ID NO: 14565 - DNA, 20 bp, Artificial Sequence
  Description of Artificial Sequence: Synthetic oligonucleotide
  Target: SCNA; (-) strand; PAM type: NRG; PAM sequence: AAG
tgtgtccagagaaggcatgc

SEQ ID NO: 14566 - DNA, 20 bp, Artificial Sequence
  Description of Artificial Sequence: Synthetic oligonucleotide
  Target: SCNA; (-) strand; PAM type: NRG; PAM sequence: AGG
aattgtggtgtgtccagaga

SEQ ID NO: 14567 - DNA, 20 bp, Artificial Sequence
  Description of Artificial Sequence: Synthetic oligonucleotide
  Target: SCNA; (-) strand; PAM type: NRG; PAM sequence: AAG
gaattgtggtgtgtccagag

SEQ ID NO: 14568 - DNA, 20 bp, Artificial Sequence
  Description of Artificial Sequence: Synthetic oligonucleotide
  Target: SCNA; (-) strand; PAM type: NRG; PAM sequence: GAG
tgggaattgtggtgtgtcca

SEQ ID NO: 14569 - DNA, 20 bp, Artificial Sequence
  Description of Artificial Sequence: Synthetic oligonucleotide
  Target: SCNA; (-) strand; PAM type: NRG; PAM sequence: CAG
gctgggaattgtggtgtgtc

SEQ ID NO: 14570 - DNA, 20 bp, Artificial Sequence
  Description of Artificial Sequence: Synthetic oligonucleotide
  Target: SCNA; (-) strand; PAM type: NRG; PAM sequence: TGG
tgcagaggtgctgggaattg

SEQ ID NO: 14571 - DNA, 20 bp, Artificial Sequence
  Description of Artificial Sequence: Synthetic oligonucleotide
  Target: SCNA; (-) strand; PAM type: NRG; PAM sequence: GGG
ggtgaacatgcagaggtgct

SEQ ID NO: 14572 - DNA, 20 bp, Artificial Sequence
  Description of Artificial Sequence: Synthetic oligonucleotide
  Target: SCNA; (-) strand; PAM type: NRG; PAM sequence: TGG
aggtgaacatgcagaggtgc

SEQ ID NO: 14573 - DNA, 20 bp, Artificial Sequence
  Description of Artificial Sequence: Synthetic oligonucleotide
  Target: SCNA; (-) strand; PAM type: NRG; PAM sequence: AGG
tgaaataggtgaacatgcag

SEQ ID NO: 14574 - DNA, 20 bp, Artificial Sequence
  Description of Artificial Sequence: Synthetic oligonucleotide
  Target: SCNA; (-) strand; PAM type: NRG; PAM sequence: GAG
ttgaaataggtgaacatgca

SEQ ID NO: 14575 - DNA, 20 bp, Artificial Sequence
  Description of Artificial Sequence: Synthetic oligonucleotide
  Target: SCNA; (-) strand; PAM type: NRG; PAM sequence: CAG
ctttgaaataggtgaacatg

SEQ ID NO: 14576 - DNA, 20 bp, Artificial Sequence
  Description of Artificial Sequence: Synthetic oligonucleotide
  Target: SCNA; (-) strand; PAM type: NRG; PAM sequence: AGG
gattcagagtgctttgaaat

SEQ ID NO: 14577 - DNA, 20 bp, Artificial Sequence
  Description of Artificial Sequence: Synthetic oligonucleotide
  Target: SCNA; (-) strand; PAM type: NRG; PAM sequence: TAG
ggattcagagtgctttgaaa

SEQ ID NO: 14578 - DNA, 20 bp, Artificial Sequence
  Description of Artificial Sequence: Synthetic oligonucleotide
  Target: SCNA; (-) strand; PAM type: NRG; PAM sequence: GAG
tccctaaaagacaggattca

SEQ ID NO: 14579 - DNA, 20 bp, Artificial Sequence
  Description of Artificial Sequence: Synthetic oligonucleotide
  Target: SCNA; (-) strand; PAM type: NRG; PAM sequence: CAG
aatccctaaaagacaggatt

SEQ ID NO: 14580 - DNA, 20 bp, Artificial Sequence
  Description of Artificial Sequence: Synthetic oligonucleotide
  Target: SCNA; (-) strand; PAM type: NRG; PAM sequence: AGG
cataaaaatccctaaaagac

SEQ ID NO: 14581 - DNA, 20 bp, Artificial Sequence
  Description of Artificial Sequence: Synthetic oligonucleotide
  Target: SCNA; (-) strand; PAM type: NRG; PAM sequence: CAG
ccataaaaatccctaaaaga

SEQ ID NO: 14582 - DNA, 20 bp, Artificial Sequence
  Description of Artificial Sequence: Synthetic oligonucleotide
  Target: SCNA; (-) strand; PAM type: NRG; PAM sequence: AAG
gactccataaaaatccctaa

SEQ ID NO: 14583 - DNA, 20 bp, Artificial Sequence
  Description of Artificial Sequence: Synthetic oligonucleotide
  Target: SCNA; (-) strand; PAM type: NRG; PAM sequence: AAG
gcaacaatgcttccatgatg

SEQ ID NO: 14584 - DNA, 20 bp, Artificial Sequence
  Description of Artificial Sequence: Synthetic oligonucleotide
  Target: SCNA; (-) strand; PAM type: NRG; PAM sequence: AAG
gagctggagattgagttaat

SEQ ID NO: 14585 - DNA, 20 bp, Artificial Sequence
  Description of Artificial Sequence: Synthetic oligonucleotide
  Target: SCNA; (-) strand; PAM type: NRG; PAM sequence: GAG
gagaagaggagctggagatt

SEQ ID NO: 14586 - DNA, 20 bp, Artificial Sequence
  Description of Artificial Sequence: Synthetic oligonucleotide
  Target: SCNA; (-) strand; PAM type: NRG; PAM sequence: GAG
acgggagagaagaggagctg

SEQ ID NO: 14587 - DNA, 20 bp, Artificial Sequence
  Description of Artificial Sequence: Synthetic oligonucleotide
  Target: SCNA; (-) strand; PAM type: NRG; PAM sequence: TGG
ggacgggagagaagaggagc

SEQ ID NO: 14588 - DNA, 20 bp, Artificial Sequence
  Description of Artificial Sequence: Synthetic oligonucleotide
  Target: SCNA; (-) strand; PAM type: NRG; PAM sequence: GAG
ctggggacgggagagaagag

SEQ ID NO: 14589 - DNA, 20 bp, Artificial Sequence
  Description of Artificial Sequence: Synthetic oligonucleotide
  Target: SCNA; (-) strand; PAM type: NRG; PAM sequence: AGG
ttctggggacgggagagaag

SEQ ID NO: 14590 - DNA, 20 bp, Artificial Sequence
  Description of Artificial Sequence: Synthetic oligonucleotide
  Target: SCNA; (-) strand; PAM type: NRG; PAM sequence: GAG
cttctggggacgggagagaa

SEQ ID NO: 14591 - DNA, 20 bp, Artificial Sequence
  Description of Artificial Sequence: Synthetic oligonucleotide
  Target: SCNA; (-) strand; PAM type: NRG; PAM sequence: AAG
atcttctggggacgggagag

SEQ ID NO: 14592 - DNA, 20 bp, Artificial Sequence
  Description of Artificial Sequence: Synthetic oligonucleotide
  Target: SCNA; (-) strand; PAM type: NRG; PAM sequence: GAG
cacatcttctggggacggga

SEQ ID NO: 14593 - DNA, 20 bp, Artificial Sequence
  Description of Artificial Sequence: Synthetic oligonucleotide
  Target: SCNA; (-) strand; PAM type: NRG; PAM sequence: GAG
ttcacatcttctggggacgg

SEQ ID NO: 14594 - DNA, 20 bp, Artificial Sequence
  Description of Artificial Sequence: Synthetic oligonucleotide
  Target: SCNA; (-) strand; PAM type: NRG; PAM sequence: GGG
cattcacatcttctggggac

SEQ ID NO: 14595 - DNA, 20 bp, Artificial Sequence
  Description of Artificial Sequence: Synthetic oligonucleotide
  Target: SCNA; (-) strand; PAM type: NRG; PAM sequence: CGG
ccattcacatcttctgggga

SEQ ID NO: 14596 - DNA, 20 bp, Artificial Sequence
  Description of Artificial Sequence: Synthetic oligonucleotide
  Target: SCNA; (-) strand; PAM type: NRG; PAM sequence: GGG
ggccccattcacatcttctg

SEQ ID NO: 14597 - DNA, 20 bp, Artificial Sequence
  Description of Artificial Sequence: Synthetic oligonucleotide
  Target: SCNA; (-) strand; PAM type: NRG; PAM sequence: GGG
tggccccattcacatcttct

SEQ ID NO: 14598 - DNA, 20 bp, Artificial Sequence
  Description of Artificial Sequence: Synthetic oligonucleotide
  Target: SCNA; (-) strand; PAM type: NRG; PAM sequence: TGG
ttggccccattcacatcttc

SEQ ID NO: 14599 - DNA, 20 bp, Artificial Sequence
  Description of Artificial Sequence: Synthetic oligonucleotide
  Target: SCNA; (-) strand; PAM type: NRG; PAM sequence: TGG
gataagaagcttgaagcttt

SEQ ID NO: 14600 - DNA, 20 bp, Artificial Sequence
  Description of Artificial Sequence: Synthetic oligonucleotide
  Target: SCNA; (-) strand; PAM type: NRG; PAM sequence: AAG
aagccatgataagaagcttg

SEQ ID NO: 14601 - DNA, 20 bp, Artificial Sequence
  Description of Artificial Sequence: Synthetic oligonucleotide
  Target: SCNA; (-) strand; PAM type: NRG; PAM sequence: AAG
aaaggtcaagccatgataag

SEQ ID NO: 14602 - DNA, 20 bp, Artificial Sequence
  Description of Artificial Sequence: Synthetic oligonucleotide
  Target: SCNA; (-) strand; PAM type: NRG; PAM sequence: AAG
cagaaaggtcaagccatgat

SEQ ID NO: 14603 - DNA, 20 bp, Artificial Sequence
  Description of Artificial Sequence: Synthetic oligonucleotide
  Target: SCNA; (-) strand; PAM type: NRG; PAM sequence: AAG
ggctggtcaccagaaaggtc

SEQ ID NO: 14604 - DNA, 20 bp, Artificial Sequence
  Description of Artificial Sequence: Synthetic oligonucleotide
  Target: SCNA; (-) strand; PAM type: NRG; PAM sequence: AGG
atgggggctggtcaccagaa

SEQ ID NO: 14605 - DNA, 20 bp, Artificial Sequence
  Description of Artificial Sequence: Synthetic oligonucleotide
  Target: SCNA; (-) strand; PAM type: NRG; PAM sequence: AAG
gatgggggctggtcaccaga

SEQ ID NO: 14606 - DNA, 20 bp, Artificial Sequence
  Description of Artificial Sequence: Synthetic oligonucleotide
  Target: SCNA; (-) strand; PAM type: NRG; PAM sequence: CAG
cctggatgggggctggtcac

SEQ ID NO: 14607 - DNA, 20 bp, Artificial Sequence
  Description of Artificial Sequence: Synthetic oligonucleotide
  Target: SCNA; (-) strand; PAM type: NRG; PAM sequence: TGG
ctgggttcctggatgggggc

SEQ ID NO: 14608 - DNA, 20 bp, Artificial Sequence
  Description of Artificial Sequence: Synthetic oligonucleotide
  Target: SCNA; (-) strand; PAM type: NRG; PAM sequence: GGG
cttgctgggttcctggatgg

SEQ ID NO: 14609 - DNA, 20 bp, Artificial Sequence
  Description of Artificial Sequence: Synthetic oligonucleotide
  Target: SCNA; (-) strand; PAM type: NRG; PAM sequence: GGG
tcttgctgggttcctggatg

SEQ ID NO: 14610 - DNA, 20 bp, Artificial Sequence
  Description of Artificial Sequence: Synthetic oligonucleotide
  Target: SCNA; (-) strand; PAM type: NRG; PAM sequence: GGG
ctcttgctgggttcctggat

SEQ ID NO: 14611 - DNA, 20 bp, Artificial Sequence
  Description of Artificial Sequence: Synthetic oligonucleotide
  Target: SCNA; (-) strand; PAM type: NRG; PAM sequence: TGG
actcttgctgggttcctgga

SEQ ID NO: 14612 - DNA, 20 bp, Artificial Sequence
  Description of Artificial Sequence: Synthetic oligonucleotide
  Target: SCNA; (-) strand; PAM type: NRG; PAM sequence: TGG
agtgactcttgctgggttcc

SEQ ID NO: 14613 - DNA, 20 bp, Artificial Sequence
  Description of Artificial Sequence: Synthetic oligonucleotide
  Target: SCNA; (-) strand; PAM type: NRG; PAM sequence: GGG
ctaatgaagtgactcttgct

SEQ ID NO: 14614 - DNA, 20 bp, Artificial Sequence
  Description of Artificial Sequence: Synthetic oligonucleotide
  Target: SCNA; (-) strand; PAM type: NRG; PAM sequence: TGG
tctaatgaagtgactcttgc

SEQ ID NO: 14615 - DNA, 20 bp, Artificial Sequence
  Description of Artificial Sequence: Synthetic oligonucleotide
  Target: SCNA; (-) strand; PAM type: NRG; PAM sequence: AAG
tagcatcttctcttctaatg

SEQ ID NO: 14616 - DNA, 20 bp, Artificial Sequence
  Description of Artificial Sequence: Synthetic oligonucleotide
  Target: SCNA; (-) strand; PAM type: NRG; PAM sequence: TAG
ccttagtccctgggtgagag

SEQ ID NO: 14617 - DNA, 20 bp, Artificial Sequence
  Description of Artificial Sequence: Synthetic oligonucleotide
  Target: SCNA; (-) strand; PAM type: NRG; PAM sequence: GAG
gctccttagtccctgggtga

SEQ ID NO: 14618 - DNA, 20 bp, Artificial Sequence
  Description of Artificial Sequence: Synthetic oligonucleotide
  Target: SCNA; (-) strand; PAM type: NRG; PAM sequence: GAG
gagctccttagtccctgggt

SEQ ID NO: 14619 - DNA, 20 bp, Artificial Sequence
  Description of Artificial Sequence: Synthetic oligonucleotide
  Target: SCNA; (-) strand; PAM type: NRG; PAM sequence: GGG
gacagagctccttagtccct

SEQ ID NO: 14620 - DNA, 20 bp, Artificial Sequence
  Description of Artificial Sequence: Synthetic oligonucleotide
  Target: SCNA; (-) strand; PAM type: NRG; PAM sequence: TGG
tgacagagctccttagtccc

SEQ ID NO: 14621 - DNA, 20 bp, Artificial Sequence
  Description of Artificial Sequence: Synthetic oligonucleotide
  Target: SCNA; (-) strand; PAM type: NRG; PAM sequence: TAG
tgctttctgacagagctcct

SEQ ID NO: 14622 - DNA, 20 bp, Artificial Sequence
  Description of Artificial Sequence: Synthetic oligonucleotide
  Target: SCNA; (-) strand; PAM type: NRG; PAM sequence: GAG
tttgactctgctttctgaca

SEQ ID NO: 14623 - DNA, 20 bp, Artificial Sequence
  Description of Artificial Sequence: Synthetic oligonucleotide
  Target: SCNA; (-) strand; PAM type: NRG; PAM sequence: CAG
tctttgactctgctttctga

SEQ ID NO: 14624 - DNA, 20 bp, Artificial Sequence
  Description of Artificial Sequence: Synthetic oligonucleotide
  Target: SCNA; (-) strand; PAM type: NRG; PAM sequence: TGG
tcatcttttgttctaatatt

SEQ ID NO: 14625 - DNA, 20 bp, Artificial Sequence
  Description of Artificial Sequence: Synthetic oligonucleotide
  Target: SCNA; (-) strand; PAM type: NRG; PAM sequence: GGG
cctgagtagtaggggtgcta

SEQ ID NO: 14626 - DNA, 20 bp, Artificial Sequence
  Description of Artificial Sequence: Synthetic oligonucleotide
  Target: SCNA; (-) strand; PAM type: NRG; PAM sequence: AGG
tcctgagtagtaggggtgct

SEQ ID NO: 14627 - DNA, 20 bp, Artificial Sequence
  Description of Artificial Sequence: Synthetic oligonucleotide
  Target: SCNA; (-) strand; PAM type: NRG; PAM sequence: TAG
ttcctgagtagtaggggtgc

SEQ ID NO: 14628 - DNA, 20 bp, Artificial Sequence
  Description of Artificial Sequence: Synthetic oligonucleotide
  Target: SCNA; (-) strand; PAM type: NRG; PAM sequence: GGG
tgtaatttcctgagtagtag

SEQ ID NO: 14629 - DNA, 20 bp, Artificial Sequence
  Description of Artificial Sequence: Synthetic oligonucleotide
  Target: SCNA; (-) strand; PAM type: NRG; PAM sequence: GGG
ttgtaatttcctgagtagta

SEQ ID NO: 14630 - DNA, 20 bp, Artificial Sequence
  Description of Artificial Sequence: Synthetic oligonucleotide
  Target: SCNA; (-) strand; PAM type: NRG; PAM sequence: AGG
cttgtaatttcctgagtagt

SEQ ID NO: 14631 - DNA, 20 bp, Artificial Sequence
  Description of Artificial Sequence: Synthetic oligonucleotide
  Target: SCNA; (-) strand; PAM type: NRG; PAM sequence: TAG
ccttgtaatttcctgagtag

SEQ ID NO: 14632 - DNA, 20 bp, Artificial Sequence
  Description of Artificial Sequence: Synthetic oligonucleotide
  Target: SCNA; (-) strand; PAM type: NRG; PAM sequence: TAG
aacccttgtaatttcctgag

SEQ ID NO: 14633 - DNA, 20 bp, Artificial Sequence
  Description of Artificial Sequence: Synthetic oligonucleotide
  Target: SCNA; (-) strand; PAM type: NRG; PAM sequence: GAG
taaaacccttgtaatttcct

SEQ ID NO: 14634 - DNA, 20 bp, Artificial Sequence
  Description of Artificial Sequence: Synthetic oligonucleotide
  Target: SCNA; (-) strand; PAM type: NRG; PAM sequence: GAG
ctgcctccagttcttacaaa

SEQ ID NO: 14635 - DNA, 20 bp, Artificial Sequence
  Description of Artificial Sequence: Synthetic oligonucleotide
  Target: SCNA; (-) strand; PAM type: NRG; PAM sequence: AAG
ttctgcctccagttcttaca

SEQ ID NO: 14636 - DNA, 20 bp, Artificial Sequence
  Description of Artificial Sequence: Synthetic oligonucleotide
  Target: SCNA; (-) strand; PAM type: NRG; PAM sequence: CAG
atgtatttggtttctgcctc

SEQ ID NO: 14637 - DNA, 20 bp, Artificial Sequence
  Description of Artificial Sequence: Synthetic oligonucleotide
  Target: SCNA; (-) strand; PAM type: NRG; PAM sequence: TGG
catatatgaaaatatgtatt

SEQ ID NO: 14638 - DNA, 20 bp, Artificial Sequence
  Description of Artificial Sequence: Synthetic oligonucleotide
  Target: SCNA; (-) strand; PAM type: NRG; PAM sequence: TAG
tttctggcttatccagtatg

SEQ ID NO: 14639 - DNA, 20 bp, Artificial Sequence
  Description of Artificial Sequence: Synthetic oligonucleotide
  Target: SCNA; (-) strand; PAM type: NRG; PAM sequence: CAG
cctcatctttctggcttatc

SEQ ID NO: 14640 - DNA, 20 bp, Artificial Sequence
  Description of Artificial Sequence: Synthetic oligonucleotide
  Target: SCNA; (-) strand; PAM type: NRG; PAM sequence: TGG
aacatgtttcctcatctttc

SEQ ID NO: 14641 - DNA, 20 bp, Artificial Sequence
  Description of Artificial Sequence: Synthetic oligonucleotide
  Target: SCNA; (-) strand; PAM type: NRG; PAM sequence: GAG
cagaatctctgcactagtgt

SEQ ID NO: 14642 - DNA, 20 bp, Artificial Sequence
  Description of Artificial Sequence: Synthetic oligonucleotide
  Target: SCNA; (-) strand; PAM type: NRG; PAM sequence: TAG
ctttttcagaatctctgcac

SEQ ID NO: 14643 - DNA, 20 bp, Artificial Sequence
  Description of Artificial Sequence: Synthetic oligonucleotide
  Target: SCNA; (-) strand; PAM type: NRG; PAM sequence: CAG
attccaagtggggtcttttt

SEQ ID NO: 14644 - DNA, 20 bp, Artificial Sequence
  Description of Artificial Sequence: Synthetic oligonucleotide
  Target: SCNA; (-) strand; PAM type: NRG; PAM sequence: GGG
gtggtttggtattccaagtg

SEQ ID NO: 14645 - DNA, 20 bp, Artificial Sequence
  Description of Artificial Sequence: Synthetic oligonucleotide
  Target: SCNA; (-) strand; PAM type: NRG; PAM sequence: GGG
tgtggtttggtattccaagt

SEQ ID NO: 14646 - DNA, 20 bp, Artificial Sequence
  Description of Artificial Sequence: Synthetic oligonucleotide
  Target: SCNA; (-) strand; PAM type: NRG; PAM sequence: TGG
gtgtggtttggtattccaag

SEQ ID NO: 14647 - DNA, 20 bp, Artificial Sequence
  Description of Artificial Sequence: Synthetic oligonucleotide
  Target: SCNA; (-) strand; PAM type: NRG; PAM sequence: AAG
aatgtgtggtttggtattcc

SEQ ID NO: 14648 - DNA, 20 bp, Artificial Sequence
  Description of Artificial Sequence: Synthetic oligonucleotide
  Target: SCNA; (-) strand; PAM type: NRG; PAM sequence: TGG
gaacaatctaatgtgtggtt

SEQ ID NO: 14649 - DNA, 20 bp, Artificial Sequence
  Description of Artificial Sequence: Synthetic oligonucleotide
  Target: SCNA; (-) strand; PAM type: NRG; PAM sequence: TGG
gaacagaacaatctaatgtg

SEQ ID NO: 14650 - DNA, 20 bp, Artificial Sequence
  Description of Artificial Sequence: Synthetic oligonucleotide
  Target: SCNA; (-) strand; PAM type: NRG; PAM sequence: CAG
ctttggcacacaattgggaa

SEQ ID NO: 14651 - DNA, 20 bp, Artificial Sequence
  Description of Artificial Sequence: Synthetic oligonucleotide
  Target: SCNA; (-) strand; PAM type: NRG; PAM sequence: GGG
gtgcactttggcacacaatt

SEQ ID NO: 14652 - DNA, 20 bp, Artificial Sequence
  Description of Artificial Sequence: Synthetic oligonucleotide
  Target: SCNA; (-) strand; PAM type: NRG; PAM sequence: TGG
agtgcactttggcacacaat

SEQ ID NO: 14653 - DNA, 20 bp, Artificial Sequence
  Description of Artificial Sequence: Synthetic oligonucleotide
  Target: SCNA; (-) strand; PAM type: NRG; PAM sequence: TGG
aaacagttcagagtgcactt

SEQ ID NO: 14654 - DNA, 20 bp, Artificial Sequence
  Description of Artificial Sequence: Synthetic oligonucleotide
  Target: SCNA; (-) strand; PAM type: NRG; PAM sequence: GAG
ggctttaccaaaacagttca

SEQ ID NO: 14655 - DNA, 20 bp, Artificial Sequence
  Description of Artificial Sequence: Synthetic oligonucleotide
  Target: SCNA; (-) strand; PAM type: NRG; PAM sequence: CAG
tcggctttaccaaaacagtt

SEQ ID NO: 14656 - DNA, 20 bp, Artificial Sequence
  Description of Artificial Sequence: Synthetic oligonucleotide
  Target: SCNA; (-) strand; PAM type: NRG; PAM sequence: CAG
cacggtcggctttaccaaaa

SEQ ID NO: 14657 - DNA, 20 bp, Artificial Sequence
  Description of Artificial Sequence: Synthetic oligonucleotide
  Target: SCNA; (-) strand; PAM type: NRG; PAM sequence: CGG
gcctcatatgactccacggt

SEQ ID NO: 14658 - DNA, 20 bp, Artificial Sequence
  Description of Artificial Sequence: Synthetic oligonucleotide
  Target: SCNA; (-) strand; PAM type: NRG; PAM sequence: CGG
ttcagcctcatatgactcca

SEQ ID NO: 14659 - DNA, 20 bp, Artificial Sequence
  Description of Artificial Sequence: Synthetic oligonucleotide
  Target: SCNA; (-) strand; PAM type: NRG; PAM sequence: CAG
ttacattctcccaagttatt

SEQ ID NO: 14660 - DNA, 20 bp, Artificial Sequence
  Description of Artificial Sequence: Synthetic oligonucleotide
  Target: SCNA; (-) strand; PAM type: NRG; PAM sequence: AAG
ttgcagacttacattctccc

SEQ ID NO: 14661 - DNA, 20 bp, Artificial Sequence
  Description of Artificial Sequence: Synthetic oligonucleotide
  Target: SCNA; (-) strand; PAM type: NRG; PAM sequence: CAG
ccagtcctaggtttattttg

SEQ ID NO: 14662 - DNA, 20 bp, Artificial Sequence
  Description of Artificial Sequence: Synthetic oligonucleotide
  Target: SCNA; (-) strand; PAM type: NRG; PAM sequence: AGG
ctgaggatcaatccagtcct

SEQ ID NO: 14663 - DNA, 20 bp, Artificial Sequence
  Description of Artificial Sequence: Synthetic oligonucleotide
  Target: SCNA; (-) strand; PAM type: NRG; PAM sequence: TAG
cctgaggatcaatccagtcc

SEQ ID NO: 14664 - DNA, 20 bp, Artificial Sequence
  Description of Artificial Sequence: Synthetic oligonucleotide
  Target: SCNA; (-) strand; PAM type: NRG; PAM sequence: CAG
aagtggcctgaggatcaatc

SEQ ID NO: 14665 - DNA, 20 bp, Artificial Sequence
  Description of Artificial Sequence: Synthetic oligonucleotide
  Target: SCNA; (-) strand; PAM type: NRG; PAM sequence: AGG
ttcacctgccaagtggcctg

SEQ ID NO: 14666 - DNA, 20 bp, Artificial Sequence
  Description of Artificial Sequence: Synthetic oligonucleotide
  Target: SCNA; (-) strand; PAM type: NRG; PAM sequence: GAG
attcacctgccaagtggcct

SEQ ID NO: 14667 - DNA, 20 bp, Artificial Sequence
  Description of Artificial Sequence: Synthetic oligonucleotide
  Target: SCNA; (-) strand; PAM type: NRG; PAM sequence: TGG
cgagacattcacctgccaag

SEQ ID NO: 14668 - DNA, 20 bp, Artificial Sequence
  Description of Artificial Sequence: Synthetic oligonucleotide
  Target: SCNA; (-) strand; PAM type: NRG; PAM sequence: AAG
tcccgagacattcacctgcc

SEQ ID NO: 14669 - DNA, 20 bp, Artificial Sequence
  Description of Artificial Sequence: Synthetic oligonucleotide
  Target: SCNA; (-) strand; PAM type: NRG; PAM sequence: GAG
cttgtctcatattcactccc

SEQ ID NO: 14670 - DNA, 20 bp, Artificial Sequence
  Description of Artificial Sequence: Synthetic oligonucleotide
  Target: SCNA; (-) strand; PAM type: NRG; PAM sequence: AAG
gtcatataagccttttcagg

SEQ ID NO: 14671 - DNA, 20 bp, Artificial Sequence
  Description of Artificial Sequence: Synthetic oligonucleotide
  Target: SCNA; (-) strand; PAM type: NRG; PAM sequence: AGG
taagtcatataagccttttc

SEQ ID NO: 14672 - DNA, 20 bp, Artificial Sequence
  Description of Artificial Sequence: Synthetic oligonucleotide
  Target: SCNA; (-) strand; PAM type: NRG; PAM sequence: CAG
ttaagtcatataagcctttt

SEQ ID NO: 14673 - DNA, 20 bp, Artificial Sequence
  Description of Artificial Sequence: Synthetic oligonucleotide
  Target: SCNA; (-) strand; PAM type: NRG; PAM sequence: AAG
aaaagttctttaagtcatat

SEQ ID NO: 14674 - DNA, 20 bp, Artificial Sequence
  Description of Artificial Sequence: Synthetic oligonucleotide
  Target: SCNA; (-) strand; PAM type: NRG; PAM sequence: AAG
acttaaacaaaaagttcttt

SEQ ID NO: 14675 - DNA, 20 bp, Artificial Sequence
  Description of Artificial Sequence: Synthetic oligonucleotide
  Target: SCNA; (-) strand; PAM type: NRG; PAM sequence: AAG
ggaccaaacacttaaacaaa

SEQ ID NO: 14676 - DNA, 20 bp, Artificial Sequence
  Description of Artificial Sequence: Synthetic oligonucleotide
  Target: SCNA; (-) strand; PAM type: NRG; PAM sequence: GGG
tatatcttaatagtttattt

SEQ ID NO: 14677 - DNA, 20 bp, Artificial Sequence
  Description of Artificial Sequence: Synthetic oligonucleotide
  Target: SCNA; (-) strand; PAM type: NRG; PAM sequence: TGG
atatatcttaatagtttatt

SEQ ID NO: 14678 - DNA, 20 bp, Artificial Sequence
  Description of Artificial Sequence: Synthetic oligonucleotide
  Target: SCNA; (-) strand; PAM type: NRG; PAM sequence: TAG
aattactttatatatcttaa

SEQ ID NO: 14679 - DNA, 20 bp, Artificial Sequence
  Description of Artificial Sequence: Synthetic oligonucleotide
  Target: SCNA; (-) strand; PAM type: NRG; PAM sequence: CAG
atctgacggtaatttttgag

SEQ ID NO: 14680 - DNA, 20 bp, Artificial Sequence
  Description of Artificial Sequence: Synthetic oligonucleotide
  Target: SCNA; (-) strand; PAM type: NRG; PAM sequence: GAG
tttatctgacggtaattttt

SEQ ID NO: 14681 - DNA, 20 bp, Artificial Sequence
  Description of Artificial Sequence: Synthetic oligonucleotide
  Target: SCNA; (-) strand; PAM type: NRG; PAM sequence: CGG
ttcccttaatatttatctga

SEQ ID NO: 14682 - DNA, 20 bp, Artificial Sequence
  Description of Artificial Sequence: Synthetic oligonucleotide
  Target: SCNA; (-) strand; PAM type: NRG; PAM sequence: AAG
tggatacaaattctccttta

SEQ ID NO: 14683 - DNA, 20 bp, Artificial Sequence
  Description of Artificial Sequence: Synthetic oligonucleotide
  Target: SCNA; (-) strand; PAM type: NRG; PAM sequence: TGG
catgaatttaaggatttatg

SEQ ID NO: 14684 - DNA, 20 bp, Artificial Sequence
  Description of Artificial Sequence: Synthetic oligonucleotide
  Target: SCNA; (-) strand; PAM type: NRG; PAM sequence: AGG
aagttgtgaccatgaattta

SEQ ID NO: 14685 - DNA, 20 bp, Artificial Sequence
  Description of Artificial Sequence: Synthetic oligonucleotide
  Target: SCNA; (-) strand; PAM type: NRG; PAM sequence: AAG
aaagttgtgaccatgaattt

SEQ ID NO: 14686 - DNA, 20 bp, Artificial Sequence
  Description of Artificial Sequence: Synthetic oligonucleotide
  Target: SCNA; (-) strand; PAM type: NRG; PAM sequence: AAG
agaacaatttgagattagga

SEQ ID NO: 14687 - DNA, 20 bp, Artificial Sequence
  Description of Artificial Sequence: Synthetic oligonucleotide
  Target: SCNA; (-) strand; PAM type: NRG; PAM sequence: AGG
acctagaacaatttgagatt

SEQ ID NO: 14688 - DNA, 20 bp, Artificial Sequence
  Description of Artificial Sequence: Synthetic oligonucleotide
  Target: SCNA; (-) strand; PAM type: NRG; PAM sequence: TAG
gacctagaacaatttgagat

SEQ ID NO: 14689 - DNA, 20 bp, Artificial Sequence
  Description of Artificial Sequence: Synthetic oligonucleotide
  Target: SCNA; (-) strand; PAM type: NRG; PAM sequence: GAG
gcagtgacctagaacaattt

SEQ ID NO: 14690 - DNA, 20 bp, Artificial Sequence
  Description of Artificial Sequence: Synthetic oligonucleotide
  Target: SCNA; (-) strand; PAM type: NRG; PAM sequence: TAG
ctagactgatagcagtgacc

SEQ ID NO: 14691 - DNA, 20 bp, Artificial Sequence
  Description of Artificial Sequence: Synthetic oligonucleotide
  Target: SCNA; (-) strand; PAM type: NRG; PAM sequence: CAG
ggacagaactagactgatag

SEQ ID NO: 14692 - DNA, 20 bp, Artificial Sequence
  Description of Artificial Sequence: Synthetic oligonucleotide
  Target: SCNA; (-) strand; PAM type: NRG; PAM sequence: TAG
agaggacagaactagactga

SEQ ID NO: 14693 - DNA, 20 bp, Artificial Sequence
  Description of Artificial Sequence: Synthetic oligonucleotide
  Target: SCNA; (-) strand; PAM type: NRG; PAM sequence: TAG
taagaaatagaggacagaac

SEQ ID NO: 14694 - DNA, 20 bp, Artificial Sequence
  Description of Artificial Sequence: Synthetic oligonucleotide
  Target: SCNA; (-) strand; PAM type: NRG; PAM sequence: CAG
ttaaattaagaaatagagga

SEQ ID NO: 14695 - DNA, 20 bp, Artificial Sequence
  Description of Artificial Sequence: Synthetic oligonucleotide
  Target: SCNA; (-) strand; PAM type: NRG; PAM sequence: AGG
ggtattaaattaagaaatag

SEQ ID NO: 14696 - DNA, 20 bp, Artificial Sequence
  Description of Artificial Sequence: Synthetic oligonucleotide
  Target: SCNA; (-) strand; PAM type: NRG; PAM sequence: GAG
tggtattaaattaagaaata

SEQ ID NO: 14697 - DNA, 20 bp, Artificial Sequence
  Description of Artificial Sequence: Synthetic oligonucleotide
  Target: SCNA; (-) strand; PAM type: NRG; PAM sequence: TAG
attggtattaaattaagaaa

SEQ ID NO: 14698 - DNA, 20 bp, Artificial Sequence
  Description of Artificial Sequence: Synthetic oligonucleotide
  Target: SCNA; (-) strand; PAM type: NRG; PAM sequence: AAG
aaaagtattggtattaaatt

SEQ ID NO: 14699 - DNA, 20 bp, Artificial Sequence
  Description of Artificial Sequence: Synthetic oligonucleotide
  Target: SCNA; (-) strand; PAM type: NRG; PAM sequence: TGG
ttttaaaaatttaaaagtat

SEQ ID NO: 14700 - DNA, 20 bp, Artificial Sequence
  Description of Artificial Sequence: Synthetic oligonucleotide
  Target: SCNA; (-) strand; PAM type: NRG; PAM sequence: AAG
agcatattttaaaaatttaa

SEQ ID NO: 14701 - DNA, 20 bp, Artificial Sequence
  Description of Artificial Sequence: Synthetic oligonucleotide
  Target: SCNA; (-) strand; PAM type: NRG; PAM sequence: CAG
tattttaaatctacctaaag

SEQ ID NO: 14702 - DNA, 20 bp, Artificial Sequence
  Description of Artificial Sequence: Synthetic oligonucleotide
  Target: SCNA; (-) strand; PAM type: NRG; PAM sequence: AAG
atatattttaaatctaccta

SEQ ID NO: 14703 - DNA, 20 bp, Artificial Sequence
  Description of Artificial Sequence: Synthetic oligonucleotide
  Target: SCNA; (-) strand; PAM type: NRG; PAM sequence: AGG
aaggttagaaagtggcggtt

SEQ ID NO: 14704 - DNA, 20 bp, Artificial Sequence
  Description of Artificial Sequence: Synthetic oligonucleotide
  Target: SCNA; (-) strand; PAM type: NRG; PAM sequence: TAG
gaaggttagaaagtggcggt

SEQ ID NO: 14705 - DNA, 20 bp, Artificial Sequence
  Description of Artificial Sequence: Synthetic oligonucleotide
  Target: SCNA; (-) strand; PAM type: NRG; PAM sequence: CGG
tcaggaaggttagaaagtgg

SEQ ID NO: 14706 - DNA, 20 bp, Artificial Sequence
  Description of Artificial Sequence: Synthetic oligonucleotide
  Target: SCNA; (-) strand; PAM type: NRG; PAM sequence: TGG
atttcaggaaggttagaaag

SEQ ID NO: 14707 - DNA, 20 bp, Artificial Sequence
  Description of Artificial Sequence: Synthetic oligonucleotide
  Target: SCNA; (-) strand; PAM type: NRG; PAM sequence: AAG
tatatttcaggaaggttaga

SEQ ID NO: 14708 - DNA, 20 bp, Artificial Sequence
  Description of Artificial Sequence: Synthetic oligonucleotide
  Target: SCNA; (-) strand; PAM type: NRG; PAM sequence: TAG
acagtatatttcaggaaggt

SEQ ID NO: 14709 - DNA, 20 bp, Artificial Sequence
  Description of Artificial Sequence: Synthetic oligonucleotide
  Target: SCNA; (-) strand; PAM type: NRG; PAM sequence: AGG
ttgaacagtatatttcagga

SEQ ID NO: 14710 - DNA, 20 bp, Artificial Sequence
  Description of Artificial Sequence: Synthetic oligonucleotide
  Target: SCNA; (-) strand; PAM type: NRG; PAM sequence: AAG
attgaacagtatatttcagg

SEQ ID NO: 14711 - DNA, 20 bp, Artificial Sequence
  Description of Artificial Sequence: Synthetic oligonucleotide
  Target: SCNA; (-) strand; PAM type: NRG; PAM sequence: AGG
gttattgaacagtatatttc

SEQ ID NO: 14712 - DNA, 20 bp, Artificial Sequence
  Description of Artificial Sequence: Synthetic oligonucleotide
  Target: SCNA; (-) strand; PAM type: NRG; PAM sequence: CAG
tgttattgaacagtatattt

SEQ ID NO: 14713 - DNA, 20 bp, Artificial Sequence
  Description of Artificial Sequence: Synthetic oligonucleotide
  Target: SCNA; (-) strand; PAM type: NRG; PAM sequence: CAG
ggaaaggatttgttattgaa

SEQ ID NO: 14714 - DNA, 20 bp, Artificial Sequence
  Description of Artificial Sequence: Synthetic oligonucleotide
  Target: SCNA; (-) strand; PAM type: NRG; PAM sequence: AGG
agttatgtttaagcaaggaa

SEQ ID NO: 14715 - DNA, 20 bp, Artificial Sequence
  Description of Artificial Sequence: Synthetic oligonucleotide
  Target: SCNA; (-) strand; PAM type: NRG; PAM sequence: AAG
aagttatgtttaagcaagga

SEQ ID NO: 14716 - DNA, 20 bp, Artificial Sequence
  Description of Artificial Sequence: Synthetic oligonucleotide
  Target: SCNA; (-) strand; PAM type: NRG; PAM sequence: AGG
atttaagttatgtttaagca

SEQ ID NO: 14717 - DNA, 20 bp, Artificial Sequence
  Description of Artificial Sequence: Synthetic oligonucleotide
  Target: SCNA; (-) strand; PAM type: NRG; PAM sequence: AAG
tatttaagttatgtttaagc

SEQ ID NO: 14718 - DNA, 20 bp, Artificial Sequence
  Description of Artificial Sequence: Synthetic oligonucleotide
  Target: SCNA; (-) strand; PAM type: NRG; PAM sequence: AAG
gttttatttaagttatgttt

SEQ ID NO: 14719 - DNA, 20 bp, Artificial Sequence
  Description of Artificial Sequence: Synthetic oligonucleotide
  Target: SCNA; (-) strand; PAM type: NRG; PAM sequence: AAG
gtaagtttcttgttttattt

SEQ ID NO: 14720 - DNA, 20 bp, Artificial Sequence
  Description of Artificial Sequence: Synthetic oligonucleotide
  Target: SCNA; (-) strand; PAM type: NRG; PAM sequence: AAG
ttacactagagagaaatggt

SEQ ID NO: 14721 - DNA, 20 bp, Artificial Sequence
  Description of Artificial Sequence: Synthetic oligonucleotide
  Target: SCNA; (-) strand; PAM type: NRG; PAM sequence: TGG
catcttacactagagagaaa

SEQ ID NO: 14722 - DNA, 20 bp, Artificial Sequence
  Description of Artificial Sequence: Synthetic oligonucleotide
  Target: SCNA; (-) strand; PAM type: NRG; PAM sequence: GAG
atgtgtcatcttacactaga

SEQ ID NO: 14723 - DNA, 20 bp, Artificial Sequence
  Description of Artificial Sequence: Synthetic oligonucleotide
  Target: SCNA; (-) strand; PAM type: NRG; PAM sequence: GAG
gcatgtgtcatcttacacta

SEQ ID NO: 14724 - DNA, 20 bp, Artificial Sequence
  Description of Artificial Sequence: Synthetic oligonucleotide
  Target: SCNA; (-) strand; PAM type: NRG; PAM sequence: TAG
ctgcatgtgtcatcttacac

SEQ ID NO: 14725 - DNA, 20 bp, Artificial Sequence
  Description of Artificial Sequence: Synthetic oligonucleotide
  Target: SCNA; (-) strand; PAM type: NRG; PAM sequence: AAG
agagactactacagagtgct

SEQ ID NO: 14726 - DNA, 20 bp, Artificial Sequence
  Description of Artificial Sequence: Synthetic oligonucleotide
  Target: SCNA; (-) strand; PAM type: NRG; PAM sequence: GAG
attgaagagagactactaca

SEQ ID NO: 14727 - DNA, 20 bp, Artificial Sequence
  Description of Artificial Sequence: Synthetic oligonucleotide
  Target: SCNA; (-) strand; PAM type: NRG; PAM sequence: CAG
taattgaagagagactacta

SEQ ID NO: 14728 - DNA, 20 bp, Artificial Sequence
  Description of Artificial Sequence: Synthetic oligonucleotide
  Target: SCNA; (-) strand; PAM type: NRG; PAM sequence: GAG
cttttttacctaattgaaga

SEQ ID NO: 14729 - DNA, 20 bp, Artificial Sequence
  Description of Artificial Sequence: Synthetic oligonucleotide
  Target: SCNA; (-) strand; PAM type: NRG; PAM sequence: GAG
tccttttttacctaattgaa

SEQ ID NO: 14730 - DNA, 20 bp, Artificial Sequence
  Description of Artificial Sequence: Synthetic oligonucleotide
  Target: SCNA; (-) strand; PAM type: NRG; PAM sequence: AAG
cttccttttttacctaattg

SEQ ID NO: 14731 - DNA, 20 bp, Artificial Sequence
  Description of Artificial Sequence: Synthetic oligonucleotide
  Target: SCNA; (-) strand; PAM type: NRG; PAM sequence: TAG
gactataaggatggttacca

SEQ ID NO: 14732 - DNA, 20 bp, Artificial Sequence
  Description of Artificial Sequence: Synthetic oligonucleotide
  Target: SCNA; (-) strand; PAM type: NRG; PAM sequence: TGG
ggaatgagtgactataagga

SEQ ID NO: 14733 - DNA, 20 bp, Artificial Sequence
  Description of Artificial Sequence: Synthetic oligonucleotide
  Target: SCNA; (-) strand; PAM type: NRG; PAM sequence: AGG
aggaggaatgagtgactata

SEQ ID NO: 14734 - DNA, 20 bp, Artificial Sequence
  Description of Artificial Sequence: Synthetic oligonucleotide
  Target: SCNA; (-) strand; PAM type: NRG; PAM sequence: AAG
aaggaggaatgagtgactat

SEQ ID NO: 14735 - DNA, 20 bp, Artificial Sequence
  Description of Artificial Sequence: Synthetic oligonucleotide
  Target: SCNA; (-) strand; PAM type: NRG; PAM sequence: GAG
gtgaggaaggaaggaggaat

SEQ ID NO: 14736 - DNA, 20 bp, Artificial Sequence
  Description of Artificial Sequence: Synthetic oligonucleotide
  Target: SCNA; (-) strand; PAM type: NRG; PAM sequence: AGG
gcgctggtgaggaaggaagg

SEQ ID NO: 14737 - DNA, 20 bp, Artificial Sequence
  Description of Artificial Sequence: Synthetic oligonucleotide
  Target: SCNA; (-) strand; PAM type: NRG; PAM sequence: GAG
ggcgctggtgaggaaggaag

SEQ ID NO: 14738 - DNA, 20 bp, Artificial Sequence
  Description of Artificial Sequence: Synthetic oligonucleotide
  Target: SCNA; (-) strand; PAM type: NRG; PAM sequence: AGG
tgggcgctggtgaggaagga

SEQ ID NO: 14739 - DNA, 20 bp, Artificial Sequence
  Description of Artificial Sequence: Synthetic oligonucleotide
  Target: SCNA; (-) strand; PAM type: NRG; PAM sequence: AAG
ttgggcgctggtgaggaagg

SEQ ID NO: 14740 - DNA, 20 bp, Artificial Sequence
  Description of Artificial Sequence: Synthetic oligonucleotide
  Target: SCNA; (-) strand; PAM type: NRG; PAM sequence: AGG
atattgggcgctggtgagga

SEQ ID NO: 14741 - DNA, 20 bp, Artificial Sequence
  Description of Artificial Sequence: Synthetic oligonucleotide
  Target: SCNA; (-) strand; PAM type: NRG; PAM sequence: AAG
tatattgggcgctggtgagg

SEQ ID NO: 14742 - DNA, 20 bp, Artificial Sequence
  Description of Artificial Sequence: Synthetic oligonucleotide
  Target: SCNA; (-) strand; PAM type: NRG; PAM sequence: AGG
atatatattgggcgctggtg

SEQ ID NO: 14743 - DNA, 20 bp, Artificial Sequence
  Description of Artificial Sequence: Synthetic oligonucleotide
  Target: SCNA; (-) strand; PAM type: NRG; PAM sequence: GAG
gatatatattgggcgctggt

SEQ ID NO: 14744 - DNA, 20 bp, Artificial Sequence
  Description of Artificial Sequence: Synthetic oligonucleotide
  Target: SCNA; (-) strand; PAM type: NRG; PAM sequence: TGG
atgtgatatatattgggcgc

SEQ ID NO: 14745 - DNA, 20 bp, Artificial Sequence
  Description of Artificial Sequence: Synthetic oligonucleotide
  Target: SCNA; (-) strand; PAM type: NRG; PAM sequence: GGG
tgagtaatgtgatatatatt

SEQ ID NO: 14746 - DNA, 20 bp, Artificial Sequence
  Description of Artificial Sequence: Synthetic oligonucleotide
  Target: SCNA; (-) strand; PAM type: NRG; PAM sequence: TGG
atgagtaatgtgatatatat

SEQ ID NO: 14747 - DNA, 20 bp, Artificial Sequence
  Description of Artificial Sequence: Synthetic oligonucleotide
  Target: SCNA; (-) strand; PAM type: NRG; PAM sequence: GAG
agcagtttatatgtattcat

SEQ ID NO: 14748 - DNA, 20 bp, Artificial Sequence
  Description of Artificial Sequence: Synthetic oligonucleotide
  Target: SCNA; (-) strand; PAM type: NRG; PAM sequence: CAG
gaatattctagacatgctag

SEQ ID NO: 14749 - DNA, 20 bp, Artificial Sequence
  Description of Artificial Sequence: Synthetic oligonucleotide
  Target: SCNA; (-) strand; PAM type: NRG; PAM sequence: TAG
acagaatattctagacatgc

SEQ ID NO: 14750 - DNA, 20 bp, Artificial Sequence
  Description of Artificial Sequence: Synthetic oligonucleotide
  Target: SCNA; (-) strand; PAM type: NRG; PAM sequence: TAG
aatttcaagacagaatattc

SEQ ID NO: 14751 - DNA, 20 bp, Artificial Sequence
  Description of Artificial Sequence: Synthetic oligonucleotide
  Target: SCNA; (-) strand; PAM type: NRG; PAM sequence: CAG
tagaaagtataatttcaaga

SEQ ID NO: 14752 - DNA, 20 bp, Artificial Sequence
  Description of Artificial Sequence: Synthetic oligonucleotide
  Target: SCNA; (-) strand; PAM type: NRG; PAM sequence: AAG
ctagtagaaagtataatttc

SEQ ID NO: 14753 - DNA, 20 bp, Artificial Sequence
  Description of Artificial Sequence: Synthetic oligonucleotide
  Target: SCNA; (-) strand; PAM type: NRG; PAM sequence: AAG
ttctaaaagtcactagtaga

SEQ ID NO: 14754 - DNA, 20 bp, Artificial Sequence
  Description of Artificial Sequence: Synthetic oligonucleotide
  Target: SCNA; (-) strand; PAM type: NRG; PAM sequence: TAG
tcatttctaaaagtcactag

SEQ ID NO: 14755 - DNA, 20 bp, Artificial Sequence
  Description of Artificial Sequence: Synthetic oligonucleotide
  Target: SCNA; (-) strand; PAM type: NRG; PAM sequence: TAG
tagtcatttctaaaagtcac

SEQ ID NO: 14756 - DNA, 20 bp, Artificial Sequence
  Description of Artificial Sequence: Synthetic oligonucleotide
  Target: SCNA; (-) strand; PAM type: NRG; PAM sequence: AAG
tggggcatagtcatttctaa

SEQ ID NO: 14757 - DNA, 20 bp, Artificial Sequence
  Description of Artificial Sequence: Synthetic oligonucleotide
  Target: SCNA; (-) strand; PAM type: NRG; PAM sequence: TAG
tttttaattattctggggca

SEQ ID NO: 14758 - DNA, 20 bp, Artificial Sequence
  Description of Artificial Sequence: Synthetic oligonucleotide
  Target: SCNA; (-) strand; PAM type: NRG; PAM sequence: GGG
ttctctttttaattattctg

SEQ ID NO: 14759 - DNA, 20 bp, Artificial Sequence
  Description of Artificial Sequence: Synthetic oligonucleotide
  Target: SCNA; (-) strand; PAM type: NRG; PAM sequence: GGG
tttctctttttaattattct

SEQ ID NO: 14760 - DNA, 20 bp, Artificial Sequence
  Description of Artificial Sequence: Synthetic oligonucleotide
  Target: SCNA; (-) strand; PAM type: NRG; PAM sequence: TGG
gtttctctttttaattattc

SEQ ID NO: 14761 - DNA, 20 bp, Artificial Sequence
  Description of Artificial Sequence: Synthetic oligonucleotide
  Target: SCNA; (-) strand; PAM type: NRG; PAM sequence: TGG
aaattaatttaaaaattatt

SEQ ID NO: 14762 - DNA, 20 bp, Artificial Sequence
  Description of Artificial Sequence: Synthetic oligonucleotide
  Target: SCNA; (-) strand; PAM type: NRG; PAM sequence: TGG
ggtgctgaaaataaacttga

SEQ ID NO: 14763 - DNA, 20 bp, Artificial Sequence
  Description of Artificial Sequence: Synthetic oligonucleotide
  Target: SCNA; (-) strand; PAM type: NRG; PAM sequence: GGG
aagatctattaactccccat

SEQ ID NO: 14764 - DNA, 20 bp, Artificial Sequence
  Description of Artificial Sequence: Synthetic oligonucleotide
  Target: SCNA; (-) strand; PAM type: NRG; PAM sequence: TGG
gaagatctattaactcccca

SEQ ID NO: 14765 - DNA, 20 bp, Artificial Sequence
  Description of Artificial Sequence: Synthetic oligonucleotide
  Target: SCNA; (-) strand; PAM type: NRG; PAM sequence: AAG
aaggtttttctctttcaggg

SEQ ID NO: 14766 - DNA, 20 bp, Artificial Sequence
  Description of Artificial Sequence: Synthetic oligonucleotide
  Target: SCNA; (-) strand; PAM type: NRG; PAM sequence: GGG
ggaaaggtttttctctttca

SEQ ID NO: 14767 - DNA, 20 bp, Artificial Sequence
  Description of Artificial Sequence: Synthetic oligonucleotide
  Target: SCNA; (-) strand; PAM type: NRG; PAM sequence: AGG
aggaaaggtttttctctttc

SEQ ID NO: 14768 - DNA, 20 bp, Artificial Sequence
  Description of Artificial Sequence: Synthetic oligonucleotide
  Target: SCNA; (-) strand; PAM type: NRG; PAM sequence: CAG
taggaaaggtttttctcttt

SEQ ID NO: 14769 - DNA, 20 bp, Artificial Sequence
  Description of Artificial Sequence: Synthetic oligonucleotide
  Target: SCNA; (-) strand; PAM type: NRG; PAM sequence: AGG
ctaggatttttccttaggaa

SEQ ID NO: 14770 - DNA, 20 bp, Artificial Sequence
  Description of Artificial Sequence: Synthetic oligonucleotide
  Target: SCNA; (-) strand; PAM type: NRG; PAM sequence: AAG
tctaggatttttccttagga

SEQ ID NO: 14771 - DNA, 20 bp, Artificial Sequence
  Description of Artificial Sequence: Synthetic oligonucleotide
  Target: SCNA; (-) strand; PAM type: NRG; PAM sequence: AGG
gaattctaggatttttcctt

SEQ ID NO: 14772 - DNA, 20 bp, Artificial Sequence
  Description of Artificial Sequence: Synthetic oligonucleotide
  Target: SCNA; (-) strand; PAM type: NRG; PAM sequence: TAG
tgaattctaggatttttcct

SEQ ID NO: 14773 - DNA, 20 bp, Artificial Sequence
  Description of Artificial Sequence: Synthetic oligonucleotide
  Target: SCNA; (-) strand; PAM type: NRG; PAM sequence: AGG
ttgccaaatatatgaattct

SEQ ID NO: 14774 - DNA, 20 bp, Artificial Sequence
  Description of Artificial Sequence: Synthetic oligonucleotide
  Target: SCNA; (-) strand; PAM type: NRG; PAM sequence: TAG
gttgccaaatatatgaattc

SEQ ID NO: 14775 - DNA, 20 bp, Artificial Sequence
  Description of Artificial Sequence: Synthetic oligonucleotide
  Target: SCNA; (-) strand; PAM type: NRG; PAM sequence: TGG
ctagactgataaaaatttca

SEQ ID NO: 14776 - DNA, 20 bp, Artificial Sequence
  Description of Artificial Sequence: Synthetic oligonucleotide
  Target: SCNA; (-) strand; PAM type: NRG; PAM sequence: TAG
cttaaaggagatcaattctc

SEQ ID NO: 14777 - DNA, 20 bp, Artificial Sequence
  Description of Artificial Sequence: Synthetic oligonucleotide
  Target: SCNA; (-) strand; PAM type: NRG; PAM sequence: GAG
ctaccagagtcaccttaaag

SEQ ID NO: 14778 - DNA, 20 bp, Artificial Sequence
  Description of Artificial Sequence: Synthetic oligonucleotide
  Target: SCNA; (-) strand; PAM type: NRG; PAM sequence: AGG
aactaccagagtcaccttaa

SEQ ID NO: 14779 - DNA, 20 bp, Artificial Sequence
  Description of Artificial Sequence: Synthetic oligonucleotide
  Target: SCNA; (-) strand; PAM type: NRG; PAM sequence: AAG
gaactaccagagtcacctta

SEQ ID NO: 14780 - DNA, 20 bp, Artificial Sequence
  Description of Artificial Sequence: Synthetic oligonucleotide
  Target: SCNA; (-) strand; PAM type: NRG; PAM sequence: GAG
aaacatcgttggaactacca

SEQ ID NO: 14781 - DNA, 20 bp, Artificial Sequence
  Description of Artificial Sequence: Synthetic oligonucleotide
  Target: SCNA; (-) strand; PAM type: NRG; PAM sequence: CAG
ttaaacatcgttggaactac

SEQ ID NO: 14782 - DNA, 20 bp, Artificial Sequence
  Description of Artificial Sequence: Synthetic oligonucleotide
  Target: SCNA; (-) strand; PAM type: NRG; PAM sequence: TGG
gaaatgcctttaaacatcgt

SEQ ID NO: 14783 - DNA, 20 bp, Artificial Sequence
  Description of Artificial Sequence: Synthetic oligonucleotide
  Target: SCNA; (-) strand; PAM type: NRG; PAM sequence: AGG
ctttttttttttttttttac

SEQ ID NO: 14784 - DNA, 20 bp, Artificial Sequence
  Description of Artificial Sequence: Synthetic oligonucleotide
  Target: SCNA; (-) strand; PAM type: NRG; PAM sequence: CAG
tcttttttttttttttttta

SEQ ID NO: 14785 - DNA, 20 bp, Artificial Sequence
  Description of Artificial Sequence: Synthetic oligonucleotide
  Target: SCNA; (-) strand; PAM type: NRG; PAM sequence: CAG
cactttttttttttaatcat

SEQ ID NO: 14786 - DNA, 20 bp, Artificial Sequence
  Description of Artificial Sequence: Synthetic oligonucleotide
  Target: SCNA; (-) strand; PAM type: NRG; PAM sequence: CAG
gtggttaactttgtttaact

SEQ ID NO: 14787 - DNA, 20 bp, Artificial Sequence
  Description of Artificial Sequence: Synthetic oligonucleotide
  Target: SCNA; (-) strand; PAM type: NRG; PAM sequence: TGG
ttcaaggctctgagagaatg

SEQ ID NO: 14788 - DNA, 20 bp, Artificial Sequence
  Description of Artificial Sequence: Synthetic oligonucleotide
  Target: SCNA; (-) strand; PAM type: NRG; PAM sequence: GAG
tagcacattcaaggctctga

SEQ ID NO: 14789 - DNA, 20 bp, Artificial Sequence
  Description of Artificial Sequence: Synthetic oligonucleotide
  Target: SCNA; (-) strand; PAM type: NRG; PAM sequence: GAG
attagcacattcaaggctct

SEQ ID NO: 14790 - DNA, 20 bp, Artificial Sequence
  Description of Artificial Sequence: Synthetic oligonucleotide
  Target: SCNA; (-) strand; PAM type: NRG; PAM sequence: AGG
agcacatattagcacattca

SEQ ID NO: 14791 - DNA, 20 bp, Artificial Sequence
  Description of Artificial Sequence: Synthetic oligonucleotide
  Target: SCNA; (-) strand; PAM type: NRG; PAM sequence: AAG
tagcacatattagcacattc

SEQ ID NO: 14792 - DNA, 20 bp, Artificial Sequence
  Description of Artificial Sequence: Synthetic oligonucleotide
  Target: SCNA; (-) strand; PAM type: NRG; PAM sequence: TAG
taagacacattagcacatat

SEQ ID NO: 14793 - DNA, 20 bp, Artificial Sequence
  Description of Artificial Sequence: Synthetic oligonucleotide
  Target: SCNA; (-) strand; PAM type: NRG; PAM sequence: TAG
tagagagccataagacacat

SEQ ID NO: 14794 - DNA, 20 bp, Artificial Sequence
  Description of Artificial Sequence: Synthetic oligonucleotide
  Target: SCNA; (-) strand; PAM type: NRG; PAM sequence: AAG
caccctccttagagagccat

SEQ ID NO: 14795 - DNA, 20 bp, Artificial Sequence
  Description of Artificial Sequence: Synthetic oligonucleotide
  Target: SCNA; (-) strand; PAM type: NRG; PAM sequence: GAG
ttgactacaccctccttaga

SEQ ID NO: 14796 - DNA, 20 bp, Artificial Sequence
  Description of Artificial Sequence: Synthetic oligonucleotide
  Target: SCNA; (-) strand; PAM type: NRG; PAM sequence: GAG
ttttgactacaccctcctta

SEQ ID NO: 14797 - DNA, 20 bp, Artificial Sequence
  Description of Artificial Sequence: Synthetic oligonucleotide
  Target: SCNA; (-) strand; PAM type: NRG; PAM sequence: TAG
gattttgactacaccctcct

SEQ ID NO: 14798 - DNA, 20 bp, Artificial Sequence
  Description of Artificial Sequence: Synthetic oligonucleotide
  Target: SCNA; (-) strand; PAM type: NRG; PAM sequence: AAG
ccgggaactaagcagtgtag

SEQ ID NO: 14799 - DNA, 20 bp, Artificial Sequence
  Description of Artificial Sequence: Synthetic oligonucleotide
  Target: SCNA; (-) strand; PAM type: NRG; PAM sequence: TAG
ttcccgggaactaagcagtg

SEQ ID NO: 14800 - DNA, 20 bp, Artificial Sequence
  Description of Artificial Sequence: Synthetic oligonucleotide
  Target: SCNA; (-) strand; PAM type: NRG; PAM sequence: CAG
gtgggttcccgggaactaag

SEQ ID NO: 14801 - DNA, 20 bp, Artificial Sequence
  Description of Artificial Sequence: Synthetic oligonucleotide
  Target: SCNA; (-) strand; PAM type: NRG; PAM sequence: AAG
aaagtgggttcccgggaact

SEQ ID NO: 14802 - DNA, 20 bp, Artificial Sequence
  Description of Artificial Sequence: Synthetic oligonucleotide
  Target: SCNA; (-) strand; PAM type: NRG; PAM sequence: GGG
aaaaaaaaaagtgggttccc

SEQ ID NO: 14803 - DNA, 20 bp, Artificial Sequence
  Description of Artificial Sequence: Synthetic oligonucleotide
  Target: SCNA; (-) strand; PAM type: NRG; PAM sequence: CGG
aaaaaaaaaaagtgggttcc

SEQ ID NO: 14804 - DNA, 20 bp, Artificial Sequence
  Description of Artificial Sequence: Synthetic oligonucleotide
  Target: SCNA; (-) strand; PAM type: NRG; PAM sequence: GGG
aataaaaaaaaaaaaaaagt

SEQ ID NO: 14805 - DNA, 20 bp, Artificial Sequence
  Description of Artificial Sequence: Synthetic oligonucleotide
  Target: SCNA; (-) strand; PAM type: NRG; PAM sequence: TGG
gaataaaaaaaaaaaaaaag

SEQ ID NO: 14806 - DNA, 20 bp, Artificial Sequence
  Description of Artificial Sequence: Synthetic oligonucleotide
  Target: SCNA; (-) strand; PAM type: NRG; PAM sequence: AAG
catgaataaaaaaaaaaaaa

SEQ ID NO: 14807 - DNA, 20 bp, Artificial Sequence
  Description of Artificial Sequence: Synthetic oligonucleotide
  Target: SCNA; (-) strand; PAM type: NRG; PAM sequence: TGG
aaatctattttgtctgatat

SEQ ID NO: 14808 - DNA, 20 bp, Artificial Sequence
  Description of Artificial Sequence: Synthetic oligonucleotide
  Target: SCNA; (-) strand; PAM type: NRG; PAM sequence: TAG
tttgtctcgaaataattttt

SEQ ID NO: 14809 - DNA, 20 bp, Artificial Sequence
  Description of Artificial Sequence: Synthetic oligonucleotide
  Target: SCNA; (-) strand; PAM type: NRG; PAM sequence: GAG
attgttatacatttttaatt

SEQ ID NO: 14810 - DNA, 20 bp, Artificial Sequence
  Description of Artificial Sequence: Synthetic oligonucleotide
  Target: SCNA; (-) strand; PAM type: NRG; PAM sequence: GGG
tgtttgctttacgtattttg

SEQ ID NO: 14811 - DNA, 20 bp, Artificial Sequence
  Description of Artificial Sequence: Synthetic oligonucleotide
  Target: SCNA; (-) strand; PAM type: NRG; PAM sequence: GGG
atgtttgctttacgtatttt

SEQ ID NO: 14812 - DNA, 20 bp, Artificial Sequence
  Description of Artificial Sequence: Synthetic oligonucleotide
  Target: SCNA; (-) strand; PAM type: NRG; PAM sequence: TGG
aatgtttgctttacgtattt

SEQ ID NO: 14813 - DNA, 20 bp, Artificial Sequence
  Description of Artificial Sequence: Synthetic oligonucleotide
  Target: SCNA; (-) strand; PAM type: NRG; PAM sequence: TGG
ccccaactactattgtagag

SEQ ID NO: 14814 - DNA, 20 bp, Artificial Sequence
  Description of Artificial Sequence: Synthetic oligonucleotide
  Target: SCNA; (-) strand; PAM type: NRG; PAM sequence: GAG
agaccccaactactattgta

SEQ ID NO: 14815 - DNA, 20 bp, Artificial Sequence
  Description of Artificial Sequence: Synthetic oligonucleotide
  Target: SCNA; (-) strand; PAM type: NRG; PAM sequence: TAG
gaagaccccaactactattg

SEQ ID NO: 14816 - DNA, 20 bp, Artificial Sequence
  Description of Artificial Sequence: Synthetic oligonucleotide
  Target: SCNA; (-) strand; PAM type: NRG; PAM sequence: AAG
ttattgaaagtggggtgttg

SEQ ID NO: 14817 - DNA, 20 bp, Artificial Sequence
  Description of Artificial Sequence: Synthetic oligonucleotide
  Target: SCNA; (-) strand; PAM type: NRG; PAM sequence: GGG
gtgattaattattgaaagtg

SEQ ID NO: 14818 - DNA, 20 bp, Artificial Sequence
  Description of Artificial Sequence: Synthetic oligonucleotide
  Target: SCNA; (-) strand; PAM type: NRG; PAM sequence: GGG
tgtgattaattattgaaagt

SEQ ID NO: 14819 - DNA, 20 bp, Artificial Sequence
  Description of Artificial Sequence: Synthetic oligonucleotide
  Target: SCNA; (-) strand; PAM type: NRG; PAM sequence: TGG
ctgtgattaattattgaaag

SEQ ID NO: 14820 - DNA, 20 bp, Artificial Sequence
  Description of Artificial Sequence: Synthetic oligonucleotide
  Target: SCNA; (-) strand; PAM type: NRG; PAM sequence: AAG
tggctgtgattaattattga

SEQ ID NO: 14821 - DNA, 20 bp, Artificial Sequence
  Description of Artificial Sequence: Synthetic oligonucleotide
  Target: SCNA; (-) strand; PAM type: NRG; PAM sequence: TGG
gtatgcactggttccttaag

SEQ ID NO: 14822 - DNA, 20 bp, Artificial Sequence
  Description of Artificial Sequence: Synthetic oligonucleotide
  Target: SCNA; (-) strand; PAM type: NRG; PAM sequence: AAG
ttggtatgcactggttcctt

SEQ ID NO: 14823 - DNA, 20 bp, Artificial Sequence
  Description of Artificial Sequence: Synthetic oligonucleotide
  Target: SCNA; (-) strand; PAM type: NRG; PAM sequence: TGG
aagtgtgttttggtatgcac

SEQ ID NO: 14824 - DNA, 20 bp, Artificial Sequence
  Description of Artificial Sequence: Synthetic oligonucleotide
  Target: SCNA; (-) strand; PAM type: NRG; PAM sequence: TGG
acactgccagaagtgtgttt

SEQ ID NO: 14825 - DNA, 20 bp, Artificial Sequence
  Description of Artificial Sequence: Synthetic oligonucleotide
  Target: SCNA; (-) strand; PAM type: NRG; PAM sequence: AAG
ccctgaagcaacactgccag

SEQ ID NO: 14826 - DNA, 20 bp, Artificial Sequence
  Description of Artificial Sequence: Synthetic oligonucleotide
  Target: SCNA; (-) strand; PAM type: NRG; PAM sequence: CAG
attccctgaagcaacactgc

SEQ ID NO: 14827 - DNA, 20 bp, Artificial Sequence
  Description of Artificial Sequence: Synthetic oligonucleotide
  Target: SCNA; (-) strand; PAM type: NRG; PAM sequence: AAG
cctacactcggaattccctg

SEQ ID NO: 14828 - DNA, 20 bp, Artificial Sequence
  Description of Artificial Sequence: Synthetic oligonucleotide
  Target: SCNA; (-) strand; PAM type: NRG; PAM sequence: CGG
tggaacattaaccctacact

SEQ ID NO: 14829 - DNA, 20 bp, Artificial Sequence
  Description of Artificial Sequence: Synthetic oligonucleotide
  Target: SCNA; (-) strand; PAM type: NRG; PAM sequence: TGG
tttagaagaggtagagaaaa

SEQ ID NO: 14830 - DNA, 20 bp, Artificial Sequence
  Description of Artificial Sequence: Synthetic oligonucleotide
  Target: SCNA; (-) strand; PAM type: NRG; PAM sequence: GAG
gaggaattttagaagaggta

SEQ ID NO: 14831 - DNA, 20 bp, Artificial Sequence
  Description of Artificial Sequence: Synthetic oligonucleotide
  Target: SCNA; (-) strand; PAM type: NRG; PAM sequence: TAG
aggaggaattttagaagagg

SEQ ID NO: 14832 - DNA, 20 bp, Artificial Sequence
  Description of Artificial Sequence: Synthetic oligonucleotide
  Target: SCNA; (-) strand; PAM type: NRG; PAM sequence: AGG
agaaggaggaattttagaag

SEQ ID NO: 14833 - DNA, 20 bp, Artificial Sequence
  Description of Artificial Sequence: Synthetic oligonucleotide
  Target: SCNA; (-) strand; PAM type: NRG; PAM sequence: GAG
aagaaggaggaattttagaa

SEQ ID NO: 14834 - DNA, 20 bp, Artificial Sequence
  Description of Artificial Sequence: Synthetic oligonucleotide
  Target: SCNA; (-) strand; PAM type: NRG; PAM sequence: AAG
tgaagaaggaggaattttag

SEQ ID NO: 14835 - DNA, 20 bp, Artificial Sequence
  Description of Artificial Sequence: Synthetic oligonucleotide
  Target: SCNA; (-) strand; PAM type: NRG; PAM sequence: TAG
atttgaagaaggaggaattt

SEQ ID NO: 14836 - DNA, 20 bp, Artificial Sequence
  Description of Artificial Sequence: Synthetic oligonucleotide
  Target: SCNA; (-) strand; PAM type: NRG; PAM sequence: AGG
taatagccatttgaagaagg

SEQ ID NO: 14837 - DNA, 20 bp, Artificial Sequence
  Description of Artificial Sequence: Synthetic oligonucleotide
  Target: SCNA; (-) strand; PAM type: NRG; PAM sequence: GAG
ttaatagccatttgaagaag

SEQ ID NO: 14838 - DNA, 20 bp, Artificial Sequence
  Description of Artificial Sequence: Synthetic oligonucleotide
  Target: SCNA; (-) strand; PAM type: NRG; PAM sequence: AGG
tattaatagccatttgaaga

SEQ ID NO: 14839 - DNA, 20 bp, Artificial Sequence
  Description of Artificial Sequence: Synthetic oligonucleotide
  Target: SCNA; (-) strand; PAM type: NRG; PAM sequence: AAG
ttattaatagccatttgaag

SEQ ID NO: 14840 - DNA, 20 bp, Artificial Sequence
  Description of Artificial Sequence: Synthetic oligonucleotide
  Target: SCNA; (-) strand; PAM type: NRG; PAM sequence: AAG
aagttattaatagccatttg

SEQ ID NO: 14841 - DNA, 20 bp, Artificial Sequence
  Description of Artificial Sequence: Synthetic oligonucleotide
  Target: SCNA; (-) strand; PAM type: NRG; PAM sequence: TAG
caaaaatataaagttattaa

SEQ ID NO: 14842 - DNA, 20 bp, Artificial Sequence
  Description of Artificial Sequence: Synthetic oligonucleotide
  Target: SCNA; (-) strand; PAM type: NRG; PAM sequence: AAG
acacaaaggacaaaaatata

SEQ ID NO: 14843 - DNA, 20 bp, Artificial Sequence
  Description of Artificial Sequence: Synthetic oligonucleotide
  Target: SCNA; (-) strand; PAM type: NRG; PAM sequence: AGG
tgaattaagaactgacacaa

SEQ ID NO: 14844 - DNA, 20 bp, Artificial Sequence
  Description of Artificial Sequence: Synthetic oligonucleotide
  Target: SCNA; (-) strand; PAM type: NRG; PAM sequence: AAG
atgaattaagaactgacaca

SEQ ID NO: 14845 - DNA, 20 bp, Artificial Sequence
  Description of Artificial Sequence: Synthetic oligonucleotide
  Target: SCNA; (-) strand; PAM type: NRG; PAM sequence: AAG
gcttataagcaacatgaatt

SEQ ID NO: 14846 - DNA, 20 bp, Artificial Sequence
  Description of Artificial Sequence: Synthetic oligonucleotide
  Target: SCNA; (-) strand; PAM type: NRG; PAM sequence: AAG
ataataaaaatcatgcttat

SEQ ID NO: 14847 - DNA, 20 bp, Artificial Sequence
  Description of Artificial Sequence: Synthetic oligonucleotide
  Target: SCNA; (-) strand; PAM type: NRG; PAM sequence: GAG
tgtgtttgtatataaatggt

SEQ ID NO: 14848 - DNA, 20 bp, Artificial Sequence
  Description of Artificial Sequence: Synthetic oligonucleotide
  Target: SCNA; (-) strand; PAM type: NRG; PAM sequence: TGG
cacttgtgtttgtatataaa

SEQ ID NO: 14849 - DNA, 20 bp, Artificial Sequence
  Description of Artificial Sequence: Synthetic oligonucleotide
  Target: SCNA; (-) strand; PAM type: NRG; PAM sequence: GAG
tataatacttaaaaatatgt

SEQ ID NO: 14850 - DNA, 20 bp, Artificial Sequence
  Description of Artificial Sequence: Synthetic oligonucleotide
  Target: SCNA; (-) strand; PAM type: NRG; PAM sequence: AAG
gtcttttaatgatactgtct

SEQ ID NO: 14851 - DNA, 20 bp, Artificial Sequence
  Description of Artificial Sequence: Synthetic oligonucleotide
  Target: SCNA; (-) strand; PAM type: NRG; PAM sequence: AGG
tcatatattataagattttt

SEQ ID NO: 14852 - DNA, 20 bp, Artificial Sequence
  Description of Artificial Sequence: Synthetic oligonucleotide
  Target: SCNA; (-) strand; PAM type: NRG; PAM sequence: TAG
atcatatattataagatttt

SEQ ID NO: 14853 - DNA, 20 bp, Artificial Sequence
  Description of Artificial Sequence: Synthetic oligonucleotide
  Target: SCNA; (-) strand; PAM type: NRG; PAM sequence: AAG
gatttgctatcatatattat

SEQ ID NO: 14854 - DNA, 20 bp, Artificial Sequence
  Description of Artificial Sequence: Synthetic oligonucleotide
  Target: SCNA; (-) strand; PAM type: NRG; PAM sequence: TAG
tgctgttgttcagaagttgt

SEQ ID NO: 14855 - DNA, 20 bp, Artificial Sequence
  Description of Artificial Sequence: Synthetic oligonucleotide
  Target: SCNA; (-) strand; PAM type: NRG; PAM sequence: AAG
tttttgttgctgttgttcag

SEQ ID NO: 14856 - DNA, 20 bp, Artificial Sequence
  Description of Artificial Sequence: Synthetic oligonucleotide
  Target: SCNA; (-) strand; PAM type: NRG; PAM sequence: CAG
atttttttgttgctgttgtt

SEQ ID NO: 14857 - DNA, 20 bp, Artificial Sequence
  Description of Artificial Sequence: Synthetic oligonucleotide
  Target: SCNA; (-) strand; PAM type: NRG; PAM sequence: AAG
aaaacaaattaaaaacacct

SEQ ID NO: 14858 - DNA, 20 bp, Artificial Sequence
  Description of Artificial Sequence: Synthetic oligonucleotide
  Target: SCNA; (-) strand; PAM type: NRG; PAM sequence: TGG
tttgtgtgctgtggattttg

SEQ ID NO: 14859 - DNA, 20 bp, Artificial Sequence
  Description of Artificial Sequence: Synthetic oligonucleotide
  Target: SCNA; (-) strand; PAM type: NRG; PAM sequence: TGG
agcagggtctttgtgtgctg

SEQ ID NO: 14860 - DNA, 20 bp, Artificial Sequence
  Description of Artificial Sequence: Synthetic oligonucleotide
  Target: SCNA; (-) strand; PAM type: NRG; PAM sequence: GGG
gaagtgaatacatggtagca

SEQ ID NO: 14861 - DNA, 20 bp, Artificial Sequence
  Description of Artificial Sequence: Synthetic oligonucleotide
  Target: SCNA; (-) strand; PAM type: NRG; PAM sequence: AGG
tgaagtgaatacatggtagc

SEQ ID NO: 14862 - DNA, 20 bp, Artificial Sequence
  Description of Artificial Sequence: Synthetic oligonucleotide
  Target: SCNA; (-) strand; PAM type: NRG; PAM sequence: CAG
ctgaagtgaatacatggtag

SEQ ID NO: 14863 - DNA, 20 bp, Artificial Sequence
  Description of Artificial Sequence: Synthetic oligonucleotide
  Target: SCNA; (-) strand; PAM type: NRG; PAM sequence: TAG
tcactgaagtgaatacatgg

SEQ ID NO: 14864 - DNA, 20 bp, Artificial Sequence
  Description of Artificial Sequence: Synthetic oligonucleotide
  Target: SCNA; (-) strand; PAM type: NRG; PAM sequence: TGG
ctttcactgaagtgaataca

SEQ ID NO: 14865 - DNA, 20 bp, Artificial Sequence
  Description of Artificial Sequence: Synthetic oligonucleotide
  Target: SCNA; (-) strand; PAM type: NRG; PAM sequence: AAG
tcggtgcttccctttcactg

SEQ ID NO: 14866 - DNA, 20 bp, Artificial Sequence
  Description of Artificial Sequence: Synthetic oligonucleotide
  Target: SCNA; (-) strand; PAM type: NRG; PAM sequence: CGG
cctgcccccactcagcattt

SEQ ID NO: 14867 - DNA, 20 bp, Artificial Sequence
  Description of Artificial Sequence: Synthetic oligonucleotide
  Target: SCNA; (-) strand; PAM type: NRG; PAM sequence: CAG
tatctgtacctgcccccact

SEQ ID NO: 14868 - DNA, 20 bp, Artificial Sequence
  Description of Artificial Sequence: Synthetic oligonucleotide
  Target: SCNA; (-) strand; PAM type: NRG; PAM sequence: AAG
tcttccatcagcagtgattg

SEQ ID NO: 14869 - DNA, 20 bp, Artificial Sequence
  Description of Artificial Sequence: Synthetic oligonucleotide
  Target: SCNA; (-) strand; PAM type: NRG; PAM sequence: CAG
atctcgaagtcttccatcag

SEQ ID NO: 14870 - DNA, 20 bp, Artificial Sequence
  Description of Artificial Sequence: Synthetic oligonucleotide
  Target: SCNA; (-) strand; PAM type: NRG; PAM sequence: CAG
tgtatctcgaagtcttccat

SEQ ID NO: 14871 - DNA, 20 bp, Artificial Sequence
  Description of Artificial Sequence: Synthetic oligonucleotide
  Target: SCNA; (-) strand; PAM type: NRG; PAM sequence: AAG
agtttttacagtgtatctcg

SEQ ID NO: 14872 - DNA, 20 bp, Artificial Sequence
  Description of Artificial Sequence: Synthetic oligonucleotide
  Target: SCNA; (-) strand; PAM type: NRG; PAM sequence: CAG
gacatttctcaaagttttta

SEQ ID NO: 14873 - DNA, 20 bp, Artificial Sequence
  Description of Artificial Sequence: Synthetic oligonucleotide
  Target: SCNA; (-) strand; PAM type: NRG; PAM sequence: AAG
cccagtcatgacatttctca

SEQ ID NO: 14874 - DNA, 20 bp, Artificial Sequence
  Description of Artificial Sequence: Synthetic oligonucleotide
  Target: SCNA; (-) strand; PAM type: NRG; PAM sequence: CAG
gtgctcagttccaatgtgcc

SEQ ID NO: 14875 - DNA, 20 bp, Artificial Sequence
  Description of Artificial Sequence: Synthetic oligonucleotide
  Target: SCNA; (-) strand; PAM type: NRG; PAM sequence: CAG
ttccatcctgtacaagtgct

SEQ ID NO: 14876 - DNA, 20 bp, Artificial Sequence
  Description of Artificial Sequence: Synthetic oligonucleotide
  Target: SCNA; (-) strand; PAM type: NRG; PAM sequence: AAG
acagatgttccatcctgtac

SEQ ID NO: 14877 - DNA, 20 bp, Artificial Sequence
  Description of Artificial Sequence: Synthetic oligonucleotide
  Target: SCNA; (-) strand; PAM type: NRG; PAM sequence: CAG
agtttcttgagatctgctga

SEQ ID NO: 14878 - DNA, 20 bp, Artificial Sequence
  Description of Artificial Sequence: Synthetic oligonucleotide
  Target: SCNA; (-) strand; PAM type: NRG; PAM sequence: GAG
atctttgctcccagtttctt

SEQ ID NO: 14879 - DNA, 20 bp, Artificial Sequence
  Description of Artificial Sequence: Synthetic oligonucleotide
  Target: SCNA; (-) strand; PAM type: NRG; PAM sequence: CAG
ctaagaaatatctttgctcc

SEQ ID NO: 14880 - DNA, 20 bp, Artificial Sequence
  Description of Artificial Sequence: Synthetic oligonucleotide
  Target: SCNA; (-) strand; PAM type: NRG; PAM sequence: AAG
agactacgaacctgaagcct

SEQ ID NO: 14881 - DNA, 20 bp, Artificial Sequence
  Description of Artificial Sequence: Synthetic oligonucleotide
  Target: SCNA; (-) strand; PAM type: NRG; PAM sequence: AAG
gtatcaagactacgaacctg

SEQ ID NO: 14882 - DNA, 20 bp, Artificial Sequence
  Description of Artificial Sequence: Synthetic oligonucleotide
  Target: SCNA; (-) strand; PAM type: NRG; PAM sequence: AAG
ctaatattaggaagggtatc

SEQ ID NO: 14883 - DNA, 20 bp, Artificial Sequence
  Description of Artificial Sequence: Synthetic oligonucleotide
  Target: SCNA; (-) strand; PAM type: NRG; PAM sequence: GGG
gatttttctaatattaggaa

SEQ ID NO: 14884 - DNA, 20 bp, Artificial Sequence
  Description of Artificial Sequence: Synthetic oligonucleotide
  Target: SCNA; (-) strand; PAM type: NRG; PAM sequence: AGG
tgatttttctaatattagga

SEQ ID NO: 14885 - DNA, 20 bp, Artificial Sequence
  Description of Artificial Sequence: Synthetic oligonucleotide
  Target: SCNA; (-) strand; PAM type: NRG; PAM sequence: AAG
ttgatttttctaatattagg

SEQ ID NO: 14886 - DNA, 20 bp, Artificial Sequence
  Description of Artificial Sequence: Synthetic oligonucleotide
  Target: SCNA; (-) strand; PAM type: NRG; PAM sequence: AGG
tttttgatttttctaatatt

SEQ ID NO: 14887 - DNA, 20 bp, Artificial Sequence
  Description of Artificial Sequence: Synthetic oligonucleotide
  Target: SCNA; (-) strand; PAM type: NRG; PAM sequence: TAG
ctttttgatttttctaatat

SEQ ID NO: 14888 - DNA, 20 bp, Artificial Sequence
  Description of Artificial Sequence: Synthetic oligonucleotide
  Target: SCNA; (-) strand; PAM type: NRG; PAM sequence: CAG
gtaattgaaacttatactaa

SEQ ID NO: 14889 - DNA, 20 bp, Artificial Sequence
  Description of Artificial Sequence: Synthetic oligonucleotide
  Target: SCNA; (-) strand; PAM type: NRG; PAM sequence: CAG
tttcctatctcattggctgt

SEQ ID NO: 14890 - DNA, 20 bp, Artificial Sequence
  Description of Artificial Sequence: Synthetic oligonucleotide
  Target: SCNA; (-) strand; PAM type: NRG; PAM sequence: TGG
ggagccatttcctatctcat

SEQ ID NO: 14891 - DNA, 20 bp, Artificial Sequence
  Description of Artificial Sequence: Synthetic oligonucleotide
  Target: SCNA; (-) strand; PAM type: NRG; PAM sequence: GAG
taaattttagtgtaagtggg

SEQ ID NO: 14892 - DNA, 20 bp, Artificial Sequence
  Description of Artificial Sequence: Synthetic oligonucleotide
  Target: SCNA; (-) strand; PAM type: NRG; PAM sequence: GGG
tgtaaattttagtgtaagtg

SEQ ID NO: 14893 - DNA, 20 bp, Artificial Sequence
  Description of Artificial Sequence: Synthetic oligonucleotide
  Target: SCNA; (-) strand; PAM type: NRG; PAM sequence: GGG
ttgtaaattttagtgtaagt

SEQ ID NO: 14894 - DNA, 20 bp, Artificial Sequence
  Description of Artificial Sequence: Synthetic oligonucleotide
  Target: SCNA; (-) strand; PAM type: NRG; PAM sequence: TGG
attgtaaattttagtgtaag

SEQ ID NO: 14895 - DNA, 20 bp, Artificial Sequence
  Description of Artificial Sequence: Synthetic oligonucleotide
  Target: SCNA; (-) strand; PAM type: NRG; PAM sequence: AAG
ttgattgtaaattttagtgt

SEQ ID NO: 14896 - DNA, 20 bp, Artificial Sequence
  Description of Artificial Sequence: Synthetic oligonucleotide
  Target: SCNA; (-) strand; PAM type: NRG; PAM sequence: TAG
aaaacattgattgtaaattt

SEQ ID NO: 14897 - DNA, 20 bp, Artificial Sequence
  Description of Artificial Sequence: Synthetic oligonucleotide
  Target: SCNA; (-) strand; PAM type: NRG; PAM sequence: CAG
aaataagataatatttgctg

SEQ ID NO: 14898 - DNA, 20 bp, Artificial Sequence
  Description of Artificial Sequence: Synthetic oligonucleotide
  Target: SCNA; (-) strand; PAM type: NRG; PAM sequence: AAG
aagacacaactattaaaaat

SEQ ID NO: 14899 - DNA, 20 bp, Artificial Sequence
  Description of Artificial Sequence: Synthetic oligonucleotide
  Target: SCNA; (-) strand; PAM type: NRG; PAM sequence: AAG
cacttttatatcagacaaga

SEQ ID NO: 14900 - DNA, 20 bp, Artificial Sequence
  Description of Artificial Sequence: Synthetic oligonucleotide
  Target: SCNA; (-) strand; PAM type: NRG; PAM sequence: AAG
aattcacttttatatcagac

SEQ ID NO: 14901 - DNA, 20 bp, Artificial Sequence
  Description of Artificial Sequence: Synthetic oligonucleotide
  Target: SCNA; (-) strand; PAM type: NRG; PAM sequence: CAG
actgtaattcacttttatat

SEQ ID NO: 14902 - DNA, 20 bp, Artificial Sequence
  Description of Artificial Sequence: Synthetic oligonucleotide
  Target: SCNA; (-) strand; PAM type: NRG; PAM sequence: TAG
ggtgcatccggatcagaacc

SEQ ID NO: 14903 - DNA, 20 bp, Artificial Sequence
  Description of Artificial Sequence: Synthetic oligonucleotide
  Target: SCNA; (-) strand; PAM type: NRG; PAM sequence: CAG
attaaatggtgcatccggat

SEQ ID NO: 14904 - DNA, 20 bp, Artificial Sequence
  Description of Artificial Sequence: Synthetic oligonucleotide
  Target: SCNA; (-) strand; PAM type: NRG; PAM sequence: CGG
tgatcattaaatggtgcatc

SEQ ID NO: 14905 - DNA, 20 bp, Artificial Sequence
  Description of Artificial Sequence: Synthetic oligonucleotide
  Target: SCNA; (-) strand; PAM type: NRG; PAM sequence: TGG
ctaggtatatgatcattaaa

SEQ ID NO: 14906 - DNA, 20 bp, Artificial Sequence
  Description of Artificial Sequence: Synthetic oligonucleotide
  Target: SCNA; (-) strand; PAM type: NRG; PAM sequence: AGG
cttatttgtcctaccaaact

SEQ ID NO: 14907 - DNA, 20 bp, Artificial Sequence
  Description of Artificial Sequence: Synthetic oligonucleotide
  Target: SCNA; (-) strand; PAM type: NRG; PAM sequence: TAG
acttatttgtcctaccaaac

SEQ ID NO: 14908 - DNA, 20 bp, Artificial Sequence
  Description of Artificial Sequence: Synthetic oligonucleotide
  Target: SCNA; (-) strand; PAM type: NRG; PAM sequence: CAG
tgaagaaactgagaaccaga

SEQ ID NO: 14909 - DNA, 20 bp, Artificial Sequence
  Description of Artificial Sequence: Synthetic oligonucleotide
  Target: SCNA; (-) strand; PAM type: NRG; PAM sequence: CAG
caggtgaagaaactgagaac

SEQ ID NO: 14910 - DNA, 20 bp, Artificial Sequence
  Description of Artificial Sequence: Synthetic oligonucleotide
  Target: SCNA; (-) strand; PAM type: NRG; PAM sequence: GAG
attttacaggtgaagaaact

SEQ ID NO: 14911 - DNA, 20 bp, Artificial Sequence
  Description of Artificial Sequence: Synthetic oligonucleotide
  Target: SCNA; (-) strand; PAM type: NRG; PAM sequence: AAG
gttctcacattttacaggtg

SEQ ID NO: 14912 - DNA, 20 bp, Artificial Sequence
  Description of Artificial Sequence: Synthetic oligonucleotide
  Target: SCNA; (-) strand; PAM type: NRG; PAM sequence: AGG
attttgttctcacattttac

SEQ ID NO: 14913 - DNA, 20 bp, Artificial Sequence
  Description of Artificial Sequence: Synthetic oligonucleotide
  Target: SCNA; (-) strand; PAM type: NRG; PAM sequence: CAG
gattttgttctcacatttta

SEQ ID NO: 14914 - DNA, 20 bp, Artificial Sequence
  Description of Artificial Sequence: Synthetic oligonucleotide
  Target: SCNA; (-) strand; PAM type: NRG; PAM sequence: CAG
tctggaaaaggctttataga

SEQ ID NO: 14915 - DNA, 20 bp, Artificial Sequence
  Description of Artificial Sequence: Synthetic oligonucleotide
  Target: SCNA; (-) strand; PAM type: NRG; PAM sequence: TAG
ttagtctggaaaaggcttta

SEQ ID NO: 14916 - DNA, 20 bp, Artificial Sequence
  Description of Artificial Sequence: Synthetic oligonucleotide
  Target: SCNA; (-) strand; PAM type: NRG; PAM sequence: AGG
agagcatcttagtctggaaa

SEQ ID NO: 14917 - DNA, 20 bp, Artificial Sequence
  Description of Artificial Sequence: Synthetic oligonucleotide
  Target: SCNA; (-) strand; PAM type: NRG; PAM sequence: AAG
tagagcatcttagtctggaa

SEQ ID NO: 14918 - DNA, 20 bp, Artificial Sequence
  Description of Artificial Sequence: Synthetic oligonucleotide
  Target: SCNA; (-) strand; PAM type: NRG; PAM sequence: TGG
agaattagagcatcttagtc

SEQ ID NO: 14919 - DNA, 20 bp, Artificial Sequence
  Description of Artificial Sequence: Synthetic oligonucleotide
  Target: SCNA; (-) strand; PAM type: NRG; PAM sequence: TAG
ttctgagaattagagcatct

SEQ ID NO: 14920 - DNA, 20 bp, Artificial Sequence
  Description of Artificial Sequence: Synthetic oligonucleotide
  Target: SCNA; (-) strand; PAM type: NRG; PAM sequence: GAG
taatttccttctgagaatta

SEQ ID NO: 14921 - DNA, 20 bp, Artificial Sequence
  Description of Artificial Sequence: Synthetic oligonucleotide
  Target: SCNA; (-) strand; PAM type: NRG; PAM sequence: TAG
cttaatttccttctgagaat

SEQ ID NO: 14922 - DNA, 20 bp, Artificial Sequence
  Description of Artificial Sequence: Synthetic oligonucleotide
  Target: SCNA; (-) strand; PAM type: NRG; PAM sequence: GAG
aaacatcttaatttccttct

SEQ ID NO: 14923 - DNA, 20 bp, Artificial Sequence
  Description of Artificial Sequence: Synthetic oligonucleotide
  Target: SCNA; (-) strand; PAM type: NRG; PAM sequence: GGG
caactgggagagtgaaagta

SEQ ID NO: 14924 - DNA, 20 bp, Artificial Sequence
  Description of Artificial Sequence: Synthetic oligonucleotide
  Target: SCNA; (-) strand; PAM type: NRG; PAM sequence: AGG
tcaactgggagagtgaaagt

SEQ ID NO: 14925 - DNA, 20 bp, Artificial Sequence
  Description of Artificial Sequence: Synthetic oligonucleotide
  Target: SCNA; (-) strand; PAM type: NRG; PAM sequence: TAG
ttcaactgggagagtgaaag

SEQ ID NO: 14926 - DNA, 20 bp, Artificial Sequence
  Description of Artificial Sequence: Synthetic oligonucleotide
  Target: SCNA; (-) strand; PAM type: NRG; PAM sequence: AAG
attttcaactgggagagtga

SEQ ID NO: 14927 - DNA, 20 bp, Artificial Sequence
  Description of Artificial Sequence: Synthetic oligonucleotide
  Target: SCNA; (-) strand; PAM type: NRG; PAM sequence: GAG
gacgaaattttcaactggga

SEQ ID NO: 14928 - DNA, 20 bp, Artificial Sequence
  Description of Artificial Sequence: Synthetic oligonucleotide
  Target: SCNA; (-) strand; PAM type: NRG; PAM sequence: GAG
aagacgaaattttcaactgg

SEQ ID NO: 14929 - DNA, 20 bp, Artificial Sequence
  Description of Artificial Sequence: Synthetic oligonucleotide
  Target: SCNA; (-) strand; PAM type: NRG; PAM sequence: GGG
tgaagacgaaattttcaact

SEQ ID NO: 14930 - DNA, 20 bp, Artificial Sequence
  Description of Artificial Sequence: Synthetic oligonucleotide
  Target: SCNA; (-) strand; PAM type: NRG; PAM sequence: TGG
atgaagacgaaattttcaac

SEQ ID NO: 14931 - DNA, 20 bp, Artificial Sequence
  Description of Artificial Sequence: Synthetic oligonucleotide
  Target: SCNA; (-) strand; PAM type: NRG; PAM sequence: AAG
aataattgaagccatagatg

SEQ ID NO: 14932 - DNA, 20 bp, Artificial Sequence
  Description of Artificial Sequence: Synthetic oligonucleotide
  Target: SCNA; (-) strand; PAM type: NRG; PAM sequence: TAG
acaagtaataattgaagcca

SEQ ID NO: 14933 - DNA, 20 bp, Artificial Sequence
  Description of Artificial Sequence: Synthetic oligonucleotide
  Target: SCNA; (-) strand; PAM type: NRG; PAM sequence: AAG
tgaaatacaagtaataattg

SEQ ID NO: 14934 - DNA, 20 bp, Artificial Sequence
  Description of Artificial Sequence: Synthetic oligonucleotide
  Target: SCNA; (-) strand; PAM type: NRG; PAM sequence: AAG
gagcttgaggtttgaaatac

SEQ ID NO: 14935 - DNA, 20 bp, Artificial Sequence
  Description of Artificial Sequence: Synthetic oligonucleotide
  Target: SCNA; (-) strand; PAM type: NRG; PAM sequence: AGG
gatactgtatggagagcttg

SEQ ID NO: 14936 - DNA, 20 bp, Artificial Sequence
  Description of Artificial Sequence: Synthetic oligonucleotide
  Target: SCNA; (-) strand; PAM type: NRG; PAM sequence: GAG
agatactgtatggagagctt

SEQ ID NO: 14937 - DNA, 20 bp, Artificial Sequence
  Description of Artificial Sequence: Synthetic oligonucleotide
  Target: SCNA; (-) strand; PAM type: NRG; PAM sequence: GAG
ctatccagatactgtatgga

SEQ ID NO: 14938 - DNA, 20 bp, Artificial Sequence
  Description of Artificial Sequence: Synthetic oligonucleotide
  Target: SCNA; (-) strand; PAM type: NRG; PAM sequence: GAG
tgctatccagatactgtatg

SEQ ID NO: 14939 - DNA, 20 bp, Artificial Sequence
  Description of Artificial Sequence: Synthetic oligonucleotide
  Target: SCNA; (-) strand; PAM type: NRG; PAM sequence: TGG
gatgctatccagatactgta

SEQ ID NO: 14940 - DNA, 20 bp, Artificial Sequence
  Description of Artificial Sequence: Synthetic oligonucleotide
  Target: SCNA; (-) strand; PAM type: NRG; PAM sequence: CAG
tttgtgttgtggatgctatc

SEQ ID NO: 14941 - DNA, 20 bp, Artificial Sequence
  Description of Artificial Sequence: Synthetic oligonucleotide
  Target: SCNA; (-) strand; PAM type: NRG; PAM sequence: TGG
atccattaatatttgtgttg

SEQ ID NO: 14942 - DNA, 20 bp, Artificial Sequence
  Description of Artificial Sequence: Synthetic oligonucleotide
  Target: SCNA; (-) strand; PAM type: NRG; PAM sequence: AGG
tattagagttgctctttagg

SEQ ID NO: 14943 - DNA, 20 bp, Artificial Sequence
  Description of Artificial Sequence: Synthetic oligonucleotide
  Target: SCNA; (-) strand; PAM type: NRG; PAM sequence: GAG
ttattagagttgctctttag

SEQ ID NO: 14944 - DNA, 20 bp, Artificial Sequence
  Description of Artificial Sequence: Synthetic oligonucleotide
  Target: SCNA; (-) strand; PAM type: NRG; PAM sequence: AGG
tattattagagttgctcttt

SEQ ID NO: 14945 - DNA, 20 bp, Artificial Sequence
  Description of Artificial Sequence: Synthetic oligonucleotide
  Target: SCNA; (-) strand; PAM type: NRG; PAM sequence: TAG
atattattagagttgctctt

SEQ ID NO: 14946 - DNA, 20 bp, Artificial Sequence
  Description of Artificial Sequence: Synthetic oligonucleotide
  Target: SCNA; (-) strand; PAM type: NRG; PAM sequence: GAG
gcagaatcctgatattatta

SEQ ID NO: 14947 - DNA, 20 bp, Artificial Sequence
  Description of Artificial Sequence: Synthetic oligonucleotide
  Target: SCNA; (-) strand; PAM type: NRG; PAM sequence: TAG
aagcagaatcctgatattat

SEQ ID NO: 14948 - DNA, 20 bp, Artificial Sequence
  Description of Artificial Sequence: Synthetic oligonucleotide
  Target: SCNA; (-) strand; PAM type: NRG; PAM sequence: CAG
cttatttgtttgtttttaag

SEQ ID NO: 14949 - DNA, 20 bp, Artificial Sequence
  Description of Artificial Sequence: Synthetic oligonucleotide
  Target: SCNA; (-) strand; PAM type: NRG; PAM sequence: AAG
atgcttatttgtttgttttt

SEQ ID NO: 14950 - DNA, 20 bp, Artificial Sequence
  Description of Artificial Sequence: Synthetic oligonucleotide
  Target: SCNA; (-) strand; PAM type: NRG; PAM sequence: AAG
gaaaacaacttgagttattg

SEQ ID NO: 14951 - DNA, 20 bp, Artificial Sequence
  Description of Artificial Sequence: Synthetic oligonucleotide
  Target: SCNA; (-) strand; PAM type: NRG; PAM sequence: GAG
ttctattcagaaaacaactt

SEQ ID NO: 14952 - DNA, 20 bp, Artificial Sequence
  Description of Artificial Sequence: Synthetic oligonucleotide
  Target: SCNA; (-) strand; PAM type: NRG; PAM sequence: CAG
atttcagcttgtattctatt

SEQ ID NO: 14953 - DNA, 20 bp, Artificial Sequence
  Description of Artificial Sequence: Synthetic oligonucleotide
  Target: SCNA; (-) strand; PAM type: NRG; PAM sequence: CAG
ttaggataatcttgtcattt

SEQ ID NO: 14954 - DNA, 20 bp, Artificial Sequence
  Description of Artificial Sequence: Synthetic oligonucleotide
  Target: SCNA; (-) strand; PAM type: NRG; PAM sequence: AGG
aagacaagttatagagtatt

SEQ ID NO: 14955 - DNA, 20 bp, Artificial Sequence
  Description of Artificial Sequence: Synthetic oligonucleotide
  Target: SCNA; (-) strand; PAM type: NRG; PAM sequence: TAG
aaagacaagttatagagtat

SEQ ID NO: 14956 - DNA, 20 bp, Artificial Sequence
  Description of Artificial Sequence: Synthetic oligonucleotide
  Target: SCNA; (-) strand; PAM type: NRG; PAM sequence: GAG
tgggtcaaagacaagttata

SEQ ID NO: 14957 - DNA, 20 bp, Artificial Sequence
  Description of Artificial Sequence: Synthetic oligonucleotide
  Target: SCNA; (-) strand; PAM type: NRG; PAM sequence: TAG
tatgggtcaaagacaagtta

SEQ ID NO: 14958 - DNA, 20 bp, Artificial Sequence
  Description of Artificial Sequence: Synthetic oligonucleotide
  Target: SCNA; (-) strand; PAM type: NRG; PAM sequence: AAG
tgcagctatgggtcaaagac

SEQ ID NO: 14959 - DNA, 20 bp, Artificial Sequence
  Description of Artificial Sequence: Synthetic oligonucleotide
  Target: SCNA; (-) strand; PAM type: NRG; PAM sequence: AAG
gaatttgcagctatgggtca

SEQ ID NO: 14960 - DNA, 20 bp, Artificial Sequence
  Description of Artificial Sequence: Synthetic oligonucleotide
  Target: SCNA; (-) strand; PAM type: NRG; PAM sequence: GGG
tagattgaatttgcagctat

SEQ ID NO: 14961 - DNA, 20 bp, Artificial Sequence
  Description of Artificial Sequence: Synthetic oligonucleotide
  Target: SCNA; (-) strand; PAM type: NRG; PAM sequence: TGG
atagattgaatttgcagcta

SEQ ID NO: 14962 - DNA, 20 bp, Artificial Sequence
  Description of Artificial Sequence: Synthetic oligonucleotide
  Target: SCNA; (-) strand; PAM type: NRG; PAM sequence: CAG
atggtgatagattgaatttg

SEQ ID NO: 14963 - DNA, 20 bp, Artificial Sequence
  Description of Artificial Sequence: Synthetic oligonucleotide
  Target: SCNA; (-) strand; PAM type: NRG; PAM sequence: TAG
aggaacaaggaaaatggtga

SEQ ID NO: 14964 - DNA, 20 bp, Artificial Sequence
  Description of Artificial Sequence: Synthetic oligonucleotide
  Target: SCNA; (-) strand; PAM type: NRG; PAM sequence: TGG
aagcttaggaacaaggaaaa

SEQ ID NO: 14965 - DNA, 20 bp, Artificial Sequence
  Description of Artificial Sequence: Synthetic oligonucleotide
  Target: SCNA; (-) strand; PAM type: NRG; PAM sequence: AGG
atgactcaagcttaggaaca

SEQ ID NO: 14966 - DNA, 20 bp, Artificial Sequence
  Description of Artificial Sequence: Synthetic oligonucleotide
  Target: SCNA; (-) strand; PAM type: NRG; PAM sequence: AAG
tatgactcaagcttaggaac

SEQ ID NO: 14967 - DNA, 20 bp, Artificial Sequence
  Description of Artificial Sequence: Synthetic oligonucleotide
  Target: SCNA; (-) strand; PAM type: NRG; PAM sequence: AGG
aataattatgactcaagctt

SEQ ID NO: 14968 - DNA, 20 bp, Artificial Sequence
  Description of Artificial Sequence: Synthetic oligonucleotide
  Target: SCNA; (-) strand; PAM type: NRG; PAM sequence: TAG
gaataattatgactcaagct

SEQ ID NO: 14969 - DNA, 20 bp, Artificial Sequence
  Description of Artificial Sequence: Synthetic oligonucleotide
  Target: SCNA; (-) strand; PAM type: NRG; PAM sequence: AAG
acagtgaataattatgactc

SEQ ID NO: 14970 - DNA, 20 bp, Artificial Sequence
  Description of Artificial Sequence: Synthetic oligonucleotide
  Target: SCNA; (-) strand; PAM type: NRG; PAM sequence: CAG
caaatggatatgtctgagaa

SEQ ID NO: 14971 - DNA, 20 bp, Artificial Sequence
  Description of Artificial Sequence: Synthetic oligonucleotide
  Target: SCNA; (-) strand; PAM type: NRG; PAM sequence: GAG
gcatgcaaatggatatgtct

SEQ ID NO: 14972 - DNA, 20 bp, Artificial Sequence
  Description of Artificial Sequence: Synthetic oligonucleotide
  Target: SCNA; (-) strand; PAM type: NRG; PAM sequence: TGG
tgtatgtctgagcatgcaaa

SEQ ID NO: 14973 - DNA, 20 bp, Artificial Sequence
  Description of Artificial Sequence: Synthetic oligonucleotide
  Target: SCNA; (-) strand; PAM type: NRG; PAM sequence: GAG
aagcaaaggcatgtatgtct

SEQ ID NO: 14974 - DNA, 20 bp, Artificial Sequence
  Description of Artificial Sequence: Synthetic oligonucleotide
  Target: SCNA; (-) strand; PAM type: NRG; PAM sequence: AGG
caagggaatatcagaagcaa

SEQ ID NO: 14975 - DNA, 20 bp, Artificial Sequence
  Description of Artificial Sequence: Synthetic oligonucleotide
  Target: SCNA; (-) strand; PAM type: NRG; PAM sequence: AAG
acaagggaatatcagaagca

SEQ ID NO: 14976 - DNA, 20 bp, Artificial Sequence
  Description of Artificial Sequence: Synthetic oligonucleotide
  Target: SCNA; (-) strand; PAM type: NRG; PAM sequence: AAG
ctggcacaagggaatatcag

SEQ ID NO: 14977 - DNA, 20 bp, Artificial Sequence
  Description of Artificial Sequence: Synthetic oligonucleotide
  Target: SCNA; (-) strand; PAM type: NRG; PAM sequence: CAG
attctggcacaagggaatat

SEQ ID NO: 14978 - DNA, 20 bp, Artificial Sequence
  Description of Artificial Sequence: Synthetic oligonucleotide
  Target: SCNA; (-) strand; PAM type: NRG; PAM sequence: GGG
cagaggacattctggcacaa

SEQ ID NO: 14979 - DNA, 20 bp, Artificial Sequence
  Description of Artificial Sequence: Synthetic oligonucleotide
  Target: SCNA; (-) strand; PAM type: NRG; PAM sequence: AGG
acagaggacattctggcaca

SEQ ID NO: 14980 - DNA, 20 bp, Artificial Sequence
  Description of Artificial Sequence: Synthetic oligonucleotide
  Target: SCNA; (-) strand; PAM type: NRG; PAM sequence: AAG
aacagaggacattctggcac

SEQ ID NO: 14981 - DNA, 20 bp, Artificial Sequence
  Description of Artificial Sequence: Synthetic oligonucleotide
  Target: SCNA; (-) strand; PAM type: NRG; PAM sequence: TGG
aaaacaaacagaggacattc

SEQ ID NO: 14982 - DNA, 20 bp, Artificial Sequence
  Description of Artificial Sequence: Synthetic oligonucleotide
  Target: SCNA; (-) strand; PAM type: NRG; PAM sequence: AGG
tagtaggtcaaaacaaacag

SEQ ID NO: 14983 - DNA, 20 bp, Artificial Sequence
  Description of Artificial Sequence: Synthetic oligonucleotide
  Target: SCNA; (-) strand; PAM type: NRG; PAM sequence: GAG
atagtaggtcaaaacaaaca

SEQ ID NO: 14984 - DNA, 20 bp, Artificial Sequence
  Description of Artificial Sequence: Synthetic oligonucleotide
  Target: SCNA; (-) strand; PAM type: NRG; PAM sequence: CAG
atatagtaggtcaaaacaaa

SEQ ID NO: 14985 - DNA, 20 bp, Artificial Sequence
  Description of Artificial Sequence: Synthetic oligonucleotide
  Target: SCNA; (-) strand; PAM type: NRG; PAM sequence: AGG
gaaaaggtaagagatatagt

SEQ ID NO: 14986 - DNA, 20 bp, Artificial Sequence
  Description of Artificial Sequence: Synthetic oligonucleotide
  Target: SCNA; (-) strand; PAM type: NRG; PAM sequence: TAG
ggaaaaggtaagagatatag

SEQ ID NO: 14987 - DNA, 20 bp, Artificial Sequence
  Description of Artificial Sequence: Synthetic oligonucleotide
  Target: SCNA; (-) strand; PAM type: NRG; PAM sequence: TAG
gtgggaaaaggtaagagata

SEQ ID NO: 14988 - DNA, 20 bp, Artificial Sequence
  Description of Artificial Sequence: Synthetic oligonucleotide
  Target: SCNA; (-) strand; PAM type: NRG; PAM sequence: GAG
atctgggtgggaaaaggtaa

SEQ ID NO: 14989 - DNA, 20 bp, Artificial Sequence
  Description of Artificial Sequence: Synthetic oligonucleotide
  Target: SCNA; (-) strand; PAM type: NRG; PAM sequence: AAG
tgatctgggtgggaaaaggt

SEQ ID NO: 14990 - DNA, 20 bp, Artificial Sequence
  Description of Artificial Sequence: Synthetic oligonucleotide
  Target: SCNA; (-) strand; PAM type: NRG; PAM sequence: AGG
atgttgatctgggtgggaaa

SEQ ID NO: 14991 - DNA, 20 bp, Artificial Sequence
  Description of Artificial Sequence: Synthetic oligonucleotide
  Target: SCNA; (-) strand; PAM type: NRG; PAM sequence: AAG
aatgttgatctgggtgggaa

SEQ ID NO: 14992 - DNA, 20 bp, Artificial Sequence
  Description of Artificial Sequence: Synthetic oligonucleotide
  Target: SCNA; (-) strand; PAM type: NRG; PAM sequence: GGG
gaggtaatgttgatctgggt

SEQ ID NO: 14993 - DNA, 20 bp, Artificial Sequence
  Description of Artificial Sequence: Synthetic oligonucleotide
  Target: SCNA; (-) strand; PAM type: NRG; PAM sequence: TGG
ggaggtaatgttgatctggg

SEQ ID NO: 14994 - DNA, 20 bp, Artificial Sequence
  Description of Artificial Sequence: Synthetic oligonucleotide
  Target: SCNA; (-) strand; PAM type: NRG; PAM sequence: GGG
tgaggaggtaatgttgatct

SEQ ID NO: 14995 - DNA, 20 bp, Artificial Sequence
  Description of Artificial Sequence: Synthetic oligonucleotide
  Target: SCNA; (-) strand; PAM type: NRG; PAM sequence: TGG
ttgaggaggtaatgttgatc

SEQ ID NO: 14996 - DNA, 20 bp, Artificial Sequence
  Description of Artificial Sequence: Synthetic oligonucleotide
  Target: SCNA; (-) strand; PAM type: NRG; PAM sequence: AGG
caggagaagttttattgagg

SEQ ID NO: 14997 - DNA, 20 bp, Artificial Sequence
  Description of Artificial Sequence: Synthetic oligonucleotide
  Target: SCNA; (-) strand; PAM type: NRG; PAM sequence: GAG
tcaggagaagttttattgag

SEQ ID NO: 14998 - DNA, 20 bp, Artificial Sequence
  Description of Artificial Sequence: Synthetic oligonucleotide
  Target: SCNA; (-) strand; PAM type: NRG; PAM sequence: AGG
aatcaggagaagttttattg

SEQ ID NO: 14999 - DNA, 20 bp, Artificial Sequence
  Description of Artificial Sequence: Synthetic oligonucleotide
  Target: SCNA; (-) strand; PAM type: NRG; PAM sequence: GAG
caatcaggagaagttttatt

SEQ ID NO: 15000 - DNA, 20 bp, Artificial Sequence
  Description of Artificial Sequence: Synthetic oligonucleotide
  Target: SCNA; (-) strand; PAM type: NRG; PAM sequence: AAG
ctgtttcaatcaatcaggag

SEQ ID NO: 15001 - DNA, 20 bp, Artificial Sequence
  Description of Artificial Sequence: Synthetic oligonucleotide
  Target: SCNA; (-) strand; PAM type: NRG; PAM sequence: GAG
gatctgtttcaatcaatcag

SEQ ID NO: 15002 - DNA, 20 bp, Artificial Sequence
  Description of Artificial Sequence: Synthetic oligonucleotide
  Target: SCNA; (-) strand; PAM type: NRG; PAM sequence: AGG
aagatctgtttcaatcaatc

SEQ ID NO: 15003 - DNA, 20 bp, Artificial Sequence
  Description of Artificial Sequence: Synthetic oligonucleotide
  Target: SCNA; (-) strand; PAM type: NRG; PAM sequence: CAG
aaagatctgtttcaatcaat

SEQ ID NO: 15004 - DNA, 20 bp, Artificial Sequence
  Description of Artificial Sequence: Synthetic oligonucleotide
  Target: SCNA; (-) strand; PAM type: NRG; PAM sequence: AAG
ctaaaaagtaaaacatttta

SEQ ID NO: 15005 - DNA, 20 bp, Artificial Sequence
  Description of Artificial Sequence: Synthetic oligonucleotide
  Target: SCNA; (-) strand; PAM type: NRG; PAM sequence: AAG
aatatataagacatactaaa

SEQ ID NO: 15006 - DNA, 20 bp, Artificial Sequence
  Description of Artificial Sequence: Synthetic oligonucleotide
  Target: SCNA; (-) strand; PAM type: NRG; PAM sequence: AAG
tcacaggagcaaaaatatat

SEQ ID NO: 15007 - DNA, 20 bp, Artificial Sequence
  Description of Artificial Sequence: Synthetic oligonucleotide
  Target: SCNA; (-) strand; PAM type: NRG; PAM sequence: GAG
cgatgtaccaggcatcacag

SEQ ID NO: 15008 - DNA, 20 bp, Artificial Sequence
  Description of Artificial Sequence: Synthetic oligonucleotide
  Target: SCNA; (-) strand; PAM type: NRG; PAM sequence: AGG
ttcgatgtaccaggcatcac

SEQ ID NO: 15009 - DNA, 20 bp, Artificial Sequence
  Description of Artificial Sequence: Synthetic oligonucleotide
  Target: SCNA; (-) strand; PAM type: NRG; PAM sequence: CAG
cttcgatgtaccaggcatca

SEQ ID NO: 15010 - DNA, 20 bp, Artificial Sequence
  Description of Artificial Sequence: Synthetic oligonucleotide
  Target: SCNA; (-) strand; PAM type: NRG; PAM sequence: AGG
ttgattgtcttcgatgtacc

SEQ ID NO: 15011 - DNA, 20 bp, Artificial Sequence
  Description of Artificial Sequence: Synthetic oligonucleotide
  Target: SCNA; (-) strand; PAM type: NRG; PAM sequence: CAG
attgattgtcttcgatgtac

SEQ ID NO: 15012 - DNA, 20 bp, Artificial Sequence
  Description of Artificial Sequence: Synthetic oligonucleotide
  Target: SCNA; (-) strand; PAM type: NRG; PAM sequence: TAG
gtaggtttgatgaaaaaaaa

SEQ ID NO: 15013 - DNA, 20 bp, Artificial Sequence
  Description of Artificial Sequence: Synthetic oligonucleotide
  Target: SCNA; (-) strand; PAM type: NRG; PAM sequence: AGG
taaggagtttacagtctggt

SEQ ID NO: 15014 - DNA, 20 bp, Artificial Sequence
  Description of Artificial Sequence: Synthetic oligonucleotide
  Target: SCNA; (-) strand; PAM type: NRG; PAM sequence: TAG
ataaggagtttacagtctgg

SEQ ID NO: 15015 - DNA, 20 bp, Artificial Sequence
  Description of Artificial Sequence: Synthetic oligonucleotide
  Target: SCNA; (-) strand; PAM type: NRG; PAM sequence: TGG
gacataaggagtttacagtc

SEQ ID NO: 15016 - DNA, 20 bp, Artificial Sequence
  Description of Artificial Sequence: Synthetic oligonucleotide
  Target: SCNA; (-) strand; PAM type: NRG; PAM sequence: CAG
accaggacataaggagttta

SEQ ID NO: 15017 - DNA, 20 bp, Artificial Sequence
  Description of Artificial Sequence: Synthetic oligonucleotide
  Target: SCNA; (-) strand; PAM type: NRG; PAM sequence: GAG
tgacattaccaggacataag

SEQ ID NO: 15018 - DNA, 20 bp, Artificial Sequence
  Description of Artificial Sequence: Synthetic oligonucleotide
  Target: SCNA; (-) strand; PAM type: NRG; PAM sequence: AGG
attgacattaccaggacata

SEQ ID NO: 15019 - DNA, 20 bp, Artificial Sequence
  Description of Artificial Sequence: Synthetic oligonucleotide
  Target: SCNA; (-) strand; PAM type: NRG; PAM sequence: AAG
aattgacattaccaggacat

SEQ ID NO: 15020 - DNA, 20 bp, Artificial Sequence
  Description of Artificial Sequence: Synthetic oligonucleotide
  Target: SCNA; (-) strand; PAM type: NRG; PAM sequence: AGG
atagagtaattgacattacc

SEQ ID NO: 15021 - DNA, 20 bp, Artificial Sequence
  Description of Artificial Sequence: Synthetic oligonucleotide
  Target: SCNA; (-) strand; PAM type: NRG; PAM sequence: CAG
tatagagtaattgacattac

SEQ ID NO: 15022 - DNA, 20 bp, Artificial Sequence
  Description of Artificial Sequence: Synthetic oligonucleotide
  Target: SCNA; (-) strand; PAM type: NRG; PAM sequence: GAG
aaacacaatggaaaactata

SEQ ID NO: 15023 - DNA, 20 bp, Artificial Sequence
  Description of Artificial Sequence: Synthetic oligonucleotide
  Target: SCNA; (-) strand; PAM type: NRG; PAM sequence: TAG
ctaaacacaatggaaaacta

SEQ ID NO: 15024 - DNA, 20 bp, Artificial Sequence
  Description of Artificial Sequence: Synthetic oligonucleotide
  Target: SCNA; (-) strand; PAM type: NRG; PAM sequence: TGG
agacacagtactaaacacaa

SEQ ID NO: 15025 - DNA, 20 bp, Artificial Sequence
  Description of Artificial Sequence: Synthetic oligonucleotide
  Target: SCNA; (-) strand; PAM type: NRG; PAM sequence: CAG
ggggtcttttatgcaagaca

SEQ ID NO: 15026 - DNA, 20 bp, Artificial Sequence
  Description of Artificial Sequence: Synthetic oligonucleotide
  Target: SCNA; (-) strand; PAM type: NRG; PAM sequence: AAG
tattttggggtcttttatgc

SEQ ID NO: 15027 - DNA, 20 bp, Artificial Sequence
  Description of Artificial Sequence: Synthetic oligonucleotide
  Target: SCNA; (-) strand; PAM type: NRG; PAM sequence: GGG
taagaatttccaatattttg

SEQ ID NO: 15028 - DNA, 20 bp, Artificial Sequence
  Description of Artificial Sequence: Synthetic oligonucleotide
  Target: SCNA; (-) strand; PAM type: NRG; PAM sequence: GGG
ataagaatttccaatatttt

SEQ ID NO: 15029 - DNA, 20 bp, Artificial Sequence
  Description of Artificial Sequence: Synthetic oligonucleotide
  Target: SCNA; (-) strand; PAM type: NRG; PAM sequence: TGG
aataagaatttccaatattt

SEQ ID NO: 15030 - DNA, 20 bp, Artificial Sequence
  Description of Artificial Sequence: Synthetic oligonucleotide
  Target: SCNA; (-) strand; PAM type: NRG; PAM sequence: AAG
aaattgtttgtttgcctaat

SEQ ID NO: 15031 - DNA, 20 bp, Artificial Sequence
  Description of Artificial Sequence: Synthetic oligonucleotide
  Target: SCNA; (-) strand; PAM type: NRG; PAM sequence: GAG
taattcaacttatagaaatt

SEQ ID NO: 15032 - DNA, 20 bp, Artificial Sequence
  Description of Artificial Sequence: Synthetic oligonucleotide
  Target: SCNA; (-) strand; PAM type: NRG; PAM sequence: TAG
attgataataattcaactta

SEQ ID NO: 15033 - DNA, 20 bp, Artificial Sequence
  Description of Artificial Sequence: Synthetic oligonucleotide
  Target: SCNA; (-) strand; PAM type: NRG; PAM sequence: AGG
gtctcacacagacacacgaa

SEQ ID NO: 15034 - DNA, 20 bp, Artificial Sequence
  Description of Artificial Sequence: Synthetic oligonucleotide
  Target: SCNA; (-) strand; PAM type: NRG; PAM sequence: AAG
tgtctcacacagacacacga

SEQ ID NO: 15035 - DNA, 20 bp, Artificial Sequence
  Description of Artificial Sequence: Synthetic oligonucleotide
  Target: SCNA; (-) strand; PAM type: NRG; PAM sequence: CAG
cagagcaagactgtctcaca

SEQ ID NO: 15036 - DNA, 20 bp, Artificial Sequence
  Description of Artificial Sequence: Synthetic oligonucleotide
  Target: SCNA; (-) strand; PAM type: NRG; PAM sequence: AAG
tccaatcttggtaacagagc

SEQ ID NO: 15037 - DNA, 20 bp, Artificial Sequence
  Description of Artificial Sequence: Synthetic oligonucleotide
  Target: SCNA; (-) strand; PAM type: NRG; PAM sequence: GAG
gcactccaatcttggtaaca

SEQ ID NO: 15038 - DNA, 20 bp, Artificial Sequence
  Description of Artificial Sequence: Synthetic oligonucleotide
  Target: SCNA; (-) strand; PAM type: NRG; PAM sequence: CAG
ctgcactccaatcttggtaa

SEQ ID NO: 15039 - DNA, 20 bp, Artificial Sequence
  Description of Artificial Sequence: Synthetic oligonucleotide
  Target: SCNA; (-) strand; PAM type: NRG; PAM sequence: TGG
gcacccctgcactccaatct

SEQ ID NO: 15040 - DNA, 20 bp, Artificial Sequence
  Description of Artificial Sequence: Synthetic oligonucleotide
  Target: SCNA; (-) strand; PAM type: NRG; PAM sequence: TGG
gaggttgcagtgagctgaga

SEQ ID NO: 15041 - DNA, 20 bp, Artificial Sequence
  Description of Artificial Sequence: Synthetic oligonucleotide
  Target: SCNA; (-) strand; PAM type: NRG; PAM sequence: GAG
ggcagaggttgcagtgagct

SEQ ID NO: 15042 - DNA, 20 bp, Artificial Sequence
  Description of Artificial Sequence: Synthetic oligonucleotide
  Target: SCNA; (-) strand; PAM type: NRG; PAM sequence: GAG
caggaggcagaggttgcagt

SEQ ID NO: 15043 - DNA, 20 bp, Artificial Sequence
  Description of Artificial Sequence: Synthetic oligonucleotide
  Target: SCNA; (-) strand; PAM type: NRG; PAM sequence: CAG
aacccaggaggcagaggttg

SEQ ID NO: 15044 - DNA, 20 bp, Artificial Sequence
  Description of Artificial Sequence: Synthetic oligonucleotide
  Target: SCNA; (-) strand; PAM type: NRG; PAM sequence: AGG
cacttgaacccaggaggcag

SEQ ID NO: 15045 - DNA, 20 bp, Artificial Sequence
  Description of Artificial Sequence: Synthetic oligonucleotide
  Target: SCNA; (-) strand; PAM type: NRG; PAM sequence: GAG
tcacttgaacccaggaggca

SEQ ID NO: 15046 - DNA, 20 bp, Artificial Sequence
  Description of Artificial Sequence: Synthetic oligonucleotide
  Target: SCNA; (-) strand; PAM type: NRG; PAM sequence: CAG
agtcacttgaacccaggagg

SEQ ID NO: 15047 - DNA, 20 bp, Artificial Sequence
  Description of Artificial Sequence: Synthetic oligonucleotide
  Target: SCNA; (-) strand; PAM type: NRG; PAM sequence: AGG
gagagtcacttgaacccagg

SEQ ID NO: 15048 - DNA, 20 bp, Artificial Sequence
  Description of Artificial Sequence: Synthetic oligonucleotide
  Target: SCNA; (-) strand; PAM type: NRG; PAM sequence: GAG
tgagagtcacttgaacccag

SEQ ID NO: 15049 - DNA, 20 bp, Artificial Sequence
  Description of Artificial Sequence: Synthetic oligonucleotide
  Target: SCNA; (-) strand; PAM type: NRG; PAM sequence: AGG
catgagagtcacttgaaccc

SEQ ID NO: 15050 - DNA, 20 bp, Artificial Sequence
  Description of Artificial Sequence: Synthetic oligonucleotide
  Target: SCNA; (-) strand; PAM type: NRG; PAM sequence: CAG
gcatgagagtcacttgaacc

SEQ ID NO: 15051 - DNA, 20 bp, Artificial Sequence
  Description of Artificial Sequence: Synthetic oligonucleotide
  Target: SCNA; (-) strand; PAM type: NRG; PAM sequence: GAG
cttgggaggctgaggcatga

SEQ ID NO: 15052 - DNA, 20 bp, Artificial Sequence
  Description of Artificial Sequence: Synthetic oligonucleotide
  Target: SCNA; (-) strand; PAM type: NRG; PAM sequence: GAG
tacttgggaggctgaggcat

SEQ ID NO: 15053 - DNA, 20 bp, Artificial Sequence
  Description of Artificial Sequence: Synthetic oligonucleotide
  Target: SCNA; (-) strand; PAM type: NRG; PAM sequence: AGG
tccagctacttgggaggctg

SEQ ID NO: 15054 - DNA, 20 bp, Artificial Sequence
  Description of Artificial Sequence: Synthetic oligonucleotide
  Target: SCNA; (-) strand; PAM type: NRG; PAM sequence: GAG
ttccagctacttgggaggct

SEQ ID NO: 15055 - DNA, 20 bp, Artificial Sequence
  Description of Artificial Sequence: Synthetic oligonucleotide
  Target: SCNA; (-) strand; PAM type: NRG; PAM sequence: AGG
tatggttccagctacttggg

SEQ ID NO: 15056 - DNA, 20 bp, Artificial Sequence
  Description of Artificial Sequence: Synthetic oligonucleotide
  Target: SCNA; (-) strand; PAM type: NRG; PAM sequence: GAG
ctatggttccagctacttgg

SEQ ID NO: 15057 - DNA, 20 bp, Artificial Sequence
  Description of Artificial Sequence: Synthetic oligonucleotide
  Target: SCNA; (-) strand; PAM type: NRG; PAM sequence: GGG
gcctatggttccagctactt

SEQ ID NO: 15058 - DNA, 20 bp, Artificial Sequence
  Description of Artificial Sequence: Synthetic oligonucleotide
  Target: SCNA; (-) strand; PAM type: NRG; PAM sequence: TGG
cgcctatggttccagctact

SEQ ID NO: 15059 - DNA, 20 bp, Artificial Sequence
  Description of Artificial Sequence: Synthetic oligonucleotide
  Target: SCNA; (-) strand; PAM type: NRG; PAM sequence: CAG
gtggtacacgcctatggttc

SEQ ID NO: 15060 - DNA, 20 bp, Artificial Sequence
  Description of Artificial Sequence: Synthetic oligonucleotide
  Target: SCNA; (-) strand; PAM type: NRG; PAM sequence: TGG
ggcatggtggtacacgccta

SEQ ID NO: 15061 - DNA, 20 bp, Artificial Sequence
  Description of Artificial Sequence: Synthetic oligonucleotide
  Target: SCNA; (-) strand; PAM type: NRG; PAM sequence: TGG
caaaaattagccgggcatgg

SEQ ID NO: 15062 - DNA, 20 bp, Artificial Sequence
  Description of Artificial Sequence: Synthetic oligonucleotide
  Target: SCNA; (-) strand; PAM type: NRG; PAM sequence: TGG
atacaaaaattagccgggca

SEQ ID NO: 15063 - DNA, 20 bp, Artificial Sequence
  Description of Artificial Sequence: Synthetic oligonucleotide
  Target: SCNA; (-) strand; PAM type: NRG; PAM sequence: GGG
taaaaatacaaaaattagcc

SEQ ID NO: 15064 - DNA, 20 bp, Artificial Sequence
  Description of Artificial Sequence: Synthetic oligonucleotide
  Target: SCNA; (-) strand; PAM type: NRG; PAM sequence: CGG
ctaaaaatacaaaaattagc

SEQ ID NO: 15065 - DNA, 20 bp, Artificial Sequence
  Description of Artificial Sequence: Synthetic oligonucleotide
  Target: SCNA; (-) strand; PAM type: NRG; PAM sequence: TAG
tctactaaaaatacaaaaat

SEQ ID NO: 15066 - DNA, 20 bp, Artificial Sequence
  Description of Artificial Sequence: Synthetic oligonucleotide
  Target: SCNA; (-) strand; PAM type: NRG; PAM sequence: TGG
ggagaccagtctggccaaca

SEQ ID NO: 15067 - DNA, 20 bp, Artificial Sequence
  Description of Artificial Sequence: Synthetic oligonucleotide
  Target: SCNA; (-) strand; PAM type: NRG; PAM sequence: TGG
ccaggagttggagaccagtc

SEQ ID NO: 15068 - DNA, 20 bp, Artificial Sequence
  Description of Artificial Sequence: Synthetic oligonucleotide
  Target: SCNA; (-) strand; PAM type: NRG; PAM sequence: CAG
tgaggccaggagttggagac

SEQ ID NO: 15069 - DNA, 20 bp, Artificial Sequence
  Description of Artificial Sequence: Synthetic oligonucleotide
  Target: SCNA; (-) strand; PAM type: NRG; PAM sequence: GAG
ttacttgaggccaggagttg

SEQ ID NO: 15070 - DNA, 20 bp, Artificial Sequence
  Description of Artificial Sequence: Synthetic oligonucleotide
  Target: SCNA; (-) strand; PAM type: NRG; PAM sequence: TGG
ggttacttgaggccaggagt

SEQ ID NO: 15071 - DNA, 20 bp, Artificial Sequence
  Description of Artificial Sequence: Synthetic oligonucleotide
  Target: SCNA; (-) strand; PAM type: NRG; PAM sequence: GAG
gccaggttacttgaggccag

SEQ ID NO: 15072 - DNA, 20 bp, Artificial Sequence
  Description of Artificial Sequence: Synthetic oligonucleotide
  Target: SCNA; (-) strand; PAM type: NRG; PAM sequence: AGG
tggccaggttacttgaggcc

SEQ ID NO: 15073 - DNA, 20 bp, Artificial Sequence
  Description of Artificial Sequence: Synthetic oligonucleotide
  Target: SCNA; (-) strand; PAM type: NRG; PAM sequence: CAG
gtggccaggttacttgaggc

SEQ ID NO: 15074 - DNA, 20 bp, Artificial Sequence
  Description of Artificial Sequence: Synthetic oligonucleotide
  Target: SCNA; (-) strand; PAM type: NRG; PAM sequence: AGG
caaagtggccaggttacttg

SEQ ID NO: 15075 - DNA, 20 bp, Artificial Sequence
  Description of Artificial Sequence: Synthetic oligonucleotide
  Target: SCNA; (-) strand; PAM type: NRG; PAM sequence: GAG
ccaaagtggccaggttactt

SEQ ID NO: 15076 - DNA, 20 bp, Artificial Sequence
  Description of Artificial Sequence: Synthetic oligonucleotide
  Target: SCNA; (-) strand; PAM type: NRG; PAM sequence: AGG
ctttgtgagccaaagtggcc

SEQ ID NO: 15077 - DNA, 20 bp, Artificial Sequence
  Description of Artificial Sequence: Synthetic oligonucleotide
  Target: SCNA; (-) strand; PAM type: NRG; PAM sequence: CAG
actttgtgagccaaagtggc

SEQ ID NO: 15078 - DNA, 20 bp, Artificial Sequence
  Description of Artificial Sequence: Synthetic oligonucleotide
  Target: SCNA; (-) strand; PAM type: NRG; PAM sequence: TGG
ccgcactttgtgagccaaag

SEQ ID NO: 15079 - DNA, 20 bp, Artificial Sequence
  Description of Artificial Sequence: Synthetic oligonucleotide
  Target: SCNA; (-) strand; PAM type: NRG; PAM sequence: AAG
atcccgcactttgtgagcca

SEQ ID NO: 15080 - DNA, 20 bp, Artificial Sequence
  Description of Artificial Sequence: Synthetic oligonucleotide
  Target: SCNA; (-) strand; PAM type: NRG; PAM sequence: GAG
cctgtaatcccgcactttgt

SEQ ID NO: 15081 - DNA, 20 bp, Artificial Sequence
  Description of Artificial Sequence: Synthetic oligonucleotide
  Target: SCNA; (-) strand; PAM type: NRG; PAM sequence: CAG
catgtcgaggatgggcacag

SEQ ID NO: 15082 - DNA, 20 bp, Artificial Sequence
  Description of Artificial Sequence: Synthetic oligonucleotide
  Target: SCNA; (-) strand; PAM type: NRG; PAM sequence: CAG
aggcatgtcgaggatgggca

SEQ ID NO: 15083 - DNA, 20 bp, Artificial Sequence
  Description of Artificial Sequence: Synthetic oligonucleotide
  Target: SCNA; (-) strand; PAM type: NRG; PAM sequence: GGG
ttaaaaggcatgtcgaggat

SEQ ID NO: 15084 - DNA, 20 bp, Artificial Sequence
  Description of Artificial Sequence: Synthetic oligonucleotide
  Target: SCNA; (-) strand; PAM type: NRG; PAM sequence: TGG
attaaaaggcatgtcgagga

SEQ ID NO: 15085 - DNA, 20 bp, Artificial Sequence
  Description of Artificial Sequence: Synthetic oligonucleotide
  Target: SCNA; (-) strand; PAM type: NRG; PAM sequence: AGG
cattattaaaaggcatgtcg

SEQ ID NO: 15086 - DNA, 20 bp, Artificial Sequence
  Description of Artificial Sequence: Synthetic oligonucleotide
  Target: SCNA; (-) strand; PAM type: NRG; PAM sequence: GAG
gcattattaaaaggcatgtc

SEQ ID NO: 15087 - DNA, 20 bp, Artificial Sequence
  Description of Artificial Sequence: Synthetic oligonucleotide
  Target: SCNA; (-) strand; PAM type: NRG; PAM sequence: AGG
ttcctcacggcattattaaa

SEQ ID NO: 15088 - DNA, 20 bp, Artificial Sequence
  Description of Artificial Sequence: Synthetic oligonucleotide
  Target: SCNA; (-) strand; PAM type: NRG; PAM sequence: AAG
attcctcacggcattattaa

SEQ ID NO: 15089 - DNA, 20 bp, Artificial Sequence
  Description of Artificial Sequence: Synthetic oligonucleotide
  Target: SCNA; (-) strand; PAM type: NRG; PAM sequence: CGG
tggttatgtattattcctca

SEQ ID NO: 15090 - DNA, 20 bp, Artificial Sequence
  Description of Artificial Sequence: Synthetic oligonucleotide
  Target: SCNA; (-) strand; PAM type: NRG; PAM sequence: TGG
agttcaagtatgttgtagtt

SEQ ID NO: 15091 - DNA, 20 bp, Artificial Sequence
  Description of Artificial Sequence: Synthetic oligonucleotide
  Target: SCNA; (-) strand; PAM type: NRG; PAM sequence: TAG
aattgagttcaagtatgttg

SEQ ID NO: 15092 - DNA, 20 bp, Artificial Sequence
  Description of Artificial Sequence: Synthetic oligonucleotide
  Target: SCNA; (-) strand; PAM type: NRG; PAM sequence: AAG
ctccattaaaaattgagttc

SEQ ID NO: 15093 - DNA, 20 bp, Artificial Sequence
  Description of Artificial Sequence: Synthetic oligonucleotide
  Target: SCNA; (-) strand; PAM type: NRG; PAM sequence: GAG
taatggctccattaaaaatt

SEQ ID NO: 15094 - DNA, 20 bp, Artificial Sequence
  Description of Artificial Sequence: Synthetic oligonucleotide
  Target: SCNA; (-) strand; PAM type: NRG; PAM sequence: TGG
caagaaaagaaactatataa

SEQ ID NO: 15095 - DNA, 20 bp, Artificial Sequence
  Description of Artificial Sequence: Synthetic oligonucleotide
  Target: SCNA; (-) strand; PAM type: NRG; PAM sequence: AAG
aaatgaagatatcacaagaa

SEQ ID NO: 15096 - DNA, 20 bp, Artificial Sequence
  Description of Artificial Sequence: Synthetic oligonucleotide
  Target: SCNA; (-) strand; PAM type: NRG; PAM sequence: AAG
aaaccaaatgaagatatcac

SEQ ID NO: 15097 - DNA, 20 bp, Artificial Sequence
  Description of Artificial Sequence: Synthetic oligonucleotide
  Target: SCNA; (-) strand; PAM type: NRG; PAM sequence: AAG
ctgataatcaaaaccaaatg

SEQ ID NO: 15098 - DNA, 20 bp, Artificial Sequence
  Description of Artificial Sequence: Synthetic oligonucleotide
  Target: SCNA; (-) strand; PAM type: NRG; PAM sequence: GAG
catttcccaactaattttgt

SEQ ID NO: 15099 - DNA, 20 bp, Artificial Sequence
  Description of Artificial Sequence: Synthetic oligonucleotide
  Target: SCNA; (-) strand; PAM type: NRG; PAM sequence: GAG
tctcttacaaaacagaagag

SEQ ID NO: 15100 - DNA, 20 bp, Artificial Sequence
  Description of Artificial Sequence: Synthetic oligonucleotide
  Target: SCNA; (-) strand; PAM type: NRG; PAM sequence: AGG
tatctcttacaaaacagaag

SEQ ID NO: 15101 - DNA, 20 bp, Artificial Sequence
  Description of Artificial Sequence: Synthetic oligonucleotide
  Target: SCNA; (-) strand; PAM type: NRG; PAM sequence: GAG
atatctcttacaaaacagaa

SEQ ID NO: 15102 - DNA, 20 bp, Artificial Sequence
  Description of Artificial Sequence: Synthetic oligonucleotide
  Target: SCNA; (-) strand; PAM type: NRG; PAM sequence: AAG
taatatctcttacaaaacag

SEQ ID NO: 15103 - DNA, 20 bp, Artificial Sequence
  Description of Artificial Sequence: Synthetic oligonucleotide
  Target: SCNA; (-) strand; PAM type: NRG; PAM sequence: CAG
aattaatatctcttacaaaa

SEQ ID NO: 15104 - DNA, 20 bp, Artificial Sequence
  Description of Artificial Sequence: Synthetic oligonucleotide
  Target: SCNA; (-) strand; PAM type: NRG; PAM sequence: TAG
aaagaggaattaatactaat

SEQ ID NO: 15105 - DNA, 20 bp, Artificial Sequence
  Description of Artificial Sequence: Synthetic oligonucleotide
  Target: SCNA; (-) strand; PAM type: NRG; PAM sequence: AGG
attctaccaaacatttaaag

SEQ ID NO: 15106 - DNA, 20 bp, Artificial Sequence
  Description of Artificial Sequence: Synthetic oligonucleotide
  Target: SCNA; (-) strand; PAM type: NRG; PAM sequence: GAG
aattctaccaaacatttaaa

SEQ ID NO: 15107 - DNA, 20 bp, Artificial Sequence
  Description of Artificial Sequence: Synthetic oligonucleotide
  Target: SCNA; (-) strand; PAM type: NRG; PAM sequence: AAG
taaattctaccaaacattta

SEQ ID NO: 15108 - DNA, 20 bp, Artificial Sequence
  Description of Artificial Sequence: Synthetic oligonucleotide
  Target: SCNA; (-) strand; PAM type: NRG; PAM sequence: TGG
ccaggccgagatggcatcac

SEQ ID NO: 15109 - DNA, 20 bp, Artificial Sequence
  Description of Artificial Sequence: Synthetic oligonucleotide
  Target: SCNA; (-) strand; PAM type: NRG; PAM sequence: TGG
aagaaaatcccaggccgaga

SEQ ID NO: 15110 - DNA, 20 bp, Artificial Sequence
  Description of Artificial Sequence: Synthetic oligonucleotide
  Target: SCNA; (-) strand; PAM type: NRG; PAM sequence: GAG
tgcaaagaaaatcccaggcc

SEQ ID NO: 15111 - DNA, 20 bp, Artificial Sequence
  Description of Artificial Sequence: Synthetic oligonucleotide
  Target: SCNA; (-) strand; PAM type: NRG; PAM sequence: AGG
ctacctgcaaagaaaatccc

SEQ ID NO: 15112 - DNA, 20 bp, Artificial Sequence
  Description of Artificial Sequence: Synthetic oligonucleotide
  Target: SCNA; (-) strand; PAM type: NRG; PAM sequence: CAG
cctacctgcaaagaaaatcc

SEQ ID NO: 15113 - DNA, 20 bp, Artificial Sequence
  Description of Artificial Sequence: Synthetic oligonucleotide
  Target: SCNA; (-) strand; PAM type: NRG; PAM sequence: AAG
aaaaaaaaaacctacctgca

SEQ ID NO: 15114 - DNA, 20 bp, Artificial Sequence
  Description of Artificial Sequence: Synthetic oligonucleotide
  Target: SCNA; (-) strand; PAM type: NRG; PAM sequence: TAG
acacagcgaatagattaaat

SEQ ID NO: 15115 - DNA, 20 bp, Artificial Sequence
  Description of Artificial Sequence: Synthetic oligonucleotide
  Target: SCNA; (-) strand; PAM type: NRG; PAM sequence: TAG
tagatttgtaacacagcgaa

SEQ ID NO: 15116 - DNA, 20 bp, Artificial Sequence
  Description of Artificial Sequence: Synthetic oligonucleotide
  Target: SCNA; (-) strand; PAM type: NRG; PAM sequence: CAG
atctgaatagatttgtaaca

SEQ ID NO: 15117 - DNA, 20 bp, Artificial Sequence
  Description of Artificial Sequence: Synthetic oligonucleotide
  Target: SCNA; (-) strand; PAM type: NRG; PAM sequence: TAG
gaagaaacagtaaatctgaa

SEQ ID NO: 15118 - DNA, 20 bp, Artificial Sequence
  Description of Artificial Sequence: Synthetic oligonucleotide
  Target: SCNA; (-) strand; PAM type: NRG; PAM sequence: CAG
aaaactggcccaagaagaaa

SEQ ID NO: 15119 - DNA, 20 bp, Artificial Sequence
  Description of Artificial Sequence: Synthetic oligonucleotide
  Target: SCNA; (-) strand; PAM type: NRG; PAM sequence: AAG
atgaataaaactggcccaag

SEQ ID NO: 15120 - DNA, 20 bp, Artificial Sequence
  Description of Artificial Sequence: Synthetic oligonucleotide
  Target: SCNA; (-) strand; PAM type: NRG; PAM sequence: AAG
tagatgaataaaactggccc

SEQ ID NO: 15121 - DNA, 20 bp, Artificial Sequence
  Description of Artificial Sequence: Synthetic oligonucleotide
  Target: SCNA; (-) strand; PAM type: NRG; PAM sequence: TGG
tactgttagatgaataaaac

SEQ ID NO: 15122 - DNA, 20 bp, Artificial Sequence
  Description of Artificial Sequence: Synthetic oligonucleotide
  Target: SCNA; (-) strand; PAM type: NRG; PAM sequence: TAG
gggaaattagaaaatactgt

SEQ ID NO: 15123 - DNA, 20 bp, Artificial Sequence
  Description of Artificial Sequence: Synthetic oligonucleotide
  Target: SCNA; (-) strand; PAM type: NRG; PAM sequence: TAG
aaatgtatcaaaagggaaat

SEQ ID NO: 15124 - DNA, 20 bp, Artificial Sequence
  Description of Artificial Sequence: Synthetic oligonucleotide
  Target: SCNA; (-) strand; PAM type: NRG; PAM sequence: GGG
taatagaaaatgtatcaaaa

SEQ ID NO: 15125 - DNA, 20 bp, Artificial Sequence
  Description of Artificial Sequence: Synthetic oligonucleotide
  Target: SCNA; (-) strand; PAM type: NRG; PAM sequence: AGG
ttaatagaaaatgtatcaaa

SEQ ID NO: 15126 - DNA, 20 bp, Artificial Sequence
  Description of Artificial Sequence: Synthetic oligonucleotide
  Target: SCNA; (-) strand; PAM type: NRG; PAM sequence: AAG
tttaatagaaaatgtatcaa

SEQ ID NO: 15127 - DNA, 20 bp, Artificial Sequence
  Description of Artificial Sequence: Synthetic oligonucleotide
  Target: SCNA; (-) strand; PAM type: NRG; PAM sequence: TAG
gaaaatgaaagtatctttaa

SEQ ID NO: 15128 - DNA, 20 bp, Artificial Sequence
  Description of Artificial Sequence: Synthetic oligonucleotide
  Target: SCNA; (-) strand; PAM type: NRG; PAM sequence: AAG
tttattttgattgaaaatga

SEQ ID NO: 15129 - DNA, 20 bp, Artificial Sequence
  Description of Artificial Sequence: Synthetic oligonucleotide
  Target: SCNA; (-) strand; PAM type: NRG; PAM sequence: CAG
ttgcgacaattgatatattc

SEQ ID NO: 15130 - DNA, 20 bp, Artificial Sequence
  Description of Artificial Sequence: Synthetic oligonucleotide
  Target: SCNA; (-) strand; PAM type: NRG; PAM sequence: AAG
cacacaagttatagaataaa

SEQ ID NO: 15131 - DNA, 20 bp, Artificial Sequence
  Description of Artificial Sequence: Synthetic oligonucleotide
  Target: SCNA; (-) strand; PAM type: NRG; PAM sequence: TAG
aaagttacccacacaagtta

SEQ ID NO: 15132 - DNA, 20 bp, Artificial Sequence
  Description of Artificial Sequence: Synthetic oligonucleotide
  Target: SCNA; (-) strand; PAM type: NRG; PAM sequence: AAG
aaaataaaagttacccacac

SEQ ID NO: 15133 - DNA, 20 bp, Artificial Sequence
  Description of Artificial Sequence: Synthetic oligonucleotide
  Target: SCNA; (-) strand; PAM type: NRG; PAM sequence: AAG
gatgacgcatagtaaaataa

SEQ ID NO: 15134 - DNA, 20 bp, Artificial Sequence
  Description of Artificial Sequence: Synthetic oligonucleotide
  Target: SCNA; (-) strand; PAM type: NRG; PAM sequence: TAG
atgtccaatgggatgacgca

SEQ ID NO: 15135 - DNA, 20 bp, Artificial Sequence
  Description of Artificial Sequence: Synthetic oligonucleotide
  Target: SCNA; (-) strand; PAM type: NRG; PAM sequence: GGG
ttttgccatacatgtccaat

SEQ ID NO: 15136 - DNA, 20 bp, Artificial Sequence
  Description of Artificial Sequence: Synthetic oligonucleotide
  Target: SCNA; (-) strand; PAM type: NRG; PAM sequence: TGG
tttttgccatacatgtccaa

SEQ ID NO: 15137 - DNA, 20 bp, Artificial Sequence
  Description of Artificial Sequence: Synthetic oligonucleotide
  Target: SCNA; (-) strand; PAM type: NRG; PAM sequence: AGG
atcaatggaatgccaaagga

SEQ ID NO: 15138 - DNA, 20 bp, Artificial Sequence
  Description of Artificial Sequence: Synthetic oligonucleotide
  Target: SCNA; (-) strand; PAM type: NRG; PAM sequence: AAG
aatcaatggaatgccaaagg

SEQ ID NO: 15139 - DNA, 20 bp, Artificial Sequence
  Description of Artificial Sequence: Synthetic oligonucleotide
  Target: SCNA; (-) strand; PAM type: NRG; PAM sequence: AGG
ggaaatcaatggaatgccaa

SEQ ID NO: 15140 - DNA, 20 bp, Artificial Sequence
  Description of Artificial Sequence: Synthetic oligonucleotide
  Target: SCNA; (-) strand; PAM type: NRG; PAM sequence: AAG
gggaaatcaatggaatgcca

SEQ ID NO: 15141 - DNA, 20 bp, Artificial Sequence
  Description of Artificial Sequence: Synthetic oligonucleotide
  Target: SCNA; (-) strand; PAM type: NRG; PAM sequence: TGG
tggaaagttagggaaatcaa

SEQ ID NO: 15142 - DNA, 20 bp, Artificial Sequence
  Description of Artificial Sequence: Synthetic oligonucleotide
  Target: SCNA; (-) strand; PAM type: NRG; PAM sequence: GGG
aatttctaaatggaaagtta

SEQ ID NO: 15143 - DNA, 20 bp, Artificial Sequence
  Description of Artificial Sequence: Synthetic oligonucleotide
  Target: SCNA; (-) strand; PAM type: NRG; PAM sequence: AGG
aaatttctaaatggaaagtt

SEQ ID NO: 15144 - DNA, 20 bp, Artificial Sequence
  Description of Artificial Sequence: Synthetic oligonucleotide
  Target: SCNA; (-) strand; PAM type: NRG; PAM sequence: TAG
taaatttctaaatggaaagt

SEQ ID NO: 15145 - DNA, 20 bp, Artificial Sequence
  Description of Artificial Sequence: Synthetic oligonucleotide
  Target: SCNA; (-) strand; PAM type: NRG; PAM sequence: AAG
aaaataaatttctaaatgga

SEQ ID NO: 15146 - DNA, 20 bp, Artificial Sequence
  Description of Artificial Sequence: Synthetic oligonucleotide
  Target: SCNA; (-) strand; PAM type: NRG; PAM sequence: TGG
ttctaaaataaatttctaaa

SEQ ID NO: 15147 - DNA, 20 bp, Artificial Sequence
  Description of Artificial Sequence: Synthetic oligonucleotide
  Target: SCNA; (-) strand; PAM type: NRG; PAM sequence: TAG
tgcattagagaatatatttt

SEQ ID NO: 15148 - DNA, 20 bp, Artificial Sequence
  Description of Artificial Sequence: Synthetic oligonucleotide
  Target: SCNA; (-) strand; PAM type: NRG; PAM sequence: GAG
gtttactaacccctgcatta

SEQ ID NO: 15149 - DNA, 20 bp, Artificial Sequence
  Description of Artificial Sequence: Synthetic oligonucleotide
  Target: SCNA; (-) strand; PAM type: NRG; PAM sequence: TAG
aagtttactaacccctgcat

SEQ ID NO: 15150 - DNA, 20 bp, Artificial Sequence
  Description of Artificial Sequence: Synthetic oligonucleotide
  Target: SCNA; (-) strand; PAM type: NRG; PAM sequence: AAG
tacttgaccctttacaggaa

SEQ ID NO: 15151 - DNA, 20 bp, Artificial Sequence
  Description of Artificial Sequence: Synthetic oligonucleotide
  Target: SCNA; (-) strand; PAM type: NRG; PAM sequence: AGG
cttactacttgaccctttac

SEQ ID NO: 15152 - DNA, 20 bp, Artificial Sequence
  Description of Artificial Sequence: Synthetic oligonucleotide
  Target: SCNA; (-) strand; PAM type: NRG; PAM sequence: CAG
acttactacttgacccttta

SEQ ID NO: 15153 - DNA, 20 bp, Artificial Sequence
  Description of Artificial Sequence: Synthetic oligonucleotide
  Target: SCNA; (-) strand; PAM type: NRG; PAM sequence: TAG
gaaatcatatgtagtccaca

SEQ ID NO: 15154 - DNA, 20 bp, Artificial Sequence
  Description of Artificial Sequence: Synthetic oligonucleotide
  Target: SCNA; (-) strand; PAM type: NRG; PAM sequence: TAG
gatgtaaaagaaatcatatg

SEQ ID NO: 15155 - DNA, 20 bp, Artificial Sequence
  Description of Artificial Sequence: Synthetic oligonucleotide
  Target: SCNA; (-) strand; PAM type: NRG; PAM sequence: AAG
aagaggaagaaaggatgtaa

SEQ ID NO: 15156 - DNA, 20 bp, Artificial Sequence
  Description of Artificial Sequence: Synthetic oligonucleotide
  Target: SCNA; (-) strand; PAM type: NRG; PAM sequence: AGG
aagatgaagaagaggaagaa

SEQ ID NO: 15157 - DNA, 20 bp, Artificial Sequence
  Description of Artificial Sequence: Synthetic oligonucleotide
  Target: SCNA; (-) strand; PAM type: NRG; PAM sequence: AAG
gaagatgaagaagaggaaga

SEQ ID NO: 15158 - DNA, 20 bp, Artificial Sequence
  Description of Artificial Sequence: Synthetic oligonucleotide
  Target: SCNA; (-) strand; PAM type: NRG; PAM sequence: AAG
ggaggaagatgaagaagagg

SEQ ID NO: 15159 - DNA, 20 bp, Artificial Sequence
  Description of Artificial Sequence: Synthetic oligonucleotide
  Target: SCNA; (-) strand; PAM type: NRG; PAM sequence: AGG
ggaggaggaagatgaagaag

SEQ ID NO: 15160 - DNA, 20 bp, Artificial Sequence
  Description of Artificial Sequence: Synthetic oligonucleotide
  Target: SCNA; (-) strand; PAM type: NRG; PAM sequence: GAG
aggaggaggaagatgaagaa

SEQ ID NO: 15161 - DNA, 20 bp, Artificial Sequence
  Description of Artificial Sequence: Synthetic oligonucleotide
  Target: SCNA; (-) strand; PAM type: NRG; PAM sequence: AAG
agaggaggaggaagatgaag

SEQ ID NO: 15162 - DNA, 20 bp, Artificial Sequence
  Description of Artificial Sequence: Synthetic oligonucleotide
  Target: SCNA; (-) strand; PAM type: NRG; PAM sequence: AAG
aaaagaggaggaggaagatg

SEQ ID NO: 15163 - DNA, 20 bp, Artificial Sequence
  Description of Artificial Sequence: Synthetic oligonucleotide
  Target: SCNA; (-) strand; PAM type: NRG; PAM sequence: AAG
taaaaaaaaagaggaggagg

SEQ ID NO: 15164 - DNA, 20 bp, Artificial Sequence
  Description of Artificial Sequence: Synthetic oligonucleotide
  Target: SCNA; (-) strand; PAM type: NRG; PAM sequence: AGG
ccttaaaaaaaaagaggagg

SEQ ID NO: 15165 - DNA, 20 bp, Artificial Sequence
  Description of Artificial Sequence: Synthetic oligonucleotide
  Target: SCNA; (-) strand; PAM type: NRG; PAM sequence: GAG
tccttaaaaaaaaagaggag

SEQ ID NO: 15166 - DNA, 20 bp, Artificial Sequence
  Description of Artificial Sequence: Synthetic oligonucleotide
  Target: SCNA; (-) strand; PAM type: NRG; PAM sequence: AGG
ggtccttaaaaaaaaagagg

SEQ ID NO: 15167 - DNA, 20 bp, Artificial Sequence
  Description of Artificial Sequence: Synthetic oligonucleotide
  Target: SCNA; (-) strand; PAM type: NRG; PAM sequence: GAG
gggtccttaaaaaaaaagag

SEQ ID NO: 15168 - DNA, 20 bp, Artificial Sequence
  Description of Artificial Sequence: Synthetic oligonucleotide
  Target: SCNA; (-) strand; PAM type: NRG; PAM sequence: AGG
aagggtccttaaaaaaaaag

SEQ ID NO: 15169 - DNA, 20 bp, Artificial Sequence
  Description of Artificial Sequence: Synthetic oligonucleotide
  Target: SCNA; (-) strand; PAM type: NRG; PAM sequence: GAG
aaagggtccttaaaaaaaaa

SEQ ID NO: 15170 - DNA, 20 bp, Artificial Sequence
  Description of Artificial Sequence: Synthetic oligonucleotide
  Target: SCNA; (-) strand; PAM type: NRG; PAM sequence: AAG
ttaaagggtccttaaaaaaa

SEQ ID NO: 15171 - DNA, 20 bp, Artificial Sequence
  Description of Artificial Sequence: Synthetic oligonucleotide
  Target: SCNA; (-) strand; PAM type: NRG; PAM sequence: GGG
atagtttttacatttttaaa

SEQ ID NO: 15172 - DNA, 20 bp, Artificial Sequence
  Description of Artificial Sequence: Synthetic oligonucleotide
  Target: SCNA; (-) strand; PAM type: NRG; PAM sequence: AGG
aatagtttttacatttttaa

SEQ ID NO: 15173 - DNA, 20 bp, Artificial Sequence
  Description of Artificial Sequence: Synthetic oligonucleotide
  Target: SCNA; (-) strand; PAM type: NRG; PAM sequence: AAG
gaatagtttttacattttta

SEQ ID NO: 15174 - DNA, 20 bp, Artificial Sequence
  Description of Artificial Sequence: Synthetic oligonucleotide
  Target: SCNA; (-) strand; PAM type: NRG; PAM sequence: TAG
gacaacttgcaagttaagaa

SEQ ID NO: 15175 - DNA, 20 bp, Artificial Sequence
  Description of Artificial Sequence: Synthetic oligonucleotide
  Target: SCNA; (-) strand; PAM type: NRG; PAM sequence: AAG
acgtggacaacttgcaagtt

SEQ ID NO: 15176 - DNA, 20 bp, Artificial Sequence
  Description of Artificial Sequence: Synthetic oligonucleotide
  Target: SCNA; (-) strand; PAM type: NRG; PAM sequence: AAG
tcattacgtggacaacttgc

SEQ ID NO: 15177 - DNA, 20 bp, Artificial Sequence
  Description of Artificial Sequence: Synthetic oligonucleotide
  Target: SCNA; (-) strand; PAM type: NRG; PAM sequence: TGG
ctctctacatgctcattacg

SEQ ID NO: 15178 - DNA, 20 bp, Artificial Sequence
  Description of Artificial Sequence: Synthetic oligonucleotide
  Target: SCNA; (-) strand; PAM type: NRG; PAM sequence: GAG
ctctttcattagtgcttagt

SEQ ID NO: 15179 - DNA, 20 bp, Artificial Sequence
  Description of Artificial Sequence: Synthetic oligonucleotide
  Target: SCNA; (-) strand; PAM type: NRG; PAM sequence: TAG
atttctctttcattagtgct

SEQ ID NO: 15180 - DNA, 20 bp, Artificial Sequence
  Description of Artificial Sequence: Synthetic oligonucleotide
  Target: SCNA; (-) strand; PAM type: NRG; PAM sequence: TAG
ttgtcacatttctctttcat

SEQ ID NO: 15181 - DNA, 20 bp, Artificial Sequence
  Description of Artificial Sequence: Synthetic oligonucleotide
  Target: SCNA; (-) strand; PAM type: NRG; PAM sequence: CAG
gctgaatctttctaacaaga

SEQ ID NO: 15182 - DNA, 20 bp, Artificial Sequence
  Description of Artificial Sequence: Synthetic oligonucleotide
  Target: SCNA; (-) strand; PAM type: NRG; PAM sequence: AAG
ccaagctgaatctttctaac

SEQ ID NO: 15183 - DNA, 20 bp, Artificial Sequence
  Description of Artificial Sequence: Synthetic oligonucleotide
  Target: SCNA; (-) strand; PAM type: NRG; PAM sequence: AAG
gccttctgaggtaggagtcc

SEQ ID NO: 15184 - DNA, 20 bp, Artificial Sequence
  Description of Artificial Sequence: Synthetic oligonucleotide
  Target: SCNA; (-) strand; PAM type: NRG; PAM sequence: GAG
tgaaatgccttctgaggtag

SEQ ID NO: 15185 - DNA, 20 bp, Artificial Sequence
  Description of Artificial Sequence: Synthetic oligonucleotide
  Target: SCNA; (-) strand; PAM type: NRG; PAM sequence: AGG
tatgaaatgccttctgaggt

SEQ ID NO: 15186 - DNA, 20 bp, Artificial Sequence
  Description of Artificial Sequence: Synthetic oligonucleotide
  Target: SCNA; (-) strand; PAM type: NRG; PAM sequence: TAG
ttatgaaatgccttctgagg

SEQ ID NO: 15187 - DNA, 20 bp, Artificial Sequence
  Description of Artificial Sequence: Synthetic oligonucleotide
  Target: SCNA; (-) strand; PAM type: NRG; PAM sequence: AGG
ggcttatgaaatgccttctg

SEQ ID NO: 15188 - DNA, 20 bp, Artificial Sequence
  Description of Artificial Sequence: Synthetic oligonucleotide
  Target: SCNA; (-) strand; PAM type: NRG; PAM sequence: GAG
aggcttatgaaatgccttct

SEQ ID NO: 15189 - DNA, 20 bp, Artificial Sequence
  Description of Artificial Sequence: Synthetic oligonucleotide
  Target: SCNA; (-) strand; PAM type: NRG; PAM sequence: AGG
gcctgtggatcctgacaatg

SEQ ID NO: 15190 - DNA, 20 bp, Artificial Sequence
  Description of Artificial Sequence: Synthetic oligonucleotide
  Target: SCNA; (-) strand; PAM type: NRG; PAM sequence: GAG
tgcctgtggatcctgacaat

SEQ ID NO: 15191 - DNA, 20 bp, Artificial Sequence
  Description of Artificial Sequence: Synthetic oligonucleotide
  Target: SCNA; (-) strand; PAM type: NRG; PAM sequence: TGG
aattctggaagatatgcctg

SEQ ID NO: 15192 - DNA, 20 bp, Artificial Sequence
  Description of Artificial Sequence: Synthetic oligonucleotide
  Target: SCNA; (-) strand; PAM type: NRG; PAM sequence: AAG
cccacaggaaggaattctgg

SEQ ID NO: 15193 - DNA, 20 bp, Artificial Sequence
  Description of Artificial Sequence: Synthetic oligonucleotide
  Target: SCNA; (-) strand; PAM type: NRG; PAM sequence: TGG
agccccacaggaaggaattc

SEQ ID NO: 15194 - DNA, 20 bp, Artificial Sequence
  Description of Artificial Sequence: Synthetic oligonucleotide
  Target: SCNA; (-) strand; PAM type: NRG; PAM sequence: AGG
gaagaaggagccccacagga

SEQ ID NO: 15195 - DNA, 20 bp, Artificial Sequence
  Description of Artificial Sequence: Synthetic oligonucleotide
  Target: SCNA; (-) strand; PAM type: NRG; PAM sequence: AAG
tgaagaaggagccccacagg

SEQ ID NO: 15196 - DNA, 20 bp, Artificial Sequence
  Description of Artificial Sequence: Synthetic oligonucleotide
  Target: SCNA; (-) strand; PAM type: NRG; PAM sequence: AGG
gaatgaagaaggagccccac

SEQ ID NO: 15197 - DNA, 20 bp, Artificial Sequence
  Description of Artificial Sequence: Synthetic oligonucleotide
  Target: SCNA; (-) strand; PAM type: NRG; PAM sequence: CAG
agaatgaagaaggagcccca

SEQ ID NO: 15198 - DNA, 20 bp, Artificial Sequence
  Description of Artificial Sequence: Synthetic oligonucleotide
  Target: SCNA; (-) strand; PAM type: NRG; PAM sequence: GAG
taaatattagaatgaagaag

SEQ ID NO: 15199 - DNA, 20 bp, Artificial Sequence
  Description of Artificial Sequence: Synthetic oligonucleotide
  Target: SCNA; (-) strand; PAM type: NRG; PAM sequence: AGG
tttaaatattagaatgaaga

SEQ ID NO: 15200 - DNA, 20 bp, Artificial Sequence
  Description of Artificial Sequence: Synthetic oligonucleotide
  Target: SCNA; (-) strand; PAM type: NRG; PAM sequence: AAG
ctttaaatattagaatgaag

SEQ ID NO: 15201 - DNA, 20 bp, Artificial Sequence
  Description of Artificial Sequence: Synthetic oligonucleotide
  Target: SCNA; (-) strand; PAM type: NRG; PAM sequence: AAG
ttactttaaatattagaatg

SEQ ID NO: 15202 - DNA, 20 bp, Artificial Sequence
  Description of Artificial Sequence: Synthetic oligonucleotide
  Target: SCNA; (-) strand; PAM type: NRG; PAM sequence: TAG
gtgcttcttactttaaatat

SEQ ID NO: 15203 - DNA, 20 bp, Artificial Sequence
  Description of Artificial Sequence: Synthetic oligonucleotide
  Target: SCNA; (-) strand; PAM type: NRG; PAM sequence: AAG
aacatggttctgatttttaa

SEQ ID NO: 15204 - DNA, 20 bp, Artificial Sequence
  Description of Artificial Sequence: Synthetic oligonucleotide
  Target: SCNA; (-) strand; PAM type: NRG; PAM sequence: TGG
tgtaagatttttccaaaaca

SEQ ID NO: 15205 - DNA, 20 bp, Artificial Sequence
  Description of Artificial Sequence: Synthetic oligonucleotide
  Target: SCNA; (-) strand; PAM type: NRG; PAM sequence: AAG
tggccaacatccctatatgt

SEQ ID NO: 15206 - DNA, 20 bp, Artificial Sequence
  Description of Artificial Sequence: Synthetic oligonucleotide
  Target: SCNA; (-) strand; PAM type: NRG; PAM sequence: TGG
tgtgccattttcaagatccg

SEQ ID NO: 15207 - DNA, 20 bp, Artificial Sequence
  Description of Artificial Sequence: Synthetic oligonucleotide
  Target: SCNA; (-) strand; PAM type: NRG; PAM sequence: AAG
tattaaggtgtgccattttc

SEQ ID NO: 15208 - DNA, 20 bp, Artificial Sequence
  Description of Artificial Sequence: Synthetic oligonucleotide
  Target: SCNA; (-) strand; PAM type: NRG; PAM sequence: AGG
gaatgccagtagtaatatta

SEQ ID NO: 15209 - DNA, 20 bp, Artificial Sequence
  Description of Artificial Sequence: Synthetic oligonucleotide
  Target: SCNA; (-) strand; PAM type: NRG; PAM sequence: AAG
agaatgccagtagtaatatt

SEQ ID NO: 15210 - DNA, 20 bp, Artificial Sequence
  Description of Artificial Sequence: Synthetic oligonucleotide
  Target: SCNA; (-) strand; PAM type: NRG; PAM sequence: TAG
tgtggagtttagaatgccag

SEQ ID NO: 15211 - DNA, 20 bp, Artificial Sequence
  Description of Artificial Sequence: Synthetic oligonucleotide
  Target: SCNA; (-) strand; PAM type: NRG; PAM sequence: CAG
cattgtggagtttagaatgc

SEQ ID NO: 15212 - DNA, 20 bp, Artificial Sequence
  Description of Artificial Sequence: Synthetic oligonucleotide
  Target: SCNA; (-) strand; PAM type: NRG; PAM sequence: TAG
cccggaggcattgtggagtt

SEQ ID NO: 15213 - DNA, 20 bp, Artificial Sequence
  Description of Artificial Sequence: Synthetic oligonucleotide
  Target: SCNA; (-) strand; PAM type: NRG; PAM sequence: GAG
gtttccccggaggcattgtg

SEQ ID NO: 15214 - DNA, 20 bp, Artificial Sequence
  Description of Artificial Sequence: Synthetic oligonucleotide
  Target: SCNA; (-) strand; PAM type: NRG; PAM sequence: TGG
atgtttccccggaggcattg

SEQ ID NO: 15215 - DNA, 20 bp, Artificial Sequence
  Description of Artificial Sequence: Synthetic oligonucleotide
  Target: SCNA; (-) strand; PAM type: NRG; PAM sequence: AGG
ttgccgcaatgtttccccgg

SEQ ID NO: 15216 - DNA, 20 bp, Artificial Sequence
  Description of Artificial Sequence: Synthetic oligonucleotide
  Target: SCNA; (-) strand; PAM type: NRG; PAM sequence: GAG
gttgccgcaatgtttccccg

SEQ ID NO: 15217 - DNA, 20 bp, Artificial Sequence
  Description of Artificial Sequence: Synthetic oligonucleotide
  Target: SCNA; (-) strand; PAM type: NRG; PAM sequence: CGG
atgttgccgcaatgtttccc

SEQ ID NO: 15218 - DNA, 20 bp, Artificial Sequence
  Description of Artificial Sequence: Synthetic oligonucleotide
  Target: SCNA; (-) strand; PAM type: NRG; PAM sequence: GGG
aaaaagtttacatactttga

SEQ ID NO: 15219 - DNA, 20 bp, Artificial Sequence
  Description of Artificial Sequence: Synthetic oligonucleotide
  Target: SCNA; (-) strand; PAM type: NRG; PAM sequence: AGG
caaaaagtttacatactttg

SEQ ID NO: 15220 - DNA, 20 bp, Artificial Sequence
  Description of Artificial Sequence: Synthetic oligonucleotide
  Target: SCNA; (-) strand; PAM type: NRG; PAM sequence: GAG
gcaaaaagtttacatacttt

SEQ ID NO: 15221 - DNA, 20 bp, Artificial Sequence
  Description of Artificial Sequence: Synthetic oligonucleotide
  Target: SCNA; (-) strand; PAM type: NRG; PAM sequence: AAG
tagtaaattacttgagcaaa

SEQ ID NO: 15222 - DNA, 20 bp, Artificial Sequence
  Description of Artificial Sequence: Synthetic oligonucleotide
  Target: SCNA; (-) strand; PAM type: NRG; PAM sequence: GAG
tcctaaatagtaaattactt

SEQ ID NO: 15223 - DNA, 20 bp, Artificial Sequence
  Description of Artificial Sequence: Synthetic oligonucleotide
  Target: SCNA; (-) strand; PAM type: NRG; PAM sequence: TAG
gctgtggattatttcctaaa

SEQ ID NO: 15224 - DNA, 20 bp, Artificial Sequence
  Description of Artificial Sequence: Synthetic oligonucleotide
  Target: SCNA; (-) strand; PAM type: NRG; PAM sequence: TGG
atatctttggactatagctg

SEQ ID NO: 15225 - DNA, 20 bp, Artificial Sequence
  Description of Artificial Sequence: Synthetic oligonucleotide
  Target: SCNA; (-) strand; PAM type: NRG; PAM sequence: TAG
tgaaaaatatctttggacta

SEQ ID NO: 15226 - DNA, 20 bp, Artificial Sequence
  Description of Artificial Sequence: Synthetic oligonucleotide
  Target: SCNA; (-) strand; PAM type: NRG; PAM sequence: TGG
gatcttgtgaaaaatatctt

SEQ ID NO: 15227 - DNA, 20 bp, Artificial Sequence
  Description of Artificial Sequence: Synthetic oligonucleotide
  Target: SCNA; (-) strand; PAM type: NRG; PAM sequence: TAG
ttcattattcattgaacatt

SEQ ID NO: 15228 - DNA, 20 bp, Artificial Sequence
  Description of Artificial Sequence: Synthetic oligonucleotide
  Target: SCNA; (-) strand; PAM type: NRG; PAM sequence: CAG
caggagtgaaccactgcacc

SEQ ID NO: 15229 - DNA, 20 bp, Artificial Sequence
  Description of Artificial Sequence: Synthetic oligonucleotide
  Target: SCNA; (-) strand; PAM type: NRG; PAM sequence: GAG
ccaaagtgctgaaatcacag

SEQ ID NO: 15230 - DNA, 20 bp, Artificial Sequence
  Description of Artificial Sequence: Synthetic oligonucleotide
  Target: SCNA; (-) strand; PAM type: NRG; PAM sequence: AGG
tcccaaagtgctgaaatcac

SEQ ID NO: 15231 - DNA, 20 bp, Artificial Sequence
  Description of Artificial Sequence: Synthetic oligonucleotide
  Target: SCNA; (-) strand; PAM type: NRG; PAM sequence: CAG
ctcccaaagtgctgaaatca

SEQ ID NO: 15232 - DNA, 20 bp, Artificial Sequence
  Description of Artificial Sequence: Synthetic oligonucleotide
  Target: SCNA; (-) strand; PAM type: NRG; PAM sequence: AAG
ccacctgcctcagcctccca

SEQ ID NO: 15233 - DNA, 20 bp, Artificial Sequence
  Description of Artificial Sequence: Synthetic oligonucleotide
  Target: SCNA; (-) strand; PAM type: NRG; PAM sequence: CAG
ctcaaatgatccacctgcct

SEQ ID NO: 15234 - DNA, 20 bp, Artificial Sequence
  Description of Artificial Sequence: Synthetic oligonucleotide
  Target: SCNA; (-) strand; PAM type: NRG; PAM sequence: TGG
ccaggctggtcttgaactcc

SEQ ID NO: 15235 - DNA, 20 bp, Artificial Sequence
  Description of Artificial Sequence: Synthetic oligonucleotide
  Target: SCNA; (-) strand; PAM type: NRG; PAM sequence: TGG
ttcattgtaacagcccaggc

SEQ ID NO: 15236 - DNA, 20 bp, Artificial Sequence
  Description of Artificial Sequence: Synthetic oligonucleotide
  Target: SCNA; (-) strand; PAM type: NRG; PAM sequence: AGG
gggtttcattgtaacagccc

SEQ ID NO: 15237 - DNA, 20 bp, Artificial Sequence
  Description of Artificial Sequence: Synthetic oligonucleotide
  Target: SCNA; (-) strand; PAM type: NRG; PAM sequence: CAG
ggggtttcattgtaacagcc

SEQ ID NO: 15238 - DNA, 20 bp, Artificial Sequence
  Description of Artificial Sequence: Synthetic oligonucleotide
  Target: SCNA; (-) strand; PAM type: NRG; PAM sequence: CAG
gagatggggtttcattgtaa

SEQ ID NO: 15239 - DNA, 20 bp, Artificial Sequence
  Description of Artificial Sequence: Synthetic oligonucleotide
  Target: SCNA; (-) strand; PAM type: NRG; PAM sequence: GGG
ttgtatttttagtagagatg

SEQ ID NO: 15240 - DNA, 20 bp, Artificial Sequence
  Description of Artificial Sequence: Synthetic oligonucleotide
  Target: SCNA; (-) strand; PAM type: NRG; PAM sequence: GGG
tttgtatttttagtagagat

SEQ ID NO: 15241 - DNA, 20 bp, Artificial Sequence
  Description of Artificial Sequence: Synthetic oligonucleotide
  Target: SCNA; (-) strand; PAM type: NRG; PAM sequence: TGG
atttgtatttttagtagaga

SEQ ID NO: 15242 - DNA, 20 bp, Artificial Sequence
  Description of Artificial Sequence: Synthetic oligonucleotide
  Target: SCNA; (-) strand; PAM type: NRG; PAM sequence: GAG
atttatttgtatttttagta

SEQ ID NO: 15243 - DNA, 20 bp, Artificial Sequence
  Description of Artificial Sequence: Synthetic oligonucleotide
  Target: SCNA; (-) strand; PAM type: NRG; PAM sequence: TAG
ctatttatttgtatttttag

SEQ ID NO: 15244 - DNA, 20 bp, Artificial Sequence
  Description of Artificial Sequence: Synthetic oligonucleotide
  Target: SCNA; (-) strand; PAM type: NRG; PAM sequence: TAG
cagctatttatttgtatttt

SEQ ID NO: 15245 - DNA, 20 bp, Artificial Sequence
  Description of Artificial Sequence: Synthetic oligonucleotide
  Target: SCNA; (-) strand; PAM type: NRG; PAM sequence: CAG
taggcatgtgccaccatgcc

SEQ ID NO: 15246 - DNA, 20 bp, Artificial Sequence
  Description of Artificial Sequence: Synthetic oligonucleotide
  Target: SCNA; (-) strand; PAM type: NRG; PAM sequence: AGG
tcccaagtggctgggactgt

SEQ ID NO: 15247 - DNA, 20 bp, Artificial Sequence
  Description of Artificial Sequence: Synthetic oligonucleotide
  Target: SCNA; (-) strand; PAM type: NRG; PAM sequence: TAG
ctcccaagtggctgggactg

SEQ ID NO: 15248 - DNA, 20 bp, Artificial Sequence
  Description of Artificial Sequence: Synthetic oligonucleotide
  Target: SCNA; (-) strand; PAM type: NRG; PAM sequence: GGG
cctcagcctcccaagtggct

SEQ ID NO: 15249 - DNA, 20 bp, Artificial Sequence
  Description of Artificial Sequence: Synthetic oligonucleotide
  Target: SCNA; (-) strand; PAM type: NRG; PAM sequence: TGG
gcctcagcctcccaagtggc

SEQ ID NO: 15250 - DNA, 20 bp, Artificial Sequence
  Description of Artificial Sequence: Synthetic oligonucleotide
  Target: SCNA; (-) strand; PAM type: NRG; PAM sequence: TGG
tcctgcctcagcctcccaag

SEQ ID NO: 15251 - DNA, 20 bp, Artificial Sequence
  Description of Artificial Sequence: Synthetic oligonucleotide
  Target: SCNA; (-) strand; PAM type: NRG; PAM sequence: AAG
tcctcctgcctcagcctccc

SEQ ID NO: 15252 - DNA, 20 bp, Artificial Sequence
  Description of Artificial Sequence: Synthetic oligonucleotide
  Target: SCNA; (-) strand; PAM type: NRG; PAM sequence: CAG
ctcaagtgatcctcctgcct

SEQ ID NO: 15253 - DNA, 20 bp, Artificial Sequence
  Description of Artificial Sequence: Synthetic oligonucleotide
  Target: SCNA; (-) strand; PAM type: NRG; PAM sequence: AAG
agcctctacctcccaggctc

SEQ ID NO: 15254 - DNA, 20 bp, Artificial Sequence
  Description of Artificial Sequence: Synthetic oligonucleotide
  Target: SCNA; (-) strand; PAM type: NRG; PAM sequence: AGG
cactgtagcctctacctccc

SEQ ID NO: 15255 - DNA, 20 bp, Artificial Sequence
  Description of Artificial Sequence: Synthetic oligonucleotide
  Target: SCNA; (-) strand; PAM type: NRG; PAM sequence: CAG
tcactgtagcctctacctcc

SEQ ID NO: 15256 - DNA, 20 bp, Artificial Sequence
  Description of Artificial Sequence: Synthetic oligonucleotide
  Target: SCNA; (-) strand; PAM type: NRG; PAM sequence: TAG
ggcatgcacatggctcactg

SEQ ID NO: 15257 - DNA, 20 bp, Artificial Sequence
  Description of Artificial Sequence: Synthetic oligonucleotide
  Target: SCNA; (-) strand; PAM type: NRG; PAM sequence: TGG
agaatgcagtggcatgcaca

SEQ ID NO: 15258 - DNA, 20 bp, Artificial Sequence
  Description of Artificial Sequence: Synthetic oligonucleotide
  Target: SCNA; (-) strand; PAM type: NRG; PAM sequence: TGG
tcacccaggctagaatgcag

SEQ ID NO: 15259 - DNA, 20 bp, Artificial Sequence
  Description of Artificial Sequence: Synthetic oligonucleotide
  Target: SCNA; (-) strand; PAM type: NRG; PAM sequence: CAG
ctgtcacccaggctagaatg

SEQ ID NO: 15260 - DNA, 20 bp, Artificial Sequence
  Description of Artificial Sequence: Synthetic oligonucleotide
  Target: SCNA; (-) strand; PAM type: NRG; PAM sequence: TAG
tctccctctgtcacccaggc

SEQ ID NO: 15261 - DNA, 20 bp, Artificial Sequence
  Description of Artificial Sequence: Synthetic oligonucleotide
  Target: SCNA; (-) strand; PAM type: NRG; PAM sequence: AGG
aaggtctccctctgtcaccc

SEQ ID NO: 15262 - DNA, 20 bp, Artificial Sequence
  Description of Artificial Sequence: Synthetic oligonucleotide
  Target: SCNA; (-) strand; PAM type: NRG; PAM sequence: CAG
caaggtctccctctgtcacc

SEQ ID NO: 15263 - DNA, 20 bp, Artificial Sequence
  Description of Artificial Sequence: Synthetic oligonucleotide
  Target: SCNA; (-) strand; PAM type: NRG; PAM sequence: AGG
tgataattttttttaagaca

SEQ ID NO: 15264 - DNA, 20 bp, Artificial Sequence
  Description of Artificial Sequence: Synthetic oligonucleotide
  Target: SCNA; (-) strand; PAM type: NRG; PAM sequence: AAG
atgataattttttttaagac

SEQ ID NO: 15265 - DNA, 20 bp, Artificial Sequence
  Description of Artificial Sequence: Synthetic oligonucleotide
  Target: SCNA; (-) strand; PAM type: NRG; PAM sequence: AAG
gttgaatgataatttttttt

SEQ ID NO: 15266 - DNA, 20 bp, Artificial Sequence
  Description of Artificial Sequence: Synthetic oligonucleotide
  Target: SCNA; (-) strand; PAM type: NRG; PAM sequence: TAG
ctttatcataatctactgag

SEQ ID NO: 15267 - DNA, 20 bp, Artificial Sequence
  Description of Artificial Sequence: Synthetic oligonucleotide
  Target: SCNA; (-) strand; PAM type: NRG; PAM sequence: GAG
ggtctttatcataatctact

SEQ ID NO: 15268 - DNA, 20 bp, Artificial Sequence
  Description of Artificial Sequence: Synthetic oligonucleotide
  Target: SCNA; (-) strand; PAM type: NRG; PAM sequence: AGG
ttctcaggtaatagtaatac

SEQ ID NO: 15269 - DNA, 20 bp, Artificial Sequence
  Description of Artificial Sequence: Synthetic oligonucleotide
  Target: SCNA; (-) strand; PAM type: NRG; PAM sequence: CAG
attctcaggtaatagtaata

SEQ ID NO: 15270 - DNA, 20 bp, Artificial Sequence
  Description of Artificial Sequence: Synthetic oligonucleotide
  Target: SCNA; (-) strand; PAM type: NRG; PAM sequence: TAG
gttacataattctcaggtaa

SEQ ID NO: 15271 - DNA, 20 bp, Artificial Sequence
  Description of Artificial Sequence: Synthetic oligonucleotide
  Target: SCNA; (-) strand; PAM type: NRG; PAM sequence: AGG
gtagttgttacataattctc

SEQ ID NO: 15272 - DNA, 20 bp, Artificial Sequence
  Description of Artificial Sequence: Synthetic oligonucleotide
  Target: SCNA; (-) strand; PAM type: NRG; PAM sequence: CAG
ggtagttgttacataattct

SEQ ID NO: 15273 - DNA, 20 bp, Artificial Sequence
  Description of Artificial Sequence: Synthetic oligonucleotide
  Target: SCNA; (-) strand; PAM type: NRG; PAM sequence: TAG
aatattataccataaatagg

SEQ ID NO: 15274 - DNA, 20 bp, Artificial Sequence
  Description of Artificial Sequence: Synthetic oligonucleotide
  Target: SCNA; (-) strand; PAM type: NRG; PAM sequence: AGG
ctaaatattataccataaat

SEQ ID NO: 15275 - DNA, 20 bp, Artificial Sequence
  Description of Artificial Sequence: Synthetic oligonucleotide
  Target: SCNA; (-) strand; PAM type: NRG; PAM sequence: TAG
gctaaatattataccataaa

SEQ ID NO: 15276 - DNA, 20 bp, Artificial Sequence
  Description of Artificial Sequence: Synthetic oligonucleotide
  Target: SCNA; (-) strand; PAM type: NRG; PAM sequence: TAG
ataatatagacaacacttta

SEQ ID NO: 15277 - DNA, 20 bp, Artificial Sequence
  Description of Artificial Sequence: Synthetic oligonucleotide
  Target: SCNA; (-) strand; PAM type: NRG; PAM sequence: TAG
tgtaggttgtatctataata

SEQ ID NO: 15278 - DNA, 20 bp, Artificial Sequence
  Description of Artificial Sequence: Synthetic oligonucleotide
  Target: SCNA; (-) strand; PAM type: NRG; PAM sequence: AGG
tttgcgtctgaattctgtgt

SEQ ID NO: 15279 - DNA, 20 bp, Artificial Sequence
  Description of Artificial Sequence: Synthetic oligonucleotide
  Target: SCNA; (-) strand; PAM type: NRG; PAM sequence: TAG
ctttgcgtctgaattctgtg

SEQ ID NO: 15280 - DNA, 20 bp, Artificial Sequence
  Description of Artificial Sequence: Synthetic oligonucleotide
  Target: SCNA; (-) strand; PAM type: NRG; PAM sequence: AAG
aagttaaacacttagaaaaa

SEQ ID NO: 15281 - DNA, 20 bp, Artificial Sequence
  Description of Artificial Sequence: Synthetic oligonucleotide
  Target: SCNA; (-) strand; PAM type: NRG; PAM sequence: TAG
ggttataaaagttaaacact

SEQ ID NO: 15282 - DNA, 20 bp, Artificial Sequence
  Description of Artificial Sequence: Synthetic oligonucleotide
  Target: SCNA; (-) strand; PAM type: NRG; PAM sequence: AAG
tacattataagtggttataa

SEQ ID NO: 15283 - DNA, 20 bp, Artificial Sequence
  Description of Artificial Sequence: Synthetic oligonucleotide
  Target: SCNA; (-) strand; PAM type: NRG; PAM sequence: TGG
gtatgcttttacattataag

SEQ ID NO: 15284 - DNA, 20 bp, Artificial Sequence
  Description of Artificial Sequence: Synthetic oligonucleotide
  Target: SCNA; (-) strand; PAM type: NRG; PAM sequence: AAG
tatgtatgcttttacattat

SEQ ID NO: 15285 - DNA, 20 bp, Artificial Sequence
  Description of Artificial Sequence: Synthetic oligonucleotide
  Target: SCNA; (-) strand; PAM type: NRG; PAM sequence: AAG
tcagtcttcaaatttcagaa

SEQ ID NO: 15286 - DNA, 20 bp, Artificial Sequence
  Description of Artificial Sequence: Synthetic oligonucleotide
  Target: SCNA; (-) strand; PAM type: NRG; PAM sequence: CAG
tagtctcagtcttcaaattt

SEQ ID NO: 15287 - DNA, 20 bp, Artificial Sequence
  Description of Artificial Sequence: Synthetic oligonucleotide
  Target: SCNA; (-) strand; PAM type: NRG; PAM sequence: CAG
tccttcaatatgtatagtct

SEQ ID NO: 15288 - DNA, 20 bp, Artificial Sequence
  Description of Artificial Sequence: Synthetic oligonucleotide
  Target: SCNA; (-) strand; PAM type: NRG; PAM sequence: TAG
ttattttccttcaatatgta

SEQ ID NO: 15289 - DNA, 20 bp, Artificial Sequence
  Description of Artificial Sequence: Synthetic oligonucleotide
  Target: SCNA; (-) strand; PAM type: NRG; PAM sequence: TAG
tttgtctaggaagagatacc

SEQ ID NO: 15290 - DNA, 20 bp, Artificial Sequence
  Description of Artificial Sequence: Synthetic oligonucleotide
  Target: SCNA; (-) strand; PAM type: NRG; PAM sequence: GAG
tagtattctttgtctaggaa

SEQ ID NO: 15291 - DNA, 20 bp, Artificial Sequence
  Description of Artificial Sequence: Synthetic oligonucleotide
  Target: SCNA; (-) strand; PAM type: NRG; PAM sequence: AAG
tgtagtattctttgtctagg

SEQ ID NO: 15292 - DNA, 20 bp, Artificial Sequence
  Description of Artificial Sequence: Synthetic oligonucleotide
  Target: SCNA; (-) strand; PAM type: NRG; PAM sequence: AGG
ttttgtagtattctttgtct

SEQ ID NO: 15293 - DNA, 20 bp, Artificial Sequence
  Description of Artificial Sequence: Synthetic oligonucleotide
  Target: SCNA; (-) strand; PAM type: NRG; PAM sequence: TAG
gttttgtagtattctttgtc

SEQ ID NO: 15294 - DNA, 20 bp, Artificial Sequence
  Description of Artificial Sequence: Synthetic oligonucleotide
  Target: SCNA; (-) strand; PAM type: NRG; PAM sequence: TAG
ccatttcaggctgagttttg

SEQ ID NO: 15295 - DNA, 20 bp, Artificial Sequence
  Description of Artificial Sequence: Synthetic oligonucleotide
  Target: SCNA; (-) strand; PAM type: NRG; PAM sequence: GAG
agccatgaccatttcaggct

SEQ ID NO: 15296 - DNA, 20 bp, Artificial Sequence
  Description of Artificial Sequence: Synthetic oligonucleotide
  Target: SCNA; (-) strand; PAM type: NRG; PAM sequence: AGG
aacaaagccatgaccatttc

SEQ ID NO: 15297 - DNA, 20 bp, Artificial Sequence
  Description of Artificial Sequence: Synthetic oligonucleotide
  Target: SCNA; (-) strand; PAM type: NRG; PAM sequence: CAG
caacaaagccatgaccattt

SEQ ID NO: 15298 - DNA, 20 bp, Artificial Sequence
  Description of Artificial Sequence: Synthetic oligonucleotide
  Target: SCNA; (-) strand; PAM type: NRG; PAM sequence: AAG
tttagtgaagaataccaaca

SEQ ID NO: 15299 - DNA, 20 bp, Artificial Sequence
  Description of Artificial Sequence: Synthetic oligonucleotide
  Target: SCNA; (-) strand; PAM type: NRG; PAM sequence: AAG
gcaacaaaaggtatttagtg

SEQ ID NO: 15300 - DNA, 20 bp, Artificial Sequence
  Description of Artificial Sequence: Synthetic oligonucleotide
  Target: SCNA; (-) strand; PAM type: NRG; PAM sequence: TAG
gcaaagcaacaaaaggtatt

SEQ ID NO: 15301 - DNA, 20 bp, Artificial Sequence
  Description of Artificial Sequence: Synthetic oligonucleotide
  Target: SCNA; (-) strand; PAM type: NRG; PAM sequence: AGG
aataaatgcaaagcaacaaa

SEQ ID NO: 15302 - DNA, 20 bp, Artificial Sequence
  Description of Artificial Sequence: Synthetic oligonucleotide
  Target: SCNA; (-) strand; PAM type: NRG; PAM sequence: AAG
aaataaatgcaaagcaacaa

SEQ ID NO: 15303 - DNA, 20 bp, Artificial Sequence
  Description of Artificial Sequence: Synthetic oligonucleotide
  Target: SCNA; (-) strand; PAM type: NRG; PAM sequence: AAG
actttgctgaaataaatgca

SEQ ID NO: 15304 - DNA, 20 bp, Artificial Sequence
  Description of Artificial Sequence: Synthetic oligonucleotide
  Target: SCNA; (-) strand; PAM type: NRG; PAM sequence: AGG
ctctttctccaagtcccttt

SEQ ID NO: 15305 - DNA, 20 bp, Artificial Sequence
  Description of Artificial Sequence: Synthetic oligonucleotide
  Target: SCNA; (-) strand; PAM type: NRG; PAM sequence: TAG
tctctttctccaagtccctt

SEQ ID NO: 15306 - DNA, 20 bp, Artificial Sequence
  Description of Artificial Sequence: Synthetic oligonucleotide
  Target: SCNA; (-) strand; PAM type: NRG; PAM sequence: AAG
attatttgatctctttctcc

SEQ ID NO: 15307 - DNA, 20 bp, Artificial Sequence
  Description of Artificial Sequence: Synthetic oligonucleotide
  Target: SCNA; (-) strand; PAM type: NRG; PAM sequence: GGG
aaatcagccgcgttggctga

SEQ ID NO: 15308 - DNA, 20 bp, Artificial Sequence
  Description of Artificial Sequence: Synthetic oligonucleotide
  Target: SCNA; (-) strand; PAM type: NRG; PAM sequence: AGG
aaaatcagccgcgttggctg

SEQ ID NO: 15309 - DNA, 20 bp, Artificial Sequence
  Description of Artificial Sequence: Synthetic oligonucleotide
  Target: SCNA; (-) strand; PAM type: NRG; PAM sequence: GAG
gaaaatcagccgcgttggct

SEQ ID NO: 15310 - DNA, 20 bp, Artificial Sequence
  Description of Artificial Sequence: Synthetic oligonucleotide
  Target: SCNA; (-) strand; PAM type: NRG; PAM sequence: TGG
ttgttgaaaatcagccgcgt

SEQ ID NO: 15311 - DNA, 20 bp, Artificial Sequence
  Description of Artificial Sequence: Synthetic oligonucleotide
  Target: SCNA; (-) strand; PAM type: NRG; PAM sequence: CAG
tcagacatgttgttgaaaat

SEQ ID NO: 15312 - DNA, 20 bp, Artificial Sequence
  Description of Artificial Sequence: Synthetic oligonucleotide
  Target: SCNA; (-) strand; PAM type: NRG; PAM sequence: CAG
atggggaagcttttttacat

SEQ ID NO: 15313 - DNA, 20 bp, Artificial Sequence
  Description of Artificial Sequence: Synthetic oligonucleotide
  Target: SCNA; (-) strand; PAM type: NRG; PAM sequence: AAG
ttccatgtgaagacatgggg

SEQ ID NO: 15314 - DNA, 20 bp, Artificial Sequence
  Description of Artificial Sequence: Synthetic oligonucleotide
  Target: SCNA; (-) strand; PAM type: NRG; PAM sequence: GGG
cacttccatgtgaagacatg

SEQ ID NO: 15315 - DNA, 20 bp, Artificial Sequence
  Description of Artificial Sequence: Synthetic oligonucleotide
  Target: SCNA; (-) strand; PAM type: NRG; PAM sequence: GGG
tcacttccatgtgaagacat

SEQ ID NO: 15316 - DNA, 20 bp, Artificial Sequence
  Description of Artificial Sequence: Synthetic oligonucleotide
  Target: SCNA; (-) strand; PAM type: NRG; PAM sequence: TGG
gtcacttccatgtgaagaca

SEQ ID NO: 15317 - DNA, 20 bp, Artificial Sequence
  Description of Artificial Sequence: Synthetic oligonucleotide
  Target: SCNA; (-) strand; PAM type: NRG; PAM sequence: AAG
ctgtcagtcacttccatgtg

SEQ ID NO: 15318 - DNA, 20 bp, Artificial Sequence
  Description of Artificial Sequence: Synthetic oligonucleotide
  Target: SCNA; (-) strand; PAM type: NRG; PAM sequence: CAG
ttatacttctgcgtccctgt

SEQ ID NO: 15319 - DNA, 20 bp, Artificial Sequence
  Description of Artificial Sequence: Synthetic oligonucleotide
  Target: SCNA; (-) strand; PAM type: NRG; PAM sequence: TAG
gtgtgaccttttcttactgt

SEQ ID NO: 15320 - DNA, 20 bp, Artificial Sequence
  Description of Artificial Sequence: Synthetic oligonucleotide
  Target: SCNA; (-) strand; PAM type: NRG; PAM sequence: TAG
cctaccataagcatgatctt

SEQ ID NO: 15321 - DNA, 20 bp, Artificial Sequence
  Description of Artificial Sequence: Synthetic oligonucleotide
  Target: SCNA; (-) strand; PAM type: NRG; PAM sequence: AAG
cttctctgcccacctaccat

SEQ ID NO: 15322 - DNA, 20 bp, Artificial Sequence
  Description of Artificial Sequence: Synthetic oligonucleotide
  Target: SCNA; (-) strand; PAM type: NRG; PAM sequence: AAG
gcaagggcagaatgatctgt

SEQ ID NO: 15323 - DNA, 20 bp, Artificial Sequence
  Description of Artificial Sequence: Synthetic oligonucleotide
  Target: SCNA; (-) strand; PAM type: NRG; PAM sequence: CAG
aaaaagggcattggcaaggg

SEQ ID NO: 15324 - DNA, 20 bp, Artificial Sequence
  Description of Artificial Sequence: Synthetic oligonucleotide
  Target: SCNA; (-) strand; PAM type: NRG; PAM sequence: GGG
tataaaaagggcattggcaa

SEQ ID NO: 15325 - DNA, 20 bp, Artificial Sequence
  Description of Artificial Sequence: Synthetic oligonucleotide
  Target: SCNA; (-) strand; PAM type: NRG; PAM sequence: AGG
ttataaaaagggcattggca

SEQ ID NO: 15326 - DNA, 20 bp, Artificial Sequence
  Description of Artificial Sequence: Synthetic oligonucleotide
  Target: SCNA; (-) strand; PAM type: NRG; PAM sequence: AAG
tttataaaaagggcattggc

SEQ ID NO: 15327 - DNA, 20 bp, Artificial Sequence
  Description of Artificial Sequence: Synthetic oligonucleotide
  Target: SCNA; (-) strand; PAM type: NRG; PAM sequence: TGG
ttagtttataaaaagggcat

SEQ ID NO: 15328 - DNA, 20 bp, Artificial Sequence
  Description of Artificial Sequence: Synthetic oligonucleotide
  Target: SCNA; (-) strand; PAM type: NRG; PAM sequence: GGG
ttttttttagtttataaaaa

SEQ ID NO: 15329 - DNA, 20 bp, Artificial Sequence
  Description of Artificial Sequence: Synthetic oligonucleotide
  Target: SCNA; (-) strand; PAM type: NRG; PAM sequence: AGG
attttttttagtttataaaa

SEQ ID NO: 15330 - DNA, 20 bp, Artificial Sequence
  Description of Artificial Sequence: Synthetic oligonucleotide
  Target: SCNA; (-) strand; PAM type: NRG; PAM sequence: AAG
gattttttttagtttataaa

SEQ ID NO: 15331 - DNA, 20 bp, Artificial Sequence
  Description of Artificial Sequence: Synthetic oligonucleotide
  Target: SCNA; (-) strand; PAM type: NRG; PAM sequence: TAG
tatattatttggattttttt

SEQ ID NO: 15332 - DNA, 20 bp, Artificial Sequence
  Description of Artificial Sequence: Synthetic oligonucleotide
  Target: SCNA; (-) strand; PAM type: NRG; PAM sequence: TGG
tatttaatttatatattatt

SEQ ID NO: 15333 - DNA, 20 bp, Artificial Sequence
  Description of Artificial Sequence: Synthetic oligonucleotide
  Target: SCNA; (-) strand; PAM type: NRG; PAM sequence: TGG
taaagtgaggtagtttgggg

SEQ ID NO: 15334 - DNA, 20 bp, Artificial Sequence
  Description of Artificial Sequence: Synthetic oligonucleotide
  Target: SCNA; (-) strand; PAM type: NRG; PAM sequence: GGG
ttttaaagtgaggtagtttg

SEQ ID NO: 15335 - DNA, 20 bp, Artificial Sequence
  Description of Artificial Sequence: Synthetic oligonucleotide
  Target: SCNA; (-) strand; PAM type: NRG; PAM sequence: GGG
attttaaagtgaggtagttt

SEQ ID NO: 15336 - DNA, 20 bp, Artificial Sequence
  Description of Artificial Sequence: Synthetic oligonucleotide
  Target: SCNA; (-) strand; PAM type: NRG; PAM sequence: TGG
cattttaaagtgaggtagtt

SEQ ID NO: 15337 - DNA, 20 bp, Artificial Sequence
  Description of Artificial Sequence: Synthetic oligonucleotide
  Target: SCNA; (-) strand; PAM type: NRG; PAM sequence: TAG
ctccacattttaaagtgagg

SEQ ID NO: 15338 - DNA, 20 bp, Artificial Sequence
  Description of Artificial Sequence: Synthetic oligonucleotide
  Target: SCNA; (-) strand; PAM type: NRG; PAM sequence: AGG
ttactccacattttaaagtg

SEQ ID NO: 15339 - DNA, 20 bp, Artificial Sequence
  Description of Artificial Sequence: Synthetic oligonucleotide
  Target: SCNA; (-) strand; PAM type: NRG; PAM sequence: GAG
tttactccacattttaaagt

SEQ ID NO: 15340 - DNA, 20 bp, Artificial Sequence
  Description of Artificial Sequence: Synthetic oligonucleotide
  Target: SCNA; (-) strand; PAM type: NRG; PAM sequence: AAG
tatgtttactccacatttta

SEQ ID NO: 15341 - DNA, 20 bp, Artificial Sequence
  Description of Artificial Sequence: Synthetic oligonucleotide
  Target: SCNA; (-) strand; PAM type: NRG; PAM sequence: CAG
gaagtgaaacactacgaaaa

SEQ ID NO: 15342 - DNA, 20 bp, Artificial Sequence
  Description of Artificial Sequence: Synthetic oligonucleotide
  Target: SCNA; (-) strand; PAM type: NRG; PAM sequence: AAG
gcagaggcgtatctaccaag

SEQ ID NO: 15343 - DNA, 20 bp, Artificial Sequence
  Description of Artificial Sequence: Synthetic oligonucleotide
  Target: SCNA; (-) strand; PAM type: NRG; PAM sequence: AAG
gcagcagaggcgtatctacc

SEQ ID NO: 15344 - DNA, 20 bp, Artificial Sequence
  Description of Artificial Sequence: Synthetic oligonucleotide
  Target: SCNA; (-) strand; PAM type: NRG; PAM sequence: AGG
gcctagccatcctgcagcag

SEQ ID NO: 15345 - DNA, 20 bp, Artificial Sequence
  Description of Artificial Sequence: Synthetic oligonucleotide
  Target: SCNA; (-) strand; PAM type: NRG; PAM sequence: GAG
tgcctagccatcctgcagca

SEQ ID NO: 15346 - DNA, 20 bp, Artificial Sequence
  Description of Artificial Sequence: Synthetic oligonucleotide
  Target: SCNA; (-) strand; PAM type: NRG; PAM sequence: CAG
tgtgcctagccatcctgcag

SEQ ID NO: 15347 - DNA, 20 bp, Artificial Sequence
  Description of Artificial Sequence: Synthetic oligonucleotide
  Target: SCNA; (-) strand; PAM type: NRG; PAM sequence: CAG
ccttgtgcctagccatcctg

SEQ ID NO: 15348 - DNA, 20 bp, Artificial Sequence
  Description of Artificial Sequence: Synthetic oligonucleotide
  Target: SCNA; (-) strand; PAM type: NRG; PAM sequence: TAG
gacatggaaggccttgtgcc

SEQ ID NO: 15349 - DNA, 20 bp, Artificial Sequence
  Description of Artificial Sequence: Synthetic oligonucleotide
  Target: SCNA; (-) strand; PAM type: NRG; PAM sequence: AGG
ctcaagtcctgtgacatgga

SEQ ID NO: 15350 - DNA, 20 bp, Artificial Sequence
  Description of Artificial Sequence: Synthetic oligonucleotide
  Target: SCNA; (-) strand; PAM type: NRG; PAM sequence: AAG
gctcaagtcctgtgacatgg

SEQ ID NO: 15351 - DNA, 20 bp, Artificial Sequence
  Description of Artificial Sequence: Synthetic oligonucleotide
  Target: SCNA; (-) strand; PAM type: NRG; PAM sequence: TGG
tgagctcaagtcctgtgaca

SEQ ID NO: 15352 - DNA, 20 bp, Artificial Sequence
  Description of Artificial Sequence: Synthetic oligonucleotide
  Target: SCNA; (-) strand; PAM type: NRG; PAM sequence: AAG
agaagctaggacttgagctc

SEQ ID NO: 15353 - DNA, 20 bp, Artificial Sequence
  Description of Artificial Sequence: Synthetic oligonucleotide
  Target: SCNA; (-) strand; PAM type: NRG; PAM sequence: GAG
atctagagaagctaggactt

SEQ ID NO: 15354 - DNA, 20 bp, Artificial Sequence
  Description of Artificial Sequence: Synthetic oligonucleotide
  Target: SCNA; (-) strand; PAM type: NRG; PAM sequence: AGG
ctctgtcatctagagaagct

SEQ ID NO: 15355 - DNA, 20 bp, Artificial Sequence
  Description of Artificial Sequence: Synthetic oligonucleotide
  Target: SCNA; (-) strand; PAM type: NRG; PAM sequence: TAG
gctctgtcatctagagaagc

SEQ ID NO: 15356 - DNA, 20 bp, Artificial Sequence
  Description of Artificial Sequence: Synthetic oligonucleotide
  Target: SCNA; (-) strand; PAM type: NRG; PAM sequence: AAG
aaaagctctgtcatctagag

SEQ ID NO: 15357 - DNA, 20 bp, Artificial Sequence
  Description of Artificial Sequence: Synthetic oligonucleotide
  Target: SCNA; (-) strand; PAM type: NRG; PAM sequence: GAG
cacaaaagctctgtcatcta

SEQ ID NO: 15358 - DNA, 20 bp, Artificial Sequence
  Description of Artificial Sequence: Synthetic oligonucleotide
  Target: SCNA; (-) strand; PAM type: NRG; PAM sequence: TAG
atcacaaaagctctgtcatc

SEQ ID NO: 15359 - DNA, 20 bp, Artificial Sequence
  Description of Artificial Sequence: Synthetic oligonucleotide
  Target: SCNA; (-) strand; PAM type: NRG; PAM sequence: AAG
gaaacttctcagcatcacaa

SEQ ID NO: 15360 - DNA, 20 bp, Artificial Sequence
  Description of Artificial Sequence: Synthetic oligonucleotide
  Target: SCNA; (-) strand; PAM type: NRG; PAM sequence: CAG
aaaaagcataggaaacttct

SEQ ID NO: 15361 - DNA, 20 bp, Artificial Sequence
  Description of Artificial Sequence: Synthetic oligonucleotide
  Target: SCNA; (-) strand; PAM type: NRG; PAM sequence: AGG
ttgacactcagaaaaagcat

SEQ ID NO: 15362 - DNA, 20 bp, Artificial Sequence
  Description of Artificial Sequence: Synthetic oligonucleotide
  Target: SCNA; (-) strand; PAM type: NRG; PAM sequence: TAG
attgacactcagaaaaagca

SEQ ID NO: 15363 - DNA, 20 bp, Artificial Sequence
  Description of Artificial Sequence: Synthetic oligonucleotide
  Target: SCNA; (-) strand; PAM type: NRG; PAM sequence: AAG
gactaattgacactcagaaa

SEQ ID NO: 15364 - DNA, 20 bp, Artificial Sequence
  Description of Artificial Sequence: Synthetic oligonucleotide
  Target: SCNA; (-) strand; PAM type: NRG; PAM sequence: CAG
cactaagactaattgacact

SEQ ID NO: 15365 - DNA, 20 bp, Artificial Sequence
  Description of Artificial Sequence: Synthetic oligonucleotide
  Target: SCNA; (-) strand; PAM type: NRG; PAM sequence: AAG
tgctgtcccgtttgatcact

SEQ ID NO: 15366 - DNA, 20 bp, Artificial Sequence
  Description of Artificial Sequence: Synthetic oligonucleotide
  Target: SCNA; (-) strand; PAM type: NRG; PAM sequence: AGG
ccttctccctgttgtaaaga

SEQ ID NO: 15367 - DNA, 20 bp, Artificial Sequence
  Description of Artificial Sequence: Synthetic oligonucleotide
  Target: SCNA; (-) strand; PAM type: NRG; PAM sequence: AAG
tccttctccctgttgtaaag

SEQ ID NO: 15368 - DNA, 20 bp, Artificial Sequence
  Description of Artificial Sequence: Synthetic oligonucleotide
  Target: SCNA; (-) strand; PAM type: NRG; PAM sequence: AAG
gtttccttctccctgttgta

SEQ ID NO: 15369 - DNA, 20 bp, Artificial Sequence
  Description of Artificial Sequence: Synthetic oligonucleotide
  Target: SCNA; (-) strand; PAM type: NRG; PAM sequence: AAG
taatctaaatattaatgaga

SEQ ID NO: 15370 - DNA, 20 bp, Artificial Sequence
  Description of Artificial Sequence: Synthetic oligonucleotide
  Target: SCNA; (-) strand; PAM type: NRG; PAM sequence: GAG
acagtaatctaaatattaat

SEQ ID NO: 15371 - DNA, 20 bp, Artificial Sequence
  Description of Artificial Sequence: Synthetic oligonucleotide
  Target: SCNA; (-) strand; PAM type: NRG; PAM sequence: CAG
cttatacttggatatcctaa

SEQ ID NO: 15372 - DNA, 20 bp, Artificial Sequence
  Description of Artificial Sequence: Synthetic oligonucleotide
  Target: SCNA; (-) strand; PAM type: NRG; PAM sequence: TGG
tgccttatttcccttatact

SEQ ID NO: 15373 - DNA, 20 bp, Artificial Sequence
  Description of Artificial Sequence: Synthetic oligonucleotide
  Target: SCNA; (-) strand; PAM type: NRG; PAM sequence: TGG
ctctgtcagtttcaaaatca

SEQ ID NO: 15374 - DNA, 20 bp, Artificial Sequence
  Description of Artificial Sequence: Synthetic oligonucleotide
  Target: SCNA; (-) strand; PAM type: NRG; PAM sequence: CAG
ttagaaaatcaaatctctgt

SEQ ID NO: 15375 - DNA, 20 bp, Artificial Sequence
  Description of Artificial Sequence: Synthetic oligonucleotide
  Target: SCNA; (-) strand; PAM type: NRG; PAM sequence: TAG
aattttctaacaaattatat

SEQ ID NO: 15376 - DNA, 20 bp, Artificial Sequence
  Description of Artificial Sequence: Synthetic oligonucleotide
  Target: SCNA; (-) strand; PAM type: NRG; PAM sequence: TGG
gtctgccatatttacttgtc

SEQ ID NO: 15377 - DNA, 20 bp, Artificial Sequence
  Description of Artificial Sequence: Synthetic oligonucleotide
  Target: SCNA; (-) strand; PAM type: NRG; PAM sequence: AGG
catcaaacaacaaacagggt

SEQ ID NO: 15378 - DNA, 20 bp, Artificial Sequence
  Description of Artificial Sequence: Synthetic oligonucleotide
  Target: SCNA; (-) strand; PAM type: NRG; PAM sequence: TAG
tcatcaaacaacaaacaggg

SEQ ID NO: 15379 - DNA, 20 bp, Artificial Sequence
  Description of Artificial Sequence: Synthetic oligonucleotide
  Target: SCNA; (-) strand; PAM type: NRG; PAM sequence: GGG
tgatcatcaaacaacaaaca

SEQ ID NO: 15380 - DNA, 20 bp, Artificial Sequence
  Description of Artificial Sequence: Synthetic oligonucleotide
  Target: SCNA; (-) strand; PAM type: NRG; PAM sequence: AGG
ttgatcatcaaacaacaaac

SEQ ID NO: 15381 - DNA, 20 bp, Artificial Sequence
  Description of Artificial Sequence: Synthetic oligonucleotide
  Target: SCNA; (-) strand; PAM type: NRG; PAM sequence: CAG
tttgatcatcaaacaacaaa

SEQ ID NO: 15382 - DNA, 20 bp, Artificial Sequence
  Description of Artificial Sequence: Synthetic oligonucleotide
  Target: SCNA; (-) strand; PAM type: NRG; PAM sequence: TAG
ccagtaatatccatcagtct

SEQ ID NO: 15383 - DNA, 20 bp, Artificial Sequence
  Description of Artificial Sequence: Synthetic oligonucleotide
  Target: SCNA; (-) strand; PAM type: NRG; PAM sequence: CAG
acaaatccagtaatatccat

SEQ ID NO: 15384 - DNA, 20 bp, Artificial Sequence
  Description of Artificial Sequence: Synthetic oligonucleotide
  Target: SCNA; (-) strand; PAM type: NRG; PAM sequence: CAG
aaataacatataaacaaatc

SEQ ID NO: 15385 - DNA, 20 bp, Artificial Sequence
  Description of Artificial Sequence: Synthetic oligonucleotide
  Target: SCNA; (-) strand; PAM type: NRG; PAM sequence: CAG
tgtgtacatccttcaaagtt

SEQ ID NO: 15386 - DNA, 20 bp, Artificial Sequence
  Description of Artificial Sequence: Synthetic oligonucleotide
  Target: SCNA; (-) strand; PAM type: NRG; PAM sequence: AAG
acatctgtgtacatccttca

SEQ ID NO: 15387 - DNA, 20 bp, Artificial Sequence
  Description of Artificial Sequence: Synthetic oligonucleotide
  Target: SCNA; (-) strand; PAM type: NRG; PAM sequence: CAG
tcacccaggctggaaccatg

SEQ ID NO: 15388 - DNA, 20 bp, Artificial Sequence
  Description of Artificial Sequence: Synthetic oligonucleotide
  Target: SCNA; (-) strand; PAM type: NRG; PAM sequence: TGG
acacacccactcacccaggc

SEQ ID NO: 15389 - DNA, 20 bp, Artificial Sequence
  Description of Artificial Sequence: Synthetic oligonucleotide
  Target: SCNA; (-) strand; PAM type: NRG; PAM sequence: AGG
ttgtacacacccactcaccc

SEQ ID NO: 15390 - DNA, 20 bp, Artificial Sequence
  Description of Artificial Sequence: Synthetic oligonucleotide
  Target: SCNA; (-) strand; PAM type: NRG; PAM sequence: CAG
cttgtacacacccactcacc

SEQ ID NO: 15391 - DNA, 20 bp, Artificial Sequence
  Description of Artificial Sequence: Synthetic oligonucleotide
  Target: SCNA; (-) strand; PAM type: NRG; PAM sequence: GGG
gacgctgttccattactgca

SEQ ID NO: 15392 - DNA, 20 bp, Artificial Sequence
  Description of Artificial Sequence: Synthetic oligonucleotide
  Target: SCNA; (-) strand; PAM type: NRG; PAM sequence: AGG
ggacgctgttccattactgc

SEQ ID NO: 15393 - DNA, 20 bp, Artificial Sequence
  Description of Artificial Sequence: Synthetic oligonucleotide
  Target: SCNA; (-) strand; PAM type: NRG; PAM sequence: CAG
aggacgctgttccattactg

SEQ ID NO: 15394 - DNA, 20 bp, Artificial Sequence
  Description of Artificial Sequence: Synthetic oligonucleotide
  Target: SCNA; (-) strand; PAM type: NRG; PAM sequence: AGG
tatgggaacccaccccggac

SEQ ID NO: 15395 - DNA, 20 bp, Artificial Sequence
  Description of Artificial Sequence: Synthetic oligonucleotide
  Target: SCNA; (-) strand; PAM type: NRG; PAM sequence: CAG
atatgggaacccaccccgga

SEQ ID NO: 15396 - DNA, 20 bp, Artificial Sequence
  Description of Artificial Sequence: Synthetic oligonucleotide
  Target: SCNA; (-) strand; PAM type: NRG; PAM sequence: CGG
agcaatatgggaacccaccc

SEQ ID NO: 15397 - DNA, 20 bp, Artificial Sequence
  Description of Artificial Sequence: Synthetic oligonucleotide
  Target: SCNA; (-) strand; PAM type: NRG; PAM sequence: GGG
ggcagctcagggagcaatat

SEQ ID NO: 15398 - DNA, 20 bp, Artificial Sequence
  Description of Artificial Sequence: Synthetic oligonucleotide
  Target: SCNA; (-) strand; PAM type: NRG; PAM sequence: TGG
tggcagctcagggagcaata

SEQ ID NO: 15399 - DNA, 20 bp, Artificial Sequence
  Description of Artificial Sequence: Synthetic oligonucleotide
  Target: SCNA; (-) strand; PAM type: NRG; PAM sequence: GAG
gcctatcctggcagctcagg

SEQ ID NO: 15400 - DNA, 20 bp, Artificial Sequence
  Description of Artificial Sequence: Synthetic oligonucleotide
  Target: SCNA; (-) strand; PAM type: NRG; PAM sequence: GGG
gagcctatcctggcagctca

SEQ ID NO: 15401 - DNA, 20 bp, Artificial Sequence
  Description of Artificial Sequence: Synthetic oligonucleotide
  Target: SCNA; (-) strand; PAM type: NRG; PAM sequence: AGG
ggagcctatcctggcagctc

SEQ ID NO: 15402 - DNA, 20 bp, Artificial Sequence
  Description of Artificial Sequence: Synthetic oligonucleotide
  Target: SCNA; (-) strand; PAM type: NRG; PAM sequence: CAG
tggagcctatcctggcagct

SEQ ID NO: 15403 - DNA, 20 bp, Artificial Sequence
  Description of Artificial Sequence: Synthetic oligonucleotide
  Target: SCNA; (-) strand; PAM type: NRG; PAM sequence: CAG
gtggttggagcctatcctgg

SEQ ID NO: 15404 - DNA, 20 bp, Artificial Sequence
  Description of Artificial Sequence: Synthetic oligonucleotide
  Target: SCNA; (-) strand; PAM type: NRG; PAM sequence: TGG
caggtggttggagcctatcc

SEQ ID NO: 15405 - DNA, 20 bp, Artificial Sequence
  Description of Artificial Sequence: Synthetic oligonucleotide
  Target: SCNA; (-) strand; PAM type: NRG; PAM sequence: GAG
gtggaggccgcaggtggttg

SEQ ID NO: 15406 - DNA, 20 bp, Artificial Sequence
  Description of Artificial Sequence: Synthetic oligonucleotide
  Target: SCNA; (-) strand; PAM type: NRG; PAM sequence: TGG
cggtggaggccgcaggtggt

SEQ ID NO: 15407 - DNA, 20 bp, Artificial Sequence
  Description of Artificial Sequence: Synthetic oligonucleotide
  Target: SCNA; (-) strand; PAM type: NRG; PAM sequence: TGG
atttcggtggaggccgcagg

SEQ ID NO: 15408 - DNA, 20 bp, Artificial Sequence
  Description of Artificial Sequence: Synthetic oligonucleotide
  Target: SCNA; (-) strand; PAM type: NRG; PAM sequence: AGG
attatttcggtggaggccgc

SEQ ID NO: 15409 - DNA, 20 bp, Artificial Sequence
  Description of Artificial Sequence: Synthetic oligonucleotide
  Target: SCNA; (-) strand; PAM type: NRG; PAM sequence: CAG
aattatttcggtggaggccg

SEQ ID NO: 15410 - DNA, 20 bp, Artificial Sequence
  Description of Artificial Sequence: Synthetic oligonucleotide
  Target: SCNA; (-) strand; PAM type: NRG; PAM sequence: AGG
ttacctaattatttcggtgg

SEQ ID NO: 15411 - DNA, 20 bp, Artificial Sequence
  Description of Artificial Sequence: Synthetic oligonucleotide
  Target: SCNA; (-) strand; PAM type: NRG; PAM sequence: GAG
cttacctaattatttcggtg

SEQ ID NO: 15412 - DNA, 20 bp, Artificial Sequence
  Description of Artificial Sequence: Synthetic oligonucleotide
  Target: SCNA; (-) strand; PAM type: NRG; PAM sequence: TGG
aacttacctaattatttcgg

SEQ ID NO: 15413 - DNA, 20 bp, Artificial Sequence
  Description of Artificial Sequence: Synthetic oligonucleotide
  Target: SCNA; (-) strand; PAM type: NRG; PAM sequence: CGG
aataacttacctaattattt

SEQ ID NO: 15414 - DNA, 20 bp, Artificial Sequence
  Description of Artificial Sequence: Synthetic oligonucleotide
  Target: SCNA; (-) strand; PAM type: NRG; PAM sequence: AAG
taagaaagattaatacaaac

SEQ ID NO: 15415 - DNA, 20 bp, Artificial Sequence
  Description of Artificial Sequence: Synthetic oligonucleotide
  Target: SCNA; (-) strand; PAM type: NRG; PAM sequence: AAG
agctatatatacgtttaaga

SEQ ID NO: 15416 - DNA, 20 bp, Artificial Sequence
  Description of Artificial Sequence: Synthetic oligonucleotide
  Target: SCNA; (-) strand; PAM type: NRG; PAM sequence: AAG
tgtgagctatatatacgttt

SEQ ID NO: 15417 - DNA, 20 bp, Artificial Sequence
  Description of Artificial Sequence: Synthetic oligonucleotide
  Target: SCNA; (-) strand; PAM type: NRG; PAM sequence: GAG
ttaaacattgaaattaatgt

SEQ ID NO: 15418 - DNA, 20 bp, Artificial Sequence
  Description of Artificial Sequence: Synthetic oligonucleotide
  Target: SCNA; (-) strand; PAM type: NRG; PAM sequence: AAG
caccatcaaactcctaaata

SEQ ID NO: 15419 - DNA, 20 bp, Artificial Sequence
  Description of Artificial Sequence: Synthetic oligonucleotide
  Target: SCNA; (-) strand; PAM type: NRG; PAM sequence: TGG
taagtcctatggcaaatttc

SEQ ID NO: 15420 - DNA, 20 bp, Artificial Sequence
  Description of Artificial Sequence: Synthetic oligonucleotide
  Target: SCNA; (-) strand; PAM type: NRG; PAM sequence: TGG
taagcaagaattaagtccta

SEQ ID NO: 15421 - DNA, 20 bp, Artificial Sequence
  Description of Artificial Sequence: Synthetic oligonucleotide
  Target: SCNA; (-) strand; PAM type: NRG; PAM sequence: AAG
aattgatataagcaagaatt

SEQ ID NO: 15422 - DNA, 20 bp, Artificial Sequence
  Description of Artificial Sequence: Synthetic oligonucleotide
  Target: SCNA; (-) strand; PAM type: NRG; PAM sequence: AAG
attggctaattgatataagc

SEQ ID NO: 15423 - DNA, 20 bp, Artificial Sequence
  Description of Artificial Sequence: Synthetic oligonucleotide
  Target: SCNA; (-) strand; PAM type: NRG; PAM sequence: AAG
taccattggctaattgatat

SEQ ID NO: 15424 - DNA, 20 bp, Artificial Sequence
  Description of Artificial Sequence: Synthetic oligonucleotide
  Target: SCNA; (-) strand; PAM type: NRG; PAM sequence: TGG
aacaaaaccagttttaccat

SEQ ID NO: 15425 - DNA, 20 bp, Artificial Sequence
  Description of Artificial Sequence: Synthetic oligonucleotide
  Target: SCNA; (-) strand; PAM type: NRG; PAM sequence: CAG
aaaacaacatataacaaaac

SEQ ID NO: 15426 - DNA, 20 bp, Artificial Sequence
  Description of Artificial Sequence: Synthetic oligonucleotide
  Target: SCNA; (-) strand; PAM type: NRG; PAM sequence: AAG
tttctggaaactgtgacttg

SEQ ID NO: 15427 - DNA, 20 bp, Artificial Sequence
  Description of Artificial Sequence: Synthetic oligonucleotide
  Target: SCNA; (-) strand; PAM type: NRG; PAM sequence: TGG
ttaacttcatcaatagtttc

SEQ ID NO: 15428 - DNA, 20 bp, Artificial Sequence
  Description of Artificial Sequence: Synthetic oligonucleotide
  Target: SCNA; (-) strand; PAM type: NRG; PAM sequence: TAG
tcctcacttaacttcatcaa

SEQ ID NO: 15429 - DNA, 20 bp, Artificial Sequence
  Description of Artificial Sequence: Synthetic oligonucleotide
  Target: SCNA; (-) strand; PAM type: NRG; PAM sequence: CAG
ccatcagagggcacataata

SEQ ID NO: 15430 - DNA, 20 bp, Artificial Sequence
  Description of Artificial Sequence: Synthetic oligonucleotide
  Target: SCNA; (-) strand; PAM type: NRG; PAM sequence: GGG
gtgtatgtacttccatcaga

SEQ ID NO: 15431 - DNA, 20 bp, Artificial Sequence
  Description of Artificial Sequence: Synthetic oligonucleotide
  Target: SCNA; (-) strand; PAM type: NRG; PAM sequence: AGG
tgtgtatgtacttccatcag

SEQ ID NO: 15432 - DNA, 20 bp, Artificial Sequence
  Description of Artificial Sequence: Synthetic oligonucleotide
  Target: SCNA; (-) strand; PAM type: NRG; PAM sequence: GAG
atgtgtatgtacttccatca

SEQ ID NO: 15433 - DNA, 20 bp, Artificial Sequence
  Description of Artificial Sequence: Synthetic oligonucleotide
  Target: SCNA; (-) strand; PAM type: NRG; PAM sequence: CAG
tgatgtgtatgtacttccat

SEQ ID NO: 15434 - DNA, 20 bp, Artificial Sequence
  Description of Artificial Sequence: Synthetic oligonucleotide
  Target: SCNA; (-) strand; PAM type: NRG; PAM sequence: TGG
agtacagtcttagtttaaga

SEQ ID NO: 15435 - DNA, 20 bp, Artificial Sequence
  Description of Artificial Sequence: Synthetic oligonucleotide
  Target: SCNA; (-) strand; PAM type: NRG; PAM sequence: AAG
aactagtacagtcttagttt

SEQ ID NO: 15436 - DNA, 20 bp, Artificial Sequence
  Description of Artificial Sequence: Synthetic oligonucleotide
  Target: SCNA; (-) strand; PAM type: NRG; PAM sequence: TAG
cacttaaactagtacagtct

SEQ ID NO: 15437 - DNA, 20 bp, Artificial Sequence
  Description of Artificial Sequence: Synthetic oligonucleotide
  Target: SCNA; (-) strand; PAM type: NRG; PAM sequence: CAG
atagcccacttaaactagta

SEQ ID NO: 15438 - DNA, 20 bp, Artificial Sequence
  Description of Artificial Sequence: Synthetic oligonucleotide
  Target: SCNA; (-) strand; PAM type: NRG; PAM sequence: TAG
gaacaatagcccacttaaac

SEQ ID NO: 15439 - DNA, 20 bp, Artificial Sequence
  Description of Artificial Sequence: Synthetic oligonucleotide
  Target: SCNA; (-) strand; PAM type: NRG; PAM sequence: TAG
gttattggatcagtgaacaa

SEQ ID NO: 15440 - DNA, 20 bp, Artificial Sequence
  Description of Artificial Sequence: Synthetic oligonucleotide
  Target: SCNA; (-) strand; PAM type: NRG; PAM sequence: CAG
acttgatgaagttattggat

SEQ ID NO: 15441 - DNA, 20 bp, Artificial Sequence
  Description of Artificial Sequence: Synthetic oligonucleotide
  Target: SCNA; (-) strand; PAM type: NRG; PAM sequence: TGG
ttcccacttgatgaagttat

SEQ ID NO: 15442 - DNA, 20 bp, Artificial Sequence
  Description of Artificial Sequence: Synthetic oligonucleotide
  Target: SCNA; (-) strand; PAM type: NRG; PAM sequence: AAG
tagcttgttcccacttgatg

SEQ ID NO: 15443 - DNA, 20 bp, Artificial Sequence
  Description of Artificial Sequence: Synthetic oligonucleotide
  Target: SCNA; (-) strand; PAM type: NRG; PAM sequence: TAG
ttgtgctgtcatccctagtg

SEQ ID NO: 15444 - DNA, 20 bp, Artificial Sequence
  Description of Artificial Sequence: Synthetic oligonucleotide
  Target: SCNA; (-) strand; PAM type: NRG; PAM sequence: TAG
taggattgtgctgtcatccc

SEQ ID NO: 15445 - DNA, 20 bp, Artificial Sequence
  Description of Artificial Sequence: Synthetic oligonucleotide
  Target: SCNA; (-) strand; PAM type: NRG; PAM sequence: AGG
gtcgatttggactctagaat

SEQ ID NO: 15446 - DNA, 20 bp, Artificial Sequence
  Description of Artificial Sequence: Synthetic oligonucleotide
  Target: SCNA; (-) strand; PAM type: NRG; PAM sequence: TAG
tgtcgatttggactctagaa

SEQ ID NO: 15447 - DNA, 20 bp, Artificial Sequence
  Description of Artificial Sequence: Synthetic oligonucleotide
  Target: SCNA; (-) strand; PAM type: NRG; PAM sequence: TAG
cctattgtcgatttggactc

SEQ ID NO: 15448 - DNA, 20 bp, Artificial Sequence
  Description of Artificial Sequence: Synthetic oligonucleotide
  Target: SCNA; (-) strand; PAM type: NRG; PAM sequence: TGG
cgtaaaccctattgtcgatt

SEQ ID NO: 15449 - DNA, 20 bp, Artificial Sequence
  Description of Artificial Sequence: Synthetic oligonucleotide
  Target: SCNA; (-) strand; PAM type: NRG; PAM sequence: AGG
gatgacctgatccaacatcg

SEQ ID NO: 15450 - DNA, 20 bp, Artificial Sequence
  Description of Artificial Sequence: Synthetic oligonucleotide
  Target: SCNA; (-) strand; PAM type: NRG; PAM sequence: GAG
ggatgacctgatccaacatc

SEQ ID NO: 15451 - DNA, 20 bp, Artificial Sequence
  Description of Artificial Sequence: Synthetic oligonucleotide
  Target: SCNA; (-) strand; PAM type: NRG; PAM sequence: AGG
ttaatagcagttacaccatt

SEQ ID NO: 15452 - DNA, 20 bp, Artificial Sequence
  Description of Artificial Sequence: Synthetic oligonucleotide
  Target: SCNA; (-) strand; PAM type: NRG; PAM sequence: TAG
tttaatagcagttacaccat

SEQ ID NO: 15453 - DNA, 20 bp, Artificial Sequence
  Description of Artificial Sequence: Synthetic oligonucleotide
  Target: SCNA; (-) strand; PAM type: NRG; PAM sequence: CAG
aacaaacgaacctttaatag

SEQ ID NO: 15454 - DNA, 20 bp, Artificial Sequence
  Description of Artificial Sequence: Synthetic oligonucleotide
  Target: SCNA; (-) strand; PAM type: NRG; PAM sequence: TAG
tcgaacaaacgaacctttaa

SEQ ID NO: 15455 - DNA, 20 bp, Artificial Sequence
  Description of Artificial Sequence: Synthetic oligonucleotide
  Target: SCNA; (-) strand; PAM type: NRG; PAM sequence: AGG
cctgacctcaccgatcatgt

SEQ ID NO: 15456 - DNA, 20 bp, Artificial Sequence
  Description of Artificial Sequence: Synthetic oligonucleotide
  Target: SCNA; (-) strand; PAM type: NRG; PAM sequence: TAG
tcctgacctcaccgatcatg

SEQ ID NO: 15457 - DNA, 20 bp, Artificial Sequence
  Description of Artificial Sequence: Synthetic oligonucleotide
  Target: SCNA; (-) strand; PAM type: NRG; PAM sequence: TAG
ccatgttggccaggatgcta

SEQ ID NO: 15458 - DNA, 20 bp, Artificial Sequence
  Description of Artificial Sequence: Synthetic oligonucleotide
  Target: SCNA; (-) strand; PAM type: NRG; PAM sequence: AGG
ggggtttcaccatgttggcc

SEQ ID NO: 15459 - DNA, 20 bp, Artificial Sequence
  Description of Artificial Sequence: Synthetic oligonucleotide
  Target: SCNA; (-) strand; PAM type: NRG; PAM sequence: CAG
tggggtttcaccatgttggc

SEQ ID NO: 15460 - DNA, 20 bp, Artificial Sequence
  Description of Artificial Sequence: Synthetic oligonucleotide
  Target: SCNA; (-) strand; PAM type: NRG; PAM sequence: TGG
gagatggggtttcaccatgt

SEQ ID NO: 15461 - DNA, 20 bp, Artificial Sequence
  Description of Artificial Sequence: Synthetic oligonucleotide
  Target: SCNA; (-) strand; PAM type: NRG; PAM sequence: GGG
tttgtattttagtagagatg

SEQ ID NO: 15462 - DNA, 20 bp, Artificial Sequence
  Description of Artificial Sequence: Synthetic oligonucleotide
  Target: SCNA; (-) strand; PAM type: NRG; PAM sequence: GGG
ttttgtattttagtagagat

SEQ ID NO: 15463 - DNA, 20 bp, Artificial Sequence
  Description of Artificial Sequence: Synthetic oligonucleotide
  Target: SCNA; (-) strand; PAM type: NRG; PAM sequence: TGG
tttttgtattttagtagaga

SEQ ID NO: 15464 - DNA, 20 bp, Artificial Sequence
  Description of Artificial Sequence: Synthetic oligonucleotide
  Target: SCNA; (-) strand; PAM type: NRG; PAM sequence: GAG
taactttttgtattttagta

SEQ ID NO: 15465 - DNA, 20 bp, Artificial Sequence
  Description of Artificial Sequence: Synthetic oligonucleotide
  Target: SCNA; (-) strand; PAM type: NRG; PAM sequence: TAG
gctaactttttgtattttag

SEQ ID NO: 15466 - DNA, 20 bp, Artificial Sequence
  Description of Artificial Sequence: Synthetic oligonucleotide
  Target: SCNA; (-) strand; PAM type: NRG; PAM sequence: TAG
ccggctaactttttgtattt

SEQ ID NO: 15467 - DNA, 20 bp, Artificial Sequence
  Description of Artificial Sequence: Synthetic oligonucleotide
  Target: SCNA; (-) strand; PAM type: NRG; PAM sequence: CGG
tataggagaaccaccacgcc

SEQ ID NO: 15468 - DNA, 20 bp, Artificial Sequence
  Description of Artificial Sequence: Synthetic oligonucleotide
  Target: SCNA; (-) strand; PAM type: NRG; PAM sequence: GAG
ccgagtagctgggactatag

SEQ ID NO: 15469 - DNA, 20 bp, Artificial Sequence
  Description of Artificial Sequence: Synthetic oligonucleotide
  Target: SCNA; (-) strand; PAM type: NRG; PAM sequence: AGG
tcccgagtagctgggactat

SEQ ID NO: 15470 - DNA, 20 bp, Artificial Sequence
  Description of Artificial Sequence: Synthetic oligonucleotide
  Target: SCNA; (-) strand; PAM type: NRG; PAM sequence: TAG
ctcccgagtagctgggacta

SEQ ID NO: 15471 - DNA, 20 bp, Artificial Sequence
  Description of Artificial Sequence: Synthetic oligonucleotide
  Target: SCNA; (-) strand; PAM type: NRG; PAM sequence: GGG
gctcagtctcccgagtagct

SEQ ID NO: 15472 - DNA, 20 bp, Artificial Sequence
  Description of Artificial Sequence: Synthetic oligonucleotide
  Target: SCNA; (-) strand; PAM type: NRG; PAM sequence: TGG
ggctcagtctcccgagtagc

SEQ ID NO: 15473 - DNA, 20 bp, Artificial Sequence
  Description of Artificial Sequence: Synthetic oligonucleotide
  Target: SCNA; (-) strand; PAM type: NRG; PAM sequence: TAG
ccctggctcagtctcccgag

SEQ ID NO: 15474 - DNA, 20 bp, Artificial Sequence
  Description of Artificial Sequence: Synthetic oligonucleotide
  Target: SCNA; (-) strand; PAM type: NRG; PAM sequence: GAG
ttcccctggctcagtctccc

SEQ ID NO: 15475 - DNA, 20 bp, Artificial Sequence
  Description of Artificial Sequence: Synthetic oligonucleotide
  Target: SCNA; (-) strand; PAM type: NRG; PAM sequence: CAG
ttcaagtgattcccctggct

SEQ ID NO: 15476 - DNA, 20 bp, Artificial Sequence
  Description of Artificial Sequence: Synthetic oligonucleotide
  Target: SCNA; (-) strand; PAM type: NRG; PAM sequence: TGG
ccgggttcaagtgattcccc

SEQ ID NO: 15477 - DNA, 20 bp, Artificial Sequence
  Description of Artificial Sequence: Synthetic oligonucleotide
  Target: SCNA; (-) strand; PAM type: NRG; PAM sequence: AAG
aatctccacctcccgggttc

SEQ ID NO: 15478 - DNA, 20 bp, Artificial Sequence
  Description of Artificial Sequence: Synthetic oligonucleotide
  Target: SCNA; (-) strand; PAM type: NRG; PAM sequence: GGG
cactgcaatctccacctccc

SEQ ID NO: 15479 - DNA, 20 bp, Artificial Sequence
  Description of Artificial Sequence: Synthetic oligonucleotide
  Target: SCNA; (-) strand; PAM type: NRG; PAM sequence: CGG
tcactgcaatctccacctcc

SEQ ID NO: 15480 - DNA, 20 bp, Artificial Sequence
  Description of Artificial Sequence: Synthetic oligonucleotide
  Target: SCNA; (-) strand; PAM type: NRG; PAM sequence: GGG
ggagtgcaatggtgtgatct

SEQ ID NO: 15481 - DNA, 20 bp, Artificial Sequence
  Description of Artificial Sequence: Synthetic oligonucleotide
  Target: SCNA; (-) strand; PAM type: NRG; PAM sequence: TGG
tggagtgcaatggtgtgatc

SEQ ID NO: 15482 - DNA, 20 bp, Artificial Sequence
  Description of Artificial Sequence: Synthetic oligonucleotide
  Target: SCNA; (-) strand; PAM type: NRG; PAM sequence: TGG
gtcaccaggctggagtgcaa

SEQ ID NO: 15483 - DNA, 20 bp, Artificial Sequence
  Description of Artificial Sequence: Synthetic oligonucleotide
  Target: SCNA; (-) strand; PAM type: NRG; PAM sequence: GAG
ctcactccgtcaccaggctg

SEQ ID NO: 15484 - DNA, 20 bp, Artificial Sequence
  Description of Artificial Sequence: Synthetic oligonucleotide
  Target: SCNA; (-) strand; PAM type: NRG; PAM sequence: TGG
gtctcactccgtcaccaggc

SEQ ID NO: 15485 - DNA, 20 bp, Artificial Sequence
  Description of Artificial Sequence: Synthetic oligonucleotide
  Target: SCNA; (-) strand; PAM type: NRG; PAM sequence: AGG
cggagtctcactccgtcacc

SEQ ID NO: 15486 - DNA, 20 bp, Artificial Sequence
  Description of Artificial Sequence: Synthetic oligonucleotide
  Target: SCNA; (-) strand; PAM type: NRG; PAM sequence: CAG
acggagtctcactccgtcac

SEQ ID NO: 15487 - DNA, 20 bp, Artificial Sequence
  Description of Artificial Sequence: Synthetic oligonucleotide
  Target: SCNA; (-) strand; PAM type: NRG; PAM sequence: GAG
tatttatttattttgagacg

SEQ ID NO: 15488 - DNA, 20 bp, Artificial Sequence
  Description of Artificial Sequence: Synthetic oligonucleotide
  Target: SCNA; (-) strand; PAM type: NRG; PAM sequence: CGG
tttatttatttattttgaga

SEQ ID NO: 15489 - DNA, 20 bp, Artificial Sequence
  Description of Artificial Sequence: Synthetic oligonucleotide
  Target: SCNA; (-) strand; PAM type: NRG; PAM sequence: GAG
tatatttatttatttatttt

SEQ ID NO: 15490 - DNA, 20 bp, Artificial Sequence
  Description of Artificial Sequence: Synthetic oligonucleotide
  Target: SCNA; (-) strand; PAM type: NRG; PAM sequence: GGG
attcaaattcggatcacgta

SEQ ID NO: 15491 - DNA, 20 bp, Artificial Sequence
  Description of Artificial Sequence: Synthetic oligonucleotide
  Target: SCNA; (-) strand; PAM type: NRG; PAM sequence: AGG
aattcaaattcggatcacgt

SEQ ID NO: 15492 - DNA, 20 bp, Artificial Sequence
  Description of Artificial Sequence: Synthetic oligonucleotide
  Target: SCNA; (-) strand; PAM type: NRG; PAM sequence: TAG
aaattcaaattcggatcacg

SEQ ID NO: 15493 - DNA, 20 bp, Artificial Sequence
  Description of Artificial Sequence: Synthetic oligonucleotide
  Target: SCNA; (-) strand; PAM type: NRG; PAM sequence: CGG
atgttaatcaaattcaaatt

SEQ ID NO: 15494 - DNA, 20 bp, Artificial Sequence
  Description of Artificial Sequence: Synthetic oligonucleotide
  Target: SCNA; (-) strand; PAM type: NRG; PAM sequence: TAG
ttgctgtaagttgtcagtga

SEQ ID NO: 15495 - DNA, 20 bp, Artificial Sequence
  Description of Artificial Sequence: Synthetic oligonucleotide
  Target: SCNA; (-) strand; PAM type: NRG; PAM sequence: CAG
ttatatttgctgtaagttgt

SEQ ID NO: 15496 - DNA, 20 bp, Artificial Sequence
  Description of Artificial Sequence: Synthetic oligonucleotide
  Target: SCNA; (-) strand; PAM type: NRG; PAM sequence: AAG
caccaccttatatttgctgt

SEQ ID NO: 15497 - DNA, 20 bp, Artificial Sequence
  Description of Artificial Sequence: Synthetic oligonucleotide
  Target: SCNA; (-) strand; PAM type: NRG; PAM sequence: AAG
ctgattgtagccactgttgt

SEQ ID NO: 15498 - DNA, 20 bp, Artificial Sequence
  Description of Artificial Sequence: Synthetic oligonucleotide
  Target: SCNA; (-) strand; PAM type: NRG; PAM sequence: TAG
agtgcaaaatttgctgattg

SEQ ID NO: 15499 - DNA, 20 bp, Artificial Sequence
  Description of Artificial Sequence: Synthetic oligonucleotide
  Target: SCNA; (-) strand; PAM type: NRG; PAM sequence: CAG
ttgtcttgtgtagtttctca

SEQ ID NO: 15500 - DNA, 20 bp, Artificial Sequence
  Description of Artificial Sequence: Synthetic oligonucleotide
  Target: SCNA; (-) strand; PAM type: NRG; PAM sequence: TAG
gacgtattctttgtcttgtg

SEQ ID NO: 15501 - DNA, 20 bp, Artificial Sequence
  Description of Artificial Sequence: Synthetic oligonucleotide
  Target: SCNA; (-) strand; PAM type: NRG; PAM sequence: TAG
tgcaatttacttattgaaat

SEQ ID NO: 15502 - DNA, 20 bp, Artificial Sequence
  Description of Artificial Sequence: Synthetic oligonucleotide
  Target: SCNA; (-) strand; PAM type: NRG; PAM sequence: TAG
ggttcccactaacttctttt

SEQ ID NO: 15503 - DNA, 20 bp, Artificial Sequence
  Description of Artificial Sequence: Synthetic oligonucleotide
  Target: SCNA; (-) strand; PAM type: NRG; PAM sequence: AGG
tcacttctactttaagcggc

SEQ ID NO: 15504 - DNA, 20 bp, Artificial Sequence
  Description of Artificial Sequence: Synthetic oligonucleotide
  Target: SCNA; (-) strand; PAM type: NRG; PAM sequence: CAG
ctcacttctactttaagcgg

SEQ ID NO: 15505 - DNA, 20 bp, Artificial Sequence
  Description of Artificial Sequence: Synthetic oligonucleotide
  Target: SCNA; (-) strand; PAM type: NRG; PAM sequence: CGG
tctctcacttctactttaag

SEQ ID NO: 15506 - DNA, 20 bp, Artificial Sequence
  Description of Artificial Sequence: Synthetic oligonucleotide
  Target: SCNA; (-) strand; PAM type: NRG; PAM sequence: AAG
tgctctctcacttctacttt

SEQ ID NO: 15507 - DNA, 20 bp, Artificial Sequence
  Description of Artificial Sequence: Synthetic oligonucleotide
  Target: SCNA; (-) strand; PAM type: NRG; PAM sequence: TGG
taaagttcttaggttgcaat

SEQ ID NO: 15508 - DNA, 20 bp, Artificial Sequence
  Description of Artificial Sequence: Synthetic oligonucleotide
  Target: SCNA; (-) strand; PAM type: NRG; PAM sequence: AGG
gagaatgaaataaagttctt

SEQ ID NO: 15509 - DNA, 20 bp, Artificial Sequence
  Description of Artificial Sequence: Synthetic oligonucleotide
  Target: SCNA; (-) strand; PAM type: NRG; PAM sequence: TAG
tgagaatgaaataaagttct

SEQ ID NO: 15510 - DNA, 20 bp, Artificial Sequence
  Description of Artificial Sequence: Synthetic oligonucleotide
  Target: SCNA; (-) strand; PAM type: NRG; PAM sequence: AAG
ttcccaatgagaatgaaata

SEQ ID NO: 15511 - DNA, 20 bp, Artificial Sequence
  Description of Artificial Sequence: Synthetic oligonucleotide
  Target: SCNA; (-) strand; PAM type: NRG; PAM sequence: GAG
gcttatgtagggttcccaat

SEQ ID NO: 15512 - DNA, 20 bp, Artificial Sequence
  Description of Artificial Sequence: Synthetic oligonucleotide
  Target: SCNA; (-) strand; PAM type: NRG; PAM sequence: GGG
gttttccatttgcttatgta

SEQ ID NO: 15513 - DNA, 20 bp, Artificial Sequence
  Description of Artificial Sequence: Synthetic oligonucleotide
  Target: SCNA; (-) strand; PAM type: NRG; PAM sequence: AGG
tgttttccatttgcttatgt

SEQ ID NO: 15514 - DNA, 20 bp, Artificial Sequence
  Description of Artificial Sequence: Synthetic oligonucleotide
  Target: SCNA; (-) strand; PAM type: NRG; PAM sequence: TAG
gtgttttccatttgcttatg

SEQ ID NO: 15515 - DNA, 20 bp, Artificial Sequence
  Description of Artificial Sequence: Synthetic oligonucleotide
  Target: SCNA; (-) strand; PAM type: NRG; PAM sequence: CAG
ataattcttaaatatcaagt

SEQ ID NO: 15516 - DNA, 20 bp, Artificial Sequence
  Description of Artificial Sequence: Synthetic oligonucleotide
  Target: SCNA; (-) strand; PAM type: NRG; PAM sequence: AAG
aacaataattcttaaatatc

SEQ ID NO: 15517 - DNA, 20 bp, Artificial Sequence
  Description of Artificial Sequence: Synthetic oligonucleotide
  Target: SCNA; (-) strand; PAM type: NRG; PAM sequence: AAG
gcaatatatcatcacaccta

SEQ ID NO: 15518 - DNA, 20 bp, Artificial Sequence
  Description of Artificial Sequence: Synthetic oligonucleotide
  Target: SCNA; (-) strand; PAM type: NRG; PAM sequence: AAG
taaaagttaagaactttttg

SEQ ID NO: 15519 - DNA, 20 bp, Artificial Sequence
  Description of Artificial Sequence: Synthetic oligonucleotide
  Target: SCNA; (-) strand; PAM type: NRG; PAM sequence: AAG
ttaattaatttgtaaaagtt

SEQ ID NO: 15520 - DNA, 20 bp, Artificial Sequence
  Description of Artificial Sequence: Synthetic oligonucleotide
  Target: SCNA; (-) strand; PAM type: NRG; PAM sequence: AAG
aacatttaattaatttgtaa

SEQ ID NO: 15521 - DNA, 20 bp, Artificial Sequence
  Description of Artificial Sequence: Synthetic oligonucleotide
  Target: SCNA; (-) strand; PAM type: NRG; PAM sequence: TAG
ttcccccacccaaacctaga

SEQ ID NO: 15522 - DNA, 20 bp, Artificial Sequence
  Description of Artificial Sequence: Synthetic oligonucleotide
  Target: SCNA; (-) strand; PAM type: NRG; PAM sequence: TAG
ccatttcccccacccaaacc

SEQ ID NO: 15523 - DNA, 20 bp, Artificial Sequence
  Description of Artificial Sequence: Synthetic oligonucleotide
  Target: SCNA; (-) strand; PAM type: NRG; PAM sequence: GAG
aacaaaaccacggataaaag

SEQ ID NO: 15524 - DNA, 20 bp, Artificial Sequence
  Description of Artificial Sequence: Synthetic oligonucleotide
  Target: SCNA; (-) strand; PAM type: NRG; PAM sequence: AGG
aaaacaaaaccacggataaa

SEQ ID NO: 15525 - DNA, 20 bp, Artificial Sequence
  Description of Artificial Sequence: Synthetic oligonucleotide
  Target: SCNA; (-) strand; PAM type: NRG; PAM sequence: AAG
gaaaacaaaaccacggataa

SEQ ID NO: 15526 - DNA, 20 bp, Artificial Sequence
  Description of Artificial Sequence: Synthetic oligonucleotide
  Target: SCNA; (-) strand; PAM type: NRG; PAM sequence: CGG
aaccatggaaaacaaaacca

SEQ ID NO: 15527 - DNA, 20 bp, Artificial Sequence
  Description of Artificial Sequence: Synthetic oligonucleotide
  Target: SCNA; (-) strand; PAM type: NRG; PAM sequence: TGG
gtggtgggcaactgaaacca

SEQ ID NO: 15528 - DNA, 20 bp, Artificial Sequence
  Description of Artificial Sequence: Synthetic oligonucleotide
  Target: SCNA; (-) strand; PAM type: NRG; PAM sequence: GGG
ttggggttgcaattggtggt

SEQ ID NO: 15529 - DNA, 20 bp, Artificial Sequence
  Description of Artificial Sequence: Synthetic oligonucleotide
  Target: SCNA; (-) strand; PAM type: NRG; PAM sequence: TGG
tttggggttgcaattggtgg

SEQ ID NO: 15530 - DNA, 20 bp, Artificial Sequence
  Description of Artificial Sequence: Synthetic oligonucleotide
  Target: SCNA; (-) strand; PAM type: NRG; PAM sequence: TGG
tattttggggttgcaattgg

SEQ ID NO: 15531 - DNA, 20 bp, Artificial Sequence
  Description of Artificial Sequence: Synthetic oligonucleotide
  Target: SCNA; (-) strand; PAM type: NRG; PAM sequence: TGG
tagtattttggggttgcaat

SEQ ID NO: 15532 - DNA, 20 bp, Artificial Sequence
  Description of Artificial Sequence: Synthetic oligonucleotide
  Target: SCNA; (-) strand; PAM type: NRG; PAM sequence: GGG
ctaaatatcttagtattttg

SEQ ID NO: 15533 - DNA, 20 bp, Artificial Sequence
  Description of Artificial Sequence: Synthetic oligonucleotide
  Target: SCNA; (-) strand; PAM type: NRG; PAM sequence: GGG
tctaaatatcttagtatttt

SEQ ID NO: 15534 - DNA, 20 bp, Artificial Sequence
  Description of Artificial Sequence: Synthetic oligonucleotide
  Target: SCNA; (-) strand; PAM type: NRG; PAM sequence: TGG
ctctaaatatcttagtattt

SEQ ID NO: 15535 - DNA, 20 bp, Artificial Sequence
  Description of Artificial Sequence: Synthetic oligonucleotide
  Target: SCNA; (-) strand; PAM type: NRG; PAM sequence: TAG
ctctctgtctctaaatatct

SEQ ID NO: 15536 - DNA, 20 bp, Artificial Sequence
  Description of Artificial Sequence: Synthetic oligonucleotide
  Target: SCNA; (-) strand; PAM type: NRG; PAM sequence: TGG
taataaaagttatgtgggta

SEQ ID NO: 15537 - DNA, 20 bp, Artificial Sequence
  Description of Artificial Sequence: Synthetic oligonucleotide
  Target: SCNA; (-) strand; PAM type: NRG; PAM sequence: GGG
tactgtaataaaagttatgt

SEQ ID NO: 15538 - DNA, 20 bp, Artificial Sequence
  Description of Artificial Sequence: Synthetic oligonucleotide
  Target: SCNA; (-) strand; PAM type: NRG; PAM sequence: TGG
atactgtaataaaagttatg

SEQ ID NO: 15539 - DNA, 20 bp, Artificial Sequence
  Description of Artificial Sequence: Synthetic oligonucleotide
  Target: SCNA; (-) strand; PAM type: NRG; PAM sequence: AAG
ataataatatactgtaataa

SEQ ID NO: 15540 - DNA, 20 bp, Artificial Sequence
  Description of Artificial Sequence: Synthetic oligonucleotide
  Target: SCNA; (-) strand; PAM type: NRG; PAM sequence: GAG
aacaataactaataacaaaa

SEQ ID NO: 15541 - DNA, 20 bp, Artificial Sequence
  Description of Artificial Sequence: Synthetic oligonucleotide
  Target: SCNA; (-) strand; PAM type: NRG; PAM sequence: AAG
acaacaataactaataacaa

SEQ ID NO: 15542 - DNA, 20 bp, Artificial Sequence
  Description of Artificial Sequence: Synthetic oligonucleotide
  Target: SCNA; (-) strand; PAM type: NRG; PAM sequence: GAG
ttataaactaggcacagtaa

SEQ ID NO: 15543 - DNA, 20 bp, Artificial Sequence
  Description of Artificial Sequence: Synthetic oligonucleotide
  Target: SCNA; (-) strand; PAM type: NRG; PAM sequence: AAG
atttataaactaggcacagt

SEQ ID NO: 15544 - DNA, 20 bp, Artificial Sequence
  Description of Artificial Sequence: Synthetic oligonucleotide
  Target: SCNA; (-) strand; PAM type: NRG; PAM sequence: CAG
tttaatttataaactaggca

SEQ ID NO: 15545 - DNA, 20 bp, Artificial Sequence
  Description of Artificial Sequence: Synthetic oligonucleotide
  Target: SCNA; (-) strand; PAM type: NRG; PAM sequence: AGG
aaaagtttaatttataaact

SEQ ID NO: 15546 - DNA, 20 bp, Artificial Sequence
  Description of Artificial Sequence: Synthetic oligonucleotide
  Target: SCNA; (-) strand; PAM type: NRG; PAM sequence: TAG
aaaaagtttaatttataaac

SEQ ID NO: 15547 - DNA, 20 bp, Artificial Sequence
  Description of Artificial Sequence: Synthetic oligonucleotide
  Target: SCNA; (-) strand; PAM type: NRG; PAM sequence: AAG
atgcttatgtacctatgaaa

SEQ ID NO: 15548 - DNA, 20 bp, Artificial Sequence
  Description of Artificial Sequence: Synthetic oligonucleotide
  Target: SCNA; (-) strand; PAM type: NRG; PAM sequence: TAG
acacctgaaattgcggatag

SEQ ID NO: 15549 - DNA, 20 bp, Artificial Sequence
  Description of Artificial Sequence: Synthetic oligonucleotide
  Target: SCNA; (-) strand; PAM type: NRG; PAM sequence: TAG
aggacacctgaaattgcgga

SEQ ID NO: 15550 - DNA, 20 bp, Artificial Sequence
  Description of Artificial Sequence: Synthetic oligonucleotide
  Target: SCNA; (-) strand; PAM type: NRG; PAM sequence: CGG
cactaggacacctgaaattg

SEQ ID NO: 15551 - DNA, 20 bp, Artificial Sequence
  Description of Artificial Sequence: Synthetic oligonucleotide
  Target: SCNA; (-) strand; PAM type: NRG; PAM sequence: AGG
tacattctgaaacccccact

SEQ ID NO: 15552 - DNA, 20 bp, Artificial Sequence
  Description of Artificial Sequence: Synthetic oligonucleotide
  Target: SCNA; (-) strand; PAM type: NRG; PAM sequence: TAG
atacattctgaaacccccac

SEQ ID NO: 15553 - DNA, 20 bp, Artificial Sequence
  Description of Artificial Sequence: Synthetic oligonucleotide
  Target: SCNA; (-) strand; PAM type: NRG; PAM sequence: GGG
gcagtcttcctttatctaca

SEQ ID NO: 15554 - DNA, 20 bp, Artificial Sequence
  Description of Artificial Sequence: Synthetic oligonucleotide
  Target: SCNA; (-) strand; PAM type: NRG; PAM sequence: AGG
agcagtcttcctttatctac

SEQ ID NO: 15555 - DNA, 20 bp, Artificial Sequence
  Description of Artificial Sequence: Synthetic oligonucleotide
  Target: SCNA; (-) strand; PAM type: NRG; PAM sequence: CAG
cagcagtcttcctttatcta

SEQ ID NO: 15556 - DNA, 20 bp, Artificial Sequence
  Description of Artificial Sequence: Synthetic oligonucleotide
  Target: SCNA; (-) strand; PAM type: NRG; PAM sequence: CAG
ctattgaaatgagcatacag

SEQ ID NO: 15557 - DNA, 20 bp, Artificial Sequence
  Description of Artificial Sequence: Synthetic oligonucleotide
  Target: SCNA; (-) strand; PAM type: NRG; PAM sequence: CAG
taactattgaaatgagcata

SEQ ID NO: 15558 - DNA, 20 bp, Artificial Sequence
  Description of Artificial Sequence: Synthetic oligonucleotide
  Target: SCNA; (-) strand; PAM type: NRG; PAM sequence: GAG
agagaactaactattgaaat

SEQ ID NO: 15559 - DNA, 20 bp, Artificial Sequence
  Description of Artificial Sequence: Synthetic oligonucleotide
  Target: SCNA; (-) strand; PAM type: NRG; PAM sequence: GAG
tattcagaaaaacatagtta

SEQ ID NO: 15560 - DNA, 20 bp, Artificial Sequence
  Description of Artificial Sequence: Synthetic oligonucleotide
  Target: SCNA; (-) strand; PAM type: NRG; PAM sequence: TAG
catattcagaaaaacatagt

SEQ ID NO: 15561 - DNA, 20 bp, Artificial Sequence
  Description of Artificial Sequence: Synthetic oligonucleotide
  Target: SCNA; (-) strand; PAM type: NRG; PAM sequence: TAG
atcacatattcagaaaaaca

SEQ ID NO: 15562 - DNA, 20 bp, Artificial Sequence
  Description of Artificial Sequence: Synthetic oligonucleotide
  Target: SCNA; (-) strand; PAM type: NRG; PAM sequence: CAG
acaaatttagatcacatatt

SEQ ID NO: 15563 - DNA, 20 bp, Artificial Sequence
  Description of Artificial Sequence: Synthetic oligonucleotide
  Target: SCNA; (-) strand; PAM type: NRG; PAM sequence: TAG
tgtgatagagtcaacaaatt

SEQ ID NO: 15564 - DNA, 20 bp, Artificial Sequence
  Description of Artificial Sequence: Synthetic oligonucleotide
  Target: SCNA; (-) strand; PAM type: NRG; PAM sequence: GAG
taaaatctacgaatgtgata

SEQ ID NO: 15565 - DNA, 20 bp, Artificial Sequence
  Description of Artificial Sequence: Synthetic oligonucleotide
  Target: SCNA; (-) strand; PAM type: NRG; PAM sequence: TAG
cttaaaatctacgaatgtga

SEQ ID NO: 15566 - DNA, 20 bp, Artificial Sequence
  Description of Artificial Sequence: Synthetic oligonucleotide
  Target: SCNA; (-) strand; PAM type: NRG; PAM sequence: TAG
ggaatagctgccaaatattt

SEQ ID NO: 15567 - DNA, 20 bp, Artificial Sequence
  Description of Artificial Sequence: Synthetic oligonucleotide
  Target: SCNA; (-) strand; PAM type: NRG; PAM sequence: TAG
ttgttatattctccttggaa

SEQ ID NO: 15568 - DNA, 20 bp, Artificial Sequence
  Description of Artificial Sequence: Synthetic oligonucleotide
  Target: SCNA; (-) strand; PAM type: NRG; PAM sequence: TGG
gtttgttgttatattctcct

SEQ ID NO: 15569 - DNA, 20 bp, Artificial Sequence
  Description of Artificial Sequence: Synthetic oligonucleotide
  Target: SCNA; (-) strand; PAM type: NRG; PAM sequence: AAG
ttgtgtctgatggtcatatg

SEQ ID NO: 15570 - DNA, 20 bp, Artificial Sequence
  Description of Artificial Sequence: Synthetic oligonucleotide
  Target: SCNA; (-) strand; PAM type: NRG; PAM sequence: TGG
agggataaaattgtgtctga

SEQ ID NO: 15571 - DNA, 20 bp, Artificial Sequence
  Description of Artificial Sequence: Synthetic oligonucleotide
  Target: SCNA; (-) strand; PAM type: NRG; PAM sequence: GGG
acagtaaatatacaggtata

SEQ ID NO: 15572 - DNA, 20 bp, Artificial Sequence
  Description of Artificial Sequence: Synthetic oligonucleotide
  Target: SCNA; (-) strand; PAM type: NRG; PAM sequence: AGG
aacagtaaatatacaggtat

SEQ ID NO: 15573 - DNA, 20 bp, Artificial Sequence
  Description of Artificial Sequence: Synthetic oligonucleotide
  Target: SCNA; (-) strand; PAM type: NRG; PAM sequence: TAG
aaacagtaaatatacaggta

SEQ ID NO: 15574 - DNA, 20 bp, Artificial Sequence
  Description of Artificial Sequence: Synthetic oligonucleotide
  Target: SCNA; (-) strand; PAM type: NRG; PAM sequence: AGG
ttatgaaacagtaaatatac

SEQ ID NO: 15575 - DNA, 20 bp, Artificial Sequence
  Description of Artificial Sequence: Synthetic oligonucleotide
  Target: SCNA; (-) strand; PAM type: NRG; PAM sequence: CAG
tttatgaaacagtaaatata

SEQ ID NO: 15576 - DNA, 20 bp, Artificial Sequence
  Description of Artificial Sequence: Synthetic oligonucleotide
  Target: SCNA; (-) strand; PAM type: NRG; PAM sequence: CAG
ttagaaataggtttatgaaa

SEQ ID NO: 15577 - DNA, 20 bp, Artificial Sequence
  Description of Artificial Sequence: Synthetic oligonucleotide
  Target: SCNA; (-) strand; PAM type: NRG; PAM sequence: AGG
ataacaatgtttttagaaat

SEQ ID NO: 15578 - DNA, 20 bp, Artificial Sequence
  Description of Artificial Sequence: Synthetic oligonucleotide
  Target: SCNA; (-) strand; PAM type: NRG; PAM sequence: TAG
gataacaatgtttttagaaa

SEQ ID NO: 15579 - DNA, 20 bp, Artificial Sequence
  Description of Artificial Sequence: Synthetic oligonucleotide
  Target: SCNA; (-) strand; PAM type: NRG; PAM sequence: TAG
tttatagataacaatgtttt

SEQ ID NO: 15580 - DNA, 20 bp, Artificial Sequence
  Description of Artificial Sequence: Synthetic oligonucleotide
  Target: SCNA; (-) strand; PAM type: NRG; PAM sequence: TAG
tgaaatttaatatttcttta

SEQ ID NO: 15581 - DNA, 20 bp, Artificial Sequence
  Description of Artificial Sequence: Synthetic oligonucleotide
  Target: SCNA; (-) strand; PAM type: NRG; PAM sequence: GAG
ttaggcacagttgtaaattg

SEQ ID NO: 15582 - DNA, 20 bp, Artificial Sequence
  Description of Artificial Sequence: Synthetic oligonucleotide
  Target: SCNA; (-) strand; PAM type: NRG; PAM sequence: TGG
tattaggcacagttgtaaat

SEQ ID NO: 15583 - DNA, 20 bp, Artificial Sequence
  Description of Artificial Sequence: Synthetic oligonucleotide
  Target: SCNA; (-) strand; PAM type: NRG; PAM sequence: CAG
cagccaaactatattaggca

SEQ ID NO: 15584 - DNA, 20 bp, Artificial Sequence
  Description of Artificial Sequence: Synthetic oligonucleotide
  Target: SCNA; (-) strand; PAM type: NRG; PAM sequence: AGG
tgttacagccaaactatatt

SEQ ID NO: 15585 - DNA, 20 bp, Artificial Sequence
  Description of Artificial Sequence: Synthetic oligonucleotide
  Target: SCNA; (-) strand; PAM type: NRG; PAM sequence: TAG
ttgttacagccaaactatat

SEQ ID NO: 15586 - DNA, 20 bp, Artificial Sequence
  Description of Artificial Sequence: Synthetic oligonucleotide
  Target: SCNA; (-) strand; PAM type: NRG; PAM sequence: CAG
ttaatgttctttttttgtta

SEQ ID NO: 15587 - DNA, 20 bp, Artificial Sequence
  Description of Artificial Sequence: Synthetic oligonucleotide
  Target: SCNA; (-) strand; PAM type: NRG; PAM sequence: AAG
tatgattatattttgaaaac

SEQ ID NO: 15588 - DNA, 20 bp, Artificial Sequence
  Description of Artificial Sequence: Synthetic oligonucleotide
  Target: SCNA; (-) strand; PAM type: NRG; PAM sequence: AAG
aaggtgcacttcacaccttc

SEQ ID NO: 15589 - DNA, 20 bp, Artificial Sequence
  Description of Artificial Sequence: Synthetic oligonucleotide
  Target: SCNA; (-) strand; PAM type: NRG; PAM sequence: AGG
ttgtggtaaaaataaataga

SEQ ID NO: 15590 - DNA, 20 bp, Artificial Sequence
  Description of Artificial Sequence: Synthetic oligonucleotide
  Target: SCNA; (-) strand; PAM type: NRG; PAM sequence: AAG
tttgtggtaaaaataaatag

SEQ ID NO: 15591 - DNA, 20 bp, Artificial Sequence
  Description of Artificial Sequence: Synthetic oligonucleotide
  Target: SCNA; (-) strand; PAM type: NRG; PAM sequence: TAG
ttgtttgtggtaaaaataaa

SEQ ID NO: 15592 - DNA, 20 bp, Artificial Sequence
  Description of Artificial Sequence: Synthetic oligonucleotide
  Target: SCNA; (-) strand; PAM type: NRG; PAM sequence: TGG
gtagttttttttcttgtttg

SEQ ID NO: 15593 - DNA, 20 bp, Artificial Sequence
  Description of Artificial Sequence: Synthetic oligonucleotide
  Target: SCNA; (-) strand; PAM type: NRG; PAM sequence: TAG
tttaacatttgttatattgg

SEQ ID NO: 15594 - DNA, 20 bp, Artificial Sequence
  Description of Artificial Sequence: Synthetic oligonucleotide
  Target: SCNA; (-) strand; PAM type: NRG; PAM sequence: TGG
gtgtttaacatttgttatat

SEQ ID NO: 15595 - DNA, 20 bp, Artificial Sequence
  Description of Artificial Sequence: Synthetic oligonucleotide
  Target: SCNA; (-) strand; PAM type: NRG; PAM sequence: AAG
gaaaaaattgattttttcaa

SEQ ID NO: 15596 - DNA, 20 bp, Artificial Sequence
  Description of Artificial Sequence: Synthetic oligonucleotide
  Target: SCNA; (-) strand; PAM type: NRG; PAM sequence: GAG
taatatcataatgaaaattt

SEQ ID NO: 15597 - DNA, 20 bp, Artificial Sequence
  Description of Artificial Sequence: Synthetic oligonucleotide
  Target: SCNA; (-) strand; PAM type: NRG; PAM sequence: GGG
ttattgccctaacatattct

SEQ ID NO: 15598 - DNA, 20 bp, Artificial Sequence
  Description of Artificial Sequence: Synthetic oligonucleotide
  Target: SCNA; (-) strand; PAM type: NRG; PAM sequence: TGG
tttattgccctaacatattc

SEQ ID NO: 15599 - DNA, 20 bp, Artificial Sequence
  Description of Artificial Sequence: Synthetic oligonucleotide
  Target: SCNA; (-) strand; PAM type: NRG; PAM sequence: CAG
tacaggcatataccaaaatc

SEQ ID NO: 15600 - DNA, 20 bp, Artificial Sequence
  Description of Artificial Sequence: Synthetic oligonucleotide
  Target: SCNA; (-) strand; PAM type: NRG; PAM sequence: AGG
ggttctcttattaagcatac

SEQ ID NO: 15601 - DNA, 20 bp, Artificial Sequence
  Description of Artificial Sequence: Synthetic oligonucleotide
  Target: SCNA; (-) strand; PAM type: NRG; PAM sequence: CAG
aggttctcttattaagcata

SEQ ID NO: 15602 - DNA, 20 bp, Artificial Sequence
  Description of Artificial Sequence: Synthetic oligonucleotide
  Target: SCNA; (-) strand; PAM type: NRG; PAM sequence: AAG
accctgtaggttctcttatt

SEQ ID NO: 15603 - DNA, 20 bp, Artificial Sequence
  Description of Artificial Sequence: Synthetic oligonucleotide
  Target: SCNA; (-) strand; PAM type: NRG; PAM sequence: AGG
gtctctatatcctaccctgt

SEQ ID NO: 15604 - DNA, 20 bp, Artificial Sequence
  Description of Artificial Sequence: Synthetic oligonucleotide
  Target: SCNA; (-) strand; PAM type: NRG; PAM sequence: TAG
tgtctctatatcctaccctg

SEQ ID NO: 15605 - DNA, 20 bp, Artificial Sequence
  Description of Artificial Sequence: Synthetic oligonucleotide
  Target: SCNA; (-) strand; PAM type: NRG; PAM sequence: AGG
cctagtagagagagaataaa

SEQ ID NO: 15606 - DNA, 20 bp, Artificial Sequence
  Description of Artificial Sequence: Synthetic oligonucleotide
  Target: SCNA; (-) strand; PAM type: NRG; PAM sequence: AAG
gcctagtagagagagaataa

SEQ ID NO: 15607 - DNA, 20 bp, Artificial Sequence
  Description of Artificial Sequence: Synthetic oligonucleotide
  Target: SCNA; (-) strand; PAM type: NRG; PAM sequence: GAG
gggatagggcctagtagaga

SEQ ID NO: 15608 - DNA, 20 bp, Artificial Sequence
  Description of Artificial Sequence: Synthetic oligonucleotide
  Target: SCNA; (-) strand; PAM type: NRG; PAM sequence: GAG
cagggatagggcctagtaga

SEQ ID NO: 15609 - DNA, 20 bp, Artificial Sequence
  Description of Artificial Sequence: Synthetic oligonucleotide
  Target: SCNA; (-) strand; PAM type: NRG; PAM sequence: GAG
tccagggatagggcctagta

SEQ ID NO: 15610 - DNA, 20 bp, Artificial Sequence
  Description of Artificial Sequence: Synthetic oligonucleotide
  Target: SCNA; (-) strand; PAM type: NRG; PAM sequence: TAG
attccagggatagggcctag

SEQ ID NO: 15611 - DNA, 20 bp, Artificial Sequence
  Description of Artificial Sequence: Synthetic oligonucleotide
  Target: SCNA; (-) strand; PAM type: NRG; PAM sequence: TAG
gctattccagggatagggcc

SEQ ID NO: 15612 - DNA, 20 bp, Artificial Sequence
  Description of Artificial Sequence: Synthetic oligonucleotide
  Target: SCNA; (-) strand; PAM type: NRG; PAM sequence: GGG
ctacagctattccagggata

SEQ ID NO: 15613 - DNA, 20 bp, Artificial Sequence
  Description of Artificial Sequence: Synthetic oligonucleotide
  Target: SCNA; (-) strand; PAM type: NRG; PAM sequence: AGG
tctacagctattccagggat

SEQ ID NO: 15614 - DNA, 20 bp, Artificial Sequence
  Description of Artificial Sequence: Synthetic oligonucleotide
  Target: SCNA; (-) strand; PAM type: NRG; PAM sequence: TAG
gtctacagctattccaggga

SEQ ID NO: 15615 - DNA, 20 bp, Artificial Sequence
  Description of Artificial Sequence: Synthetic oligonucleotide
  Target: SCNA; (-) strand; PAM type: NRG; PAM sequence: GGG
aaaagtctacagctattcca

SEQ ID NO: 15616 - DNA, 20 bp, Artificial Sequence
  Description of Artificial Sequence: Synthetic oligonucleotide
  Target: SCNA; (-) strand; PAM type: NRG; PAM sequence: AGG
aaaaagtctacagctattcc

SEQ ID NO: 15617 - DNA, 20 bp, Artificial Sequence
  Description of Artificial Sequence: Synthetic oligonucleotide
  Target: SCNA; (-) strand; PAM type: NRG; PAM sequence: CAG
aaaaaagtctacagctattc

SEQ ID NO: 15618 - DNA, 20 bp, Artificial Sequence
  Description of Artificial Sequence: Synthetic oligonucleotide
  Target: SCNA; (-) strand; PAM type: NRG; PAM sequence: CAG
atttgaaaaaaaaaagtcta

SEQ ID NO: 15619 - DNA, 20 bp, Artificial Sequence
  Description of Artificial Sequence: Synthetic oligonucleotide
  Target: SCNA; (-) strand; PAM type: NRG; PAM sequence: AAG
caatcccatttgaaaaaaaa

SEQ ID NO: 15620 - DNA, 20 bp, Artificial Sequence
  Description of Artificial Sequence: Synthetic oligonucleotide
  Target: SCNA; (-) strand; PAM type: NRG; PAM sequence: GAG
cagatataagatactgaact

SEQ ID NO: 15621 - DNA, 20 bp, Artificial Sequence
  Description of Artificial Sequence: Synthetic oligonucleotide
  Target: SCNA; (-) strand; PAM type: NRG; PAM sequence: AAG
tgtgtgtcaaatgcagatat

SEQ ID NO: 15622 - DNA, 20 bp, Artificial Sequence
  Description of Artificial Sequence: Synthetic oligonucleotide
  Target: SCNA; (-) strand; PAM type: NRG; PAM sequence: CAG
ttctttctgtgtgtcaaatg

SEQ ID NO: 15623 - DNA, 20 bp, Artificial Sequence
  Description of Artificial Sequence: Synthetic oligonucleotide
  Target: SCNA; (-) strand; PAM type: NRG; PAM sequence: GGG
tctttccttattagcaatga

SEQ ID NO: 15624 - DNA, 20 bp, Artificial Sequence
  Description of Artificial Sequence: Synthetic oligonucleotide
  Target: SCNA; (-) strand; PAM type: NRG; PAM sequence: AGG
gtctttccttattagcaatg

SEQ ID NO: 15625 - DNA, 20 bp, Artificial Sequence
  Description of Artificial Sequence: Synthetic oligonucleotide
  Target: SCNA; (-) strand; PAM type: NRG; PAM sequence: GAG
agtctttccttattagcaat

SEQ ID NO: 15626 - DNA, 20 bp, Artificial Sequence
  Description of Artificial Sequence: Synthetic oligonucleotide
  Target: SCNA; (-) strand; PAM type: NRG; PAM sequence: TAG
gcttttaagtctttccttat

SEQ ID NO: 15627 - DNA, 20 bp, Artificial Sequence
  Description of Artificial Sequence: Synthetic oligonucleotide
  Target: SCNA; (-) strand; PAM type: NRG; PAM sequence: AAG
tgtttcctaatatagctttt

SEQ ID NO: 15628 - DNA, 20 bp, Artificial Sequence
  Description of Artificial Sequence: Synthetic oligonucleotide
  Target: SCNA; (-) strand; PAM type: NRG; PAM sequence: TAG
gccatttctgtttcctaata

SEQ ID NO: 15629 - DNA, 20 bp, Artificial Sequence
  Description of Artificial Sequence: Synthetic oligonucleotide
  Target: SCNA; (-) strand; PAM type: NRG; PAM sequence: CAG
agggagaaagaggtcagtct

SEQ ID NO: 15630 - DNA, 20 bp, Artificial Sequence
  Description of Artificial Sequence: Synthetic oligonucleotide
  Target: SCNA; (-) strand; PAM type: NRG; PAM sequence: CAG
ctttttagggagaaagaggt

SEQ ID NO: 15631 - DNA, 20 bp, Artificial Sequence
  Description of Artificial Sequence: Synthetic oligonucleotide
  Target: SCNA; (-) strand; PAM type: NRG; PAM sequence: AGG
taagctttttagggagaaag

SEQ ID NO: 15632 - DNA, 20 bp, Artificial Sequence
  Description of Artificial Sequence: Synthetic oligonucleotide
  Target: SCNA; (-) strand; PAM type: NRG; PAM sequence: GAG
ataagctttttagggagaaa

SEQ ID NO: 15633 - DNA, 20 bp, Artificial Sequence
  Description of Artificial Sequence: Synthetic oligonucleotide
  Target: SCNA; (-) strand; PAM type: NRG; PAM sequence: AAG
gaataagctttttagggaga

SEQ ID NO: 15634 - DNA, 20 bp, Artificial Sequence
  Description of Artificial Sequence: Synthetic oligonucleotide
  Target: SCNA; (-) strand; PAM type: NRG; PAM sequence: GAG
acttgaataagctttttagg

SEQ ID NO: 15635 - DNA, 20 bp, Artificial Sequence
  Description of Artificial Sequence: Synthetic oligonucleotide
  Target: SCNA; (-) strand; PAM type: NRG; PAM sequence: GGG
gaacttgaataagcttttta

SEQ ID NO: 15636 - DNA, 20 bp, Artificial Sequence
  Description of Artificial Sequence: Synthetic oligonucleotide
  Target: SCNA; (-) strand; PAM type: NRG; PAM sequence: AGG
agaacttgaataagcttttt

SEQ ID NO: 15637 - DNA, 20 bp, Artificial Sequence
  Description of Artificial Sequence: Synthetic oligonucleotide
  Target: SCNA; (-) strand; PAM type: NRG; PAM sequence: TAG
aagaacttgaataagctttt

SEQ ID NO: 15638 - DNA, 20 bp, Artificial Sequence
  Description of Artificial Sequence: Synthetic oligonucleotide
  Target: SCNA; (-) strand; PAM type: NRG; PAM sequence: AAG
tatttaaaaagaacttgaat

SEQ ID NO: 15639 - DNA, 20 bp, Artificial Sequence
  Description of Artificial Sequence: Synthetic oligonucleotide
  Target: SCNA; (-) strand; PAM type: NRG; PAM sequence: AAG
accctacaggtttatttaaa

SEQ ID NO: 15640 - DNA, 20 bp, Artificial Sequence
  Description of Artificial Sequence: Synthetic oligonucleotide
  Target: SCNA; (-) strand; PAM type: NRG; PAM sequence: AGG
tatcagctattcaaccctac

SEQ ID NO: 15641 - DNA, 20 bp, Artificial Sequence
  Description of Artificial Sequence: Synthetic oligonucleotide
  Target: SCNA; (-) strand; PAM type: NRG; PAM sequence: CAG
atatcagctattcaacccta

SEQ ID NO: 15642 - DNA, 20 bp, Artificial Sequence
  Description of Artificial Sequence: Synthetic oligonucleotide
  Target: SCNA; (-) strand; PAM type: NRG; PAM sequence: CAG
gaaatgataatcagttatat

SEQ ID NO: 15643 - DNA, 20 bp, Artificial Sequence
  Description of Artificial Sequence: Synthetic oligonucleotide
  Target: SCNA; (-) strand; PAM type: NRG; PAM sequence: CAG
gacgagtacgaaatgataat

SEQ ID NO: 15644 - DNA, 20 bp, Artificial Sequence
  Description of Artificial Sequence: Synthetic oligonucleotide
  Target: SCNA; (-) strand; PAM type: NRG; PAM sequence: GAG
tagagcacttcagctgggac

SEQ ID NO: 15645 - DNA, 20 bp, Artificial Sequence
  Description of Artificial Sequence: Synthetic oligonucleotide
  Target: SCNA; (-) strand; PAM type: NRG; PAM sequence: GGG
ttttatagagcacttcagct

SEQ ID NO: 15646 - DNA, 20 bp, Artificial Sequence
  Description of Artificial Sequence: Synthetic oligonucleotide
  Target: SCNA; (-) strand; PAM type: NRG; PAM sequence: TGG
gttttatagagcacttcagc

SEQ ID NO: 15647 - DNA, 20 bp, Artificial Sequence
  Description of Artificial Sequence: Synthetic oligonucleotide
  Target: SCNA; (-) strand; PAM type: NRG; PAM sequence: CAG
atctgttttatagagcactt

SEQ ID NO: 15648 - DNA, 20 bp, Artificial Sequence
  Description of Artificial Sequence: Synthetic oligonucleotide
  Target: SCNA; (-) strand; PAM type: NRG; PAM sequence: GAG
gtctcatgatctgttttata

SEQ ID NO: 15649 - DNA, 20 bp, Artificial Sequence
  Description of Artificial Sequence: Synthetic oligonucleotide
  Target: SCNA; (-) strand; PAM type: NRG; PAM sequence: TAG
tcgtctcatgatctgtttta

SEQ ID NO: 15650 - DNA, 20 bp, Artificial Sequence
  Description of Artificial Sequence: Synthetic oligonucleotide
  Target: SCNA; (-) strand; PAM type: NRG; PAM sequence: AAG
taagctattagcagtgaagg

SEQ ID NO: 15651 - DNA, 20 bp, Artificial Sequence
  Description of Artificial Sequence: Synthetic oligonucleotide
  Target: SCNA; (-) strand; PAM type: NRG; PAM sequence: AGG
caataagctattagcagtga

SEQ ID NO: 15652 - DNA, 20 bp, Artificial Sequence
  Description of Artificial Sequence: Synthetic oligonucleotide
  Target: SCNA; (-) strand; PAM type: NRG; PAM sequence: AAG
ccaataagctattagcagtg

SEQ ID NO: 15653 - DNA, 20 bp, Artificial Sequence
  Description of Artificial Sequence: Synthetic oligonucleotide
  Target: SCNA; (-) strand; PAM type: NRG; PAM sequence: CAG
acttcccaataagctattag

SEQ ID NO: 15654 - DNA, 20 bp, Artificial Sequence
  Description of Artificial Sequence: Synthetic oligonucleotide
  Target: SCNA; (-) strand; PAM type: NRG; PAM sequence: TAG
tgtacttcccaataagctat

SEQ ID NO: 15655 - DNA, 20 bp, Artificial Sequence
  Description of Artificial Sequence: Synthetic oligonucleotide
  Target: SCNA; (-) strand; PAM type: NRG; PAM sequence: AAG
ctggaattgtacttcccaat

SEQ ID NO: 15656 - DNA, 20 bp, Artificial Sequence
  Description of Artificial Sequence: Synthetic oligonucleotide
  Target: SCNA; (-) strand; PAM type: NRG; PAM sequence: TGG
ttccttcactttcacttccc

SEQ ID NO: 15657 - DNA, 20 bp, Artificial Sequence
  Description of Artificial Sequence: Synthetic oligonucleotide
  Target: SCNA; (-) strand; PAM type: NRG; PAM sequence: TAG
agttgtattcctaaagacag

SEQ ID NO: 15658 - DNA, 20 bp, Artificial Sequence
  Description of Artificial Sequence: Synthetic oligonucleotide
  Target: SCNA; (-) strand; PAM type: NRG; PAM sequence: CAG
tgtagttgtattcctaaaga

SEQ ID NO: 15659 - DNA, 20 bp, Artificial Sequence
  Description of Artificial Sequence: Synthetic oligonucleotide
  Target: SCNA; (-) strand; PAM type: NRG; PAM sequence: AAG
attctgtagttgtattccta

SEQ ID NO: 15660 - DNA, 20 bp, Artificial Sequence
  Description of Artificial Sequence: Synthetic oligonucleotide
  Target: SCNA; (-) strand; PAM type: NRG; PAM sequence: TAG
aaaagattatgtaaattctg

SEQ ID NO: 15661 - DNA, 20 bp, Artificial Sequence
  Description of Artificial Sequence: Synthetic oligonucleotide
  Target: SCNA; (-) strand; PAM type: NRG; PAM sequence: AAG
ttcaaaacaggaaatttaaa

SEQ ID NO: 15662 - DNA, 20 bp, Artificial Sequence
  Description of Artificial Sequence: Synthetic oligonucleotide
  Target: SCNA; (-) strand; PAM type: NRG; PAM sequence: AGG
aatacaatatggttcaaaac

SEQ ID NO: 15663 - DNA, 20 bp, Artificial Sequence
  Description of Artificial Sequence: Synthetic oligonucleotide
  Target: SCNA; (-) strand; PAM type: NRG; PAM sequence: CAG
aaatacaatatggttcaaaa

SEQ ID NO: 15664 - DNA, 20 bp, Artificial Sequence
  Description of Artificial Sequence: Synthetic oligonucleotide
  Target: SCNA; (-) strand; PAM type: NRG; PAM sequence: TGG
ctaggtatctaaatacaata

SEQ ID NO: 15665 - DNA, 20 bp, Artificial Sequence
  Description of Artificial Sequence: Synthetic oligonucleotide
  Target: SCNA; (-) strand; PAM type: NRG; PAM sequence: AGG
tccttacagaaagtattact

SEQ ID NO: 15666 - DNA, 20 bp, Artificial Sequence
  Description of Artificial Sequence: Synthetic oligonucleotide
  Target: SCNA; (-) strand; PAM type: NRG; PAM sequence: TAG
ttccttacagaaagtattac

SEQ ID NO: 15667 - DNA, 20 bp, Artificial Sequence
  Description of Artificial Sequence: Synthetic oligonucleotide
  Target: SCNA; (-) strand; PAM type: NRG; PAM sequence: AAG
aaagataatttccttacaga

SEQ ID NO: 15668 - DNA, 20 bp, Artificial Sequence
  Description of Artificial Sequence: Synthetic oligonucleotide
  Target: SCNA; (-) strand; PAM type: NRG; PAM sequence: CAG
gaataaagataatttcctta

SEQ ID NO: 15669 - DNA, 20 bp, Artificial Sequence
  Description of Artificial Sequence: Synthetic oligonucleotide
  Target: SCNA; (-) strand; PAM type: NRG; PAM sequence: AAG
ataagtcatagaattgaata

SEQ ID NO: 15670 - DNA, 20 bp, Artificial Sequence
  Description of Artificial Sequence: Synthetic oligonucleotide
  Target: SCNA; (-) strand; PAM type: NRG; PAM sequence: TAG
aaaattaaagttataagtca

SEQ ID NO: 15671 - DNA, 20 bp, Artificial Sequence
  Description of Artificial Sequence: Synthetic oligonucleotide
  Target: SCNA; (-) strand; PAM type: NRG; PAM sequence: AAG
atatttaaaattaaagttat

SEQ ID NO: 15672 - DNA, 20 bp, Artificial Sequence
  Description of Artificial Sequence: Synthetic oligonucleotide
  Target: SCNA; (-) strand; PAM type: NRG; PAM sequence: AAG
tttaaatatatttaaaatta

SEQ ID NO: 15673 - DNA, 20 bp, Artificial Sequence
  Description of Artificial Sequence: Synthetic oligonucleotide
  Target: SCNA; (-) strand; PAM type: NRG; PAM sequence: AAG
ctagaagagtgtggtttgga

SEQ ID NO: 15674 - DNA, 20 bp, Artificial Sequence
  Description of Artificial Sequence: Synthetic oligonucleotide
  Target: SCNA; (-) strand; PAM type: NRG; PAM sequence: TGG
gattctagaagagtgtggtt

SEQ ID NO: 15675 - DNA, 20 bp, Artificial Sequence
  Description of Artificial Sequence: Synthetic oligonucleotide
  Target: SCNA; (-) strand; PAM type: NRG; PAM sequence: TGG
tagatgattctagaagagtg

SEQ ID NO: 15676 - DNA, 20 bp, Artificial Sequence
  Description of Artificial Sequence: Synthetic oligonucleotide
  Target: SCNA; (-) strand; PAM type: NRG; PAM sequence: GAG
ggccctagatgattctagaa

SEQ ID NO: 15677 - DNA, 20 bp, Artificial Sequence
  Description of Artificial Sequence: Synthetic oligonucleotide
  Target: SCNA; (-) strand; PAM type: NRG; PAM sequence: AAG
agggccctagatgattctag

SEQ ID NO: 15678 - DNA, 20 bp, Artificial Sequence
  Description of Artificial Sequence: Synthetic oligonucleotide
  Target: SCNA; (-) strand; PAM type: NRG; PAM sequence: TAG
acaagggccctagatgattc

SEQ ID NO: 15679 - DNA, 20 bp, Artificial Sequence
  Description of Artificial Sequence: Synthetic oligonucleotide
  Target: SCNA; (-) strand; PAM type: NRG; PAM sequence: TAG
tgcatttttaacaagggccc

SEQ ID NO: 15680 - DNA, 20 bp, Artificial Sequence
  Description of Artificial Sequence: Synthetic oligonucleotide
  Target: SCNA; (-) strand; PAM type: NRG; PAM sequence: GGG
caaacctgcatttttaacaa

SEQ ID NO: 15681 - DNA, 20 bp, Artificial Sequence
  Description of Artificial Sequence: Synthetic oligonucleotide
  Target: SCNA; (-) strand; PAM type: NRG; PAM sequence: AGG
acaaacctgcatttttaaca

SEQ ID NO: 15682 - DNA, 20 bp, Artificial Sequence
  Description of Artificial Sequence: Synthetic oligonucleotide
  Target: SCNA; (-) strand; PAM type: NRG; PAM sequence: AAG
tacaaacctgcatttttaac

SEQ ID NO: 15683 - DNA, 20 bp, Artificial Sequence
  Description of Artificial Sequence: Synthetic oligonucleotide
  Target: SCNA; (-) strand; PAM type: NRG; PAM sequence: AGG
tacttaacaagacactcaca

SEQ ID NO: 15684 - DNA, 20 bp, Artificial Sequence
  Description of Artificial Sequence: Synthetic oligonucleotide
  Target: SCNA; (-) strand; PAM type: NRG; PAM sequence: AAG
atacttaacaagacactcac

SEQ ID NO: 15685 - DNA, 20 bp, Artificial Sequence
  Description of Artificial Sequence: Synthetic oligonucleotide
  Target: SCNA; (-) strand; PAM type: NRG; PAM sequence: AAG
ttccaaggaacatacttaac

SEQ ID NO: 15686 - DNA, 20 bp, Artificial Sequence
  Description of Artificial Sequence: Synthetic oligonucleotide
  Target: SCNA; (-) strand; PAM type: NRG; PAM sequence: AGG
atgtcgggcagtggtttcca

SEQ ID NO: 15687 - DNA, 20 bp, Artificial Sequence
  Description of Artificial Sequence: Synthetic oligonucleotide
  Target: SCNA; (-) strand; PAM type: NRG; PAM sequence: AAG
gatgtcgggcagtggtttcc

SEQ ID NO: 15688 - DNA, 20 bp, Artificial Sequence
  Description of Artificial Sequence: Synthetic oligonucleotide
  Target: SCNA; (-) strand; PAM type: NRG; PAM sequence: TGG
caattggtgatgtcgggcag

SEQ ID NO: 15689 - DNA, 20 bp, Artificial Sequence
  Description of Artificial Sequence: Synthetic oligonucleotide
  Target: SCNA; (-) strand; PAM type: NRG; PAM sequence: CAG
aaacaattggtgatgtcggg

SEQ ID NO: 15690 - DNA, 20 bp, Artificial Sequence
  Description of Artificial Sequence: Synthetic oligonucleotide
  Target: SCNA; (-) strand; PAM type: NRG; PAM sequence: GGG
tacaaacaattggtgatgtc

SEQ ID NO: 15691 - DNA, 20 bp, Artificial Sequence
  Description of Artificial Sequence: Synthetic oligonucleotide
  Target: SCNA; (-) strand; PAM type: NRG; PAM sequence: CGG
ttacaaacaattggtgatgt

SEQ ID NO: 15692 - DNA, 20 bp, Artificial Sequence
  Description of Artificial Sequence: Synthetic oligonucleotide
  Target: SCNA; (-) strand; PAM type: NRG; PAM sequence: TGG
ccacagggtttacaaacaat

SEQ ID NO: 15693 - DNA, 20 bp, Artificial Sequence
  Description of Artificial Sequence: Synthetic oligonucleotide
  Target: SCNA; (-) strand; PAM type: NRG; PAM sequence: GGG
ctatattaaattataccaca

SEQ ID NO: 15694 - DNA, 20 bp, Artificial Sequence
  Description of Artificial Sequence: Synthetic oligonucleotide
  Target: SCNA; (-) strand; PAM type: NRG; PAM sequence: AGG
tctatattaaattataccac

SEQ ID NO: 15695 - DNA, 20 bp, Artificial Sequence
  Description of Artificial Sequence: Synthetic oligonucleotide
  Target: SCNA; (-) strand; PAM type: NRG; PAM sequence: CAG
ctctatattaaattatacca

SEQ ID NO: 15696 - DNA, 20 bp, Artificial Sequence
  Description of Artificial Sequence: Synthetic oligonucleotide
  Target: SCNA; (-) strand; PAM type: NRG; PAM sequence: TGG
cacactgacagcaagtacat

SEQ ID NO: 15697 - DNA, 20 bp, Artificial Sequence
  Description of Artificial Sequence: Synthetic oligonucleotide
  Target: SCNA; (-) strand; PAM type: NRG; PAM sequence: AAG
aaattattcacactgacagc

SEQ ID NO: 15698 - DNA, 20 bp, Artificial Sequence
  Description of Artificial Sequence: Synthetic oligonucleotide
  Target: SCNA; (-) strand; PAM type: NRG; PAM sequence: CAG
aaaaaaattattcacactga

SEQ ID NO: 15699 - DNA, 20 bp, Artificial Sequence
  Description of Artificial Sequence: Synthetic oligonucleotide
  Target: SCNA; (-) strand; PAM type: NRG; PAM sequence: GAG
catttgatggacttcaaaat

SEQ ID NO: 15700 - DNA, 20 bp, Artificial Sequence
  Description of Artificial Sequence: Synthetic oligonucleotide
  Target: SCNA; (-) strand; PAM type: NRG; PAM sequence: TGG
caacatttgccaacatttga

SEQ ID NO: 15701 - DNA, 20 bp, Artificial Sequence
  Description of Artificial Sequence: Synthetic oligonucleotide
  Target: SCNA; (-) strand; PAM type: NRG; PAM sequence: CAG
ggattacttcccagtgtctt

SEQ ID NO: 15702 - DNA, 20 bp, Artificial Sequence
  Description of Artificial Sequence: Synthetic oligonucleotide
  Target: SCNA; (-) strand; PAM type: NRG; PAM sequence: CAG
gatcaccatggattacttcc

SEQ ID NO: 15703 - DNA, 20 bp, Artificial Sequence
  Description of Artificial Sequence: Synthetic oligonucleotide
  Target: SCNA; (-) strand; PAM type: NRG; PAM sequence: TGG
tgctattttaacgatcacca

SEQ ID NO: 15704 - DNA, 20 bp, Artificial Sequence
  Description of Artificial Sequence: Synthetic oligonucleotide
  Target: SCNA; (-) strand; PAM type: NRG; PAM sequence: CAG
ctttgacaaagcatagatac

SEQ ID NO: 15705 - DNA, 20 bp, Artificial Sequence
  Description of Artificial Sequence: Synthetic oligonucleotide
  Target: SCNA; (-) strand; PAM type: NRG; PAM sequence: TAG
tttctaactttgacaaagca

SEQ ID NO: 15706 - DNA, 20 bp, Artificial Sequence
  Description of Artificial Sequence: Synthetic oligonucleotide
  Target: SCNA; (-) strand; PAM type: NRG; PAM sequence: AAG
ctacatttctaactttgaca

SEQ ID NO: 15707 - DNA, 20 bp, Artificial Sequence
  Description of Artificial Sequence: Synthetic oligonucleotide
  Target: SCNA; (-) strand; PAM type: NRG; PAM sequence: TAG
cccacataaaagttttaatt

SEQ ID NO: 15708 - DNA, 20 bp, Artificial Sequence
  Description of Artificial Sequence: Synthetic oligonucleotide
  Target: SCNA; (-) strand; PAM type: NRG; PAM sequence: AAG
caatttttcttcccacataa

SEQ ID NO: 15709 - DNA, 20 bp, Artificial Sequence
  Description of Artificial Sequence: Synthetic oligonucleotide
  Target: SCNA; (-) strand; PAM type: NRG; PAM sequence: CAG
tgggtataccaaagaccaac

SEQ ID NO: 15710 - DNA, 20 bp, Artificial Sequence
  Description of Artificial Sequence: Synthetic oligonucleotide
  Target: SCNA; (-) strand; PAM type: NRG; PAM sequence: AAG
tttgttctttgggtatacca

SEQ ID NO: 15711 - DNA, 20 bp, Artificial Sequence
  Description of Artificial Sequence: Synthetic oligonucleotide
  Target: SCNA; (-) strand; PAM type: NRG; PAM sequence: GGG
caacctcctctttgttcttt

SEQ ID NO: 15712 - DNA, 20 bp, Artificial Sequence
  Description of Artificial Sequence: Synthetic oligonucleotide
  Target: SCNA; (-) strand; PAM type: NRG; PAM sequence: TGG
ccaacctcctctttgttctt

SEQ ID NO: 15713 - DNA, 20 bp, Artificial Sequence
  Description of Artificial Sequence: Synthetic oligonucleotide
  Target: SCNA; (-) strand; PAM type: NRG; PAM sequence: CAG
cgtgtatcatttctcttttt

SEQ ID NO: 15714 - DNA, 20 bp, Artificial Sequence
  Description of Artificial Sequence: Synthetic oligonucleotide
  Target: SCNA; (-) strand; PAM type: NRG; PAM sequence: CAG
caatgaactttctcaaagag

SEQ ID NO: 15715 - DNA, 20 bp, Artificial Sequence
  Description of Artificial Sequence: Synthetic oligonucleotide
  Target: SCNA; (-) strand; PAM type: NRG; PAM sequence: GAG
tgccaatgaactttctcaaa

SEQ ID NO: 15716 - DNA, 20 bp, Artificial Sequence
  Description of Artificial Sequence: Synthetic oligonucleotide
  Target: SCNA; (-) strand; PAM type: NRG; PAM sequence: AAG
agtgccaatgaactttctca

SEQ ID NO: 15717 - DNA, 20 bp, Artificial Sequence
  Description of Artificial Sequence: Synthetic oligonucleotide
  Target: SCNA; (-) strand; PAM type: NRG; PAM sequence: TAG
ctagctccccagaacctttc

SEQ ID NO: 15718 - DNA, 20 bp, Artificial Sequence
  Description of Artificial Sequence: Synthetic oligonucleotide
  Target: SCNA; (-) strand; PAM type: NRG; PAM sequence: CAG
attgaagcttactagctccc

SEQ ID NO: 15719 - DNA, 20 bp, Artificial Sequence
  Description of Artificial Sequence: Synthetic oligonucleotide
  Target: SCNA; (-) strand; PAM type: NRG; PAM sequence: TAG
actcaccaattgaagcttac

SEQ ID NO: 15720 - DNA, 20 bp, Artificial Sequence
  Description of Artificial Sequence: Synthetic oligonucleotide
  Target: SCNA; (-) strand; PAM type: NRG; PAM sequence: AAG
ccactgtcactcaccaattg

SEQ ID NO: 15721 - DNA, 20 bp, Artificial Sequence
  Description of Artificial Sequence: Synthetic oligonucleotide
  Target: SCNA; (-) strand; PAM type: NRG; PAM sequence: AGG
aaaaaacttgctgcagctct

SEQ ID NO: 15722 - DNA, 20 bp, Artificial Sequence
  Description of Artificial Sequence: Synthetic oligonucleotide
  Target: SCNA; (-) strand; PAM type: NRG; PAM sequence: TAG
gaaaaaacttgctgcagctc

SEQ ID NO: 15723 - DNA, 20 bp, Artificial Sequence
  Description of Artificial Sequence: Synthetic oligonucleotide
  Target: SCNA; (-) strand; PAM type: NRG; PAM sequence: CAG
actgctgaaaaaacttgctg

SEQ ID NO: 15724 - DNA, 20 bp, Artificial Sequence
  Description of Artificial Sequence: Synthetic oligonucleotide
  Target: SCNA; (-) strand; PAM type: NRG; PAM sequence: GGG
gaggctgcctgttgtaacct

SEQ ID NO: 15725 - DNA, 20 bp, Artificial Sequence
  Description of Artificial Sequence: Synthetic oligonucleotide
  Target: SCNA; (-) strand; PAM type: NRG; PAM sequence: TGG
tgaggctgcctgttgtaacc

SEQ ID NO: 15726 - DNA, 20 bp, Artificial Sequence
  Description of Artificial Sequence: Synthetic oligonucleotide
  Target: SCNA; (-) strand; PAM type: NRG; PAM sequence: AGG
ttctacaagtccgcatgctg

SEQ ID NO: 15727 - DNA, 20 bp, Artificial Sequence
  Description of Artificial Sequence: Synthetic oligonucleotide
  Target: SCNA; (-) strand; PAM type: NRG; PAM sequence: GAG
tttctacaagtccgcatgct

SEQ ID NO: 15728 - DNA, 20 bp, Artificial Sequence
  Description of Artificial Sequence: Synthetic oligonucleotide
  Target: SCNA; (-) strand; PAM type: NRG; PAM sequence: AAG
ccaaaagtgtaattttctac

SEQ ID NO: 15729 - DNA, 20 bp, Artificial Sequence
  Description of Artificial Sequence: Synthetic oligonucleotide
  Target: SCNA; (-) strand; PAM type: NRG; PAM sequence: AAG
gaaacatcacattgctccaa

SEQ ID NO: 15730 - DNA, 20 bp, Artificial Sequence
  Description of Artificial Sequence: Synthetic oligonucleotide
  Target: SCNA; (-) strand; PAM type: NRG; PAM sequence: AAG
gcctgggaggaaaagcattc

SEQ ID NO: 15731 - DNA, 20 bp, Artificial Sequence
  Description of Artificial Sequence: Synthetic oligonucleotide
  Target: SCNA; (-) strand; PAM type: NRG; PAM sequence: AAG
atcaagaagcctgggaggaa

SEQ ID NO: 15732 - DNA, 20 bp, Artificial Sequence
  Description of Artificial Sequence: Synthetic oligonucleotide
  Target: SCNA; (-) strand; PAM type: NRG; PAM sequence: AGG
aaacaatcaagaagcctggg

SEQ ID NO: 15733 - DNA, 20 bp, Artificial Sequence
  Description of Artificial Sequence: Synthetic oligonucleotide
  Target: SCNA; (-) strand; PAM type: NRG; PAM sequence: GAG
aaaacaatcaagaagcctgg

SEQ ID NO: 15734 - DNA, 20 bp, Artificial Sequence
  Description of Artificial Sequence: Synthetic oligonucleotide
  Target: SCNA; (-) strand; PAM type: NRG; PAM sequence: GGG
ctaaaacaatcaagaagcct

SEQ ID NO: 15735 - DNA, 20 bp, Artificial Sequence
  Description of Artificial Sequence: Synthetic oligonucleotide
  Target: SCNA; (-) strand; PAM type: NRG; PAM sequence: TGG
actaaaacaatcaagaagcc

SEQ ID NO: 15736 - DNA, 20 bp, Artificial Sequence
  Description of Artificial Sequence: Synthetic oligonucleotide
  Target: SCNA; (-) strand; PAM type: NRG; PAM sequence: AAG
acccaactaaaacaatcaag

SEQ ID NO: 15737 - DNA, 20 bp, Artificial Sequence
  Description of Artificial Sequence: Synthetic oligonucleotide
  Target: SCNA; (-) strand; PAM type: NRG; PAM sequence: AAG
tatacccaactaaaacaatc

SEQ ID NO: 15738 - DNA, 20 bp, Artificial Sequence
  Description of Artificial Sequence: Synthetic oligonucleotide
  Target: SCNA; (-) strand; PAM type: NRG; PAM sequence: GGG
gaaagttgatcacacaaatt

SEQ ID NO: 15739 - DNA, 20 bp, Artificial Sequence
  Description of Artificial Sequence: Synthetic oligonucleotide
  Target: SCNA; (-) strand; PAM type: NRG; PAM sequence: TGG
tgaaagttgatcacacaaat

SEQ ID NO: 15740 - DNA, 20 bp, Artificial Sequence
  Description of Artificial Sequence: Synthetic oligonucleotide
  Target: SCNA; (-) strand; PAM type: NRG; PAM sequence: AAG
ttgaatgtttaaggctgtga

SEQ ID NO: 15741 - DNA, 20 bp, Artificial Sequence
  Description of Artificial Sequence: Synthetic oligonucleotide
  Target: SCNA; (-) strand; PAM type: NRG; PAM sequence: AGG
tctgctgctttgaatgttta

SEQ ID NO: 15742 - DNA, 20 bp, Artificial Sequence
  Description of Artificial Sequence: Synthetic oligonucleotide
  Target: SCNA; (-) strand; PAM type: NRG; PAM sequence: AAG
ttctgctgctttgaatgttt

SEQ ID NO: 15743 - DNA, 20 bp, Artificial Sequence
  Description of Artificial Sequence: Synthetic oligonucleotide
  Target: SCNA; (-) strand; PAM type: NRG; PAM sequence: AAG
aaagcagtgggcaaaagaga

SEQ ID NO: 15744 - DNA, 20 bp, Artificial Sequence
  Description of Artificial Sequence: Synthetic oligonucleotide
  Target: SCNA; (-) strand; PAM type: NRG; PAM sequence: GAG
tgtaaaagcagtgggcaaaa

SEQ ID NO: 15745 - DNA, 20 bp, Artificial Sequence
  Description of Artificial Sequence: Synthetic oligonucleotide
  Target: SCNA; (-) strand; PAM type: NRG; PAM sequence: AAG
agtgtaaaagcagtgggcaa

SEQ ID NO: 15746 - DNA, 20 bp, Artificial Sequence
  Description of Artificial Sequence: Synthetic oligonucleotide
  Target: SCNA; (-) strand; PAM type: NRG; PAM sequence: GGG
tcttcaagtgtaaaagcagt

SEQ ID NO: 15747 - DNA, 20 bp, Artificial Sequence
  Description of Artificial Sequence: Synthetic oligonucleotide
  Target: SCNA; (-) strand; PAM type: NRG; PAM sequence: TGG
atcttcaagtgtaaaagcag

SEQ ID NO: 15748 - DNA, 20 bp, Artificial Sequence
  Description of Artificial Sequence: Synthetic oligonucleotide
  Target: SCNA; (-) strand; PAM type: NRG; PAM sequence: CAG
aatatcttcaagtgtaaaag

SEQ ID NO: 15749 - DNA, 20 bp, Artificial Sequence
  Description of Artificial Sequence: Synthetic oligonucleotide
  Target: SCNA; (-) strand; PAM type: NRG; PAM sequence: AAG
caaaatatcttcaagtgtaa

SEQ ID NO: 15750 - DNA, 20 bp, Artificial Sequence
  Description of Artificial Sequence: Synthetic oligonucleotide
  Target: SCNA; (-) strand; PAM type: NRG; PAM sequence: AAG
gttctacccaaaatatcttc

SEQ ID NO: 15751 - DNA, 20 bp, Artificial Sequence
  Description of Artificial Sequence: Synthetic oligonucleotide
  Target: SCNA; (-) strand; PAM type: NRG; PAM sequence: TGG
tcaataatgcagcaaaacaa

SEQ ID NO: 15752 - DNA, 20 bp, Artificial Sequence
  Description of Artificial Sequence: Synthetic oligonucleotide
  Target: SCNA; (-) strand; PAM type: NRG; PAM sequence: CAG
agtgacattgttcaataatg

SEQ ID NO: 15753 - DNA, 20 bp, Artificial Sequence
  Description of Artificial Sequence: Synthetic oligonucleotide
  Target: SCNA; (-) strand; PAM type: NRG; PAM sequence: AAG
taattccattatttgaggct

SEQ ID NO: 15754 - DNA, 20 bp, Artificial Sequence
  Description of Artificial Sequence: Synthetic oligonucleotide
  Target: SCNA; (-) strand; PAM type: NRG; PAM sequence: AGG
ggtattaattccattatttg

SEQ ID NO: 15755 - DNA, 20 bp, Artificial Sequence
  Description of Artificial Sequence: Synthetic oligonucleotide
  Target: SCNA; (-) strand; PAM type: NRG; PAM sequence: GAG
aggtattaattccattattt

SEQ ID NO: 15756 - DNA, 20 bp, Artificial Sequence
  Description of Artificial Sequence: Synthetic oligonucleotide
  Target: SCNA; (-) strand; PAM type: NRG; PAM sequence: AGG
tggtgtgagttgttgagtga

SEQ ID NO: 15757 - DNA, 20 bp, Artificial Sequence
  Description of Artificial Sequence: Synthetic oligonucleotide
  Target: SCNA; (-) strand; PAM type: NRG; PAM sequence: AAG
ctggtgtgagttgttgagtg

SEQ ID NO: 15758 - DNA, 20 bp, Artificial Sequence
  Description of Artificial Sequence: Synthetic oligonucleotide
  Target: SCNA; (-) strand; PAM type: NRG; PAM sequence: GAG
tcctcctggtgtgagttgtt

SEQ ID NO: 15759 - DNA, 20 bp, Artificial Sequence
  Description of Artificial Sequence: Synthetic oligonucleotide
  Target: SCNA; (-) strand; PAM type: NRG; PAM sequence: GAG
ctccttcatcctcctggtgt

SEQ ID NO: 15760 - DNA, 20 bp, Artificial Sequence
  Description of Artificial Sequence: Synthetic oligonucleotide
  Target: SCNA; (-) strand; PAM type: NRG; PAM sequence: TGG
atctctctccttcatcctcc

SEQ ID NO: 15761 - DNA, 20 bp, Artificial Sequence
  Description of Artificial Sequence: Synthetic oligonucleotide
  Target: SCNA; (-) strand; PAM type: NRG; PAM sequence: TGG
agtttcttcttttatctttt

SEQ ID NO: 15762 - DNA, 20 bp, Artificial Sequence
  Description of Artificial Sequence: Synthetic oligonucleotide
  Target: SCNA; (-) strand; PAM type: NRG; PAM sequence: TAG
cttaagtcaaagttcttttt

SEQ ID NO: 15763 - DNA, 20 bp, Artificial Sequence
  Description of Artificial Sequence: Synthetic oligonucleotide
  Target: SCNA; (-) strand; PAM type: NRG; PAM sequence: AAG
ctttttttcctcttaagtca

SEQ ID NO: 15764 - DNA, 20 bp, Artificial Sequence
  Description of Artificial Sequence: Synthetic oligonucleotide
  Target: SCNA; (-) strand; PAM type: NRG; PAM sequence: AAG
ttgaacctttttttcctctt

SEQ ID NO: 15765 - DNA, 20 bp, Artificial Sequence
  Description of Artificial Sequence: Synthetic oligonucleotide
  Target: SCNA; (-) strand; PAM type: NRG; PAM sequence: AAG
tggaacacgggtgtgtgctt

SEQ ID NO: 15766 - DNA, 20 bp, Artificial Sequence
  Description of Artificial Sequence: Synthetic oligonucleotide
  Target: SCNA; (-) strand; PAM type: NRG; PAM sequence: GGG
ttgatttcattttggaacac

SEQ ID NO: 15767 - DNA, 20 bp, Artificial Sequence
  Description of Artificial Sequence: Synthetic oligonucleotide
  Target: SCNA; (-) strand; PAM type: NRG; PAM sequence: CGG
cttgatttcattttggaaca

SEQ ID NO: 15768 - DNA, 20 bp, Artificial Sequence
  Description of Artificial Sequence: Synthetic oligonucleotide
  Target: SCNA; (-) strand; PAM type: NRG; PAM sequence: TGG
ttctgggcttgatttcattt

SEQ ID NO: 15769 - DNA, 20 bp, Artificial Sequence
  Description of Artificial Sequence: Synthetic oligonucleotide
  Target: SCNA; (-) strand; PAM type: NRG; PAM sequence: GGG
tttatttaaatacgagttct

SEQ ID NO: 15770 - DNA, 20 bp, Artificial Sequence
  Description of Artificial Sequence: Synthetic oligonucleotide
  Target: SCNA; (-) strand; PAM type: NRG; PAM sequence: TGG
ttttatttaaatacgagttc

SEQ ID NO: 15771 - DNA, 20 bp, Artificial Sequence
  Description of Artificial Sequence: Synthetic oligonucleotide
  Target: SCNA; (-) strand; PAM type: NRG; PAM sequence: GAG
tgctatttttatttaaatac

SEQ ID NO: 15772 - DNA, 20 bp, Artificial Sequence
  Description of Artificial Sequence: Synthetic oligonucleotide
  Target: SCNA; (-) strand; PAM type: NRG; PAM sequence: GAG
ctgtctgaggtagagaagta

SEQ ID NO: 15773 - DNA, 20 bp, Artificial Sequence
  Description of Artificial Sequence: Synthetic oligonucleotide
  Target: SCNA; (-) strand; PAM type: NRG; PAM sequence: TAG
ccctgtctgaggtagagaag

SEQ ID NO: 15774 - DNA, 20 bp, Artificial Sequence
  Description of Artificial Sequence: Synthetic oligonucleotide
  Target: SCNA; (-) strand; PAM type: NRG; PAM sequence: AAG
ctcccctgtctgaggtagag

SEQ ID NO: 15775 - DNA, 20 bp, Artificial Sequence
  Description of Artificial Sequence: Synthetic oligonucleotide
  Target: SCNA; (-) strand; PAM type: NRG; PAM sequence: GAG
acactcccctgtctgaggta

SEQ ID NO: 15776 - DNA, 20 bp, Artificial Sequence
  Description of Artificial Sequence: Synthetic oligonucleotide
  Target: SCNA; (-) strand; PAM type: NRG; PAM sequence: TAG
acacactcccctgtctgagg

SEQ ID NO: 15777 - DNA, 20 bp, Artificial Sequence
  Description of Artificial Sequence: Synthetic oligonucleotide
  Target: SCNA; (-) strand; PAM type: NRG; PAM sequence: AGG
tgtacacactcccctgtctg

SEQ ID NO: 15778 - DNA, 20 bp, Artificial Sequence
  Description of Artificial Sequence: Synthetic oligonucleotide
  Target: SCNA; (-) strand; PAM type: NRG; PAM sequence: GAG
atgtacacactcccctgtct

SEQ ID NO: 15779 - DNA, 20 bp, Artificial Sequence
  Description of Artificial Sequence: Synthetic oligonucleotide
  Target: SCNA; (-) strand; PAM type: NRG; PAM sequence: TAG
aaaatacatggtaattctct

SEQ ID NO: 15780 - DNA, 20 bp, Artificial Sequence
  Description of Artificial Sequence: Synthetic oligonucleotide
  Target: SCNA; (-) strand; PAM type: NRG; PAM sequence: TGG
aagtgcatcaataaaataca

SEQ ID NO: 15781 - DNA, 20 bp, Artificial Sequence
  Description of Artificial Sequence: Synthetic oligonucleotide
  Target: SCNA; (-) strand; PAM type: NRG; PAM sequence: AAG
tgtctatcgccttcattttt

SEQ ID NO: 15782 - DNA, 20 bp, Artificial Sequence
  Description of Artificial Sequence: Synthetic oligonucleotide
  Target: SCNA; (-) strand; PAM type: NRG; PAM sequence: AGG
ctttaccttgctttttaaca

SEQ ID NO: 15783 - DNA, 20 bp, Artificial Sequence
  Description of Artificial Sequence: Synthetic oligonucleotide
  Target: SCNA; (-) strand; PAM type: NRG; PAM sequence: AAG
tctttaccttgctttttaac

SEQ ID NO: 15784 - DNA, 20 bp, Artificial Sequence
  Description of Artificial Sequence: Synthetic oligonucleotide
  Target: SCNA; (-) strand; PAM type: NRG; PAM sequence: TAG
agcagactaggaattgataa

SEQ ID NO: 15785 - DNA, 20 bp, Artificial Sequence
  Description of Artificial Sequence: Synthetic oligonucleotide
  Target: SCNA; (-) strand; PAM type: NRG; PAM sequence: AGG
aatggcattatgagcagact

SEQ ID NO: 15786 - DNA, 20 bp, Artificial Sequence
  Description of Artificial Sequence: Synthetic oligonucleotide
  Target: SCNA; (-) strand; PAM type: NRG; PAM sequence: TAG
aaatggcattatgagcagac

SEQ ID NO: 15787 - DNA, 20 bp, Artificial Sequence
  Description of Artificial Sequence: Synthetic oligonucleotide
  Target: SCNA; (-) strand; PAM type: NRG; PAM sequence: CAG
ccccaaaatggcattatgag

SEQ ID NO: 15788 - DNA, 20 bp, Artificial Sequence
  Description of Artificial Sequence: Synthetic oligonucleotide
  Target: SCNA; (-) strand; PAM type: NRG; PAM sequence: GAG
ccaccccaaaatggcattat

SEQ ID NO: 15789 - DNA, 20 bp, Artificial Sequence
  Description of Artificial Sequence: Synthetic oligonucleotide
  Target: SCNA; (-) strand; PAM type: NRG; PAM sequence: TGG
ctttgctccccaccccaaaa

SEQ ID NO: 15790 - DNA, 20 bp, Artificial Sequence
  Description of Artificial Sequence: Synthetic oligonucleotide
  Target: SCNA; (-) strand; PAM type: NRG; PAM sequence: CAG
agattagtttgattttgaat

SEQ ID NO: 15791 - DNA, 20 bp, Artificial Sequence
  Description of Artificial Sequence: Synthetic oligonucleotide
  Target: SCNA; (-) strand; PAM type: NRG; PAM sequence: TAG
attttatcaaaaattgagat

SEQ ID NO: 15792 - DNA, 20 bp, Artificial Sequence
  Description of Artificial Sequence: Synthetic oligonucleotide
  Target: SCNA; (-) strand; PAM type: NRG; PAM sequence: GAG
cttagattttatcaaaaatt

SEQ ID NO: 15793 - DNA, 20 bp, Artificial Sequence
  Description of Artificial Sequence: Synthetic oligonucleotide
  Target: SCNA; (-) strand; PAM type: NRG; PAM sequence: TAG
gttttaaaaataaaattcct

SEQ ID NO: 15794 - DNA, 20 bp, Artificial Sequence
  Description of Artificial Sequence: Synthetic oligonucleotide
  Target: SCNA; (-) strand; PAM type: NRG; PAM sequence: AAG
aagagaaatcagagtatcca

SEQ ID NO: 15795 - DNA, 20 bp, Artificial Sequence
  Description of Artificial Sequence: Synthetic oligonucleotide
  Target: SCNA; (-) strand; PAM type: NRG; PAM sequence: GAG
tatgacctcaagagaaatca

SEQ ID NO: 15796 - DNA, 20 bp, Artificial Sequence
  Description of Artificial Sequence: Synthetic oligonucleotide
  Target: SCNA; (-) strand; PAM type: NRG; PAM sequence: CAG
tttatgacctcaagagaaat

SEQ ID NO: 15797 - DNA, 20 bp, Artificial Sequence
  Description of Artificial Sequence: Synthetic oligonucleotide
  Target: SCNA; (-) strand; PAM type: NRG; PAM sequence: GAG
cagaggatttatgacctcaa

SEQ ID NO: 15798 - DNA, 20 bp, Artificial Sequence
  Description of Artificial Sequence: Synthetic oligonucleotide
  Target: SCNA; (-) strand; PAM type: NRG; PAM sequence: AAG
ggcagaggatttatgacctc

SEQ ID NO: 15799 - DNA, 20 bp, Artificial Sequence
  Description of Artificial Sequence: Synthetic oligonucleotide
  Target: SCNA; (-) strand; PAM type: NRG; PAM sequence: AGG
tagatctcttaaaaaggcag

SEQ ID NO: 15800 - DNA, 20 bp, Artificial Sequence
  Description of Artificial Sequence: Synthetic oligonucleotide
  Target: SCNA; (-) strand; PAM type: NRG; PAM sequence: GAG
atagatctcttaaaaaggca

SEQ ID NO: 15801 - DNA, 20 bp, Artificial Sequence
  Description of Artificial Sequence: Synthetic oligonucleotide
  Target: SCNA; (-) strand; PAM type: NRG; PAM sequence: CAG
acatagatctcttaaaaagg

SEQ ID NO: 15802 - DNA, 20 bp, Artificial Sequence
  Description of Artificial Sequence: Synthetic oligonucleotide
  Target: SCNA; (-) strand; PAM type: NRG; PAM sequence: AGG
tccacatagatctcttaaaa

SEQ ID NO: 15803 - DNA, 20 bp, Artificial Sequence
  Description of Artificial Sequence: Synthetic oligonucleotide
  Target: SCNA; (-) strand; PAM type: NRG; PAM sequence: AAG
ctccacatagatctcttaaa

SEQ ID NO: 15804 - DNA, 20 bp, Artificial Sequence
  Description of Artificial Sequence: Synthetic oligonucleotide
  Target: SCNA; (-) strand; PAM type: NRG; PAM sequence: TAG
cagagttgttcctctccaca

SEQ ID NO: 15805 - DNA, 20 bp, Artificial Sequence
  Description of Artificial Sequence: Synthetic oligonucleotide
  Target: SCNA; (-) strand; PAM type: NRG; PAM sequence: GAG
aataattcgtttaagaccca

SEQ ID NO: 15806 - DNA, 20 bp, Artificial Sequence
  Description of Artificial Sequence: Synthetic oligonucleotide
  Target: SCNA; (-) strand; PAM type: NRG; PAM sequence: CAG
tcaataattcgtttaagacc

SEQ ID NO: 15807 - DNA, 20 bp, Artificial Sequence
  Description of Artificial Sequence: Synthetic oligonucleotide
  Target: SCNA; (-) strand; PAM type: NRG; PAM sequence: AAG
aagacctcaataattcgttt

SEQ ID NO: 15808 - DNA, 20 bp, Artificial Sequence
  Description of Artificial Sequence: Synthetic oligonucleotide
  Target: SCNA; (-) strand; PAM type: NRG; PAM sequence: AAG
atatctagcctttccaaaac

SEQ ID NO: 15809 - DNA, 20 bp, Artificial Sequence
  Description of Artificial Sequence: Synthetic oligonucleotide
  Target: SCNA; (-) strand; PAM type: NRG; PAM sequence: TAG
atattttttaacaaaatatc

SEQ ID NO: 15810 - DNA, 20 bp, Artificial Sequence
  Description of Artificial Sequence: Synthetic oligonucleotide
  Target: SCNA; (-) strand; PAM type: NRG; PAM sequence: AGG
ataacattgtccaaagtttt

SEQ ID NO: 15811 - DNA, 20 bp, Artificial Sequence
  Description of Artificial Sequence: Synthetic oligonucleotide
  Target: SCNA; (-) strand; PAM type: NRG; PAM sequence: TAG
aataacattgtccaaagttt

SEQ ID NO: 15812 - DNA, 20 bp, Artificial Sequence
  Description of Artificial Sequence: Synthetic oligonucleotide
  Target: SCNA; (-) strand; PAM type: NRG; PAM sequence: AAG
tgattaaataacattgtcca

SEQ ID NO: 15813 - DNA, 20 bp, Artificial Sequence
  Description of Artificial Sequence: Synthetic oligonucleotide
  Target: SCNA; (-) strand; PAM type: NRG; PAM sequence: TAG
taatagtaagactgaaaata

SEQ ID NO: 15814 - DNA, 20 bp, Artificial Sequence
  Description of Artificial Sequence: Synthetic oligonucleotide
  Target: SCNA; (-) strand; PAM type: NRG; PAM sequence: AAG
tctttcttatgcataatagt

SEQ ID NO: 15815 - DNA, 20 bp, Artificial Sequence
  Description of Artificial Sequence: Synthetic oligonucleotide
  Target: SCNA; (-) strand; PAM type: NRG; PAM sequence: TAG
ttgttctttcttatgcataa

SEQ ID NO: 15816 - DNA, 20 bp, Artificial Sequence
  Description of Artificial Sequence: Synthetic oligonucleotide
  Target: SCNA; (-) strand; PAM type: NRG; PAM sequence: GAG
atgcaattaaatactcctca

SEQ ID NO: 15817 - DNA, 20 bp, Artificial Sequence
  Description of Artificial Sequence: Synthetic oligonucleotide
  Target: SCNA; (-) strand; PAM type: NRG; PAM sequence: CAG
ggatgcaattaaatactcct

SEQ ID NO: 15818 - DNA, 20 bp, Artificial Sequence
  Description of Artificial Sequence: Synthetic oligonucleotide
  Target: SCNA; (-) strand; PAM type: NRG; PAM sequence: AGG
tgtgacagaatatacttact

SEQ ID NO: 15819 - DNA, 20 bp, Artificial Sequence
  Description of Artificial Sequence: Synthetic oligonucleotide
  Target: SCNA; (-) strand; PAM type: NRG; PAM sequence: TAG
atgtgacagaatatacttac

SEQ ID NO: 15820 - DNA, 20 bp, Artificial Sequence
  Description of Artificial Sequence: Synthetic oligonucleotide
  Target: SCNA; (-) strand; PAM type: NRG; PAM sequence: CAG
ttctatggcttctcatgtga

SEQ ID NO: 15821 - DNA, 20 bp, Artificial Sequence
  Description of Artificial Sequence: Synthetic oligonucleotide
  Target: SCNA; (-) strand; PAM type: NRG; PAM sequence: TGG
gcagaacatgccaatttcta

SEQ ID NO: 15822 - DNA, 20 bp, Artificial Sequence
  Description of Artificial Sequence: Synthetic oligonucleotide
  Target: SCNA; (-) strand; PAM type: NRG; PAM sequence: CAG
cctttgggcattggatacag

SEQ ID NO: 15823 - DNA, 20 bp, Artificial Sequence
  Description of Artificial Sequence: Synthetic oligonucleotide
  Target: SCNA; (-) strand; PAM type: NRG; PAM sequence: CAG
tatcctttgggcattggata

SEQ ID NO: 15824 - DNA, 20 bp, Artificial Sequence
  Description of Artificial Sequence: Synthetic oligonucleotide
  Target: SCNA; (-) strand; PAM type: NRG; PAM sequence: TGG
ctttattatcctttgggcat

SEQ ID NO: 15825 - DNA, 20 bp, Artificial Sequence
  Description of Artificial Sequence: Synthetic oligonucleotide
  Target: SCNA; (-) strand; PAM type: NRG; PAM sequence: GGG
atcatgctttattatccttt

SEQ ID NO: 15826 - DNA, 20 bp, Artificial Sequence
  Description of Artificial Sequence: Synthetic oligonucleotide
  Target: SCNA; (-) strand; PAM type: NRG; PAM sequence: TGG
tatcatgctttattatcctt

SEQ ID NO: 15827 - DNA, 20 bp, Artificial Sequence
  Description of Artificial Sequence: Synthetic oligonucleotide
  Target: SCNA; (-) strand; PAM type: NRG; PAM sequence: AAG
aaaaggaggttgggttcgtt

SEQ ID NO: 15828 - DNA, 20 bp, Artificial Sequence
  Description of Artificial Sequence: Synthetic oligonucleotide
  Target: SCNA; (-) strand; PAM type: NRG; PAM sequence: GGG
tataattggaaaaggaggtt

SEQ ID NO: 15829 - DNA, 20 bp, Artificial Sequence
  Description of Artificial Sequence: Synthetic oligonucleotide
  Target: SCNA; (-) strand; PAM type: NRG; PAM sequence: TGG
atataattggaaaaggaggt

SEQ ID NO: 15830 - DNA, 20 bp, Artificial Sequence
  Description of Artificial Sequence: Synthetic oligonucleotide
  Target: SCNA; (-) strand; PAM type: NRG; PAM sequence: AGG
ccatatataattggaaaagg

SEQ ID NO: 15831 - DNA, 20 bp, Artificial Sequence
  Description of Artificial Sequence: Synthetic oligonucleotide
  Target: SCNA; (-) strand; PAM type: NRG; PAM sequence: GAG
accatatataattggaaaag

SEQ ID NO: 15832 - DNA, 20 bp, Artificial Sequence
  Description of Artificial Sequence: Synthetic oligonucleotide
  Target: SCNA; (-) strand; PAM type: NRG; PAM sequence: AGG
taaccatatataattggaaa

SEQ ID NO: 15833 - DNA, 20 bp, Artificial Sequence
  Description of Artificial Sequence: Synthetic oligonucleotide
  Target: SCNA; (-) strand; PAM type: NRG; PAM sequence: AAG
ttaaccatatataattggaa

SEQ ID NO: 15834 - DNA, 20 bp, Artificial Sequence
  Description of Artificial Sequence: Synthetic oligonucleotide
  Target: SCNA; (-) strand; PAM type: NRG; PAM sequence: TGG
ttaacttaaccatatataat

SEQ ID NO: 15835 - DNA, 20 bp, Artificial Sequence
  Description of Artificial Sequence: Synthetic oligonucleotide
  Target: SCNA; (-) strand; PAM type: NRG; PAM sequence: AAG
ctatactttcccaaaaatta

SEQ ID NO: 15836 - DNA, 20 bp, Artificial Sequence
  Description of Artificial Sequence: Synthetic oligonucleotide
  Target: SCNA; (-) strand; PAM type: NRG; PAM sequence: AAG
tttatttctaccttagatct

SEQ ID NO: 15837 - DNA, 20 bp, Artificial Sequence
  Description of Artificial Sequence: Synthetic oligonucleotide
  Target: SCNA; (-) strand; PAM type: NRG; PAM sequence: TAG
tggtcattttatttctacct

SEQ ID NO: 15838 - DNA, 20 bp, Artificial Sequence
  Description of Artificial Sequence: Synthetic oligonucleotide
  Target: SCNA; (-) strand; PAM type: NRG; PAM sequence: TGG
gttaaatgcaccaagtcctt

SEQ ID NO: 15839 - DNA, 20 bp, Artificial Sequence
  Description of Artificial Sequence: Synthetic oligonucleotide
  Target: SCNA; (-) strand; PAM type: NRG; PAM sequence: AAG
tatagaatgttaaatgcacc

SEQ ID NO: 15840 - DNA, 20 bp, Artificial Sequence
  Description of Artificial Sequence: Synthetic oligonucleotide
  Target: SCNA; (-) strand; PAM type: NRG; PAM sequence: TAG
ttgatgcatttctaaagtta

SEQ ID NO: 15841 - DNA, 20 bp, Artificial Sequence
  Description of Artificial Sequence: Synthetic oligonucleotide
  Target: SCNA; (-) strand; PAM type: NRG; PAM sequence: AAG
gccactttgatgcatttcta

SEQ ID NO: 15842 - DNA, 20 bp, Artificial Sequence
  Description of Artificial Sequence: Synthetic oligonucleotide
  Target: SCNA; (-) strand; PAM type: NRG; PAM sequence: GGG
gacaaatagctcttaatgct

SEQ ID NO: 15843 - DNA, 20 bp, Artificial Sequence
  Description of Artificial Sequence: Synthetic oligonucleotide
  Target: SCNA; (-) strand; PAM type: NRG; PAM sequence: TGG
tgacaaatagctcttaatgc

SEQ ID NO: 15844 - DNA, 20 bp, Artificial Sequence
  Description of Artificial Sequence: Synthetic oligonucleotide
  Target: SCNA; (-) strand; PAM type: NRG; PAM sequence: TAG
cacaggcccttagtgacaaa

SEQ ID NO: 15845 - DNA, 20 bp, Artificial Sequence
  Description of Artificial Sequence: Synthetic oligonucleotide
  Target: SCNA; (-) strand; PAM type: NRG; PAM sequence: TAG
agacttcaaccacaggccct

SEQ ID NO: 15846 - DNA, 20 bp, Artificial Sequence
  Description of Artificial Sequence: Synthetic oligonucleotide
  Target: SCNA; (-) strand; PAM type: NRG; PAM sequence: AGG
atccaacagacttcaaccac

SEQ ID NO: 15847 - DNA, 20 bp, Artificial Sequence
  Description of Artificial Sequence: Synthetic oligonucleotide
  Target: SCNA; (-) strand; PAM type: NRG; PAM sequence: CAG
gatccaacagacttcaacca

SEQ ID NO: 15848 - DNA, 20 bp, Artificial Sequence
  Description of Artificial Sequence: Synthetic oligonucleotide
  Target: SCNA; (-) strand; PAM type: NRG; PAM sequence: CAG
gaaagaacagatggatccaa

SEQ ID NO: 15849 - DNA, 20 bp, Artificial Sequence
  Description of Artificial Sequence: Synthetic oligonucleotide
  Target: SCNA; (-) strand; PAM type: NRG; PAM sequence: TGG
attgcctcagaaagaacaga

SEQ ID NO: 15850 - DNA, 20 bp, Artificial Sequence
  Description of Artificial Sequence: Synthetic oligonucleotide
  Target: SCNA; (-) strand; PAM type: NRG; PAM sequence: CAG
gcatattgcctcagaaagaa

SEQ ID NO: 15851 - DNA, 20 bp, Artificial Sequence
  Description of Artificial Sequence: Synthetic oligonucleotide
  Target: SCNA; (-) strand; PAM type: NRG; PAM sequence: AAG
cgtctgcatattgcctcaga

SEQ ID NO: 15852 - DNA, 20 bp, Artificial Sequence
  Description of Artificial Sequence: Synthetic oligonucleotide
  Target: SCNA; (-) strand; PAM type: NRG; PAM sequence: CAG
ctttcgtctgcatattgcct

SEQ ID NO: 15853 - DNA, 20 bp, Artificial Sequence
  Description of Artificial Sequence: Synthetic oligonucleotide
  Target: SCNA; (-) strand; PAM type: NRG; PAM sequence: TAG
cccttttacatctatcttac

SEQ ID NO: 15854 - DNA, 20 bp, Artificial Sequence
  Description of Artificial Sequence: Synthetic oligonucleotide
  Target: SCNA; (-) strand; PAM type: NRG; PAM sequence: AAG
ccagacctgtcactctatac

SEQ ID NO: 15855 - DNA, 20 bp, Artificial Sequence
  Description of Artificial Sequence: Synthetic oligonucleotide
  Target: SCNA; (-) strand; PAM type: NRG; PAM sequence: CAG
atttggtagtaggactgtac

SEQ ID NO: 15856 - DNA, 20 bp, Artificial Sequence
  Description of Artificial Sequence: Synthetic oligonucleotide
  Target: SCNA; (-) strand; PAM type: NRG; PAM sequence: AGG
atagttatagatttggtagt

SEQ ID NO: 15857 - DNA, 20 bp, Artificial Sequence
  Description of Artificial Sequence: Synthetic oligonucleotide
  Target: SCNA; (-) strand; PAM type: NRG; PAM sequence: TAG
tatagttatagatttggtag

SEQ ID NO: 15858 - DNA, 20 bp, Artificial Sequence
  Description of Artificial Sequence: Synthetic oligonucleotide
  Target: SCNA; (-) strand; PAM type: NRG; PAM sequence: TAG
tactatagttatagatttgg

SEQ ID NO: 15859 - DNA, 20 bp, Artificial Sequence
  Description of Artificial Sequence: Synthetic oligonucleotide
  Target: SCNA; (-) strand; PAM type: NRG; PAM sequence: TGG
aaatactatagttatagatt

SEQ ID NO: 15860 - DNA, 20 bp, Artificial Sequence
  Description of Artificial Sequence: Synthetic oligonucleotide
  Target: SCNA; (-) strand; PAM type: NRG; PAM sequence: TAG
tattcaaaatactatagtta

SEQ ID NO: 15861 - DNA, 20 bp, Artificial Sequence
  Description of Artificial Sequence: Synthetic oligonucleotide
  Target: SCNA; (-) strand; PAM type: NRG; PAM sequence: TAG
gcaaaatattcaaaatacta

SEQ ID NO: 15862 - DNA, 20 bp, Artificial Sequence
  Description of Artificial Sequence: Synthetic oligonucleotide
  Target: SCNA; (-) strand; PAM type: NRG; PAM sequence: TAG
aaaatactgctacattgaaa

SEQ ID NO: 15863 - DNA, 20 bp, Artificial Sequence
  Description of Artificial Sequence: Synthetic oligonucleotide
  Target: SCNA; (-) strand; PAM type: NRG; PAM sequence: AGG
ttttatcttgttgtaaagtc

SEQ ID NO: 15864 - DNA, 20 bp, Artificial Sequence
  Description of Artificial Sequence: Synthetic oligonucleotide
  Target: SCNA; (-) strand; PAM type: NRG; PAM sequence: CAG
tttttatcttgttgtaaagt

SEQ ID NO: 15865 - DNA, 20 bp, Artificial Sequence
  Description of Artificial Sequence: Synthetic oligonucleotide
  Target: SCNA; (-) strand; PAM type: NRG; PAM sequence: AAG
gaattttttatcttgttgta

SEQ ID NO: 15866 - DNA, 20 bp, Artificial Sequence
  Description of Artificial Sequence: Synthetic oligonucleotide
  Target: SCNA; (-) strand; PAM type: NRG; PAM sequence: TGG
gtcactacattgttaaaact

SEQ ID NO: 15867 - DNA, 20 bp, Artificial Sequence
  Description of Artificial Sequence: Synthetic oligonucleotide
  Target: SCNA; (-) strand; PAM type: NRG; PAM sequence: AGG
ttcaacatctaaaacacagt

SEQ ID NO: 15868 - DNA, 20 bp, Artificial Sequence
  Description of Artificial Sequence: Synthetic oligonucleotide
  Target: SCNA; (-) strand; PAM type: NRG; PAM sequence: TAG
tttcaacatctaaaacacag

SEQ ID NO: 15869 - DNA, 20 bp, Artificial Sequence
  Description of Artificial Sequence: Synthetic oligonucleotide
  Target: SCNA; (-) strand; PAM type: NRG; PAM sequence: CAG
agatttcaacatctaaaaca

SEQ ID NO: 15870 - DNA, 20 bp, Artificial Sequence
  Description of Artificial Sequence: Synthetic oligonucleotide
  Target: SCNA; (-) strand; PAM type: NRG; PAM sequence: TAG
aaaatgttgatagaaaatta

SEQ ID NO: 15871 - DNA, 20 bp, Artificial Sequence
  Description of Artificial Sequence: Synthetic oligonucleotide
  Target: SCNA; (-) strand; PAM type: NRG; PAM sequence: TAG
aggttagtagaaaatgttga

SEQ ID NO: 15872 - DNA, 20 bp, Artificial Sequence
  Description of Artificial Sequence: Synthetic oligonucleotide
  Target: SCNA; (-) strand; PAM type: NRG; PAM sequence: TAG
gcatgtcttttacaggttag

SEQ ID NO: 15873 - DNA, 20 bp, Artificial Sequence
  Description of Artificial Sequence: Synthetic oligonucleotide
  Target: SCNA; (-) strand; PAM type: NRG; PAM sequence: TAG
aaggcatgtcttttacaggt

SEQ ID NO: 15874 - DNA, 20 bp, Artificial Sequence
  Description of Artificial Sequence: Synthetic oligonucleotide
  Target: SCNA; (-) strand; PAM type: NRG; PAM sequence: AGG
ttctaaggcatgtcttttac

SEQ ID NO: 15875 - DNA, 20 bp, Artificial Sequence
  Description of Artificial Sequence: Synthetic oligonucleotide
  Target: SCNA; (-) strand; PAM type: NRG; PAM sequence: CAG
attctaaggcatgtctttta

SEQ ID NO: 15876 - DNA, 20 bp, Artificial Sequence
  Description of Artificial Sequence: Synthetic oligonucleotide
  Target: SCNA; (-) strand; PAM type: NRG; PAM sequence: AGG
gtgtgtgttcccacattcta

SEQ ID NO: 15877 - DNA, 20 bp, Artificial Sequence
  Description of Artificial Sequence: Synthetic oligonucleotide
  Target: SCNA; (-) strand; PAM type: NRG; PAM sequence: AAG
tgtgtgtgttcccacattct

SEQ ID NO: 15878 - DNA, 20 bp, Artificial Sequence
  Description of Artificial Sequence: Synthetic oligonucleotide
  Target: SCNA; (-) strand; PAM type: NRG; PAM sequence: GAG
cttcgtgtgtatgtgtctgt

SEQ ID NO: 15879 - DNA, 20 bp, Artificial Sequence
  Description of Artificial Sequence: Synthetic oligonucleotide
  Target: SCNA; (-) strand; PAM type: NRG; PAM sequence: TGG
gtggcaccagagatcatcag

SEQ ID NO: 15880 - DNA, 20 bp, Artificial Sequence
  Description of Artificial Sequence: Synthetic oligonucleotide
  Target: SCNA; (-) strand; PAM type: NRG; PAM sequence: CAG
gaagtggcaccagagatcat

SEQ ID NO: 15881 - DNA, 20 bp, Artificial Sequence
  Description of Artificial Sequence: Synthetic oligonucleotide
  Target: SCNA; (-) strand; PAM type: NRG; PAM sequence: GAG
gatctcaggaagtggcacca

SEQ ID NO: 15882 - DNA, 20 bp, Artificial Sequence
  Description of Artificial Sequence: Synthetic oligonucleotide
  Target: SCNA; (-) strand; PAM type: NRG; PAM sequence: CAG
atgatctcaggaagtggcac

SEQ ID NO: 15883 - DNA, 20 bp, Artificial Sequence
  Description of Artificial Sequence: Synthetic oligonucleotide
  Target: SCNA; (-) strand; PAM type: NRG; PAM sequence: TGG
ttcaaaatgatctcaggaag

SEQ ID NO: 15884 - DNA, 20 bp, Artificial Sequence
  Description of Artificial Sequence: Synthetic oligonucleotide
  Target: SCNA; (-) strand; PAM type: NRG; PAM sequence: AAG
acattcaaaatgatctcagg

SEQ ID NO: 15885 - DNA, 20 bp, Artificial Sequence
  Description of Artificial Sequence: Synthetic oligonucleotide
  Target: SCNA; (-) strand; PAM type: NRG; PAM sequence: AGG
agaacattcaaaatgatctc

SEQ ID NO: 15886 - DNA, 20 bp, Artificial Sequence
  Description of Artificial Sequence: Synthetic oligonucleotide
  Target: SCNA; (-) strand; PAM type: NRG; PAM sequence: CAG
tagaacattcaaaatgatct

SEQ ID NO: 15887 - DNA, 20 bp, Artificial Sequence
  Description of Artificial Sequence: Synthetic oligonucleotide
  Target: SCNA; (-) strand; PAM type: NRG; PAM sequence: TAG
tatactttgcactttttaat

SEQ ID NO: 15888 - DNA, 20 bp, Artificial Sequence
  Description of Artificial Sequence: Synthetic oligonucleotide
  Target: SCNA; (-) strand; PAM type: NRG; PAM sequence: TAG
gcttagcatatataatagca

SEQ ID NO: 15889 - DNA, 20 bp, Artificial Sequence
  Description of Artificial Sequence: Synthetic oligonucleotide
  Target: SCNA; (-) strand; PAM type: NRG; PAM sequence: TAG
gtttggcttagcatatataa

SEQ ID NO: 15890 - DNA, 20 bp, Artificial Sequence
  Description of Artificial Sequence: Synthetic oligonucleotide
  Target: SCNA; (-) strand; PAM type: NRG; PAM sequence: TAG
ccttgttgctaggtttggct

SEQ ID NO: 15891 - DNA, 20 bp, Artificial Sequence
  Description of Artificial Sequence: Synthetic oligonucleotide
  Target: SCNA; (-) strand; PAM type: NRG; PAM sequence: TGG
ctcagccttgttgctaggtt

SEQ ID NO: 15892 - DNA, 20 bp, Artificial Sequence
  Description of Artificial Sequence: Synthetic oligonucleotide
  Target: SCNA; (-) strand; PAM type: NRG; PAM sequence: AGG
cttcactcagccttgttgct

SEQ ID NO: 15893 - DNA, 20 bp, Artificial Sequence
  Description of Artificial Sequence: Synthetic oligonucleotide
  Target: SCNA; (-) strand; PAM type: NRG; PAM sequence: TAG
tcttcactcagccttgttgc

SEQ ID NO: 15894 - DNA, 20 bp, Artificial Sequence
  Description of Artificial Sequence: Synthetic oligonucleotide
  Target: SCNA; (-) strand; PAM type: NRG; PAM sequence: CAG
ccaggagccacatcttcact

SEQ ID NO: 15895 - DNA, 20 bp, Artificial Sequence
  Description of Artificial Sequence: Synthetic oligonucleotide
  Target: SCNA; (-) strand; PAM type: NRG; PAM sequence: GAG
aagcctagcatatgacccag

SEQ ID NO: 15896 - DNA, 20 bp, Artificial Sequence
  Description of Artificial Sequence: Synthetic oligonucleotide
  Target: SCNA; (-) strand; PAM type: NRG; PAM sequence: AGG
gaaagcctagcatatgaccc

SEQ ID NO: 15897 - DNA, 20 bp, Artificial Sequence
  Description of Artificial Sequence: Synthetic oligonucleotide
  Target: SCNA; (-) strand; PAM type: NRG; PAM sequence: CAG
agaaagcctagcatatgacc

SEQ ID NO: 15898 - DNA, 20 bp, Artificial Sequence
  Description of Artificial Sequence: Synthetic oligonucleotide
  Target: SCNA; (-) strand; PAM type: NRG; PAM sequence: TAG
ccatttgccgaaagaaagcc

SEQ ID NO: 15899 - DNA, 20 bp, Artificial Sequence
  Description of Artificial Sequence: Synthetic oligonucleotide
  Target: SCNA; (-) strand; PAM type: NRG; PAM sequence: AAG
caagtccatttgccgaaaga

SEQ ID NO: 15900 - DNA, 20 bp, Artificial Sequence
  Description of Artificial Sequence: Synthetic oligonucleotide
  Target: SCNA; (-) strand; PAM type: NRG; PAM sequence: AAG
agagcaagtccatttgccga

SEQ ID NO: 15901 - DNA, 20 bp, Artificial Sequence
  Description of Artificial Sequence: Synthetic oligonucleotide
  Target: SCNA; (-) strand; PAM type: NRG; PAM sequence: AAG
taacataactgagggagagc

SEQ ID NO: 15902 - DNA, 20 bp, Artificial Sequence
  Description of Artificial Sequence: Synthetic oligonucleotide
  Target: SCNA; (-) strand; PAM type: NRG; PAM sequence: GAG
tatgtaacataactgaggga

SEQ ID NO: 15903 - DNA, 20 bp, Artificial Sequence
  Description of Artificial Sequence: Synthetic oligonucleotide
  Target: SCNA; (-) strand; PAM type: NRG; PAM sequence: GAG
ggtatgtaacataactgagg

SEQ ID NO: 15904 - DNA, 20 bp, Artificial Sequence
  Description of Artificial Sequence: Synthetic oligonucleotide
  Target: SCNA; (-) strand; PAM type: NRG; PAM sequence: GGG
taggtatgtaacataactga

SEQ ID NO: 15905 - DNA, 20 bp, Artificial Sequence
  Description of Artificial Sequence: Synthetic oligonucleotide
  Target: SCNA; (-) strand; PAM type: NRG; PAM sequence: AGG
gtaggtatgtaacataactg

SEQ ID NO: 15906 - DNA, 20 bp, Artificial Sequence
  Description of Artificial Sequence: Synthetic oligonucleotide
  Target: SCNA; (-) strand; PAM type: NRG; PAM sequence: GAG
agtaggtatgtaacataact

SEQ ID NO: 15907 - DNA, 20 bp, Artificial Sequence
  Description of Artificial Sequence: Synthetic oligonucleotide
  Target: SCNA; (-) strand; PAM type: NRG; PAM sequence: AGG
tgctgagacctgatctgagt

SEQ ID NO: 15908 - DNA, 20 bp, Artificial Sequence
  Description of Artificial Sequence: Synthetic oligonucleotide
  Target: SCNA; (-) strand; PAM type: NRG; PAM sequence: TAG
ttgctgagacctgatctgag

SEQ ID NO: 15909 - DNA, 20 bp, Artificial Sequence
  Description of Artificial Sequence: Synthetic oligonucleotide
  Target: SCNA; (-) strand; PAM type: NRG; PAM sequence: GAG
catttgctgagacctgatct

SEQ ID NO: 15910 - DNA, 20 bp, Artificial Sequence
  Description of Artificial Sequence: Synthetic oligonucleotide
  Target: SCNA; (-) strand; PAM type: NRG; PAM sequence: GAG
tagtaatttgtacatttgct

SEQ ID NO: 15911 - DNA, 20 bp, Artificial Sequence
  Description of Artificial Sequence: Synthetic oligonucleotide
  Target: SCNA; (-) strand; PAM type: NRG; PAM sequence: TAG
gatccagatggctgatgaca

SEQ ID NO: 15912 - DNA, 20 bp, Artificial Sequence
  Description of Artificial Sequence: Synthetic oligonucleotide
  Target: SCNA; (-) strand; PAM type: NRG; PAM sequence: TGG
ctattcccaagtgatccaga

SEQ ID NO: 15913 - DNA, 20 bp, Artificial Sequence
  Description of Artificial Sequence: Synthetic oligonucleotide
  Target: SCNA; (-) strand; PAM type: NRG; PAM sequence: CAG
gtgactattcccaagtgatc

SEQ ID NO: 15914 - DNA, 20 bp, Artificial Sequence
  Description of Artificial Sequence: Synthetic oligonucleotide
  Target: SCNA; (-) strand; PAM type: NRG; PAM sequence: AAG
tcaccaatgtgactattccc

SEQ ID NO: 15915 - DNA, 20 bp, Artificial Sequence
  Description of Artificial Sequence: Synthetic oligonucleotide
  Target: SCNA; (-) strand; PAM type: NRG; PAM sequence: CAG
tgtatttaagatatgactta

SEQ ID NO: 15916 - DNA, 20 bp, Artificial Sequence
  Description of Artificial Sequence: Synthetic oligonucleotide
  Target: SCNA; (-) strand; PAM type: NRG; PAM sequence: AAG
ggattatgtataatgtattt

SEQ ID NO: 15917 - DNA, 20 bp, Artificial Sequence
  Description of Artificial Sequence: Synthetic oligonucleotide
  Target: SCNA; (-) strand; PAM type: NRG; PAM sequence: TGG
gcattctcaatctgtaggta

SEQ ID NO: 15918 - DNA, 20 bp, Artificial Sequence
  Description of Artificial Sequence: Synthetic oligonucleotide
  Target: SCNA; (-) strand; PAM type: NRG; PAM sequence: AGG
gatttgcattctcaatctgt

SEQ ID NO: 15919 - DNA, 20 bp, Artificial Sequence
  Description of Artificial Sequence: Synthetic oligonucleotide
  Target: SCNA; (-) strand; PAM type: NRG; PAM sequence: TAG
agatttgcattctcaatctg

SEQ ID NO: 15920 - DNA, 20 bp, Artificial Sequence
  Description of Artificial Sequence: Synthetic oligonucleotide
  Target: SCNA; (-) strand; PAM type: NRG; PAM sequence: TAG
aaggtatcatttaattaaaa

SEQ ID NO: 15921 - DNA, 20 bp, Artificial Sequence
  Description of Artificial Sequence: Synthetic oligonucleotide
  Target: SCNA; (-) strand; PAM type: NRG; PAM sequence: AGG
tgtaagactgggttctctaa

SEQ ID NO: 15922 - DNA, 20 bp, Artificial Sequence
  Description of Artificial Sequence: Synthetic oligonucleotide
  Target: SCNA; (-) strand; PAM type: NRG; PAM sequence: AAG
gtgtaagactgggttctcta

SEQ ID NO: 15923 - DNA, 20 bp, Artificial Sequence
  Description of Artificial Sequence: Synthetic oligonucleotide
  Target: SCNA; (-) strand; PAM type: NRG; PAM sequence: GGG
tgttatttatgtgtaagact

SEQ ID NO: 15924 - DNA, 20 bp, Artificial Sequence
  Description of Artificial Sequence: Synthetic oligonucleotide
  Target: SCNA; (-) strand; PAM type: NRG; PAM sequence: TGG
atgttatttatgtgtaagac

SEQ ID NO: 15925 - DNA, 20 bp, Artificial Sequence
  Description of Artificial Sequence: Synthetic oligonucleotide
  Target: SCNA; (-) strand; PAM type: NRG; PAM sequence: AAG
aatatatgttatttatgtgt

SEQ ID NO: 15926 - DNA, 20 bp, Artificial Sequence
  Description of Artificial Sequence: Synthetic oligonucleotide
  Target: SCNA; (-) strand; PAM type: NRG; PAM sequence: TGG
taaacaaagtagagcataaa

SEQ ID NO: 15927 - DNA, 20 bp, Artificial Sequence
  Description of Artificial Sequence: Synthetic oligonucleotide
  Target: SCNA; (-) strand; PAM type: NRG; PAM sequence: GAG
aacaaaagataaacaaagta

SEQ ID NO: 15928 - DNA, 20 bp, Artificial Sequence
  Description of Artificial Sequence: Synthetic oligonucleotide
  Target: SCNA; (-) strand; PAM type: NRG; PAM sequence: TAG
taaacaaaagataaacaaag

SEQ ID NO: 15929 - DNA, 20 bp, Artificial Sequence
  Description of Artificial Sequence: Synthetic oligonucleotide
  Target: SCNA; (-) strand; PAM type: NRG; PAM sequence: AAG
ctctaaacaaaagataaaca

SEQ ID NO: 15930 - DNA, 20 bp, Artificial Sequence
  Description of Artificial Sequence: Synthetic oligonucleotide
  Target: SCNA; (-) strand; PAM type: NRG; PAM sequence: AAG
aagaccctgcctctaaacaa

SEQ ID NO: 15931 - DNA, 20 bp, Artificial Sequence
  Description of Artificial Sequence: Synthetic oligonucleotide
  Target: SCNA; (-) strand; PAM type: NRG; PAM sequence: AAG
tacagcctgggcaatagggc

SEQ ID NO: 15932 - DNA, 20 bp, Artificial Sequence
  Description of Artificial Sequence: Synthetic oligonucleotide
  Target: SCNA; (-) strand; PAM type: NRG; PAM sequence: GGG
gcattacagcctgggcaata

SEQ ID NO: 15933 - DNA, 20 bp, Artificial Sequence
  Description of Artificial Sequence: Synthetic oligonucleotide
  Target: SCNA; (-) strand; PAM type: NRG; PAM sequence: AGG
tgcattacagcctgggcaat

SEQ ID NO: 15934 - DNA, 20 bp, Artificial Sequence
  Description of Artificial Sequence: Synthetic oligonucleotide
  Target: SCNA; (-) strand; PAM type: NRG; PAM sequence: TAG
ctgcattacagcctgggcaa

SEQ ID NO: 15935 - DNA, 20 bp, Artificial Sequence
  Description of Artificial Sequence: Synthetic oligonucleotide
  Target: SCNA; (-) strand; PAM type: NRG; PAM sequence: GGG
gtatcactgcattacagcct

SEQ ID NO: 15936 - DNA, 20 bp, Artificial Sequence
  Description of Artificial Sequence: Synthetic oligonucleotide
  Target: SCNA; (-) strand; PAM type: NRG; PAM sequence: TGG
tgtatcactgcattacagcc

SEQ ID NO: 15937 - DNA, 20 bp, Artificial Sequence
  Description of Artificial Sequence: Synthetic oligonucleotide
  Target: SCNA; (-) strand; PAM type: NRG; PAM sequence: CAG
atgattgtatcactgcatta

SEQ ID NO: 15938 - DNA, 20 bp, Artificial Sequence
  Description of Artificial Sequence: Synthetic oligonucleotide
  Target: SCNA; (-) strand; PAM type: NRG; PAM sequence: GAG
caggagttggagactacagt

SEQ ID NO: 15939 - DNA, 20 bp, Artificial Sequence
  Description of Artificial Sequence: Synthetic oligonucleotide
  Target: SCNA; (-) strand; PAM type: NRG; PAM sequence: CAG
ggcccaggagttggagacta

SEQ ID NO: 15940 - DNA, 20 bp, Artificial Sequence
  Description of Artificial Sequence: Synthetic oligonucleotide
  Target: SCNA; (-) strand; PAM type: NRG; PAM sequence: GAG
tcacttgggcccaggagttg

SEQ ID NO: 15941 - DNA, 20 bp, Artificial Sequence
  Description of Artificial Sequence: Synthetic oligonucleotide
  Target: SCNA; (-) strand; PAM type: NRG; PAM sequence: TGG
gatcacttgggcccaggagt

SEQ ID NO: 15942 - DNA, 20 bp, Artificial Sequence
  Description of Artificial Sequence: Synthetic oligonucleotide
  Target: SCNA; (-) strand; PAM type: NRG; PAM sequence: GAG
ggaggatcacttgggcccag

SEQ ID NO: 15943 - DNA, 20 bp, Artificial Sequence
  Description of Artificial Sequence: Synthetic oligonucleotide
  Target: SCNA; (-) strand; PAM type: NRG; PAM sequence: AGG
ctggaggatcacttgggccc

SEQ ID NO: 15944 - DNA, 20 bp, Artificial Sequence
  Description of Artificial Sequence: Synthetic oligonucleotide
  Target: SCNA; (-) strand; PAM type: NRG; PAM sequence: CAG
gctggaggatcacttgggcc

SEQ ID NO: 15945 - DNA, 20 bp, Artificial Sequence
  Description of Artificial Sequence: Synthetic oligonucleotide
  Target: SCNA; (-) strand; PAM type: NRG; PAM sequence: GGG
ctgaggctggaggatcactt

SEQ ID NO: 15946 - DNA, 20 bp, Artificial Sequence
  Description of Artificial Sequence: Synthetic oligonucleotide
  Target: SCNA; (-) strand; PAM type: NRG; PAM sequence: TGG
gctgaggctggaggatcact

SEQ ID NO: 15947 - DNA, 20 bp, Artificial Sequence
  Description of Artificial Sequence: Synthetic oligonucleotide
  Target: SCNA; (-) strand; PAM type: NRG; PAM sequence: AGG
atttgggaggctgaggctgg

SEQ ID NO: 15948 - DNA, 20 bp, Artificial Sequence
  Description of Artificial Sequence: Synthetic oligonucleotide
  Target: SCNA; (-) strand; PAM type: NRG; PAM sequence: GAG
tatttgggaggctgaggctg

SEQ ID NO: 15949 - DNA, 20 bp, Artificial Sequence
  Description of Artificial Sequence: Synthetic oligonucleotide
  Target: SCNA; (-) strand; PAM type: NRG; PAM sequence: TGG
gctatttgggaggctgaggc

SEQ ID NO: 15950 - DNA, 20 bp, Artificial Sequence
  Description of Artificial Sequence: Synthetic oligonucleotide
  Target: SCNA; (-) strand; PAM type: NRG; PAM sequence: AGG
cccagctatttgggaggctg

SEQ ID NO: 15951 - DNA, 20 bp, Artificial Sequence
  Description of Artificial Sequence: Synthetic oligonucleotide
  Target: SCNA; (-) strand; PAM type: NRG; PAM sequence: GAG
tcccagctatttgggaggct

SEQ ID NO: 15952 - DNA, 20 bp, Artificial Sequence
  Description of Artificial Sequence: Synthetic oligonucleotide
  Target: SCNA; (-) strand; PAM type: NRG; PAM sequence: AGG
tatagtcccagctatttggg

SEQ ID NO: 15953 - DNA, 20 bp, Artificial Sequence
  Description of Artificial Sequence: Synthetic oligonucleotide
  Target: SCNA; (-) strand; PAM type: NRG; PAM sequence: GAG
ctatagtcccagctatttgg

SEQ ID NO: 15954 - DNA, 20 bp, Artificial Sequence
  Description of Artificial Sequence: Synthetic oligonucleotide
  Target: SCNA; (-) strand; PAM type: NRG; PAM sequence: GGG
gcctatagtcccagctattt

SEQ ID NO: 15955 - DNA, 20 bp, Artificial Sequence
  Description of Artificial Sequence: Synthetic oligonucleotide
  Target: SCNA; (-) strand; PAM type: NRG; PAM sequence: TGG
agcctatagtcccagctatt

SEQ ID NO: 15956 - DNA, 20 bp, Artificial Sequence
  Description of Artificial Sequence: Synthetic oligonucleotide
  Target: SCNA; (-) strand; PAM type: NRG; PAM sequence: CAG
gtggtgtaagcctatagtcc

SEQ ID NO: 15957 - DNA, 20 bp, Artificial Sequence
  Description of Artificial Sequence: Synthetic oligonucleotide
  Target: SCNA; (-) strand; PAM type: NRG; PAM sequence: TAG
agcatggtggtgtaagccta

SEQ ID NO: 15958 - DNA, 20 bp, Artificial Sequence
  Description of Artificial Sequence: Synthetic oligonucleotide
  Target: SCNA; (-) strand; PAM type: NRG; PAM sequence: AAG
atagccgagcatggtggtgt

SEQ ID NO: 15959 - DNA, 20 bp, Artificial Sequence
  Description of Artificial Sequence: Synthetic oligonucleotide
  Target: SCNA; (-) strand; PAM type: NRG; PAM sequence: TGG
atttaaatagccgagcatgg

SEQ ID NO: 15960 - DNA, 20 bp, Artificial Sequence
  Description of Artificial Sequence: Synthetic oligonucleotide
  Target: SCNA; (-) strand; PAM type: NRG; PAM sequence: TGG
aaaatttaaatagccgagca

SEQ ID NO: 15961 - DNA, 20 bp, Artificial Sequence
  Description of Artificial Sequence: Synthetic oligonucleotide
  Target: SCNA; (-) strand; PAM type: NRG; PAM sequence: GAG
aaaaaaaaatttaaatagcc

SEQ ID NO: 15962 - DNA, 20 bp, Artificial Sequence
  Description of Artificial Sequence: Synthetic oligonucleotide
  Target: SCNA; (-) strand; PAM type: NRG; PAM sequence: TAG
ataaaaaaaaaaaatttaaa

SEQ ID NO: 15963 - DNA, 20 bp, Artificial Sequence
  Description of Artificial Sequence: Synthetic oligonucleotide
  Target: SCNA; (-) strand; PAM type: NRG; PAM sequence: GGG
caggagtttgagaccagcct

SEQ ID NO: 15964 - DNA, 20 bp, Artificial Sequence
  Description of Artificial Sequence: Synthetic oligonucleotide
  Target: SCNA; (-) strand; PAM type: NRG; PAM sequence: TGG
ccaggagtttgagaccagcc

SEQ ID NO: 15965 - DNA, 20 bp, Artificial Sequence
  Description of Artificial Sequence: Synthetic oligonucleotide
  Target: SCNA; (-) strand; PAM type: NRG; PAM sequence: CAG
tgagtccaggagtttgagac

SEQ ID NO: 15966 - DNA, 20 bp, Artificial Sequence
  Description of Artificial Sequence: Synthetic oligonucleotide
  Target: SCNA; (-) strand; PAM type: NRG; PAM sequence: GAG
tcacttgagtccaggagttt

SEQ ID NO: 15967 - DNA, 20 bp, Artificial Sequence
  Description of Artificial Sequence: Synthetic oligonucleotide
  Target: SCNA; (-) strand; PAM type: NRG; PAM sequence: GAG
ggaggatcacttgagtccag

SEQ ID NO: 15968 - DNA, 20 bp, Artificial Sequence
  Description of Artificial Sequence: Synthetic oligonucleotide
  Target: SCNA; (-) strand; PAM type: NRG; PAM sequence: AGG
caggaggatcacttgagtcc

SEQ ID NO: 15969 - DNA, 20 bp, Artificial Sequence
  Description of Artificial Sequence: Synthetic oligonucleotide
  Target: SCNA; (-) strand; PAM type: NRG; PAM sequence: CAG
gcaggaggatcacttgagtc

SEQ ID NO: 15970 - DNA, 20 bp, Artificial Sequence
  Description of Artificial Sequence: Synthetic oligonucleotide
  Target: SCNA; (-) strand; PAM type: NRG; PAM sequence: GAG
ctgacgcaggaggatcactt

SEQ ID NO: 15971 - DNA, 20 bp, Artificial Sequence
  Description of Artificial Sequence: Synthetic oligonucleotide
  Target: SCNA; (-) strand; PAM type: NRG; PAM sequence: AGG
ctttcggaggctgacgcagg

SEQ ID NO: 15972 - DNA, 20 bp, Artificial Sequence
  Description of Artificial Sequence: Synthetic oligonucleotide
  Target: SCNA; (-) strand; PAM type: NRG; PAM sequence: GAG
actttcggaggctgacgcag

SEQ ID NO: 15973 - DNA, 20 bp, Artificial Sequence
  Description of Artificial Sequence: Synthetic oligonucleotide
  Target: SCNA; (-) strand; PAM type: NRG; PAM sequence: AGG
gcactttcggaggctgacgc

SEQ ID NO: 15974 - DNA, 20 bp, Artificial Sequence
  Description of Artificial Sequence: Synthetic oligonucleotide
  Target: SCNA; (-) strand; PAM type: NRG; PAM sequence: CAG
agcactttcggaggctgacg

SEQ ID NO: 15975 - DNA, 20 bp, Artificial Sequence
  Description of Artificial Sequence: Synthetic oligonucleotide
  Target: SCNA; (-) strand; PAM type: NRG; PAM sequence: AGG
tgtaatcccagcactttcgg

SEQ ID NO: 15976 - DNA, 20 bp, Artificial Sequence
  Description of Artificial Sequence: Synthetic oligonucleotide
  Target: SCNA; (-) strand; PAM type: NRG; PAM sequence: GAG
ctgtaatcccagcactttcg

SEQ ID NO: 15977 - DNA, 20 bp, Artificial Sequence
  Description of Artificial Sequence: Synthetic oligonucleotide
  Target: SCNA; (-) strand; PAM type: NRG; PAM sequence: CGG
gcctgtaatcccagcacttt

SEQ ID NO: 15978 - DNA, 20 bp, Artificial Sequence
  Description of Artificial Sequence: Synthetic oligonucleotide
  Target: SCNA; (-) strand; PAM type: NRG; PAM sequence: CAG
gtggctcatgcctgtaatcc

SEQ ID NO: 15979 - DNA, 20 bp, Artificial Sequence
  Description of Artificial Sequence: Synthetic oligonucleotide
  Target: SCNA; (-) strand; PAM type: NRG; PAM sequence: TGG
agagcacggctcaggtgcag

SEQ ID NO: 15980 - DNA, 20 bp, Artificial Sequence
  Description of Artificial Sequence: Synthetic oligonucleotide
  Target: SCNA; (-) strand; PAM type: NRG; PAM sequence: CAG
agtagagcacggctcaggtg

SEQ ID NO: 15981 - DNA, 20 bp, Artificial Sequence
  Description of Artificial Sequence: Synthetic oligonucleotide
  Target: SCNA; (-) strand; PAM type: NRG; PAM sequence: AGG
tccaaagtagagcacggctc

SEQ ID NO: 15982 - DNA, 20 bp, Artificial Sequence
  Description of Artificial Sequence: Synthetic oligonucleotide
  Target: SCNA; (-) strand; PAM type: NRG; PAM sequence: CAG
atccaaagtagagcacggct

SEQ ID NO: 15983 - DNA, 20 bp, Artificial Sequence
  Description of Artificial Sequence: Synthetic oligonucleotide
  Target: SCNA; (-) strand; PAM type: NRG; PAM sequence: CGG
agattatccaaagtagagca

SEQ ID NO: 15984 - DNA, 20 bp, Artificial Sequence
  Description of Artificial Sequence: Synthetic oligonucleotide
  Target: SCNA; (-) strand; PAM type: NRG; PAM sequence: GAG
gtaacagattatccaaagta

SEQ ID NO: 15985 - DNA, 20 bp, Artificial Sequence
  Description of Artificial Sequence: Synthetic oligonucleotide
  Target: SCNA; (-) strand; PAM type: NRG; PAM sequence: TAG
tagtaacagattatccaaag

SEQ ID NO: 15986 - DNA, 20 bp, Artificial Sequence
  Description of Artificial Sequence: Synthetic oligonucleotide
  Target: SCNA; (-) strand; PAM type: NRG; PAM sequence: AAG
agatagtaacagattatcca

SEQ ID NO: 15987 - DNA, 20 bp, Artificial Sequence
  Description of Artificial Sequence: Synthetic oligonucleotide
  Target: SCNA; (-) strand; PAM type: NRG; PAM sequence: CAG
gaaaatcagtaagatagtaa

SEQ ID NO: 15988 - DNA, 20 bp, Artificial Sequence
  Description of Artificial Sequence: Synthetic oligonucleotide
  Target: SCNA; (-) strand; PAM type: NRG; PAM sequence: TAG
agacaagaaaatcagtaaga

SEQ ID NO: 15989 - DNA, 20 bp, Artificial Sequence
  Description of Artificial Sequence: Synthetic oligonucleotide
  Target: SCNA; (-) strand; PAM type: NRG; PAM sequence: AAG
caaaagacaagaaaatcagt

SEQ ID NO: 15990 - DNA, 20 bp, Artificial Sequence
  Description of Artificial Sequence: Synthetic oligonucleotide
  Target: SCNA; (-) strand; PAM type: NRG; PAM sequence: CAG
agggcaaaagacaagaaaat

SEQ ID NO: 15991 - DNA, 20 bp, Artificial Sequence
  Description of Artificial Sequence: Synthetic oligonucleotide
  Target: SCNA; (-) strand; PAM type: NRG; PAM sequence: AAG
cagctagaagggcaaaagac

SEQ ID NO: 15992 - DNA, 20 bp, Artificial Sequence
  Description of Artificial Sequence: Synthetic oligonucleotide
  Target: SCNA; (-) strand; PAM type: NRG; PAM sequence: AAG
agaaacagctagaagggcaa

SEQ ID NO: 15993 - DNA, 20 bp, Artificial Sequence
  Description of Artificial Sequence: Synthetic oligonucleotide
  Target: SCNA; (-) strand; PAM type: NRG; PAM sequence: GGG
gactaaagaaacagctagaa

SEQ ID NO: 15994 - DNA, 20 bp, Artificial Sequence
  Description of Artificial Sequence: Synthetic oligonucleotide
  Target: SCNA; (-) strand; PAM type: NRG; PAM sequence: AGG
agactaaagaaacagctaga

SEQ ID NO: 15995 - DNA, 20 bp, Artificial Sequence
  Description of Artificial Sequence: Synthetic oligonucleotide
  Target: SCNA; (-) strand; PAM type: NRG; PAM sequence: AAG
aagactaaagaaacagctag

SEQ ID NO: 15996 - DNA, 20 bp, Artificial Sequence
  Description of Artificial Sequence: Synthetic oligonucleotide
  Target: SCNA; (-) strand; PAM type: NRG; PAM sequence: TAG
gccaagactaaagaaacagc

SEQ ID NO: 15997 - DNA, 20 bp, Artificial Sequence
  Description of Artificial Sequence: Synthetic oligonucleotide
  Target: SCNA; (-) strand; PAM type: NRG; PAM sequence: CAG
gattgccaagactaaagaaa

SEQ ID NO: 15998 - DNA, 20 bp, Artificial Sequence
  Description of Artificial Sequence: Synthetic oligonucleotide
  Target: SCNA; (-) strand; PAM type: NRG; PAM sequence: AAG
taaggtgattgccaagacta

SEQ ID NO: 15999 - DNA, 20 bp, Artificial Sequence
  Description of Artificial Sequence: Synthetic oligonucleotide
  Target: SCNA; (-) strand; PAM type: NRG; PAM sequence: AAG
ctctctctaaggtgattgcc

SEQ ID NO: 16000 - DNA, 20 bp, Artificial Sequence
  Description of Artificial Sequence: Synthetic oligonucleotide
  Target: SCNA; (-) strand; PAM type: NRG; PAM sequence: AGG
tctctttttctctctctcta

SEQ ID NO: 16001 - DNA, 20 bp, Artificial Sequence
  Description of Artificial Sequence: Synthetic oligonucleotide
  Target: SCNA; (-) strand; PAM type: NRG; PAM sequence: AAG
ttctctttttctctctctct

SEQ ID NO: 16002 - DNA, 20 bp, Artificial Sequence
  Description of Artificial Sequence: Synthetic oligonucleotide
  Target: SCNA; (-) strand; PAM type: NRG; PAM sequence: TAG
cccaaatatatttaatatat

SEQ ID NO: 16003 - DNA, 20 bp, Artificial Sequence
  Description of Artificial Sequence: Synthetic oligonucleotide
  Target: SCNA; (-) strand; PAM type: NRG; PAM sequence: TAG
tcagagataaaactagtaaa

SEQ ID NO: 16004 - DNA, 20 bp, Artificial Sequence
  Description of Artificial Sequence: Synthetic oligonucleotide
  Target: SCNA; (-) strand; PAM type: NRG; PAM sequence: TAG
cctgaattcagagataaaac

SEQ ID NO: 16005 - DNA, 20 bp, Artificial Sequence
  Description of Artificial Sequence: Synthetic oligonucleotide
  Target: SCNA; (-) strand; PAM type: NRG; PAM sequence: GAG
tgtatttaaacctgaattca

SEQ ID NO: 16006 - DNA, 20 bp, Artificial Sequence
  Description of Artificial Sequence: Synthetic oligonucleotide
  Target: SCNA; (-) strand; PAM type: NRG; PAM sequence: CAG
aatgtatttaaacctgaatt

SEQ ID NO: 16007 - DNA, 20 bp, Artificial Sequence
  Description of Artificial Sequence: Synthetic oligonucleotide
  Target: SCNA; (-) strand; PAM type: NRG; PAM sequence: TGG
accaattattttttaattta

SEQ ID NO: 16008 - DNA, 20 bp, Artificial Sequence
  Description of Artificial Sequence: Synthetic oligonucleotide
  Target: SCNA; (-) strand; PAM type: NRG; PAM sequence: CAG
aggaaaataaggatttaaag

SEQ ID NO: 16009 - DNA, 20 bp, Artificial Sequence
  Description of Artificial Sequence: Synthetic oligonucleotide
  Target: SCNA; (-) strand; PAM type: NRG; PAM sequence: AAG
ccaaggaaaataaggattta

SEQ ID NO: 16010 - DNA, 20 bp, Artificial Sequence
  Description of Artificial Sequence: Synthetic oligonucleotide
  Target: SCNA; (-) strand; PAM type: NRG; PAM sequence: AGG
taggcttgccaaggaaaata

SEQ ID NO: 16011 - DNA, 20 bp, Artificial Sequence
  Description of Artificial Sequence: Synthetic oligonucleotide
  Target: SCNA; (-) strand; PAM type: NRG; PAM sequence: AAG
ttaggcttgccaaggaaaat

SEQ ID NO: 16012 - DNA, 20 bp, Artificial Sequence
  Description of Artificial Sequence: Synthetic oligonucleotide
  Target: SCNA; (-) strand; PAM type: NRG; PAM sequence: AGG
cctgcttgttaggcttgcca

SEQ ID NO: 16013 - DNA, 20 bp, Artificial Sequence
  Description of Artificial Sequence: Synthetic oligonucleotide
  Target: SCNA; (-) strand; PAM type: NRG; PAM sequence: AAG
ccctgcttgttaggcttgcc

SEQ ID NO: 16014 - DNA, 20 bp, Artificial Sequence
  Description of Artificial Sequence: Synthetic oligonucleotide
  Target: SCNA; (-) strand; PAM type: NRG; PAM sequence: AGG
caggcactgccctgcttgtt

SEQ ID NO: 16015 - DNA, 20 bp, Artificial Sequence
  Description of Artificial Sequence: Synthetic oligonucleotide
  Target: SCNA; (-) strand; PAM type: NRG; PAM sequence: TAG
gcaggcactgccctgcttgt

SEQ ID NO: 16016 - DNA, 20 bp, Artificial Sequence
  Description of Artificial Sequence: Synthetic oligonucleotide
  Target: SCNA; (-) strand; PAM type: NRG; PAM sequence: AGG
ggcactaccataaatacagc

SEQ ID NO: 16017 - DNA, 20 bp, Artificial Sequence
  Description of Artificial Sequence: Synthetic oligonucleotide
  Target: SCNA; (-) strand; PAM type: NRG; PAM sequence: CAG
tggcactaccataaatacag

SEQ ID NO: 16018 - DNA, 20 bp, Artificial Sequence
  Description of Artificial Sequence: Synthetic oligonucleotide
  Target: SCNA; (-) strand; PAM type: NRG; PAM sequence: CAG
atatggcactaccataaata

SEQ ID NO: 16019 - DNA, 20 bp, Artificial Sequence
  Description of Artificial Sequence: Synthetic oligonucleotide
  Target: SCNA; (-) strand; PAM type: NRG; PAM sequence: TGG
aggtgagtcagctaattata

SEQ ID NO: 16020 - DNA, 20 bp, Artificial Sequence
  Description of Artificial Sequence: Synthetic oligonucleotide
  Target: SCNA; (-) strand; PAM type: NRG; PAM sequence: CAG
tgaagtcttattaggtgagt

SEQ ID NO: 16021 - DNA, 20 bp, Artificial Sequence
  Description of Artificial Sequence: Synthetic oligonucleotide
  Target: SCNA; (-) strand; PAM type: NRG; PAM sequence: GAG
gctgtgaagtcttattaggt

SEQ ID NO: 16022 - DNA, 20 bp, Artificial Sequence
  Description of Artificial Sequence: Synthetic oligonucleotide
  Target: SCNA; (-) strand; PAM type: NRG; PAM sequence: AGG
ctgcgctgtgaagtcttatt

SEQ ID NO: 16023 - DNA, 20 bp, Artificial Sequence
  Description of Artificial Sequence: Synthetic oligonucleotide
  Target: SCNA; (-) strand; PAM type: NRG; PAM sequence: TAG
gctgcgctgtgaagtcttat

SEQ ID NO: 16024 - DNA, 20 bp, Artificial Sequence
  Description of Artificial Sequence: Synthetic oligonucleotide
  Target: SCNA; (-) strand; PAM type: NRG; PAM sequence: AAG
gcagttgttgctgcgctgtg

SEQ ID NO: 16025 - DNA, 20 bp, Artificial Sequence
  Description of Artificial Sequence: Synthetic oligonucleotide
  Target: SCNA; (-) strand; PAM type: NRG; PAM sequence: CAG
aacaggacaaaaaaagctgg

SEQ ID NO: 16026 - DNA, 20 bp, Artificial Sequence
  Description of Artificial Sequence: Synthetic oligonucleotide
  Target: SCNA; (-) strand; PAM type: NRG; PAM sequence: TGG
agtaacaggacaaaaaaagc

SEQ ID NO: 16027 - DNA, 20 bp, Artificial Sequence
  Description of Artificial Sequence: Synthetic oligonucleotide
  Target: SCNA; (-) strand; PAM type: NRG; PAM sequence: AAG
tccaagtaacaggacaaaaa

SEQ ID NO: 16028 - DNA, 20 bp, Artificial Sequence
  Description of Artificial Sequence: Synthetic oligonucleotide
  Target: SCNA; (-) strand; PAM type: NRG; PAM sequence: AGG
accgagtctatccaagtaac

SEQ ID NO: 16029 - DNA, 20 bp, Artificial Sequence
  Description of Artificial Sequence: Synthetic oligonucleotide
  Target: SCNA; (-) strand; PAM type: NRG; PAM sequence: CAG
aaccgagtctatccaagtaa

SEQ ID NO: 16030 - DNA, 20 bp, Artificial Sequence
  Description of Artificial Sequence: Synthetic oligonucleotide
  Target: SCNA; (-) strand; PAM type: NRG; PAM sequence: AAG
atattcaaccgagtctatcc

SEQ ID NO: 16031 - DNA, 20 bp, Artificial Sequence
  Description of Artificial Sequence: Synthetic oligonucleotide
  Target: SCNA; (-) strand; PAM type: NRG; PAM sequence: GAG
gtgcattagtatattcaacc

SEQ ID NO: 16032 - DNA, 20 bp, Artificial Sequence
  Description of Artificial Sequence: Synthetic oligonucleotide
  Target: SCNA; (-) strand; PAM type: NRG; PAM sequence: TAG
ccagatttccctttgtgcat

SEQ ID NO: 16033 - DNA, 20 bp, Artificial Sequence
  Description of Artificial Sequence: Synthetic oligonucleotide
  Target: SCNA; (-) strand; PAM type: NRG; PAM sequence: CAG
aagtaaaaatagtttattcc

SEQ ID NO: 16034 - DNA, 20 bp, Artificial Sequence
  Description of Artificial Sequence: Synthetic oligonucleotide
  Target: SCNA; (-) strand; PAM type: NRG; PAM sequence: TAG
ttagacatgaaaagtaaaaa

SEQ ID NO: 16035 - DNA, 20 bp, Artificial Sequence
  Description of Artificial Sequence: Synthetic oligonucleotide
  Target: SCNA; (-) strand; PAM type: NRG; PAM sequence: AAG
gatcagcccttagacatgaa

SEQ ID NO: 16036 - DNA, 20 bp, Artificial Sequence
  Description of Artificial Sequence: Synthetic oligonucleotide
  Target: SCNA; (-) strand; PAM type: NRG; PAM sequence: TAG
agaagaggaggatcagccct

SEQ ID NO: 16037 - DNA, 20 bp, Artificial Sequence
  Description of Artificial Sequence: Synthetic oligonucleotide
  Target: SCNA; (-) strand; PAM type: NRG; PAM sequence: CAG
tatttctagaagaggaggat

SEQ ID NO: 16038 - DNA, 20 bp, Artificial Sequence
  Description of Artificial Sequence: Synthetic oligonucleotide
  Target: SCNA; (-) strand; PAM type: NRG; PAM sequence: AGG
aattttatttctagaagagg

SEQ ID NO: 16039 - DNA, 20 bp, Artificial Sequence
  Description of Artificial Sequence: Synthetic oligonucleotide
  Target: SCNA; (-) strand; PAM type: NRG; PAM sequence: GAG
aaattttatttctagaagag

SEQ ID NO: 16040 - DNA, 20 bp, Artificial Sequence
  Description of Artificial Sequence: Synthetic oligonucleotide
  Target: SCNA; (-) strand; PAM type: NRG; PAM sequence: AGG
ataaattttatttctagaag

SEQ ID NO: 16041 - DNA, 20 bp, Artificial Sequence
  Description of Artificial Sequence: Synthetic oligonucleotide
  Target: SCNA; (-) strand; PAM type: NRG; PAM sequence: GAG
aataaattttatttctagaa

SEQ ID NO: 16042 - DNA, 20 bp, Artificial Sequence
  Description of Artificial Sequence: Synthetic oligonucleotide
  Target: SCNA; (-) strand; PAM type: NRG; PAM sequence: AAG
ataataaattttatttctag

SEQ ID NO: 16043 - DNA, 20 bp, Artificial Sequence
  Description of Artificial Sequence: Synthetic oligonucleotide
  Target: SCNA; (-) strand; PAM type: NRG; PAM sequence: TAG
tacataataaattttatttc

SEQ ID NO: 16044 - DNA, 20 bp, Artificial Sequence
  Description of Artificial Sequence: Synthetic oligonucleotide
  Target: SCNA; (-) strand; PAM type: NRG; PAM sequence: TAG
atagtaaacaaatttgaata

SEQ ID NO: 16045 - DNA, 20 bp, Artificial Sequence
  Description of Artificial Sequence: Synthetic oligonucleotide
  Target: SCNA; (-) strand; PAM type: NRG; PAM sequence: TAG
taatccatgaaagcttaaaa

SEQ ID NO: 16046 - DNA, 20 bp, Artificial Sequence
  Description of Artificial Sequence: Synthetic oligonucleotide
  Target: SCNA; (-) strand; PAM type: NRG; PAM sequence: AAG
ttcaagattctaatccatga

SEQ ID NO: 16047 - DNA, 20 bp, Artificial Sequence
  Description of Artificial Sequence: Synthetic oligonucleotide
  Target: SCNA; (-) strand; PAM type: NRG; PAM sequence: AAG
tacccaaggggctgaccttc

SEQ ID NO: 16048 - DNA, 20 bp, Artificial Sequence
  Description of Artificial Sequence: Synthetic oligonucleotide
  Target: SCNA; (-) strand; PAM type: NRG; PAM sequence: GGG
ttattcagtcactacccaag

SEQ ID NO: 16049 - DNA, 20 bp, Artificial Sequence
  Description of Artificial Sequence: Synthetic oligonucleotide
  Target: SCNA; (-) strand; PAM type: NRG; PAM sequence: GGG
cttattcagtcactacccaa

SEQ ID NO: 16050 - DNA, 20 bp, Artificial Sequence
  Description of Artificial Sequence: Synthetic oligonucleotide
  Target: SCNA; (-) strand; PAM type: NRG; PAM sequence: AGG
tcttattcagtcactaccca

SEQ ID NO: 16051 - DNA, 20 bp, Artificial Sequence
  Description of Artificial Sequence: Synthetic oligonucleotide
  Target: SCNA; (-) strand; PAM type: NRG; PAM sequence: AAG
gtcttattcagtcactaccc

SEQ ID NO: 16052 - DNA, 20 bp, Artificial Sequence
  Description of Artificial Sequence: Synthetic oligonucleotide
  Target: SCNA; (-) strand; PAM type: NRG; PAM sequence: CAG
cacatcgttaatgtcttatt

SEQ ID NO: 16053 - DNA, 20 bp, Artificial Sequence
  Description of Artificial Sequence: Synthetic oligonucleotide
  Target: SCNA; (-) strand; PAM type: NRG; PAM sequence: CAG
gcacaagagcaaacctttct

SEQ ID NO: 16054 - DNA, 20 bp, Artificial Sequence
  Description of Artificial Sequence: Synthetic oligonucleotide
  Target: SCNA; (-) strand; PAM type: NRG; PAM sequence: GAG
tgattctgagctcagcacaa

SEQ ID NO: 16055 - DNA, 20 bp, Artificial Sequence
  Description of Artificial Sequence: Synthetic oligonucleotide
  Target: SCNA; (-) strand; PAM type: NRG; PAM sequence: AAG
attgattctgagctcagcac

SEQ ID NO: 16056 - DNA, 20 bp, Artificial Sequence
  Description of Artificial Sequence: Synthetic oligonucleotide
  Target: SCNA; (-) strand; PAM type: NRG; PAM sequence: CAG
tgacttattgattctgagct

SEQ ID NO: 16057 - DNA, 20 bp, Artificial Sequence
  Description of Artificial Sequence: Synthetic oligonucleotide
  Target: SCNA; (-) strand; PAM type: NRG; PAM sequence: GAG
tgaaatgacttattgattct

SEQ ID NO: 16058 - DNA, 20 bp, Artificial Sequence
  Description of Artificial Sequence: Synthetic oligonucleotide
  Target: SCNA; (-) strand; PAM type: NRG; PAM sequence: AAG
aaaaaaaaaaaaaaaaaaaa

SEQ ID NO: 16059 - DNA, 20 bp, Artificial Sequence
  Description of Artificial Sequence: Synthetic oligonucleotide
  Target: SCNA; (-) strand; PAM type: NRG; PAM sequence: GAG
tccagcctgggcgacagagc

SEQ ID NO: 16060 - DNA, 20 bp, Artificial Sequence
  Description of Artificial Sequence: Synthetic oligonucleotide
  Target: SCNA; (-) strand; PAM type: NRG; PAM sequence: GAG
gcactccagcctgggcgaca

SEQ ID NO: 16061 - DNA, 20 bp, Artificial Sequence
  Description of Artificial Sequence: Synthetic oligonucleotide
  Target: SCNA; (-) strand; PAM type: NRG; PAM sequence: CAG
ctgcactccagcctgggcga

SEQ ID NO: 16062 - DNA, 20 bp, Artificial Sequence
  Description of Artificial Sequence: Synthetic oligonucleotide
  Target: SCNA; (-) strand; PAM type: NRG; PAM sequence: GGG
gcgccactgcactccagcct

SEQ ID NO: 16063 - DNA, 20 bp, Artificial Sequence
  Description of Artificial Sequence: Synthetic oligonucleotide
  Target: SCNA; (-) strand; PAM type: NRG; PAM sequence: TGG
cgcgccactgcactccagcc

SEQ ID NO: 16064 - DNA, 20 bp, Artificial Sequence
  Description of Artificial Sequence: Synthetic oligonucleotide
  Target: SCNA; (-) strand; PAM type: NRG; PAM sequence: CAG
gagatcgcgccactgcactc

SEQ ID NO: 16065 - DNA, 20 bp, Artificial Sequence
  Description of Artificial Sequence: Synthetic oligonucleotide
  Target: SCNA; (-) strand; PAM type: NRG; PAM sequence: GAG
ggcagagcttgcagtgagct

SEQ ID NO: 16066 - DNA, 20 bp, Artificial Sequence
  Description of Artificial Sequence: Synthetic oligonucleotide
  Target: SCNA; (-) strand; PAM type: NRG; PAM sequence: GAG
cgtgaggcagagcttgcagt

SEQ ID NO: 16067 - DNA, 20 bp, Artificial Sequence
  Description of Artificial Sequence: Synthetic oligonucleotide
  Target: SCNA; (-) strand; PAM type: NRG; PAM sequence: CAG
atcccgtgaggcagagcttg

SEQ ID NO: 16068 - DNA, 20 bp, Artificial Sequence
  Description of Artificial Sequence: Synthetic oligonucleotide
  Target: SCNA; (-) strand; PAM type: NRG; PAM sequence: GAG
tggcgtgatcccgtgaggca

SEQ ID NO: 16069 - DNA, 20 bp, Artificial Sequence
  Description of Artificial Sequence: Synthetic oligonucleotide
  Target: SCNA; (-) strand; PAM type: NRG; PAM sequence: CAG
aatggcgtgatcccgtgagg

SEQ ID NO: 16070 - DNA, 20 bp, Artificial Sequence
  Description of Artificial Sequence: Synthetic oligonucleotide
  Target: SCNA; (-) strand; PAM type: NRG; PAM sequence: AGG
gagaatggcgtgatcccgtg

SEQ ID NO: 16071 - DNA, 20 bp, Artificial Sequence
  Description of Artificial Sequence: Synthetic oligonucleotide
  Target: SCNA; (-) strand; PAM type: NRG; PAM sequence: GAG
ggagaatggcgtgatcccgt

SEQ ID NO: 16072 - DNA, 20 bp, Artificial Sequence
  Description of Artificial Sequence: Synthetic oligonucleotide
  Target: SCNA; (-) strand; PAM type: NRG; PAM sequence: TGG
gggaggctgaagcaggagaa

SEQ ID NO: 16073 - DNA, 20 bp, Artificial Sequence
  Description of Artificial Sequence: Synthetic oligonucleotide
  Target: SCNA; (-) strand; PAM type: NRG; PAM sequence: GAG
tactcgggaggctgaagcag

SEQ ID NO: 16074 - DNA, 20 bp, Artificial Sequence
  Description of Artificial Sequence: Synthetic oligonucleotide
  Target: SCNA; (-) strand; PAM type: NRG; PAM sequence: AGG
gctactcgggaggctgaagc

SEQ ID NO: 16075 - DNA, 20 bp, Artificial Sequence
  Description of Artificial Sequence: Synthetic oligonucleotide
  Target: SCNA; (-) strand; PAM type: NRG; PAM sequence: CAG
agctactcgggaggctgaag

SEQ ID NO: 16076 - DNA, 20 bp, Artificial Sequence
  Description of Artificial Sequence: Synthetic oligonucleotide
  Target: SCNA; (-) strand; PAM type: NRG; PAM sequence: AAG
cccagctactcgggaggctg

SEQ ID NO: 16077 - DNA, 20 bp, Artificial Sequence
  Description of Artificial Sequence: Synthetic oligonucleotide
  Target: SCNA; (-) strand; PAM type: NRG; PAM sequence: AGG
tgtagtcccagctactcggg

SEQ ID NO: 16078 - DNA, 20 bp, Artificial Sequence
  Description of Artificial Sequence: Synthetic oligonucleotide
  Target: SCNA; (-) strand; PAM type: NRG; PAM sequence: GAG
ctgtagtcccagctactcgg

SEQ ID NO: 16079 - DNA, 20 bp, Artificial Sequence
  Description of Artificial Sequence: Synthetic oligonucleotide
  Target: SCNA; (-) strand; PAM type: NRG; PAM sequence: GGG
gcctgtagtcccagctactc

SEQ ID NO: 16080 - DNA, 20 bp, Artificial Sequence
  Description of Artificial Sequence: Synthetic oligonucleotide
  Target: SCNA; (-) strand; PAM type: NRG; PAM sequence: CGG
cgcctgtagtcccagctact

SEQ ID NO: 16081 - DNA, 20 bp, Artificial Sequence
  Description of Artificial Sequence: Synthetic oligonucleotide
  Target: SCNA; (-) strand; PAM type: NRG; PAM sequence: CAG
gtggtgagcgcctgtagtcc

SEQ ID NO: 16082 - DNA, 20 bp, Artificial Sequence
  Description of Artificial Sequence: Synthetic oligonucleotide
  Target: SCNA; (-) strand; PAM type: NRG; PAM sequence: TAG
ggcgtggtggtgagcgcctg

SEQ ID NO: 16083 - DNA, 20 bp, Artificial Sequence
  Description of Artificial Sequence: Synthetic oligonucleotide
  Target: SCNA; (-) strand; PAM type: NRG; PAM sequence: GAG
aattagccaggcgtggtggt

SEQ ID NO: 16084 - DNA, 20 bp, Artificial Sequence
  Description of Artificial Sequence: Synthetic oligonucleotide
  Target: SCNA; (-) strand; PAM type: NRG; PAM sequence: TGG
aaaaaattagccaggcgtgg

SEQ ID NO: 16085 - DNA, 20 bp, Artificial Sequence
  Description of Artificial Sequence: Synthetic oligonucleotide
  Target: SCNA; (-) strand; PAM type: NRG; PAM sequence: TGG
acaaaaaaattagccaggcg

SEQ ID NO: 16086 - DNA, 20 bp, Artificial Sequence
  Description of Artificial Sequence: Synthetic oligonucleotide
  Target: SCNA; (-) strand; PAM type: NRG; PAM sequence: AGG
aaattacaaaaaaattagcc

SEQ ID NO: 16087 - DNA, 20 bp, Artificial Sequence
  Description of Artificial Sequence: Synthetic oligonucleotide
  Target: SCNA; (-) strand; PAM type: NRG; PAM sequence: CAG
aaaattacaaaaaaattagc

SEQ ID NO: 16088 - DNA, 20 bp, Artificial Sequence
  Description of Artificial Sequence: Synthetic oligonucleotide
  Target: SCNA; (-) strand; PAM type: NRG; PAM sequence: TAG
tactaaaattacaaaaaaat

SEQ ID NO: 16089 - DNA, 20 bp, Artificial Sequence
  Description of Artificial Sequence: Synthetic oligonucleotide
  Target: SCNA; (-) strand; PAM type: NRG; PAM sequence: CAG
cgagaccatcctggctaaca

SEQ ID NO: 16090 - DNA, 20 bp, Artificial Sequence
  Description of Artificial Sequence: Synthetic oligonucleotide
  Target: SCNA; (-) strand; PAM type: NRG; PAM sequence: TGG
tcaggagatcgagaccatcc

SEQ ID NO: 16091 - DNA, 20 bp, Artificial Sequence
  Description of Artificial Sequence: Synthetic oligonucleotide
  Target: SCNA; (-) strand; PAM type: NRG; PAM sequence: GAG
gatcacgaggtcaggagatc

SEQ ID NO: 16092 - DNA, 20 bp, Artificial Sequence
  Description of Artificial Sequence: Synthetic oligonucleotide
  Target: SCNA; (-) strand; PAM type: NRG; PAM sequence: GAG
taggtggatcacgaggtcag

SEQ ID NO: 16093 - DNA, 20 bp, Artificial Sequence
  Description of Artificial Sequence: Synthetic oligonucleotide
  Target: SCNA; (-) strand; PAM type: NRG; PAM sequence: AGG
ggtaggtggatcacgaggtc

SEQ ID NO: 16094 - DNA, 20 bp, Artificial Sequence
  Description of Artificial Sequence: Synthetic oligonucleotide
  Target: SCNA; (-) strand; PAM type: NRG; PAM sequence: CAG
aggtaggtggatcacgaggt

SEQ ID NO: 16095 - DNA, 20 bp, Artificial Sequence
  Description of Artificial Sequence: Synthetic oligonucleotide
  Target: SCNA; (-) strand; PAM type: NRG; PAM sequence: AGG
gccaaggtaggtggatcacg

SEQ ID NO: 16096 - DNA, 20 bp, Artificial Sequence
  Description of Artificial Sequence: Synthetic oligonucleotide
  Target: SCNA; (-) strand; PAM type: NRG; PAM sequence: GAG
ggccaaggtaggtggatcac

SEQ ID NO: 16097 - DNA, 20 bp, Artificial Sequence
  Description of Artificial Sequence: Synthetic oligonucleotide
  Target: SCNA; (-) strand; PAM type: NRG; PAM sequence: TGG
ctttgggaggccaaggtagg

SEQ ID NO: 16098 - DNA, 20 bp, Artificial Sequence
  Description of Artificial Sequence: Synthetic oligonucleotide
  Target: SCNA; (-) strand; PAM type: NRG; PAM sequence: AGG
gcactttgggaggccaaggt

SEQ ID NO: 16099 - DNA, 20 bp, Artificial Sequence
  Description of Artificial Sequence: Synthetic oligonucleotide
  Target: SCNA; (-) strand; PAM type: NRG; PAM sequence: TAG
agcactttgggaggccaagg

SEQ ID NO: 16100 - DNA, 20 bp, Artificial Sequence
  Description of Artificial Sequence: Synthetic oligonucleotide
  Target: SCNA; (-) strand; PAM type: NRG; PAM sequence: AGG
cccagcactttgggaggcca

SEQ ID NO: 16101 - DNA, 20 bp, Artificial Sequence
  Description of Artificial Sequence: Synthetic oligonucleotide
  Target: SCNA; (-) strand; PAM type: NRG; PAM sequence: AAG
tcccagcactttgggaggcc

SEQ ID NO: 16102 - DNA, 20 bp, Artificial Sequence
  Description of Artificial Sequence: Synthetic oligonucleotide
  Target: SCNA; (-) strand; PAM type: NRG; PAM sequence: AGG
tgtaatcccagcactttggg

SEQ ID NO: 16103 - DNA, 20 bp, Artificial Sequence
  Description of Artificial Sequence: Synthetic oligonucleotide
  Target: SCNA; (-) strand; PAM type: NRG; PAM sequence: GAG
ctgtaatcccagcactttgg

SEQ ID NO: 16104 - DNA, 20 bp, Artificial Sequence
  Description of Artificial Sequence: Synthetic oligonucleotide
  Target: SCNA; (-) strand; PAM type: NRG; PAM sequence: GGG
gcctgtaatcccagcacttt

SEQ ID NO: 16105 - DNA, 20 bp, Artificial Sequence
  Description of Artificial Sequence: Synthetic oligonucleotide
  Target: SCNA; (-) strand; PAM type: NRG; PAM sequence: TGG
cgcctgtaatcccagcactt

SEQ ID NO: 16106 - DNA, 20 bp, Artificial Sequence
  Description of Artificial Sequence: Synthetic oligonucleotide
  Target: SCNA; (-) strand; PAM type: NRG; PAM sequence: CAG
gtggctcacgcctgtaatcc

SEQ ID NO: 16107 - DNA, 20 bp, Artificial Sequence
  Description of Artificial Sequence: Synthetic oligonucleotide
  Target: SCNA; (-) strand; PAM type: NRG; PAM sequence: TGG
ctgcctctggccgggcgcag

SEQ ID NO: 16108 - DNA, 20 bp, Artificial Sequence
  Description of Artificial Sequence: Synthetic oligonucleotide
  Target: SCNA; (-) strand; PAM type: NRG; PAM sequence: CAG
gacctgcctctggccgggcg

SEQ ID NO: 16109 - DNA, 20 bp, Artificial Sequence
  Description of Artificial Sequence: Synthetic oligonucleotide
  Target: SCNA; (-) strand; PAM type: NRG; PAM sequence: GGG
tttaagacctgcctctggcc

SEQ ID NO: 16110 - DNA, 20 bp, Artificial Sequence
  Description of Artificial Sequence: Synthetic oligonucleotide
  Target: SCNA; (-) strand; PAM type: NRG; PAM sequence: CGG
ttttaagacctgcctctggc

SEQ ID NO: 16111 - DNA, 20 bp, Artificial Sequence
  Description of Artificial Sequence: Synthetic oligonucleotide
  Target: SCNA; (-) strand; PAM type: NRG; PAM sequence: TGG
ctagttttaagacctgcctc

SEQ ID NO: 16112 - DNA, 20 bp, Artificial Sequence
  Description of Artificial Sequence: Synthetic oligonucleotide
  Target: SCNA; (-) strand; PAM type: NRG; PAM sequence: AAG
ctcacccagttgctagtttt

SEQ ID NO: 16113 - DNA, 20 bp, Artificial Sequence
  Description of Artificial Sequence: Synthetic oligonucleotide
  Target: SCNA; (-) strand; PAM type: NRG; PAM sequence: TAG
ctgatttctcacccagttgc

SEQ ID NO: 16114 - DNA, 20 bp, Artificial Sequence
  Description of Artificial Sequence: Synthetic oligonucleotide
  Target: SCNA; (-) strand; PAM type: NRG; PAM sequence: CAG
ctccccactgatttctcacc

SEQ ID NO: 16115 - DNA, 20 bp, Artificial Sequence
  Description of Artificial Sequence: Synthetic oligonucleotide
  Target: SCNA; (-) strand; PAM type: NRG; PAM sequence: AAG
ctttatctcttactttgtca

SEQ ID NO: 16116 - DNA, 20 bp, Artificial Sequence
  Description of Artificial Sequence: Synthetic oligonucleotide
  Target: SCNA; (-) strand; PAM type: NRG; PAM sequence: CAG
gtttttctaaaatatgaaag

SEQ ID NO: 16117 - DNA, 20 bp, Artificial Sequence
  Description of Artificial Sequence: Synthetic oligonucleotide
  Target: SCNA; (-) strand; PAM type: NRG; PAM sequence: AAG
tgggtttttctaaaatatga

SEQ ID NO: 16118 - DNA, 20 bp, Artificial Sequence
  Description of Artificial Sequence: Synthetic oligonucleotide
  Target: SCNA; (-) strand; PAM type: NRG; PAM sequence: GGG
tgggcttttcagcattccct

SEQ ID NO: 16119 - DNA, 20 bp, Artificial Sequence
  Description of Artificial Sequence: Synthetic oligonucleotide
  Target: SCNA; (-) strand; PAM type: NRG; PAM sequence: TGG
atgggcttttcagcattccc

SEQ ID NO: 16120 - DNA, 20 bp, Artificial Sequence
  Description of Artificial Sequence: Synthetic oligonucleotide
  Target: SCNA; (-) strand; PAM type: NRG; PAM sequence: CAG
cttctttcctatgggctttt

SEQ ID NO: 16121 - DNA, 20 bp, Artificial Sequence
  Description of Artificial Sequence: Synthetic oligonucleotide
  Target: SCNA; (-) strand; PAM type: NRG; PAM sequence: GGG
gcatatttcttctttcctat

SEQ ID NO: 16122 - DNA, 20 bp, Artificial Sequence
  Description of Artificial Sequence: Synthetic oligonucleotide
  Target: SCNA; (-) strand; PAM type: NRG; PAM sequence: TGG
agcatatttcttctttccta

SEQ ID NO: 16123 - DNA, 20 bp, Artificial Sequence
  Description of Artificial Sequence: Synthetic oligonucleotide
  Target: SCNA; (-) strand; PAM type: NRG; PAM sequence: CAG
ttggctcactaacatcttga

SEQ ID NO: 16124 - DNA, 20 bp, Artificial Sequence
  Description of Artificial Sequence: Synthetic oligonucleotide
  Target: SCNA; (-) strand; PAM type: NRG; PAM sequence: TGG
gagagcaaactcctgggcct

SEQ ID NO: 16125 - DNA, 20 bp, Artificial Sequence
  Description of Artificial Sequence: Synthetic oligonucleotide
  Target: SCNA; (-) strand; PAM type: NRG; PAM sequence: GGG
gtttttgagagcaaactcct

SEQ ID NO: 16126 - DNA, 20 bp, Artificial Sequence
  Description of Artificial Sequence: Synthetic oligonucleotide
  Target: SCNA; (-) strand; PAM type: NRG; PAM sequence: TGG
tgtttttgagagcaaactcc

SEQ ID NO: 16127 - DNA, 20 bp, Artificial Sequence
  Description of Artificial Sequence: Synthetic oligonucleotide
  Target: SCNA; (-) strand; PAM type: NRG; PAM sequence: GAG
agtttctcatctgtttttga

SEQ ID NO: 16128 - DNA, 20 bp, Artificial Sequence
  Description of Artificial Sequence: Synthetic oligonucleotide
  Target: SCNA; (-) strand; PAM type: NRG; PAM sequence: GAG
ccagtttctcatctgttttt

SEQ ID NO: 16129 - DNA, 20 bp, Artificial Sequence
  Description of Artificial Sequence: Synthetic oligonucleotide
  Target: SCNA; (-) strand; PAM type: NRG; PAM sequence: CAG
tcccagtcagattttaagtc

SEQ ID NO: 16130 - DNA, 20 bp, Artificial Sequence
  Description of Artificial Sequence: Synthetic oligonucleotide
  Target: SCNA; (-) strand; PAM type: NRG; PAM sequence: AAG
ctttctcccagtcagatttt

SEQ ID NO: 16131 - DNA, 20 bp, Artificial Sequence
  Description of Artificial Sequence: Synthetic oligonucleotide
  Target: SCNA; (-) strand; PAM type: NRG; PAM sequence: CAG
ctaaagtactttctcccagt

SEQ ID NO: 16132 - DNA, 20 bp, Artificial Sequence
  Description of Artificial Sequence: Synthetic oligonucleotide
  Target: SCNA; (-) strand; PAM type: NRG; PAM sequence: CAG
ttgcctaaagtactttctcc

SEQ ID NO: 16133 - DNA, 20 bp, Artificial Sequence
  Description of Artificial Sequence: Synthetic oligonucleotide
  Target: SCNA; (-) strand; PAM type: NRG; PAM sequence: AAG
tgagtagtttgttttgccta

SEQ ID NO: 16134 - DNA, 20 bp, Artificial Sequence
  Description of Artificial Sequence: Synthetic oligonucleotide
  Target: SCNA; (-) strand; PAM type: NRG; PAM sequence: TAG
cccatccttttgtatatgag

SEQ ID NO: 16135 - DNA, 20 bp, Artificial Sequence
  Description of Artificial Sequence: Synthetic oligonucleotide
  Target: SCNA; (-) strand; PAM type: NRG; PAM sequence: GAG
gagcccatccttttgtatat

SEQ ID NO: 16136 - DNA, 20 bp, Artificial Sequence
  Description of Artificial Sequence: Synthetic oligonucleotide
  Target: SCNA; (-) strand; PAM type: NRG; PAM sequence: GAG
tgccttcactctctgcttca

SEQ ID NO: 16137 - DNA, 20 bp, Artificial Sequence
  Description of Artificial Sequence: Synthetic oligonucleotide
  Target: SCNA; (-) strand; PAM type: NRG; PAM sequence: CAG
attgccttcactctctgctt

SEQ ID NO: 16138 - DNA, 20 bp, Artificial Sequence
  Description of Artificial Sequence: Synthetic oligonucleotide
  Target: SCNA; (-) strand; PAM type: NRG; PAM sequence: AAG
ttttaaatccaccgatcttg

SEQ ID NO: 16139 - DNA, 20 bp, Artificial Sequence
  Description of Artificial Sequence: Synthetic oligonucleotide
  Target: SCNA; (-) strand; PAM type: NRG; PAM sequence: AGG
cttttagagaagatacttct

SEQ ID NO: 16140 - DNA, 20 bp, Artificial Sequence
  Description of Artificial Sequence: Synthetic oligonucleotide
  Target: SCNA; (-) strand; PAM type: NRG; PAM sequence: TAG
tcttttagagaagatacttc

SEQ ID NO: 16141 - DNA, 20 bp, Artificial Sequence
  Description of Artificial Sequence: Synthetic oligonucleotide
  Target: SCNA; (-) strand; PAM type: NRG; PAM sequence: AAG
taatcttttatcttttagag

SEQ ID NO: 16142 - DNA, 20 bp, Artificial Sequence
  Description of Artificial Sequence: Synthetic oligonucleotide
  Target: SCNA; (-) strand; PAM type: NRG; PAM sequence: GAG
tcttaatcttttatctttta

SEQ ID NO: 16143 - DNA, 20 bp, Artificial Sequence
  Description of Artificial Sequence: Synthetic oligonucleotide
  Target: SCNA; (-) strand; PAM type: NRG; PAM sequence: TAG
tttcttaatcttttatcttt

SEQ ID NO: 16144 - DNA, 20 bp, Artificial Sequence
  Description of Artificial Sequence: Synthetic oligonucleotide
  Target: SCNA; (-) strand; PAM type: NRG; PAM sequence: AAG
ttcctgctctagctatctta

SEQ ID NO: 16145 - DNA, 20 bp, Artificial Sequence
  Description of Artificial Sequence: Synthetic oligonucleotide
  Target: SCNA; (-) strand; PAM type: NRG; PAM sequence: TAG
tgactactttattcctgctc

SEQ ID NO: 16146 - DNA, 20 bp, Artificial Sequence
  Description of Artificial Sequence: Synthetic oligonucleotide
  Target: SCNA; (-) strand; PAM type: NRG; PAM sequence: TGG
tggaaacttctggaaccttg

SEQ ID NO: 16147 - DNA, 20 bp, Artificial Sequence
  Description of Artificial Sequence: Synthetic oligonucleotide
  Target: SCNA; (-) strand; PAM type: NRG; PAM sequence: TGG
tctattagtatggaaacttc

SEQ ID NO: 16148 - DNA, 20 bp, Artificial Sequence
  Description of Artificial Sequence: Synthetic oligonucleotide
  Target: SCNA; (-) strand; PAM type: NRG; PAM sequence: TGG
agtatctgtttctattagta

SEQ ID NO: 16149 - DNA, 20 bp, Artificial Sequence
  Description of Artificial Sequence: Synthetic oligonucleotide
  Target: SCNA; (-) strand; PAM type: NRG; PAM sequence: TAG
cacttagtatctgtttctat

SEQ ID NO: 16150 - DNA, 20 bp, Artificial Sequence
  Description of Artificial Sequence: Synthetic oligonucleotide
  Target: SCNA; (-) strand; PAM type: NRG; PAM sequence: TAG
agggcccctcaaacttcact

SEQ ID NO: 16151 - DNA, 20 bp, Artificial Sequence
  Description of Artificial Sequence: Synthetic oligonucleotide
  Target: SCNA; (-) strand; PAM type: NRG; PAM sequence: GGG
gttttctatccagattgtga

SEQ ID NO: 16152 - DNA, 20 bp, Artificial Sequence
  Description of Artificial Sequence: Synthetic oligonucleotide
  Target: SCNA; (-) strand; PAM type: NRG; PAM sequence: AGG
agttttctatccagattgtg

SEQ ID NO: 16153 - DNA, 20 bp, Artificial Sequence
  Description of Artificial Sequence: Synthetic oligonucleotide
  Target: SCNA; (-) strand; PAM type: NRG; PAM sequence: GAG
gagttttctatccagattgt

SEQ ID NO: 16154 - DNA, 20 bp, Artificial Sequence
  Description of Artificial Sequence: Synthetic oligonucleotide
  Target: SCNA; (-) strand; PAM type: NRG; PAM sequence: CAG
tacttgaagagttttctatc

SEQ ID NO: 16155 - DNA, 20 bp, Artificial Sequence
  Description of Artificial Sequence: Synthetic oligonucleotide
  Target: SCNA; (-) strand; PAM type: NRG; PAM sequence: GAG
aaggttgagatctacttgaa

SEQ ID NO: 16156 - DNA, 20 bp, Artificial Sequence
  Description of Artificial Sequence: Synthetic oligonucleotide
  Target: SCNA; (-) strand; PAM type: NRG; PAM sequence: AAG
tgaaggttgagatctacttg

SEQ ID NO: 16157 - DNA, 20 bp, Artificial Sequence
  Description of Artificial Sequence: Synthetic oligonucleotide
  Target: SCNA; (-) strand; PAM type: NRG; PAM sequence: GAG
gatattccagcctgaaggtt

SEQ ID NO: 16158 - DNA, 20 bp, Artificial Sequence
  Description of Artificial Sequence: Synthetic oligonucleotide
  Target: SCNA; (-) strand; PAM type: NRG; PAM sequence: AGG
gcaaagatattccagcctga

SEQ ID NO: 16159 - DNA, 20 bp, Artificial Sequence
  Description of Artificial Sequence: Synthetic oligonucleotide
  Target: SCNA; (-) strand; PAM type: NRG; PAM sequence: AAG
agcaaagatattccagcctg

SEQ ID NO: 16160 - DNA, 20 bp, Artificial Sequence
  Description of Artificial Sequence: Synthetic oligonucleotide
  Target: SCNA; (-) strand; PAM type: NRG; PAM sequence: CAG
atagctaagcaaagatattc

SEQ ID NO: 16161 - DNA, 20 bp, Artificial Sequence
  Description of Artificial Sequence: Synthetic oligonucleotide
  Target: SCNA; (-) strand; PAM type: NRG; PAM sequence: AAG
ctggctgggatagctaagca

SEQ ID NO: 16162 - DNA, 20 bp, Artificial Sequence
  Description of Artificial Sequence: Synthetic oligonucleotide
  Target: SCNA; (-) strand; PAM type: NRG; PAM sequence: AAG
gtcctctggctgggatagct

SEQ ID NO: 16163 - DNA, 20 bp, Artificial Sequence
  Description of Artificial Sequence: Synthetic oligonucleotide
  Target: SCNA; (-) strand; PAM type: NRG; PAM sequence: TAG
ctatggtcctctggctggga

SEQ ID NO: 16164 - DNA, 20 bp, Artificial Sequence
  Description of Artificial Sequence: Synthetic oligonucleotide
  Target: SCNA; (-) strand; PAM type: NRG; PAM sequence: GGG
accactatggtcctctggct

SEQ ID NO: 16165 - DNA, 20 bp, Artificial Sequence
  Description of Artificial Sequence: Synthetic oligonucleotide
  Target: SCNA; (-) strand; PAM type: NRG; PAM sequence: TGG
aaccactatggtcctctggc

SEQ ID NO: 16166 - DNA, 20 bp, Artificial Sequence
  Description of Artificial Sequence: Synthetic oligonucleotide
  Target: SCNA; (-) strand; PAM type: NRG; PAM sequence: TGG
aatcaaccactatggtcctc

SEQ ID NO: 16167 - DNA, 20 bp, Artificial Sequence
  Description of Artificial Sequence: Synthetic oligonucleotide
  Target: SCNA; (-) strand; PAM type: NRG; PAM sequence: TGG
ccttttgaaatcaaccacta

SEQ ID NO: 16168 - DNA, 20 bp, Artificial Sequence
  Description of Artificial Sequence: Synthetic oligonucleotide
  Target: SCNA; (-) strand; PAM type: NRG; PAM sequence: TAG
caatgagagaatttacaaga

SEQ ID NO: 16169 - DNA, 20 bp, Artificial Sequence
  Description of Artificial Sequence: Synthetic oligonucleotide
  Target: SCNA; (-) strand; PAM type: NRG; PAM sequence: AAG
ttaacaatgagagaatttac

SEQ ID NO: 16170 - DNA, 20 bp, Artificial Sequence
  Description of Artificial Sequence: Synthetic oligonucleotide
  Target: SCNA; (-) strand; PAM type: NRG; PAM sequence: GAG
gtgacaaaacttaacaatga

SEQ ID NO: 16171 - DNA, 20 bp, Artificial Sequence
  Description of Artificial Sequence: Synthetic oligonucleotide
  Target: SCNA; (-) strand; PAM type: NRG; PAM sequence: GAG
ctgtgacaaaacttaacaat

SEQ ID NO: 16172 - DNA, 20 bp, Artificial Sequence
  Description of Artificial Sequence: Synthetic oligonucleotide
  Target: SCNA; (-) strand; PAM type: NRG; PAM sequence: TAG
tctaggtaactgaaagaaag

SEQ ID NO: 16173 - DNA, 20 bp, Artificial Sequence
  Description of Artificial Sequence: Synthetic oligonucleotide
  Target: SCNA; (-) strand; PAM type: NRG; PAM sequence: AAG
ttttctaggtaactgaaaga

SEQ ID NO: 16174 - DNA, 20 bp, Artificial Sequence
  Description of Artificial Sequence: Synthetic oligonucleotide
  Target: SCNA; (-) strand; PAM type: NRG; PAM sequence: AAG
aacattttctaggtaactga

SEQ ID NO: 16175 - DNA, 20 bp, Artificial Sequence
  Description of Artificial Sequence: Synthetic oligonucleotide
  Target: SCNA; (-) strand; PAM type: NRG; PAM sequence: AGG
tttcagagaaaacattttct

SEQ ID NO: 16176 - DNA, 20 bp, Artificial Sequence
  Description of Artificial Sequence: Synthetic oligonucleotide
  Target: SCNA; (-) strand; PAM type: NRG; PAM sequence: TAG
ttttcagagaaaacattttc

SEQ ID NO: 16177 - DNA, 20 bp, Artificial Sequence
  Description of Artificial Sequence: Synthetic oligonucleotide
  Target: SCNA; (-) strand; PAM type: NRG; PAM sequence: GAG
ggcatggatagaggttttca

SEQ ID NO: 16178 - DNA, 20 bp, Artificial Sequence
  Description of Artificial Sequence: Synthetic oligonucleotide
  Target: SCNA; (-) strand; PAM type: NRG; PAM sequence: CAG
gaggcatggatagaggtttt

SEQ ID NO: 16179 - DNA, 20 bp, Artificial Sequence
  Description of Artificial Sequence: Synthetic oligonucleotide
  Target: SCNA; (-) strand; PAM type: NRG; PAM sequence: AGG
atctgttgaggcatggatag

SEQ ID NO: 16180 - DNA, 20 bp, Artificial Sequence
  Description of Artificial Sequence: Synthetic oligonucleotide
  Target: SCNA; (-) strand; PAM type: NRG; PAM sequence: GAG
gatctgttgaggcatggata

SEQ ID NO: 16181 - DNA, 20 bp, Artificial Sequence
  Description of Artificial Sequence: Synthetic oligonucleotide
  Target: SCNA; (-) strand; PAM type: NRG; PAM sequence: TAG
ccgatctgttgaggcatgga

SEQ ID NO: 16182 - DNA, 20 bp, Artificial Sequence
  Description of Artificial Sequence: Synthetic oligonucleotide
  Target: SCNA; (-) strand; PAM type: NRG; PAM sequence: TGG
atctccgatctgttgaggca

SEQ ID NO: 16183 - DNA, 20 bp, Artificial Sequence
  Description of Artificial Sequence: Synthetic oligonucleotide
  Target: SCNA; (-) strand; PAM type: NRG; PAM sequence: AGG
tttttatctccgatctgttg

SEQ ID NO: 16184 - DNA, 20 bp, Artificial Sequence
  Description of Artificial Sequence: Synthetic oligonucleotide
  Target: SCNA; (-) strand; PAM type: NRG; PAM sequence: GAG
ttttttatctccgatctgtt

SEQ ID NO: 16185 - DNA, 20 bp, Artificial Sequence
  Description of Artificial Sequence: Synthetic oligonucleotide
  Target: SCNA; (-) strand; PAM type: NRG; PAM sequence: AAG
atctttcttgataatcttgt

SEQ ID NO: 16186 - DNA, 20 bp, Artificial Sequence
  Description of Artificial Sequence: Synthetic oligonucleotide
  Target: SCNA; (-) strand; PAM type: NRG; PAM sequence: TAG
tgaccttttaaggatacacc

SEQ ID NO: 16187 - DNA, 20 bp, Artificial Sequence
  Description of Artificial Sequence: Synthetic oligonucleotide
  Target: SCNA; (-) strand; PAM type: NRG; PAM sequence: AGG
ttcatttgaatgacctttta

SEQ ID NO: 16188 - DNA, 20 bp, Artificial Sequence
  Description of Artificial Sequence: Synthetic oligonucleotide
  Target: SCNA; (-) strand; PAM type: NRG; PAM sequence: AAG
tttcatttgaatgacctttt

SEQ ID NO: 16189 - DNA, 20 bp, Artificial Sequence
  Description of Artificial Sequence: Synthetic oligonucleotide
  Target: SCNA; (-) strand; PAM type: NRG; PAM sequence: AAG
tccgaataacacagaaaagt

SEQ ID NO: 16190 - DNA, 20 bp, Artificial Sequence
  Description of Artificial Sequence: Synthetic oligonucleotide
  Target: SCNA; (-) strand; PAM type: NRG; PAM sequence: AAG
catgtccgaataacacagaa

SEQ ID NO: 16191 - DNA, 20 bp, Artificial Sequence
  Description of Artificial Sequence: Synthetic oligonucleotide
  Target: SCNA; (-) strand; PAM type: NRG; PAM sequence: CAG
tattccatgtccgaataaca

SEQ ID NO: 16192 - DNA, 20 bp, Artificial Sequence
  Description of Artificial Sequence: Synthetic oligonucleotide
  Target: SCNA; (-) strand; PAM type: NRG; PAM sequence: AAG
aatggtaccaaatacagagt

SEQ ID NO: 16193 - DNA, 20 bp, Artificial Sequence
  Description of Artificial Sequence: Synthetic oligonucleotide
  Target: SCNA; (-) strand; PAM type: NRG; PAM sequence: GAG
ttgaaatggtaccaaataca

SEQ ID NO: 16194 - DNA, 20 bp, Artificial Sequence
  Description of Artificial Sequence: Synthetic oligonucleotide
  Target: SCNA; (-) strand; PAM type: NRG; PAM sequence: CAG
tcttgaaatggtaccaaata

SEQ ID NO: 16195 - DNA, 20 bp, Artificial Sequence
  Description of Artificial Sequence: Synthetic oligonucleotide
  Target: SCNA; (-) strand; PAM type: NRG; PAM sequence: TGG
tgcatataaaactcttgaaa

SEQ ID NO: 16196 - DNA, 20 bp, Artificial Sequence
  Description of Artificial Sequence: Synthetic oligonucleotide
  Target: SCNA; (-) strand; PAM type: NRG; PAM sequence: AAG
tcctcaaagagttgtttttt

SEQ ID NO: 16197 - DNA, 20 bp, Artificial Sequence
  Description of Artificial Sequence: Synthetic oligonucleotide
  Target: SCNA; (-) strand; PAM type: NRG; PAM sequence: GAG
acagtagtaacttcctcaaa

SEQ ID NO: 16198 - DNA, 20 bp, Artificial Sequence
  Description of Artificial Sequence: Synthetic oligonucleotide
  Target: SCNA; (-) strand; PAM type: NRG; PAM sequence: AAG
agacagtagtaacttcctca

SEQ ID NO: 16199 - DNA, 20 bp, Artificial Sequence
  Description of Artificial Sequence: Synthetic oligonucleotide
  Target: SCNA; (-) strand; PAM type: NRG; PAM sequence: TAG
cactgataaaatggagacag

SEQ ID NO: 16200 - DNA, 20 bp, Artificial Sequence
  Description of Artificial Sequence: Synthetic oligonucleotide
  Target: SCNA; (-) strand; PAM type: NRG; PAM sequence: CAG
attcactgataaaatggaga

SEQ ID NO: 16201 - DNA, 20 bp, Artificial Sequence
  Description of Artificial Sequence: Synthetic oligonucleotide
  Target: SCNA; (-) strand; PAM type: NRG; PAM sequence: GAG
gttcattcactgataaaatg

SEQ ID NO: 16202 - DNA, 20 bp, Artificial Sequence
  Description of Artificial Sequence: Synthetic oligonucleotide
  Target: SCNA; (-) strand; PAM type: NRG; PAM sequence: TGG
ctgttcattcactgataaaa

SEQ ID NO: 16203 - DNA, 20 bp, Artificial Sequence
  Description of Artificial Sequence: Synthetic oligonucleotide
  Target: SCNA; (-) strand; PAM type: NRG; PAM sequence: CAG
aagagtgtgggctttggagc

SEQ ID NO: 16204 - DNA, 20 bp, Artificial Sequence
  Description of Artificial Sequence: Synthetic oligonucleotide
  Target: SCNA; (-) strand; PAM type: NRG; PAM sequence: GAG
agttaagagtgtgggctttg

SEQ ID NO: 16205 - DNA, 20 bp, Artificial Sequence
  Description of Artificial Sequence: Synthetic oligonucleotide
  Target: SCNA; (-) strand; PAM type: NRG; PAM sequence: TGG
atagttaagagtgtgggctt

SEQ ID NO: 16206 - DNA, 20 bp, Artificial Sequence
  Description of Artificial Sequence: Synthetic oligonucleotide
  Target: SCNA; (-) strand; PAM type: NRG; PAM sequence: GGG
tgcataatagttaagagtgt

SEQ ID NO: 16207 - DNA, 20 bp, Artificial Sequence
  Description of Artificial Sequence: Synthetic oligonucleotide
  Target: SCNA; (-) strand; PAM type: NRG; PAM sequence: TGG
ttgcataatagttaagagtg

SEQ ID NO: 16208 - DNA, 20 bp, Artificial Sequence
  Description of Artificial Sequence: Synthetic oligonucleotide
  Target: SCNA; (-) strand; PAM type: NRG; PAM sequence: GAG
taatattgcataatagttaa

SEQ ID NO: 16209 - DNA, 20 bp, Artificial Sequence
  Description of Artificial Sequence: Synthetic oligonucleotide
  Target: SCNA; (-) strand; PAM type: NRG; PAM sequence: AAG
actaatattgcataatagtt

SEQ ID NO: 16210 - DNA, 20 bp, Artificial Sequence
  Description of Artificial Sequence: Synthetic oligonucleotide
  Target: SCNA; (-) strand; PAM type: NRG; PAM sequence: TAG
tgacaactaatattgcataa

SEQ ID NO: 16211 - DNA, 20 bp, Artificial Sequence
  Description of Artificial Sequence: Synthetic oligonucleotide
  Target: SCNA; (-) strand; PAM type: NRG; PAM sequence: AAG
attacacagatttttttttc

SEQ ID NO: 16212 - DNA, 20 bp, Artificial Sequence
  Description of Artificial Sequence: Synthetic oligonucleotide
  Target: SCNA; (-) strand; PAM type: NRG; PAM sequence: CAG
gtaatattttagtaattaca

SEQ ID NO: 16213 - DNA, 20 bp, Artificial Sequence
  Description of Artificial Sequence: Synthetic oligonucleotide
  Target: SCNA; (-) strand; PAM type: NRG; PAM sequence: TAG
agtagcccagcgtaatattt

SEQ ID NO: 16214 - DNA, 20 bp, Artificial Sequence
  Description of Artificial Sequence: Synthetic oligonucleotide
  Target: SCNA; (-) strand; PAM type: NRG; PAM sequence: CAG
ttttaccttaataagtagcc

SEQ ID NO: 16215 - DNA, 20 bp, Artificial Sequence
  Description of Artificial Sequence: Synthetic oligonucleotide
  Target: SCNA; (-) strand; PAM type: NRG; PAM sequence: TAG
cgtaattttaccttaataag

SEQ ID NO: 16216 - DNA, 20 bp, Artificial Sequence
  Description of Artificial Sequence: Synthetic oligonucleotide
  Target: SCNA; (-) strand; PAM type: NRG; PAM sequence: AAG
aaacgtaattttaccttaat

SEQ ID NO: 16217 - DNA, 20 bp, Artificial Sequence
  Description of Artificial Sequence: Synthetic oligonucleotide
  Target: SCNA; (-) strand; PAM type: NRG; PAM sequence: AGG
agttaacattgcatttggaa

SEQ ID NO: 16218 - DNA, 20 bp, Artificial Sequence
  Description of Artificial Sequence: Synthetic oligonucleotide
  Target: SCNA; (-) strand; PAM type: NRG; PAM sequence: AAG
tagttaacattgcatttgga

SEQ ID NO: 16219 - DNA, 20 bp, Artificial Sequence
  Description of Artificial Sequence: Synthetic oligonucleotide
  Target: SCNA; (-) strand; PAM type: NRG; PAM sequence: TGG
tgaatagttaacattgcatt

SEQ ID NO: 16220 - DNA, 20 bp, Artificial Sequence
  Description of Artificial Sequence: Synthetic oligonucleotide
  Target: SCNA; (-) strand; PAM type: NRG; PAM sequence: TAG
ttctgatatttcatcatgaa

SEQ ID NO: 16221 - DNA, 20 bp, Artificial Sequence
  Description of Artificial Sequence: Synthetic oligonucleotide
  Target: SCNA; (-) strand; PAM type: NRG; PAM sequence: TAG
aaaaatattggtattagaga

SEQ ID NO: 16222 - DNA, 20 bp, Artificial Sequence
  Description of Artificial Sequence: Synthetic oligonucleotide
  Target: SCNA; (-) strand; PAM type: NRG; PAM sequence: GAG
caataaaaatattggtatta

SEQ ID NO: 16223 - DNA, 20 bp, Artificial Sequence
  Description of Artificial Sequence: Synthetic oligonucleotide
  Target: SCNA; (-) strand; PAM type: NRG; PAM sequence: TAG
tccaataaaaatattggtat

SEQ ID NO: 16224 - DNA, 20 bp, Artificial Sequence
  Description of Artificial Sequence: Synthetic oligonucleotide
  Target: SCNA; (-) strand; PAM type: NRG; PAM sequence: TGG
ttttattccaataaaaatat

SEQ ID NO: 16225 - DNA, 20 bp, Artificial Sequence
  Description of Artificial Sequence: Synthetic oligonucleotide
  Target: SCNA; (-) strand; PAM type: NRG; PAM sequence: TAG
tatgtatgtgtgtgtgtgca

SEQ ID NO: 16226 - DNA, 20 bp, Artificial Sequence
  Description of Artificial Sequence: Synthetic oligonucleotide
  Target: SCNA; (-) strand; PAM type: NRG; PAM sequence: TAG
aaaaatcatatatatacaca

SEQ ID NO: 16227 - DNA, 20 bp, Artificial Sequence
  Description of Artificial Sequence: Synthetic oligonucleotide
  Target: SCNA; (-) strand; PAM type: NRG; PAM sequence: TGG
ttatgtgtttaaaaaaaatc

SEQ ID NO: 16228 - DNA, 20 bp, Artificial Sequence
  Description of Artificial Sequence: Synthetic oligonucleotide
  Target: SCNA; (-) strand; PAM type: NRG; PAM sequence: CAG
attgataaacttgatatttg

SEQ ID NO: 16229 - DNA, 20 bp, Artificial Sequence
  Description of Artificial Sequence: Synthetic oligonucleotide
  Target: SCNA; (-) strand; PAM type: NRG; PAM sequence: CAG
aataatggaaaggtctaaac

SEQ ID NO: 16230 - DNA, 20 bp, Artificial Sequence
  Description of Artificial Sequence: Synthetic oligonucleotide
  Target: SCNA; (-) strand; PAM type: NRG; PAM sequence: AGG
ctgtcagaacaataatggaa

SEQ ID NO: 16231 - DNA, 20 bp, Artificial Sequence
  Description of Artificial Sequence: Synthetic oligonucleotide
  Target: SCNA; (-) strand; PAM type: NRG; PAM sequence: AAG
tctgtcagaacaataatgga

SEQ ID NO: 16232 - DNA, 20 bp, Artificial Sequence
  Description of Artificial Sequence: Synthetic oligonucleotide
  Target: SCNA; (-) strand; PAM type: NRG; PAM sequence: TGG
ttgttctgtcagaacaataa

SEQ ID NO: 16233 - DNA, 20 bp, Artificial Sequence
  Description of Artificial Sequence: Synthetic oligonucleotide
  Target: SCNA; (-) strand; PAM type: NRG; PAM sequence: CAG
cctcatagtctttgttctgt

SEQ ID NO: 16234 - DNA, 20 bp, Artificial Sequence
  Description of Artificial Sequence: Synthetic oligonucleotide
  Target: SCNA; (-) strand; PAM type: NRG; PAM sequence: TAG
atttatttctgacaacctca

SEQ ID NO: 16235 - DNA, 20 bp, Artificial Sequence
  Description of Artificial Sequence: Synthetic oligonucleotide
  Target: SCNA; (-) strand; PAM type: NRG; PAM sequence: AGG
aatgtctttgccacatattt

SEQ ID NO: 16236 - DNA, 20 bp, Artificial Sequence
  Description of Artificial Sequence: Synthetic oligonucleotide
  Target: SCNA; (-) strand; PAM type: NRG; PAM sequence: TAG
caatgtctttgccacatatt

SEQ ID NO: 16237 - DNA, 20 bp, Artificial Sequence
  Description of Artificial Sequence: Synthetic oligonucleotide
  Target: SCNA; (-) strand; PAM type: NRG; PAM sequence: AAG
ctattctaaaacaaacaaac

SEQ ID NO: 16238 - DNA, 20 bp, Artificial Sequence
  Description of Artificial Sequence: Synthetic oligonucleotide
  Target: SCNA; (-) strand; PAM type: NRG; PAM sequence: AAG
ttggttggtcaaaaggtttg

SEQ ID NO: 16239 - DNA, 20 bp, Artificial Sequence
  Description of Artificial Sequence: Synthetic oligonucleotide
  Target: SCNA; (-) strand; PAM type: NRG; PAM sequence: AGG
agctttcttggttggtcaaa

SEQ ID NO: 16240 - DNA, 20 bp, Artificial Sequence
  Description of Artificial Sequence: Synthetic oligonucleotide
  Target: SCNA; (-) strand; PAM type: NRG; PAM sequence: AAG
aagctttcttggttggtcaa

SEQ ID NO: 16241 - DNA, 20 bp, Artificial Sequence
  Description of Artificial Sequence: Synthetic oligonucleotide
  Target: SCNA; (-) strand; PAM type: NRG; PAM sequence: TGG
caggcaaaagctttcttggt

SEQ ID NO: 16242 - DNA, 20 bp, Artificial Sequence
  Description of Artificial Sequence: Synthetic oligonucleotide
  Target: SCNA; (-) strand; PAM type: NRG; PAM sequence: TGG
tgcccaggcaaaagctttct

SEQ ID NO: 16243 - DNA, 20 bp, Artificial Sequence
  Description of Artificial Sequence: Synthetic oligonucleotide
  Target: SCNA; (-) strand; PAM type: NRG; PAM sequence: AAG
taaagcctgtgcccaggcaa

SEQ ID NO: 16244 - DNA, 20 bp, Artificial Sequence
  Description of Artificial Sequence: Synthetic oligonucleotide
  Target: SCNA; (-) strand; PAM type: NRG; PAM sequence: AGG
gaaagataaagcctgtgccc

SEQ ID NO: 16245 - DNA, 20 bp, Artificial Sequence
  Description of Artificial Sequence: Synthetic oligonucleotide
  Target: SCNA; (-) strand; PAM type: NRG; PAM sequence: CAG
agaaagataaagcctgtgcc

SEQ ID NO: 16246 - DNA, 20 bp, Artificial Sequence
  Description of Artificial Sequence: Synthetic oligonucleotide
  Target: SCNA; (-) strand; PAM type: NRG; PAM sequence: AAG
gtgtaatgctaagaaagata

SEQ ID NO: 16247 - DNA, 20 bp, Artificial Sequence
  Description of Artificial Sequence: Synthetic oligonucleotide
  Target: SCNA; (-) strand; PAM type: NRG; PAM sequence: AAG
tctctagtgtaatgctaaga

SEQ ID NO: 16248 - DNA, 20 bp, Artificial Sequence
  Description of Artificial Sequence: Synthetic oligonucleotide
  Target: SCNA; (-) strand; PAM type: NRG; PAM sequence: AAG
agtatctctagtgtaatgct

SEQ ID NO: 16249 - DNA, 20 bp, Artificial Sequence
  Description of Artificial Sequence: Synthetic oligonucleotide
  Target: SCNA; (-) strand; PAM type: NRG; PAM sequence: TAG
ttgggagggattagtatctc

SEQ ID NO: 16250 - DNA, 20 bp, Artificial Sequence
  Description of Artificial Sequence: Synthetic oligonucleotide
  Target: SCNA; (-) strand; PAM type: NRG; PAM sequence: TAG
atgaaattgttgggagggat

SEQ ID NO: 16251 - DNA, 20 bp, Artificial Sequence
  Description of Artificial Sequence: Synthetic oligonucleotide
  Target: SCNA; (-) strand; PAM type: NRG; PAM sequence: GGG
tcataatgaaattgttggga

SEQ ID NO: 16252 - DNA, 20 bp, Artificial Sequence
  Description of Artificial Sequence: Synthetic oligonucleotide
  Target: SCNA; (-) strand; PAM type: NRG; PAM sequence: AGG
atcataatgaaattgttggg

SEQ ID NO: 16253 - DNA, 20 bp, Artificial Sequence
  Description of Artificial Sequence: Synthetic oligonucleotide
  Target: SCNA; (-) strand; PAM type: NRG; PAM sequence: GAG
aatcataatgaaattgttgg

SEQ ID NO: 16254 - DNA, 20 bp, Artificial Sequence
  Description of Artificial Sequence: Synthetic oligonucleotide
  Target: SCNA; (-) strand; PAM type: NRG; PAM sequence: GGG
ataatcataatgaaattgtt

SEQ ID NO: 16255 - DNA, 20 bp, Artificial Sequence
  Description of Artificial Sequence: Synthetic oligonucleotide
  Target: SCNA; (-) strand; PAM type: NRG; PAM sequence: TGG
gataatcataatgaaattgt

SEQ ID NO: 16256 - DNA, 20 bp, Artificial Sequence
  Description of Artificial Sequence: Synthetic oligonucleotide
  Target: SCNA; (-) strand; PAM type: NRG; PAM sequence: TGG
catctgccccatggacttaa

SEQ ID NO: 16257 - DNA, 20 bp, Artificial Sequence
  Description of Artificial Sequence: Synthetic oligonucleotide
  Target: SCNA; (-) strand; PAM type: NRG; PAM sequence: TGG
ataaataaacatctgcccca

SEQ ID NO: 16258 - DNA, 20 bp, Artificial Sequence
  Description of Artificial Sequence: Synthetic oligonucleotide
  Target: SCNA; (-) strand; PAM type: NRG; PAM sequence: TGG
attctctgtggaataaggca

SEQ ID NO: 16259 - DNA, 20 bp, Artificial Sequence
  Description of Artificial Sequence: Synthetic oligonucleotide
  Target: SCNA; (-) strand; PAM type: NRG; PAM sequence: AGG
tttaaattctctgtggaata

SEQ ID NO: 16260 - DNA, 20 bp, Artificial Sequence
  Description of Artificial Sequence: Synthetic oligonucleotide
  Target: SCNA; (-) strand; PAM type: NRG; PAM sequence: AAG
ctttaaattctctgtggaat

SEQ ID NO: 16261 - DNA, 20 bp, Artificial Sequence
  Description of Artificial Sequence: Synthetic oligonucleotide
  Target: SCNA; (-) strand; PAM type: NRG; PAM sequence: TGG
attcctctttaaattctctg

SEQ ID NO: 16262 - DNA, 20 bp, Artificial Sequence
  Description of Artificial Sequence: Synthetic oligonucleotide
  Target: SCNA; (-) strand; PAM type: NRG; PAM sequence: AGG
gatattcatttgatgcaatg

SEQ ID NO: 16263 - DNA, 20 bp, Artificial Sequence
  Description of Artificial Sequence: Synthetic oligonucleotide
  Target: SCNA; (-) strand; PAM type: NRG; PAM sequence: GAG
agatattcatttgatgcaat

SEQ ID NO: 16264 - DNA, 20 bp, Artificial Sequence
  Description of Artificial Sequence: Synthetic oligonucleotide
  Target: SCNA; (-) strand; PAM type: NRG; PAM sequence: AAG
tacaacattagacaaaataa

SEQ ID NO: 16265 - DNA, 20 bp, Artificial Sequence
  Description of Artificial Sequence: Synthetic oligonucleotide
  Target: SCNA; (-) strand; PAM type: NRG; PAM sequence: TAG
aagaaaaagaaatacaacat

SEQ ID NO: 16266 - DNA, 20 bp, Artificial Sequence
  Description of Artificial Sequence: Synthetic oligonucleotide
  Target: SCNA; (-) strand; PAM type: NRG; PAM sequence: AAG
tttagtgccaattaaagaaa

SEQ ID NO: 16267 - DNA, 20 bp, Artificial Sequence
  Description of Artificial Sequence: Synthetic oligonucleotide
  Target: SCNA; (-) strand; PAM type: NRG; PAM sequence: AAG
taaacatttagtgccaatta

SEQ ID NO: 16268 - DNA, 20 bp, Artificial Sequence
  Description of Artificial Sequence: Synthetic oligonucleotide
  Target: SCNA; (-) strand; PAM type: NRG; PAM sequence: TAG
aaagaatgcaaataaacatt

SEQ ID NO: 16269 - DNA, 20 bp, Artificial Sequence
  Description of Artificial Sequence: Synthetic oligonucleotide
  Target: SCNA; (-) strand; PAM type: NRG; PAM sequence: AAG
gatgccttaaaagtaattaa

SEQ ID NO: 16270 - DNA, 20 bp, Artificial Sequence
  Description of Artificial Sequence: Synthetic oligonucleotide
  Target: SCNA; (-) strand; PAM type: NRG; PAM sequence: AAG
agaaataatggatgccttaa

SEQ ID NO: 16271 - DNA, 20 bp, Artificial Sequence
  Description of Artificial Sequence: Synthetic oligonucleotide
  Target: SCNA; (-) strand; PAM type: NRG; PAM sequence: TGG
gtaatgtaatccagaaataa

SEQ ID NO: 16272 - DNA, 20 bp, Artificial Sequence
  Description of Artificial Sequence: Synthetic oligonucleotide
  Target: SCNA; (-) strand; PAM type: NRG; PAM sequence: CAG
gagagttcagtaatgtaatc

SEQ ID NO: 16273 - DNA, 20 bp, Artificial Sequence
  Description of Artificial Sequence: Synthetic oligonucleotide
  Target: SCNA; (-) strand; PAM type: NRG; PAM sequence: CAG
gtattgatttattgagagtt

SEQ ID NO: 16274 - DNA, 20 bp, Artificial Sequence
  Description of Artificial Sequence: Synthetic oligonucleotide
  Target: SCNA; (-) strand; PAM type: NRG; PAM sequence: GAG
actatgtattgatttattga

SEQ ID NO: 16275 - DNA, 20 bp, Artificial Sequence
  Description of Artificial Sequence: Synthetic oligonucleotide
  Target: SCNA; (-) strand; PAM type: NRG; PAM sequence: GAG
gaactatgtattgatttatt

SEQ ID NO: 16276 - DNA, 20 bp, Artificial Sequence
  Description of Artificial Sequence: Synthetic oligonucleotide
  Target: SCNA; (-) strand; PAM type: NRG; PAM sequence: CAG
aatgttgaaaaaattatata

SEQ ID NO: 16277 - DNA, 20 bp, Artificial Sequence
  Description of Artificial Sequence: Synthetic oligonucleotide
  Target: SCNA; (-) strand; PAM type: NRG; PAM sequence: AGG
caaatgaaccaaattaaaga

SEQ ID NO: 16278 - DNA, 20 bp, Artificial Sequence
  Description of Artificial Sequence: Synthetic oligonucleotide
  Target: SCNA; (-) strand; PAM type: NRG; PAM sequence: AAG
acaaatgaaccaaattaaag

SEQ ID NO: 16279 - DNA, 20 bp, Artificial Sequence
  Description of Artificial Sequence: Synthetic oligonucleotide
  Target: SCNA; (-) strand; PAM type: NRG; PAM sequence: AAG
gatacaaatgaaccaaatta

SEQ ID NO: 16280 - DNA, 20 bp, Artificial Sequence
  Description of Artificial Sequence: Synthetic oligonucleotide
  Target: SCNA; (-) strand; PAM type: NRG; PAM sequence: GAG
tactcaataaacagcaaagg

SEQ ID NO: 16281 - DNA, 20 bp, Artificial Sequence
  Description of Artificial Sequence: Synthetic oligonucleotide
  Target: SCNA; (-) strand; PAM type: NRG; PAM sequence: GGG
tctactcaataaacagcaaa

SEQ ID NO: 16282 - DNA, 20 bp, Artificial Sequence
  Description of Artificial Sequence: Synthetic oligonucleotide
  Target: SCNA; (-) strand; PAM type: NRG; PAM sequence: AGG
ttctactcaataaacagcaa

SEQ ID NO: 16283 - DNA, 20 bp, Artificial Sequence
  Description of Artificial Sequence: Synthetic oligonucleotide
  Target: SCNA; (-) strand; PAM type: NRG; PAM sequence: AAG
tttctactcaataaacagca

SEQ ID NO: 16284 - DNA, 20 bp, Artificial Sequence
  Description of Artificial Sequence: Synthetic oligonucleotide
  Target: SCNA; (-) strand; PAM type: NRG; PAM sequence: CAG
cagaatttctactcaataaa

SEQ ID NO: 16285 - DNA, 20 bp, Artificial Sequence
  Description of Artificial Sequence: Synthetic oligonucleotide
  Target: SCNA; (-) strand; PAM type: NRG; PAM sequence: CAG
tctccctttgctacaaaaat

SEQ ID NO: 16286 - DNA, 20 bp, Artificial Sequence
  Description of Artificial Sequence: Synthetic oligonucleotide
  Target: SCNA; (-) strand; PAM type: NRG; PAM sequence: CAG
gacaattgcagcattaaata

SEQ ID NO: 16287 - DNA, 20 bp, Artificial Sequence
  Description of Artificial Sequence: Synthetic oligonucleotide
  Target: SCNA; (-) strand; PAM type: NRG; PAM sequence: CAG
tgcaaccatagagacaattg

SEQ ID NO: 16288 - DNA, 20 bp, Artificial Sequence
  Description of Artificial Sequence: Synthetic oligonucleotide
  Target: SCNA; (-) strand; PAM type: NRG; PAM sequence: GAG
acctacacattgcaaccata

SEQ ID NO: 16289 - DNA, 20 bp, Artificial Sequence
  Description of Artificial Sequence: Synthetic oligonucleotide
  Target: SCNA; (-) strand; PAM type: NRG; PAM sequence: TAG
ccacctacacattgcaacca

SEQ ID NO: 16290 - DNA, 20 bp, Artificial Sequence
  Description of Artificial Sequence: Synthetic oligonucleotide
  Target: SCNA; (-) strand; PAM type: NRG; PAM sequence: AAG
cacacacacacaaataccac

SEQ ID NO: 16291 - DNA, 20 bp, Artificial Sequence
  Description of Artificial Sequence: Synthetic oligonucleotide
  Target: SCNA; (-) strand; PAM type: NRG; PAM sequence: AGG
ctcaacaaagtgataaaatt

SEQ ID NO: 16292 - DNA, 20 bp, Artificial Sequence
  Description of Artificial Sequence: Synthetic oligonucleotide
  Target: SCNA; (-) strand; PAM type: NRG; PAM sequence: TAG
cctcaacaaagtgataaaat

SEQ ID NO: 16293 - DNA, 20 bp, Artificial Sequence
  Description of Artificial Sequence: Synthetic oligonucleotide
  Target: SCNA; (-) strand; PAM type: NRG; PAM sequence: AAG
acaatttcagttcctcaaca

SEQ ID NO: 16294 - DNA, 20 bp, Artificial Sequence
  Description of Artificial Sequence: Synthetic oligonucleotide
  Target: SCNA; (-) strand; PAM type: NRG; PAM sequence: CAG
tgaatgtgtagccacaattt

SEQ ID NO: 16295 - DNA, 20 bp, Artificial Sequence
  Description of Artificial Sequence: Synthetic oligonucleotide
  Target: SCNA; (-) strand; PAM type: NRG; PAM sequence: TAG
aaatatttagagtgaatgtg

SEQ ID NO: 16296 - DNA, 20 bp, Artificial Sequence
  Description of Artificial Sequence: Synthetic oligonucleotide
  Target: SCNA; (-) strand; PAM type: NRG; PAM sequence: GAG
actgtgagacaaaatattta

SEQ ID NO: 16297 - DNA, 20 bp, Artificial Sequence
  Description of Artificial Sequence: Synthetic oligonucleotide
  Target: SCNA; (-) strand; PAM type: NRG; PAM sequence: TAG
ggactgtgagacaaaatatt

SEQ ID NO: 16298 - DNA, 20 bp, Artificial Sequence
  Description of Artificial Sequence: Synthetic oligonucleotide
  Target: SCNA; (-) strand; PAM type: NRG; PAM sequence: GAG
tgttgaagggaggggactgt

SEQ ID NO: 16299 - DNA, 20 bp, Artificial Sequence
  Description of Artificial Sequence: Synthetic oligonucleotide
  Target: SCNA; (-) strand; PAM type: NRG; PAM sequence: GGG
tatataattgttgaagggag

SEQ ID NO: 16300 - DNA, 20 bp, Artificial Sequence
  Description of Artificial Sequence: Synthetic oligonucleotide
  Target: SCNA; (-) strand; PAM type: NRG; PAM sequence: GGG
gtatataattgttgaaggga

SEQ ID NO: 16301 - DNA, 20 bp, Artificial Sequence
  Description of Artificial Sequence: Synthetic oligonucleotide
  Target: SCNA; (-) strand; PAM type: NRG; PAM sequence: AGG
tgtatataattgttgaaggg

SEQ ID NO: 16302 - DNA, 20 bp, Artificial Sequence
  Description of Artificial Sequence: Synthetic oligonucleotide
  Target: SCNA; (-) strand; PAM type: NRG; PAM sequence: GAG
ctgtatataattgttgaagg

SEQ ID NO: 16303 - DNA, 20 bp, Artificial Sequence
  Description of Artificial Sequence: Synthetic oligonucleotide
  Target: SCNA; (-) strand; PAM type: NRG; PAM sequence: GGG
tactgtatataattgttgaa

SEQ ID NO: 16304 - DNA, 20 bp, Artificial Sequence
  Description of Artificial Sequence: Synthetic oligonucleotide
  Target: SCNA; (-) strand; PAM type: NRG; PAM sequence: AGG
gtactgtatataattgttga

SEQ ID NO: 16305 - DNA, 20 bp, Artificial Sequence
  Description of Artificial Sequence: Synthetic oligonucleotide
  Target: SCNA; (-) strand; PAM type: NRG; PAM sequence: AAG
tgtactgtatataattgttg

SEQ ID NO: 16306 - DNA, 20 bp, Artificial Sequence
  Description of Artificial Sequence: Synthetic oligonucleotide
  Target: SCNA; (-) strand; PAM type: NRG; PAM sequence: TAG
tctcctgagcttccaacaaa

SEQ ID NO: 16307 - DNA, 20 bp, Artificial Sequence
  Description of Artificial Sequence: Synthetic oligonucleotide
  Target: SCNA; (-) strand; PAM type: NRG; PAM sequence: GAG
ttaaatgccctttttctcct

SEQ ID NO: 16308 - DNA, 20 bp, Artificial Sequence
  Description of Artificial Sequence: Synthetic oligonucleotide
  Target: SCNA; (-) strand; PAM type: NRG; PAM sequence: CAG
ggtaccatctactattaggt

SEQ ID NO: 16309 - DNA, 20 bp, Artificial Sequence
  Description of Artificial Sequence: Synthetic oligonucleotide
  Target: SCNA; (-) strand; PAM type: NRG; PAM sequence: AGG
cactggtaccatctactatt

SEQ ID NO: 16310 - DNA, 20 bp, Artificial Sequence
  Description of Artificial Sequence: Synthetic oligonucleotide
  Target: SCNA; (-) strand; PAM type: NRG; PAM sequence: TAG
tcactggtaccatctactat

SEQ ID NO: 16311 - DNA, 20 bp, Artificial Sequence
  Description of Artificial Sequence: Synthetic oligonucleotide
  Target: SCNA; (-) strand; PAM type: NRG; PAM sequence: TGG
tacgttgctcaagatctcac

SEQ ID NO: 16312 - DNA, 20 bp, Artificial Sequence
  Description of Artificial Sequence: Synthetic oligonucleotide
  Target: SCNA; (-) strand; PAM type: NRG; PAM sequence: AAG
ttgaaacatttacgttgctc

SEQ ID NO: 16313 - DNA, 20 bp, Artificial Sequence
  Description of Artificial Sequence: Synthetic oligonucleotide
  Target: SCNA; (-) strand; PAM type: NRG; PAM sequence: CAG
gttttattgttaccgttttt

SEQ ID NO: 16314 - DNA, 20 bp, Artificial Sequence
  Description of Artificial Sequence: Synthetic oligonucleotide
  Target: SCNA; (-) strand; PAM type: NRG; PAM sequence: TAG
tttatgtatatcatttcatt

SEQ ID NO: 16315 - DNA, 20 bp, Artificial Sequence
  Description of Artificial Sequence: Synthetic oligonucleotide
  Target: SCNA; (-) strand; PAM type: NRG; PAM sequence: AGG
gactgtgcatgggtcattat

SEQ ID NO: 16316 - DNA, 20 bp, Artificial Sequence
  Description of Artificial Sequence: Synthetic oligonucleotide
  Target: SCNA; (-) strand; PAM type: NRG; PAM sequence: TAG
tgactgtgcatgggtcatta

SEQ ID NO: 16317 - DNA, 20 bp, Artificial Sequence
  Description of Artificial Sequence: Synthetic oligonucleotide
  Target: SCNA; (-) strand; PAM type: NRG; PAM sequence: GGG
ttgatattatgactgtgcat

SEQ ID NO: 16318 - DNA, 20 bp, Artificial Sequence
  Description of Artificial Sequence: Synthetic oligonucleotide
  Target: SCNA; (-) strand; PAM type: NRG; PAM sequence: TGG
tttgatattatgactgtgca

SEQ ID NO: 16319 - DNA, 20 bp, Artificial Sequence
  Description of Artificial Sequence: Synthetic oligonucleotide
  Target: SCNA; (-) strand; PAM type: NRG; PAM sequence: CAG
tctagcacatagtagatgct

SEQ ID NO: 16320 - DNA, 20 bp, Artificial Sequence
  Description of Artificial Sequence: Synthetic oligonucleotide
  Target: SCNA; (-) strand; PAM type: NRG; PAM sequence: TAG
taaaataatctagcacatag

SEQ ID NO: 16321 - DNA, 20 bp, Artificial Sequence
  Description of Artificial Sequence: Synthetic oligonucleotide
  Target: SCNA; (-) strand; PAM type: NRG; PAM sequence: TAG
gcttaaaataatctagcaca

SEQ ID NO: 16322 - DNA, 20 bp, Artificial Sequence
  Description of Artificial Sequence: Synthetic oligonucleotide
  Target: SCNA; (-) strand; PAM type: NRG; PAM sequence: TAG
caaaagtgcttaaaataatc

SEQ ID NO: 16323 - DNA, 20 bp, Artificial Sequence
  Description of Artificial Sequence: Synthetic oligonucleotide
  Target: SCNA; (-) strand; PAM type: NRG; PAM sequence: AAG
caaaatacttatattttcaa

SEQ ID NO: 16324 - DNA, 20 bp, Artificial Sequence
  Description of Artificial Sequence: Synthetic oligonucleotide
  Target: SCNA; (-) strand; PAM type: NRG; PAM sequence: AAG
aacaacaatataatcttatt

SEQ ID NO: 16325 - DNA, 20 bp, Artificial Sequence
  Description of Artificial Sequence: Synthetic oligonucleotide
  Target: SCNA; (-) strand; PAM type: NRG; PAM sequence: AAG
aaaaaaataaaattagcaat

SEQ ID NO: 16326 - DNA, 20 bp, Artificial Sequence
  Description of Artificial Sequence: Synthetic oligonucleotide
  Target: SCNA; (-) strand; PAM type: NRG; PAM sequence: TAG
ttttcttaaaaaaataaaat

SEQ ID NO: 16327 - DNA, 20 bp, Artificial Sequence
  Description of Artificial Sequence: Synthetic oligonucleotide
  Target: SCNA; (-) strand; PAM type: NRG; PAM sequence: AGG
tttcgattctttccaaaaaa

SEQ ID NO: 16328 - DNA, 20 bp, Artificial Sequence
  Description of Artificial Sequence: Synthetic oligonucleotide
  Target: SCNA; (-) strand; PAM type: NRG; PAM sequence: AAG
gtttcgattctttccaaaaa

SEQ ID NO: 16329 - DNA, 20 bp, Artificial Sequence
  Description of Artificial Sequence: Synthetic oligonucleotide
  Target: SCNA; (-) strand; PAM type: NRG; PAM sequence: TAG
tttttaaatagttgggtttt

SEQ ID NO: 16330 - DNA, 20 bp, Artificial Sequence
  Description of Artificial Sequence: Synthetic oligonucleotide
  Target: SCNA; (-) strand; PAM type: NRG; PAM sequence: GGG
tttccattttttaaatagtt

SEQ ID NO: 16331 - DNA, 20 bp, Artificial Sequence
  Description of Artificial Sequence: Synthetic oligonucleotide
  Target: SCNA; (-) strand; PAM type: NRG; PAM sequence: TGG
gtttccattttttaaatagt

SEQ ID NO: 16332 - DNA, 20 bp, Artificial Sequence
  Description of Artificial Sequence: Synthetic oligonucleotide
  Target: SCNA; (-) strand; PAM type: NRG; PAM sequence: TAG
aaaagtttccattttttaaa

SEQ ID NO: 16333 - DNA, 20 bp, Artificial Sequence
  Description of Artificial Sequence: Synthetic oligonucleotide
  Target: SCNA; (-) strand; PAM type: NRG; PAM sequence: AAG
gagcctccgttcccggccaa

SEQ ID NO: 16334 - DNA, 20 bp, Artificial Sequence
  Description of Artificial Sequence: Synthetic oligonucleotide
  Target: SCNA; (-) strand; PAM type: NRG; PAM sequence: CGG
taggtgtgagcctccgttcc

SEQ ID NO: 16335 - DNA, 20 bp, Artificial Sequence
  Description of Artificial Sequence: Synthetic oligonucleotide
  Target: SCNA; (-) strand; PAM type: NRG; PAM sequence: GAG
agtgctgagattataggtgt

SEQ ID NO: 16336 - DNA, 20 bp, Artificial Sequence
  Description of Artificial Sequence: Synthetic oligonucleotide
  Target: SCNA; (-) strand; PAM type: NRG; PAM sequence: AGG
tcccaaagtgctgagattat

SEQ ID NO: 16337 - DNA, 20 bp, Artificial Sequence
  Description of Artificial Sequence: Synthetic oligonucleotide
  Target: SCNA; (-) strand; PAM type: NRG; PAM sequence: TAG
ctcccaaagtgctgagatta

SEQ ID NO: 16338 - DNA, 20 bp, Artificial Sequence
  Description of Artificial Sequence: Synthetic oligonucleotide
  Target: SCNA; (-) strand; PAM type: NRG; PAM sequence: GAG
attcggcctcccaaagtgct

SEQ ID NO: 16339 - DNA, 20 bp, Artificial Sequence
  Description of Artificial Sequence: Synthetic oligonucleotide
  Target: SCNA; (-) strand; PAM type: NRG; PAM sequence: AAG
tccgcccattcggcctccca

SEQ ID NO: 16340 - DNA, 20 bp, Artificial Sequence
  Description of Artificial Sequence: Synthetic oligonucleotide
  Target: SCNA; (-) strand; PAM type: NRG; PAM sequence: CGG
gaccttgtgatccgcccatt

SEQ ID NO: 16341 - DNA, 20 bp, Artificial Sequence
  Description of Artificial Sequence: Synthetic oligonucleotide
  Target: SCNA; (-) strand; PAM type: NRG; PAM sequence: TGG
tttcaccacgttggccagga

SEQ ID NO: 16342 - DNA, 20 bp, Artificial Sequence
  Description of Artificial Sequence: Synthetic oligonucleotide
  Target: SCNA; (-) strand; PAM type: NRG; PAM sequence: AGG
ggagtttcaccacgttggcc

SEQ ID NO: 16343 - DNA, 20 bp, Artificial Sequence
  Description of Artificial Sequence: Synthetic oligonucleotide
  Target: SCNA; (-) strand; PAM type: NRG; PAM sequence: CAG
cggagtttcaccacgttggc

SEQ ID NO: 16344 - DNA, 20 bp, Artificial Sequence
  Description of Artificial Sequence: Synthetic oligonucleotide
  Target: SCNA; (-) strand; PAM type: NRG; PAM sequence: TGG
gagacggagtttcaccacgt

SEQ ID NO: 16345 - DNA, 20 bp, Artificial Sequence
  Description of Artificial Sequence: Synthetic oligonucleotide
  Target: SCNA; (-) strand; PAM type: NRG; PAM sequence: GAG
ttgtatttttagtagagacg

SEQ ID NO: 16346 - DNA, 20 bp, Artificial Sequence
  Description of Artificial Sequence: Synthetic oligonucleotide
  Target: SCNA; (-) strand; PAM type: NRG; PAM sequence: CGG
ttttgtatttttagtagaga

SEQ ID NO: 16347 - DNA, 20 bp, Artificial Sequence
  Description of Artificial Sequence: Synthetic oligonucleotide
  Target: SCNA; (-) strand; PAM type: NRG; PAM sequence: GAG
taacttttgtatttttagta

SEQ ID NO: 16348 - DNA, 20 bp, Artificial Sequence
  Description of Artificial Sequence: Synthetic oligonucleotide
  Target: SCNA; (-) strand; PAM type: NRG; PAM sequence: TAG
gctaacttttgtatttttag

SEQ ID NO: 16349 - DNA, 20 bp, Artificial Sequence
  Description of Artificial Sequence: Synthetic oligonucleotide
  Target: SCNA; (-) strand; PAM type: NRG; PAM sequence: TAG
ccagctaacttttgtatttt

SEQ ID NO: 16350 - DNA, 20 bp, Artificial Sequence
  Description of Artificial Sequence: Synthetic oligonucleotide
  Target: SCNA; (-) strand; PAM type: NRG; PAM sequence: CAG
caggcatgtgccaccatgcc

SEQ ID NO: 16351 - DNA, 20 bp, Artificial Sequence
  Description of Artificial Sequence: Synthetic oligonucleotide
  Target: SCNA; (-) strand; PAM type: NRG; PAM sequence: AGG
tcccgagtagctgggactac

SEQ ID NO: 16352 - DNA, 20 bp, Artificial Sequence
  Description of Artificial Sequence: Synthetic oligonucleotide
  Target: SCNA; (-) strand; PAM type: NRG; PAM sequence: CAG
ctcccgagtagctgggacta

SEQ ID NO: 16353 - DNA, 20 bp, Artificial Sequence
  Description of Artificial Sequence: Synthetic oligonucleotide
  Target: SCNA; (-) strand; PAM type: NRG; PAM sequence: GGG
cctcagcctcccgagtagct

SEQ ID NO: 16354 - DNA, 20 bp, Artificial Sequence
  Description of Artificial Sequence: Synthetic oligonucleotide
  Target: SCNA; (-) strand; PAM type: NRG; PAM sequence: TGG
gcctcagcctcccgagtagc

SEQ ID NO: 16355 - DNA, 20 bp, Artificial Sequence
  Description of Artificial Sequence: Synthetic oligonucleotide
  Target: SCNA; (-) strand; PAM type: NRG; PAM sequence: TAG
ttctgcctcagcctcccgag

SEQ ID NO: 16356 - DNA, 20 bp, Artificial Sequence
  Description of Artificial Sequence: Synthetic oligonucleotide
  Target: SCNA; (-) strand; PAM type: NRG; PAM sequence: GAG
ttcttctgcctcagcctccc

SEQ ID NO: 16357 - DNA, 20 bp, Artificial Sequence
  Description of Artificial Sequence: Synthetic oligonucleotide
  Target: SCNA; (-) strand; PAM type: NRG; PAM sequence: CAG
ttccagcgattcttctgcct

SEQ ID NO: 16358 - DNA, 20 bp, Artificial Sequence
  Description of Artificial Sequence: Synthetic oligonucleotide
  Target: SCNA; (-) strand; PAM type: NRG; PAM sequence: CAG
aacctccgcctcctgggttc

SEQ ID NO: 16359 - DNA, 20 bp, Artificial Sequence
  Description of Artificial Sequence: Synthetic oligonucleotide
  Target: SCNA; (-) strand; PAM type: NRG; PAM sequence: GGG
cactgcaacctccgcctcct

SEQ ID NO: 16360 - DNA, 20 bp, Artificial Sequence
  Description of Artificial Sequence: Synthetic oligonucleotide
  Target: SCNA; (-) strand; PAM type: NRG; PAM sequence: TGG
tcactgcaacctccgcctcc

SEQ ID NO: 16361 - DNA, 20 bp, Artificial Sequence
  Description of Artificial Sequence: Synthetic oligonucleotide
  Target: SCNA; (-) strand; PAM type: NRG; PAM sequence: CGG
ggagtgcagtggtgctgtct

SEQ ID NO: 16362 - DNA, 20 bp, Artificial Sequence
  Description of Artificial Sequence: Synthetic oligonucleotide
  Target: SCNA; (-) strand; PAM type: NRG; PAM sequence: TGG
gtcgccagtctggagtgcag

SEQ ID NO: 16363 - DNA, 20 bp, Artificial Sequence
  Description of Artificial Sequence: Synthetic oligonucleotide
  Target: SCNA; (-) strand; PAM type: NRG; PAM sequence: CAG
tctgtcgccagtctggagtg

SEQ ID NO: 16364 - DNA, 20 bp, Artificial Sequence
  Description of Artificial Sequence: Synthetic oligonucleotide
  Target: SCNA; (-) strand; PAM type: NRG; PAM sequence: GAG
ctcactctgtcgccagtctg

SEQ ID NO: 16365 - DNA, 20 bp, Artificial Sequence
  Description of Artificial Sequence: Synthetic oligonucleotide
  Target: SCNA; (-) strand; PAM type: NRG; PAM sequence: TGG
gtctcactctgtcgccagtc

SEQ ID NO: 16366 - DNA, 20 bp, Artificial Sequence
  Description of Artificial Sequence: Synthetic oligonucleotide
  Target: SCNA; (-) strand; PAM type: NRG; PAM sequence: CAG
atggagtctcactctgtcgc

SEQ ID NO: 16367 - DNA, 20 bp, Artificial Sequence
  Description of Artificial Sequence: Synthetic oligonucleotide
  Target: SCNA; (-) strand; PAM type: NRG; PAM sequence: GAG
cttttttttttttttagatg

SEQ ID NO: 16368 - DNA, 20 bp, Artificial Sequence
  Description of Artificial Sequence: Synthetic oligonucleotide
  Target: SCNA; (-) strand; PAM type: NRG; PAM sequence: TGG
tccttttttttttttttaga

SEQ ID NO: 16369 - DNA, 20 bp, Artificial Sequence
  Description of Artificial Sequence: Synthetic oligonucleotide
  Target: SCNA; (-) strand; PAM type: NRG; PAM sequence: TAG
aggttccttttttttttttt

SEQ ID NO: 16370 - DNA, 20 bp, Artificial Sequence
  Description of Artificial Sequence: Synthetic oligonucleotide
  Target: SCNA; (-) strand; PAM type: NRG; PAM sequence: AGG
agcaaacgaagtaaggcaaa

SEQ ID NO: 16371 - DNA, 20 bp, Artificial Sequence
  Description of Artificial Sequence: Synthetic oligonucleotide
  Target: SCNA; (-) strand; PAM type: NRG; PAM sequence: AAG
tagcaaacgaagtaaggcaa

SEQ ID NO: 16372 - DNA, 20 bp, Artificial Sequence
  Description of Artificial Sequence: Synthetic oligonucleotide
  Target: SCNA; (-) strand; PAM type: NRG; PAM sequence: AGG
tgtagctagcaaacgaagta

SEQ ID NO: 16373 - DNA, 20 bp, Artificial Sequence
  Description of Artificial Sequence: Synthetic oligonucleotide
  Target: SCNA; (-) strand; PAM type: NRG; PAM sequence: AAG
atgtagctagcaaacgaagt

SEQ ID NO: 16374 - DNA, 20 bp, Artificial Sequence
  Description of Artificial Sequence: Synthetic oligonucleotide
  Target: SCNA; (-) strand; PAM type: NRG; PAM sequence: AAG
ttgaatgtagctagcaaacg

SEQ ID NO: 16375 - DNA, 20 bp, Artificial Sequence
  Description of Artificial Sequence: Synthetic oligonucleotide
  Target: SCNA; (-) strand; PAM type: NRG; PAM sequence: TAG
attgcagacttgaatgtagc

SEQ ID NO: 16376 - DNA, 20 bp, Artificial Sequence
  Description of Artificial Sequence: Synthetic oligonucleotide
  Target: SCNA; (-) strand; PAM type: NRG; PAM sequence: TAG
cttaattgcagacttgaatg

SEQ ID NO: 16377 - DNA, 20 bp, Artificial Sequence
  Description of Artificial Sequence: Synthetic oligonucleotide
  Target: SCNA; (-) strand; PAM type: NRG; PAM sequence: CAG
caaaacaccgagcttaattg

SEQ ID NO: 16378 - DNA, 20 bp, Artificial Sequence
  Description of Artificial Sequence: Synthetic oligonucleotide
  Target: SCNA; (-) strand; PAM type: NRG; PAM sequence: GAG
tttgagaaaggcaaaacacc

SEQ ID NO: 16379 - DNA, 20 bp, Artificial Sequence
  Description of Artificial Sequence: Synthetic oligonucleotide
  Target: SCNA; (-) strand; PAM type: NRG; PAM sequence: AGG
acctgtgcacagtttgagaa

SEQ ID NO: 16380 - DNA, 20 bp, Artificial Sequence
  Description of Artificial Sequence: Synthetic oligonucleotide
  Target: SCNA; (-) strand; PAM type: NRG; PAM sequence: AAG
gacctgtgcacagtttgaga

SEQ ID NO: 16381 - DNA, 20 bp, Artificial Sequence
  Description of Artificial Sequence: Synthetic oligonucleotide
  Target: SCNA; (-) strand; PAM type: NRG; PAM sequence: GAG
agaggacctgtgcacagttt

SEQ ID NO: 16382 - DNA, 20 bp, Artificial Sequence
  Description of Artificial Sequence: Synthetic oligonucleotide
  Target: SCNA; (-) strand; PAM type: NRG; PAM sequence: CAG
caaacaagaggacctgtgca

SEQ ID NO: 16383 - DNA, 20 bp, Artificial Sequence
  Description of Artificial Sequence: Synthetic oligonucleotide
  Target: SCNA; (-) strand; PAM type: NRG; PAM sequence: AGG
agagaaggggaacaaacaag

SEQ ID NO: 16384 - DNA, 20 bp, Artificial Sequence
  Description of Artificial Sequence: Synthetic oligonucleotide
  Target: SCNA; (-) strand; PAM type: NRG; PAM sequence: GAG
gagagaaggggaacaaacaa

SEQ ID NO: 16385 - DNA, 20 bp, Artificial Sequence
  Description of Artificial Sequence: Synthetic oligonucleotide
  Target: SCNA; (-) strand; PAM type: NRG; PAM sequence: AAG
cagagagaaggggaacaaac

SEQ ID NO: 16386 - DNA, 20 bp, Artificial Sequence
  Description of Artificial Sequence: Synthetic oligonucleotide
  Target: SCNA; (-) strand; PAM type: NRG; PAM sequence: GGG
tcctaggcaacagagagaag

SEQ ID NO: 16387 - DNA, 20 bp, Artificial Sequence
  Description of Artificial Sequence: Synthetic oligonucleotide
  Target: SCNA; (-) strand; PAM type: NRG; PAM sequence: GGG
ttcctaggcaacagagagaa

SEQ ID NO: 16388 - DNA, 20 bp, Artificial Sequence
  Description of Artificial Sequence: Synthetic oligonucleotide
  Target: SCNA; (-) strand; PAM type: NRG; PAM sequence: AGG
attcctaggcaacagagaga

SEQ ID NO: 16389 - DNA, 20 bp, Artificial Sequence
  Description of Artificial Sequence: Synthetic oligonucleotide
  Target: SCNA; (-) strand; PAM type: NRG; PAM sequence: AAG
tattcctaggcaacagagag

SEQ ID NO: 16390 - DNA, 20 bp, Artificial Sequence
  Description of Artificial Sequence: Synthetic oligonucleotide
  Target: SCNA; (-) strand; PAM type: NRG; PAM sequence: GAG
ctgtattcctaggcaacaga

SEQ ID NO: 16391 - DNA, 20 bp, Artificial Sequence
  Description of Artificial Sequence: Synthetic oligonucleotide
  Target: SCNA; (-) strand; PAM type: NRG; PAM sequence: GAG
ggctgtattcctaggcaaca

SEQ ID NO: 16392 - DNA, 20 bp, Artificial Sequence
  Description of Artificial Sequence: Synthetic oligonucleotide
  Target: SCNA; (-) strand; PAM type: NRG; PAM sequence: CAG
ttggctgtattcctaggcaa

SEQ ID NO: 16393 - DNA, 20 bp, Artificial Sequence
  Description of Artificial Sequence: Synthetic oligonucleotide
  Target: SCNA; (-) strand; PAM type: NRG; PAM sequence: AGG
aagtttttggctgtattcct

SEQ ID NO: 16394 - DNA, 20 bp, Artificial Sequence
  Description of Artificial Sequence: Synthetic oligonucleotide
  Target: SCNA; (-) strand; PAM type: NRG; PAM sequence: TAG
caagtttttggctgtattcc

SEQ ID NO: 16395 - DNA, 20 bp, Artificial Sequence
  Description of Artificial Sequence: Synthetic oligonucleotide
  Target: SCNA; (-) strand; PAM type: NRG; PAM sequence: TGG
tcatctattactcaagtttt

SEQ ID NO: 16396 - DNA, 20 bp, Artificial Sequence
  Description of Artificial Sequence: Synthetic oligonucleotide
  Target: SCNA; (-) strand; PAM type: NRG; PAM sequence: AAG
ccatctatcatctattactc

SEQ ID NO: 16397 - DNA, 20 bp, Artificial Sequence
  Description of Artificial Sequence: Synthetic oligonucleotide
  Target: SCNA; (-) strand; PAM type: NRG; PAM sequence: CAG
cactaggatgtgcttagtga

SEQ ID NO: 16398 - DNA, 20 bp, Artificial Sequence
  Description of Artificial Sequence: Synthetic oligonucleotide
  Target: SCNA; (-) strand; PAM type: NRG; PAM sequence: TAG
ctatgtcactaggatgtgct

SEQ ID NO: 16399 - DNA, 20 bp, Artificial Sequence
  Description of Artificial Sequence: Synthetic oligonucleotide
  Target: SCNA; (-) strand; PAM type: NRG; PAM sequence: AGG
tgcttcttatctatgtcact

SEQ ID NO: 16400 - DNA, 20 bp, Artificial Sequence
  Description of Artificial Sequence: Synthetic oligonucleotide
  Target: SCNA; (-) strand; PAM type: NRG; PAM sequence: TAG
ttgcttcttatctatgtcac

SEQ ID NO: 16401 - DNA, 20 bp, Artificial Sequence
  Description of Artificial Sequence: Synthetic oligonucleotide
  Target: SCNA; (-) strand; PAM type: NRG; PAM sequence: TAG
agtttgcacctataattttg

SEQ ID NO: 16402 - DNA, 20 bp, Artificial Sequence
  Description of Artificial Sequence: Synthetic oligonucleotide
  Target: SCNA; (-) strand; PAM type: NRG; PAM sequence: TAG
accaattaaaacacaacttg

SEQ ID NO: 16403 - DNA, 20 bp, Artificial Sequence
  Description of Artificial Sequence: Synthetic oligonucleotide
  Target: SCNA; (-) strand; PAM type: NRG; PAM sequence: AAG
ttcacagttcttctgcttat

SEQ ID NO: 16404 - DNA, 20 bp, Artificial Sequence
  Description of Artificial Sequence: Synthetic oligonucleotide
  Target: SCNA; (-) strand; PAM type: NRG; PAM sequence: CAG
acaaaatgttagatttttca

SEQ ID NO: 16405 - DNA, 20 bp, Artificial Sequence
  Description of Artificial Sequence: Synthetic oligonucleotide
  Target: SCNA; (-) strand; PAM type: NRG; PAM sequence: TAG
ttgcaagtaggacaaaatgt

SEQ ID NO: 16406 - DNA, 20 bp, Artificial Sequence
  Description of Artificial Sequence: Synthetic oligonucleotide
  Target: SCNA; (-) strand; PAM type: NRG; PAM sequence: AGG
agactggcaggcttgcaagt

SEQ ID NO: 16407 - DNA, 20 bp, Artificial Sequence
  Description of Artificial Sequence: Synthetic oligonucleotide
  Target: SCNA; (-) strand; PAM type: NRG; PAM sequence: TAG
aagactggcaggcttgcaag

SEQ ID NO: 16408 - DNA, 20 bp, Artificial Sequence
  Description of Artificial Sequence: Synthetic oligonucleotide
  Target: SCNA; (-) strand; PAM type: NRG; PAM sequence: AAG
caaaagactggcaggcttgc

SEQ ID NO: 16409 - DNA, 20 bp, Artificial Sequence
  Description of Artificial Sequence: Synthetic oligonucleotide
  Target: SCNA; (-) strand; PAM type: NRG; PAM sequence: AGG
ccagcactcaaaagactggc

SEQ ID NO: 16410 - DNA, 20 bp, Artificial Sequence
  Description of Artificial Sequence: Synthetic oligonucleotide
  Target: SCNA; (-) strand; PAM type: NRG; PAM sequence: CAG
cccagcactcaaaagactgg

SEQ ID NO: 16411 - DNA, 20 bp, Artificial Sequence
  Description of Artificial Sequence: Synthetic oligonucleotide
  Target: SCNA; (-) strand; PAM type: NRG; PAM sequence: TGG
ttgcccagcactcaaaagac

SEQ ID NO: 16412 - DNA, 20 bp, Artificial Sequence
  Description of Artificial Sequence: Synthetic oligonucleotide
  Target: SCNA; (-) strand; PAM type: NRG; PAM sequence: AAG
tgtctttgcccagcactcaa

SEQ ID NO: 16413 - DNA, 20 bp, Artificial Sequence
  Description of Artificial Sequence: Synthetic oligonucleotide
  Target: SCNA; (-) strand; PAM type: NRG; PAM sequence: CAG
agcactattgtgtctttgcc

SEQ ID NO: 16414 - DNA, 20 bp, Artificial Sequence
  Description of Artificial Sequence: Synthetic oligonucleotide
  Target: SCNA; (-) strand; PAM type: NRG; PAM sequence: CAG
aaagttaattgtctctgacc

SEQ ID NO: 16415 - DNA, 20 bp, Artificial Sequence
  Description of Artificial Sequence: Synthetic oligonucleotide
  Target: SCNA; (-) strand; PAM type: NRG; PAM sequence: AAG
tgctattaatgtgagtagta

SEQ ID NO: 16416 - DNA, 20 bp, Artificial Sequence
  Description of Artificial Sequence: Synthetic oligonucleotide
  Target: SCNA; (-) strand; PAM type: NRG; PAM sequence: TAG
gctaatgctattaatgtgag

SEQ ID NO: 16417 - DNA, 20 bp, Artificial Sequence
  Description of Artificial Sequence: Synthetic oligonucleotide
  Target: SCNA; (-) strand; PAM type: NRG; PAM sequence: GAG
cttgctaatgctattaatgt

SEQ ID NO: 16418 - DNA, 20 bp, Artificial Sequence
  Description of Artificial Sequence: Synthetic oligonucleotide
  Target: SCNA; (-) strand; PAM type: NRG; PAM sequence: AAG
gcggcttgaggaatcagtgc

SEQ ID NO: 16419 - DNA, 20 bp, Artificial Sequence
  Description of Artificial Sequence: Synthetic oligonucleotide
  Target: SCNA; (-) strand; PAM type: NRG; PAM sequence: CAG
ggaattgcggcttgaggaat

SEQ ID NO: 16420 - DNA, 20 bp, Artificial Sequence
  Description of Artificial Sequence: Synthetic oligonucleotide
  Target: SCNA; (-) strand; PAM type: NRG; PAM sequence: AGG
tctgtgggaattgcggcttg

SEQ ID NO: 16421 - DNA, 20 bp, Artificial Sequence
  Description of Artificial Sequence: Synthetic oligonucleotide
  Target: SCNA; (-) strand; PAM type: NRG; PAM sequence: GAG
ttctgtgggaattgcggctt

SEQ ID NO: 16422 - DNA, 20 bp, Artificial Sequence
  Description of Artificial Sequence: Synthetic oligonucleotide
  Target: SCNA; (-) strand; PAM type: NRG; PAM sequence: CGG
gagcttttctgtgggaattg

SEQ ID NO: 16423 - DNA, 20 bp, Artificial Sequence
  Description of Artificial Sequence: Synthetic oligonucleotide
  Target: SCNA; (-) strand; PAM type: NRG; PAM sequence: GGG
tgtcacctgagcttttctgt

SEQ ID NO: 16424 - DNA, 20 bp, Artificial Sequence
  Description of Artificial Sequence: Synthetic oligonucleotide
  Target: SCNA; (-) strand; PAM type: NRG; PAM sequence: TGG
gtgtcacctgagcttttctg

SEQ ID NO: 16425 - DNA, 20 bp, Artificial Sequence
  Description of Artificial Sequence: Synthetic oligonucleotide
  Target: SCNA; (-) strand; PAM type: NRG; PAM sequence: GAG
tgagcatgtaggtgtcacct

SEQ ID NO: 16426 - DNA, 20 bp, Artificial Sequence
  Description of Artificial Sequence: Synthetic oligonucleotide
  Target: SCNA; (-) strand; PAM type: NRG; PAM sequence: AGG
atgcaacccactgagcatgt

SEQ ID NO: 16427 - DNA, 20 bp, Artificial Sequence
  Description of Artificial Sequence: Synthetic oligonucleotide
  Target: SCNA; (-) strand; PAM type: NRG; PAM sequence: TAG
aatgcaacccactgagcatg

SEQ ID NO: 16428 - DNA, 20 bp, Artificial Sequence
  Description of Artificial Sequence: Synthetic oligonucleotide
  Target: SCNA; (-) strand; PAM type: NRG; PAM sequence: GAG
cttttctaatgcaacccact

SEQ ID NO: 16429 - DNA, 20 bp, Artificial Sequence
  Description of Artificial Sequence: Synthetic oligonucleotide
  Target: SCNA; (-) strand; PAM type: NRG; PAM sequence: GAG
ataaaatatccatgtttcct

SEQ ID NO: 16430 - DNA, 20 bp, Artificial Sequence
  Description of Artificial Sequence: Synthetic oligonucleotide
  Target: SCNA; (-) strand; PAM type: NRG; PAM sequence: TGG
aagcaaagggacatctttac

SEQ ID NO: 16431 - DNA, 20 bp, Artificial Sequence
  Description of Artificial Sequence: Synthetic oligonucleotide
  Target: SCNA; (-) strand; PAM type: NRG; PAM sequence: GGG
gtgcctctttctaaagcaaa

SEQ ID NO: 16432 - DNA, 20 bp, Artificial Sequence
  Description of Artificial Sequence: Synthetic oligonucleotide
  Target: SCNA; (-) strand; PAM type: NRG; PAM sequence: AGG
agtgcctctttctaaagcaa

SEQ ID NO: 16433 - DNA, 20 bp, Artificial Sequence
  Description of Artificial Sequence: Synthetic oligonucleotide
  Target: SCNA; (-) strand; PAM type: NRG; PAM sequence: AAG
tagtgcctctttctaaagca

SEQ ID NO: 16434 - DNA, 20 bp, Artificial Sequence
  Description of Artificial Sequence: Synthetic oligonucleotide
  Target: SCNA; (-) strand; PAM type: NRG; PAM sequence: AAG
agaggtagtgcctctttcta

SEQ ID NO: 16435 - DNA, 20 bp, Artificial Sequence
  Description of Artificial Sequence: Synthetic oligonucleotide
  Target: SCNA; (-) strand; PAM type: NRG; PAM sequence: TAG
cttgcagccttggatagagg

SEQ ID NO: 16436 - DNA, 20 bp, Artificial Sequence
  Description of Artificial Sequence: Synthetic oligonucleotide
  Target: SCNA; (-) strand; PAM type: NRG; PAM sequence: AGG
gtgcttgcagccttggatag

SEQ ID NO: 16437 - DNA, 20 bp, Artificial Sequence
  Description of Artificial Sequence: Synthetic oligonucleotide
  Target: SCNA; (-) strand; PAM type: NRG; PAM sequence: GAG
tgtgcttgcagccttggata

SEQ ID NO: 16438 - DNA, 20 bp, Artificial Sequence
  Description of Artificial Sequence: Synthetic oligonucleotide
  Target: SCNA; (-) strand; PAM type: NRG; PAM sequence: TAG
ggtgtgcttgcagccttgga

SEQ ID NO: 16439 - DNA, 20 bp, Artificial Sequence
  Description of Artificial Sequence: Synthetic oligonucleotide
  Target: SCNA; (-) strand; PAM type: NRG; PAM sequence: TGG
ggcaggtgtgcttgcagcct

SEQ ID NO: 16440 - DNA, 20 bp, Artificial Sequence
  Description of Artificial Sequence: Synthetic oligonucleotide
  Target: SCNA; (-) strand; PAM type: NRG; PAM sequence: CAG
acaaaaggcaggtgtgcttg

SEQ ID NO: 16441 - DNA, 20 bp, Artificial Sequence
  Description of Artificial Sequence: Synthetic oligonucleotide
  Target: SCNA; (-) strand; PAM type: NRG; PAM sequence: AGG
ctccttctaaaacaaaaggc

SEQ ID NO: 16442 - DNA, 20 bp, Artificial Sequence
  Description of Artificial Sequence: Synthetic oligonucleotide
  Target: SCNA; (-) strand; PAM type: NRG; PAM sequence: CAG
tctccttctaaaacaaaagg

SEQ ID NO: 16443 - DNA, 20 bp, Artificial Sequence
  Description of Artificial Sequence: Synthetic oligonucleotide
  Target: SCNA; (-) strand; PAM type: NRG; PAM sequence: AGG
atttctccttctaaaacaaa

SEQ ID NO: 16444 - DNA, 20 bp, Artificial Sequence
  Description of Artificial Sequence: Synthetic oligonucleotide
  Target: SCNA; (-) strand; PAM type: NRG; PAM sequence: AAG
catttctccttctaaaacaa

SEQ ID NO: 16445 - DNA, 20 bp, Artificial Sequence
  Description of Artificial Sequence: Synthetic oligonucleotide
  Target: SCNA; (-) strand; PAM type: NRG; PAM sequence: TAG
tagtgaacagccttggaaga

SEQ ID NO: 16446 - DNA, 20 bp, Artificial Sequence
  Description of Artificial Sequence: Synthetic oligonucleotide
  Target: SCNA; (-) strand; PAM type: NRG; PAM sequence: AAG
catatagtgaacagccttgg

SEQ ID NO: 16447 - DNA, 20 bp, Artificial Sequence
  Description of Artificial Sequence: Synthetic oligonucleotide
  Target: SCNA; (-) strand; PAM type: NRG; PAM sequence: TGG
tttcatatagtgaacagcct

SEQ ID NO: 16448 - DNA, 20 bp, Artificial Sequence
  Description of Artificial Sequence: Synthetic oligonucleotide
  Target: SCNA; (-) strand; PAM type: NRG; PAM sequence: CAG
ctgtcttttcatatagtgaa

SEQ ID NO: 16449 - DNA, 20 bp, Artificial Sequence
  Description of Artificial Sequence: Synthetic oligonucleotide
  Target: SCNA; (-) strand; PAM type: NRG; PAM sequence: TAG
tttgggactgtcttttcata

SEQ ID NO: 16450 - DNA, 20 bp, Artificial Sequence
  Description of Artificial Sequence: Synthetic oligonucleotide
  Target: SCNA; (-) strand; PAM type: NRG; PAM sequence: GGG
tcagtaactgccttttgttt

SEQ ID NO: 16451 - DNA, 20 bp, Artificial Sequence
  Description of Artificial Sequence: Synthetic oligonucleotide
  Target: SCNA; (-) strand; PAM type: NRG; PAM sequence: TGG
gtcagtaactgccttttgtt

SEQ ID NO: 16452 - DNA, 20 bp, Artificial Sequence
  Description of Artificial Sequence: Synthetic oligonucleotide
  Target: SCNA; (-) strand; PAM type: NRG; PAM sequence: CAG
tgcacatttttcaagcaagt

SEQ ID NO: 16453 - DNA, 20 bp, Artificial Sequence
  Description of Artificial Sequence: Synthetic oligonucleotide
  Target: SCNA; (-) strand; PAM type: NRG; PAM sequence: AAG
tttctgcacatttttcaagc

SEQ ID NO: 16454 - DNA, 20 bp, Artificial Sequence
  Description of Artificial Sequence: Synthetic oligonucleotide
  Target: SCNA; (-) strand; PAM type: NRG; PAM sequence: AAG
atcatttctgcacatttttc

SEQ ID NO: 16455 - DNA, 20 bp, Artificial Sequence
  Description of Artificial Sequence: Synthetic oligonucleotide
  Target: SCNA; (-) strand; PAM type: NRG; PAM sequence: CAG
gtcagctgtccacattcaag

SEQ ID NO: 16456 - DNA, 20 bp, Artificial Sequence
  Description of Artificial Sequence: Synthetic oligonucleotide
  Target: SCNA; (-) strand; PAM type: NRG; PAM sequence: AAG
tgtgtcagctgtccacattc

SEQ ID NO: 16457 - DNA, 20 bp, Artificial Sequence
  Description of Artificial Sequence: Synthetic oligonucleotide
  Target: SCNA; (-) strand; PAM type: NRG; PAM sequence: CAG
tttactccttgtccctgtgt

SEQ ID NO: 16458 - DNA, 20 bp, Artificial Sequence
  Description of Artificial Sequence: Synthetic oligonucleotide
  Target: SCNA; (-) strand; PAM type: NRG; PAM sequence: AAG
aattatcttcctagttggtc

SEQ ID NO: 16459 - DNA, 20 bp, Artificial Sequence
  Description of Artificial Sequence: Synthetic oligonucleotide
  Target: SCNA; (-) strand; PAM type: NRG; PAM sequence: TGG
ctaataattatcttcctagt

SEQ ID NO: 16460 - DNA, 20 bp, Artificial Sequence
  Description of Artificial Sequence: Synthetic oligonucleotide
  Target: SCNA; (-) strand; PAM type: NRG; PAM sequence: TAG
actgctaataattatcttcc

SEQ ID NO: 16461 - DNA, 20 bp, Artificial Sequence
  Description of Artificial Sequence: Synthetic oligonucleotide
  Target: SCNA; (-) strand; PAM type: NRG; PAM sequence: TGG
gactcaacctacctaaaaaa

SEQ ID NO: 16462 - DNA, 20 bp, Artificial Sequence
  Description of Artificial Sequence: Synthetic oligonucleotide
  Target: SCNA; (-) strand; PAM type: NRG; PAM sequence: CAG
ttatatttatggaggcatct

SEQ ID NO: 16463 - DNA, 20 bp, Artificial Sequence
  Description of Artificial Sequence: Synthetic oligonucleotide
  Target: SCNA; (-) strand; PAM type: NRG; PAM sequence: AGG
ttttcaacttatatttatgg

SEQ ID NO: 16464 - DNA, 20 bp, Artificial Sequence
  Description of Artificial Sequence: Synthetic oligonucleotide
  Target: SCNA; (-) strand; PAM type: NRG; PAM sequence: GAG
attttcaacttatatttatg

SEQ ID NO: 16465 - DNA, 20 bp, Artificial Sequence
  Description of Artificial Sequence: Synthetic oligonucleotide
  Target: SCNA; (-) strand; PAM type: NRG; PAM sequence: TGG
atattttcaacttatattta

SEQ ID NO: 16466 - DNA, 20 bp, Artificial Sequence
  Description of Artificial Sequence: Synthetic oligonucleotide
  Target: SCNA; (-) strand; PAM type: NRG; PAM sequence: AAG
actcaaaatatgtatttctg

SEQ ID NO: 16467 - DNA, 20 bp, Artificial Sequence
  Description of Artificial Sequence: Synthetic oligonucleotide
  Target: SCNA; (-) strand; PAM type: NRG; PAM sequence: TAG
actctgatgacttacctctg

SEQ ID NO: 16468 - DNA, 20 bp, Artificial Sequence
  Description of Artificial Sequence: Synthetic oligonucleotide
  Target: SCNA; (-) strand; PAM type: NRG; PAM sequence: AAG
tgctgccttccttcctaaga

SEQ ID NO: 16469 - DNA, 20 bp, Artificial Sequence
  Description of Artificial Sequence: Synthetic oligonucleotide
  Target: SCNA; (-) strand; PAM type: NRG; PAM sequence: AAG
tctttgctgccttccttcct

SEQ ID NO: 16470 - DNA, 20 bp, Artificial Sequence
  Description of Artificial Sequence: Synthetic oligonucleotide
  Target: SCNA; (-) strand; PAM type: NRG; PAM sequence: AAG
tagtaccaattacttagtaa

SEQ ID NO: 16471 - DNA, 20 bp, Artificial Sequence
  Description of Artificial Sequence: Synthetic oligonucleotide
  Target: SCNA; (-) strand; PAM type: NRG; PAM sequence: TAG
aagtagtagtaccaattact

SEQ ID NO: 16472 - DNA, 20 bp, Artificial Sequence
  Description of Artificial Sequence: Synthetic oligonucleotide
  Target: SCNA; (-) strand; PAM type: NRG; PAM sequence: TAG
cacttgaaactgacaagtag

SEQ ID NO: 16473 - DNA, 20 bp, Artificial Sequence
  Description of Artificial Sequence: Synthetic oligonucleotide
  Target: SCNA; (-) strand; PAM type: NRG; PAM sequence: TAG
cagcacttgaaactgacaag

SEQ ID NO: 16474 - DNA, 20 bp, Artificial Sequence
  Description of Artificial Sequence: Synthetic oligonucleotide
  Target: SCNA; (-) strand; PAM type: NRG; PAM sequence: AAG
ttacagcacttgaaactgac

SEQ ID NO: 16475 - DNA, 20 bp, Artificial Sequence
  Description of Artificial Sequence: Synthetic oligonucleotide
  Target: SCNA; (-) strand; PAM type: NRG; PAM sequence: CAG
ggttcttcccatttttttta

SEQ ID NO: 16476 - DNA, 20 bp, Artificial Sequence
  Description of Artificial Sequence: Synthetic oligonucleotide
  Target: SCNA; (-) strand; PAM type: NRG; PAM sequence: TGG
gtactgaaagtgcacatgtg

SEQ ID NO: 16477 - DNA, 20 bp, Artificial Sequence
  Description of Artificial Sequence: Synthetic oligonucleotide
  Target: SCNA; (-) strand; PAM type: NRG; PAM sequence: AAG
cataaaatacatagtactga

SEQ ID NO: 16478 - DNA, 20 bp, Artificial Sequence
  Description of Artificial Sequence: Synthetic oligonucleotide
  Target: SCNA; (-) strand; PAM type: NRG; PAM sequence: TAG
tccctgaagcataaaataca

SEQ ID NO: 16479 - DNA, 20 bp, Artificial Sequence
  Description of Artificial Sequence: Synthetic oligonucleotide
  Target: SCNA; (-) strand; PAM type: NRG; PAM sequence: AAG
taaacaggtatgcatccctg

SEQ ID NO: 16480 - DNA, 20 bp, Artificial Sequence
  Description of Artificial Sequence: Synthetic oligonucleotide
  Target: SCNA; (-) strand; PAM type: NRG; PAM sequence: AGG
aaaacatacttttgttaaac

SEQ ID NO: 16481 - DNA, 20 bp, Artificial Sequence
  Description of Artificial Sequence: Synthetic oligonucleotide
  Target: SCNA; (-) strand; PAM type: NRG; PAM sequence: CAG
aaaaacatacttttgttaaa

SEQ ID NO: 16482 - DNA, 20 bp, Artificial Sequence
  Description of Artificial Sequence: Synthetic oligonucleotide
  Target: SCNA; (-) strand; PAM type: NRG; PAM sequence: GAG
tggactattcaacacacttt

SEQ ID NO: 16483 - DNA, 20 bp, Artificial Sequence
  Description of Artificial Sequence: Synthetic oligonucleotide
  Target: SCNA; (-) strand; PAM type: NRG; PAM sequence: TGG
cttctacctccatctttttc

SEQ ID NO: 16484 - DNA, 20 bp, Artificial Sequence
  Description of Artificial Sequence: Synthetic oligonucleotide
  Target: SCNA; (-) strand; PAM type: NRG; PAM sequence: AAG
tctggttcctttatctcctg

SEQ ID NO: 16485 - DNA, 20 bp, Artificial Sequence
  Description of Artificial Sequence: Synthetic oligonucleotide
  Target: SCNA; (-) strand; PAM type: NRG; PAM sequence: TGG
acagccttcaatgatctttc

SEQ ID NO: 16486 - DNA, 20 bp, Artificial Sequence
  Description of Artificial Sequence: Synthetic oligonucleotide
  Target: SCNA; (-) strand; PAM type: NRG; PAM sequence: CAG
caaaatgttttctaccatca

SEQ ID NO: 16487 - DNA, 20 bp, Artificial Sequence
  Description of Artificial Sequence: Synthetic oligonucleotide
  Target: SCNA; (-) strand; PAM type: NRG; PAM sequence: TAG
aaaattaattgtcccacccc

SEQ ID NO: 16488 - DNA, 20 bp, Artificial Sequence
  Description of Artificial Sequence: Synthetic oligonucleotide
  Target: SCNA; (-) strand; PAM type: NRG; PAM sequence: AAG
acaaaacaattaaagaacag

SEQ ID NO: 16489 - DNA, 20 bp, Artificial Sequence
  Description of Artificial Sequence: Synthetic oligonucleotide
  Target: SCNA; (-) strand; PAM type: NRG; PAM sequence: CAG
aagacaaaacaattaaagaa

SEQ ID NO: 16490 - DNA, 20 bp, Artificial Sequence
  Description of Artificial Sequence: Synthetic oligonucleotide
  Target: SCNA; (-) strand; PAM type: NRG; PAM sequence: AAG
aaaagaagacaaaacaatta

SEQ ID NO: 16491 - DNA, 20 bp, Artificial Sequence
  Description of Artificial Sequence: Synthetic oligonucleotide
  Target: SCNA; (-) strand; PAM type: NRG; PAM sequence: AAG
ctcttggtttctttaaaaag

SEQ ID NO: 16492 - DNA, 20 bp, Artificial Sequence
  Description of Artificial Sequence: Synthetic oligonucleotide
  Target: SCNA; (-) strand; PAM type: NRG; PAM sequence: AAG
agtctcttggtttctttaaa

SEQ ID NO: 16493 - DNA, 20 bp, Artificial Sequence
  Description of Artificial Sequence: Synthetic oligonucleotide
  Target: SCNA; (-) strand; PAM type: NRG; PAM sequence: TGG
ctactacattaacagtctct

SEQ ID NO: 16494 - DNA, 20 bp, Artificial Sequence
  Description of Artificial Sequence: Synthetic oligonucleotide
  Target: SCNA; (-) strand; PAM type: NRG; PAM sequence: CAG
ctctgctcctactacattaa

SEQ ID NO: 16495 - DNA, 20 bp, Artificial Sequence
  Description of Artificial Sequence: Synthetic oligonucleotide
  Target: SCNA; (-) strand; PAM type: NRG; PAM sequence: GAG
ccattcttttcctctcattt

SEQ ID NO: 16496 - DNA, 20 bp, Artificial Sequence
  Description of Artificial Sequence: Synthetic oligonucleotide
  Target: SCNA; (-) strand; PAM type: NRG; PAM sequence: TGG
ttaaacatcatctctgttat

SEQ ID NO: 16497 - DNA, 20 bp, Artificial Sequence
  Description of Artificial Sequence: Synthetic oligonucleotide
  Target: SCNA; (-) strand; PAM type: NRG; PAM sequence: TGG
ataagctcattttagttctc

SEQ ID NO: 16498 - DNA, 20 bp, Artificial Sequence
  Description of Artificial Sequence: Synthetic oligonucleotide
  Target: SCNA; (-) strand; PAM type: NRG; PAM sequence: TAG
tgcatgccataagctcattt

SEQ ID NO: 16499 - DNA, 20 bp, Artificial Sequence
  Description of Artificial Sequence: Synthetic oligonucleotide
  Target: SCNA; (-) strand; PAM type: NRG; PAM sequence: AAG
cttcagcatctgcatgccat

SEQ ID NO: 16500 - DNA, 20 bp, Artificial Sequence
  Description of Artificial Sequence: Synthetic oligonucleotide
  Target: SCNA; (-) strand; PAM type: NRG; PAM sequence: CAG
tcctttcctttcttcatctt

SEQ ID NO: 16501 - DNA, 20 bp, Artificial Sequence
  Description of Artificial Sequence: Synthetic oligonucleotide
  Target: SCNA; (-) strand; PAM type: NRG; PAM sequence: AAG
ggggtgattaacagttttac

SEQ ID NO: 16502 - DNA, 20 bp, Artificial Sequence
  Description of Artificial Sequence: Synthetic oligonucleotide
  Target: SCNA; (-) strand; PAM type: NRG; PAM sequence: CAG
cagtaaaaaggggtgattaa

SEQ ID NO: 16503 - DNA, 20 bp, Artificial Sequence
  Description of Artificial Sequence: Synthetic oligonucleotide
  Target: SCNA; (-) strand; PAM type: NRG; PAM sequence: GGG
gtcttatcgtcagtaaaaag

SEQ ID NO: 16504 - DNA, 20 bp, Artificial Sequence
  Description of Artificial Sequence: Synthetic oligonucleotide
  Target: SCNA; (-) strand; PAM type: NRG; PAM sequence: GGG
tgtcttatcgtcagtaaaaa

SEQ ID NO: 16505 - DNA, 20 bp, Artificial Sequence
  Description of Artificial Sequence: Synthetic oligonucleotide
  Target: SCNA; (-) strand; PAM type: NRG; PAM sequence: AGG
atgtcttatcgtcagtaaaa

SEQ ID NO: 16506 - DNA, 20 bp, Artificial Sequence
  Description of Artificial Sequence: Synthetic oligonucleotide
  Target: SCNA; (-) strand; PAM type: NRG; PAM sequence: AAG
tatgtcttatcgtcagtaaa

SEQ ID NO: 16507 - DNA, 20 bp, Artificial Sequence
  Description of Artificial Sequence: Synthetic oligonucleotide
  Target: SCNA; (-) strand; PAM type: NRG; PAM sequence: CAG
tgacatttatgtcttatcgt

SEQ ID NO: 16508 - DNA, 20 bp, Artificial Sequence
  Description of Artificial Sequence: Synthetic oligonucleotide
  Target: SCNA; (-) strand; PAM type: NRG; PAM sequence: AGG
actatcgaattttttacttt

SEQ ID NO: 16509 - DNA, 20 bp, Artificial Sequence
  Description of Artificial Sequence: Synthetic oligonucleotide
  Target: SCNA; (-) strand; PAM type: NRG; PAM sequence: TAG
gactatcgaattttttactt

SEQ ID NO: 16510 - DNA, 20 bp, Artificial Sequence
  Description of Artificial Sequence: Synthetic oligonucleotide
  Target: SCNA; (-) strand; PAM type: NRG; PAM sequence: CAG
gactgatatggttttaaacc

SEQ ID NO: 16511 - DNA, 20 bp, Artificial Sequence
  Description of Artificial Sequence: Synthetic oligonucleotide
  Target: SCNA; (-) strand; PAM type: NRG; PAM sequence: TGG
gctttgacgtaagactgata

SEQ ID NO: 16512 - DNA, 20 bp, Artificial Sequence
  Description of Artificial Sequence: Synthetic oligonucleotide
  Target: SCNA; (-) strand; PAM type: NRG; PAM sequence: AAG
attaaaacatgctttgacgt

SEQ ID NO: 16513 - DNA, 20 bp, Artificial Sequence
  Description of Artificial Sequence: Synthetic oligonucleotide
  Target: SCNA; (-) strand; PAM type: NRG; PAM sequence: CAG
ttaaaatcacaaccacacaa

SEQ ID NO: 16514 - DNA, 20 bp, Artificial Sequence
  Description of Artificial Sequence: Synthetic oligonucleotide
  Target: SCNA; (-) strand; PAM type: NRG; PAM sequence: GAG
aattgatattttatttttca

SEQ ID NO: 16515 - DNA, 20 bp, Artificial Sequence
  Description of Artificial Sequence: Synthetic oligonucleotide
  Target: SCNA; (-) strand; PAM type: NRG; PAM sequence: CAG
ctaattgatattttattttt

SEQ ID NO: 16516 - DNA, 20 bp, Artificial Sequence
  Description of Artificial Sequence: Synthetic oligonucleotide
  Target: SCNA; (-) strand; PAM type: NRG; PAM sequence: CAG
ttggattcactgcttctcag

SEQ ID NO: 16517 - DNA, 20 bp, Artificial Sequence
  Description of Artificial Sequence: Synthetic oligonucleotide
  Target: SCNA; (-) strand; PAM type: NRG; PAM sequence: CAG
tgcttggattcactgcttct

SEQ ID NO: 16518 - DNA, 20 bp, Artificial Sequence
  Description of Artificial Sequence: Synthetic oligonucleotide
  Target: SCNA; (-) strand; PAM type: NRG; PAM sequence: TGG
gatgatactcagattctgct

SEQ ID NO: 16519 - DNA, 20 bp, Artificial Sequence
  Description of Artificial Sequence: Synthetic oligonucleotide
  Target: SCNA; (-) strand; PAM type: NRG; PAM sequence: CAG
aactaaaaagtgatgatact

SEQ ID NO: 16520 - DNA, 20 bp, Artificial Sequence
  Description of Artificial Sequence: Synthetic oligonucleotide
  Target: SCNA; (-) strand; PAM type: NRG; PAM sequence: AAG
gactggttagtttaactaaa

SEQ ID NO: 16521 - DNA, 20 bp, Artificial Sequence
  Description of Artificial Sequence: Synthetic oligonucleotide
  Target: SCNA; (-) strand; PAM type: NRG; PAM sequence: TAG
aatcaggatattggactggt

SEQ ID NO: 16522 - DNA, 20 bp, Artificial Sequence
  Description of Artificial Sequence: Synthetic oligonucleotide
  Target: SCNA; (-) strand; PAM type: NRG; PAM sequence: TGG
gaaaaatcaggatattggac

SEQ ID NO: 16523 - DNA, 20 bp, Artificial Sequence
  Description of Artificial Sequence: Synthetic oligonucleotide
  Target: SCNA; (-) strand; PAM type: NRG; PAM sequence: TGG
ttaaagaaaaatcaggatat

SEQ ID NO: 16524 - DNA, 20 bp, Artificial Sequence
  Description of Artificial Sequence: Synthetic oligonucleotide
  Target: SCNA; (-) strand; PAM type: NRG; PAM sequence: AGG
ttgcctgttaaagaaaaatc

SEQ ID NO: 16525 - DNA, 20 bp, Artificial Sequence
  Description of Artificial Sequence: Synthetic oligonucleotide
  Target: SCNA; (-) strand; PAM type: NRG; PAM sequence: CAG
tttgcctgttaaagaaaaat

SEQ ID NO: 16526 - DNA, 20 bp, Artificial Sequence
  Description of Artificial Sequence: Synthetic oligonucleotide
  Target: SCNA; (-) strand; PAM type: NRG; PAM sequence: AAG
caaaaattctttgcctgtta

SEQ ID NO: 16527 - DNA, 20 bp, Artificial Sequence
  Description of Artificial Sequence: Synthetic oligonucleotide
  Target: SCNA; (-) strand; PAM type: NRG; PAM sequence: AAG
caagaactcagtctatggga

SEQ ID NO: 16528 - DNA, 20 bp, Artificial Sequence
  Description of Artificial Sequence: Synthetic oligonucleotide
  Target: SCNA; (-) strand; PAM type: NRG; PAM sequence: GGG
ttcacaagaactcagtctat

SEQ ID NO: 16529 - DNA, 20 bp, Artificial Sequence
  Description of Artificial Sequence: Synthetic oligonucleotide
  Target: SCNA; (-) strand; PAM type: NRG; PAM sequence: TGG
gttcacaagaactcagtcta

SEQ ID NO: 16530 - DNA, 20 bp, Artificial Sequence
  Description of Artificial Sequence: Synthetic oligonucleotide
  Target: SCNA; (-) strand; PAM type: NRG; PAM sequence: CAG
taaaatagttcacaagaact

SEQ ID NO: 16531 - DNA, 20 bp, Artificial Sequence
  Description of Artificial Sequence: Synthetic oligonucleotide
  Target: SCNA; (-) strand; PAM type: NRG; PAM sequence: AAG
attgctgtaaaatagttcac

SEQ ID NO: 16532 - DNA, 20 bp, Artificial Sequence
  Description of Artificial Sequence: Synthetic oligonucleotide
  Target: SCNA; (-) strand; PAM type: NRG; PAM sequence: TAG
atgccattattgctgtaaaa

SEQ ID NO: 16533 - DNA, 20 bp, Artificial Sequence
  Description of Artificial Sequence: Synthetic oligonucleotide
  Target: SCNA; (-) strand; PAM type: NRG; PAM sequence: TGG
gttattgttatctataggat

SEQ ID NO: 16534 - DNA, 20 bp, Artificial Sequence
  Description of Artificial Sequence: Synthetic oligonucleotide
  Target: SCNA; (-) strand; PAM type: NRG; PAM sequence: AGG
gctttgttattgttatctat

SEQ ID NO: 16535 - DNA, 20 bp, Artificial Sequence
  Description of Artificial Sequence: Synthetic oligonucleotide
  Target: SCNA; (-) strand; PAM type: NRG; PAM sequence: TAG
agctttgttattgttatcta

SEQ ID NO: 16536 - DNA, 20 bp, Artificial Sequence
  Description of Artificial Sequence: Synthetic oligonucleotide
  Target: SCNA; (-) strand; PAM type: NRG; PAM sequence: CAG
cctggcaacaaaatggtctg

SEQ ID NO: 16537 - DNA, 20 bp, Artificial Sequence
  Description of Artificial Sequence: Synthetic oligonucleotide
  Target: SCNA; (-) strand; PAM type: NRG; PAM sequence: TGG
ggagaaacctggcaacaaaa

SEQ ID NO: 16538 - DNA, 20 bp, Artificial Sequence
  Description of Artificial Sequence: Synthetic oligonucleotide
  Target: SCNA; (-) strand; PAM type: NRG; PAM sequence: TGG
gccaccctggaggagaaacc

SEQ ID NO: 16539 - DNA, 20 bp, Artificial Sequence
  Description of Artificial Sequence: Synthetic oligonucleotide
  Target: SCNA; (-) strand; PAM type: NRG; PAM sequence: GAG
gctggaaagccaccctggag

SEQ ID NO: 16540 - DNA, 20 bp, Artificial Sequence
  Description of Artificial Sequence: Synthetic oligonucleotide
  Target: SCNA; (-) strand; PAM type: NRG; PAM sequence: AGG
tagctggaaagccaccctgg

SEQ ID NO: 16541 - DNA, 20 bp, Artificial Sequence
  Description of Artificial Sequence: Synthetic oligonucleotide
  Target: SCNA; (-) strand; PAM type: NRG; PAM sequence: GAG
ctagctggaaagccaccctg

SEQ ID NO: 16542 - DNA, 20 bp, Artificial Sequence
  Description of Artificial Sequence: Synthetic oligonucleotide
  Target: SCNA; (-) strand; PAM type: NRG; PAM sequence: TGG
aactagctggaaagccaccc

SEQ ID NO: 16543 - DNA, 20 bp, Artificial Sequence
  Description of Artificial Sequence: Synthetic oligonucleotide
  Target: SCNA; (-) strand; PAM type: NRG; PAM sequence: AAG
ttgtttacaaactagctgga

SEQ ID NO: 16544 - DNA, 20 bp, Artificial Sequence
  Description of Artificial Sequence: Synthetic oligonucleotide
  Target: SCNA; (-) strand; PAM type: NRG; PAM sequence: TGG
ttatttgtttacaaactagc

SEQ ID NO: 16545 - DNA, 20 bp, Artificial Sequence
  Description of Artificial Sequence: Synthetic oligonucleotide
  Target: SCNA; (-) strand; PAM type: NRG; PAM sequence: TAG
tgagttatttgtttacaaac

SEQ ID NO: 16546 - DNA, 20 bp, Artificial Sequence
  Description of Artificial Sequence: Synthetic oligonucleotide
  Target: SCNA; (-) strand; PAM type: NRG; PAM sequence: GAG
gtaacatgacagggccacct

SEQ ID NO: 16547 - DNA, 20 bp, Artificial Sequence
  Description of Artificial Sequence: Synthetic oligonucleotide
  Target: SCNA; (-) strand; PAM type: NRG; PAM sequence: GGG
ttagttaatgtaacatgaca

SEQ ID NO: 16548 - DNA, 20 bp, Artificial Sequence
  Description of Artificial Sequence: Synthetic oligonucleotide
  Target: SCNA; (-) strand; PAM type: NRG; PAM sequence: AGG
tttagttaatgtaacatgac

SEQ ID NO: 16549 - DNA, 20 bp, Artificial Sequence
  Description of Artificial Sequence: Synthetic oligonucleotide
  Target: SCNA; (-) strand; PAM type: NRG; PAM sequence: CAG
ttttagttaatgtaacatga

SEQ ID NO: 16550 - DNA, 20 bp, Artificial Sequence
  Description of Artificial Sequence: Synthetic oligonucleotide
  Target: SCNA; (-) strand; PAM type: NRG; PAM sequence: TAG
tgtgctttagacttggtttt

SEQ ID NO: 16551 - DNA, 20 bp, Artificial Sequence
  Description of Artificial Sequence: Synthetic oligonucleotide
  Target: SCNA; (-) strand; PAM type: NRG; PAM sequence: TGG
ttatatgtgtgctttagact

SEQ ID NO: 16552 - DNA, 20 bp, Artificial Sequence
  Description of Artificial Sequence: Synthetic oligonucleotide
  Target: SCNA; (-) strand; PAM type: NRG; PAM sequence: TAG
atgttattatatgtgtgctt

SEQ ID NO: 16553 - DNA, 20 bp, Artificial Sequence
  Description of Artificial Sequence: Synthetic oligonucleotide
  Target: SCNA; (-) strand; PAM type: NRG; PAM sequence: CAG
ttaggaatttgaaagcaagc

SEQ ID NO: 16554 - DNA, 20 bp, Artificial Sequence
  Description of Artificial Sequence: Synthetic oligonucleotide
  Target: SCNA; (-) strand; PAM type: NRG; PAM sequence: AAG
tgatttaggaatttgaaagc

SEQ ID NO: 16555 - DNA, 20 bp, Artificial Sequence
  Description of Artificial Sequence: Synthetic oligonucleotide
  Target: SCNA; (-) strand; PAM type: NRG; PAM sequence: AAG
tgtatgatttaggaatttga

SEQ ID NO: 16556 - DNA, 20 bp, Artificial Sequence
  Description of Artificial Sequence: Synthetic oligonucleotide
  Target: SCNA; (-) strand; PAM type: NRG; PAM sequence: AGG
aaaatttaattgtatgattt

SEQ ID NO: 16557 - DNA, 20 bp, Artificial Sequence
  Description of Artificial Sequence: Synthetic oligonucleotide
  Target: SCNA; (-) strand; PAM type: NRG; PAM sequence: TAG
taaaatttaattgtatgatt

SEQ ID NO: 16558 - DNA, 20 bp, Artificial Sequence
  Description of Artificial Sequence: Synthetic oligonucleotide
  Target: SCNA; (-) strand; PAM type: NRG; PAM sequence: CAG
ttttttcttgtttccaaata

SEQ ID NO: 16559 - DNA, 20 bp, Artificial Sequence
  Description of Artificial Sequence: Synthetic oligonucleotide
  Target: SCNA; (-) strand; PAM type: NRG; PAM sequence: AAG
tatacatcagttgggtgtca

SEQ ID NO: 16560 - DNA, 20 bp, Artificial Sequence
  Description of Artificial Sequence: Synthetic oligonucleotide
  Target: SCNA; (-) strand; PAM type: NRG; PAM sequence: GGG
ctcctttatatacatcagtt

SEQ ID NO: 16561 - DNA, 20 bp, Artificial Sequence
  Description of Artificial Sequence: Synthetic oligonucleotide
  Target: SCNA; (-) strand; PAM type: NRG; PAM sequence: TGG
tctcctttatatacatcagt

SEQ ID NO: 16562 - DNA, 20 bp, Artificial Sequence
  Description of Artificial Sequence: Synthetic oligonucleotide
  Target: SCNA; (-) strand; PAM type: NRG; PAM sequence: CAG
acagtctcctttatatacat

SEQ ID NO: 16563 - DNA, 20 bp, Artificial Sequence
  Description of Artificial Sequence: Synthetic oligonucleotide
  Target: SCNA; (-) strand; PAM type: NRG; PAM sequence: CAG
cattttaaaacccatatgca

SEQ ID NO: 16564 - DNA, 20 bp, Artificial Sequence
  Description of Artificial Sequence: Synthetic oligonucleotide
  Target: SCNA; (-) strand; PAM type: NRG; PAM sequence: AAG
taacattgtttttaatctca

SEQ ID NO: 16565 - DNA, 20 bp, Artificial Sequence
  Description of Artificial Sequence: Synthetic oligonucleotide
  Target: SCNA; (-) strand; PAM type: NRG; PAM sequence: TAG
tcagaaaaattaaataaaaa

SEQ ID NO: 16566 - DNA, 20 bp, Artificial Sequence
  Description of Artificial Sequence: Synthetic oligonucleotide
  Target: SCNA; (-) strand; PAM type: NRG; PAM sequence: CAG
aaagcaaatacaatattttt

SEQ ID NO: 16567 - DNA, 20 bp, Artificial Sequence
  Description of Artificial Sequence: Synthetic oligonucleotide
  Target: SCNA; (-) strand; PAM type: NRG; PAM sequence: AAG
ttgtatagcaagagggtata

SEQ ID NO: 16568 - DNA, 20 bp, Artificial Sequence
  Description of Artificial Sequence: Synthetic oligonucleotide
  Target: SCNA; (-) strand; PAM type: NRG; PAM sequence: GGG
tataagtttgtatagcaaga

SEQ ID NO: 16569 - DNA, 20 bp, Artificial Sequence
  Description of Artificial Sequence: Synthetic oligonucleotide
  Target: SCNA; (-) strand; PAM type: NRG; PAM sequence: AGG
atataagtttgtatagcaag

SEQ ID NO: 16570 - DNA, 20 bp, Artificial Sequence
  Description of Artificial Sequence: Synthetic oligonucleotide
  Target: SCNA; (-) strand; PAM type: NRG; PAM sequence: GAG
aatataagtttgtatagcaa

SEQ ID NO: 16571 - DNA, 20 bp, Artificial Sequence
  Description of Artificial Sequence: Synthetic oligonucleotide
  Target: SCNA; (-) strand; PAM type: NRG; PAM sequence: AAG
acaatataagtttgtatagc

SEQ ID NO: 16572 - DNA, 20 bp, Artificial Sequence
  Description of Artificial Sequence: Synthetic oligonucleotide
  Target: SCNA; (-) strand; PAM type: NRG; PAM sequence: TAG
caaaacaatataagtttgta

SEQ ID NO: 16573 - DNA, 20 bp, Artificial Sequence
  Description of Artificial Sequence: Synthetic oligonucleotide
  Target: SCNA; (-) strand; PAM type: NRG; PAM sequence: AAG
gagggtaagcaaaacaatat

SEQ ID NO: 16574 - DNA, 20 bp, Artificial Sequence
  Description of Artificial Sequence: Synthetic oligonucleotide
  Target: SCNA; (-) strand; PAM type: NRG; PAM sequence: AAG
gaggaataaaaaaagagggt

SEQ ID NO: 16575 - DNA, 20 bp, Artificial Sequence
  Description of Artificial Sequence: Synthetic oligonucleotide
  Target: SCNA; (-) strand; PAM type: NRG; PAM sequence: GGG
gtaggaggaataaaaaaaga

SEQ ID NO: 16576 - DNA, 20 bp, Artificial Sequence
  Description of Artificial Sequence: Synthetic oligonucleotide
  Target: SCNA; (-) strand; PAM type: NRG; PAM sequence: AGG
agtaggaggaataaaaaaag

SEQ ID NO: 16577 - DNA, 20 bp, Artificial Sequence
  Description of Artificial Sequence: Synthetic oligonucleotide
  Target: SCNA; (-) strand; PAM type: NRG; PAM sequence: GAG
aagtaggaggaataaaaaaa

SEQ ID NO: 16578 - DNA, 20 bp, Artificial Sequence
  Description of Artificial Sequence: Synthetic oligonucleotide
  Target: SCNA; (-) strand; PAM type: NRG; PAM sequence: AAG
aaaagtaggaggaataaaaa

SEQ ID NO: 16579 - DNA, 20 bp, Artificial Sequence
  Description of Artificial Sequence: Synthetic oligonucleotide
  Target: SCNA; (-) strand; PAM type: NRG; PAM sequence: AGG
caaaattaagaaaaagtagg

SEQ ID NO: 16580 - DNA, 20 bp, Artificial Sequence
  Description of Artificial Sequence: Synthetic oligonucleotide
  Target: SCNA; (-) strand; PAM type: NRG; PAM sequence: GAG
tcaaaattaagaaaaagtag

SEQ ID NO: 16581 - DNA, 20 bp, Artificial Sequence
  Description of Artificial Sequence: Synthetic oligonucleotide
  Target: SCNA; (-) strand; PAM type: NRG; PAM sequence: AGG
tatcaaaattaagaaaaagt

SEQ ID NO: 16582 - DNA, 20 bp, Artificial Sequence
  Description of Artificial Sequence: Synthetic oligonucleotide
  Target: SCNA; (-) strand; PAM type: NRG; PAM sequence: TAG
atatcaaaattaagaaaaag

SEQ ID NO: 16583 - DNA, 20 bp, Artificial Sequence
  Description of Artificial Sequence: Synthetic oligonucleotide
  Target: SCNA; (-) strand; PAM type: NRG; PAM sequence: AAG
gagatatcaaaattaagaaa

SEQ ID NO: 16584 - DNA, 20 bp, Artificial Sequence
  Description of Artificial Sequence: Synthetic oligonucleotide
  Target: SCNA; (-) strand; PAM type: NRG; PAM sequence: AAG
aattcagagatatcaaaatt

SEQ ID NO: 16585 - DNA, 20 bp, Artificial Sequence
  Description of Artificial Sequence: Synthetic oligonucleotide
  Target: SCNA; (-) strand; PAM type: NRG; PAM sequence: GAG
ttctctagactttaaattca

SEQ ID NO: 16586 - DNA, 20 bp, Artificial Sequence
  Description of Artificial Sequence: Synthetic oligonucleotide
  Target: SCNA; (-) strand; PAM type: NRG; PAM sequence: CAG
cattctctagactttaaatt

SEQ ID NO: 16587 - DNA, 20 bp, Artificial Sequence
  Description of Artificial Sequence: Synthetic oligonucleotide
  Target: SCNA; (-) strand; PAM type: NRG; PAM sequence: TAG
agtgaagatgaatcattctc

SEQ ID NO: 16588 - DNA, 20 bp, Artificial Sequence
  Description of Artificial Sequence: Synthetic oligonucleotide
  Target: SCNA; (-) strand; PAM type: NRG; PAM sequence: AAG
tggaaaagatagaactagtg

SEQ ID NO: 16589 - DNA, 20 bp, Artificial Sequence
  Description of Artificial Sequence: Synthetic oligonucleotide
  Target: SCNA; (-) strand; PAM type: NRG; PAM sequence: TAG
agcactggaaaagatagaac

SEQ ID NO: 16590 - DNA, 20 bp, Artificial Sequence
  Description of Artificial Sequence: Synthetic oligonucleotide
  Target: SCNA; (-) strand; PAM type: NRG; PAM sequence: TAG
aatactagcactggaaaaga

SEQ ID NO: 16591 - DNA, 20 bp, Artificial Sequence
  Description of Artificial Sequence: Synthetic oligonucleotide
  Target: SCNA; (-) strand; PAM type: NRG; PAM sequence: AAG
caaaaatactagcactggaa

SEQ ID NO: 16592 - DNA, 20 bp, Artificial Sequence
  Description of Artificial Sequence: Synthetic oligonucleotide
  Target: SCNA; (-) strand; PAM type: NRG; PAM sequence: TGG
aaaaacaaaaatactagcac

SEQ ID NO: 16593 - DNA, 20 bp, Artificial Sequence
  Description of Artificial Sequence: Synthetic oligonucleotide
  Target: SCNA; (-) strand; PAM type: NRG; PAM sequence: TAG
cagctcaaaaacaaaaatac

SEQ ID NO: 16594 - DNA, 20 bp, Artificial Sequence
  Description of Artificial Sequence: Synthetic oligonucleotide
  Target: SCNA; (-) strand; PAM type: NRG; PAM sequence: CAG
aaaatgggatagggaaacca

SEQ ID NO: 16595 - DNA, 20 bp, Artificial Sequence
  Description of Artificial Sequence: Synthetic oligonucleotide
  Target: SCNA; (-) strand; PAM type: NRG; PAM sequence: GGG
gagatctcaaaaatgggata

SEQ ID NO: 16596 - DNA, 20 bp, Artificial Sequence
  Description of Artificial Sequence: Synthetic oligonucleotide
  Target: SCNA; (-) strand; PAM type: NRG; PAM sequence: AGG
tgagatctcaaaaatgggat

SEQ ID NO: 16597 - DNA, 20 bp, Artificial Sequence
  Description of Artificial Sequence: Synthetic oligonucleotide
  Target: SCNA; (-) strand; PAM type: NRG; PAM sequence: TAG
ttgagatctcaaaaatggga

SEQ ID NO: 16598 - DNA, 20 bp, Artificial Sequence
  Description of Artificial Sequence: Synthetic oligonucleotide
  Target: SCNA; (-) strand; PAM type: NRG; PAM sequence: GGG
tagtttgagatctcaaaaat

SEQ ID NO: 16599 - DNA, 20 bp, Artificial Sequence
  Description of Artificial Sequence: Synthetic oligonucleotide
  Target: SCNA; (-) strand; PAM type: NRG; PAM sequence: TGG
atagtttgagatctcaaaaa

SEQ ID NO: 16600 - DNA, 20 bp, Artificial Sequence
  Description of Artificial Sequence: Synthetic oligonucleotide
  Target: SCNA; (-) strand; PAM type: NRG; PAM sequence: GAG
tcgacaccaaattatagttt

SEQ ID NO: 16601 - DNA, 20 bp, Artificial Sequence
  Description of Artificial Sequence: Synthetic oligonucleotide
  Target: SCNA; (-) strand; PAM type: NRG; PAM sequence: TAG
gggtactcgacaccaaatta

SEQ ID NO: 16602 - DNA, 20 bp, Artificial Sequence
  Description of Artificial Sequence: Synthetic oligonucleotide
  Target: SCNA; (-) strand; PAM type: NRG; PAM sequence: GGG
actttaaagataagatacct

SEQ ID NO: 16603 - DNA, 20 bp, Artificial Sequence
  Description of Artificial Sequence: Synthetic oligonucleotide
  Target: SCNA; (-) strand; PAM type: NRG; PAM sequence: TGG
cactttaaagataagatacc

SEQ ID NO: 16604 - DNA, 20 bp, Artificial Sequence
  Description of Artificial Sequence: Synthetic oligonucleotide
  Target: SCNA; (-) strand; PAM type: NRG; PAM sequence: AAG
tacgtcttcactttaaagat

SEQ ID NO: 16605 - DNA, 20 bp, Artificial Sequence
  Description of Artificial Sequence: Synthetic oligonucleotide
  Target: SCNA; (-) strand; PAM type: NRG; PAM sequence: AAG
ctgcctacgtcttcacttta

SEQ ID NO: 16606 - DNA, 20 bp, Artificial Sequence
  Description of Artificial Sequence: Synthetic oligonucleotide
  Target: SCNA; (-) strand; PAM type: NRG; PAM sequence: AAG
tctagtggacgttctaataa

SEQ ID NO: 16607 - DNA, 20 bp, Artificial Sequence
  Description of Artificial Sequence: Synthetic oligonucleotide
  Target: SCNA; (-) strand; PAM type: NRG; PAM sequence: TGG
cactggtcattctgatctag

SEQ ID NO: 16608 - DNA, 20 bp, Artificial Sequence
  Description of Artificial Sequence: Synthetic oligonucleotide
  Target: SCNA; (-) strand; PAM type: NRG; PAM sequence: TAG
gtgcactggtcattctgatc

SEQ ID NO: 16609 - DNA, 20 bp, Artificial Sequence
  Description of Artificial Sequence: Synthetic oligonucleotide
  Target: SCNA; (-) strand; PAM type: NRG; PAM sequence: TGG
ggaaaataaattttgtgcac

SEQ ID NO: 16610 - DNA, 20 bp, Artificial Sequence
  Description of Artificial Sequence: Synthetic oligonucleotide
  Target: SCNA; (-) strand; PAM type: NRG; PAM sequence: AGG
ttaaatttggtgagtctgct

SEQ ID NO: 16611 - DNA, 20 bp, Artificial Sequence
  Description of Artificial Sequence: Synthetic oligonucleotide
  Target: SCNA; (-) strand; PAM type: NRG; PAM sequence: TAG
gttaaatttggtgagtctgc

SEQ ID NO: 16612 - DNA, 20 bp, Artificial Sequence
  Description of Artificial Sequence: Synthetic oligonucleotide
  Target: SCNA; (-) strand; PAM type: NRG; PAM sequence: GAG
tcttccaggttaaatttggt

SEQ ID NO: 16613 - DNA, 20 bp, Artificial Sequence
  Description of Artificial Sequence: Synthetic oligonucleotide
  Target: SCNA; (-) strand; PAM type: NRG; PAM sequence: TGG
attctcttccaggttaaatt

SEQ ID NO: 16614 - DNA, 20 bp, Artificial Sequence
  Description of Artificial Sequence: Synthetic oligonucleotide
  Target: SCNA; (-) strand; PAM type: NRG; PAM sequence: AGG
agagtcagacattctcttcc

SEQ ID NO: 16615 - DNA, 20 bp, Artificial Sequence
  Description of Artificial Sequence: Synthetic oligonucleotide
  Target: SCNA; (-) strand; PAM type: NRG; PAM sequence: CAG
cagagtcagacattctcttc

SEQ ID NO: 16616 - DNA, 20 bp, Artificial Sequence
  Description of Artificial Sequence: Synthetic oligonucleotide
  Target: SCNA; (-) strand; PAM type: NRG; PAM sequence: CAG
ctaagaaaattcaacagagt

SEQ ID NO: 16617 - DNA, 20 bp, Artificial Sequence
  Description of Artificial Sequence: Synthetic oligonucleotide
  Target: SCNA; (-) strand; PAM type: NRG; PAM sequence: GAG
ttgcctaagaaaattcaaca

SEQ ID NO: 16618 - DNA, 20 bp, Artificial Sequence
  Description of Artificial Sequence: Synthetic oligonucleotide
  Target: SCNA; (-) strand; PAM type: NRG; PAM sequence: CAG
atttgcctaagaaaattcaa

SEQ ID NO: 16619 - DNA, 20 bp, Artificial Sequence
  Description of Artificial Sequence: Synthetic oligonucleotide
  Target: SCNA; (-) strand; PAM type: NRG; PAM sequence: AAG
ttcaaatattgtatttgcct

SEQ ID NO: 16620 - DNA, 20 bp, Artificial Sequence
  Description of Artificial Sequence: Synthetic oligonucleotide
  Target: SCNA; (-) strand; PAM type: NRG; PAM sequence: CAG
tatattttgtttgaaacatt

SEQ ID NO: 16621 - DNA, 20 bp, Artificial Sequence
  Description of Artificial Sequence: Synthetic oligonucleotide
  Target: SCNA; (-) strand; PAM type: NRG; PAM sequence: CAG
aacacatgagaacaataaca

SEQ ID NO: 16622 - DNA, 20 bp, Artificial Sequence
  Description of Artificial Sequence: Synthetic oligonucleotide
  Target: SCNA; (-) strand; PAM type: NRG; PAM sequence: GAG
ttttctgggcataaacacat

SEQ ID NO: 16623 - DNA, 20 bp, Artificial Sequence
  Description of Artificial Sequence: Synthetic oligonucleotide
  Target: SCNA; (-) strand; PAM type: NRG; PAM sequence: GGG
ctccagtctgcttattttct

SEQ ID NO: 16624 - DNA, 20 bp, Artificial Sequence
  Description of Artificial Sequence: Synthetic oligonucleotide
  Target: SCNA; (-) strand; PAM type: NRG; PAM sequence: TGG
gctccagtctgcttattttc

SEQ ID NO: 16625 - DNA, 20 bp, Artificial Sequence
  Description of Artificial Sequence: Synthetic oligonucleotide
  Target: SCNA; (-) strand; PAM type: NRG; PAM sequence: CAG
ttttaatcttagagaagctc

SEQ ID NO: 16626 - DNA, 20 bp, Artificial Sequence
  Description of Artificial Sequence: Synthetic oligonucleotide
  Target: SCNA; (-) strand; PAM type: NRG; PAM sequence: AAG
tttgacttttaatcttagag

SEQ ID NO: 16627 - DNA, 20 bp, Artificial Sequence
  Description of Artificial Sequence: Synthetic oligonucleotide
  Target: SCNA; (-) strand; PAM type: NRG; PAM sequence: GAG
tgttttgacttttaatctta

SEQ ID NO: 16628 - DNA, 20 bp, Artificial Sequence
  Description of Artificial Sequence: Synthetic oligonucleotide
  Target: SCNA; (-) strand; PAM type: NRG; PAM sequence: TAG
actgttttgacttttaatct

SEQ ID NO: 16629 - DNA, 20 bp, Artificial Sequence
  Description of Artificial Sequence: Synthetic oligonucleotide
  Target: SCNA; (-) strand; PAM type: NRG; PAM sequence: TGG
ttagatagtcaaatctgggc

SEQ ID NO: 16630 - DNA, 20 bp, Artificial Sequence
  Description of Artificial Sequence: Synthetic oligonucleotide
  Target: SCNA; (-) strand; PAM type: NRG; PAM sequence: GGG
atgattagatagtcaaatct

SEQ ID NO: 16631 - DNA, 20 bp, Artificial Sequence
  Description of Artificial Sequence: Synthetic oligonucleotide
  Target: SCNA; (-) strand; PAM type: NRG; PAM sequence: TGG
aatgattagatagtcaaatc

SEQ ID NO: 16632 - DNA, 20 bp, Artificial Sequence
  Description of Artificial Sequence: Synthetic oligonucleotide
  Target: SCNA; (-) strand; PAM type: NRG; PAM sequence: TAG
ctaaggtttaaatgattaga

SEQ ID NO: 16633 - DNA, 20 bp, Artificial Sequence
  Description of Artificial Sequence: Synthetic oligonucleotide
  Target: SCNA; (-) strand; PAM type: NRG; PAM sequence: TAG
gatactaaggtttaaatgat

SEQ ID NO: 16634 - DNA, 20 bp, Artificial Sequence
  Description of Artificial Sequence: Synthetic oligonucleotide
  Target: SCNA; (-) strand; PAM type: NRG; PAM sequence: AGG
tggtgatgatgatgatacta

SEQ ID NO: 16635 - DNA, 20 bp, Artificial Sequence
  Description of Artificial Sequence: Synthetic oligonucleotide
  Target: SCNA; (-) strand; PAM type: NRG; PAM sequence: AAG
gtggtgatgatgatgatact

SEQ ID NO: 16636 - DNA, 20 bp, Artificial Sequence
  Description of Artificial Sequence: Synthetic oligonucleotide
  Target: SCNA; (-) strand; PAM type: NRG; PAM sequence: TGG
taatgagtatgcagtgacgg

SEQ ID NO: 16637 - DNA, 20 bp, Artificial Sequence
  Description of Artificial Sequence: Synthetic oligonucleotide
  Target: SCNA; (-) strand; PAM type: NRG; PAM sequence: CGG
acttaatgagtatgcagtga

SEQ ID NO: 16638 - DNA, 20 bp, Artificial Sequence
  Description of Artificial Sequence: Synthetic oligonucleotide
  Target: SCNA; (-) strand; PAM type: NRG; PAM sequence: CAG
tttttaacttaatgagtatg

SEQ ID NO: 16639 - DNA, 20 bp, Artificial Sequence
  Description of Artificial Sequence: Synthetic oligonucleotide
  Target: SCNA; (-) strand; PAM type: NRG; PAM sequence: GAG
ggaattttttttaacttaat

SEQ ID NO: 16640 - DNA, 20 bp, Artificial Sequence
  Description of Artificial Sequence: Synthetic oligonucleotide
  Target: SCNA; (-) strand; PAM type: NRG; PAM sequence: AGG
ttcttttccatttattttaa

SEQ ID NO: 16641 - DNA, 20 bp, Artificial Sequence
  Description of Artificial Sequence: Synthetic oligonucleotide
  Target: SCNA; (-) strand; PAM type: NRG; PAM sequence: AAG
tttcttttccatttatttta

SEQ ID NO: 16642 - DNA, 20 bp, Artificial Sequence
  Description of Artificial Sequence: Synthetic oligonucleotide
  Target: SCNA; (-) strand; PAM type: NRG; PAM sequence: CAG
atcgctttaatctatttaca

SEQ ID NO: 16643 - DNA, 20 bp, Artificial Sequence
  Description of Artificial Sequence: Synthetic oligonucleotide
  Target: SCNA; (-) strand; PAM type: NRG; PAM sequence: AGG
ggagaaagggagtggtgagc

SEQ ID NO: 16644 - DNA, 20 bp, Artificial Sequence
  Description of Artificial Sequence: Synthetic oligonucleotide
  Target: SCNA; (-) strand; PAM type: NRG; PAM sequence: CAG
gggagaaagggagtggtgag

SEQ ID NO: 16645 - DNA, 20 bp, Artificial Sequence
  Description of Artificial Sequence: Synthetic oligonucleotide
  Target: SCNA; (-) strand; PAM type: NRG; PAM sequence: GAG
ccagggagaaagggagtggt

SEQ ID NO: 16646 - DNA, 20 bp, Artificial Sequence
  Description of Artificial Sequence: Synthetic oligonucleotide
  Target: SCNA; (-) strand; PAM type: NRG; PAM sequence: TGG
tgccccagggagaaagggag

SEQ ID NO: 16647 - DNA, 20 bp, Artificial Sequence
  Description of Artificial Sequence: Synthetic oligonucleotide
  Target: SCNA; (-) strand; PAM type: NRG; PAM sequence: GAG
tcctgccccagggagaaagg

SEQ ID NO: 16648 - DNA, 20 bp, Artificial Sequence
  Description of Artificial Sequence: Synthetic oligonucleotide
  Target: SCNA; (-) strand; PAM type: NRG; PAM sequence: GGG
tctcctgccccagggagaaa

SEQ ID NO: 16649 - DNA, 20 bp, Artificial Sequence
  Description of Artificial Sequence: Synthetic oligonucleotide
  Target: SCNA; (-) strand; PAM type: NRG; PAM sequence: AGG
gtctcctgccccagggagaa

SEQ ID NO: 16650 - DNA, 20 bp, Artificial Sequence
  Description of Artificial Sequence: Synthetic oligonucleotide
  Target: SCNA; (-) strand; PAM type: NRG; PAM sequence: AAG
agtctcctgccccagggaga

SEQ ID NO: 16651 - DNA, 20 bp, Artificial Sequence
  Description of Artificial Sequence: Synthetic oligonucleotide
  Target: SCNA; (-) strand; PAM type: NRG; PAM sequence: GAG
ctcaagtctcctgccccagg

SEQ ID NO: 16652 - DNA, 20 bp, Artificial Sequence
  Description of Artificial Sequence: Synthetic oligonucleotide
  Target: SCNA; (-) strand; PAM type: NRG; PAM sequence: GGG
tgctcaagtctcctgcccca

SEQ ID NO: 16653 - DNA, 20 bp, Artificial Sequence
  Description of Artificial Sequence: Synthetic oligonucleotide
  Target: SCNA; (-) strand; PAM type: NRG; PAM sequence: AGG
gtgctcaagtctcctgcccc

SEQ ID NO: 16654 - DNA, 20 bp, Artificial Sequence
  Description of Artificial Sequence: Synthetic oligonucleotide
  Target: SCNA; (-) strand; PAM type: NRG; PAM sequence: CAG
tgtgctcaagtctcctgccc

SEQ ID NO: 16655 - DNA, 20 bp, Artificial Sequence
  Description of Artificial Sequence: Synthetic oligonucleotide
  Target: SCNA; (-) strand; PAM type: NRG; PAM sequence: AAG
tgagttcctttgatgtgctc

SEQ ID NO: 16656 - DNA, 20 bp, Artificial Sequence
  Description of Artificial Sequence: Synthetic oligonucleotide
  Target: SCNA; (-) strand; PAM type: NRG; PAM sequence: GAG
acttactccaagaacgctat

SEQ ID NO: 16657 - DNA, 20 bp, Artificial Sequence
  Description of Artificial Sequence: Synthetic oligonucleotide
  Target: SCNA; (-) strand; PAM type: NRG; PAM sequence: AAG
gtggctttcacacttactcc

SEQ ID NO: 16658 - DNA, 20 bp, Artificial Sequence
  Description of Artificial Sequence: Synthetic oligonucleotide
  Target: SCNA; (-) strand; PAM type: NRG; PAM sequence: TGG
attcatttagttcatcacgg

SEQ ID NO: 16659 - DNA, 20 bp, Artificial Sequence
  Description of Artificial Sequence: Synthetic oligonucleotide
  Target: SCNA; (-) strand; PAM type: NRG; PAM sequence: CGG
agcattcatttagttcatca

SEQ ID NO: 16660 - DNA, 20 bp, Artificial Sequence
  Description of Artificial Sequence: Synthetic oligonucleotide
  Target: SCNA; (-) strand; PAM type: NRG; PAM sequence: TAG
tttagatgtaagcattcatt

SEQ ID NO: 16661 - DNA, 20 bp, Artificial Sequence
  Description of Artificial Sequence: Synthetic oligonucleotide
  Target: SCNA; (-) strand; PAM type: NRG; PAM sequence: AAG
ttacatctttctttagatgt

SEQ ID NO: 16662 - DNA, 20 bp, Artificial Sequence
  Description of Artificial Sequence: Synthetic oligonucleotide
  Target: SCNA; (-) strand; PAM type: NRG; PAM sequence: TAG
aatatgtttacatctttctt

SEQ ID NO: 16663 - DNA, 20 bp, Artificial Sequence
  Description of Artificial Sequence: Synthetic oligonucleotide
  Target: SCNA; (-) strand; PAM type: NRG; PAM sequence: CAG
gtcgcctcacatttcttaat

SEQ ID NO: 16664 - DNA, 20 bp, Artificial Sequence
  Description of Artificial Sequence: Synthetic oligonucleotide
  Target: SCNA; (-) strand; PAM type: NRG; PAM sequence: AAG
gatttatcagtggcacatga

SEQ ID NO: 16665 - DNA, 20 bp, Artificial Sequence
  Description of Artificial Sequence: Synthetic oligonucleotide
  Target: SCNA; (-) strand; PAM type: NRG; PAM sequence: TGG
aaattataatgatttatcag

SEQ ID NO: 16666 - DNA, 20 bp, Artificial Sequence
  Description of Artificial Sequence: Synthetic oligonucleotide
  Target: SCNA; (-) strand; PAM type: NRG; PAM sequence: CAG
gtcaaattataatgatttat

SEQ ID NO: 16667 - DNA, 20 bp, Artificial Sequence
  Description of Artificial Sequence: Synthetic oligonucleotide
  Target: SCNA; (-) strand; PAM type: NRG; PAM sequence: GGG
ggtatgcagatgaaatatag

SEQ ID NO: 16668 - DNA, 20 bp, Artificial Sequence
  Description of Artificial Sequence: Synthetic oligonucleotide
  Target: SCNA; (-) strand; PAM type: NRG; PAM sequence: GGG
aggtatgcagatgaaatata

SEQ ID NO: 16669 - DNA, 20 bp, Artificial Sequence
  Description of Artificial Sequence: Synthetic oligonucleotide
  Target: SCNA; (-) strand; PAM type: NRG; PAM sequence: AGG
caggtatgcagatgaaatat

SEQ ID NO: 16670 - DNA, 20 bp, Artificial Sequence
  Description of Artificial Sequence: Synthetic oligonucleotide
  Target: SCNA; (-) strand; PAM type: NRG; PAM sequence: TAG
ccaggtatgcagatgaaata

SEQ ID NO: 16671 - DNA, 20 bp, Artificial Sequence
  Description of Artificial Sequence: Synthetic oligonucleotide
  Target: SCNA; (-) strand; PAM type: NRG; PAM sequence: CAG
gtcctcattttccaggtatg

SEQ ID NO: 16672 - DNA, 20 bp, Artificial Sequence
  Description of Artificial Sequence: Synthetic oligonucleotide
  Target: SCNA; (-) strand; PAM type: NRG; PAM sequence: AGG
tttgaaagtcctcattttcc

SEQ ID NO: 16673 - DNA, 20 bp, Artificial Sequence
  Description of Artificial Sequence: Synthetic oligonucleotide
  Target: SCNA; (-) strand; PAM type: NRG; PAM sequence: CAG
ttttgaaagtcctcattttc

SEQ ID NO: 16674 - DNA, 20 bp, Artificial Sequence
  Description of Artificial Sequence: Synthetic oligonucleotide
  Target: SCNA; (-) strand; PAM type: NRG; PAM sequence: AAG
ctggcaggaatatgttttga

SEQ ID NO: 16675 - DNA, 20 bp, Artificial Sequence
  Description of Artificial Sequence: Synthetic oligonucleotide
  Target: SCNA; (-) strand; PAM type: NRG; PAM sequence: AGG
aatacctgactgtaactggc

SEQ ID NO: 16676 - DNA, 20 bp, Artificial Sequence
  Description of Artificial Sequence: Synthetic oligonucleotide
  Target: SCNA; (-) strand; PAM type: NRG; PAM sequence: CAG
caatacctgactgtaactgg

SEQ ID NO: 16677 - DNA, 20 bp, Artificial Sequence
  Description of Artificial Sequence: Synthetic oligonucleotide
  Target: SCNA; (-) strand; PAM type: NRG; PAM sequence: TGG
ttgcaatacctgactgtaac

SEQ ID NO: 16678 - DNA, 20 bp, Artificial Sequence
  Description of Artificial Sequence: Synthetic oligonucleotide
  Target: SCNA; (-) strand; PAM type: NRG; PAM sequence: TAG
tgaagttctaagcttcagtt

SEQ ID NO: 16679 - DNA, 20 bp, Artificial Sequence
  Description of Artificial Sequence: Synthetic oligonucleotide
  Target: SCNA; (-) strand; PAM type: NRG; PAM sequence: CAG
aaaactgaagttctaagctt

SEQ ID NO: 16680 - DNA, 20 bp, Artificial Sequence
  Description of Artificial Sequence: Synthetic oligonucleotide
  Target: SCNA; (-) strand; PAM type: NRG; PAM sequence: AAG
cgccacaaaactgaagttct

SEQ ID NO: 16681 - DNA, 20 bp, Artificial Sequence
  Description of Artificial Sequence: Synthetic oligonucleotide
  Target: SCNA; (-) strand; PAM type: NRG; PAM sequence: AAG
cgcgccccgccacaaaactg

SEQ ID NO: 16682 - DNA, 20 bp, Artificial Sequence
  Description of Artificial Sequence: Synthetic oligonucleotide
  Target: SCNA; (-) strand; PAM type: NRG; PAM sequence: GAG
ggtgctgggattacaggcgt

SEQ ID NO: 16683 - DNA, 20 bp, Artificial Sequence
  Description of Artificial Sequence: Synthetic oligonucleotide
  Target: SCNA; (-) strand; PAM type: NRG; PAM sequence: AGG
tcccaaggtgctgggattac

SEQ ID NO: 16684 - DNA, 20 bp, Artificial Sequence
  Description of Artificial Sequence: Synthetic oligonucleotide
  Target: SCNA; (-) strand; PAM type: NRG; PAM sequence: CAG
ctcccaaggtgctgggatta

SEQ ID NO: 16685 - DNA, 20 bp, Artificial Sequence
  Description of Artificial Sequence: Synthetic oligonucleotide
  Target: SCNA; (-) strand; PAM type: NRG; PAM sequence: GGG
tcttggcctcccaaggtgct

SEQ ID NO: 16686 - DNA, 20 bp, Artificial Sequence
  Description of Artificial Sequence: Synthetic oligonucleotide
  Target: SCNA; (-) strand; PAM type: NRG; PAM sequence: TGG
gtcttggcctcccaaggtgc

SEQ ID NO: 16687 - DNA, 20 bp, Artificial Sequence
  Description of Artificial Sequence: Synthetic oligonucleotide
  Target: SCNA; (-) strand; PAM type: NRG; PAM sequence: AGG
ccgcctgtcttggcctccca

SEQ ID NO: 16688 - DNA, 20 bp, Artificial Sequence
  Description of Artificial Sequence: Synthetic oligonucleotide
  Target: SCNA; (-) strand; PAM type: NRG; PAM sequence: AAG
tccgcctgtcttggcctccc

SEQ ID NO: 16689 - DNA, 20 bp, Artificial Sequence
  Description of Artificial Sequence: Synthetic oligonucleotide
  Target: SCNA; (-) strand; PAM type: NRG; PAM sequence: TGG
ctcaagtgatccgcctgtct

SEQ ID NO: 16690 - DNA, 20 bp, Artificial Sequence
  Description of Artificial Sequence: Synthetic oligonucleotide
  Target: SCNA; (-) strand; PAM type: NRG; PAM sequence: AAG
ggtcccaaactcctgacctc

SEQ ID NO: 16691 - DNA, 20 bp, Artificial Sequence
  Description of Artificial Sequence: Synthetic oligonucleotide
  Target: SCNA; (-) strand; PAM type: NRG; PAM sequence: TGG
tttcaccatgtgggccaggc

SEQ ID NO: 16692 - DNA, 20 bp, Artificial Sequence
  Description of Artificial Sequence: Synthetic oligonucleotide
  Target: SCNA; (-) strand; PAM type: NRG; PAM sequence: AGG
ggggtttcaccatgtgggcc

SEQ ID NO: 16693 - DNA, 20 bp, Artificial Sequence
  Description of Artificial Sequence: Synthetic oligonucleotide
  Target: SCNA; (-) strand; PAM type: NRG; PAM sequence: CAG
tggggtttcaccatgtgggc

SEQ ID NO: 16694 - DNA, 20 bp, Artificial Sequence
  Description of Artificial Sequence: Synthetic oligonucleotide
  Target: SCNA; (-) strand; PAM type: NRG; PAM sequence: GGG
gagatggggtttcaccatgt

SEQ ID NO: 16695 - DNA, 20 bp, Artificial Sequence
  Description of Artificial Sequence: Synthetic oligonucleotide
  Target: SCNA; (-) strand; PAM type: NRG; PAM sequence: TGG
agagatggggtttcaccatg

SEQ ID NO: 16696 - DNA, 20 bp, Artificial Sequence
  Description of Artificial Sequence: Synthetic oligonucleotide
  Target: SCNA; (-) strand; PAM type: NRG; PAM sequence: GGG
ttgtatttttagtagagatg

SEQ ID NO: 16697 - DNA, 20 bp, Artificial Sequence
  Description of Artificial Sequence: Synthetic oligonucleotide
  Target: SCNA; (-) strand; PAM type: NRG; PAM sequence: GGG
tttgtatttttagtagagat

SEQ ID NO: 16698 - DNA, 20 bp, Artificial Sequence
  Description of Artificial Sequence: Synthetic oligonucleotide
  Target: SCNA; (-) strand; PAM type: NRG; PAM sequence: TGG
ttttgtatttttagtagaga

SEQ ID NO: 16699 - DNA, 20 bp, Artificial Sequence
  Description of Artificial Sequence: Synthetic oligonucleotide
  Target: SCNA; (-) strand; PAM type: NRG; PAM sequence: GAG
taatttttgtatttttagta

SEQ ID NO: 16700 - DNA, 20 bp, Artificial Sequence
  Description of Artificial Sequence: Synthetic oligonucleotide
  Target: SCNA; (-) strand; PAM type: NRG; PAM sequence: TAG
gctaatttttgtatttttag

SEQ ID NO: 16701 - DNA, 20 bp, Artificial Sequence
  Description of Artificial Sequence: Synthetic oligonucleotide
  Target: SCNA; (-) strand; PAM type: NRG; PAM sequence: TAG
ctggctaatttttgtatttt

SEQ ID NO: 16702 - DNA, 20 bp, Artificial Sequence
  Description of Artificial Sequence: Synthetic oligonucleotide
  Target: SCNA; (-) strand; PAM type: NRG; PAM sequence: TGG
caggtgcgtgcaaccatgcc

SEQ ID NO: 16703 - DNA, 20 bp, Artificial Sequence
  Description of Artificial Sequence: Synthetic oligonucleotide
  Target: SCNA; (-) strand; PAM type: NRG; PAM sequence: AGG
acctgagtaactgggactac

SEQ ID NO: 16704 - DNA, 20 bp, Artificial Sequence
  Description of Artificial Sequence: Synthetic oligonucleotide
  Target: SCNA; (-) strand; PAM type: NRG; PAM sequence: CAG
cacctgagtaactgggacta

SEQ ID NO: 16705 - DNA, 20 bp, Artificial Sequence
  Description of Artificial Sequence: Synthetic oligonucleotide
  Target: SCNA; (-) strand; PAM type: NRG; PAM sequence: GGG
cctcagccacctgagtaact

SEQ ID NO: 16706 - DNA, 20 bp, Artificial Sequence
  Description of Artificial Sequence: Synthetic oligonucleotide
  Target: SCNA; (-) strand; PAM type: NRG; PAM sequence: TGG
gcctcagccacctgagtaac

SEQ ID NO: 16707 - DNA, 20 bp, Artificial Sequence
  Description of Artificial Sequence: Synthetic oligonucleotide
  Target: SCNA; (-) strand; PAM type: NRG; PAM sequence: GAG
ttcttctgcctcagccacct

SEQ ID NO: 16708 - DNA, 20 bp, Artificial Sequence
  Description of Artificial Sequence: Synthetic oligonucleotide
  Target: SCNA; (-) strand; PAM type: NRG; PAM sequence: CAG
ttcaagcgattcttctgcct

SEQ ID NO: 16709 - DNA, 20 bp, Artificial Sequence
  Description of Artificial Sequence: Synthetic oligonucleotide
  Target: SCNA; (-) strand; PAM type: NRG; PAM sequence: AAG
aatctccaccacccaggttc

SEQ ID NO: 16710 - DNA, 20 bp, Artificial Sequence
  Description of Artificial Sequence: Synthetic oligonucleotide
  Target: SCNA; (-) strand; PAM type: NRG; PAM sequence: AGG
cactgcaatctccaccaccc

SEQ ID NO: 16711 - DNA, 20 bp, Artificial Sequence
  Description of Artificial Sequence: Synthetic oligonucleotide
  Target: SCNA; (-) strand; PAM type: NRG; PAM sequence: CAG
tcactgcaatctccaccacc

SEQ ID NO: 16712 - DNA, 20 bp, Artificial Sequence
  Description of Artificial Sequence: Synthetic oligonucleotide
  Target: SCNA; (-) strand; PAM type: NRG; PAM sequence: CAG
ggagtgcagtggcaggatct

SEQ ID NO: 16713 - DNA, 20 bp, Artificial Sequence
  Description of Artificial Sequence: Synthetic oligonucleotide
  Target: SCNA; (-) strand; PAM type: NRG; PAM sequence: AGG
ccaggctggagtgcagtggc

SEQ ID NO: 16714 - DNA, 20 bp, Artificial Sequence
  Description of Artificial Sequence: Synthetic oligonucleotide
  Target: SCNA; (-) strand; PAM type: NRG; PAM sequence: CAG
cccaggctggagtgcagtgg

SEQ ID NO: 16715 - DNA, 20 bp, Artificial Sequence
  Description of Artificial Sequence: Synthetic oligonucleotide
  Target: SCNA; (-) strand; PAM type: NRG; PAM sequence: TGG
ttgcccaggctggagtgcag

SEQ ID NO: 16716 - DNA, 20 bp, Artificial Sequence
  Description of Artificial Sequence: Synthetic oligonucleotide
  Target: SCNA; (-) strand; PAM type: NRG; PAM sequence: CAG
ctcttgcccaggctggagtg

SEQ ID NO: 16717 - DNA, 20 bp, Artificial Sequence
  Description of Artificial Sequence: Synthetic oligonucleotide
  Target: SCNA; (-) strand; PAM type: NRG; PAM sequence: GAG
tcactctcttgcccaggctg

SEQ ID NO: 16718 - DNA, 20 bp, Artificial Sequence
  Description of Artificial Sequence: Synthetic oligonucleotide
  Target: SCNA; (-) strand; PAM type: NRG; PAM sequence: TGG
tctcactctcttgcccaggc

SEQ ID NO: 16719 - DNA, 20 bp, Artificial Sequence
  Description of Artificial Sequence: Synthetic oligonucleotide
  Target: SCNA; (-) strand; PAM type: NRG; PAM sequence: AGG
ggagtctcactctcttgccc

SEQ ID NO: 16720 - DNA, 20 bp, Artificial Sequence
  Description of Artificial Sequence: Synthetic oligonucleotide
  Target: SCNA; (-) strand; PAM type: NRG; PAM sequence: CAG
tggagtctcactctcttgcc

SEQ ID NO: 16721 - DNA, 20 bp, Artificial Sequence
  Description of Artificial Sequence: Synthetic oligonucleotide
  Target: SCNA; (-) strand; PAM type: NRG; PAM sequence: GAG
ttctttatttttttgagatg

SEQ ID NO: 16722 - DNA, 20 bp, Artificial Sequence
  Description of Artificial Sequence: Synthetic oligonucleotide
  Target: SCNA; (-) strand; PAM type: NRG; PAM sequence: TGG
agttctttatttttttgaga

SEQ ID NO: 16723 - DNA, 20 bp, Artificial Sequence
  Description of Artificial Sequence: Synthetic oligonucleotide
  Target: SCNA; (-) strand; PAM type: NRG; PAM sequence: GAG
ttggagttctttattttttt

SEQ ID NO: 16724 - DNA, 20 bp, Artificial Sequence
  Description of Artificial Sequence: Synthetic oligonucleotide
  Target: SCNA; (-) strand; PAM type: NRG; PAM sequence: GAG
ccatgaagaaaataaaattg

SEQ ID NO: 16725 - DNA, 20 bp, Artificial Sequence
  Description of Artificial Sequence: Synthetic oligonucleotide
  Target: SCNA; (-) strand; PAM type: NRG; PAM sequence: TGG
tgccatgaagaaaataaaat

SEQ ID NO: 16726 - DNA, 20 bp, Artificial Sequence
  Description of Artificial Sequence: Synthetic oligonucleotide
  Target: SCNA; (-) strand; PAM type: NRG; PAM sequence: AAG
atctattatgctatgccatg

SEQ ID NO: 16727 - DNA, 20 bp, Artificial Sequence
  Description of Artificial Sequence: Synthetic oligonucleotide
  Target: SCNA; (-) strand; PAM type: NRG; PAM sequence: TGG
caggcaggttaaatatttta

SEQ ID NO: 16728 - DNA, 20 bp, Artificial Sequence
  Description of Artificial Sequence: Synthetic oligonucleotide
  Target: SCNA; (-) strand; PAM type: NRG; PAM sequence: AGG
atttaggggaagtaacaggc

SEQ ID NO: 16729 - DNA, 20 bp, Artificial Sequence
  Description of Artificial Sequence: Synthetic oligonucleotide
  Target: SCNA; (-) strand; PAM type: NRG; PAM sequence: CAG
gatttaggggaagtaacagg

SEQ ID NO: 16730 - DNA, 20 bp, Artificial Sequence
  Description of Artificial Sequence: Synthetic oligonucleotide
  Target: SCNA; (-) strand; PAM type: NRG; PAM sequence: AGG
agagatttaggggaagtaac

SEQ ID NO: 16731 - DNA, 20 bp, Artificial Sequence
  Description of Artificial Sequence: Synthetic oligonucleotide
  Target: SCNA; (-) strand; PAM type: NRG; PAM sequence: CAG
gagagatttaggggaagtaa

SEQ ID NO: 16732 - DNA, 20 bp, Artificial Sequence
  Description of Artificial Sequence: Synthetic oligonucleotide
  Target: SCNA; (-) strand; PAM type: NRG; PAM sequence: AAG
gctacagagagatttagggg

SEQ ID NO: 16733 - DNA, 20 bp, Artificial Sequence
  Description of Artificial Sequence: Synthetic oligonucleotide
  Target: SCNA; (-) strand; PAM type: NRG; PAM sequence: GGG
tcagctacagagagatttag

SEQ ID NO: 16734 - DNA, 20 bp, Artificial Sequence
  Description of Artificial Sequence: Synthetic oligonucleotide
  Target: SCNA; (-) strand; PAM type: NRG; PAM sequence: GGG
atcagctacagagagattta

SEQ ID NO: 16735 - DNA, 20 bp, Artificial Sequence
  Description of Artificial Sequence: Synthetic oligonucleotide
  Target: SCNA; (-) strand; PAM type: NRG; PAM sequence: AGG
catcagctacagagagattt

SEQ ID NO: 16736 - DNA, 20 bp, Artificial Sequence
  Description of Artificial Sequence: Synthetic oligonucleotide
  Target: SCNA; (-) strand; PAM type: NRG; PAM sequence: TAG
gcatcagctacagagagatt

SEQ ID NO: 16737 - DNA, 20 bp, Artificial Sequence
  Description of Artificial Sequence: Synthetic oligonucleotide
  Target: SCNA; (-) strand; PAM type: NRG; PAM sequence: GAG
attggggcatcagctacaga

SEQ ID NO: 16738 - DNA, 20 bp, Artificial Sequence
  Description of Artificial Sequence: Synthetic oligonucleotide
  Target: SCNA; (-) strand; PAM type: NRG; PAM sequence: GAG
aaattggggcatcagctaca

SEQ ID NO: 16739 - DNA, 20 bp, Artificial Sequence
  Description of Artificial Sequence: Synthetic oligonucleotide
  Target: SCNA; (-) strand; PAM type: NRG; PAM sequence: CAG
tgaaattggggcatcagcta

SEQ ID NO: 16740 - DNA, 20 bp, Artificial Sequence
  Description of Artificial Sequence: Synthetic oligonucleotide
  Target: SCNA; (-) strand; PAM type: NRG; PAM sequence: CAG
taatagtgaaattggggcat

SEQ ID NO: 16741 - DNA, 20 bp, Artificial Sequence
  Description of Artificial Sequence: Synthetic oligonucleotide
  Target: SCNA; (-) strand; PAM type: NRG; PAM sequence: GGG
aagagctaatagtgaaattg

SEQ ID NO: 16742 - DNA, 20 bp, Artificial Sequence
  Description of Artificial Sequence: Synthetic oligonucleotide
  Target: SCNA; (-) strand; PAM type: NRG; PAM sequence: GGG
gaagagctaatagtgaaatt

SEQ ID NO: 16743 - DNA, 20 bp, Artificial Sequence
  Description of Artificial Sequence: Synthetic oligonucleotide
  Target: SCNA; (-) strand; PAM type: NRG; PAM sequence: TGG
tgaagagctaatagtgaaat

SEQ ID NO: 16744 - DNA, 20 bp, Artificial Sequence
  Description of Artificial Sequence: Synthetic oligonucleotide
  Target: SCNA; (-) strand; PAM type: NRG; PAM sequence: TAG
atccaagtctgaagagctaa

SEQ ID NO: 16745 - DNA, 20 bp, Artificial Sequence
  Description of Artificial Sequence: Synthetic oligonucleotide
  Target: SCNA; (-) strand; PAM type: NRG; PAM sequence: GAG
gcttaacatccaagtctgaa

SEQ ID NO: 16746 - DNA, 20 bp, Artificial Sequence
  Description of Artificial Sequence: Synthetic oligonucleotide
  Target: SCNA; (-) strand; PAM type: NRG; PAM sequence: AAG
gtgcttaacatccaagtctg

SEQ ID NO: 16747 - DNA, 20 bp, Artificial Sequence
  Description of Artificial Sequence: Synthetic oligonucleotide
  Target: SCNA; (-) strand; PAM type: NRG; PAM sequence: AAG
aggcacagtgcttaacatcc

SEQ ID NO: 16748 - DNA, 20 bp, Artificial Sequence
  Description of Artificial Sequence: Synthetic oligonucleotide
  Target: SCNA; (-) strand; PAM type: NRG; PAM sequence: CAG
gagaggtccaggggaaggca

SEQ ID NO: 16749 - DNA, 20 bp, Artificial Sequence
  Description of Artificial Sequence: Synthetic oligonucleotide
  Target: SCNA; (-) strand; PAM type: NRG; PAM sequence: AGG
ttaaagagaggtccagggga

SEQ ID NO: 16750 - DNA, 20 bp, Artificial Sequence
  Description of Artificial Sequence: Synthetic oligonucleotide
  Target: SCNA; (-) strand; PAM type: NRG; PAM sequence: AAG
tttaaagagaggtccagggg

SEQ ID NO: 16751 - DNA, 20 bp, Artificial Sequence
  Description of Artificial Sequence: Synthetic oligonucleotide
  Target: SCNA; (-) strand; PAM type: NRG; PAM sequence: GGG
acatttaaagagaggtccag

SEQ ID NO: 16752 - DNA, 20 bp, Artificial Sequence
  Description of Artificial Sequence: Synthetic oligonucleotide
  Target: SCNA; (-) strand; PAM type: NRG; PAM sequence: GGG
gacatttaaagagaggtcca

SEQ ID NO: 16753 - DNA, 20 bp, Artificial Sequence
  Description of Artificial Sequence: Synthetic oligonucleotide
  Target: SCNA; (-) strand; PAM type: NRG; PAM sequence: AGG
tgacatttaaagagaggtcc

SEQ ID NO: 16754 - DNA, 20 bp, Artificial Sequence
  Description of Artificial Sequence: Synthetic oligonucleotide
  Target: SCNA; (-) strand; PAM type: NRG; PAM sequence: CAG
gtgacatttaaagagaggtc

SEQ ID NO: 16755 - DNA, 20 bp, Artificial Sequence
  Description of Artificial Sequence: Synthetic oligonucleotide
  Target: SCNA; (-) strand; PAM type: NRG; PAM sequence: AGG
tagctgtgacatttaaagag

SEQ ID NO: 16756 - DNA, 20 bp, Artificial Sequence
  Description of Artificial Sequence: Synthetic oligonucleotide
  Target: SCNA; (-) strand; PAM type: NRG; PAM sequence: GAG
atagctgtgacatttaaaga

SEQ ID NO: 16757 - DNA, 20 bp, Artificial Sequence
  Description of Artificial Sequence: Synthetic oligonucleotide
  Target: SCNA; (-) strand; PAM type: NRG; PAM sequence: GAG
aaatagctgtgacatttaaa

SEQ ID NO: 16758 - DNA, 20 bp, Artificial Sequence
  Description of Artificial Sequence: Synthetic oligonucleotide
  Target: SCNA; (-) strand; PAM type: NRG; PAM sequence: AAG
agaaatagctgtgacattta

SEQ ID NO: 16759 - DNA, 20 bp, Artificial Sequence
  Description of Artificial Sequence: Synthetic oligonucleotide
  Target: SCNA; (-) strand; PAM type: NRG; PAM sequence: TAG
atagtcttacctgccagaaa

SEQ ID NO: 16760 - DNA, 20 bp, Artificial Sequence
  Description of Artificial Sequence: Synthetic oligonucleotide
  Target: SCNA; (-) strand; PAM type: NRG; PAM sequence: CAG
aaagcaatagtcttacctgc

SEQ ID NO: 16761 - DNA, 20 bp, Artificial Sequence
  Description of Artificial Sequence: Synthetic oligonucleotide
  Target: SCNA; (-) strand; PAM type: NRG; PAM sequence: TAG
gttcacactaaccaaagcaa

SEQ ID NO: 16762 - DNA, 20 bp, Artificial Sequence
  Description of Artificial Sequence: Synthetic oligonucleotide
  Target: SCNA; (-) strand; PAM type: NRG; PAM sequence: AAG
gtgtgtgttcacactaacca

SEQ ID NO: 16763 - DNA, 20 bp, Artificial Sequence
  Description of Artificial Sequence: Synthetic oligonucleotide
  Target: SCNA; (-) strand; PAM type: NRG; PAM sequence: TGG
aggtgccttgtgatccacag

SEQ ID NO: 16764 - DNA, 20 bp, Artificial Sequence
  Description of Artificial Sequence: Synthetic oligonucleotide
  Target: SCNA; (-) strand; PAM type: NRG; PAM sequence: CAG
ctcaggtgccttgtgatcca

SEQ ID NO: 16765 - DNA, 20 bp, Artificial Sequence
  Description of Artificial Sequence: Synthetic oligonucleotide
  Target: SCNA; (-) strand; PAM type: NRG; PAM sequence: AGG
tttcggcagccttttctctc

SEQ ID NO: 16766 - DNA, 20 bp, Artificial Sequence
  Description of Artificial Sequence: Synthetic oligonucleotide
  Target: SCNA; (-) strand; PAM type: NRG; PAM sequence: CAG
ctttcggcagccttttctct

SEQ ID NO: 16767 - DNA, 20 bp, Artificial Sequence
  Description of Artificial Sequence: Synthetic oligonucleotide
  Target: SCNA; (-) strand; PAM type: NRG; PAM sequence: CAG
agttattttcctgctttcgg

SEQ ID NO: 16768 - DNA, 20 bp, Artificial Sequence
  Description of Artificial Sequence: Synthetic oligonucleotide
  Target: SCNA; (-) strand; PAM type: NRG; PAM sequence: CGG
ctgagttattttcctgcttt

SEQ ID NO: 16769 - DNA, 20 bp, Artificial Sequence
  Description of Artificial Sequence: Synthetic oligonucleotide
  Target: SCNA; (-) strand; PAM type: NRG; PAM sequence: GAG
tgtttttttttcttttttct

SEQ ID NO: 16770 - DNA, 20 bp, Artificial Sequence
  Description of Artificial Sequence: Synthetic oligonucleotide
  Target: SCNA; (-) strand; PAM type: NRG; PAM sequence: CAG
tgcatatctgttgtattttt

SEQ ID NO: 16771 - DNA, 20 bp, Artificial Sequence
  Description of Artificial Sequence: Synthetic oligonucleotide
  Target: SCNA; (-) strand; PAM type: NRG; PAM sequence: AAG
actgacataaattagatcat

SEQ ID NO: 16772 - DNA, 20 bp, Artificial Sequence
  Description of Artificial Sequence: Synthetic oligonucleotide
  Target: SCNA; (-) strand; PAM type: NRG; PAM sequence: TAG
ttttaatgactgacataaat

SEQ ID NO: 16773 - DNA, 20 bp, Artificial Sequence
  Description of Artificial Sequence: Synthetic oligonucleotide
  Target: SCNA; (-) strand; PAM type: NRG; PAM sequence: CAG
atattaaatataaccataga

SEQ ID NO: 16774 - DNA, 20 bp, Artificial Sequence
  Description of Artificial Sequence: Synthetic oligonucleotide
  Target: SCNA; (-) strand; PAM type: NRG; PAM sequence: TAG
cacaatattaaatataacca

SEQ ID NO: 16775 - DNA, 20 bp, Artificial Sequence
  Description of Artificial Sequence: Synthetic oligonucleotide
  Target: SCNA; (-) strand; PAM type: NRG; PAM sequence: TGG
atgctttgctttgtattaag

SEQ ID NO: 16776 - DNA, 20 bp, Artificial Sequence
  Description of Artificial Sequence: Synthetic oligonucleotide
  Target: SCNA; (-) strand; PAM type: NRG; PAM sequence: AAG
agaatgctttgctttgtatt

SEQ ID NO: 16777 - DNA, 20 bp, Artificial Sequence
  Description of Artificial Sequence: Synthetic oligonucleotide
  Target: SCNA; (-) strand; PAM type: NRG; PAM sequence: AAG
cactctccatgagagcaagc

SEQ ID NO: 16778 - DNA, 20 bp, Artificial Sequence
  Description of Artificial Sequence: Synthetic oligonucleotide
  Target: SCNA; (-) strand; PAM type: NRG; PAM sequence: AAG
attgcactctccatgagagc

SEQ ID NO: 16779 - DNA, 20 bp, Artificial Sequence
  Description of Artificial Sequence: Synthetic oligonucleotide
  Target: SCNA; (-) strand; PAM type: NRG; PAM sequence: GAG
ctaaattgcactctccatga

SEQ ID NO: 16780 - DNA, 20 bp, Artificial Sequence
  Description of Artificial Sequence: Synthetic oligonucleotide
  Target: SCNA; (-) strand; PAM type: NRG; PAM sequence: GAG
ttctaaattgcactctccat

SEQ ID NO: 16781 - DNA, 20 bp, Artificial Sequence
  Description of Artificial Sequence: Synthetic oligonucleotide
  Target: SCNA; (-) strand; PAM type: NRG; PAM sequence: GAG
ataaaccctccttagaaatt

SEQ ID NO: 16782 - DNA, 20 bp, Artificial Sequence
  Description of Artificial Sequence: Synthetic oligonucleotide
  Target: SCNA; (-) strand; PAM type: NRG; PAM sequence: TAG
tagagtacataaaccctcct

SEQ ID NO: 16783 - DNA, 20 bp, Artificial Sequence
  Description of Artificial Sequence: Synthetic oligonucleotide
  Target: SCNA; (-) strand; PAM type: NRG; PAM sequence: GAG
ccttggtgtgcctcaagata

SEQ ID NO: 16784 - DNA, 20 bp, Artificial Sequence
  Description of Artificial Sequence: Synthetic oligonucleotide
  Target: SCNA; (-) strand; PAM type: NRG; PAM sequence: TAG
ctccttggtgtgcctcaaga

SEQ ID NO: 16785 - DNA, 20 bp, Artificial Sequence
  Description of Artificial Sequence: Synthetic oligonucleotide
  Target: SCNA; (-) strand; PAM type: NRG; PAM sequence: AAG
caatctccttggtgtgcctc

SEQ ID NO: 16786 - DNA, 20 bp, Artificial Sequence
  Description of Artificial Sequence: Synthetic oligonucleotide
  Target: SCNA; (-) strand; PAM type: NRG; PAM sequence: TGG
actggtaaactcaatctcct

SEQ ID NO: 16787 - DNA, 20 bp, Artificial Sequence
  Description of Artificial Sequence: Synthetic oligonucleotide
  Target: SCNA; (-) strand; PAM type: NRG; PAM sequence: TGG
tatggcagtgctttctaaac

SEQ ID NO: 16788 - DNA, 20 bp, Artificial Sequence
  Description of Artificial Sequence: Synthetic oligonucleotide
  Target: SCNA; (-) strand; PAM type: NRG; PAM sequence: CAG
ctccctgacttgaattatgg

SEQ ID NO: 16789 - DNA, 20 bp, Artificial Sequence
  Description of Artificial Sequence: Synthetic oligonucleotide
  Target: SCNA; (-) strand; PAM type: NRG; PAM sequence: TGG
cctctccctgacttgaatta

SEQ ID NO: 16790 - DNA, 20 bp, Artificial Sequence
  Description of Artificial Sequence: Synthetic oligonucleotide
  Target: SCNA; (-) strand; PAM type: NRG; PAM sequence: CAG
atcttttaaaaatcttccat

SEQ ID NO: 16791 - DNA, 20 bp, Artificial Sequence
  Description of Artificial Sequence: Synthetic oligonucleotide
  Target: SCNA; (-) strand; PAM type: NRG; PAM sequence: CAG
tattttgttttgttaaaagc

SEQ ID NO: 16792 - DNA, 20 bp, Artificial Sequence
  Description of Artificial Sequence: Synthetic oligonucleotide
  Target: SCNA; (-) strand; PAM type: NRG; PAM sequence: AAG
gaaatattttgttttgttaa

SEQ ID NO: 16793 - DNA, 20 bp, Artificial Sequence
  Description of Artificial Sequence: Synthetic oligonucleotide
  Target: SCNA; (-) strand; PAM type: NRG; PAM sequence: TGG
tcagtcagccagaagccaca

SEQ ID NO: 16794 - DNA, 20 bp, Artificial Sequence
  Description of Artificial Sequence: Synthetic oligonucleotide
  Target: SCNA; (-) strand; PAM type: NRG; PAM sequence: AAG
ttattaattcagtcagccag

SEQ ID NO: 16795 - DNA, 20 bp, Artificial Sequence
  Description of Artificial Sequence: Synthetic oligonucleotide
  Target: SCNA; (-) strand; PAM type: NRG; PAM sequence: CAG
gccttattaattcagtcagc

SEQ ID NO: 16796 - DNA, 20 bp, Artificial Sequence
  Description of Artificial Sequence: Synthetic oligonucleotide
  Target: SCNA; (-) strand; PAM type: NRG; PAM sequence: CAG
ctgggccttattaattcagt

SEQ ID NO: 16797 - DNA, 20 bp, Artificial Sequence
  Description of Artificial Sequence: Synthetic oligonucleotide
  Target: SCNA; (-) strand; PAM type: NRG; PAM sequence: CAG
gtctctgggccttattaatt

SEQ ID NO: 16798 - DNA, 20 bp, Artificial Sequence
  Description of Artificial Sequence: Synthetic oligonucleotide
  Target: SCNA; (-) strand; PAM type: NRG; PAM sequence: GGG
ttgccttcagatcagtctct

SEQ ID NO: 16799 - DNA, 20 bp, Artificial Sequence
  Description of Artificial Sequence: Synthetic oligonucleotide
  Target: SCNA; (-) strand; PAM type: NRG; PAM sequence: TGG
tttgccttcagatcagtctc

SEQ ID NO: 16800 - DNA, 20 bp, Artificial Sequence
  Description of Artificial Sequence: Synthetic oligonucleotide
  Target: SCNA; (-) strand; PAM type: NRG; PAM sequence: CAG
aaaggcttttgccttcagat

SEQ ID NO: 16801 - DNA, 20 bp, Artificial Sequence
  Description of Artificial Sequence: Synthetic oligonucleotide
  Target: SCNA; (-) strand; PAM type: NRG; PAM sequence: CAG
aaaataaaggcttttgcctt

SEQ ID NO: 16802 - DNA, 20 bp, Artificial Sequence
  Description of Artificial Sequence: Synthetic oligonucleotide
  Target: SCNA; (-) strand; PAM type: NRG; PAM sequence: AGG
tccattgcaataaaaaataa

SEQ ID NO: 16803 - DNA, 20 bp, Artificial Sequence
  Description of Artificial Sequence: Synthetic oligonucleotide
  Target: SCNA; (-) strand; PAM type: NRG; PAM sequence: AAG
ctccattgcaataaaaaata

SEQ ID NO: 16804 - DNA, 20 bp, Artificial Sequence
  Description of Artificial Sequence: Synthetic oligonucleotide
  Target: SCNA; (-) strand; PAM type: NRG; PAM sequence: CAG
actgatagtcaaataatgtt

SEQ ID NO: 16805 - DNA, 20 bp, Artificial Sequence
  Description of Artificial Sequence: Synthetic oligonucleotide
  Target: SCNA; (-) strand; PAM type: NRG; PAM sequence: TAG
ttactaaacttcacaactga

SEQ ID NO: 16806 - DNA, 20 bp, Artificial Sequence
  Description of Artificial Sequence: Synthetic oligonucleotide
  Target: SCNA; (-) strand; PAM type: NRG; PAM sequence: TAG
taaatattaaaaccacccat

SEQ ID NO: 16807 - DNA, 20 bp, Artificial Sequence
  Description of Artificial Sequence: Synthetic oligonucleotide
  Target: SCNA; (-) strand; PAM type: NRG; PAM sequence: GAG
agtggtcttgcaaaacattg

SEQ ID NO: 16808 - DNA, 20 bp, Artificial Sequence
  Description of Artificial Sequence: Synthetic oligonucleotide
  Target: SCNA; (-) strand; PAM type: NRG; PAM sequence: TGG
ttagtggtcttgcaaaacat

SEQ ID NO: 16809 - DNA, 20 bp, Artificial Sequence
  Description of Artificial Sequence: Synthetic oligonucleotide
  Target: SCNA; (-) strand; PAM type: NRG; PAM sequence: TGG
taaagatgattattaattag

SEQ ID NO: 16810 - DNA, 20 bp, Artificial Sequence
  Description of Artificial Sequence: Synthetic oligonucleotide
  Target: SCNA; (-) strand; PAM type: NRG; PAM sequence: TAG
ttgtaaagatgattattaat

SEQ ID NO: 16811 - DNA, 20 bp, Artificial Sequence
  Description of Artificial Sequence: Synthetic oligonucleotide
  Target: SCNA; (-) strand; PAM type: NRG; PAM sequence: AAG
aattacatgttccatttgta

SEQ ID NO: 16812 - DNA, 20 bp, Artificial Sequence
  Description of Artificial Sequence: Synthetic oligonucleotide
  Target: SCNA; (-) strand; PAM type: NRG; PAM sequence: CAG
tggcaaagaaaaaatagtag

SEQ ID NO: 16813 - DNA, 20 bp, Artificial Sequence
  Description of Artificial Sequence: Synthetic oligonucleotide
  Target: SCNA; (-) strand; PAM type: NRG; PAM sequence: TAG
cattggcaaagaaaaaatag

SEQ ID NO: 16814 - DNA, 20 bp, Artificial Sequence
  Description of Artificial Sequence: Synthetic oligonucleotide
  Target: SCNA; (-) strand; PAM type: NRG; PAM sequence: TAG
aagcattggcaaagaaaaaa

SEQ ID NO: 16815 - DNA, 20 bp, Artificial Sequence
  Description of Artificial Sequence: Synthetic oligonucleotide
  Target: SCNA; (-) strand; PAM type: NRG; PAM sequence: AAG
ataagtattaagcattggca

SEQ ID NO: 16816 - DNA, 20 bp, Artificial Sequence
  Description of Artificial Sequence: Synthetic oligonucleotide
  Target: SCNA; (-) strand; PAM type: NRG; PAM sequence: TGG
tcaaaataagtattaagcat

SEQ ID NO: 16817 - DNA, 20 bp, Artificial Sequence
  Description of Artificial Sequence: Synthetic oligonucleotide
  Target: SCNA; (-) strand; PAM type: NRG; PAM sequence: AAG
acgtattcaaaataagtatt

SEQ ID NO: 16818 - DNA, 20 bp, Artificial Sequence
  Description of Artificial Sequence: Synthetic oligonucleotide
  Target: SCNA; (-) strand; PAM type: NRG; PAM sequence: AAG
aaataaaacgtattcaaaat

SEQ ID NO: 16819 - DNA, 20 bp, Artificial Sequence
  Description of Artificial Sequence: Synthetic oligonucleotide
  Target: SCNA; (-) strand; PAM type: NRG; PAM sequence: TAG
tagaaataaatagagaaatt

SEQ ID NO: 16820 - DNA, 20 bp, Artificial Sequence
  Description of Artificial Sequence: Synthetic oligonucleotide
  Target: SCNA; (-) strand; PAM type: NRG; PAM sequence: GAG
tgctcaggtagaaataaata

SEQ ID NO: 16821 - DNA, 20 bp, Artificial Sequence
  Description of Artificial Sequence: Synthetic oligonucleotide
  Target: SCNA; (-) strand; PAM type: NRG; PAM sequence: TAG
aatgctcaggtagaaataaa

SEQ ID NO: 16822 - DNA, 20 bp, Artificial Sequence
  Description of Artificial Sequence: Synthetic oligonucleotide
  Target: SCNA; (-) strand; PAM type: NRG; PAM sequence: TAG
aaaattaagaaatgctcagg

SEQ ID NO: 16823 - DNA, 20 bp, Artificial Sequence
  Description of Artificial Sequence: Synthetic oligonucleotide
  Target: SCNA; (-) strand; PAM type: NRG; PAM sequence: AGG
aaaaaaattaagaaatgctc

SEQ ID NO: 16824 - DNA, 20 bp, Artificial Sequence
  Description of Artificial Sequence: Synthetic oligonucleotide
  Target: SCNA; (-) strand; PAM type: NRG; PAM sequence: CAG
taaaaaaattaagaaatgct

SEQ ID NO: 16825 - DNA, 20 bp, Artificial Sequence
  Description of Artificial Sequence: Synthetic oligonucleotide
  Target: SCNA; (-) strand; PAM type: NRG; PAM sequence: AAG
caggactgaataaaaaaatt

SEQ ID NO: 16826 - DNA, 20 bp, Artificial Sequence
  Description of Artificial Sequence: Synthetic oligonucleotide
  Target: SCNA; (-) strand; PAM type: NRG; PAM sequence: AGG
aatcctacagtgagaataac

SEQ ID NO: 16827 - DNA, 20 bp, Artificial Sequence
  Description of Artificial Sequence: Synthetic oligonucleotide
  Target: SCNA; (-) strand; PAM type: NRG; PAM sequence: CAG
aaatcctacagtgagaataa

SEQ ID NO: 16828 - DNA, 20 bp, Artificial Sequence
  Description of Artificial Sequence: Synthetic oligonucleotide
  Target: SCNA; (-) strand; PAM type: NRG; PAM sequence: GAG
gcttttaaaaatcctacagt

SEQ ID NO: 16829 - DNA, 20 bp, Artificial Sequence
  Description of Artificial Sequence: Synthetic oligonucleotide
  Target: SCNA; (-) strand; PAM type: NRG; PAM sequence: CAG
accagcttttaaaaatccta

SEQ ID NO: 16830 - DNA, 20 bp, Artificial Sequence
  Description of Artificial Sequence: Synthetic oligonucleotide
  Target: SCNA; (-) strand; PAM type: NRG; PAM sequence: CAG
aggattttaatataatatac

SEQ ID NO: 16831 - DNA, 20 bp, Artificial Sequence
  Description of Artificial Sequence: Synthetic oligonucleotide
  Target: SCNA; (-) strand; PAM type: NRG; PAM sequence: AGG
attgctgaattcacagttga

SEQ ID NO: 16832 - DNA, 20 bp, Artificial Sequence
  Description of Artificial Sequence: Synthetic oligonucleotide
  Target: SCNA; (-) strand; PAM type: NRG; PAM sequence: AAG
cattgctgaattcacagttg

SEQ ID NO: 16833 - DNA, 20 bp, Artificial Sequence
  Description of Artificial Sequence: Synthetic oligonucleotide
  Target: SCNA; (-) strand; PAM type: NRG; PAM sequence: CAG
tcaaaacattgctgaattca

SEQ ID NO: 16834 - DNA, 20 bp, Artificial Sequence
  Description of Artificial Sequence: Synthetic oligonucleotide
  Target: SCNA; (-) strand; PAM type: NRG; PAM sequence: TGG
cctaatgccagatgaatccc

SEQ ID NO: 16835 - DNA, 20 bp, Artificial Sequence
  Description of Artificial Sequence: Synthetic oligonucleotide
  Target: SCNA; (-) strand; PAM type: NRG; PAM sequence: CAG
tgacaaggtcagcctaatgc

SEQ ID NO: 16836 - DNA, 20 bp, Artificial Sequence
  Description of Artificial Sequence: Synthetic oligonucleotide
  Target: SCNA; (-) strand; PAM type: NRG; PAM sequence: CAG
atgtttatgcttgacaaggt

SEQ ID NO: 16837 - DNA, 20 bp, Artificial Sequence
  Description of Artificial Sequence: Synthetic oligonucleotide
  Target: SCNA; (-) strand; PAM type: NRG; PAM sequence: AGG
gttgatgtttatgcttgaca

SEQ ID NO: 16838 - DNA, 20 bp, Artificial Sequence
  Description of Artificial Sequence: Synthetic oligonucleotide
  Target: SCNA; (-) strand; PAM type: NRG; PAM sequence: AAG
tgttgatgtttatgcttgac

SEQ ID NO: 16839 - DNA, 20 bp, Artificial Sequence
  Description of Artificial Sequence: Synthetic oligonucleotide
  Target: SCNA; (-) strand; PAM type: NRG; PAM sequence: AGG
ttgacctcttattttgattc

SEQ ID NO: 16840 - DNA, 20 bp, Artificial Sequence
  Description of Artificial Sequence: Synthetic oligonucleotide
  Target: SCNA; (-) strand; PAM type: NRG; PAM sequence: CAG
tttgacctcttattttgatt

SEQ ID NO: 16841 - DNA, 20 bp, Artificial Sequence
  Description of Artificial Sequence: Synthetic oligonucleotide
  Target: SCNA; (-) strand; PAM type: NRG; PAM sequence: TGG
tttcaagacacaaaacaccc

SEQ ID NO: 16842 - DNA, 20 bp, Artificial Sequence
  Description of Artificial Sequence: Synthetic oligonucleotide
  Target: SCNA; (-) strand; PAM type: NRG; PAM sequence: AAG
attacagcagaaagattttc

SEQ ID NO: 16843 - DNA, 20 bp, Artificial Sequence
  Description of Artificial Sequence: Synthetic oligonucleotide
  Target: SCNA; (-) strand; PAM type: NRG; PAM sequence: AAG
ctttaggtaattacagcaga

SEQ ID NO: 16844 - DNA, 20 bp, Artificial Sequence
  Description of Artificial Sequence: Synthetic oligonucleotide
  Target: SCNA; (-) strand; PAM type: NRG; PAM sequence: CAG
cagtctttaggtaattacag

SEQ ID NO: 16845 - DNA, 20 bp, Artificial Sequence
  Description of Artificial Sequence: Synthetic oligonucleotide
  Target: SCNA; (-) strand; PAM type: NRG; PAM sequence: CAG
ccacagtctttaggtaatta

SEQ ID NO: 16846 - DNA, 20 bp, Artificial Sequence
  Description of Artificial Sequence: Synthetic oligonucleotide
  Target: SCNA; (-) strand; PAM type: NRG; PAM sequence: AGG
attatctaaccacagtcttt

SEQ ID NO: 16847 - DNA, 20 bp, Artificial Sequence
  Description of Artificial Sequence: Synthetic oligonucleotide
  Target: SCNA; (-) strand; PAM type: NRG; PAM sequence: TAG
aattatctaaccacagtctt

SEQ ID NO: 16848 - DNA, 20 bp, Artificial Sequence
  Description of Artificial Sequence: Synthetic oligonucleotide
  Target: SCNA; (-) strand; PAM type: NRG; PAM sequence: CAG
cctcaataattatctaacca

SEQ ID NO: 16849 - DNA, 20 bp, Artificial Sequence
  Description of Artificial Sequence: Synthetic oligonucleotide
  Target: SCNA; (-) strand; PAM type: NRG; PAM sequence: AAG
gagaaaagggacaattgcaa

SEQ ID NO: 16850 - DNA, 20 bp, Artificial Sequence
  Description of Artificial Sequence: Synthetic oligonucleotide
  Target: SCNA; (-) strand; PAM type: NRG; PAM sequence: GGG
ggtgatctatatagagaaaa

SEQ ID NO: 16851 - DNA, 20 bp, Artificial Sequence
  Description of Artificial Sequence: Synthetic oligonucleotide
  Target: SCNA; (-) strand; PAM type: NRG; PAM sequence: AGG
tggtgatctatatagagaaa

SEQ ID NO: 16852 - DNA, 20 bp, Artificial Sequence
  Description of Artificial Sequence: Synthetic oligonucleotide
  Target: SCNA; (-) strand; PAM type: NRG; PAM sequence: AAG
gtggtgatctatatagagaa

SEQ ID NO: 16853 - DNA, 20 bp, Artificial Sequence
  Description of Artificial Sequence: Synthetic oligonucleotide
  Target: SCNA; (-) strand; PAM type: NRG; PAM sequence: GAG
ttaatgtggtgatctatata

SEQ ID NO: 16854 - DNA, 20 bp, Artificial Sequence
  Description of Artificial Sequence: Synthetic oligonucleotide
  Target: SCNA; (-) strand; PAM type: NRG; PAM sequence: TAG
aattaatgtggtgatctata

SEQ ID NO: 16855 - DNA, 20 bp, Artificial Sequence
  Description of Artificial Sequence: Synthetic oligonucleotide
  Target: SCNA; (-) strand; PAM type: NRG; PAM sequence: TGG
agactctcgtttaattaatg

SEQ ID NO: 16856 - DNA, 20 bp, Artificial Sequence
  Description of Artificial Sequence: Synthetic oligonucleotide
  Target: SCNA; (-) strand; PAM type: NRG; PAM sequence: GAG
aacagcaacctgttcccagt

SEQ ID NO: 16857 - DNA, 20 bp, Artificial Sequence
  Description of Artificial Sequence: Synthetic oligonucleotide
  Target: SCNA; (-) strand; PAM type: NRG; PAM sequence: CAG
gcagaacagcaacctgttcc

SEQ ID NO: 16858 - DNA, 20 bp, Artificial Sequence
  Description of Artificial Sequence: Synthetic oligonucleotide
  Target: SCNA; (-) strand; PAM type: NRG; PAM sequence: CAG
aaatacttaaagatgcagaa

SEQ ID NO: 16859 - DNA, 20 bp, Artificial Sequence
  Description of Artificial Sequence: Synthetic oligonucleotide
  Target: SCNA; (-) strand; PAM type: NRG; PAM sequence: CAG
actaaaaatacttaaagatg

SEQ ID NO: 16860 - DNA, 20 bp, Artificial Sequence
  Description of Artificial Sequence: Synthetic oligonucleotide
  Target: SCNA; (-) strand; PAM type: NRG; PAM sequence: AAG
taaagtactaaaaatactta

SEQ ID NO: 16861 - DNA, 20 bp, Artificial Sequence
  Description of Artificial Sequence: Synthetic oligonucleotide
  Target: SCNA; (-) strand; PAM type: NRG; PAM sequence: AAG
ctttttctcttttgaaaata

SEQ ID NO: 16862 - DNA, 20 bp, Artificial Sequence
  Description of Artificial Sequence: Synthetic oligonucleotide
  Target: SCNA; (-) strand; PAM type: NRG; PAM sequence: TGG
agaagcaatcttcttcttag

SEQ ID NO: 16863 - DNA, 20 bp, Artificial Sequence
  Description of Artificial Sequence: Synthetic oligonucleotide
  Target: SCNA; (-) strand; PAM type: NRG; PAM sequence: TAG
ctgagaagcaatcttcttct

SEQ ID NO: 16864 - DNA, 20 bp, Artificial Sequence
  Description of Artificial Sequence: Synthetic oligonucleotide
  Target: SCNA; (-) strand; PAM type: NRG; PAM sequence: AAG
tatcagaaaatttggctgag

SEQ ID NO: 16865 - DNA, 20 bp, Artificial Sequence
  Description of Artificial Sequence: Synthetic oligonucleotide
  Target: SCNA; (-) strand; PAM type: NRG; PAM sequence: GAG
gtatatcagaaaatttggct

SEQ ID NO: 16866 - DNA, 20 bp, Artificial Sequence
  Description of Artificial Sequence: Synthetic oligonucleotide
  Target: SCNA; (-) strand; PAM type: NRG; PAM sequence: TGG
tatctgtatatcagaaaatt

SEQ ID NO: 16867 - DNA, 20 bp, Artificial Sequence
  Description of Artificial Sequence: Synthetic oligonucleotide
  Target: SCNA; (-) strand; PAM type: NRG; PAM sequence: CAG
ttttgagaatatctgtatat

SEQ ID NO: 16868 - DNA, 20 bp, Artificial Sequence
  Description of Artificial Sequence: Synthetic oligonucleotide
  Target: SCNA; (-) strand; PAM type: NRG; PAM sequence: GAG
tgtgtgtgtgcttgtctttt

SEQ ID NO: 16869 - DNA, 20 bp, Artificial Sequence
  Description of Artificial Sequence: Synthetic oligonucleotide
  Target: SCNA; (-) strand; PAM type: NRG; PAM sequence: GGG
gcacattccagagccttggg

SEQ ID NO: 16870 - DNA, 20 bp, Artificial Sequence
  Description of Artificial Sequence: Synthetic oligonucleotide
  Target: SCNA; (-) strand; PAM type: NRG; PAM sequence: GGG
ggcacattccagagccttgg

SEQ ID NO: 16871 - DNA, 20 bp, Artificial Sequence
  Description of Artificial Sequence: Synthetic oligonucleotide
  Target: SCNA; (-) strand; PAM type: NRG; PAM sequence: GGG
aggcacattccagagccttg

SEQ ID NO: 16872 - DNA, 20 bp, Artificial Sequence
  Description of Artificial Sequence: Synthetic oligonucleotide
  Target: SCNA; (-) strand; PAM type: NRG; PAM sequence: GGG
aaggcacattccagagcctt

SEQ ID NO: 16873 - DNA, 20 bp, Artificial Sequence
  Description of Artificial Sequence: Synthetic oligonucleotide
  Target: SCNA; (-) strand; PAM type: NRG; PAM sequence: TGG
taaggcacattccagagcct

SEQ ID NO: 16874 - DNA, 20 bp, Artificial Sequence
  Description of Artificial Sequence: Synthetic oligonucleotide
  Target: SCNA; (-) strand; PAM type: NRG; PAM sequence: GAG
gattgttaaggcacattcca

SEQ ID NO: 16875 - DNA, 20 bp, Artificial Sequence
  Description of Artificial Sequence: Synthetic oligonucleotide
  Target: SCNA; (-) strand; PAM type: NRG; PAM sequence: CAG
aagattgttaaggcacattc

SEQ ID NO: 16876 - DNA, 20 bp, Artificial Sequence
  Description of Artificial Sequence: Synthetic oligonucleotide
  Target: SCNA; (-) strand; PAM type: NRG; PAM sequence: AGG
gtgcaaaaataagattgtta

SEQ ID NO: 16877 - DNA, 20 bp, Artificial Sequence
  Description of Artificial Sequence: Synthetic oligonucleotide
  Target: SCNA; (-) strand; PAM type: NRG; PAM sequence: AAG
tgtgcaaaaataagattgtt

SEQ ID NO: 16878 - DNA, 20 bp, Artificial Sequence
  Description of Artificial Sequence: Synthetic oligonucleotide
  Target: SCNA; (-) strand; PAM type: NRG; PAM sequence: AAG
cttttaaaatgtgcaaaaat

SEQ ID NO: 16879 - DNA, 20 bp, Artificial Sequence
  Description of Artificial Sequence: Synthetic oligonucleotide
  Target: SCNA; (-) strand; PAM type: NRG; PAM sequence: AGG
agatcagagaagtacattac

SEQ ID NO: 16880 - DNA, 20 bp, Artificial Sequence
  Description of Artificial Sequence: Synthetic oligonucleotide
  Target: SCNA; (-) strand; PAM type: NRG; PAM sequence: CAG
cagatcagagaagtacatta

SEQ ID NO: 16881 - DNA, 20 bp, Artificial Sequence
  Description of Artificial Sequence: Synthetic oligonucleotide
  Target: SCNA; (-) strand; PAM type: NRG; PAM sequence: AAG
caagtgaaatcagatcagag

SEQ ID NO: 16882 - DNA, 20 bp, Artificial Sequence
  Description of Artificial Sequence: Synthetic oligonucleotide
  Target: SCNA; (-) strand; PAM type: NRG; PAM sequence: GAG
gctcaagtgaaatcagatca

SEQ ID NO: 16883 - DNA, 20 bp, Artificial Sequence
  Description of Artificial Sequence: Synthetic oligonucleotide
  Target: SCNA; (-) strand; PAM type: NRG; PAM sequence: CAG
tagctcaagtgaaatcagat

SEQ ID NO: 16884 - DNA, 20 bp, Artificial Sequence
  Description of Artificial Sequence: Synthetic oligonucleotide
  Target: SCNA; (-) strand; PAM type: NRG; PAM sequence: CAG
tttattagctcaagtgaaat

SEQ ID NO: 16885 - DNA, 20 bp, Artificial Sequence
  Description of Artificial Sequence: Synthetic oligonucleotide
  Target: SCNA; (-) strand; PAM type: NRG; PAM sequence: AAG
ttgtatttttttattagctc

SEQ ID NO: 16886 - DNA, 20 bp, Artificial Sequence
  Description of Artificial Sequence: Synthetic oligonucleotide
  Target: SCNA; (-) strand; PAM type: NRG; PAM sequence: TAG
cctgatttgtatttttttat

SEQ ID NO: 16887 - DNA, 20 bp, Artificial Sequence
  Description of Artificial Sequence: Synthetic oligonucleotide
  Target: SCNA; (-) strand; PAM type: NRG; PAM sequence: AAG
tttagcatcttgatcacagc

SEQ ID NO: 16888 - DNA, 20 bp, Artificial Sequence
  Description of Artificial Sequence: Synthetic oligonucleotide
  Target: SCNA; (-) strand; PAM type: NRG; PAM sequence: CAG
taactttagcatcttgatca

SEQ ID NO: 16889 - DNA, 20 bp, Artificial Sequence
  Description of Artificial Sequence: Synthetic oligonucleotide
  Target: SCNA; (-) strand; PAM type: NRG; PAM sequence: TAG
aagcagtgtaaatataactt

SEQ ID NO: 16890 - DNA, 20 bp, Artificial Sequence
  Description of Artificial Sequence: Synthetic oligonucleotide
  Target: SCNA; (-) strand; PAM type: NRG; PAM sequence: CAG
aacaccttacatttatgaag

SEQ ID NO: 16891 - DNA, 20 bp, Artificial Sequence
  Description of Artificial Sequence: Synthetic oligonucleotide
  Target: SCNA; (-) strand; PAM type: NRG; PAM sequence: AAG
tttaacaccttacatttatg

SEQ ID NO: 16892 - DNA, 20 bp, Artificial Sequence
  Description of Artificial Sequence: Synthetic oligonucleotide
  Target: SCNA; (-) strand; PAM type: NRG; PAM sequence: AAG
agtttacttcttgtctcact

SEQ ID NO: 16893 - DNA, 20 bp, Artificial Sequence
  Description of Artificial Sequence: Synthetic oligonucleotide
  Target: SCNA; (-) strand; PAM type: NRG; PAM sequence: CAG
caccctggttaatcaattat

SEQ ID NO: 16894 - DNA, 20 bp, Artificial Sequence
  Description of Artificial Sequence: Synthetic oligonucleotide
  Target: SCNA; (-) strand; PAM type: NRG; PAM sequence: TGG
ggtagatttgtatagcaccc

SEQ ID NO: 16895 - DNA, 20 bp, Artificial Sequence
  Description of Artificial Sequence: Synthetic oligonucleotide
  Target: SCNA; (-) strand; PAM type: NRG; PAM sequence: TAG
accctctaggtagatttgta

SEQ ID NO: 16896 - DNA, 20 bp, Artificial Sequence
  Description of Artificial Sequence: Synthetic oligonucleotide
  Target: SCNA; (-) strand; PAM type: NRG; PAM sequence: TAG
ctgggaaggcaccctctagg

SEQ ID NO: 16897 - DNA, 20 bp, Artificial Sequence
  Description of Artificial Sequence: Synthetic oligonucleotide
  Target: SCNA; (-) strand; PAM type: NRG; PAM sequence: AGG
aacctgggaaggcaccctct

SEQ ID NO: 16898 - DNA, 20 bp, Artificial Sequence
  Description of Artificial Sequence: Synthetic oligonucleotide
  Target: SCNA; (-) strand; PAM type: NRG; PAM sequence: TAG
taacctgggaaggcaccctc

SEQ ID NO: 16899 - DNA, 20 bp, Artificial Sequence
  Description of Artificial Sequence: Synthetic oligonucleotide
  Target: SCNA; (-) strand; PAM type: NRG; PAM sequence: AGG
ataattgcattaacctggga

SEQ ID NO: 16900 - DNA, 20 bp, Artificial Sequence
  Description of Artificial Sequence: Synthetic oligonucleotide
  Target: SCNA; (-) strand; PAM type: NRG; PAM sequence: AAG
cataattgcattaacctggg

SEQ ID NO: 16901 - DNA, 20 bp, Artificial Sequence
  Description of Artificial Sequence: Synthetic oligonucleotide
  Target: SCNA; (-) strand; PAM type: NRG; PAM sequence: GGG
tcccataattgcattaacct

SEQ ID NO: 16902 - DNA, 20 bp, Artificial Sequence
  Description of Artificial Sequence: Synthetic oligonucleotide
  Target: SCNA; (-) strand; PAM type: NRG; PAM sequence: TGG
ctcccataattgcattaacc

SEQ ID NO: 16903 - DNA, 20 bp, Artificial Sequence
  Description of Artificial Sequence: Synthetic oligonucleotide
  Target: SCNA; (-) strand; PAM type: NRG; PAM sequence: AGG
catttctgtagccaggagcc

SEQ ID NO: 16904 - DNA, 20 bp, Artificial Sequence
  Description of Artificial Sequence: Synthetic oligonucleotide
  Target: SCNA; (-) strand; PAM type: NRG; PAM sequence: CAG
gcatttctgtagccaggagc

SEQ ID NO: 16905 - DNA, 20 bp, Artificial Sequence
  Description of Artificial Sequence: Synthetic oligonucleotide
  Target: SCNA; (-) strand; PAM type: NRG; PAM sequence: GAG
gttggcatttctgtagccag

SEQ ID NO: 16906 - DNA, 20 bp, Artificial Sequence
  Description of Artificial Sequence: Synthetic oligonucleotide
  Target: SCNA; (-) strand; PAM type: NRG; PAM sequence: AGG
tagttggcatttctgtagcc

SEQ ID NO: 16907 - DNA, 20 bp, Artificial Sequence
  Description of Artificial Sequence: Synthetic oligonucleotide
  Target: SCNA; (-) strand; PAM type: NRG; PAM sequence: CAG
ttagttggcatttctgtagc

SEQ ID NO: 16908 - DNA, 20 bp, Artificial Sequence
  Description of Artificial Sequence: Synthetic oligonucleotide
  Target: SCNA; (-) strand; PAM type: NRG; PAM sequence: TAG
cactttagttggcatttctg

SEQ ID NO: 16909 - DNA, 20 bp, Artificial Sequence
  Description of Artificial Sequence: Synthetic oligonucleotide
  Target: SCNA; (-) strand; PAM type: NRG; PAM sequence: TGG
ggggtggataacactttagt

SEQ ID NO: 16910 - DNA, 20 bp, Artificial Sequence
  Description of Artificial Sequence: Synthetic oligonucleotide
  Target: SCNA; (-) strand; PAM type: NRG; PAM sequence: TAG
ggatggggtggataacactt

SEQ ID NO: 16911 - DNA, 20 bp, Artificial Sequence
  Description of Artificial Sequence: Synthetic oligonucleotide
  Target: SCNA; (-) strand; PAM type: NRG; PAM sequence: TGG
ctccaaagtgaaggatgggg

SEQ ID NO: 16912 - DNA, 20 bp, Artificial Sequence
  Description of Artificial Sequence: Synthetic oligonucleotide
  Target: SCNA; (-) strand; PAM type: NRG; PAM sequence: GGG
atcctccaaagtgaaggatg

SEQ ID NO: 16913 - DNA, 20 bp, Artificial Sequence
  Description of Artificial Sequence: Synthetic oligonucleotide
  Target: SCNA; (-) strand; PAM type: NRG; PAM sequence: GGG
catcctccaaagtgaaggat

SEQ ID NO: 16914 - DNA, 20 bp, Artificial Sequence
  Description of Artificial Sequence: Synthetic oligonucleotide
  Target: SCNA; (-) strand; PAM type: NRG; PAM sequence: TGG
gcatcctccaaagtgaagga

SEQ ID NO: 16915 - DNA, 20 bp, Artificial Sequence
  Description of Artificial Sequence: Synthetic oligonucleotide
  Target: SCNA; (-) strand; PAM type: NRG; PAM sequence: AGG
taacgcatcctccaaagtga

SEQ ID NO: 16916 - DNA, 20 bp, Artificial Sequence
  Description of Artificial Sequence: Synthetic oligonucleotide
  Target: SCNA; (-) strand; PAM type: NRG; PAM sequence: AAG
ttaacgcatcctccaaagtg

SEQ ID NO: 16917 - DNA, 20 bp, Artificial Sequence
  Description of Artificial Sequence: Synthetic oligonucleotide
  Target: SCNA; (-) strand; PAM type: NRG; PAM sequence: AAG
tcatcttaacgcatcctcca

SEQ ID NO: 16918 - DNA, 20 bp, Artificial Sequence
  Description of Artificial Sequence: Synthetic oligonucleotide
  Target: SCNA; (-) strand; PAM type: NRG; PAM sequence: CAG
attttcattttgacacagca

SEQ ID NO: 16919 - DNA, 20 bp, Artificial Sequence
  Description of Artificial Sequence: Synthetic oligonucleotide
  Target: SCNA; (-) strand; PAM type: NRG; PAM sequence: CAG
tttgtattttcattttgaca

SEQ ID NO: 16920 - DNA, 20 bp, Artificial Sequence
  Description of Artificial Sequence: Synthetic oligonucleotide
  Target: SCNA; (-) strand; PAM type: NRG; PAM sequence: CGG
tcggtttatttattatcact

SEQ ID NO: 16921 - DNA, 20 bp, Artificial Sequence
  Description of Artificial Sequence: Synthetic oligonucleotide
  Target: SCNA; (-) strand; PAM type: NRG; PAM sequence: CGG
gataaggaaactgagtcact

SEQ ID NO: 16922 - DNA, 20 bp, Artificial Sequence
  Description of Artificial Sequence: Synthetic oligonucleotide
  Target: SCNA; (-) strand; PAM type: NRG; PAM sequence: GAG
ggaaaatggataaggaaact

SEQ ID NO: 16923 - DNA, 20 bp, Artificial Sequence
  Description of Artificial Sequence: Synthetic oligonucleotide
  Target: SCNA; (-) strand; PAM type: NRG; PAM sequence: AGG
aggtaactggaaaatggata

SEQ ID NO: 16924 - DNA, 20 bp, Artificial Sequence
  Description of Artificial Sequence: Synthetic oligonucleotide
  Target: SCNA; (-) strand; PAM type: NRG; PAM sequence: AAG
aaggtaactggaaaatggat

SEQ ID NO: 16925 - DNA, 20 bp, Artificial Sequence
  Description of Artificial Sequence: Synthetic oligonucleotide
  Target: SCNA; (-) strand; PAM type: NRG; PAM sequence: TGG
aaaaaaaggtaactggaaaa

SEQ ID NO: 16926 - DNA, 20 bp, Artificial Sequence
  Description of Artificial Sequence: Synthetic oligonucleotide
  Target: SCNA; (-) strand; PAM type: NRG; PAM sequence: TGG
cctaaaaaaaaaaaggtaac

SEQ ID NO: 16927 - DNA, 20 bp, Artificial Sequence
  Description of Artificial Sequence: Synthetic oligonucleotide
  Target: SCNA; (-) strand; PAM type: NRG; PAM sequence: AGG
agactggcctaaaaaaaaaa

SEQ ID NO: 16928 - DNA, 20 bp, Artificial Sequence
  Description of Artificial Sequence: Synthetic oligonucleotide
  Target: SCNA; (-) strand; PAM type: NRG; PAM sequence: AAG
cagactggcctaaaaaaaaa

SEQ ID NO: 16929 - DNA, 20 bp, Artificial Sequence
  Description of Artificial Sequence: Synthetic oligonucleotide
  Target: SCNA; (-) strand; PAM type: NRG; PAM sequence: TGG
cttctagtggacatgcagac

SEQ ID NO: 16930 - DNA, 20 bp, Artificial Sequence
  Description of Artificial Sequence: Synthetic oligonucleotide
  Target: SCNA; (-) strand; PAM type: NRG; PAM sequence: CAG
cttttcttctagtggacatg

SEQ ID NO: 16931 - DNA, 20 bp, Artificial Sequence
  Description of Artificial Sequence: Synthetic oligonucleotide
  Target: SCNA; (-) strand; PAM type: NRG; PAM sequence: TGG
ccaggtcccttttcttctag

SEQ ID NO: 16932 - DNA, 20 bp, Artificial Sequence
  Description of Artificial Sequence: Synthetic oligonucleotide
  Target: SCNA; (-) strand; PAM type: NRG; PAM sequence: TAG
aacccaggtcccttttcttc

SEQ ID NO: 16933 - DNA, 20 bp, Artificial Sequence
  Description of Artificial Sequence: Synthetic oligonucleotide
  Target: SCNA; (-) strand; PAM type: NRG; PAM sequence: AGG
gatgggctgatgaagaaccc

SEQ ID NO: 16934 - DNA, 20 bp, Artificial Sequence
  Description of Artificial Sequence: Synthetic oligonucleotide
  Target: SCNA; (-) strand; PAM type: NRG; PAM sequence: CAG
ggatgggctgatgaagaacc

SEQ ID NO: 16935 - DNA, 20 bp, Artificial Sequence
  Description of Artificial Sequence: Synthetic oligonucleotide
  Target: SCNA; (-) strand; PAM type: NRG; PAM sequence: AAG
gatctaaggatgggctgatg

SEQ ID NO: 16936 - DNA, 20 bp, Artificial Sequence
  Description of Artificial Sequence: Synthetic oligonucleotide
  Target: SCNA; (-) strand; PAM type: NRG; PAM sequence: GGG
gtgcactaagatctaaggat

SEQ ID NO: 16937 - DNA, 20 bp, Artificial Sequence
  Description of Artificial Sequence: Synthetic oligonucleotide
  Target: SCNA; (-) strand; PAM type: NRG; PAM sequence: TGG
tgtgcactaagatctaagga

SEQ ID NO: 16938 - DNA, 20 bp, Artificial Sequence
  Description of Artificial Sequence: Synthetic oligonucleotide
  Target: SCNA; (-) strand; PAM type: NRG; PAM sequence: AGG
catatgtgcactaagatcta

SEQ ID NO: 16939 - DNA, 20 bp, Artificial Sequence
  Description of Artificial Sequence: Synthetic oligonucleotide
  Target: SCNA; (-) strand; PAM type: NRG; PAM sequence: AAG
gcatatgtgcactaagatct

SEQ ID NO: 16940 - DNA, 20 bp, Artificial Sequence
  Description of Artificial Sequence: Synthetic oligonucleotide
  Target: SCNA; (-) strand; PAM type: NRG; PAM sequence: AAG
actaggtgcatatgtgcact

SEQ ID NO: 16941 - DNA, 20 bp, Artificial Sequence
  Description of Artificial Sequence: Synthetic oligonucleotide
  Target: SCNA; (-) strand; PAM type: NRG; PAM sequence: AGG
atatttgctcggcacttact

SEQ ID NO: 16942 - DNA, 20 bp, Artificial Sequence
  Description of Artificial Sequence: Synthetic oligonucleotide
  Target: SCNA; (-) strand; PAM type: NRG; PAM sequence: TAG
aatatttgctcggcacttac

SEQ ID NO: 16943 - DNA, 20 bp, Artificial Sequence
  Description of Artificial Sequence: Synthetic oligonucleotide
  Target: SCNA; (-) strand; PAM type: NRG; PAM sequence: CGG
tcattcattgaatatttgct

SEQ ID NO: 16944 - DNA, 20 bp, Artificial Sequence
  Description of Artificial Sequence: Synthetic oligonucleotide
  Target: SCNA; (-) strand; PAM type: NRG; PAM sequence: CAG
aagaattcttaggaaaggta

SEQ ID NO: 16945 - DNA, 20 bp, Artificial Sequence
  Description of Artificial Sequence: Synthetic oligonucleotide
  Target: SCNA; (-) strand; PAM type: NRG; PAM sequence: AGG
caacgaagaattcttaggaa

SEQ ID NO: 16946 - DNA, 20 bp, Artificial Sequence
  Description of Artificial Sequence: Synthetic oligonucleotide
  Target: SCNA; (-) strand; PAM type: NRG; PAM sequence: AAG
tcaacgaagaattcttagga

SEQ ID NO: 16947 - DNA, 20 bp, Artificial Sequence
  Description of Artificial Sequence: Synthetic oligonucleotide
  Target: SCNA; (-) strand; PAM type: NRG; PAM sequence: AGG
ataatcaacgaagaattctt

SEQ ID NO: 16948 - DNA, 20 bp, Artificial Sequence
  Description of Artificial Sequence: Synthetic oligonucleotide
  Target: SCNA; (-) strand; PAM type: NRG; PAM sequence: TAG
gataatcaacgaagaattct

SEQ ID NO: 16949 - DNA, 20 bp, Artificial Sequence
  Description of Artificial Sequence: Synthetic oligonucleotide
  Target: SCNA; (-) strand; PAM type: NRG; PAM sequence: AAG
ctgttgaaggataatcaacg

SEQ ID NO: 16950 - DNA, 20 bp, Artificial Sequence
  Description of Artificial Sequence: Synthetic oligonucleotide
  Target: SCNA; (-) strand; PAM type: NRG; PAM sequence: AGG
agagaagttagctctgttga

SEQ ID NO: 16951 - DNA, 20 bp, Artificial Sequence
  Description of Artificial Sequence: Synthetic oligonucleotide
  Target: SCNA; (-) strand; PAM type: NRG; PAM sequence: AAG
gagagaagttagctctgttg

SEQ ID NO: 16952 - DNA, 20 bp, Artificial Sequence
  Description of Artificial Sequence: Synthetic oligonucleotide
  Target: SCNA; (-) strand; PAM type: NRG; PAM sequence: TAG
gagcacatagggagagaagt

SEQ ID NO: 16953 - DNA, 20 bp, Artificial Sequence
  Description of Artificial Sequence: Synthetic oligonucleotide
  Target: SCNA; (-) strand; PAM type: NRG; PAM sequence: AAG
gactgagcacatagggagag

SEQ ID NO: 16954 - DNA, 20 bp, Artificial Sequence
  Description of Artificial Sequence: Synthetic oligonucleotide
  Target: SCNA; (-) strand; PAM type: NRG; PAM sequence: GAG
tttgactgagcacataggga

SEQ ID NO: 16955 - DNA, 20 bp, Artificial Sequence
  Description of Artificial Sequence: Synthetic oligonucleotide
  Target: SCNA; (-) strand; PAM type: NRG; PAM sequence: GAG
catttgactgagcacatagg

SEQ ID NO: 16956 - DNA, 20 bp, Artificial Sequence
  Description of Artificial Sequence: Synthetic oligonucleotide
  Target: SCNA; (-) strand; PAM type: NRG; PAM sequence: GGG
agcatttgactgagcacata

SEQ ID NO: 16957 - DNA, 20 bp, Artificial Sequence
  Description of Artificial Sequence: Synthetic oligonucleotide
  Target: SCNA; (-) strand; PAM type: NRG; PAM sequence: AGG
gagcatttgactgagcacat

SEQ ID NO: 16958 - DNA, 20 bp, Artificial Sequence
  Description of Artificial Sequence: Synthetic oligonucleotide
  Target: SCNA; (-) strand; PAM type: NRG; PAM sequence: TAG
agagcatttgactgagcaca

SEQ ID NO: 16959 - DNA, 20 bp, Artificial Sequence
  Description of Artificial Sequence: Synthetic oligonucleotide
  Target: SCNA; (-) strand; PAM type: NRG; PAM sequence: GAG
caatgggagagcatttgact

SEQ ID NO: 16960 - DNA, 20 bp, Artificial Sequence
  Description of Artificial Sequence: Synthetic oligonucleotide
  Target: SCNA; (-) strand; PAM type: NRG; PAM sequence: GAG
ctgaactcagtccaatggga

SEQ ID NO: 16961 - DNA, 20 bp, Artificial Sequence
  Description of Artificial Sequence: Synthetic oligonucleotide
  Target: SCNA; (-) strand; PAM type: NRG; PAM sequence: GAG
tgctgaactcagtccaatgg

SEQ ID NO: 16962 - DNA, 20 bp, Artificial Sequence
  Description of Artificial Sequence: Synthetic oligonucleotide
  Target: SCNA; (-) strand; PAM type: NRG; PAM sequence: GGG
tatgctgaactcagtccaat

SEQ ID NO: 16963 - DNA, 20 bp, Artificial Sequence
  Description of Artificial Sequence: Synthetic oligonucleotide
  Target: SCNA; (-) strand; PAM type: NRG; PAM sequence: TGG
ttatgctgaactcagtccaa

SEQ ID NO: 16964 - DNA, 20 bp, Artificial Sequence
  Description of Artificial Sequence: Synthetic oligonucleotide
  Target: SCNA; (-) strand; PAM type: NRG; PAM sequence: CAG
atggcagtttatgctgaact

SEQ ID NO: 16965 - DNA, 20 bp, Artificial Sequence
  Description of Artificial Sequence: Synthetic oligonucleotide
  Target: SCNA; (-) strand; PAM type: NRG; PAM sequence: CAG
ccaatcatctcaaaacatgg

SEQ ID NO: 16966 - DNA, 20 bp, Artificial Sequence
  Description of Artificial Sequence: Synthetic oligonucleotide
  Target: SCNA; (-) strand; PAM type: NRG; PAM sequence: TGG
acaccaatcatctcaaaaca

SEQ ID NO: 16967 - DNA, 20 bp, Artificial Sequence
  Description of Artificial Sequence: Synthetic oligonucleotide
  Target: SCNA; (-) strand; PAM type: NRG; PAM sequence: AGG
agattctcgcaactcaggag

SEQ ID NO: 16968 - DNA, 20 bp, Artificial Sequence
  Description of Artificial Sequence: Synthetic oligonucleotide
  Target: SCNA; (-) strand; PAM type: NRG; PAM sequence: GAG
tagattctcgcaactcagga

SEQ ID NO: 16969 - DNA, 20 bp, Artificial Sequence
  Description of Artificial Sequence: Synthetic oligonucleotide
  Target: SCNA; (-) strand; PAM type: NRG; PAM sequence: GAG
cttagattctcgcaactcag

SEQ ID NO: 16970 - DNA, 20 bp, Artificial Sequence
  Description of Artificial Sequence: Synthetic oligonucleotide
  Target: SCNA; (-) strand; PAM type: NRG; PAM sequence: AGG
ctcttagattctcgcaactc

SEQ ID NO: 16971 - DNA, 20 bp, Artificial Sequence
  Description of Artificial Sequence: Synthetic oligonucleotide
  Target: SCNA; (-) strand; PAM type: NRG; PAM sequence: CAG
gctcttagattctcgcaact

SEQ ID NO: 16972 - DNA, 20 bp, Artificial Sequence
  Description of Artificial Sequence: Synthetic oligonucleotide
  Target: SCNA; (-) strand; PAM type: NRG; PAM sequence: TAG
atgtgatgttgtcctgctct

SEQ ID NO: 16973 - DNA, 20 bp, Artificial Sequence
  Description of Artificial Sequence: Synthetic oligonucleotide
  Target: SCNA; (-) strand; PAM type: NRG; PAM sequence: AAG
aagaactatagaaagtagag

SEQ ID NO: 16974 - DNA, 20 bp, Artificial Sequence
  Description of Artificial Sequence: Synthetic oligonucleotide
  Target: SCNA; (-) strand; PAM type: NRG; PAM sequence: GAG
caaaagaactatagaaagta

SEQ ID NO: 16975 - DNA, 20 bp, Artificial Sequence
  Description of Artificial Sequence: Synthetic oligonucleotide
  Target: SCNA; (-) strand; PAM type: NRG; PAM sequence: TAG
gacaaaagaactatagaaag

SEQ ID NO: 16976 - DNA, 20 bp, Artificial Sequence
  Description of Artificial Sequence: Synthetic oligonucleotide
  Target: SCNA; (-) strand; PAM type: NRG; PAM sequence: AAG
gtggacaaaagaactataga

SEQ ID NO: 16977 - DNA, 20 bp, Artificial Sequence
  Description of Artificial Sequence: Synthetic oligonucleotide
  Target: SCNA; (-) strand; PAM type: NRG; PAM sequence: TAG
gacagtggacaaaagaacta

SEQ ID NO: 16978 - DNA, 20 bp, Artificial Sequence
  Description of Artificial Sequence: Synthetic oligonucleotide
  Target: SCNA; (-) strand; PAM type: NRG; PAM sequence: AAG
atttgttagacagtggacaa

SEQ ID NO: 16979 - DNA, 20 bp, Artificial Sequence
  Description of Artificial Sequence: Synthetic oligonucleotide
  Target: SCNA; (-) strand; PAM type: NRG; PAM sequence: TGG
tggcattatttgttagacag

SEQ ID NO: 16980 - DNA, 20 bp, Artificial Sequence
  Description of Artificial Sequence: Synthetic oligonucleotide
  Target: SCNA; (-) strand; PAM type: NRG; PAM sequence: CAG
acttggcattatttgttaga

SEQ ID NO: 16981 - DNA, 20 bp, Artificial Sequence
  Description of Artificial Sequence: Synthetic oligonucleotide
  Target: SCNA; (-) strand; PAM type: NRG; PAM sequence: TAG
tttcacttggcattatttgt

SEQ ID NO: 16982 - DNA, 20 bp, Artificial Sequence
  Description of Artificial Sequence: Synthetic oligonucleotide
  Target: SCNA; (-) strand; PAM type: NRG; PAM sequence: TGG
tcatttttccctttttcact

SEQ ID NO: 16983 - DNA, 20 bp, Artificial Sequence
  Description of Artificial Sequence: Synthetic oligonucleotide
  Target: SCNA; (-) strand; PAM type: NRG; PAM sequence: TGG
gattttctgtttttttccat

SEQ ID NO: 16984 - DNA, 20 bp, Artificial Sequence
  Description of Artificial Sequence: Synthetic oligonucleotide
  Target: SCNA; (-) strand; PAM type: NRG; PAM sequence: TAG
atggagttagtggttttttt

SEQ ID NO: 16985 - DNA, 20 bp, Artificial Sequence
  Description of Artificial Sequence: Synthetic oligonucleotide
  Target: SCNA; (-) strand; PAM type: NRG; PAM sequence: TGG
aaacaattaaatggagttag

SEQ ID NO: 16986 - DNA, 20 bp, Artificial Sequence
  Description of Artificial Sequence: Synthetic oligonucleotide
  Target: SCNA; (-) strand; PAM type: NRG; PAM sequence: TAG
ctaaaacaattaaatggagt

SEQ ID NO: 16987 - DNA, 20 bp, Artificial Sequence
  Description of Artificial Sequence: Synthetic oligonucleotide
  Target: SCNA; (-) strand; PAM type: NRG; PAM sequence: GAG
tagtctaaaacaattaaatg

SEQ ID NO: 16988 - DNA, 20 bp, Artificial Sequence
  Description of Artificial Sequence: Synthetic oligonucleotide
  Target: SCNA; (-) strand; PAM type: NRG; PAM sequence: TGG
cttagtctaaaacaattaaa

SEQ ID NO: 16989 - DNA, 20 bp, Artificial Sequence
  Description of Artificial Sequence: Synthetic oligonucleotide
  Target: SCNA; (-) strand; PAM type: NRG; PAM sequence: TAG
aggtatcactgagggattct

SEQ ID NO: 16990 - DNA, 20 bp, Artificial Sequence
  Description of Artificial Sequence: Synthetic oligonucleotide
  Target: SCNA; (-) strand; PAM type: NRG; PAM sequence: GGG
ttttggctaggtatcactga

SEQ ID NO: 16991 - DNA, 20 bp, Artificial Sequence
  Description of Artificial Sequence: Synthetic oligonucleotide
  Target: SCNA; (-) strand; PAM type: NRG; PAM sequence: AGG
attttggctaggtatcactg

SEQ ID NO: 16992 - DNA, 20 bp, Artificial Sequence
  Description of Artificial Sequence: Synthetic oligonucleotide
  Target: SCNA; (-) strand; PAM type: NRG; PAM sequence: GAG
aattttggctaggtatcact

SEQ ID NO: 16993 - DNA, 20 bp, Artificial Sequence
  Description of Artificial Sequence: Synthetic oligonucleotide
  Target: SCNA; (-) strand; PAM type: NRG; PAM sequence: AGG
tctgaatcctaattttggct

SEQ ID NO: 16994 - DNA, 20 bp, Artificial Sequence
  Description of Artificial Sequence: Synthetic oligonucleotide
  Target: SCNA; (-) strand; PAM type: NRG; PAM sequence: TAG
atctgaatcctaattttggc

SEQ ID NO: 16995 - DNA, 20 bp, Artificial Sequence
  Description of Artificial Sequence: Synthetic oligonucleotide
  Target: SCNA; (-) strand; PAM type: NRG; PAM sequence: TGG
ttggatctgaatcctaattt

SEQ ID NO: 16996 - DNA, 20 bp, Artificial Sequence
  Description of Artificial Sequence: Synthetic oligonucleotide
  Target: SCNA; (-) strand; PAM type: NRG; PAM sequence: TGG
ggcaacagtatcttttattt

SEQ ID NO: 16997 - DNA, 20 bp, Artificial Sequence
  Description of Artificial Sequence: Synthetic oligonucleotide
  Target: SCNA; (-) strand; PAM type: NRG; PAM sequence: CAG
atgatatctacttggggcaa

SEQ ID NO: 16998 - DNA, 20 bp, Artificial Sequence
  Description of Artificial Sequence: Synthetic oligonucleotide
  Target: SCNA; (-) strand; PAM type: NRG; PAM sequence: GGG
caaattatgatatctacttg

SEQ ID NO: 16999 - DNA, 20 bp, Artificial Sequence
  Description of Artificial Sequence: Synthetic oligonucleotide
  Target: SCNA; (-) strand; PAM type: NRG; PAM sequence: GGG
acaaattatgatatctactt

SEQ ID NO: 17000 - DNA, 20 bp, Artificial Sequence
  Description of Artificial Sequence: Synthetic oligonucleotide
  Target: SCNA; (-) strand; PAM type: NRG; PAM sequence: TGG
aacaaattatgatatctact

SEQ ID NO: 17001 - DNA, 20 bp, Artificial Sequence
  Description of Artificial Sequence: Synthetic oligonucleotide
  Target: SCNA; (-) strand; PAM type: NRG; PAM sequence: TAG
tgaaatgtggtataacagtt

SEQ ID NO: 17002 - DNA, 20 bp, Artificial Sequence
  Description of Artificial Sequence: Synthetic oligonucleotide
  Target: SCNA; (-) strand; PAM type: NRG; PAM sequence: CAG
aaacttgaaatgtggtataa

SEQ ID NO: 17003 - DNA, 20 bp, Artificial Sequence
  Description of Artificial Sequence: Synthetic oligonucleotide
  Target: SCNA; (-) strand; PAM type: NRG; PAM sequence: TGG
agttttaaaaacttgaaatg

SEQ ID NO: 17004 - DNA, 20 bp, Artificial Sequence
  Description of Artificial Sequence: Synthetic oligonucleotide
  Target: SCNA; (-) strand; PAM type: NRG; PAM sequence: AAG
ctatgcataaaaggaagata

SEQ ID NO: 17005 - DNA, 20 bp, Artificial Sequence
  Description of Artificial Sequence: Synthetic oligonucleotide
  Target: SCNA; (-) strand; PAM type: NRG; PAM sequence: AAG
tactatctatgcataaaagg

SEQ ID NO: 17006 - DNA, 20 bp, Artificial Sequence
  Description of Artificial Sequence: Synthetic oligonucleotide
  Target: SCNA; (-) strand; PAM type: NRG; PAM sequence: AGG
tactactatctatgcataaa

SEQ ID NO: 17007 - DNA, 20 bp, Artificial Sequence
  Description of Artificial Sequence: Synthetic oligonucleotide
  Target: SCNA; (-) strand; PAM type: NRG; PAM sequence: AAG
ctactactatctatgcataa

SEQ ID NO: 17008 - DNA, 20 bp, Artificial Sequence
  Description of Artificial Sequence: Synthetic oligonucleotide
  Target: SCNA; (-) strand; PAM type: NRG; PAM sequence: TAG
acaatcaacacctcaggtga

SEQ ID NO: 17009 - DNA, 20 bp, Artificial Sequence
  Description of Artificial Sequence: Synthetic oligonucleotide
  Target: SCNA; (-) strand; PAM type: NRG; PAM sequence: AGG
gaatttacaatcaacacctc

SEQ ID NO: 17010 - DNA, 20 bp, Artificial Sequence
  Description of Artificial Sequence: Synthetic oligonucleotide
  Target: SCNA; (-) strand; PAM type: NRG; PAM sequence: CAG
tgaatttacaatcaacacct

SEQ ID NO: 17011 - DNA, 20 bp, Artificial Sequence
  Description of Artificial Sequence: Synthetic oligonucleotide
  Target: SCNA; (-) strand; PAM type: NRG; PAM sequence: AGG
gtagttaagagacaaagcct

SEQ ID NO: 17012 - DNA, 20 bp, Artificial Sequence
  Description of Artificial Sequence: Synthetic oligonucleotide
  Target: SCNA; (-) strand; PAM type: NRG; PAM sequence: TAG
agtagttaagagacaaagcc

SEQ ID NO: 17013 - DNA, 20 bp, Artificial Sequence
  Description of Artificial Sequence: Synthetic oligonucleotide
  Target: SCNA; (-) strand; PAM type: NRG; PAM sequence: AAG
gattcagtagttaagagaca

SEQ ID NO: 17014 - DNA, 20 bp, Artificial Sequence
  Description of Artificial Sequence: Synthetic oligonucleotide
  Target: SCNA; (-) strand; PAM type: NRG; PAM sequence: GAG
gattccgattcagtagttaa

SEQ ID NO: 17015 - DNA, 20 bp, Artificial Sequence
  Description of Artificial Sequence: Synthetic oligonucleotide
  Target: SCNA; (-) strand; PAM type: NRG; PAM sequence: AAG
aagattccgattcagtagtt

SEQ ID NO: 17016 - DNA, 20 bp, Artificial Sequence
  Description of Artificial Sequence: Synthetic oligonucleotide
  Target: SCNA; (-) strand; PAM type: NRG; PAM sequence: TAG
tcccaaagattccgattcag

SEQ ID NO: 17017 - DNA, 20 bp, Artificial Sequence
  Description of Artificial Sequence: Synthetic oligonucleotide
  Target: SCNA; (-) strand; PAM type: NRG; PAM sequence: CAG
cactcccaaagattccgatt

SEQ ID NO: 17018 - DNA, 20 bp, Artificial Sequence
  Description of Artificial Sequence: Synthetic oligonucleotide
  Target: SCNA; (-) strand; PAM type: NRG; PAM sequence: AAG
ttcctgtcagttcactccca

SEQ ID NO: 17019 - DNA, 20 bp, Artificial Sequence
  Description of Artificial Sequence: Synthetic oligonucleotide
  Target: SCNA; (-) strand; PAM type: NRG; PAM sequence: CAG
tttaaaattcagattcctgt

SEQ ID NO: 17020 - DNA, 20 bp, Artificial Sequence
  Description of Artificial Sequence: Synthetic oligonucleotide
  Target: SCNA; (-) strand; PAM type: NRG; PAM sequence: CAG
aagaccttatttttaaaatt

SEQ ID NO: 17021 - DNA, 20 bp, Artificial Sequence
  Description of Artificial Sequence: Synthetic oligonucleotide
  Target: SCNA; (-) strand; PAM type: NRG; PAM sequence: AAG
agatgcatgagaatcacctg

SEQ ID NO: 17022 - DNA, 20 bp, Artificial Sequence
  Description of Artificial Sequence: Synthetic oligonucleotide
  Target: SCNA; (-) strand; PAM type: NRG; PAM sequence: GAG
gcagttatctttagatgcat

SEQ ID NO: 17023 - DNA, 20 bp, Artificial Sequence
  Description of Artificial Sequence: Synthetic oligonucleotide
  Target: SCNA; (-) strand; PAM type: NRG; PAM sequence: TAG
tatattaaagcagttatctt

SEQ ID NO: 17024 - DNA, 20 bp, Artificial Sequence
  Description of Artificial Sequence: Synthetic oligonucleotide
  Target: SCNA; (-) strand; PAM type: NRG; PAM sequence: CAG
ttctttgttatatattaaag

SEQ ID NO: 17025 - DNA, 20 bp, Artificial Sequence
  Description of Artificial Sequence: Synthetic oligonucleotide
  Target: SCNA; (-) strand; PAM type: NRG; PAM sequence: AAG
ggtttctttgttatatatta

SEQ ID NO: 17026 - DNA, 20 bp, Artificial Sequence
  Description of Artificial Sequence: Synthetic oligonucleotide
  Target: SCNA; (-) strand; PAM type: NRG; PAM sequence: GGG
atcctcaagtgtccctcttt

SEQ ID NO: 17027 - DNA, 20 bp, Artificial Sequence
  Description of Artificial Sequence: Synthetic oligonucleotide
  Target: SCNA; (-) strand; PAM type: NRG; PAM sequence: TGG
aatcctcaagtgtccctctt

SEQ ID NO: 17028 - DNA, 20 bp, Artificial Sequence
  Description of Artificial Sequence: Synthetic oligonucleotide
  Target: SCNA; (-) strand; PAM type: NRG; PAM sequence: AAG
gatatattgaaaaaatcctc

SEQ ID NO: 17029 - DNA, 20 bp, Artificial Sequence
  Description of Artificial Sequence: Synthetic oligonucleotide
  Target: SCNA; (-) strand; PAM type: NRG; PAM sequence: AAG
actattaatctctgcaaaag

SEQ ID NO: 17030 - DNA, 20 bp, Artificial Sequence
  Description of Artificial Sequence: Synthetic oligonucleotide
  Target: SCNA; (-) strand; PAM type: NRG; PAM sequence: AAG
ttcactattaatctctgcaa

SEQ ID NO: 17031 - DNA, 20 bp, Artificial Sequence
  Description of Artificial Sequence: Synthetic oligonucleotide
  Target: SCNA; (-) strand; PAM type: NRG; PAM sequence: CAG
atatgtaaaattctaaacag

SEQ ID NO: 17032 - DNA, 20 bp, Artificial Sequence
  Description of Artificial Sequence: Synthetic oligonucleotide
  Target: SCNA; (-) strand; PAM type: NRG; PAM sequence: CAG
tgcatatgtaaaattctaaa

SEQ ID NO: 17033 - DNA, 20 bp, Artificial Sequence
  Description of Artificial Sequence: Synthetic oligonucleotide
  Target: SCNA; (-) strand; PAM type: NRG; PAM sequence: AAG
agcctttttgtcagtaaaag

SEQ ID NO: 17034 - DNA, 20 bp, Artificial Sequence
  Description of Artificial Sequence: Synthetic oligonucleotide
  Target: SCNA; (-) strand; PAM type: NRG; PAM sequence: AAG
aaaagcctttttgtcagtaa

SEQ ID NO: 17035 - DNA, 20 bp, Artificial Sequence
  Description of Artificial Sequence: Synthetic oligonucleotide
  Target: SCNA; (-) strand; PAM type: NRG; PAM sequence: CAG
ccagagaaaagcctttttgt

SEQ ID NO: 17036 - DNA, 20 bp, Artificial Sequence
  Description of Artificial Sequence: Synthetic oligonucleotide
  Target: SCNA; (-) strand; PAM type: NRG; PAM sequence: AAG
tttttattttctccagagaa

SEQ ID NO: 17037 - DNA, 20 bp, Artificial Sequence
  Description of Artificial Sequence: Synthetic oligonucleotide
  Target: SCNA; (-) strand; PAM type: NRG; PAM sequence: GAG
ctgcctttttattttctcca

SEQ ID NO: 17038 - DNA, 20 bp, Artificial Sequence
  Description of Artificial Sequence: Synthetic oligonucleotide
  Target: SCNA; (-) strand; PAM type: NRG; PAM sequence: CAG
agctgcctttttattttctc

SEQ ID NO: 17039 - DNA, 20 bp, Artificial Sequence
  Description of Artificial Sequence: Synthetic oligonucleotide
  Target: SCNA; (-) strand; PAM type: NRG; PAM sequence: AAG
gaagtgtgtgctctcaggga

SEQ ID NO: 17040 - DNA, 20 bp, Artificial Sequence
  Description of Artificial Sequence: Synthetic oligonucleotide
  Target: SCNA; (-) strand; PAM type: NRG; PAM sequence: GGG
gctagaagtgtgtgctctca

SEQ ID NO: 17041 - DNA, 20 bp, Artificial Sequence
  Description of Artificial Sequence: Synthetic oligonucleotide
  Target: SCNA; (-) strand; PAM type: NRG; PAM sequence: AGG
tgctagaagtgtgtgctctc

SEQ ID NO: 17042 - DNA, 20 bp, Artificial Sequence
  Description of Artificial Sequence: Synthetic oligonucleotide
  Target: SCNA; (-) strand; PAM type: NRG; PAM sequence: CAG
ttgctagaagtgtgtgctct

SEQ ID NO: 17043 - DNA, 20 bp, Artificial Sequence
  Description of Artificial Sequence: Synthetic oligonucleotide
  Target: SCNA; (-) strand; PAM type: NRG; PAM sequence: AAG
atggattggggctttgctag

SEQ ID NO: 17044 - DNA, 20 bp, Artificial Sequence
  Description of Artificial Sequence: Synthetic oligonucleotide
  Target: SCNA; (-) strand; PAM type: NRG; PAM sequence: TAG
catatggattggggctttgc

SEQ ID NO: 17045 - DNA, 20 bp, Artificial Sequence
  Description of Artificial Sequence: Synthetic oligonucleotide
  Target: SCNA; (-) strand; PAM type: NRG; PAM sequence: GGG
tcttagagtcatatggattg

SEQ ID NO: 17046 - DNA, 20 bp, Artificial Sequence
  Description of Artificial Sequence: Synthetic oligonucleotide
  Target: SCNA; (-) strand; PAM type: NRG; PAM sequence: GGG
gtcttagagtcatatggatt

SEQ ID NO: 17047 - DNA, 20 bp, Artificial Sequence
  Description of Artificial Sequence: Synthetic oligonucleotide
  Target: SCNA; (-) strand; PAM type: NRG; PAM sequence: TGG
tgtcttagagtcatatggat

SEQ ID NO: 17048 - DNA, 20 bp, Artificial Sequence
  Description of Artificial Sequence: Synthetic oligonucleotide
  Target: SCNA; (-) strand; PAM type: NRG; PAM sequence: TGG
cactctgtcttagagtcata

SEQ ID NO: 17049 - DNA, 20 bp, Artificial Sequence
  Description of Artificial Sequence: Synthetic oligonucleotide
  Target: SCNA; (-) strand; PAM type: NRG; PAM sequence: GAG
gtggaaatcactctgtctta

SEQ ID NO: 17050 - DNA, 20 bp, Artificial Sequence
  Description of Artificial Sequence: Synthetic oligonucleotide
  Target: SCNA; (-) strand; PAM type: NRG; PAM sequence: TAG
aggtggaaatcactctgtct

SEQ ID NO: 17051 - DNA, 20 bp, Artificial Sequence
  Description of Artificial Sequence: Synthetic oligonucleotide
  Target: SCNA; (-) strand; PAM type: NRG; PAM sequence: TGG
agaaagtaaggactagaagg

SEQ ID NO: 17052 - DNA, 20 bp, Artificial Sequence
  Description of Artificial Sequence: Synthetic oligonucleotide
  Target: SCNA; (-) strand; PAM type: NRG; PAM sequence: AGG
gcaagaaagtaaggactaga

SEQ ID NO: 17053 - DNA, 20 bp, Artificial Sequence
  Description of Artificial Sequence: Synthetic oligonucleotide
  Target: SCNA; (-) strand; PAM type: NRG; PAM sequence: AAG
tgcaagaaagtaaggactag

SEQ ID NO: 17054 - DNA, 20 bp, Artificial Sequence
  Description of Artificial Sequence: Synthetic oligonucleotide
  Target: SCNA; (-) strand; PAM type: NRG; PAM sequence: TAG
ttttgcaagaaagtaaggac

SEQ ID NO: 17055 - DNA, 20 bp, Artificial Sequence
  Description of Artificial Sequence: Synthetic oligonucleotide
  Target: SCNA; (-) strand; PAM type: NRG; PAM sequence: AGG
gccccttttgcaagaaagta

SEQ ID NO: 17056 - DNA, 20 bp, Artificial Sequence
  Description of Artificial Sequence: Synthetic oligonucleotide
  Target: SCNA; (-) strand; PAM type: NRG; PAM sequence: AAG
agccccttttgcaagaaagt

SEQ ID NO: 17057 - DNA, 20 bp, Artificial Sequence
  Description of Artificial Sequence: Synthetic oligonucleotide
  Target: SCNA; (-) strand; PAM type: NRG; PAM sequence: AAG
tgaaagccccttttgcaaga

SEQ ID NO: 17058 - DNA, 20 bp, Artificial Sequence
  Description of Artificial Sequence: Synthetic oligonucleotide
  Target: SCNA; (-) strand; PAM type: NRG; PAM sequence: AAG
gatttgaaagccccttttgc

SEQ ID NO: 17059 - DNA, 20 bp, Artificial Sequence
  Description of Artificial Sequence: Synthetic oligonucleotide
  Target: SCNA; (-) strand; PAM type: NRG; PAM sequence: AAG
ccatcagtaatgagatttga

SEQ ID NO: 17060 - DNA, 20 bp, Artificial Sequence
  Description of Artificial Sequence: Synthetic oligonucleotide
  Target: SCNA; (-) strand; PAM type: NRG; PAM sequence: GAG
aagatgggaccatcagtaat

SEQ ID NO: 17061 - DNA, 20 bp, Artificial Sequence
  Description of Artificial Sequence: Synthetic oligonucleotide
  Target: SCNA; (-) strand; PAM type: NRG; PAM sequence: CAG
gtaataaaagatgggaccat

SEQ ID NO: 17062 - DNA, 20 bp, Artificial Sequence
  Description of Artificial Sequence: Synthetic oligonucleotide
  Target: SCNA; (-) strand; PAM type: NRG; PAM sequence: GGG
taacaccagtaataaaagat

SEQ ID NO: 17063 - DNA, 20 bp, Artificial Sequence
  Description of Artificial Sequence: Synthetic oligonucleotide
  Target: SCNA; (-) strand; PAM type: NRG; PAM sequence: TGG
ataacaccagtaataaaaga

SEQ ID NO: 17064 - DNA, 20 bp, Artificial Sequence
  Description of Artificial Sequence: Synthetic oligonucleotide
  Target: SCNA; (-) strand; PAM type: NRG; PAM sequence: AAG
attgataacaccagtaataa

SEQ ID NO: 17065 - DNA, 20 bp, Artificial Sequence
  Description of Artificial Sequence: Synthetic oligonucleotide
  Target: SCNA; (-) strand; PAM type: NRG; PAM sequence: CAG
aagcatcccattgataacac

SEQ ID NO: 17066 - DNA, 20 bp, Artificial Sequence
  Description of Artificial Sequence: Synthetic oligonucleotide
  Target: SCNA; (-) strand; PAM type: NRG; PAM sequence: AAG
ccacatacttaagctgctgc

SEQ ID NO: 17067 - DNA, 20 bp, Artificial Sequence
  Description of Artificial Sequence: Synthetic oligonucleotide
  Target: SCNA; (-) strand; PAM type: NRG; PAM sequence: AAG
ccttctttatccacatactt

SEQ ID NO: 17068 - DNA, 20 bp, Artificial Sequence
  Description of Artificial Sequence: Synthetic oligonucleotide
  Target: SCNA; (-) strand; PAM type: NRG; PAM sequence: CAG
gaccactttttaaaaatatt

SEQ ID NO: 17069 - DNA, 20 bp, Artificial Sequence
  Description of Artificial Sequence: Synthetic oligonucleotide
  Target: SCNA; (-) strand; PAM type: NRG; PAM sequence: AAG
cacacatacagacattctga

SEQ ID NO: 17070 - DNA, 20 bp, Artificial Sequence
  Description of Artificial Sequence: Synthetic oligonucleotide
  Target: SCNA; (-) strand; PAM type: NRG; PAM sequence: CAG
agcatgggcccccacacata

SEQ ID NO: 17071 - DNA, 20 bp, Artificial Sequence
  Description of Artificial Sequence: Synthetic oligonucleotide
  Target: SCNA; (-) strand; PAM type: NRG; PAM sequence: GGG
atgcacatatgcctaagcat

SEQ ID NO: 17072 - DNA, 20 bp, Artificial Sequence
  Description of Artificial Sequence: Synthetic oligonucleotide
  Target: SCNA; (-) strand; PAM type: NRG; PAM sequence: TGG
catgcacatatgcctaagca

SEQ ID NO: 17073 - DNA, 20 bp, Artificial Sequence
  Description of Artificial Sequence: Synthetic oligonucleotide
  Target: SCNA; (-) strand; PAM type: NRG; PAM sequence: AAG
actggcatgcacatatgcct

SEQ ID NO: 17074 - DNA, 20 bp, Artificial Sequence
  Description of Artificial Sequence: Synthetic oligonucleotide
  Target: SCNA; (-) strand; PAM type: NRG; PAM sequence: TGG
tttcaacataaataacacac

SEQ ID NO: 17075 - DNA, 20 bp, Artificial Sequence
  Description of Artificial Sequence: Synthetic oligonucleotide
  Target: SCNA; (-) strand; PAM type: NRG; PAM sequence: TGG
cagccattaatgtaaaacat

SEQ ID NO: 17076 - DNA, 20 bp, Artificial Sequence
  Description of Artificial Sequence: Synthetic oligonucleotide
  Target: SCNA; (-) strand; PAM type: NRG; PAM sequence: CAG
ttcttatttttctggaattc

SEQ ID NO: 17077 - DNA, 20 bp, Artificial Sequence
  Description of Artificial Sequence: Synthetic oligonucleotide
  Target: SCNA; (-) strand; PAM type: NRG; PAM sequence: TGG
caaatattttcttatttttc

SEQ ID NO: 17078 - DNA, 20 bp, Artificial Sequence
  Description of Artificial Sequence: Synthetic oligonucleotide
  Target: SCNA; (-) strand; PAM type: NRG; PAM sequence: TAG
ccactaaacttttaatggtt

SEQ ID NO: 17079 - DNA, 20 bp, Artificial Sequence
  Description of Artificial Sequence: Synthetic oligonucleotide
  Target: SCNA; (-) strand; PAM type: NRG; PAM sequence: TGG
gagttccactaaacttttaa

SEQ ID NO: 17080 - DNA, 20 bp, Artificial Sequence
  Description of Artificial Sequence: Synthetic oligonucleotide
  Target: SCNA; (-) strand; PAM type: NRG; PAM sequence: GAG
agatgatacagactattaat

SEQ ID NO: 17081 - DNA, 20 bp, Artificial Sequence
  Description of Artificial Sequence: Synthetic oligonucleotide
  Target: SCNA; (-) strand; PAM type: NRG; PAM sequence: CAG
aaatatacagagagatgata

SEQ ID NO: 17082 - DNA, 20 bp, Artificial Sequence
  Description of Artificial Sequence: Synthetic oligonucleotide
  Target: SCNA; (-) strand; PAM type: NRG; PAM sequence: GAG
gtacttctgaaatatacaga

SEQ ID NO: 17083 - DNA, 20 bp, Artificial Sequence
  Description of Artificial Sequence: Synthetic oligonucleotide
  Target: SCNA; (-) strand; PAM type: NRG; PAM sequence: GAG
atgtacttctgaaatataca

SEQ ID NO: 17084 - DNA, 20 bp, Artificial Sequence
  Description of Artificial Sequence: Synthetic oligonucleotide
  Target: SCNA; (-) strand; PAM type: NRG; PAM sequence: CAG
aaatgtacttctgaaatata

SEQ ID NO: 17085 - DNA, 20 bp, Artificial Sequence
  Description of Artificial Sequence: Synthetic oligonucleotide
  Target: SCNA; (-) strand; PAM type: NRG; PAM sequence: TAG
cagttatgaaagtttacccc

SEQ ID NO: 17086 - DNA, 20 bp, Artificial Sequence
  Description of Artificial Sequence: Synthetic oligonucleotide
  Target: SCNA; (-) strand; PAM type: NRG; PAM sequence: AAG
ttcaaatcatacagttatga

SEQ ID NO: 17087 - DNA, 20 bp, Artificial Sequence
  Description of Artificial Sequence: Synthetic oligonucleotide
  Target: SCNA; (-) strand; PAM type: NRG; PAM sequence: CAG
gtacttgtgttcaaatcata

SEQ ID NO: 17088 - DNA, 20 bp, Artificial Sequence
  Description of Artificial Sequence: Synthetic oligonucleotide
  Target: SCNA; (-) strand; PAM type: NRG; PAM sequence: AAG
catctaaaaaaaaaaaagaa

SEQ ID NO: 17089 - DNA, 20 bp, Artificial Sequence
  Description of Artificial Sequence: Synthetic oligonucleotide
  Target: SCNA; (-) strand; PAM type: NRG; PAM sequence: AAG
gacttcatctaaaaaaaaaa

SEQ ID NO: 17090 - DNA, 20 bp, Artificial Sequence
  Description of Artificial Sequence: Synthetic oligonucleotide
  Target: SCNA; (-) strand; PAM type: NRG; PAM sequence: GAG
atagctacggcgataagagt

SEQ ID NO: 17091 - DNA, 20 bp, Artificial Sequence
  Description of Artificial Sequence: Synthetic oligonucleotide
  Target: SCNA; (-) strand; PAM type: NRG; PAM sequence: GAG
cactatagctacggcgataa

SEQ ID NO: 17092 - DNA, 20 bp, Artificial Sequence
  Description of Artificial Sequence: Synthetic oligonucleotide
  Target: SCNA; (-) strand; PAM type: NRG; PAM sequence: AAG
tgcactatagctacggcgat

SEQ ID NO: 17093 - DNA, 20 bp, Artificial Sequence
  Description of Artificial Sequence: Synthetic oligonucleotide
  Target: SCNA; (-) strand; PAM type: NRG; PAM sequence: CGG
gcgccattgcactatagcta

SEQ ID NO: 17094 - DNA, 20 bp, Artificial Sequence
  Description of Artificial Sequence: Synthetic oligonucleotide
  Target: SCNA; (-) strand; PAM type: NRG; PAM sequence: TAG
gagacagcgccattgcacta

SEQ ID NO: 17095 - DNA, 20 bp, Artificial Sequence
  Description of Artificial Sequence: Synthetic oligonucleotide
  Target: SCNA; (-) strand; PAM type: NRG; PAM sequence: CAG
gaggttgcagtgagctgaga

SEQ ID NO: 17096 - DNA, 20 bp, Artificial Sequence
  Description of Artificial Sequence: Synthetic oligonucleotide
  Target: SCNA; (-) strand; PAM type: NRG; PAM sequence: GAG
ggcggaggttgcagtgagct

SEQ ID NO: 17097 - DNA, 20 bp, Artificial Sequence
  Description of Artificial Sequence: Synthetic oligonucleotide
  Target: SCNA; (-) strand; PAM type: NRG; PAM sequence: GAG
taggaggcggaggttgcagt

SEQ ID NO: 17098 - DNA, 20 bp, Artificial Sequence
  Description of Artificial Sequence: Synthetic oligonucleotide
  Target: SCNA; (-) strand; PAM type: NRG; PAM sequence: CAG
aacctaggaggcggaggttg

SEQ ID NO: 17099 - DNA, 20 bp, Artificial Sequence
  Description of Artificial Sequence: Synthetic oligonucleotide
  Target: SCNA; (-) strand; PAM type: NRG; PAM sequence: AGG
tgctttaacctaggaggcgg

SEQ ID NO: 17100 - DNA, 20 bp, Artificial Sequence
  Description of Artificial Sequence: Synthetic oligonucleotide
  Target: SCNA; (-) strand; PAM type: NRG; PAM sequence: GAG
ttgctttaacctaggaggcg

SEQ ID NO: 17101 - DNA, 20 bp, Artificial Sequence
  Description of Artificial Sequence: Synthetic oligonucleotide
  Target: SCNA; (-) strand; PAM type: NRG; PAM sequence: CGG
aattgctttaacctaggagg

SEQ ID NO: 17102 - DNA, 20 bp, Artificial Sequence
  Description of Artificial Sequence: Synthetic oligonucleotide
  Target: SCNA; (-) strand; PAM type: NRG; PAM sequence: AGG
gagaattgctttaacctagg

SEQ ID NO: 17103 - DNA, 20 bp, Artificial Sequence
  Description of Artificial Sequence: Synthetic oligonucleotide
  Target: SCNA; (-) strand; PAM type: NRG; PAM sequence: GAG
ggagaattgctttaacctag

SEQ ID NO: 17104 - DNA, 20 bp, Artificial Sequence
  Description of Artificial Sequence: Synthetic oligonucleotide
  Target: SCNA; (-) strand; PAM type: NRG; PAM sequence: AGG
caggagaattgctttaacct

SEQ ID NO: 17105 - DNA, 20 bp, Artificial Sequence
  Description of Artificial Sequence: Synthetic oligonucleotide
  Target: SCNA; (-) strand; PAM type: NRG; PAM sequence: TAG
gcaggagaattgctttaacc

SEQ ID NO: 17106 - DNA, 20 bp, Artificial Sequence
  Description of Artificial Sequence: Synthetic oligonucleotide
  Target: SCNA; (-) strand; PAM type: NRG; PAM sequence: GAG
tactacggaggctgaggcag

SEQ ID NO: 17107 - DNA, 20 bp, Artificial Sequence
  Description of Artificial Sequence: Synthetic oligonucleotide
  Target: SCNA; (-) strand; PAM type: NRG; PAM sequence: AGG
gctactacggaggctgaggc

SEQ ID NO: 17108 - DNA, 20 bp, Artificial Sequence
  Description of Artificial Sequence: Synthetic oligonucleotide
  Target: SCNA; (-) strand; PAM type: NRG; PAM sequence: CAG
agctactacggaggctgagg

SEQ ID NO: 17109 - DNA, 20 bp, Artificial Sequence
  Description of Artificial Sequence: Synthetic oligonucleotide
  Target: SCNA; (-) strand; PAM type: NRG; PAM sequence: AGG
cccagctactacggaggctg

SEQ ID NO: 17110 - DNA, 20 bp, Artificial Sequence
  Description of Artificial Sequence: Synthetic oligonucleotide
  Target: SCNA; (-) strand; PAM type: NRG; PAM sequence: GAG
tcccagctactacggaggct

SEQ ID NO: 17111 - DNA, 20 bp, Artificial Sequence
  Description of Artificial Sequence: Synthetic oligonucleotide
  Target: SCNA; (-) strand; PAM type: NRG; PAM sequence: AGG
tgtaatcccagctactacgg

SEQ ID NO: 17112 - DNA, 20 bp, Artificial Sequence
  Description of Artificial Sequence: Synthetic oligonucleotide
  Target: SCNA; (-) strand; PAM type: NRG; PAM sequence: GAG
ctgtaatcccagctactacg

SEQ ID NO: 17113 - DNA, 20 bp, Artificial Sequence
  Description of Artificial Sequence: Synthetic oligonucleotide
  Target: SCNA; (-) strand; PAM type: NRG; PAM sequence: CGG
tcctgtaatcccagctacta

SEQ ID NO: 17114 - DNA, 20 bp, Artificial Sequence
  Description of Artificial Sequence: Synthetic oligonucleotide
  Target: SCNA; (-) strand; PAM type: NRG; PAM sequence: CAG
gtggcaggatcctgtaatcc

SEQ ID NO: 17115 - DNA, 20 bp, Artificial Sequence
  Description of Artificial Sequence: Synthetic oligonucleotide
  Target: SCNA; (-) strand; PAM type: NRG; PAM sequence: AGG
aaattagtgggtgtggtggc

SEQ ID NO: 17116 - DNA, 20 bp, Artificial Sequence
  Description of Artificial Sequence: Synthetic oligonucleotide
  Target: SCNA; (-) strand; PAM type: NRG; PAM sequence: CAG
aaaattagtgggtgtggtgg

SEQ ID NO: 17117 - DNA, 20 bp, Artificial Sequence
  Description of Artificial Sequence: Synthetic oligonucleotide
  Target: SCNA; (-) strand; PAM type: NRG; PAM sequence: TGG
acaaaaattagtgggtgtgg

SEQ ID NO: 17118 - DNA, 20 bp, Artificial Sequence
  Description of Artificial Sequence: Synthetic oligonucleotide
  Target: SCNA; (-) strand; PAM type: NRG; PAM sequence: TGG
aatacaaaaattagtgggtg

SEQ ID NO: 17119 - DNA, 20 bp, Artificial Sequence
  Description of Artificial Sequence: Synthetic oligonucleotide
  Target: SCNA; (-) strand; PAM type: NRG; PAM sequence: GGG
ccaaaaatacaaaaattagt

SEQ ID NO: 17120 - DNA, 20 bp, Artificial Sequence
  Description of Artificial Sequence: Synthetic oligonucleotide
  Target: SCNA; (-) strand; PAM type: NRG; PAM sequence: TGG
accaaaaatacaaaaattag

SEQ ID NO: 17121 - DNA, 20 bp, Artificial Sequence
  Description of Artificial Sequence: Synthetic oligonucleotide
  Target: SCNA; (-) strand; PAM type: NRG; PAM sequence: TAG
tctaccaaaaatacaaaaat

SEQ ID NO: 17122 - DNA, 20 bp, Artificial Sequence
  Description of Artificial Sequence: Synthetic oligonucleotide
  Target: SCNA; (-) strand; PAM type: NRG; PAM sequence: TGG
catgaccagcctgtccaaca

SEQ ID NO: 17123 - DNA, 20 bp, Artificial Sequence
  Description of Artificial Sequence: Synthetic oligonucleotide
  Target: SCNA; (-) strand; PAM type: NRG; PAM sequence: CAG
tgaggtcaggagttcatgac

SEQ ID NO: 17124 - DNA, 20 bp, Artificial Sequence
  Description of Artificial Sequence: Synthetic oligonucleotide
  Target: SCNA; (-) strand; PAM type: NRG; PAM sequence: GAG
ggtggatcgactgaggtcag

SEQ ID NO: 17125 - DNA, 20 bp, Artificial Sequence
  Description of Artificial Sequence: Synthetic oligonucleotide
  Target: SCNA; (-) strand; PAM type: NRG; PAM sequence: AGG
cgggtggatcgactgaggtc

SEQ ID NO: 17126 - DNA, 20 bp, Artificial Sequence
  Description of Artificial Sequence: Synthetic oligonucleotide
  Target: SCNA; (-) strand; PAM type: NRG; PAM sequence: CAG
gcgggtggatcgactgaggt

SEQ ID NO: 17127 - DNA, 20 bp, Artificial Sequence
  Description of Artificial Sequence: Synthetic oligonucleotide
  Target: SCNA; (-) strand; PAM type: NRG; PAM sequence: AGG
caaggcgggtggatcgactg

SEQ ID NO: 17128 - DNA, 20 bp, Artificial Sequence
  Description of Artificial Sequence: Synthetic oligonucleotide
  Target: SCNA; (-) strand; PAM type: NRG; PAM sequence: GAG
ccaaggcgggtggatcgact

SEQ ID NO: 17129 - DNA, 20 bp, Artificial Sequence
  Description of Artificial Sequence: Synthetic oligonucleotide
  Target: SCNA; (-) strand; PAM type: NRG; PAM sequence: TGG
ctttgggaggccaaggcggg

SEQ ID NO: 17130 - DNA, 20 bp, Artificial Sequence
  Description of Artificial Sequence: Synthetic oligonucleotide
  Target: SCNA; (-) strand; PAM type: NRG; PAM sequence: GGG
gcactttgggaggccaaggc

SEQ ID NO: 17131 - DNA, 20 bp, Artificial Sequence
  Description of Artificial Sequence: Synthetic oligonucleotide
  Target: SCNA; (-) strand; PAM type: NRG; PAM sequence: CGG
agcactttgggaggccaagg

SEQ ID NO: 17132 - DNA, 20 bp, Artificial Sequence
  Description of Artificial Sequence: Synthetic oligonucleotide
  Target: SCNA; (-) strand; PAM type: NRG; PAM sequence: AGG
tccagcactttgggaggcca

SEQ ID NO: 17133 - DNA, 20 bp, Artificial Sequence
  Description of Artificial Sequence: Synthetic oligonucleotide
  Target: SCNA; (-) strand; PAM type: NRG; PAM sequence: AAG
atccagcactttgggaggcc

SEQ ID NO: 17134 - DNA, 20 bp, Artificial Sequence
  Description of Artificial Sequence: Synthetic oligonucleotide
  Target: SCNA; (-) strand; PAM type: NRG; PAM sequence: AGG
ctgtaatccagcactttggg

SEQ ID NO: 17135 - DNA, 20 bp, Artificial Sequence
  Description of Artificial Sequence: Synthetic oligonucleotide
  Target: SCNA; (-) strand; PAM type: NRG; PAM sequence: GAG
cctgtaatccagcactttgg

SEQ ID NO: 17136 - DNA, 20 bp, Artificial Sequence
  Description of Artificial Sequence: Synthetic oligonucleotide
  Target: SCNA; (-) strand; PAM type: NRG; PAM sequence: GGG
cacctgtaatccagcacttt

SEQ ID NO: 17137 - DNA, 20 bp, Artificial Sequence
  Description of Artificial Sequence: Synthetic oligonucleotide
  Target: SCNA; (-) strand; PAM type: NRG; PAM sequence: TGG
acacctgtaatccagcactt

SEQ ID NO: 17138 - DNA, 20 bp, Artificial Sequence
  Description of Artificial Sequence: Synthetic oligonucleotide
  Target: SCNA; (-) strand; PAM type: NRG; PAM sequence: CAG
cgcggtggacacctgtaatc

SEQ ID NO: 17139 - DNA, 20 bp, Artificial Sequence
  Description of Artificial Sequence: Synthetic oligonucleotide
  Target: SCNA; (-) strand; PAM type: NRG; PAM sequence: TGG
tgaatattggccaggcgcgg

SEQ ID NO: 17140 - DNA, 20 bp, Artificial Sequence
  Description of Artificial Sequence: Synthetic oligonucleotide
  Target: SCNA; (-) strand; PAM type: NRG; PAM sequence: CGG
acttgaatattggccaggcg

SEQ ID NO: 17141 - DNA, 20 bp, Artificial Sequence
  Description of Artificial Sequence: Synthetic oligonucleotide
  Target: SCNA; (-) strand; PAM type: NRG; PAM sequence: AGG
tgtaaacttgaatattggcc

SEQ ID NO: 17142 - DNA, 20 bp, Artificial Sequence
  Description of Artificial Sequence: Synthetic oligonucleotide
  Target: SCNA; (-) strand; PAM type: NRG; PAM sequence: CAG
gtgtaaacttgaatattggc

SEQ ID NO: 17143 - DNA, 20 bp, Artificial Sequence
  Description of Artificial Sequence: Synthetic oligonucleotide
  Target: SCNA; (-) strand; PAM type: NRG; PAM sequence: TGG
tcctgtgtaaacttgaatat

SEQ ID NO: 17144 - DNA, 20 bp, Artificial Sequence
  Description of Artificial Sequence: Synthetic oligonucleotide
  Target: SCNA; (-) strand; PAM type: NRG; PAM sequence: AAG
aagtaaaggttatgcagaga

SEQ ID NO: 17145 - DNA, 20 bp, Artificial Sequence
  Description of Artificial Sequence: Synthetic oligonucleotide
  Target: SCNA; (-) strand; PAM type: NRG; PAM sequence: GAG
aaataagtaaaggttatgca

SEQ ID NO: 17146 - DNA, 20 bp, Artificial Sequence
  Description of Artificial Sequence: Synthetic oligonucleotide
  Target: SCNA; (-) strand; PAM type: NRG; PAM sequence: CAG
gtaaataagtaaaggttatg

SEQ ID NO: 17147 - DNA, 20 bp, Artificial Sequence
  Description of Artificial Sequence: Synthetic oligonucleotide
  Target: SCNA; (-) strand; PAM type: NRG; PAM sequence: AGG
gcttatgagtaaataagtaa

SEQ ID NO: 17148 - DNA, 20 bp, Artificial Sequence
  Description of Artificial Sequence: Synthetic oligonucleotide
  Target: SCNA; (-) strand; PAM type: NRG; PAM sequence: AAG
ggcttatgagtaaataagta

SEQ ID NO: 17149 - DNA, 20 bp, Artificial Sequence
  Description of Artificial Sequence: Synthetic oligonucleotide
  Target: SCNA; (-) strand; PAM type: NRG; PAM sequence: AAG
ctagaggcttatgagtaaat

SEQ ID NO: 17150 - DNA, 20 bp, Artificial Sequence
  Description of Artificial Sequence: Synthetic oligonucleotide
  Target: SCNA; (-) strand; PAM type: NRG; PAM sequence: GAG
agagagaactagaggcttat

SEQ ID NO: 17151 - DNA, 20 bp, Artificial Sequence
  Description of Artificial Sequence: Synthetic oligonucleotide
  Target: SCNA; (-) strand; PAM type: NRG; PAM sequence: AGG
tcaaatccagagagaactag

SEQ ID NO: 17152 - DNA, 20 bp, Artificial Sequence
  Description of Artificial Sequence: Synthetic oligonucleotide
  Target: SCNA; (-) strand; PAM type: NRG; PAM sequence: GAG
gtcaaatccagagagaacta

SEQ ID NO: 17153 - DNA, 20 bp, Artificial Sequence
  Description of Artificial Sequence: Synthetic oligonucleotide
  Target: SCNA; (-) strand; PAM type: NRG; PAM sequence: TAG
cagtcaaatccagagagaac

SEQ ID NO: 17154 - DNA, 20 bp, Artificial Sequence
  Description of Artificial Sequence: Synthetic oligonucleotide
  Target: SCNA; (-) strand; PAM type: NRG; PAM sequence: GAG
gatttacagtcaaatccaga

SEQ ID NO: 17155 - DNA, 20 bp, Artificial Sequence
  Description of Artificial Sequence: Synthetic oligonucleotide
  Target: SCNA; (-) strand; PAM type: NRG; PAM sequence: GAG
gagatttacagtcaaatcca

SEQ ID NO: 17156 - DNA, 20 bp, Artificial Sequence
  Description of Artificial Sequence: Synthetic oligonucleotide
  Target: SCNA; (-) strand; PAM type: NRG; PAM sequence: CAG
ttgagatttacagtcaaatc

SEQ ID NO: 17157 - DNA, 20 bp, Artificial Sequence
  Description of Artificial Sequence: Synthetic oligonucleotide
  Target: SCNA; (-) strand; PAM type: NRG; PAM sequence: CAG
gggaaatgtgttgagattta

SEQ ID NO: 17158 - DNA, 20 bp, Artificial Sequence
  Description of Artificial Sequence: Synthetic oligonucleotide
  Target: SCNA; (-) strand; PAM type: NRG; PAM sequence: GAG
tagtttctgggaaatgtgtt

SEQ ID NO: 17159 - DNA, 20 bp, Artificial Sequence
  Description of Artificial Sequence: Synthetic oligonucleotide
  Target: SCNA; (-) strand; PAM type: NRG; PAM sequence: GGG
gccagaagatgttagtttct

SEQ ID NO: 17160 - DNA, 20 bp, Artificial Sequence
  Description of Artificial Sequence: Synthetic oligonucleotide
  Target: SCNA; (-) strand; PAM type: NRG; PAM sequence: TGG
agccagaagatgttagtttc

SEQ ID NO: 17161 - DNA, 20 bp, Artificial Sequence
  Description of Artificial Sequence: Synthetic oligonucleotide
  Target: SCNA; (-) strand; PAM type: NRG; PAM sequence: TAG
agaagtcagccagaagatgt

SEQ ID NO: 17162 - DNA, 20 bp, Artificial Sequence
  Description of Artificial Sequence: Synthetic oligonucleotide
  Target: SCNA; (-) strand; PAM type: NRG; PAM sequence: AAG
ttttaatagaagtcagccag

SEQ ID NO: 17163 - DNA, 20 bp, Artificial Sequence
  Description of Artificial Sequence: Synthetic oligonucleotide
  Target: SCNA; (-) strand; PAM type: NRG; PAM sequence: CAG
aatttttaatagaagtcagc

SEQ ID NO: 17164 - DNA, 20 bp, Artificial Sequence
  Description of Artificial Sequence: Synthetic oligonucleotide
  Target: SCNA; (-) strand; PAM type: NRG; PAM sequence: CAG
tctgaatttttaatagaagt

SEQ ID NO: 17165 - DNA, 20 bp, Artificial Sequence
  Description of Artificial Sequence: Synthetic oligonucleotide
  Target: SCNA; (-) strand; PAM type: NRG; PAM sequence: AAG
tttgtctgaatttttaatag

SEQ ID NO: 17166 - DNA, 20 bp, Artificial Sequence
  Description of Artificial Sequence: Synthetic oligonucleotide
  Target: SCNA; (-) strand; PAM type: NRG; PAM sequence: TAG
ttctttgtctgaatttttaa

SEQ ID NO: 17167 - DNA, 20 bp, Artificial Sequence
  Description of Artificial Sequence: Synthetic oligonucleotide
  Target: SCNA; (-) strand; PAM type: NRG; PAM sequence: CAG
taatctctctccattgtatt

SEQ ID NO: 17168 - DNA, 20 bp, Artificial Sequence
  Description of Artificial Sequence: Synthetic oligonucleotide
  Target: SCNA; (-) strand; PAM type: NRG; PAM sequence: CAG
gagagagaatgggagaatag

SEQ ID NO: 17169 - DNA, 20 bp, Artificial Sequence
  Description of Artificial Sequence: Synthetic oligonucleotide
  Target: SCNA; (-) strand; PAM type: NRG; PAM sequence: TAG
agagagagagaatgggagaa

SEQ ID NO: 17170 - DNA, 20 bp, Artificial Sequence
  Description of Artificial Sequence: Synthetic oligonucleotide
  Target: SCNA; (-) strand; PAM type: NRG; PAM sequence: GAG
gctgtagagagagagaatgg

SEQ ID NO: 17171 - DNA, 20 bp, Artificial Sequence
  Description of Artificial Sequence: Synthetic oligonucleotide
  Target: SCNA; (-) strand; PAM type: NRG; PAM sequence: GGG
atgctgtagagagagagaat

SEQ ID NO: 17172 - DNA, 20 bp, Artificial Sequence
  Description of Artificial Sequence: Synthetic oligonucleotide
  Target: SCNA; (-) strand; PAM type: NRG; PAM sequence: TGG
tatgctgtagagagagagaa

SEQ ID NO: 17173 - DNA, 20 bp, Artificial Sequence
  Description of Artificial Sequence: Synthetic oligonucleotide
  Target: SCNA; (-) strand; PAM type: NRG; PAM sequence: GAG
ggtgatatgctgtagagaga

SEQ ID NO: 17174 - DNA, 20 bp, Artificial Sequence
  Description of Artificial Sequence: Synthetic oligonucleotide
  Target: SCNA; (-) strand; PAM type: NRG; PAM sequence: GAG
gaggtgatatgctgtagaga

SEQ ID NO: 17175 - DNA, 20 bp, Artificial Sequence
  Description of Artificial Sequence: Synthetic oligonucleotide
  Target: SCNA; (-) strand; PAM type: NRG; PAM sequence: GAG
aggaggtgatatgctgtaga

SEQ ID NO: 17176 - DNA, 20 bp, Artificial Sequence
  Description of Artificial Sequence: Synthetic oligonucleotide
  Target: SCNA; (-) strand; PAM type: NRG; PAM sequence: GAG
ggaggaggtgatatgctgta

SEQ ID NO: 17177 - DNA, 20 bp, Artificial Sequence
  Description of Artificial Sequence: Synthetic oligonucleotide
  Target: SCNA; (-) strand; PAM type: NRG; PAM sequence: TAG
ttggaggaggtgatatgctg

SEQ ID NO: 17178 - DNA, 20 bp, Artificial Sequence
  Description of Artificial Sequence: Synthetic oligonucleotide
  Target: SCNA; (-) strand; PAM type: NRG; PAM sequence: AGG
atatgaactgattttggagg

SEQ ID NO: 17179 - DNA, 20 bp, Artificial Sequence
  Description of Artificial Sequence: Synthetic oligonucleotide
  Target: SCNA; (-) strand; PAM type: NRG; PAM sequence: GAG
gatatgaactgattttggag

SEQ ID NO: 17180 - DNA, 20 bp, Artificial Sequence
  Description of Artificial Sequence: Synthetic oligonucleotide
  Target: SCNA; (-) strand; PAM type: NRG; PAM sequence: AGG
tagatatgaactgattttgg

SEQ ID NO: 17181 - DNA, 20 bp, Artificial Sequence
  Description of Artificial Sequence: Synthetic oligonucleotide
  Target: SCNA; (-) strand; PAM type: NRG; PAM sequence: GAG
ttagatatgaactgattttg

SEQ ID NO: 17182 - DNA, 20 bp, Artificial Sequence
  Description of Artificial Sequence: Synthetic oligonucleotide
  Target: SCNA; (-) strand; PAM type: NRG; PAM sequence: TGG
agttagatatgaactgattt

SEQ ID NO: 17183 - DNA, 20 bp, Artificial Sequence
  Description of Artificial Sequence: Synthetic oligonucleotide
  Target: SCNA; (-) strand; PAM type: NRG; PAM sequence: TAG
actaaaaatgtgctaggagt

SEQ ID NO: 17184 - DNA, 20 bp, Artificial Sequence
  Description of Artificial Sequence: Synthetic oligonucleotide
  Target: SCNA; (-) strand; PAM type: NRG; PAM sequence: GAG
tttaactaaaaatgtgctag

SEQ ID NO: 17185 - DNA, 20 bp, Artificial Sequence
  Description of Artificial Sequence: Synthetic oligonucleotide
  Target: SCNA; (-) strand; PAM type: NRG; PAM sequence: AGG
tttttaactaaaaatgtgct

SEQ ID NO: 17186 - DNA, 20 bp, Artificial Sequence
  Description of Artificial Sequence: Synthetic oligonucleotide
  Target: SCNA; (-) strand; PAM type: NRG; PAM sequence: TAG
atttttaactaaaaatgtgc

SEQ ID NO: 17187 - DNA, 20 bp, Artificial Sequence
  Description of Artificial Sequence: Synthetic oligonucleotide
  Target: SCNA; (-) strand; PAM type: NRG; PAM sequence: CAG
cacacacatatgtgtgatat

SEQ ID NO: 17188 - DNA, 20 bp, Artificial Sequence
  Description of Artificial Sequence: Synthetic oligonucleotide
  Target: SCNA; (-) strand; PAM type: NRG; PAM sequence: AAG
gcattctatcacctgcaaga

SEQ ID NO: 17189 - DNA, 20 bp, Artificial Sequence
  Description of Artificial Sequence: Synthetic oligonucleotide
  Target: SCNA; (-) strand; PAM type: NRG; PAM sequence: AAG
aaaagcattctatcacctgc

SEQ ID NO: 17190 - DNA, 20 bp, Artificial Sequence
  Description of Artificial Sequence: Synthetic oligonucleotide
  Target: SCNA; (-) strand; PAM type: NRG; PAM sequence: AAG
ccacaaaaccacctccaaaa

SEQ ID NO: 17191 - DNA, 20 bp, Artificial Sequence
  Description of Artificial Sequence: Synthetic oligonucleotide
  Target: SCNA; (-) strand; PAM type: NRG; PAM sequence: AGG
taacaatagagacattacat

SEQ ID NO: 17192 - DNA, 20 bp, Artificial Sequence
  Description of Artificial Sequence: Synthetic oligonucleotide
  Target: SCNA; (-) strand; PAM type: NRG; PAM sequence: TAG
ataacaatagagacattaca

SEQ ID NO: 17193 - DNA, 20 bp, Artificial Sequence
  Description of Artificial Sequence: Synthetic oligonucleotide
  Target: SCNA; (-) strand; PAM type: NRG; PAM sequence: GAG
acttttaaaatataacaata

SEQ ID NO: 17194 - DNA, 20 bp, Artificial Sequence
  Description of Artificial Sequence: Synthetic oligonucleotide
  Target: SCNA; (-) strand; PAM type: NRG; PAM sequence: TAG
aaacttttaaaatataacaa

SEQ ID NO: 17195 - DNA, 20 bp, Artificial Sequence
  Description of Artificial Sequence: Synthetic oligonucleotide
  Target: SCNA; (-) strand; PAM type: NRG; PAM sequence: AAG
aaacaaacaaacaaacaaaa

SEQ ID NO: 17196 - DNA, 20 bp, Artificial Sequence
  Description of Artificial Sequence: Synthetic oligonucleotide
  Target: SCNA; (-) strand; PAM type: NRG; PAM sequence: GAG
tccagcctgggctacagagg

SEQ ID NO: 17197 - DNA, 20 bp, Artificial Sequence
  Description of Artificial Sequence: Synthetic oligonucleotide
  Target: SCNA; (-) strand; PAM type: NRG; PAM sequence: GGG
actccagcctgggctacaga

SEQ ID NO: 17198 - DNA, 20 bp, Artificial Sequence
  Description of Artificial Sequence: Synthetic oligonucleotide
  Target: SCNA; (-) strand; PAM type: NRG; PAM sequence: AGG
cactccagcctgggctacag

SEQ ID NO: 17199 - DNA, 20 bp, Artificial Sequence
  Description of Artificial Sequence: Synthetic oligonucleotide
  Target: SCNA; (-) strand; PAM type: NRG; PAM sequence: GAG
gcactccagcctgggctaca

SEQ ID NO: 17200 - DNA, 20 bp, Artificial Sequence
  Description of Artificial Sequence: Synthetic oligonucleotide
  Target: SCNA; (-) strand; PAM type: NRG; PAM sequence: CAG
ctgcactccagcctgggcta

SEQ ID NO: 17201 - DNA, 20 bp, Artificial Sequence
  Description of Artificial Sequence: Synthetic oligonucleotide
  Target: SCNA; (-) strand; PAM type: NRG; PAM sequence: GGG
ctgccactgcactccagcct

SEQ ID NO: 17202 - DNA, 20 bp, Artificial Sequence
  Description of Artificial Sequence: Synthetic oligonucleotide
  Target: SCNA; (-) strand; PAM type: NRG; PAM sequence: TGG
cctgccactgcactccagcc

SEQ ID NO: 17203 - DNA, 20 bp, Artificial Sequence
  Description of Artificial Sequence: Synthetic oligonucleotide
  Target: SCNA; (-) strand; PAM type: NRG; PAM sequence: CAG
gagatcctgccactgcactc

SEQ ID NO: 17204 - DNA, 20 bp, Artificial Sequence
  Description of Artificial Sequence: Synthetic oligonucleotide
  Target: SCNA; (-) strand; PAM type: NRG; PAM sequence: GAG
ggcagaggttgcagtgagcc

SEQ ID NO: 17205 - DNA, 20 bp, Artificial Sequence
  Description of Artificial Sequence: Synthetic oligonucleotide
  Target: SCNA; (-) strand; PAM type: NRG; PAM sequence: GAG
cgggaggcagaggttgcagt

SEQ ID NO: 17206 - DNA, 20 bp, Artificial Sequence
  Description of Artificial Sequence: Synthetic oligonucleotide
  Target: SCNA; (-) strand; PAM type: NRG; PAM sequence: CAG
aacccgggaggcagaggttg

SEQ ID NO: 17207 - DNA, 20 bp, Artificial Sequence
  Description of Artificial Sequence: Synthetic oligonucleotide
  Target: SCNA; (-) strand; PAM type: NRG; PAM sequence: AGG
cacttgaacccgggaggcag

SEQ ID NO: 17208 - DNA, 20 bp, Artificial Sequence
  Description of Artificial Sequence: Synthetic oligonucleotide
  Target: SCNA; (-) strand; PAM type: NRG; PAM sequence: GAG
tcacttgaacccgggaggca

SEQ ID NO: 17209 - DNA, 20 bp, Artificial Sequence
  Description of Artificial Sequence: Synthetic oligonucleotide
  Target: SCNA; (-) strand; PAM type: NRG; PAM sequence: CAG
agtcacttgaacccgggagg

SEQ ID NO: 17210 - DNA, 20 bp, Artificial Sequence
  Description of Artificial Sequence: Synthetic oligonucleotide
  Target: SCNA; (-) strand; PAM type: NRG; PAM sequence: AGG
gagagtcacttgaacccggg

SEQ ID NO: 17211 - DNA, 20 bp, Artificial Sequence
  Description of Artificial Sequence: Synthetic oligonucleotide
  Target: SCNA; (-) strand; PAM type: NRG; PAM sequence: GAG
cgagagtcacttgaacccgg

SEQ ID NO: 17212 - DNA, 20 bp, Artificial Sequence
  Description of Artificial Sequence: Synthetic oligonucleotide
  Target: SCNA; (-) strand; PAM type: NRG; PAM sequence: GGG
cacgagagtcacttgaaccc

SEQ ID NO: 17213 - DNA, 20 bp, Artificial Sequence
  Description of Artificial Sequence: Synthetic oligonucleotide
  Target: SCNA; (-) strand; PAM type: NRG; PAM sequence: CGG
gcacgagagtcacttgaacc

SEQ ID NO: 17214 - DNA, 20 bp, Artificial Sequence
  Description of Artificial Sequence: Synthetic oligonucleotide
  Target: SCNA; (-) strand; PAM type: NRG; PAM sequence: GAG
ctctggaggctgaggcacga

SEQ ID NO: 17215 - DNA, 20 bp, Artificial Sequence
  Description of Artificial Sequence: Synthetic oligonucleotide
  Target: SCNA; (-) strand; PAM type: NRG; PAM sequence: GAG
tactctggaggctgaggcac

SEQ ID NO: 17216 - DNA, 20 bp, Artificial Sequence
  Description of Artificial Sequence: Synthetic oligonucleotide
  Target: SCNA; (-) strand; PAM type: NRG; PAM sequence: AGG
cctggctactctggaggctg

SEQ ID NO: 17217 - DNA, 20 bp, Artificial Sequence
  Description of Artificial Sequence: Synthetic oligonucleotide
  Target: SCNA; (-) strand; PAM type: NRG; PAM sequence: GAG
tcctggctactctggaggct

SEQ ID NO: 17218 - DNA, 20 bp, Artificial Sequence
  Description of Artificial Sequence: Synthetic oligonucleotide
  Target: SCNA; (-) strand; PAM type: NRG; PAM sequence: AGG
tgtaatcctggctactctgg

SEQ ID NO: 17219 - DNA, 20 bp, Artificial Sequence
  Description of Artificial Sequence: Synthetic oligonucleotide
  Target: SCNA; (-) strand; PAM type: NRG; PAM sequence: GAG
ctgtaatcctggctactctg

SEQ ID NO: 17220 - DNA, 20 bp, Artificial Sequence
  Description of Artificial Sequence: Synthetic oligonucleotide
  Target: SCNA; (-) strand; PAM type: NRG; PAM sequence: TGG
gcctgtaatcctggctactc

SEQ ID NO: 17221 - DNA, 20 bp, Artificial Sequence
  Description of Artificial Sequence: Synthetic oligonucleotide
  Target: SCNA; (-) strand; PAM type: NRG; PAM sequence: TGG
gtggcatgcgcctgtaatcc

SEQ ID NO: 17222 - DNA, 20 bp, Artificial Sequence
  Description of Artificial Sequence: Synthetic oligonucleotide
  Target: SCNA; (-) strand; PAM type: NRG; PAM sequence: TGG
aaaaaaaaagtgggatgtgg

SEQ ID NO: 17223 - DNA, 20 bp, Artificial Sequence
  Description of Artificial Sequence: Synthetic oligonucleotide
  Target: SCNA; (-) strand; PAM type: NRG; PAM sequence: TGG
aaaaaaaaaaaagtgggatg

SEQ ID NO: 17224 - DNA, 20 bp, Artificial Sequence
  Description of Artificial Sequence: Synthetic oligonucleotide
  Target: SCNA; (-) strand; PAM type: NRG; PAM sequence: GGG
atacaaaaaaaaaaaaaagt

SEQ ID NO: 17225 - DNA, 20 bp, Artificial Sequence
  Description of Artificial Sequence: Synthetic oligonucleotide
  Target: SCNA; (-) strand; PAM type: NRG; PAM sequence: TGG
aatacaaaaaaaaaaaaaag

SEQ ID NO: 17226 - DNA, 20 bp, Artificial Sequence
  Description of Artificial Sequence: Synthetic oligonucleotide
  Target: SCNA; (-) strand; PAM type: NRG; PAM sequence: AAG
aaaaatacaaaaaaaaaaaa

SEQ ID NO: 17227 - DNA, 20 bp, Artificial Sequence
  Description of Artificial Sequence: Synthetic oligonucleotide
  Target: SCNA; (-) strand; PAM type: NRG; PAM sequence: TGG
tgagaccaccctggccaaca

SEQ ID NO: 17228 - DNA, 20 bp, Artificial Sequence
  Description of Artificial Sequence: Synthetic oligonucleotide
  Target: SCNA; (-) strand; PAM type: NRG; PAM sequence: TGG
tcagtagtttgagaccaccc

SEQ ID NO: 17229 - DNA, 20 bp, Artificial Sequence
  Description of Artificial Sequence: Synthetic oligonucleotide
  Target: SCNA; (-) strand; PAM type: NRG; PAM sequence: GAG
ttacttgagatcagtagttt

SEQ ID NO: 17230 - DNA, 20 bp, Artificial Sequence
  Description of Artificial Sequence: Synthetic oligonucleotide
  Target: SCNA; (-) strand; PAM type: NRG; PAM sequence: TAG
ggccaattacttgagatcag

SEQ ID NO: 17231 - DNA, 20 bp, Artificial Sequence
  Description of Artificial Sequence: Synthetic oligonucleotide
  Target: SCNA; (-) strand; PAM type: NRG; PAM sequence: CAG
gctggccaattacttgagat

SEQ ID NO: 17232 - DNA, 20 bp, Artificial Sequence
  Description of Artificial Sequence: Synthetic oligonucleotide
  Target: SCNA; (-) strand; PAM type: NRG; PAM sequence: GAG
ccaaggctggccaattactt

SEQ ID NO: 17233 - DNA, 20 bp, Artificial Sequence
  Description of Artificial Sequence: Synthetic oligonucleotide
  Target: SCNA; (-) strand; PAM type: NRG; PAM sequence: TGG
gcactttgggacgccaaggc

SEQ ID NO: 17234 - DNA, 20 bp, Artificial Sequence
  Description of Artificial Sequence: Synthetic oligonucleotide
  Target: SCNA; (-) strand; PAM type: NRG; PAM sequence: AGG
tcttgcactttgggacgcca

SEQ ID NO: 17235 - DNA, 20 bp, Artificial Sequence
  Description of Artificial Sequence: Synthetic oligonucleotide
  Target: SCNA; (-) strand; PAM type: NRG; PAM sequence: AAG
gtcttgcactttgggacgcc

SEQ ID NO: 17236 - DNA, 20 bp, Artificial Sequence
  Description of Artificial Sequence: Synthetic oligonucleotide
  Target: SCNA; (-) strand; PAM type: NRG; PAM sequence: GGG
agcctgcagtcttgcacttt

SEQ ID NO: 17237 - DNA, 20 bp, Artificial Sequence
  Description of Artificial Sequence: Synthetic oligonucleotide
  Target: SCNA; (-) strand; PAM type: NRG; PAM sequence: TGG
aagcctgcagtcttgcactt

SEQ ID NO: 17238 - DNA, 20 bp, Artificial Sequence
  Description of Artificial Sequence: Synthetic oligonucleotide
  Target: SCNA; (-) strand; PAM type: NRG; PAM sequence: CAG
agcgtggtggctcaagcctg

SEQ ID NO: 17239 - DNA, 20 bp, Artificial Sequence
  Description of Artificial Sequence: Synthetic oligonucleotide
  Target: SCNA; (-) strand; PAM type: NRG; PAM sequence: AAG
ttggtggagcgtggtggctc

SEQ ID NO: 17240 - DNA, 20 bp, Artificial Sequence
  Description of Artificial Sequence: Synthetic oligonucleotide
  Target: SCNA; (-) strand; PAM type: NRG; PAM sequence: TGG
aaacttttggtggagcgtgg

SEQ ID NO: 17241 - DNA, 20 bp, Artificial Sequence
  Description of Artificial Sequence: Synthetic oligonucleotide
  Target: SCNA; (-) strand; PAM type: NRG; PAM sequence: TGG
aagaaacttttggtggagcg

SEQ ID NO: 17242 - DNA, 20 bp, Artificial Sequence
  Description of Artificial Sequence: Synthetic oligonucleotide
  Target: SCNA; (-) strand; PAM type: NRG; PAM sequence: GAG
gtgctaagaaacttttggtg

SEQ ID NO: 17243 - DNA, 20 bp, Artificial Sequence
  Description of Artificial Sequence: Synthetic oligonucleotide
  Target: SCNA; (-) strand; PAM type: NRG; PAM sequence: TGG
gagtgctaagaaacttttgg

SEQ ID NO: 17244 - DNA, 20 bp, Artificial Sequence
  Description of Artificial Sequence: Synthetic oligonucleotide
  Target: SCNA; (-) strand; PAM type: NRG; PAM sequence: TGG
aatgagtgctaagaaacttt

SEQ ID NO: 17245 - DNA, 20 bp, Artificial Sequence
  Description of Artificial Sequence: Synthetic oligonucleotide
  Target: SCNA; (-) strand; PAM type: NRG; PAM sequence: AAG
ttctcatgagaatgagtgct

SEQ ID NO: 17246 - DNA, 20 bp, Artificial Sequence
  Description of Artificial Sequence: Synthetic oligonucleotide
  Target: SCNA; (-) strand; PAM type: NRG; PAM sequence: GAG
gcaatttttctcatgagaat

SEQ ID NO: 17247 - DNA, 20 bp, Artificial Sequence
  Description of Artificial Sequence: Synthetic oligonucleotide
  Target: SCNA; (-) strand; PAM type: NRG; PAM sequence: GAG
ttttcagcaatttttctcat

SEQ ID NO: 17248 - DNA, 20 bp, Artificial Sequence
  Description of Artificial Sequence: Synthetic oligonucleotide
  Target: SCNA; (-) strand; PAM type: NRG; PAM sequence: CAG
tttctttattgccaagtttt

SEQ ID NO: 17249 - DNA, 20 bp, Artificial Sequence
  Description of Artificial Sequence: Synthetic oligonucleotide
  Target: SCNA; (-) strand; PAM type: NRG; PAM sequence: AAG
cattctgtttctttattgcc

SEQ ID NO: 17250 - DNA, 20 bp, Artificial Sequence
  Description of Artificial Sequence: Synthetic oligonucleotide
  Target: SCNA; (-) strand; PAM type: NRG; PAM sequence: TAG
aataacatttaaaggacatg

SEQ ID NO: 17251 - DNA, 20 bp, Artificial Sequence
  Description of Artificial Sequence: Synthetic oligonucleotide
  Target: SCNA; (-) strand; PAM type: NRG; PAM sequence: AGG
cccttaaaaataacatttaa

SEQ ID NO: 17252 - DNA, 20 bp, Artificial Sequence
  Description of Artificial Sequence: Synthetic oligonucleotide
  Target: SCNA; (-) strand; PAM type: NRG; PAM sequence: AAG
ccccttaaaaataacattta

SEQ ID NO: 17253 - DNA, 20 bp, Artificial Sequence
  Description of Artificial Sequence: Synthetic oligonucleotide
  Target: SCNA; (-) strand; PAM type: NRG; PAM sequence: GAG
taacttcatagtcattgatt

SEQ ID NO: 17254 - DNA, 20 bp, Artificial Sequence
  Description of Artificial Sequence: Synthetic oligonucleotide
  Target: SCNA; (-) strand; PAM type: NRG; PAM sequence: TAG
ttttatcttagataacttca

SEQ ID NO: 17255 - DNA, 20 bp, Artificial Sequence
  Description of Artificial Sequence: Synthetic oligonucleotide
  Target: SCNA; (-) strand; PAM type: NRG; PAM sequence: TAG
caaaatctggtgttttatct

SEQ ID NO: 17256 - DNA, 20 bp, Artificial Sequence
  Description of Artificial Sequence: Synthetic oligonucleotide
  Target: SCNA; (-) strand; PAM type: NRG; PAM sequence: TGG
ttaatggcaatgtcaaaatc

SEQ ID NO: 17257 - DNA, 20 bp, Artificial Sequence
  Description of Artificial Sequence: Synthetic oligonucleotide
  Target: SCNA; (-) strand; PAM type: NRG; PAM sequence: TGG
ggctctaataaaaaagttaa

SEQ ID NO: 17258 - DNA, 20 bp, Artificial Sequence
  Description of Artificial Sequence: Synthetic oligonucleotide
  Target: SCNA; (-) strand; PAM type: NRG; PAM sequence: AAG
atctgggggctctaataaaa

SEQ ID NO: 17259 - DNA, 20 bp, Artificial Sequence
  Description of Artificial Sequence: Synthetic oligonucleotide
  Target: SCNA; (-) strand; PAM type: NRG; PAM sequence: GGG
catataacctgtagatctgg

SEQ ID NO: 17260 - DNA, 20 bp, Artificial Sequence
  Description of Artificial Sequence: Synthetic oligonucleotide
  Target: SCNA; (-) strand; PAM type: NRG; PAM sequence: GGG
acatataacctgtagatctg

SEQ ID NO: 17261 - DNA, 20 bp, Artificial Sequence
  Description of Artificial Sequence: Synthetic oligonucleotide
  Target: SCNA; (-) strand; PAM type: NRG; PAM sequence: GGG
cacatataacctgtagatct

SEQ ID NO: 17262 - DNA, 20 bp, Artificial Sequence
  Description of Artificial Sequence: Synthetic oligonucleotide
  Target: SCNA; (-) strand; PAM type: NRG; PAM sequence: TGG
gcacatataacctgtagatc

SEQ ID NO: 17263 - DNA, 20 bp, Artificial Sequence
  Description of Artificial Sequence: Synthetic oligonucleotide
  Target: SCNA; (-) strand; PAM type: NRG; PAM sequence: TAG
acatctgcacatataacctg

SEQ ID NO: 17264 - DNA, 20 bp, Artificial Sequence
  Description of Artificial Sequence: Synthetic oligonucleotide
  Target: SCNA; (-) strand; PAM type: NRG; PAM sequence: CAG
tcttgaaaagggaaataaag

SEQ ID NO: 17265 - DNA, 20 bp, Artificial Sequence
  Description of Artificial Sequence: Synthetic oligonucleotide
  Target: SCNA; (-) strand; PAM type: NRG; PAM sequence: AAG
agctcttgaaaagggaaata

SEQ ID NO: 17266 - DNA, 20 bp, Artificial Sequence
  Description of Artificial Sequence: Synthetic oligonucleotide
  Target: SCNA; (-) strand; PAM type: NRG; PAM sequence: GGG
ataagaaaagctcttgaaaa

SEQ ID NO: 17267 - DNA, 20 bp, Artificial Sequence
  Description of Artificial Sequence: Synthetic oligonucleotide
  Target: SCNA; (-) strand; PAM type: NRG; PAM sequence: AGG
tataagaaaagctcttgaaa

SEQ ID NO: 17268 - DNA, 20 bp, Artificial Sequence
  Description of Artificial Sequence: Synthetic oligonucleotide
  Target: SCNA; (-) strand; PAM type: NRG; PAM sequence: AAG
gtataagaaaagctcttgaa

SEQ ID NO: 17269 - DNA, 20 bp, Artificial Sequence
  Description of Artificial Sequence: Synthetic oligonucleotide
  Target: SCNA; (-) strand; PAM type: NRG; PAM sequence: AAG
ggatagatgctgtataagaa

SEQ ID NO: 17270 - DNA, 20 bp, Artificial Sequence
  Description of Artificial Sequence: Synthetic oligonucleotide
  Target: SCNA; (-) strand; PAM type: NRG; PAM sequence: AAG
agagtggatagatgctgtat

SEQ ID NO: 17271 - DNA, 20 bp, Artificial Sequence
  Description of Artificial Sequence: Synthetic oligonucleotide
  Target: SCNA; (-) strand; PAM type: NRG; PAM sequence: TAG
catctctataggagagtgga

SEQ ID NO: 17272 - DNA, 20 bp, Artificial Sequence
  Description of Artificial Sequence: Synthetic oligonucleotide
  Target: SCNA; (-) strand; PAM type: NRG; PAM sequence: TGG
acttcatctctataggagag

SEQ ID NO: 17273 - DNA, 20 bp, Artificial Sequence
  Description of Artificial Sequence: Synthetic oligonucleotide
  Target: SCNA; (-) strand; PAM type: NRG; PAM sequence: GAG
ttaacttcatctctatagga

SEQ ID NO: 17274 - DNA, 20 bp, Artificial Sequence
  Description of Artificial Sequence: Synthetic oligonucleotide
  Target: SCNA; (-) strand; PAM type: NRG; PAM sequence: GAG
agttaacttcatctctatag

SEQ ID NO: 17275 - DNA, 20 bp, Artificial Sequence
  Description of Artificial Sequence: Synthetic oligonucleotide
  Target: SCNA; (-) strand; PAM type: NRG; PAM sequence: AGG
ggagttaacttcatctctat

SEQ ID NO: 17276 - DNA, 20 bp, Artificial Sequence
  Description of Artificial Sequence: Synthetic oligonucleotide
  Target: SCNA; (-) strand; PAM type: NRG; PAM sequence: TAG
gggagttaacttcatctcta

SEQ ID NO: 17277 - DNA, 20 bp, Artificial Sequence
  Description of Artificial Sequence: Synthetic oligonucleotide
  Target: SCNA; (-) strand; PAM type: NRG; PAM sequence: GAG
acaagtgatagttgtcaagg

SEQ ID NO: 17278 - DNA, 20 bp, Artificial Sequence
  Description of Artificial Sequence: Synthetic oligonucleotide
  Target: SCNA; (-) strand; PAM type: NRG; PAM sequence: GGG
ggacaagtgatagttgtcaa

SEQ ID NO: 17279 - DNA, 20 bp, Artificial Sequence
  Description of Artificial Sequence: Synthetic oligonucleotide
  Target: SCNA; (-) strand; PAM type: NRG; PAM sequence: AGG
gggacaagtgatagttgtca

SEQ ID NO: 17280 - DNA, 20 bp, Artificial Sequence
  Description of Artificial Sequence: Synthetic oligonucleotide
  Target: SCNA; (-) strand; PAM type: NRG; PAM sequence: AAG
ggggacaagtgatagttgtc

SEQ ID NO: 17281 - DNA, 20 bp, Artificial Sequence
  Description of Artificial Sequence: Synthetic oligonucleotide
  Target: SCNA; (-) strand; PAM type: NRG; PAM sequence: TAG
tggggattggggacaagtga

SEQ ID NO: 17282 - DNA, 20 bp, Artificial Sequence
  Description of Artificial Sequence: Synthetic oligonucleotide
  Target: SCNA; (-) strand; PAM type: NRG; PAM sequence: AAG
gaagggtggggattggggac

SEQ ID NO: 17283 - DNA, 20 bp, Artificial Sequence
  Description of Artificial Sequence: Synthetic oligonucleotide
  Target: SCNA; (-) strand; PAM type: NRG; PAM sequence: GGG
aagtggaagggtggggattg

SEQ ID NO: 17284 - DNA, 20 bp, Artificial Sequence
  Description of Artificial Sequence: Synthetic oligonucleotide
  Target: SCNA; (-) strand; PAM type: NRG; PAM sequence: GGG
caagtggaagggtggggatt

SEQ ID NO: 17285 - DNA, 20 bp, Artificial Sequence
  Description of Artificial Sequence: Synthetic oligonucleotide
  Target: SCNA; (-) strand; PAM type: NRG; PAM sequence: TGG
tcaagtggaagggtggggat

SEQ ID NO: 17286 - DNA, 20 bp, Artificial Sequence
  Description of Artificial Sequence: Synthetic oligonucleotide
  Target: SCNA; (-) strand; PAM type: NRG; PAM sequence: GGG
gtatgtcaagtggaagggtg

SEQ ID NO: 17287 - DNA, 20 bp, Artificial Sequence
  Description of Artificial Sequence: Synthetic oligonucleotide
  Target: SCNA; (-) strand; PAM type: NRG; PAM sequence: GGG
tgtatgtcaagtggaagggt

SEQ ID NO: 17288 - DNA, 20 bp, Artificial Sequence
  Description of Artificial Sequence: Synthetic oligonucleotide
  Target: SCNA; (-) strand; PAM type: NRG; PAM sequence: TGG
ttgtatgtcaagtggaaggg

SEQ ID NO: 17289 - DNA, 20 bp, Artificial Sequence
  Description of Artificial Sequence: Synthetic oligonucleotide
  Target: SCNA; (-) strand; PAM type: NRG; PAM sequence: GGG
ggtttgtatgtcaagtggaa

SEQ ID NO: 17290 - DNA, 20 bp, Artificial Sequence
  Description of Artificial Sequence: Synthetic oligonucleotide
  Target: SCNA; (-) strand; PAM type: NRG; PAM sequence: AGG
gggtttgtatgtcaagtgga

SEQ ID NO: 17291 - DNA, 20 bp, Artificial Sequence
  Description of Artificial Sequence: Synthetic oligonucleotide
  Target: SCNA; (-) strand; PAM type: NRG; PAM sequence: AAG
tgggtttgtatgtcaagtgg

SEQ ID NO: 17292 - DNA, 20 bp, Artificial Sequence
  Description of Artificial Sequence: Synthetic oligonucleotide
  Target: SCNA; (-) strand; PAM type: NRG; PAM sequence: TGG
ctttgggtttgtatgtcaag

SEQ ID NO: 17293 - DNA, 20 bp, Artificial Sequence
  Description of Artificial Sequence: Synthetic oligonucleotide
  Target: SCNA; (-) strand; PAM type: NRG; PAM sequence: AAG
tctctttgggtttgtatgtc

SEQ ID NO: 17294 - DNA, 20 bp, Artificial Sequence
  Description of Artificial Sequence: Synthetic oligonucleotide
  Target: SCNA; (-) strand; PAM type: NRG; PAM sequence: GGG
aaatgagcatgaatctcttt

SEQ ID NO: 17295 - DNA, 20 bp, Artificial Sequence
  Description of Artificial Sequence: Synthetic oligonucleotide
  Target: SCNA; (-) strand; PAM type: NRG; PAM sequence: TGG
taaatgagcatgaatctctt

SEQ ID NO: 17296 - DNA, 20 bp, Artificial Sequence
  Description of Artificial Sequence: Synthetic oligonucleotide
  Target: SCNA; (-) strand; PAM type: NRG; PAM sequence: GAG
gttttctactgagcataaat

SEQ ID NO: 17297 - DNA, 20 bp, Artificial Sequence
  Description of Artificial Sequence: Synthetic oligonucleotide
  Target: SCNA; (-) strand; PAM type: NRG; PAM sequence: GAG
atggaattatgttttctact

SEQ ID NO: 17298 - DNA, 20 bp, Artificial Sequence
  Description of Artificial Sequence: Synthetic oligonucleotide
  Target: SCNA; (-) strand; PAM type: NRG; PAM sequence: TGG
ttaataatagcagtaaccta

SEQ ID NO: 17299 - DNA, 20 bp, Artificial Sequence
  Description of Artificial Sequence: Synthetic oligonucleotide
  Target: SCNA; (-) strand; PAM type: NRG; PAM sequence: CAG
aaatatttgattaataatag

SEQ ID NO: 17300 - DNA, 20 bp, Artificial Sequence
  Description of Artificial Sequence: Synthetic oligonucleotide
  Target: SCNA; (-) strand; PAM type: NRG; PAM sequence: TAG
agtaaatatttgattaataa

SEQ ID NO: 17301 - DNA, 20 bp, Artificial Sequence
  Description of Artificial Sequence: Synthetic oligonucleotide
  Target: SCNA; (-) strand; PAM type: NRG; PAM sequence: TAG
ttgactaatagatataaatc

SEQ ID NO: 17302 - DNA, 20 bp, Artificial Sequence
  Description of Artificial Sequence: Synthetic oligonucleotide
  Target: SCNA; (-) strand; PAM type: NRG; PAM sequence: TAG
ttctaaagagaattgactaa

SEQ ID NO: 17303 - DNA, 20 bp, Artificial Sequence
  Description of Artificial Sequence: Synthetic oligonucleotide
  Target: SCNA; (-) strand; PAM type: NRG; PAM sequence: GAG
acagtcaaagaaattctaaa

SEQ ID NO: 17304 - DNA, 20 bp, Artificial Sequence
  Description of Artificial Sequence: Synthetic oligonucleotide
  Target: SCNA; (-) strand; PAM type: NRG; PAM sequence: AAG
aaacagtcaaagaaattcta

SEQ ID NO: 17305 - DNA, 20 bp, Artificial Sequence
  Description of Artificial Sequence: Synthetic oligonucleotide
  Target: SCNA; (-) strand; PAM type: NRG; PAM sequence: AAG
aagatttatagaaacagtca

SEQ ID NO: 17306 - DNA, 20 bp, Artificial Sequence
  Description of Artificial Sequence: Synthetic oligonucleotide
  Target: SCNA; (-) strand; PAM type: NRG; PAM sequence: CAG
ggaataaagatttatagaaa

SEQ ID NO: 17307 - DNA, 20 bp, Artificial Sequence
  Description of Artificial Sequence: Synthetic oligonucleotide
  Target: SCNA; (-) strand; PAM type: NRG; PAM sequence: TAG
atctgaggaataaagattta

SEQ ID NO: 17308 - DNA, 20 bp, Artificial Sequence
  Description of Artificial Sequence: Synthetic oligonucleotide
  Target: SCNA; (-) strand; PAM type: NRG; PAM sequence: AAG
aaaggaatatctgaggaata

SEQ ID NO: 17309 - DNA, 20 bp, Artificial Sequence
  Description of Artificial Sequence: Synthetic oligonucleotide
  Target: SCNA; (-) strand; PAM type: NRG; PAM sequence: AGG
ctggtttaaaggaatatctg

SEQ ID NO: 17310 - DNA, 20 bp, Artificial Sequence
  Description of Artificial Sequence: Synthetic oligonucleotide
  Target: SCNA; (-) strand; PAM type: NRG; PAM sequence: GAG
actggtttaaaggaatatct

SEQ ID NO: 17311 - DNA, 20 bp, Artificial Sequence
  Description of Artificial Sequence: Synthetic oligonucleotide
  Target: SCNA; (-) strand; PAM type: NRG; PAM sequence: AGG
agctggtaagactggtttaa

SEQ ID NO: 17312 - DNA, 20 bp, Artificial Sequence
  Description of Artificial Sequence: Synthetic oligonucleotide
  Target: SCNA; (-) strand; PAM type: NRG; PAM sequence: AAG
aagctggtaagactggttta

SEQ ID NO: 17313 - DNA, 20 bp, Artificial Sequence
  Description of Artificial Sequence: Synthetic oligonucleotide
  Target: SCNA; (-) strand; PAM type: NRG; PAM sequence: TGG
agccaataagctggtaagac

SEQ ID NO: 17314 - DNA, 20 bp, Artificial Sequence
  Description of Artificial Sequence: Synthetic oligonucleotide
  Target: SCNA; (-) strand; PAM type: NRG; PAM sequence: AAG
agtggagccaataagctggt

SEQ ID NO: 17315 - DNA, 20 bp, Artificial Sequence
  Description of Artificial Sequence: Synthetic oligonucleotide
  Target: SCNA; (-) strand; PAM type: NRG; PAM sequence: TGG
tagtagtggagccaataagc

SEQ ID NO: 17316 - DNA, 20 bp, Artificial Sequence
  Description of Artificial Sequence: Synthetic oligonucleotide
  Target: SCNA; (-) strand; PAM type: NRG; PAM sequence: AAG
taattagtagtggagccaat

SEQ ID NO: 17317 - DNA, 20 bp, Artificial Sequence
  Description of Artificial Sequence: Synthetic oligonucleotide
  Target: SCNA; (-) strand; PAM type: NRG; PAM sequence: GAG
caactaattaattagtagtg

SEQ ID NO: 17318 - DNA, 20 bp, Artificial Sequence
  Description of Artificial Sequence: Synthetic oligonucleotide
  Target: SCNA; (-) strand; PAM type: NRG; PAM sequence: TGG
ttcaactaattaattagtag

SEQ ID NO: 17319 - DNA, 20 bp, Artificial Sequence
  Description of Artificial Sequence: Synthetic oligonucleotide
  Target: SCNA; (-) strand; PAM type: NRG; PAM sequence: TAG
ttattcaactaattaattag

SEQ ID NO: 17320 - DNA, 20 bp, Artificial Sequence
  Description of Artificial Sequence: Synthetic oligonucleotide
  Target: SCNA; (-) strand; PAM type: NRG; PAM sequence: TAG
attttattcaactaattaat

SEQ ID NO: 17321 - DNA, 20 bp, Artificial Sequence
  Description of Artificial Sequence: Synthetic oligonucleotide
  Target: SCNA; (-) strand; PAM type: NRG; PAM sequence: AAG
acaaacataaacacatttca

SEQ ID NO: 17322 - DNA, 20 bp, Artificial Sequence
  Description of Artificial Sequence: Synthetic oligonucleotide
  Target: SCNA; (-) strand; PAM type: NRG; PAM sequence: TGG
tttttgaaaagtaaagaaga

SEQ ID NO: 17323 - DNA, 20 bp, Artificial Sequence
  Description of Artificial Sequence: Synthetic oligonucleotide
  Target: SCNA; (-) strand; PAM type: NRG; PAM sequence: AAG
atagtttttgaaaagtaaag

SEQ ID NO: 17324 - DNA, 20 bp, Artificial Sequence
  Description of Artificial Sequence: Synthetic oligonucleotide
  Target: SCNA; (-) strand; PAM type: NRG; PAM sequence: AAG
agtatagtttttgaaaagta

SEQ ID NO: 17325 - DNA, 20 bp, Artificial Sequence
  Description of Artificial Sequence: Synthetic oligonucleotide
  Target: SCNA; (-) strand; PAM type: NRG; PAM sequence: AAG
gctcaagtatagtttttgaa

SEQ ID NO: 17326 - DNA, 20 bp, Artificial Sequence
  Description of Artificial Sequence: Synthetic oligonucleotide
  Target: SCNA; (-) strand; PAM type: NRG; PAM sequence: TAG
tttcacagtgtgctcaagta

SEQ ID NO: 17327 - DNA, 20 bp, Artificial Sequence
  Description of Artificial Sequence: Synthetic oligonucleotide
  Target: SCNA; (-) strand; PAM type: NRG; PAM sequence: AAG
tatcttttcacagtgtgctc

SEQ ID NO: 17328 - DNA, 20 bp, Artificial Sequence
  Description of Artificial Sequence: Synthetic oligonucleotide
  Target: SCNA; (-) strand; PAM type: NRG; PAM sequence: CAG
cctagcaatttatcttttca

SEQ ID NO: 17329 - DNA, 20 bp, Artificial Sequence
  Description of Artificial Sequence: Synthetic oligonucleotide
  Target: SCNA; (-) strand; PAM type: NRG; PAM sequence: TAG
ttcagttcctcagttgaacc

SEQ ID NO: 17330 - DNA, 20 bp, Artificial Sequence
  Description of Artificial Sequence: Synthetic oligonucleotide
  Target: SCNA; (-) strand; PAM type: NRG; PAM sequence: CAG
gaaaaaattattcagttcct

SEQ ID NO: 17331 - DNA, 20 bp, Artificial Sequence
  Description of Artificial Sequence: Synthetic oligonucleotide
  Target: SCNA; (-) strand; PAM type: NRG; PAM sequence: CAG
taaaagaggaaaaaattatt

SEQ ID NO: 17332 - DNA, 20 bp, Artificial Sequence
  Description of Artificial Sequence: Synthetic oligonucleotide
  Target: SCNA; (-) strand; PAM type: NRG; PAM sequence: AGG
tagaatgttaaaactaaaag

SEQ ID NO: 17333 - DNA, 20 bp, Artificial Sequence
  Description of Artificial Sequence: Synthetic oligonucleotide
  Target: SCNA; (-) strand; PAM type: NRG; PAM sequence: GAG
gtagaatgttaaaactaaaa

SEQ ID NO: 17334 - DNA, 20 bp, Artificial Sequence
  Description of Artificial Sequence: Synthetic oligonucleotide
  Target: SCNA; (-) strand; PAM type: NRG; PAM sequence: AAG
gtgtagaatgttaaaactaa

SEQ ID NO: 17335 - DNA, 20 bp, Artificial Sequence
  Description of Artificial Sequence: Synthetic oligonucleotide
  Target: SCNA; (-) strand; PAM type: NRG; PAM sequence: TAG
ttaaaataatttagattgtg

SEQ ID NO: 17336 - DNA, 20 bp, Artificial Sequence
  Description of Artificial Sequence: Synthetic oligonucleotide
  Target: SCNA; (-) strand; PAM type: NRG; PAM sequence: TAG
ttctgagttttaaaataatt

SEQ ID NO: 17337 - DNA, 20 bp, Artificial Sequence
  Description of Artificial Sequence: Synthetic oligonucleotide
  Target: SCNA; (-) strand; PAM type: NRG; PAM sequence: GAG
atgagcttaaagcattttct

SEQ ID NO: 17338 - DNA, 20 bp, Artificial Sequence
  Description of Artificial Sequence: Synthetic oligonucleotide
  Target: SCNA; (-) strand; PAM type: NRG; PAM sequence: AAG
agtctataaatatgagctta

SEQ ID NO: 17339 - DNA, 20 bp, Artificial Sequence
  Description of Artificial Sequence: Synthetic oligonucleotide
  Target: SCNA; (-) strand; PAM type: NRG; PAM sequence: GAG
cttgggaagtctataaatat

SEQ ID NO: 17340 - DNA, 20 bp, Artificial Sequence
  Description of Artificial Sequence: Synthetic oligonucleotide
  Target: SCNA; (-) strand; PAM type: NRG; PAM sequence: AAG
aacagattgtactacttggg

SEQ ID NO: 17341 - DNA, 20 bp, Artificial Sequence
  Description of Artificial Sequence: Synthetic oligonucleotide
  Target: SCNA; (-) strand; PAM type: NRG; PAM sequence: GGG
gttaacagattgtactactt

SEQ ID NO: 17342 - DNA, 20 bp, Artificial Sequence
  Description of Artificial Sequence: Synthetic oligonucleotide
  Target: SCNA; (-) strand; PAM type: NRG; PAM sequence: TGG
agttaacagattgtactact

SEQ ID NO: 17343 - DNA, 20 bp, Artificial Sequence
  Description of Artificial Sequence: Synthetic oligonucleotide
  Target: SCNA; (-) strand; PAM type: NRG; PAM sequence: CAG
tacttacctacctcagttaa

SEQ ID NO: 17344 - DNA, 20 bp, Artificial Sequence
  Description of Artificial Sequence: Synthetic oligonucleotide
  Target: SCNA; (-) strand; PAM type: NRG; PAM sequence: CAG
ggacgtttacttacctacct

SEQ ID NO: 17345 - DNA, 20 bp, Artificial Sequence
  Description of Artificial Sequence: Synthetic oligonucleotide
  Target: SCNA; (-) strand; PAM type: NRG; PAM sequence: AGG
atcatttatggaagttttca

SEQ ID NO: 17346 - DNA, 20 bp, Artificial Sequence
  Description of Artificial Sequence: Synthetic oligonucleotide
  Target: SCNA; (-) strand; PAM type: NRG; PAM sequence: AAG
catcatttatggaagttttc

SEQ ID NO: 17347 - DNA, 20 bp, Artificial Sequence
  Description of Artificial Sequence: Synthetic oligonucleotide
  Target: SCNA; (-) strand; PAM type: NRG; PAM sequence: AAG
ttattcaccatcatttatgg

SEQ ID NO: 17348 - DNA, 20 bp, Artificial Sequence
  Description of Artificial Sequence: Synthetic oligonucleotide
  Target: SCNA; (-) strand; PAM type: NRG; PAM sequence: TGG
aatttattcaccatcattta

SEQ ID NO: 17349 - DNA, 20 bp, Artificial Sequence
  Description of Artificial Sequence: Synthetic oligonucleotide
  Target: SCNA; (-) strand; PAM type: NRG; PAM sequence: TGG
ttgaatatggctcagagacc

SEQ ID NO: 17350 - DNA, 20 bp, Artificial Sequence
  Description of Artificial Sequence: Synthetic oligonucleotide
  Target: SCNA; (-) strand; PAM type: NRG; PAM sequence: GAG
attatattgaatatggctca

SEQ ID NO: 17351 - DNA, 20 bp, Artificial Sequence
  Description of Artificial Sequence: Synthetic oligonucleotide
  Target: SCNA; (-) strand; PAM type: NRG; PAM sequence: CAG
tcattatattgaatatggct

SEQ ID NO: 17352 - DNA, 20 bp, Artificial Sequence
  Description of Artificial Sequence: Synthetic oligonucleotide
  Target: SCNA; (-) strand; PAM type: NRG; PAM sequence: TGG
aggattcattatattgaata

SEQ ID NO: 17353 - DNA, 20 bp, Artificial Sequence
  Description of Artificial Sequence: Synthetic oligonucleotide
  Target: SCNA; (-) strand; PAM type: NRG; PAM sequence: AGG
ttttcattgaactcctattc

SEQ ID NO: 17354 - DNA, 20 bp, Artificial Sequence
  Description of Artificial Sequence: Synthetic oligonucleotide
  Target: SCNA; (-) strand; PAM type: NRG; PAM sequence: CAG
cttttcattgaactcctatt

SEQ ID NO: 17355 - DNA, 20 bp, Artificial Sequence
  Description of Artificial Sequence: Synthetic oligonucleotide
  Target: SCNA; (-) strand; PAM type: NRG; PAM sequence: GGG
agcaggatcccatgggatat

SEQ ID NO: 17356 - DNA, 20 bp, Artificial Sequence
  Description of Artificial Sequence: Synthetic oligonucleotide
  Target: SCNA; (-) strand; PAM type: NRG; PAM sequence: TGG
cagcaggatcccatgggata

SEQ ID NO: 17357 - DNA, 20 bp, Artificial Sequence
  Description of Artificial Sequence: Synthetic oligonucleotide
  Target: SCNA; (-) strand; PAM type: NRG; PAM sequence: GGG
accttacagcaggatcccat

SEQ ID NO: 17358 - DNA, 20 bp, Artificial Sequence
  Description of Artificial Sequence: Synthetic oligonucleotide
  Target: SCNA; (-) strand; PAM type: NRG; PAM sequence: TGG
taccttacagcaggatccca

SEQ ID NO: 17359 - DNA, 20 bp, Artificial Sequence
  Description of Artificial Sequence: Synthetic oligonucleotide
  Target: SCNA; (-) strand; PAM type: NRG; PAM sequence: AGG
ttataaaagtaccttacagc

SEQ ID NO: 17360 - DNA, 20 bp, Artificial Sequence
  Description of Artificial Sequence: Synthetic oligonucleotide
  Target: SCNA; (-) strand; PAM type: NRG; PAM sequence: CAG
tttataaaagtaccttacag

SEQ ID NO: 17361 - DNA, 20 bp, Artificial Sequence
  Description of Artificial Sequence: Synthetic oligonucleotide
  Target: SCNA; (-) strand; PAM type: NRG; PAM sequence: CAG
taatttataaaagtacctta

SEQ ID NO: 17362 - DNA, 20 bp, Artificial Sequence
  Description of Artificial Sequence: Synthetic oligonucleotide
  Target: SCNA; (-) strand; PAM type: NRG; PAM sequence: AAG
ataatcagtataatttataa

SEQ ID NO: 17363 - DNA, 20 bp, Artificial Sequence
  Description of Artificial Sequence: Synthetic oligonucleotide
  Target: SCNA; (-) strand; PAM type: NRG; PAM sequence: CAG
gagaaatgagacagtataat

SEQ ID NO: 17364 - DNA, 20 bp, Artificial Sequence
  Description of Artificial Sequence: Synthetic oligonucleotide
  Target: SCNA; (-) strand; PAM type: NRG; PAM sequence: CAG
aaatagacagagaaatgaga

SEQ ID NO: 17365 - DNA, 20 bp, Artificial Sequence
  Description of Artificial Sequence: Synthetic oligonucleotide
  Target: SCNA; (-) strand; PAM type: NRG; PAM sequence: GAG
tggcaaatagacagagaaat

SEQ ID NO: 17366 - DNA, 20 bp, Artificial Sequence
  Description of Artificial Sequence: Synthetic oligonucleotide
  Target: SCNA; (-) strand; PAM type: NRG; PAM sequence: GAG
taacacatggcaaatagaca

SEQ ID NO: 17367 - DNA, 20 bp, Artificial Sequence
  Description of Artificial Sequence: Synthetic oligonucleotide
  Target: SCNA; (-) strand; PAM type: NRG; PAM sequence: CAG
tataacacatggcaaataga

SEQ ID NO: 17368 - DNA, 20 bp, Artificial Sequence
  Description of Artificial Sequence: Synthetic oligonucleotide
  Target: SCNA; (-) strand; PAM type: NRG; PAM sequence: TAG
agtatataacacatggcaaa

SEQ ID NO: 17369 - DNA, 20 bp, Artificial Sequence
  Description of Artificial Sequence: Synthetic oligonucleotide
  Target: SCNA; (-) strand; PAM type: NRG; PAM sequence: TGG
tcaccaaagtatataacaca

SEQ ID NO: 17370 - DNA, 20 bp, Artificial Sequence
  Description of Artificial Sequence: Synthetic oligonucleotide
  Target: SCNA; (-) strand; PAM type: NRG; PAM sequence: AAG
tgctttctcaaagatcacca

SEQ ID NO: 17371 - DNA, 20 bp, Artificial Sequence
  Description of Artificial Sequence: Synthetic oligonucleotide
  Target: SCNA; (-) strand; PAM type: NRG; PAM sequence: AAG
ataggttaaatgctttctca

SEQ ID NO: 17372 - DNA, 20 bp, Artificial Sequence
  Description of Artificial Sequence: Synthetic oligonucleotide
  Target: SCNA; (-) strand; PAM type: NRG; PAM sequence: AGG
gggaaaaaaatgcctgtaat

SEQ ID NO: 17373 - DNA, 20 bp, Artificial Sequence
  Description of Artificial Sequence: Synthetic oligonucleotide
  Target: SCNA; (-) strand; PAM type: NRG; PAM sequence: TAG
ggggaaaaaaatgcctgtaa

SEQ ID NO: 17374 - DNA, 20 bp, Artificial Sequence
  Description of Artificial Sequence: Synthetic oligonucleotide
  Target: SCNA; (-) strand; PAM type: NRG; PAM sequence: GGG
cctacctacttgtactttag

SEQ ID NO: 17375 - DNA, 20 bp, Artificial Sequence
  Description of Artificial Sequence: Synthetic oligonucleotide
  Target: SCNA; (-) strand; PAM type: NRG; PAM sequence: GGG
acctacctacttgtacttta

SEQ ID NO: 17376 - DNA, 20 bp, Artificial Sequence
  Description of Artificial Sequence: Synthetic oligonucleotide
  Target: SCNA; (-) strand; PAM type: NRG; PAM sequence: AGG
gacctacctacttgtacttt

SEQ ID NO: 17377 - DNA, 20 bp, Artificial Sequence
  Description of Artificial Sequence: Synthetic oligonucleotide
  Target: SCNA; (-) strand; PAM type: NRG; PAM sequence: TAG
tgacctacctacttgtactt

SEQ ID NO: 17378 - DNA, 20 bp, Artificial Sequence
  Description of Artificial Sequence: Synthetic oligonucleotide
  Target: SCNA; (-) strand; PAM type: NRG; PAM sequence: TAG
aggccaccagattgggtgga

SEQ ID NO: 17379 - DNA, 20 bp, Artificial Sequence
  Description of Artificial Sequence: Synthetic oligonucleotide
  Target: SCNA; (-) strand; PAM type: NRG; PAM sequence: TGG
tcggaggccaccagattggg

SEQ ID NO: 17380 - DNA, 20 bp, Artificial Sequence
  Description of Artificial Sequence: Synthetic oligonucleotide
  Target: SCNA; (-) strand; PAM type: NRG; PAM sequence: GGG
ccttcggaggccaccagatt

SEQ ID NO: 17381 - DNA, 20 bp, Artificial Sequence
  Description of Artificial Sequence: Synthetic oligonucleotide
  Target: SCNA; (-) strand; PAM type: NRG; PAM sequence: TGG
tccttcggaggccaccagat

SEQ ID NO: 17382 - DNA, 20 bp, Artificial Sequence
  Description of Artificial Sequence: Synthetic oligonucleotide
  Target: SCNA; (-) strand; PAM type: NRG; PAM sequence: CAG
ttttgtccttcggaggccac

SEQ ID NO: 17383 - DNA, 20 bp, Artificial Sequence
  Description of Artificial Sequence: Synthetic oligonucleotide
  Target: SCNA; (-) strand; PAM type: NRG; PAM sequence: AGG
ctctggcttttgtccttcgg

SEQ ID NO: 17384 - DNA, 20 bp, Artificial Sequence
  Description of Artificial Sequence: Synthetic oligonucleotide
  Target: SCNA; (-) strand; PAM type: NRG; PAM sequence: GAG
actctggcttttgtccttcg

SEQ ID NO: 17385 - DNA, 20 bp, Artificial Sequence
  Description of Artificial Sequence: Synthetic oligonucleotide
  Target: SCNA; (-) strand; PAM type: NRG; PAM sequence: CGG
taactctggcttttgtcctt

SEQ ID NO: 17386 - DNA, 20 bp, Artificial Sequence
  Description of Artificial Sequence: Synthetic oligonucleotide
  Target: SCNA; (-) strand; PAM type: NRG; PAM sequence: TGG
tgattgctttagattaactc

SEQ ID NO: 17387 - DNA, 20 bp, Artificial Sequence
  Description of Artificial Sequence: Synthetic oligonucleotide
  Target: SCNA; (-) strand; PAM type: NRG; PAM sequence: TAG
gtcagactccttgattgctt

SEQ ID NO: 17388 - DNA, 20 bp, Artificial Sequence
  Description of Artificial Sequence: Synthetic oligonucleotide
  Target: SCNA; (-) strand; PAM type: NRG; PAM sequence: CAG
ctcagggcttccatggtggt

SEQ ID NO: 17389 - DNA, 20 bp, Artificial Sequence
  Description of Artificial Sequence: Synthetic oligonucleotide
  Target: SCNA; (-) strand; PAM type: NRG; PAM sequence: TGG
cttcctcagggcttccatgg

SEQ ID NO: 17390 - DNA, 20 bp, Artificial Sequence
  Description of Artificial Sequence: Synthetic oligonucleotide
  Target: SCNA; (-) strand; PAM type: NRG; PAM sequence: TGG
ccacttcctcagggcttcca

SEQ ID NO: 17391 - DNA, 20 bp, Artificial Sequence
  Description of Artificial Sequence: Synthetic oligonucleotide
  Target: SCNA; (-) strand; PAM type: NRG; PAM sequence: GGG
atacagcagccacttcctca

SEQ ID NO: 17392 - DNA, 20 bp, Artificial Sequence
  Description of Artificial Sequence: Synthetic oligonucleotide
  Target: SCNA; (-) strand; PAM type: NRG; PAM sequence: AGG
aatacagcagccacttcctc

SEQ ID NO: 17393 - DNA, 20 bp, Artificial Sequence
  Description of Artificial Sequence: Synthetic oligonucleotide
  Target: SCNA; (-) strand; PAM type: NRG; PAM sequence: CAG
aaatacagcagccacttcct

SEQ ID NO: 17394 - DNA, 20 bp, Artificial Sequence
  Description of Artificial Sequence: Synthetic oligonucleotide
  Target: SCNA; (-) strand; PAM type: NRG; PAM sequence: CAG
tcttgaaaagggaaatacag

SEQ ID NO: 17395 - DNA, 20 bp, Artificial Sequence
  Description of Artificial Sequence: Synthetic oligonucleotide
  Target: SCNA; (-) strand; PAM type: NRG; PAM sequence: CAG
agctcttgaaaagggaaata

SEQ ID NO: 17396 - DNA, 20 bp, Artificial Sequence
  Description of Artificial Sequence: Synthetic oligonucleotide
  Target: SCNA; (-) strand; PAM type: NRG; PAM sequence: GGG
atacgaaaagctcttgaaaa

SEQ ID NO: 17397 - DNA, 20 bp, Artificial Sequence
  Description of Artificial Sequence: Synthetic oligonucleotide
  Target: SCNA; (-) strand; PAM type: NRG; PAM sequence: AGG
tatacgaaaagctcttgaaa

SEQ ID NO: 17398 - DNA, 20 bp, Artificial Sequence
  Description of Artificial Sequence: Synthetic oligonucleotide
  Target: SCNA; (-) strand; PAM type: NRG; PAM sequence: AAG
gtatacgaaaagctcttgaa

SEQ ID NO: 17399 - DNA, 20 bp, Artificial Sequence
  Description of Artificial Sequence: Synthetic oligonucleotide
  Target: SCNA; (-) strand; PAM type: NRG; PAM sequence: AAG
ggatagacgctgtatacgaa

SEQ ID NO: 17400 - DNA, 20 bp, Artificial Sequence
  Description of Artificial Sequence: Synthetic oligonucleotide
  Target: SCNA; (-) strand; PAM type: NRG; PAM sequence: TAG
catctctataggagagtgga

SEQ ID NO: 17401 - DNA, 20 bp, Artificial Sequence
  Description of Artificial Sequence: Synthetic oligonucleotide
  Target: SCNA; (-) strand; PAM type: NRG; PAM sequence: TGG
acttcatctctataggagag

SEQ ID NO: 17402 - DNA, 20 bp, Artificial Sequence
  Description of Artificial Sequence: Synthetic oligonucleotide
  Target: SCNA; (-) strand; PAM type: NRG; PAM sequence: GAG
ttaacttcatctctatagga

SEQ ID NO: 17403 - DNA, 20 bp, Artificial Sequence
  Description of Artificial Sequence: Synthetic oligonucleotide
  Target: SCNA; (-) strand; PAM type: NRG; PAM sequence: GAG
agttaacttcatctctatag

SEQ ID NO: 17404 - DNA, 20 bp, Artificial Sequence
  Description of Artificial Sequence: Synthetic oligonucleotide
  Target: SCNA; (-) strand; PAM type: NRG; PAM sequence: AGG
ggagttaacttcatctctat

SEQ ID NO: 17405 - DNA, 20 bp, Artificial Sequence
  Description of Artificial Sequence: Synthetic oligonucleotide
  Target: SCNA; (-) strand; PAM type: NRG; PAM sequence: TAG
gggagttaacttcatctcta

SEQ ID NO: 17406 - DNA, 20 bp, Artificial Sequence
  Description of Artificial Sequence: Synthetic oligonucleotide
  Target: SCNA; (-) strand; PAM type: NRG; PAM sequence: GAG
acaggtgatagttgtctagg

SEQ ID NO: 17407 - DNA, 20 bp, Artificial Sequence
  Description of Artificial Sequence: Synthetic oligonucleotide
  Target: SCNA; (-) strand; PAM type: NRG; PAM sequence: GGG
ggacaggtgatagttgtcta

SEQ ID NO: 17408 - DNA, 20 bp, Artificial Sequence
  Description of Artificial Sequence: Synthetic oligonucleotide
  Target: SCNA; (-) strand; PAM type: NRG; PAM sequence: AGG
gggacaggtgatagttgtct

SEQ ID NO: 17409 - DNA, 20 bp, Artificial Sequence
  Description of Artificial Sequence: Synthetic oligonucleotide
  Target: SCNA; (-) strand; PAM type: NRG; PAM sequence: TAG
ggggacaggtgatagttgtc

SEQ ID NO: 17410 - DNA, 20 bp, Artificial Sequence
  Description of Artificial Sequence: Synthetic oligonucleotide
  Target: SCNA; (-) strand; PAM type: NRG; PAM sequence: TAG
tggggattggggacaggtga

SEQ ID NO: 17411 - DNA, 20 bp, Artificial Sequence
  Description of Artificial Sequence: Synthetic oligonucleotide
  Target: SCNA; (-) strand; PAM type: NRG; PAM sequence: AGG
gaggggtggggattggggac

SEQ ID NO: 17412 - DNA, 20 bp, Artificial Sequence
  Description of Artificial Sequence: Synthetic oligonucleotide
  Target: SCNA; (-) strand; PAM type: NRG; PAM sequence: CAG
ggaggggtggggattgggga

SEQ ID NO: 17413 - DNA, 20 bp, Artificial Sequence
  Description of Artificial Sequence: Synthetic oligonucleotide
  Target: SCNA; (-) strand; PAM type: NRG; PAM sequence: GGG
aagtggaggggtggggattg

SEQ ID NO: 17414 - DNA, 20 bp, Artificial Sequence
  Description of Artificial Sequence: Synthetic oligonucleotide
  Target: SCNA; (-) strand; PAM type: NRG; PAM sequence: GGG
caagtggaggggtggggatt

SEQ ID NO: 17415 - DNA, 20 bp, Artificial Sequence
  Description of Artificial Sequence: Synthetic oligonucleotide
  Target: SCNA; (-) strand; PAM type: NRG; PAM sequence: TGG
tcaagtggaggggtggggat

SEQ ID NO: 17416 - DNA, 20 bp, Artificial Sequence
  Description of Artificial Sequence: Synthetic oligonucleotide
  Target: SCNA; (-) strand; PAM type: NRG; PAM sequence: GGG
gtatgtcaagtggaggggtg

SEQ ID NO: 17417 - DNA, 20 bp, Artificial Sequence
  Description of Artificial Sequence: Synthetic oligonucleotide
  Target: SCNA; (-) strand; PAM type: NRG; PAM sequence: GGG
tgtatgtcaagtggaggggt

SEQ ID NO: 17418 - DNA, 20 bp, Artificial Sequence
  Description of Artificial Sequence: Synthetic oligonucleotide
  Target: SCNA; (-) strand; PAM type: NRG; PAM sequence: TGG
ttgtatgtcaagtggagggg

SEQ ID NO: 17419 - DNA, 20 bp, Artificial Sequence
  Description of Artificial Sequence: Synthetic oligonucleotide
  Target: SCNA; (-) strand; PAM type: NRG; PAM sequence: GGG
ggtttgtatgtcaagtggag

SEQ ID NO: 17420 - DNA, 20 bp, Artificial Sequence
  Description of Artificial Sequence: Synthetic oligonucleotide
  Target: SCNA; (-) strand; PAM type: NRG; PAM sequence: GGG
gggtttgtatgtcaagtgga

SEQ ID NO: 17421 - DNA, 20 bp, Artificial Sequence
  Description of Artificial Sequence: Synthetic oligonucleotide
  Target: SCNA; (-) strand; PAM type: NRG; PAM sequence: AGG
tgggtttgtatgtcaagtgg

SEQ ID NO: 17422 - DNA, 20 bp, Artificial Sequence
  Description of Artificial Sequence: Synthetic oligonucleotide
  Target: SCNA; (-) strand; PAM type: NRG; PAM sequence: GAG
ttgggtttgtatgtcaagtg

SEQ ID NO: 17423 - DNA, 20 bp, Artificial Sequence
  Description of Artificial Sequence: Synthetic oligonucleotide
  Target: SCNA; (-) strand; PAM type: NRG; PAM sequence: TGG
ctttgggtttgtatgtcaag

SEQ ID NO: 17424 - DNA, 20 bp, Artificial Sequence
  Description of Artificial Sequence: Synthetic oligonucleotide
  Target: SCNA; (-) strand; PAM type: NRG; PAM sequence: AAG
tctctttgggtttgtatgtc

SEQ ID NO: 17425 - DNA, 20 bp, Artificial Sequence
  Description of Artificial Sequence: Synthetic oligonucleotide
  Target: SCNA; (-) strand; PAM type: NRG; PAM sequence: GGG
aaatgttaattaatctcttt

SEQ ID NO: 17426 - DNA, 20 bp, Artificial Sequence
  Description of Artificial Sequence: Synthetic oligonucleotide
  Target: SCNA; (-) strand; PAM type: NRG; PAM sequence: TGG
caaatgttaattaatctctt

SEQ ID NO: 17427 - DNA, 20 bp, Artificial Sequence
  Description of Artificial Sequence: Synthetic oligonucleotide
  Target: SCNA; (-) strand; PAM type: NRG; PAM sequence: TGG
tttttgtctgtgtctcttcc

SEQ ID NO: 17428 - DNA, 20 bp, Artificial Sequence
  Description of Artificial Sequence: Synthetic oligonucleotide
  Target: SCNA; (-) strand; PAM type: NRG; PAM sequence: CGG
acgaaggaatattccaatat

SEQ ID NO: 17429 - DNA, 20 bp, Artificial Sequence
  Description of Artificial Sequence: Synthetic oligonucleotide
  Target: SCNA; (-) strand; PAM type: NRG; PAM sequence: AGG
agttttatatttattcacga

SEQ ID NO: 17430 - DNA, 20 bp, Artificial Sequence
  Description of Artificial Sequence: Synthetic oligonucleotide
  Target: SCNA; (-) strand; PAM type: NRG; PAM sequence: AAG
aagttttatatttattcacg

SEQ ID NO: 17431 - DNA, 20 bp, Artificial Sequence
  Description of Artificial Sequence: Synthetic oligonucleotide
  Target: SCNA; (-) strand; PAM type: NRG; PAM sequence: AAG
atatcttcctccctctccat

SEQ ID NO: 17432 - DNA, 20 bp, Artificial Sequence
  Description of Artificial Sequence: Synthetic oligonucleotide
  Target: SCNA; (-) strand; PAM type: NRG; PAM sequence: AAG
tcttttggctttgagcaata

SEQ ID NO: 17433 - DNA, 20 bp, Artificial Sequence
  Description of Artificial Sequence: Synthetic oligonucleotide
  Target: SCNA; (-) strand; PAM type: NRG; PAM sequence: GAG
aaacaatttcttttggcttt

SEQ ID NO: 17434 - DNA, 20 bp, Artificial Sequence
  Description of Artificial Sequence: Synthetic oligonucleotide
  Target: SCNA; (-) strand; PAM type: NRG; PAM sequence: TGG
ccacaaaaaacaatttcttt

SEQ ID NO: 17435 - DNA, 20 bp, Artificial Sequence
  Description of Artificial Sequence: Synthetic oligonucleotide
  Target: SCNA; (-) strand; PAM type: NRG; PAM sequence: CAG
attgccagaaatacagcaca

SEQ ID NO: 17436 - DNA, 20 bp, Artificial Sequence
  Description of Artificial Sequence: Synthetic oligonucleotide
  Target: SCNA; (-) strand; PAM type: NRG; PAM sequence: CAG
acagataattgccagaaata

SEQ ID NO: 17437 - DNA, 20 bp, Artificial Sequence
  Description of Artificial Sequence: Synthetic oligonucleotide
  Target: SCNA; (-) strand; PAM type: NRG; PAM sequence: CAG
ttaagataacagataattgc

SEQ ID NO: 17438 - DNA, 20 bp, Artificial Sequence
  Description of Artificial Sequence: Synthetic oligonucleotide
  Target: SCNA; (-) strand; PAM type: NRG; PAM sequence: CAG
atataagcctcttaagataa

SEQ ID NO: 17439 - DNA, 20 bp, Artificial Sequence
  Description of Artificial Sequence: Synthetic oligonucleotide
  Target: SCNA; (-) strand; PAM type: NRG; PAM sequence: AAG
tctttctatataagcctctt

SEQ ID NO: 17440 - DNA, 20 bp, Artificial Sequence
  Description of Artificial Sequence: Synthetic oligonucleotide
  Target: SCNA; (-) strand; PAM type: NRG; PAM sequence: AAG
tacaattgttctttctatat

SEQ ID NO: 17441 - DNA, 20 bp, Artificial Sequence
  Description of Artificial Sequence: Synthetic oligonucleotide
  Target: SCNA; (-) strand; PAM type: NRG; PAM sequence: AGG
tcagagcatgctgtgaaagt

SEQ ID NO: 17442 - DNA, 20 bp, Artificial Sequence
  Description of Artificial Sequence: Synthetic oligonucleotide
  Target: SCNA; (-) strand; PAM type: NRG; PAM sequence: TAG
ctcagagcatgctgtgaaag

SEQ ID NO: 17443 - DNA, 20 bp, Artificial Sequence
  Description of Artificial Sequence: Synthetic oligonucleotide
  Target: SCNA; (-) strand; PAM type: NRG; PAM sequence: AAG
atcctcagagcatgctgtga

SEQ ID NO: 17444 - DNA, 20 bp, Artificial Sequence
  Description of Artificial Sequence: Synthetic oligonucleotide
  Target: SCNA; (-) strand; PAM type: NRG; PAM sequence: GAG
tgagggtccttagatcctca

SEQ ID NO: 17445 - DNA, 20 bp, Artificial Sequence
  Description of Artificial Sequence: Synthetic oligonucleotide
  Target: SCNA; (-) strand; PAM type: NRG; PAM sequence: CAG
gttgagggtccttagatcct

SEQ ID NO: 17446 - DNA, 20 bp, Artificial Sequence
  Description of Artificial Sequence: Synthetic oligonucleotide
  Target: SCNA; (-) strand; PAM type: NRG; PAM sequence: TAG
aactatttgttgagggtcct

SEQ ID NO: 17447 - DNA, 20 bp, Artificial Sequence
  Description of Artificial Sequence: Synthetic oligonucleotide
  Target: SCNA; (-) strand; PAM type: NRG; PAM sequence: GGG
gcatgaaaactatttgttga

SEQ ID NO: 17448 - DNA, 20 bp, Artificial Sequence
  Description of Artificial Sequence: Synthetic oligonucleotide
  Target: SCNA; (-) strand; PAM type: NRG; PAM sequence: AGG
agcatgaaaactatttgttg

SEQ ID NO: 17449 - DNA, 20 bp, Artificial Sequence
  Description of Artificial Sequence: Synthetic oligonucleotide
  Target: SCNA; (-) strand; PAM type: NRG; PAM sequence: GAG
tagcatgaaaactatttgtt

SEQ ID NO: 17450 - DNA, 20 bp, Artificial Sequence
  Description of Artificial Sequence: Synthetic oligonucleotide
  Target: SCNA; (-) strand; PAM type: NRG; PAM sequence: TAG
cctaaataagtgcctgcttg

SEQ ID NO: 17451 - DNA, 20 bp, Artificial Sequence
  Description of Artificial Sequence: Synthetic oligonucleotide
  Target: SCNA; (-) strand; PAM type: NRG; PAM sequence: AAG
catcctatttgtgcctaaat

SEQ ID NO: 17452 - DNA, 20 bp, Artificial Sequence
  Description of Artificial Sequence: Synthetic oligonucleotide
  Target: SCNA; (-) strand; PAM type: NRG; PAM sequence: AAG
atttatactacagttaaaaa

SEQ ID NO: 17453 - DNA, 20 bp, Artificial Sequence
  Description of Artificial Sequence: Synthetic oligonucleotide
  Target: SCNA; (-) strand; PAM type: NRG; PAM sequence: CAG
atataaaattatttatacta

SEQ ID NO: 17454 - DNA, 20 bp, Artificial Sequence
  Description of Artificial Sequence: Synthetic oligonucleotide
  Target: SCNA; (-) strand; PAM type: NRG; PAM sequence: AAG
tgactgtattttgtttaaaa

SEQ ID NO: 17455 - DNA, 20 bp, Artificial Sequence
  Description of Artificial Sequence: Synthetic oligonucleotide
  Target: SCNA; (-) strand; PAM type: NRG; PAM sequence: GAG
agtgtctatcttagaataga

SEQ ID NO: 17456 - DNA, 20 bp, Artificial Sequence
  Description of Artificial Sequence: Synthetic oligonucleotide
  Target: SCNA; (-) strand; PAM type: NRG; PAM sequence: GAG
gaagtgtctatcttagaata

SEQ ID NO: 17457 - DNA, 20 bp, Artificial Sequence
  Description of Artificial Sequence: Synthetic oligonucleotide
  Target: SCNA; (-) strand; PAM type: NRG; PAM sequence: TAG
gtgaagtgtctatcttagaa

SEQ ID NO: 17458 - DNA, 20 bp, Artificial Sequence
  Description of Artificial Sequence: Synthetic oligonucleotide
  Target: SCNA; (-) strand; PAM type: NRG; PAM sequence: TAG
aaattgtgaagtgtctatct

SEQ ID NO: 17459 - DNA, 20 bp, Artificial Sequence
  Description of Artificial Sequence: Synthetic oligonucleotide
  Target: SCNA; (-) strand; PAM type: NRG; PAM sequence: AAG
agtcttgaatttaaattgtg

SEQ ID NO: 17460 - DNA, 20 bp, Artificial Sequence
  Description of Artificial Sequence: Synthetic oligonucleotide
  Target: SCNA; (-) strand; PAM type: NRG; PAM sequence: GAG
agatgtcttcaagaaacaag

SEQ ID NO: 17461 - DNA, 20 bp, Artificial Sequence
  Description of Artificial Sequence: Synthetic oligonucleotide
  Target: SCNA; (-) strand; PAM type: NRG; PAM sequence: AGG
atagatgtcttcaagaaaca

SEQ ID NO: 17462 - DNA, 20 bp, Artificial Sequence
  Description of Artificial Sequence: Synthetic oligonucleotide
  Target: SCNA; (-) strand; PAM type: NRG; PAM sequence: AAG
catagatgtcttcaagaaac

SEQ ID NO: 17463 - DNA, 20 bp, Artificial Sequence
  Description of Artificial Sequence: Synthetic oligonucleotide
  Target: SCNA; (-) strand; PAM type: NRG; PAM sequence: AAG
ttgctttcatagatgtcttc

SEQ ID NO: 17464 - DNA, 20 bp, Artificial Sequence
  Description of Artificial Sequence: Synthetic oligonucleotide
  Target: SCNA; (-) strand; PAM type: NRG; PAM sequence: TAG
ctcaaaaacatttgctttca

SEQ ID NO: 17465 - DNA, 20 bp, Artificial Sequence
  Description of Artificial Sequence: Synthetic oligonucleotide
  Target: SCNA; (-) strand; PAM type: NRG; PAM sequence: AAG
gaatggactcagattcagcc

SEQ ID NO: 17466 - DNA, 20 bp, Artificial Sequence
  Description of Artificial Sequence: Synthetic oligonucleotide
  Target: SCNA; (-) strand; PAM type: NRG; PAM sequence: CAG
aatcggaatggactcagatt

SEQ ID NO: 17467 - DNA, 20 bp, Artificial Sequence
  Description of Artificial Sequence: Synthetic oligonucleotide
  Target: SCNA; (-) strand; PAM type: NRG; PAM sequence: CAG
tctgctaatcggaatggact

SEQ ID NO: 17468 - DNA, 20 bp, Artificial Sequence
  Description of Artificial Sequence: Synthetic oligonucleotide
  Target: SCNA; (-) strand; PAM type: NRG; PAM sequence: TGG
gtggaatctgctaatcggaa

SEQ ID NO: 17469 - DNA, 20 bp, Artificial Sequence
  Description of Artificial Sequence: Synthetic oligonucleotide
  Target: SCNA; (-) strand; PAM type: NRG; PAM sequence: CGG
tgaatgtggaatctgctaat

SEQ ID NO: 17470 - DNA, 20 bp, Artificial Sequence
  Description of Artificial Sequence: Synthetic oligonucleotide
  Target: SCNA; (-) strand; PAM type: NRG; PAM sequence: TGG
tcatggctcaaaagtgaatg

SEQ ID NO: 17471 - DNA, 20 bp, Artificial Sequence
  Description of Artificial Sequence: Synthetic oligonucleotide
  Target: SCNA; (-) strand; PAM type: NRG; PAM sequence: AAG
gcttctaagtcatggctcaa

SEQ ID NO: 17472 - DNA, 20 bp, Artificial Sequence
  Description of Artificial Sequence: Synthetic oligonucleotide
  Target: SCNA; (-) strand; PAM type: NRG; PAM sequence: TGG
tcttgatagcttctaagtca

SEQ ID NO: 17473 - DNA, 20 bp, Artificial Sequence
  Description of Artificial Sequence: Synthetic oligonucleotide
  Target: SCNA; (-) strand; PAM type: NRG; PAM sequence: AAG
ataatgtcttgatagcttct

SEQ ID NO: 17474 - DNA, 20 bp, Artificial Sequence
  Description of Artificial Sequence: Synthetic oligonucleotide
  Target: SCNA; (-) strand; PAM type: NRG; PAM sequence: TAG
gttgctacataatgtcttga

SEQ ID NO: 17475 - DNA, 20 bp, Artificial Sequence
  Description of Artificial Sequence: Synthetic oligonucleotide
  Target: SCNA; (-) strand; PAM type: NRG; PAM sequence: AGG
ttcctggaatactgagaaaa

SEQ ID NO: 17476 - DNA, 20 bp, Artificial Sequence
  Description of Artificial Sequence: Synthetic oligonucleotide
  Target: SCNA; (-) strand; PAM type: NRG; PAM sequence: AAG
tttcctggaatactgagaaa

SEQ ID NO: 17477 - DNA, 20 bp, Artificial Sequence
  Description of Artificial Sequence: Synthetic oligonucleotide
  Target: SCNA; (-) strand; PAM type: NRG; PAM sequence: GAG
ttttattttcctggaatact

SEQ ID NO: 17478 - DNA, 20 bp, Artificial Sequence
  Description of Artificial Sequence: Synthetic oligonucleotide
  Target: SCNA; (-) strand; PAM type: NRG; PAM sequence: TGG
catgcacatttttattttcc

SEQ ID NO: 17479 - DNA, 20 bp, Artificial Sequence
  Description of Artificial Sequence: Synthetic oligonucleotide
  Target: SCNA; (-) strand; PAM type: NRG; PAM sequence: GAG
gaaacatctgaatacctatt

SEQ ID NO: 17480 - DNA, 20 bp, Artificial Sequence
  Description of Artificial Sequence: Synthetic oligonucleotide
  Target: SCNA; (-) strand; PAM type: NRG; PAM sequence: GGG
catggtcacaacttactaat

SEQ ID NO: 17481 - DNA, 20 bp, Artificial Sequence
  Description of Artificial Sequence: Synthetic oligonucleotide
  Target: SCNA; (-) strand; PAM type: NRG; PAM sequence: TGG
gcatggtcacaacttactaa

SEQ ID NO: 17482 - DNA, 20 bp, Artificial Sequence
  Description of Artificial Sequence: Synthetic oligonucleotide
  Target: SCNA; (-) strand; PAM type: NRG; PAM sequence: TGG
tgagcatggtttttattgca

SEQ ID NO: 17483 - DNA, 20 bp, Artificial Sequence
  Description of Artificial Sequence: Synthetic oligonucleotide
  Target: SCNA; (-) strand; PAM type: NRG; PAM sequence: TGG
ttggggaatattggtgagca

SEQ ID NO: 17484 - DNA, 20 bp, Artificial Sequence
  Description of Artificial Sequence: Synthetic oligonucleotide
  Target: SCNA; (-) strand; PAM type: NRG; PAM sequence: GAG
gtttattggggaatattggt

SEQ ID NO: 17485 - DNA, 20 bp, Artificial Sequence
  Description of Artificial Sequence: Synthetic oligonucleotide
  Target: SCNA; (-) strand; PAM type: NRG; PAM sequence: TGG
tgaagtttattggggaatat

SEQ ID NO: 17486 - DNA, 20 bp, Artificial Sequence
  Description of Artificial Sequence: Synthetic oligonucleotide
  Target: SCNA; (-) strand; PAM type: NRG; PAM sequence: GGG
acaaatcttgaagtttattg

SEQ ID NO: 17487 - DNA, 20 bp, Artificial Sequence
  Description of Artificial Sequence: Synthetic oligonucleotide
  Target: SCNA; (-) strand; PAM type: NRG; PAM sequence: GGG
tacaaatcttgaagtttatt

SEQ ID NO: 17488 - DNA, 20 bp, Artificial Sequence
  Description of Artificial Sequence: Synthetic oligonucleotide
  Target: SCNA; (-) strand; PAM type: NRG; PAM sequence: TGG
ttacaaatcttgaagtttat

SEQ ID NO: 17489 - DNA, 20 bp, Artificial Sequence
  Description of Artificial Sequence: Synthetic oligonucleotide
  Target: SCNA; (-) strand; PAM type: NRG; PAM sequence: AAG
gcatgagcttacaaatcttg

SEQ ID NO: 17490 - DNA, 20 bp, Artificial Sequence
  Description of Artificial Sequence: Synthetic oligonucleotide
  Target: SCNA; (-) strand; PAM type: NRG; PAM sequence: GAG
acataaatgtgggtatgcat

SEQ ID NO: 17491 - DNA, 20 bp, Artificial Sequence
  Description of Artificial Sequence: Synthetic oligonucleotide
  Target: SCNA; (-) strand; PAM type: NRG; PAM sequence: GGG
tcaaattttaacataaatgt

SEQ ID NO: 17492 - DNA, 20 bp, Artificial Sequence
  Description of Artificial Sequence: Synthetic oligonucleotide
  Target: SCNA; (-) strand; PAM type: NRG; PAM sequence: TGG
ttcaaattttaacataaatg

SEQ ID NO: 17493 - DNA, 20 bp, Artificial Sequence
  Description of Artificial Sequence: Synthetic oligonucleotide
  Target: SCNA; (-) strand; PAM type: NRG; PAM sequence: TGG
tggaactgtggtgatggttt

SEQ ID NO: 17494 - DNA, 20 bp, Artificial Sequence
  Description of Artificial Sequence: Synthetic oligonucleotide
  Target: SCNA; (-) strand; PAM type: NRG; PAM sequence: TGG
cagcaatggaactgtggtga

SEQ ID NO: 17495 - DNA, 20 bp, Artificial Sequence
  Description of Artificial Sequence: Synthetic oligonucleotide
  Target: SCNA; (-) strand; PAM type: NRG; PAM sequence: TGG
caacaacagcaatggaactg

SEQ ID NO: 17496 - DNA, 20 bp, Artificial Sequence
  Description of Artificial Sequence: Synthetic oligonucleotide
  Target: SCNA; (-) strand; PAM type: NRG; PAM sequence: TGG
aagaagaacaacaacagcaa

SEQ ID NO: 17497 - DNA, 20 bp, Artificial Sequence
  Description of Artificial Sequence: Synthetic oligonucleotide
  Target: SCNA; (-) strand; PAM type: NRG; PAM sequence: CAG
aataagaagaagaacaacaa

SEQ ID NO: 17498 - DNA, 20 bp, Artificial Sequence
  Description of Artificial Sequence: Synthetic oligonucleotide
  Target: SCNA; (-) strand; PAM type: NRG; PAM sequence: AAG
ataataataataataagaag

SEQ ID NO: 17499 - DNA, 20 bp, Artificial Sequence
  Description of Artificial Sequence: Synthetic oligonucleotide
  Target: SCNA; (-) strand; PAM type: NRG; PAM sequence: AAG
ataataataataataataag

SEQ ID NO: 17500 - DNA, 20 bp, Artificial Sequence
  Description of Artificial Sequence: Synthetic oligonucleotide
  Target: SCNA; (-) strand; PAM type: NRG; PAM sequence: AAG
aaaataataataataataat

SEQ ID NO: 17501 - DNA, 20 bp, Artificial Sequence
  Description of Artificial Sequence: Synthetic oligonucleotide
  Target: SCNA; (-) strand; PAM type: NRG; PAM sequence: CAG
atttataaccccaaatgtgc

SEQ ID NO: 17502 - DNA, 20 bp, Artificial Sequence
  Description of Artificial Sequence: Synthetic oligonucleotide
  Target: SCNA; (-) strand; PAM type: NRG; PAM sequence: GAG
ccattggattttgtaagaag

SEQ ID NO: 17503 - DNA, 20 bp, Artificial Sequence
  Description of Artificial Sequence: Synthetic oligonucleotide
  Target: SCNA; (-) strand; PAM type: NRG; PAM sequence: AGG
agccattggattttgtaaga

SEQ ID NO: 17504 - DNA, 20 bp, Artificial Sequence
  Description of Artificial Sequence: Synthetic oligonucleotide
  Target: SCNA; (-) strand; PAM type: NRG; PAM sequence: AAG
aagccattggattttgtaag

SEQ ID NO: 17505 - DNA, 20 bp, Artificial Sequence
  Description of Artificial Sequence: Synthetic oligonucleotide
  Target: SCNA; (-) strand; PAM type: NRG; PAM sequence: AAG
gggaagccattggattttgt

SEQ ID NO: 17506 - DNA, 20 bp, Artificial Sequence
  Description of Artificial Sequence: Synthetic oligonucleotide
  Target: SCNA; (-) strand; PAM type: NRG; PAM sequence: TGG
atagacttgtgggaagccat

SEQ ID NO: 17507 - DNA, 20 bp, Artificial Sequence
  Description of Artificial Sequence: Synthetic oligonucleotide
  Target: SCNA; (-) strand; PAM type: NRG; PAM sequence: AAG
attatatatagacttgtggg

SEQ ID NO: 17508 - DNA, 20 bp, Artificial Sequence
  Description of Artificial Sequence: Synthetic oligonucleotide
  Target: SCNA; (-) strand; PAM type: NRG; PAM sequence: GGG
catattatatatagacttgt

SEQ ID NO: 17509 - DNA, 20 bp, Artificial Sequence
  Description of Artificial Sequence: Synthetic oligonucleotide
  Target: SCNA; (-) strand; PAM type: NRG; PAM sequence: TGG
gcatattatatatagacttg

SEQ ID NO: 17510 - DNA, 20 bp, Artificial Sequence
  Description of Artificial Sequence: Synthetic oligonucleotide
  Target: SCNA; (-) strand; PAM type: NRG; PAM sequence: TAG
agaaatttgcatattatata

SEQ ID NO: 17511 - DNA, 20 bp, Artificial Sequence
  Description of Artificial Sequence: Synthetic oligonucleotide
  Target: SCNA; (-) strand; PAM type: NRG; PAM sequence: AAG
cagatcttataagctatagt

SEQ ID NO: 17512 - DNA, 20 bp, Artificial Sequence
  Description of Artificial Sequence: Synthetic oligonucleotide
  Target: SCNA; (-) strand; PAM type: NRG; PAM sequence: TAG
attccagatcttataagcta

SEQ ID NO: 17513 - DNA, 20 bp, Artificial Sequence
  Description of Artificial Sequence: Synthetic oligonucleotide
  Target: SCNA; (-) strand; PAM type: NRG; PAM sequence: AAG
aaaattattccagatcttat

SEQ ID NO: 17514 - DNA, 20 bp, Artificial Sequence
  Description of Artificial Sequence: Synthetic oligonucleotide
  Target: SCNA; (-) strand; PAM type: NRG; PAM sequence: CAG
ggagataggaaaaattattc

SEQ ID NO: 17515 - DNA, 20 bp, Artificial Sequence
  Description of Artificial Sequence: Synthetic oligonucleotide
  Target: SCNA; (-) strand; PAM type: NRG; PAM sequence: AGG
aagaggtgaaggctggagat

SEQ ID NO: 17516 - DNA, 20 bp, Artificial Sequence
  Description of Artificial Sequence: Synthetic oligonucleotide
  Target: SCNA; (-) strand; PAM type: NRG; PAM sequence: TAG
gaagaggtgaaggctggaga

SEQ ID NO: 17517 - DNA, 20 bp, Artificial Sequence
  Description of Artificial Sequence: Synthetic oligonucleotide
  Target: SCNA; (-) strand; PAM type: NRG; PAM sequence: GAG
gtgagaagaggtgaaggctg

SEQ ID NO: 17518 - DNA, 20 bp, Artificial Sequence
  Description of Artificial Sequence: Synthetic oligonucleotide
  Target: SCNA; (-) strand; PAM type: NRG; PAM sequence: TGG
atgtgagaagaggtgaaggc

SEQ ID NO: 17519 - DNA, 20 bp, Artificial Sequence
  Description of Artificial Sequence: Synthetic oligonucleotide
  Target: SCNA; (-) strand; PAM type: NRG; PAM sequence: AGG
atgaatgtgagaagaggtga

SEQ ID NO: 17520 - DNA, 20 bp, Artificial Sequence
  Description of Artificial Sequence: Synthetic oligonucleotide
  Target: SCNA; (-) strand; PAM type: NRG; PAM sequence: AAG
gatgaatgtgagaagaggtg

SEQ ID NO: 17521 - DNA, 20 bp, Artificial Sequence
  Description of Artificial Sequence: Synthetic oligonucleotide
  Target: SCNA; (-) strand; PAM type: NRG; PAM sequence: AGG
aatatgatgaatgtgagaag

SEQ ID NO: 17522 - DNA, 20 bp, Artificial Sequence
  Description of Artificial Sequence: Synthetic oligonucleotide
  Target: SCNA; (-) strand; PAM type: NRG; PAM sequence: GAG
gaatatgatgaatgtgagaa

SEQ ID NO: 17523 - DNA, 20 bp, Artificial Sequence
  Description of Artificial Sequence: Synthetic oligonucleotide
  Target: SCNA; (-) strand; PAM type: NRG; PAM sequence: AAG
tagaatatgatgaatgtgag

SEQ ID NO: 17524 - DNA, 20 bp, Artificial Sequence
  Description of Artificial Sequence: Synthetic oligonucleotide
  Target: SCNA; (-) strand; PAM type: NRG; PAM sequence: GAG
agctagaatatgatgaatgt

SEQ ID NO: 17525 - DNA, 20 bp, Artificial Sequence
  Description of Artificial Sequence: Synthetic oligonucleotide
  Target: SCNA; (-) strand; PAM type: NRG; PAM sequence: TAG
ataaaagagtcctgattagc

SEQ ID NO: 17526 - DNA, 20 bp, Artificial Sequence
  Description of Artificial Sequence: Synthetic oligonucleotide
  Target: SCNA; (-) strand; PAM type: NRG; PAM sequence: TAG
tgacataaaagagtcctgat

SEQ ID NO: 17527 - DNA, 20 bp, Artificial Sequence
  Description of Artificial Sequence: Synthetic oligonucleotide
  Target: SCNA; (-) strand; PAM type: NRG; PAM sequence: GAG
gcatattttatgacataaaa

SEQ ID NO: 17528 - DNA, 20 bp, Artificial Sequence
  Description of Artificial Sequence: Synthetic oligonucleotide
  Target: SCNA; (-) strand; PAM type: NRG; PAM sequence: AAG
tagcatattttatgacataa

SEQ ID NO: 17529 - DNA, 20 bp, Artificial Sequence
  Description of Artificial Sequence: Synthetic oligonucleotide
  Target: SCNA; (-) strand; PAM type: NRG; PAM sequence: TAG
gctttaagggtgtgcaaatc

SEQ ID NO: 17530 - DNA, 20 bp, Artificial Sequence
  Description of Artificial Sequence: Synthetic oligonucleotide
  Target: SCNA; (-) strand; PAM type: NRG; PAM sequence: GGG
ctcgtatatgaaggctttaa

SEQ ID NO: 17531 - DNA, 20 bp, Artificial Sequence
  Description of Artificial Sequence: Synthetic oligonucleotide
  Target: SCNA; (-) strand; PAM type: NRG; PAM sequence: AGG
actcgtatatgaaggcttta

SEQ ID NO: 17532 - DNA, 20 bp, Artificial Sequence
  Description of Artificial Sequence: Synthetic oligonucleotide
  Target: SCNA; (-) strand; PAM type: NRG; PAM sequence: AAG
aactcgtatatgaaggcttt

SEQ ID NO: 17533 - DNA, 20 bp, Artificial Sequence
  Description of Artificial Sequence: Synthetic oligonucleotide
  Target: SCNA; (-) strand; PAM type: NRG; PAM sequence: AGG
cagaacaaactcgtatatga

SEQ ID NO: 17534 - DNA, 20 bp, Artificial Sequence
  Description of Artificial Sequence: Synthetic oligonucleotide
  Target: SCNA; (-) strand; PAM type: NRG; PAM sequence: AAG
gcagaacaaactcgtatatg

SEQ ID NO: 17535 - DNA, 20 bp, Artificial Sequence
  Description of Artificial Sequence: Synthetic oligonucleotide
  Target: SCNA; (-) strand; PAM type: NRG; PAM sequence: CAG
tggaacagaggtatccaagg

SEQ ID NO: 17536 - DNA, 20 bp, Artificial Sequence
  Description of Artificial Sequence: Synthetic oligonucleotide
  Target: SCNA; (-) strand; PAM type: NRG; PAM sequence: AGG
atgtggaacagaggtatcca

SEQ ID NO: 17537 - DNA, 20 bp, Artificial Sequence
  Description of Artificial Sequence: Synthetic oligonucleotide
  Target: SCNA; (-) strand; PAM type: NRG; PAM sequence: AAG
aatgtggaacagaggtatcc

SEQ ID NO: 17538 - DNA, 20 bp, Artificial Sequence
  Description of Artificial Sequence: Synthetic oligonucleotide
  Target: SCNA; (-) strand; PAM type: NRG; PAM sequence: AGG
tgttcgggaatgtggaacag

SEQ ID NO: 17539 - DNA, 20 bp, Artificial Sequence
  Description of Artificial Sequence: Synthetic oligonucleotide
  Target: SCNA; (-) strand; PAM type: NRG; PAM sequence: GAG
atgttcgggaatgtggaaca

SEQ ID NO: 17540 - DNA, 20 bp, Artificial Sequence
  Description of Artificial Sequence: Synthetic oligonucleotide
  Target: SCNA; (-) strand; PAM type: NRG; PAM sequence: CAG
gaatgttcgggaatgtggaa

SEQ ID NO: 17541 - DNA, 20 bp, Artificial Sequence
  Description of Artificial Sequence: Synthetic oligonucleotide
  Target: SCNA; (-) strand; PAM type: NRG; PAM sequence: TGG
agagagaatgttcgggaatg

SEQ ID NO: 17542 - DNA, 20 bp, Artificial Sequence
  Description of Artificial Sequence: Synthetic oligonucleotide
  Target: SCNA; (-) strand; PAM type: NRG; PAM sequence: GGG
tgatgagagagagaatgttc

SEQ ID NO: 17543 - DNA, 20 bp, Artificial Sequence
  Description of Artificial Sequence: Synthetic oligonucleotide
  Target: SCNA; (-) strand; PAM type: NRG; PAM sequence: CGG
gtgatgagagagagaatgtt

SEQ ID NO: 17544 - DNA, 20 bp, Artificial Sequence
  Description of Artificial Sequence: Synthetic oligonucleotide
  Target: SCNA; (-) strand; PAM type: NRG; PAM sequence: GAG
tccagctgtgtgatgagaga

SEQ ID NO: 17545 - DNA, 20 bp, Artificial Sequence
  Description of Artificial Sequence: Synthetic oligonucleotide
  Target: SCNA; (-) strand; PAM type: NRG; PAM sequence: GAG
ggtccagctgtgtgatgaga

SEQ ID NO: 17546 - DNA, 20 bp, Artificial Sequence
  Description of Artificial Sequence: Synthetic oligonucleotide
  Target: SCNA; (-) strand; PAM type: NRG; PAM sequence: GAG
agggtccagctgtgtgatga

SEQ ID NO: 17547 - DNA, 20 bp, Artificial Sequence
  Description of Artificial Sequence: Synthetic oligonucleotide
  Target: SCNA; (-) strand; PAM type: NRG; PAM sequence: GAG
aaagggtccagctgtgtgat

SEQ ID NO: 17548 - DNA, 20 bp, Artificial Sequence
  Description of Artificial Sequence: Synthetic oligonucleotide
  Target: SCNA; (-) strand; PAM type: NRG; PAM sequence: CAG
atcaggagggtgaaagggtc

SEQ ID NO: 17549 - DNA, 20 bp, Artificial Sequence
  Description of Artificial Sequence: Synthetic oligonucleotide
  Target: SCNA; (-) strand; PAM type: NRG; PAM sequence: GGG
ttgagatcaggagggtgaaa

SEQ ID NO: 17550 - DNA, 20 bp, Artificial Sequence
  Description of Artificial Sequence: Synthetic oligonucleotide
  Target: SCNA; (-) strand; PAM type: NRG; PAM sequence: AGG
attgagatcaggagggtgaa

SEQ ID NO: 17551 - DNA, 20 bp, Artificial Sequence
  Description of Artificial Sequence: Synthetic oligonucleotide
  Target: SCNA; (-) strand; PAM type: NRG; PAM sequence: AAG
aattgagatcaggagggtga

SEQ ID NO: 17552 - DNA, 20 bp, Artificial Sequence
  Description of Artificial Sequence: Synthetic oligonucleotide
  Target: SCNA; (-) strand; PAM type: NRG; PAM sequence: GGG
catttcaattgagatcagga

SEQ ID NO: 17553 - DNA, 20 bp, Artificial Sequence
  Description of Artificial Sequence: Synthetic oligonucleotide
  Target: SCNA; (-) strand; PAM type: NRG; PAM sequence: AGG
acatttcaattgagatcagg

SEQ ID NO: 17554 - DNA, 20 bp, Artificial Sequence
  Description of Artificial Sequence: Synthetic oligonucleotide
  Target: SCNA; (-) strand; PAM type: NRG; PAM sequence: GAG
cacatttcaattgagatcag

SEQ ID NO: 17555 - DNA, 20 bp, Artificial Sequence
  Description of Artificial Sequence: Synthetic oligonucleotide
  Target: SCNA; (-) strand; PAM type: NRG; PAM sequence: AGG
gtcacatttcaattgagatc

SEQ ID NO: 17556 - DNA, 20 bp, Artificial Sequence
  Description of Artificial Sequence: Synthetic oligonucleotide
  Target: SCNA; (-) strand; PAM type: NRG; PAM sequence: CAG
ggtcacatttcaattgagat

SEQ ID NO: 17557 - DNA, 20 bp, Artificial Sequence
  Description of Artificial Sequence: Synthetic oligonucleotide
  Target: SCNA; (-) strand; PAM type: NRG; PAM sequence: GAG
aggaaggtcacatttcaatt

SEQ ID NO: 17558 - DNA, 20 bp, Artificial Sequence
  Description of Artificial Sequence: Synthetic oligonucleotide
  Target: SCNA; (-) strand; PAM type: NRG; PAM sequence: AGG
catggaaagtttatacagga

SEQ ID NO: 17559 - DNA, 20 bp, Artificial Sequence
  Description of Artificial Sequence: Synthetic oligonucleotide
  Target: SCNA; (-) strand; PAM type: NRG; PAM sequence: AAG
tcatggaaagtttatacagg

SEQ ID NO: 17560 - DNA, 20 bp, Artificial Sequence
  Description of Artificial Sequence: Synthetic oligonucleotide
  Target: SCNA; (-) strand; PAM type: NRG; PAM sequence: AGG
agctcatggaaagtttatac

SEQ ID NO: 17561 - DNA, 20 bp, Artificial Sequence
  Description of Artificial Sequence: Synthetic oligonucleotide
  Target: SCNA; (-) strand; PAM type: NRG; PAM sequence: CAG
cagctcatggaaagtttata

SEQ ID NO: 17562 - DNA, 20 bp, Artificial Sequence
  Description of Artificial Sequence: Synthetic oligonucleotide
  Target: SCNA; (-) strand; PAM type: NRG; PAM sequence: AAG
cagacaagccagctcatgga

SEQ ID NO: 17563 - DNA, 20 bp, Artificial Sequence
  Description of Artificial Sequence: Synthetic oligonucleotide
  Target: SCNA; (-) strand; PAM type: NRG; PAM sequence: TGG
cagtcagacaagccagctca

SEQ ID NO: 17564 - DNA, 20 bp, Artificial Sequence
  Description of Artificial Sequence: Synthetic oligonucleotide
  Target: SCNA; (-) strand; PAM type: NRG; PAM sequence: CAG
ttgggttcagtcagacaagc

SEQ ID NO: 17565 - DNA, 20 bp, Artificial Sequence
  Description of Artificial Sequence: Synthetic oligonucleotide
  Target: SCNA; (-) strand; PAM type: NRG; PAM sequence: AAG
ccatttgggttcagtcagac

SEQ ID NO: 17566 - DNA, 20 bp, Artificial Sequence
  Description of Artificial Sequence: Synthetic oligonucleotide
  Target: SCNA; (-) strand; PAM type: NRG; PAM sequence: CAG
attagccatttgggttcagt

SEQ ID NO: 17567 - DNA, 20 bp, Artificial Sequence
  Description of Artificial Sequence: Synthetic oligonucleotide
  Target: SCNA; (-) strand; PAM type: NRG; PAM sequence: CAG
atccattagccatttgggtt

SEQ ID NO: 17568 - DNA, 20 bp, Artificial Sequence
  Description of Artificial Sequence: Synthetic oligonucleotide
  Target: SCNA; (-) strand; PAM type: NRG; PAM sequence: GGG
agaaaatccattagccattt

SEQ ID NO: 17569 - DNA, 20 bp, Artificial Sequence
  Description of Artificial Sequence: Synthetic oligonucleotide
  Target: SCNA; (-) strand; PAM type: NRG; PAM sequence: TGG
aagaaaatccattagccatt

SEQ ID NO: 17570 - DNA, 20 bp, Artificial Sequence
  Description of Artificial Sequence: Synthetic oligonucleotide
  Target: SCNA; (-) strand; PAM type: NRG; PAM sequence: TAG
taacgggaaagaaaatccat

SEQ ID NO: 17571 - DNA, 20 bp, Artificial Sequence
  Description of Artificial Sequence: Synthetic oligonucleotide
  Target: SCNA; (-) strand; PAM type: NRG; PAM sequence: AAG
ttagagagcatgtaacggga

SEQ ID NO: 17572 - DNA, 20 bp, Artificial Sequence
  Description of Artificial Sequence: Synthetic oligonucleotide
  Target: SCNA; (-) strand; PAM type: NRG; PAM sequence: GGG
taaattagagagcatgtaac

SEQ ID NO: 17573 - DNA, 20 bp, Artificial Sequence
  Description of Artificial Sequence: Synthetic oligonucleotide
  Target: SCNA; (-) strand; PAM type: NRG; PAM sequence: CGG
ataaattagagagcatgtaa

SEQ ID NO: 17574 - DNA, 20 bp, Artificial Sequence
  Description of Artificial Sequence: Synthetic oligonucleotide
  Target: SCNA; (-) strand; PAM type: NRG; PAM sequence: GAG
gcaaagcatcataaattaga

SEQ ID NO: 17575 - DNA, 20 bp, Artificial Sequence
  Description of Artificial Sequence: Synthetic oligonucleotide
  Target: SCNA; (-) strand; PAM type: NRG; PAM sequence: GAG
aagcaaagcatcataaatta

SEQ ID NO: 17576 - DNA, 20 bp, Artificial Sequence
  Description of Artificial Sequence: Synthetic oligonucleotide
  Target: SCNA; (-) strand; PAM type: NRG; PAM sequence: TAG
ccaagcaaagcatcataaat

SEQ ID NO: 17577 - DNA, 20 bp, Artificial Sequence
  Description of Artificial Sequence: Synthetic oligonucleotide
  Target: SCNA; (-) strand; PAM type: NRG; PAM sequence: AAG
tctcattttccccccaagca

SEQ ID NO: 17578 - DNA, 20 bp, Artificial Sequence
  Description of Artificial Sequence: Synthetic oligonucleotide
  Target: SCNA; (-) strand; PAM type: NRG; PAM sequence: AAG
ccacctctcattttcccccc

SEQ ID NO: 17579 - DNA, 20 bp, Artificial Sequence
  Description of Artificial Sequence: Synthetic oligonucleotide
  Target: SCNA; (-) strand; PAM type: NRG; PAM sequence: CAG
ggacttccatgttccgtaaa

SEQ ID NO: 17580 - DNA, 20 bp, Artificial Sequence
  Description of Artificial Sequence: Synthetic oligonucleotide
  Target: SCNA; (-) strand; PAM type: NRG; PAM sequence: AGG
cactcttgtacctctgcaaa

SEQ ID NO: 17581 - DNA, 20 bp, Artificial Sequence
  Description of Artificial Sequence: Synthetic oligonucleotide
  Target: SCNA; (-) strand; PAM type: NRG; PAM sequence: AAG
ccactcttgtacctctgcaa

SEQ ID NO: 17582 - DNA, 20 bp, Artificial Sequence
  Description of Artificial Sequence: Synthetic oligonucleotide
  Target: SCNA; (-) strand; PAM type: NRG; PAM sequence: CAG
cagagagccaggctggggaa

SEQ ID NO: 17583 - DNA, 20 bp, Artificial Sequence
  Description of Artificial Sequence: Synthetic oligonucleotide
  Target: SCNA; (-) strand; PAM type: NRG; PAM sequence: GGG
tgactcagagagccaggctg

SEQ ID NO: 17584 - DNA, 20 bp, Artificial Sequence
  Description of Artificial Sequence: Synthetic oligonucleotide
  Target: SCNA; (-) strand; PAM type: NRG; PAM sequence: GGG
ctgactcagagagccaggct

SEQ ID NO: 17585 - DNA, 20 bp, Artificial Sequence
  Description of Artificial Sequence: Synthetic oligonucleotide
  Target: SCNA; (-) strand; PAM type: NRG; PAM sequence: TGG
tctgactcagagagccaggc

SEQ ID NO: 17586 - DNA, 20 bp, Artificial Sequence
  Description of Artificial Sequence: Synthetic oligonucleotide
  Target: SCNA; (-) strand; PAM type: NRG; PAM sequence: AGG
caggtctgactcagagagcc

SEQ ID NO: 17587 - DNA, 20 bp, Artificial Sequence
  Description of Artificial Sequence: Synthetic oligonucleotide
  Target: SCNA; (-) strand; PAM type: NRG; PAM sequence: CAG
tcaggtctgactcagagagc

SEQ ID NO: 17588 - DNA, 20 bp, Artificial Sequence
  Description of Artificial Sequence: Synthetic oligonucleotide
  Target: SCNA; (-) strand; PAM type: NRG; PAM sequence: GAG
gatgtcaggtctgactcaga

SEQ ID NO: 17589 - DNA, 20 bp, Artificial Sequence
  Description of Artificial Sequence: Synthetic oligonucleotide
  Target: SCNA; (-) strand; PAM type: NRG; PAM sequence: GAG
tggatgtcaggtctgactca

SEQ ID NO: 17590 - DNA, 20 bp, Artificial Sequence
  Description of Artificial Sequence: Synthetic oligonucleotide
  Target: SCNA; (-) strand; PAM type: NRG; PAM sequence: CAG
tgtggatgtcaggtctgact

SEQ ID NO: 17591 - DNA, 20 bp, Artificial Sequence
  Description of Artificial Sequence: Synthetic oligonucleotide
  Target: SCNA; (-) strand; PAM type: NRG; PAM sequence: AGG
gtgctctctctgtggatgtc

SEQ ID NO: 17592 - DNA, 20 bp, Artificial Sequence
  Description of Artificial Sequence: Synthetic oligonucleotide
  Target: SCNA; (-) strand; PAM type: NRG; PAM sequence: CAG
agtgctctctctgtggatgt

SEQ ID NO: 17593 - DNA, 20 bp, Artificial Sequence
  Description of Artificial Sequence: Synthetic oligonucleotide
  Target: SCNA; (-) strand; PAM type: NRG; PAM sequence: TGG
ttactgcagtgctctctctg

SEQ ID NO: 17594 - DNA, 20 bp, Artificial Sequence
  Description of Artificial Sequence: Synthetic oligonucleotide
  Target: SCNA; (-) strand; PAM type: NRG; PAM sequence: CAG
agaagcgtttgcagttactg

SEQ ID NO: 17595 - DNA, 20 bp, Artificial Sequence
  Description of Artificial Sequence: Synthetic oligonucleotide
  Target: SCNA; (-) strand; PAM type: NRG; PAM sequence: CAG
aatcaaaacagaagcgtttg

SEQ ID NO: 17596 - DNA, 20 bp, Artificial Sequence
  Description of Artificial Sequence: Synthetic oligonucleotide
  Target: SCNA; (-) strand; PAM type: NRG; PAM sequence: AAG
aattaccacaatcaaaacag

SEQ ID NO: 17597 - DNA, 20 bp, Artificial Sequence
  Description of Artificial Sequence: Synthetic oligonucleotide
  Target: SCNA; (-) strand; PAM type: NRG; PAM sequence: CAG
tccaattaccacaatcaaaa

SEQ ID NO: 17598 - DNA, 20 bp, Artificial Sequence
  Description of Artificial Sequence: Synthetic oligonucleotide
  Target: SCNA; (-) strand; PAM type: NRG; PAM sequence: CAG
tacccttgccagtgaccttg

SEQ ID NO: 17599 - DNA, 20 bp, Artificial Sequence
  Description of Artificial Sequence: Synthetic oligonucleotide
  Target: SCNA; (-) strand; PAM type: NRG; PAM sequence: CAG
atgcctgctgctacccttgc

SEQ ID NO: 17600 - DNA, 20 bp, Artificial Sequence
  Description of Artificial Sequence: Synthetic oligonucleotide
  Target: SCNA; (-) strand; PAM type: NRG; PAM sequence: AGG
tgctttaaaattactaaggg

SEQ ID NO: 17601 - DNA, 20 bp, Artificial Sequence
  Description of Artificial Sequence: Synthetic oligonucleotide
  Target: SCNA; (-) strand; PAM type: NRG; PAM sequence: GAG
ctgctttaaaattactaagg

SEQ ID NO: 17602 - DNA, 20 bp, Artificial Sequence
  Description of Artificial Sequence: Synthetic oligonucleotide
  Target: SCNA; (-) strand; PAM type: NRG; PAM sequence: GGG
tgctgctttaaaattactaa

SEQ ID NO: 17603 - DNA, 20 bp, Artificial Sequence
  Description of Artificial Sequence: Synthetic oligonucleotide
  Target: SCNA; (-) strand; PAM type: NRG; PAM sequence: AGG
ctgctgctttaaaattacta

SEQ ID NO: 17604 - DNA, 20 bp, Artificial Sequence
  Description of Artificial Sequence: Synthetic oligonucleotide
  Target: SCNA; (-) strand; PAM type: NRG; PAM sequence: AAG
tctgctgctttaaaattact

SEQ ID NO: 17605 - DNA, 20 bp, Artificial Sequence
  Description of Artificial Sequence: Synthetic oligonucleotide
  Target: SCNA; (-) strand; PAM type: NRG; PAM sequence: TGG
tctgctcactttcatctgct

SEQ ID NO: 17606 - DNA, 20 bp, Artificial Sequence
  Description of Artificial Sequence: Synthetic oligonucleotide
  Target: SCNA; (-) strand; PAM type: NRG; PAM sequence: AAG
agggtatctcacatgtgctg

SEQ ID NO: 17607 - DNA, 20 bp, Artificial Sequence
  Description of Artificial Sequence: Synthetic oligonucleotide
  Target: SCNA; (-) strand; PAM type: NRG; PAM sequence: GGG
tgatttattggcatctccaa

SEQ ID NO: 17608 - DNA, 20 bp, Artificial Sequence
  Description of Artificial Sequence: Synthetic oligonucleotide
  Target: SCNA; (-) strand; PAM type: NRG; PAM sequence: AGG
gtgatttattggcatctcca

SEQ ID NO: 17609 - DNA, 20 bp, Artificial Sequence
  Description of Artificial Sequence: Synthetic oligonucleotide
  Target: SCNA; (-) strand; PAM type: NRG; PAM sequence: AAG
agtgatttattggcatctcc

SEQ ID NO: 17610 - DNA, 20 bp, Artificial Sequence
  Description of Artificial Sequence: Synthetic oligonucleotide
  Target: SCNA; (-) strand; PAM type: NRG; PAM sequence: TGG
cagtctctccagtgatttat

SEQ ID NO: 17611 - DNA, 20 bp, Artificial Sequence
  Description of Artificial Sequence: Synthetic oligonucleotide
  Target: SCNA; (-) strand; PAM type: NRG; PAM sequence: CAG
agcctccttcacagtctctc

SEQ ID NO: 17612 - DNA, 20 bp, Artificial Sequence
  Description of Artificial Sequence: Synthetic oligonucleotide
  Target: SCNA; (-) strand; PAM type: NRG; PAM sequence: CAG
cagggcctaagcctccttca

SEQ ID NO: 17613 - DNA, 20 bp, Artificial Sequence
  Description of Artificial Sequence: Synthetic oligonucleotide
  Target: SCNA; (-) strand; PAM type: NRG; PAM sequence: AAG
taacttcatctgcagggcct

SEQ ID NO: 17614 - DNA, 20 bp, Artificial Sequence
  Description of Artificial Sequence: Synthetic oligonucleotide
  Target: SCNA; (-) strand; PAM type: NRG; PAM sequence: GGG
catcactaacttcatctgca

SEQ ID NO: 17615 - DNA, 20 bp, Artificial Sequence
  Description of Artificial Sequence: Synthetic oligonucleotide
  Target: SCNA; (-) strand; PAM type: NRG; PAM sequence: AGG
ccatcactaacttcatctgc

SEQ ID NO: 17616 - DNA, 20 bp, Artificial Sequence
  Description of Artificial Sequence: Synthetic oligonucleotide
  Target: SCNA; (-) strand; PAM type: NRG; PAM sequence: CAG
tccatcactaacttcatctg

SEQ ID NO: 17617 - DNA, 20 bp, Artificial Sequence
  Description of Artificial Sequence: Synthetic oligonucleotide
  Target: SCNA; (-) strand; PAM type: NRG; PAM sequence: AGG
atttcagacctgacagcccg

SEQ ID NO: 17618 - DNA, 20 bp, Artificial Sequence
  Description of Artificial Sequence: Synthetic oligonucleotide
  Target: SCNA; (-) strand; PAM type: NRG; PAM sequence: GAG
tatttcagacctgacagccc

SEQ ID NO: 17619 - DNA, 20 bp, Artificial Sequence
  Description of Artificial Sequence: Synthetic oligonucleotide
  Target: SCNA; (-) strand; PAM type: NRG; PAM sequence: CAG
cccaggtatttcagacctga

SEQ ID NO: 17620 - DNA, 20 bp, Artificial Sequence
  Description of Artificial Sequence: Synthetic oligonucleotide
  Target: SCNA; (-) strand; PAM type: NRG; PAM sequence: CAG
tttacttaacccaggtattt

SEQ ID NO: 17621 - DNA, 20 bp, Artificial Sequence
  Description of Artificial Sequence: Synthetic oligonucleotide
  Target: SCNA; (-) strand; PAM type: NRG; PAM sequence: AGG
agaggccatttacttaaccc

SEQ ID NO: 17622 - DNA, 20 bp, Artificial Sequence
  Description of Artificial Sequence: Synthetic oligonucleotide
  Target: SCNA; (-) strand; PAM type: NRG; PAM sequence: CAG
cagaggccatttacttaacc

SEQ ID NO: 17623 - DNA, 20 bp, Artificial Sequence
  Description of Artificial Sequence: Synthetic oligonucleotide
  Target: SCNA; (-) strand; PAM type: NRG; PAM sequence: AGG
gccgactgtgaccatcccag

SEQ ID NO: 17624 - DNA, 20 bp, Artificial Sequence
  Description of Artificial Sequence: Synthetic oligonucleotide
  Target: SCNA; (-) strand; PAM type: NRG; PAM sequence: GAG
tgccgactgtgaccatccca

SEQ ID NO: 17625 - DNA, 20 bp, Artificial Sequence
  Description of Artificial Sequence: Synthetic oligonucleotide
  Target: SCNA; (-) strand; PAM type: NRG; PAM sequence: CAG
attgccgactgtgaccatcc

SEQ ID NO: 17626 - DNA, 20 bp, Artificial Sequence
  Description of Artificial Sequence: Synthetic oligonucleotide
  Target: SCNA; (-) strand; PAM type: NRG; PAM sequence: TGG
tatctgttttggcatagaga

SEQ ID NO: 17627 - DNA, 20 bp, Artificial Sequence
  Description of Artificial Sequence: Synthetic oligonucleotide
  Target: SCNA; (-) strand; PAM type: NRG; PAM sequence: GAG
ctgttatctgttttggcata

SEQ ID NO: 17628 - DNA, 20 bp, Artificial Sequence
  Description of Artificial Sequence: Synthetic oligonucleotide
  Target: SCNA; (-) strand; PAM type: NRG; PAM sequence: TAG
tgctgttatctgttttggca

SEQ ID NO: 17629 - DNA, 20 bp, Artificial Sequence
  Description of Artificial Sequence: Synthetic oligonucleotide
  Target: SCNA; (-) strand; PAM type: NRG; PAM sequence: TGG
ctggatgctgttatctgttt

SEQ ID NO: 17630 - DNA, 20 bp, Artificial Sequence
  Description of Artificial Sequence: Synthetic oligonucleotide
  Target: SCNA; (-) strand; PAM type: NRG; PAM sequence: TGG
ttgtgactttggataattcc

SEQ ID NO: 17631 - DNA, 20 bp, Artificial Sequence
  Description of Artificial Sequence: Synthetic oligonucleotide
  Target: SCNA; (-) strand; PAM type: NRG; PAM sequence: TGG
ctgacactgatttgtgactt

SEQ ID NO: 17632 - DNA, 20 bp, Artificial Sequence
  Description of Artificial Sequence: Synthetic oligonucleotide
  Target: SCNA; (-) strand; PAM type: NRG; PAM sequence: AAG
gcactacgtgggtgagtgac

SEQ ID NO: 17633 - DNA, 20 bp, Artificial Sequence
  Description of Artificial Sequence: Synthetic oligonucleotide
  Target: SCNA; (-) strand; PAM type: NRG; PAM sequence: GAG
gggaaaagcactacgtgggt

SEQ ID NO: 17634 - DNA, 20 bp, Artificial Sequence
  Description of Artificial Sequence: Synthetic oligonucleotide
  Target: SCNA; (-) strand; PAM type: NRG; PAM sequence: GGG
ggaagggaaaagcactacgt

SEQ ID NO: 17635 - DNA, 20 bp, Artificial Sequence
  Description of Artificial Sequence: Synthetic oligonucleotide
  Target: SCNA; (-) strand; PAM type: NRG; PAM sequence: TGG
aggaagggaaaagcactacg

SEQ ID NO: 17636 - DNA, 20 bp, Artificial Sequence
  Description of Artificial Sequence: Synthetic oligonucleotide
  Target: SCNA; (-) strand; PAM type: NRG; PAM sequence: AAG
agtaactaggaggaagggaa

SEQ ID NO: 17637 - DNA, 20 bp, Artificial Sequence
  Description of Artificial Sequence: Synthetic oligonucleotide
  Target: SCNA; (-) strand; PAM type: NRG; PAM sequence: GGG
cattaagtaactaggaggaa

SEQ ID NO: 17638 - DNA, 20 bp, Artificial Sequence
  Description of Artificial Sequence: Synthetic oligonucleotide
  Target: SCNA; (-) strand; PAM type: NRG; PAM sequence: AGG
ccattaagtaactaggagga

SEQ ID NO: 17639 - DNA, 20 bp, Artificial Sequence
  Description of Artificial Sequence: Synthetic oligonucleotide
  Target: SCNA; (-) strand; PAM type: NRG; PAM sequence: AAG
tccattaagtaactaggagg

SEQ ID NO: 17640 - DNA, 20 bp, Artificial Sequence
  Description of Artificial Sequence: Synthetic oligonucleotide
  Target: SCNA; (-) strand; PAM type: NRG; PAM sequence: AGG
ttatccattaagtaactagg

SEQ ID NO: 17641 - DNA, 20 bp, Artificial Sequence
  Description of Artificial Sequence: Synthetic oligonucleotide
  Target: SCNA; (-) strand; PAM type: NRG; PAM sequence: GAG
cttatccattaagtaactag

SEQ ID NO: 17642 - DNA, 20 bp, Artificial Sequence
  Description of Artificial Sequence: Synthetic oligonucleotide
  Target: SCNA; (-) strand; PAM type: NRG; PAM sequence: AGG
cccttatccattaagtaact

SEQ ID NO: 17643 - DNA, 20 bp, Artificial Sequence
  Description of Artificial Sequence: Synthetic oligonucleotide
  Target: SCNA; (-) strand; PAM type: NRG; PAM sequence: TAG
gcccttatccattaagtaac

SEQ ID NO: 17644 - DNA, 20 bp, Artificial Sequence
  Description of Artificial Sequence: Synthetic oligonucleotide
  Target: SCNA; (-) strand; PAM type: NRG; PAM sequence: AAG
acaatgtgcccttatccatt

SEQ ID NO: 17645 - DNA, 20 bp, Artificial Sequence
  Description of Artificial Sequence: Synthetic oligonucleotide
  Target: SCNA; (-) strand; PAM type: NRG; PAM sequence: GAG
atgattcaccttaaatttcg

SEQ ID NO: 17646 - DNA, 20 bp, Artificial Sequence
  Description of Artificial Sequence: Synthetic oligonucleotide
  Target: SCNA; (-) strand; PAM type: NRG; PAM sequence: CGG
taatgattcaccttaaattt

SEQ ID NO: 17647 - DNA, 20 bp, Artificial Sequence
  Description of Artificial Sequence: Synthetic oligonucleotide
  Target: SCNA; (-) strand; PAM type: NRG; PAM sequence: AAG
ccaaattccatgacgatacc

SEQ ID NO: 17648 - DNA, 20 bp, Artificial Sequence
  Description of Artificial Sequence: Synthetic oligonucleotide
  Target: SCNA; (-) strand; PAM type: NRG; PAM sequence: CAG
aaataaagctagttagaaaa

SEQ ID NO: 17649 - DNA, 20 bp, Artificial Sequence
  Description of Artificial Sequence: Synthetic oligonucleotide
  Target: SCNA; (-) strand; PAM type: NRG; PAM sequence: TAG
tgtgctaaaataaagctagt

SEQ ID NO: 17650 - DNA, 20 bp, Artificial Sequence
  Description of Artificial Sequence: Synthetic oligonucleotide
  Target: SCNA; (-) strand; PAM type: NRG; PAM sequence: TAG
tggctgtgctaaaataaagc

SEQ ID NO: 17651 - DNA, 20 bp, Artificial Sequence
  Description of Artificial Sequence: Synthetic oligonucleotide
  Target: SCNA; (-) strand; PAM type: NRG; PAM sequence: AAG
tttatggctgtgctaaaata

SEQ ID NO: 17652 - DNA, 20 bp, Artificial Sequence
  Description of Artificial Sequence: Synthetic oligonucleotide
  Target: SCNA; (-) strand; PAM type: NRG; PAM sequence: TGG
gacaattacagccagattta

SEQ ID NO: 17653 - DNA, 20 bp, Artificial Sequence
  Description of Artificial Sequence: Synthetic oligonucleotide
  Target: SCNA; (-) strand; PAM type: NRG; PAM sequence: CAG
gagttaaagacaattacagc

SEQ ID NO: 17654 - DNA, 20 bp, Artificial Sequence
  Description of Artificial Sequence: Synthetic oligonucleotide
  Target: SCNA; (-) strand; PAM type: NRG; PAM sequence: CAG
atcggagttaaagacaatta

SEQ ID NO: 17655 - DNA, 20 bp, Artificial Sequence
  Description of Artificial Sequence: Synthetic oligonucleotide
  Target: SCNA; (-) strand; PAM type: NRG; PAM sequence: AAG
tgtatgagtcatcggagtta

SEQ ID NO: 17656 - DNA, 20 bp, Artificial Sequence
  Description of Artificial Sequence: Synthetic oligonucleotide
  Target: SCNA; (-) strand; PAM type: NRG; PAM sequence: GAG
cttagatgtatgagtcatcg

SEQ ID NO: 17657 - DNA, 20 bp, Artificial Sequence
  Description of Artificial Sequence: Synthetic oligonucleotide
  Target: SCNA; (-) strand; PAM type: NRG; PAM sequence: CGG
tgcttagatgtatgagtcat

SEQ ID NO: 17658 - DNA, 20 bp, Artificial Sequence
  Description of Artificial Sequence: Synthetic oligonucleotide
  Target: SCNA; (-) strand; PAM type: NRG; PAM sequence: GAG
aatgaaatgcttagatgtat

SEQ ID NO: 17659 - DNA, 20 bp, Artificial Sequence
  Description of Artificial Sequence: Synthetic oligonucleotide
  Target: SCNA; (-) strand; PAM type: NRG; PAM sequence: TAG
tgaaagttaaatgaaatgct

SEQ ID NO: 17660 - DNA, 20 bp, Artificial Sequence
  Description of Artificial Sequence: Synthetic oligonucleotide
  Target: SCNA; (-) strand; PAM type: NRG; PAM sequence: AAG
ttggaatttttcacggttga

SEQ ID NO: 17661 - DNA, 20 bp, Artificial Sequence
  Description of Artificial Sequence: Synthetic oligonucleotide
  Target: SCNA; (-) strand; PAM type: NRG; PAM sequence: CGG
aaatcagttggaatttttca

SEQ ID NO: 17662 - DNA, 20 bp, Artificial Sequence
  Description of Artificial Sequence: Synthetic oligonucleotide
  Target: SCNA; (-) strand; PAM type: NRG; PAM sequence: TGG
attcatattgccaaatcagt

SEQ ID NO: 17663 - DNA, 20 bp, Artificial Sequence
  Description of Artificial Sequence: Synthetic oligonucleotide
  Target: SCNA; (-) strand; PAM type: NRG; PAM sequence: CAG
gcacattcatattgccaaat

SEQ ID NO: 17664 - DNA, 20 bp, Artificial Sequence
  Description of Artificial Sequence: Synthetic oligonucleotide
  Target: SCNA; (-) strand; PAM type: NRG; PAM sequence: GAG
atatgatcatatgcatgtaa

SEQ ID NO: 17665 - DNA, 20 bp, Artificial Sequence
  Description of Artificial Sequence: Synthetic oligonucleotide
  Target: SCNA; (-) strand; PAM type: NRG; PAM sequence: AAG
tcatatgatcatatgcatgt

SEQ ID NO: 17666 - DNA, 20 bp, Artificial Sequence
  Description of Artificial Sequence: Synthetic oligonucleotide
  Target: SCNA; (-) strand; PAM type: NRG; PAM sequence: CAG
aaaaacagatgttgtactga

SEQ ID NO: 17667 - DNA, 20 bp, Artificial Sequence
  Description of Artificial Sequence: Synthetic oligonucleotide
  Target: SCNA; (-) strand; PAM type: NRG; PAM sequence: CAG
caacatcccaagaacaaaaa

SEQ ID NO: 17668 - DNA, 20 bp, Artificial Sequence
  Description of Artificial Sequence: Synthetic oligonucleotide
  Target: SCNA; (-) strand; PAM type: NRG; PAM sequence: AAG
tgatagtccatcaacatccc

SEQ ID NO: 17669 - DNA, 20 bp, Artificial Sequence
  Description of Artificial Sequence: Synthetic oligonucleotide
  Target: SCNA; (-) strand; PAM type: NRG; PAM sequence: TAG
agttataagatggttcatga

SEQ ID NO: 17670 - DNA, 20 bp, Artificial Sequence
  Description of Artificial Sequence: Synthetic oligonucleotide
  Target: SCNA; (-) strand; PAM type: NRG; PAM sequence: TGG
ggactgggaaagttataaga

SEQ ID NO: 17671 - DNA, 20 bp, Artificial Sequence
  Description of Artificial Sequence: Synthetic oligonucleotide
  Target: SCNA; (-) strand; PAM type: NRG; PAM sequence: AAG
aaggggactgggaaagttat

SEQ ID NO: 17672 - DNA, 20 bp, Artificial Sequence
  Description of Artificial Sequence: Synthetic oligonucleotide
  Target: SCNA; (-) strand; PAM type: NRG; PAM sequence: AAG
ggacttaaaggggactggga

SEQ ID NO: 17673 - DNA, 20 bp, Artificial Sequence
  Description of Artificial Sequence: Synthetic oligonucleotide
  Target: SCNA; (-) strand; PAM type: NRG; PAM sequence: GGG
tcttggacttaaaggggact

SEQ ID NO: 17674 - DNA, 20 bp, Artificial Sequence
  Description of Artificial Sequence: Synthetic oligonucleotide
  Target: SCNA; (-) strand; PAM type: NRG; PAM sequence: TGG
ctcttggacttaaaggggac

SEQ ID NO: 17675 - DNA, 20 bp, Artificial Sequence
  Description of Artificial Sequence: Synthetic oligonucleotide
  Target: SCNA; (-) strand; PAM type: NRG; PAM sequence: GGG
gtatcctcttggacttaaag

SEQ ID NO: 17676 - DNA, 20 bp, Artificial Sequence
  Description of Artificial Sequence: Synthetic oligonucleotide
  Target: SCNA; (-) strand; PAM type: NRG; PAM sequence: GGG
tgtatcctcttggacttaaa

SEQ ID NO: 17677 - DNA, 20 bp, Artificial Sequence
  Description of Artificial Sequence: Synthetic oligonucleotide
  Target: SCNA; (-) strand; PAM type: NRG; PAM sequence: AGG
ttgtatcctcttggacttaa

SEQ ID NO: 17678 - DNA, 20 bp, Artificial Sequence
  Description of Artificial Sequence: Synthetic oligonucleotide
  Target: SCNA; (-) strand; PAM type: NRG; PAM sequence: AAG
gttgtatcctcttggactta

SEQ ID NO: 17679 - DNA, 20 bp, Artificial Sequence
  Description of Artificial Sequence: Synthetic oligonucleotide
  Target: SCNA; (-) strand; PAM type: NRG; PAM sequence: TGG
ccttctcagttgtatcctct

SEQ ID NO: 17680 - DNA, 20 bp, Artificial Sequence
  Description of Artificial Sequence: Synthetic oligonucleotide
  Target: SCNA; (-) strand; PAM type: NRG; PAM sequence: CAG
aaaaactctacctgccttct

SEQ ID NO: 17681 - DNA, 20 bp, Artificial Sequence
  Description of Artificial Sequence: Synthetic oligonucleotide
  Target: SCNA; (-) strand; PAM type: NRG; PAM sequence: TAG
tttgatattcaggaaaaacc

SEQ ID NO: 17682 - DNA, 20 bp, Artificial Sequence
  Description of Artificial Sequence: Synthetic oligonucleotide
  Target: SCNA; (-) strand; PAM type: NRG; PAM sequence: AGG
aggcaatttgtttgatattc

SEQ ID NO: 17683 - DNA, 20 bp, Artificial Sequence
  Description of Artificial Sequence: Synthetic oligonucleotide
  Target: SCNA; (-) strand; PAM type: NRG; PAM sequence: CAG
caggcaatttgtttgatatt

SEQ ID NO: 17684 - DNA, 20 bp, Artificial Sequence
  Description of Artificial Sequence: Synthetic oligonucleotide
  Target: SCNA; (-) strand; PAM type: NRG; PAM sequence: AGG
ttctgttaaattctcatacc

SEQ ID NO: 17685 - DNA, 20 bp, Artificial Sequence
  Description of Artificial Sequence: Synthetic oligonucleotide
  Target: SCNA; (-) strand; PAM type: NRG; PAM sequence: CAG
attctgttaaattctcatac

SEQ ID NO: 17686 - DNA, 20 bp, Artificial Sequence
  Description of Artificial Sequence: Synthetic oligonucleotide
  Target: SCNA; (-) strand; PAM type: NRG; PAM sequence: TGG
taaatctgttaaaaaaattg

SEQ ID NO: 17687 - DNA, 20 bp, Artificial Sequence
  Description of Artificial Sequence: Synthetic oligonucleotide
  Target: SCNA; (-) strand; PAM type: NRG; PAM sequence: TAG
gactgaggcgatgtttcaag

SEQ ID NO: 17688 - DNA, 20 bp, Artificial Sequence
  Description of Artificial Sequence: Synthetic oligonucleotide
  Target: SCNA; (-) strand; PAM type: NRG; PAM sequence: AAG
attgactgaggcgatgtttc

SEQ ID NO: 17689 - DNA, 20 bp, Artificial Sequence
  Description of Artificial Sequence: Synthetic oligonucleotide
  Target: SCNA; (-) strand; PAM type: NRG; PAM sequence: AGG
ataagtttcttcattgactg

SEQ ID NO: 17690 - DNA, 20 bp, Artificial Sequence
  Description of Artificial Sequence: Synthetic oligonucleotide
  Target: SCNA; (-) strand; PAM type: NRG; PAM sequence: GAG
cataagtttcttcattgact

SEQ ID NO: 17691 - DNA, 20 bp, Artificial Sequence
  Description of Artificial Sequence: Synthetic oligonucleotide
  Target: SCNA; (-) strand; PAM type: NRG; PAM sequence: AAG
tattattagttatagaacat

SEQ ID NO: 17692 - DNA, 20 bp, Artificial Sequence
  Description of Artificial Sequence: Synthetic oligonucleotide
  Target: SCNA; (-) strand; PAM type: NRG; PAM sequence: TAG
tgatcttttattattagtta

SEQ ID NO: 17693 - DNA, 20 bp, Artificial Sequence
  Description of Artificial Sequence: Synthetic oligonucleotide
  Target: SCNA; (-) strand; PAM type: NRG; PAM sequence: TAG
tacaaatgatcttttattat

SEQ ID NO: 17694 - DNA, 20 bp, Artificial Sequence
  Description of Artificial Sequence: Synthetic oligonucleotide
  Target: SCNA; (-) strand; PAM type: NRG; PAM sequence: CAG
aacagcaatttgtcatattt

SEQ ID NO: 17695 - DNA, 20 bp, Artificial Sequence
  Description of Artificial Sequence: Synthetic oligonucleotide
  Target: SCNA; (-) strand; PAM type: NRG; PAM sequence: CAG
ggtaatcctcatgattaaaa

SEQ ID NO: 17696 - DNA, 20 bp, Artificial Sequence
  Description of Artificial Sequence: Synthetic oligonucleotide
  Target: SCNA; (-) strand; PAM type: NRG; PAM sequence: TGG
gtttacctagctgttctaaa

SEQ ID NO: 17697 - DNA, 20 bp, Artificial Sequence
  Description of Artificial Sequence: Synthetic oligonucleotide
  Target: SCNA; (-) strand; PAM type: NRG; PAM sequence: TAG
ttaaaaagtaaatgtttacc

SEQ ID NO: 17698 - DNA, 20 bp, Artificial Sequence
  Description of Artificial Sequence: Synthetic oligonucleotide
  Target: SCNA; (-) strand; PAM type: NRG; PAM sequence: AAG
taacttatttccggattaaa

SEQ ID NO: 17699 - DNA, 20 bp, Artificial Sequence
  Description of Artificial Sequence: Synthetic oligonucleotide
  Target: SCNA; (-) strand; PAM type: NRG; PAM sequence: CGG
tatttgctttaacttatttc

SEQ ID NO: 17700 - DNA, 20 bp, Artificial Sequence
  Description of Artificial Sequence: Synthetic oligonucleotide
  Target: SCNA; (-) strand; PAM type: NRG; PAM sequence: AAG
aggaatacccacaaggtaac

SEQ ID NO: 17701 - DNA, 20 bp, Artificial Sequence
  Description of Artificial Sequence: Synthetic oligonucleotide
  Target: SCNA; (-) strand; PAM type: NRG; PAM sequence: AGG
catgttcaggaatacccaca

SEQ ID NO: 17702 - DNA, 20 bp, Artificial Sequence
  Description of Artificial Sequence: Synthetic oligonucleotide
  Target: SCNA; (-) strand; PAM type: NRG; PAM sequence: AAG
tcatgttcaggaatacccac

SEQ ID NO: 17703 - DNA, 20 bp, Artificial Sequence
  Description of Artificial Sequence: Synthetic oligonucleotide
  Target: SCNA; (-) strand; PAM type: NRG; PAM sequence: AGG
taaaaatcctaatcatgttc

SEQ ID NO: 17704 - DNA, 20 bp, Artificial Sequence
  Description of Artificial Sequence: Synthetic oligonucleotide
  Target: SCNA; (-) strand; PAM type: NRG; PAM sequence: CAG
ataaaaatcctaatcatgtt

SEQ ID NO: 17705 - DNA, 20 bp, Artificial Sequence
  Description of Artificial Sequence: Synthetic oligonucleotide
  Target: SCNA; (-) strand; PAM type: NRG; PAM sequence: GAG
tgagtgaataaaaatacttg

SEQ ID NO: 17706 - DNA, 20 bp, Artificial Sequence
  Description of Artificial Sequence: Synthetic oligonucleotide
  Target: SCNA; (-) strand; PAM type: NRG; PAM sequence: TGG
tgtgagtgaataaaaatact

SEQ ID NO: 17707 - DNA, 20 bp, Artificial Sequence
  Description of Artificial Sequence: Synthetic oligonucleotide
  Target: SCNA; (-) strand; PAM type: NRG; PAM sequence: GAG
ccttgacattttgattctgt

SEQ ID NO: 17708 - DNA, 20 bp, Artificial Sequence
  Description of Artificial Sequence: Synthetic oligonucleotide
  Target: SCNA; (-) strand; PAM type: NRG; PAM sequence: TAG
gcacttgatgaaaacttata

SEQ ID NO: 17709 - DNA, 20 bp, Artificial Sequence
  Description of Artificial Sequence: Synthetic oligonucleotide
  Target: SCNA; (-) strand; PAM type: NRG; PAM sequence: TAG
taaaaacttagatgctaaat

SEQ ID NO: 17710 - DNA, 20 bp, Artificial Sequence
  Description of Artificial Sequence: Synthetic oligonucleotide
  Target: SCNA; (-) strand; PAM type: NRG; PAM sequence: TAG
caaattaattaataaaaact

SEQ ID NO: 17711 - DNA, 20 bp, Artificial Sequence
  Description of Artificial Sequence: Synthetic oligonucleotide
  Target: SCNA; (-) strand; PAM type: NRG; PAM sequence: GAG
ggaaatggagctcaccacag

SEQ ID NO: 17712 - DNA, 20 bp, Artificial Sequence
  Description of Artificial Sequence: Synthetic oligonucleotide
  Target: SCNA; (-) strand; PAM type: NRG; PAM sequence: AGG
ctggaaatggagctcaccac

SEQ ID NO: 17713 - DNA, 20 bp, Artificial Sequence
  Description of Artificial Sequence: Synthetic oligonucleotide
  Target: SCNA; (-) strand; PAM type: NRG; PAM sequence: CAG
tctggaaatggagctcacca

SEQ ID NO: 17714 - DNA, 20 bp, Artificial Sequence
  Description of Artificial Sequence: Synthetic oligonucleotide
  Target: SCNA; (-) strand; PAM type: NRG; PAM sequence: GAG
ttcgttggaatctggaaatg

SEQ ID NO: 17715 - DNA, 20 bp, Artificial Sequence
  Description of Artificial Sequence: Synthetic oligonucleotide
  Target: SCNA; (-) strand; PAM type: NRG; PAM sequence: TGG
gtttcgttggaatctggaaa

SEQ ID NO: 17716 - DNA, 20 bp, Artificial Sequence
  Description of Artificial Sequence: Synthetic oligonucleotide
  Target: SCNA; (-) strand; PAM type: NRG; PAM sequence: TGG
ttaatggtttcgttggaatc

SEQ ID NO: 17717 - DNA, 20 bp, Artificial Sequence
  Description of Artificial Sequence: Synthetic oligonucleotide
  Target: SCNA; (-) strand; PAM type: NRG; PAM sequence: TGG
aaatattttaatggtttcgt

SEQ ID NO: 17718 - DNA, 20 bp, Artificial Sequence
  Description of Artificial Sequence: Synthetic oligonucleotide
  Target: SCNA; (-) strand; PAM type: NRG; PAM sequence: TGG
cagtgccataaatattttaa

SEQ ID NO: 17719 - DNA, 20 bp, Artificial Sequence
  Description of Artificial Sequence: Synthetic oligonucleotide
  Target: SCNA; (-) strand; PAM type: NRG; PAM sequence: CAG
agacccgtctgattcagcct

SEQ ID NO: 17720 - DNA, 20 bp, Artificial Sequence
  Description of Artificial Sequence: Synthetic oligonucleotide
  Target: SCNA; (-) strand; PAM type: NRG; PAM sequence: CAG
tacacaagacccgtctgatt

SEQ ID NO: 17721 - DNA, 20 bp, Artificial Sequence
  Description of Artificial Sequence: Synthetic oligonucleotide
  Target: SCNA; (-) strand; PAM type: NRG; PAM sequence: AAG
ggccacacaagagagtacac

SEQ ID NO: 17722 - DNA, 20 bp, Artificial Sequence
  Description of Artificial Sequence: Synthetic oligonucleotide
  Target: SCNA; (-) strand; PAM type: NRG; PAM sequence: GAG
cacaatatggccacacaaga

SEQ ID NO: 17723 - DNA, 20 bp, Artificial Sequence
  Description of Artificial Sequence: Synthetic oligonucleotide
  Target: SCNA; (-) strand; PAM type: NRG; PAM sequence: GAG
tacacaatatggccacacaa

SEQ ID NO: 17724 - DNA, 20 bp, Artificial Sequence
  Description of Artificial Sequence: Synthetic oligonucleotide
  Target: SCNA; (-) strand; PAM type: NRG; PAM sequence: AAG
gctacacaatatggccacac

SEQ ID NO: 17725 - DNA, 20 bp, Artificial Sequence
  Description of Artificial Sequence: Synthetic oligonucleotide
  Target: SCNA; (-) strand; PAM type: NRG; PAM sequence: TGG
cccactgttgctacacaata

SEQ ID NO: 17726 - DNA, 20 bp, Artificial Sequence
  Description of Artificial Sequence: Synthetic oligonucleotide
  Target: SCNA; (-) strand; PAM type: NRG; PAM sequence: TGG
agctccaattggagtctaaa

SEQ ID NO: 17727 - DNA, 20 bp, Artificial Sequence
  Description of Artificial Sequence: Synthetic oligonucleotide
  Target: SCNA; (-) strand; PAM type: NRG; PAM sequence: GAG
agttgcctgagctccaattg

SEQ ID NO: 17728 - DNA, 20 bp, Artificial Sequence
  Description of Artificial Sequence: Synthetic oligonucleotide
  Target: SCNA; (-) strand; PAM type: NRG; PAM sequence: TGG
gaagttgcctgagctccaat

SEQ ID NO: 17729 - DNA, 20 bp, Artificial Sequence
  Description of Artificial Sequence: Synthetic oligonucleotide
  Target: SCNA; (-) strand; PAM type: NRG; PAM sequence: GAG
atcacaaattgaagttgcct

SEQ ID NO: 17730 - DNA, 20 bp, Artificial Sequence
  Description of Artificial Sequence: Synthetic oligonucleotide
  Target: SCNA; (-) strand; PAM type: NRG; PAM sequence: AAG
atcattataatcacaaattg

SEQ ID NO: 17731 - DNA, 20 bp, Artificial Sequence
  Description of Artificial Sequence: Synthetic oligonucleotide
  Target: SCNA; (-) strand; PAM type: NRG; PAM sequence: AAG
acaaatagtgcatctttttg

SEQ ID NO: 17732 - DNA, 20 bp, Artificial Sequence
  Description of Artificial Sequence: Synthetic oligonucleotide
  Target: SCNA; (-) strand; PAM type: NRG; PAM sequence: TAG
tttcaacataggtctacaaa

SEQ ID NO: 17733 - DNA, 20 bp, Artificial Sequence
  Description of Artificial Sequence: Synthetic oligonucleotide
  Target: SCNA; (-) strand; PAM type: NRG; PAM sequence: AGG
cactgcataagtttcaacat

SEQ ID NO: 17734 - DNA, 20 bp, Artificial Sequence
  Description of Artificial Sequence: Synthetic oligonucleotide
  Target: SCNA; (-) strand; PAM type: NRG; PAM sequence: TAG
ccactgcataagtttcaaca

SEQ ID NO: 17735 - DNA, 20 bp, Artificial Sequence
  Description of Artificial Sequence: Synthetic oligonucleotide
  Target: SCNA; (-) strand; PAM type: NRG; PAM sequence: AAG
gctttttagttccactgcat

SEQ ID NO: 17736 - DNA, 20 bp, Artificial Sequence
  Description of Artificial Sequence: Synthetic oligonucleotide
  Target: SCNA; (-) strand; PAM type: NRG; PAM sequence: TAG
tataaaaataggtggctttt

SEQ ID NO: 17737 - DNA, 20 bp, Artificial Sequence
  Description of Artificial Sequence: Synthetic oligonucleotide
  Target: SCNA; (-) strand; PAM type: NRG; PAM sequence: TGG
ctttttattataaaaatagg

SEQ ID NO: 17738 - DNA, 20 bp, Artificial Sequence
  Description of Artificial Sequence: Synthetic oligonucleotide
  Target: SCNA; (-) strand; PAM type: NRG; PAM sequence: AGG
tgcctttttattataaaaat

SEQ ID NO: 17739 - DNA, 20 bp, Artificial Sequence
  Description of Artificial Sequence: Synthetic oligonucleotide
  Target: SCNA; (-) strand; PAM type: NRG; PAM sequence: TAG
gtgcctttttattataaaaa

SEQ ID NO: 17740 - DNA, 20 bp, Artificial Sequence
  Description of Artificial Sequence: Synthetic oligonucleotide
  Target: SCNA; (-) strand; PAM type: NRG; PAM sequence: AAG
taattatatttgaaacgttc

SEQ ID NO: 17741 - DNA, 20 bp, Artificial Sequence
  Description of Artificial Sequence: Synthetic oligonucleotide
  Target: SCNA; (-) strand; PAM type: NRG; PAM sequence: AAG
tagaagaactgattaaatga

SEQ ID NO: 17742 - DNA, 20 bp, Artificial Sequence
  Description of Artificial Sequence: Synthetic oligonucleotide
  Target: SCNA; (-) strand; PAM type: NRG; PAM sequence: AAG
catatatttgccttacttag

SEQ ID NO: 17743 - DNA, 20 bp, Artificial Sequence
  Description of Artificial Sequence: Synthetic oligonucleotide
  Target: SCNA; (-) strand; PAM type: NRG; PAM sequence: TAG
attcatatatttgccttact

SEQ ID NO: 17744 - DNA, 20 bp, Artificial Sequence
  Description of Artificial Sequence: Synthetic oligonucleotide
  Target: SCNA; (-) strand; PAM type: NRG; PAM sequence: GGG
tacttaatggagttttgggg

SEQ ID NO: 17745 - DNA, 20 bp, Artificial Sequence
  Description of Artificial Sequence: Synthetic oligonucleotide
  Target: SCNA; (-) strand; PAM type: NRG; PAM sequence: GGG
atacttaatggagttttggg

SEQ ID NO: 17746 - DNA, 20 bp, Artificial Sequence
  Description of Artificial Sequence: Synthetic oligonucleotide
  Target: SCNA; (-) strand; PAM type: NRG; PAM sequence: GGG
tatacttaatggagttttgg

SEQ ID NO: 17747 - DNA, 20 bp, Artificial Sequence
  Description of Artificial Sequence: Synthetic oligonucleotide
  Target: SCNA; (-) strand; PAM type: NRG; PAM sequence: GGG
atatacttaatggagttttg

SEQ ID NO: 17748 - DNA, 20 bp, Artificial Sequence
  Description of Artificial Sequence: Synthetic oligonucleotide
  Target: SCNA; (-) strand; PAM type: NRG; PAM sequence: GGG
gatatacttaatggagtttt

SEQ ID NO: 17749 - DNA, 20 bp, Artificial Sequence
  Description of Artificial Sequence: Synthetic oligonucleotide
  Target: SCNA; (-) strand; PAM type: NRG; PAM sequence: TGG
agatatacttaatggagttt

SEQ ID NO: 17750 - DNA, 20 bp, Artificial Sequence
  Description of Artificial Sequence: Synthetic oligonucleotide
  Target: SCNA; (-) strand; PAM type: NRG; PAM sequence: GAG
tcatatagatatacttaatg

SEQ ID NO: 17751 - DNA, 20 bp, Artificial Sequence
  Description of Artificial Sequence: Synthetic oligonucleotide
  Target: SCNA; (-) strand; PAM type: NRG; PAM sequence: TGG
ggtcatatagatatacttaa

SEQ ID NO: 17752 - DNA, 20 bp, Artificial Sequence
  Description of Artificial Sequence: Synthetic oligonucleotide
  Target: SCNA; (-) strand; PAM type: NRG; PAM sequence: TAG
aatcttacccaatggtcata

SEQ ID NO: 17753 - DNA, 20 bp, Artificial Sequence
  Description of Artificial Sequence: Synthetic oligonucleotide
  Target: SCNA; (-) strand; PAM type: NRG; PAM sequence: TGG
tcataaaaaatcttacccaa

SEQ ID NO: 17754 - DNA, 20 bp, Artificial Sequence
  Description of Artificial Sequence: Synthetic oligonucleotide
  Target: SCNA; (-) strand; PAM type: NRG; PAM sequence: CAG
atatatttaatatatctaaa

SEQ ID NO: 17755 - DNA, 20 bp, Artificial Sequence
  Description of Artificial Sequence: Synthetic oligonucleotide
  Target: SCNA; (-) strand; PAM type: NRG; PAM sequence: AGG
tttttaatactggcaaaatg

SEQ ID NO: 17756 - DNA, 20 bp, Artificial Sequence
  Description of Artificial Sequence: Synthetic oligonucleotide
  Target: SCNA; (-) strand; PAM type: NRG; PAM sequence: GAG
atttttaatactggcaaaat

SEQ ID NO: 17757 - DNA, 20 bp, Artificial Sequence
  Description of Artificial Sequence: Synthetic oligonucleotide
  Target: SCNA; (-) strand; PAM type: NRG; PAM sequence: TGG
aattttgaaatttttaatac

SEQ ID NO: 17758 - DNA, 20 bp, Artificial Sequence
  Description of Artificial Sequence: Synthetic oligonucleotide
  Target: SCNA; (-) strand; PAM type: NRG; PAM sequence: TGG
caaagtaacattgtatgcat

SEQ ID NO: 17759 - DNA, 20 bp, Artificial Sequence
  Description of Artificial Sequence: Synthetic oligonucleotide
  Target: SCNA; (-) strand; PAM type: NRG; PAM sequence: AAG
taaaacttatgttcaggaca

SEQ ID NO: 17760 - DNA, 20 bp, Artificial Sequence
  Description of Artificial Sequence: Synthetic oligonucleotide
  Target: SCNA; (-) strand; PAM type: NRG; PAM sequence: AGG
ttcttttaaaacttatgttc

SEQ ID NO: 17761 - DNA, 20 bp, Artificial Sequence
  Description of Artificial Sequence: Synthetic oligonucleotide
  Target: SCNA; (-) strand; PAM type: NRG; PAM sequence: CAG
attcttttaaaacttatgtt

SEQ ID NO: 17762 - DNA, 20 bp, Artificial Sequence
  Description of Artificial Sequence: Synthetic oligonucleotide
  Target: SCNA; (-) strand; PAM type: NRG; PAM sequence: GAG
aagtctcacaaagcatttag

SEQ ID NO: 17763 - DNA, 20 bp, Artificial Sequence
  Description of Artificial Sequence: Synthetic oligonucleotide
  Target: SCNA; (-) strand; PAM type: NRG; PAM sequence: AGG
ttaagtctcacaaagcattt

SEQ ID NO: 17764 - DNA, 20 bp, Artificial Sequence
  Description of Artificial Sequence: Synthetic oligonucleotide
  Target: SCNA; (-) strand; PAM type: NRG; PAM sequence: TAG
cttaagtctcacaaagcatt

SEQ ID NO: 17765 - DNA, 20 bp, Artificial Sequence
  Description of Artificial Sequence: Synthetic oligonucleotide
  Target: SCNA; (-) strand; PAM type: NRG; PAM sequence: AAG
tttttatcttaagtctcaca

SEQ ID NO: 17766 - DNA, 20 bp, Artificial Sequence
  Description of Artificial Sequence: Synthetic oligonucleotide
  Target: SCNA; (-) strand; PAM type: NRG; PAM sequence: AAG
gaggaactgttttttatctt

SEQ ID NO: 17767 - DNA, 20 bp, Artificial Sequence
  Description of Artificial Sequence: Synthetic oligonucleotide
  Target: SCNA; (-) strand; PAM type: NRG; PAM sequence: AGG
cccctttgtcaggagttctg

SEQ ID NO: 17768 - DNA, 20 bp, Artificial Sequence
  Description of Artificial Sequence: Synthetic oligonucleotide
  Target: SCNA; (-) strand; PAM type: NRG; PAM sequence: GAG
ccccctttgtcaggagttct

SEQ ID NO: 17769 - DNA, 20 bp, Artificial Sequence
  Description of Artificial Sequence: Synthetic oligonucleotide
  Target: SCNA; (-) strand; PAM type: NRG; PAM sequence: GAG
ttactgcccccctttgtcag

SEQ ID NO: 17770 - DNA, 20 bp, Artificial Sequence
  Description of Artificial Sequence: Synthetic oligonucleotide
  Target: SCNA; (-) strand; PAM type: NRG; PAM sequence: AGG
ctttactgcccccctttgtc

SEQ ID NO: 17771 - DNA, 20 bp, Artificial Sequence
  Description of Artificial Sequence: Synthetic oligonucleotide
  Target: SCNA; (-) strand; PAM type: NRG; PAM sequence: CAG
tctttactgcccccctttgt

SEQ ID NO: 17772 - DNA, 20 bp, Artificial Sequence
  Description of Artificial Sequence: Synthetic oligonucleotide
  Target: SCNA; (-) strand; PAM type: NRG; PAM sequence: CAG
gaatgtacacaaaggccttt

SEQ ID NO: 17773 - DNA, 20 bp, Artificial Sequence
  Description of Artificial Sequence: Synthetic oligonucleotide
  Target: SCNA; (-) strand; PAM type: NRG; PAM sequence: AGG
aaaatagggaatgtacacaa

SEQ ID NO: 17774 - DNA, 20 bp, Artificial Sequence
  Description of Artificial Sequence: Synthetic oligonucleotide
  Target: SCNA; (-) strand; PAM type: NRG; PAM sequence: AAG
gaaaatagggaatgtacaca

SEQ ID NO: 17775 - DNA, 20 bp, Artificial Sequence
  Description of Artificial Sequence: Synthetic oligonucleotide
  Target: SCNA; (-) strand; PAM type: NRG; PAM sequence: GGG
catttactgtttagaaaata

SEQ ID NO: 17776 - DNA, 20 bp, Artificial Sequence
  Description of Artificial Sequence: Synthetic oligonucleotide
  Target: SCNA; (-) strand; PAM type: NRG; PAM sequence: AGG
tcatttactgtttagaaaat

SEQ ID NO: 17777 - DNA, 20 bp, Artificial Sequence
  Description of Artificial Sequence: Synthetic oligonucleotide
  Target: SCNA; (-) strand; PAM type: NRG; PAM sequence: TAG
atcatttactgtttagaaaa

SEQ ID NO: 17778 - DNA, 20 bp, Artificial Sequence
  Description of Artificial Sequence: Synthetic oligonucleotide
  Target: SCNA; (-) strand; PAM type: NRG; PAM sequence: TAG
gcaatccatcatttactgtt

SEQ ID NO: 17779 - DNA, 20 bp, Artificial Sequence
  Description of Artificial Sequence: Synthetic oligonucleotide
  Target: SCNA; (-) strand; PAM type: NRG; PAM sequence: TAG
atttaattttagcaattttg

SEQ ID NO: 17780 - DNA, 20 bp, Artificial Sequence
  Description of Artificial Sequence: Synthetic oligonucleotide
  Target: SCNA; (-) strand; PAM type: NRG; PAM sequence: TAG
tccatcccaacatttaattt

SEQ ID NO: 17781 - DNA, 20 bp, Artificial Sequence
  Description of Artificial Sequence: Synthetic oligonucleotide
  Target: SCNA; (-) strand; PAM type: NRG; PAM sequence: GGG
gaaaatattaaattaaaagg

SEQ ID NO: 17782 - DNA, 20 bp, Artificial Sequence
  Description of Artificial Sequence: Synthetic oligonucleotide
  Target: SCNA; (-) strand; PAM type: NRG; PAM sequence: GGG
tgaaaatattaaattaaaag

SEQ ID NO: 17783 - DNA, 20 bp, Artificial Sequence
  Description of Artificial Sequence: Synthetic oligonucleotide
  Target: SCNA; (-) strand; PAM type: NRG; PAM sequence: GGG
ttgaaaatattaaattaaaa

SEQ ID NO: 17784 - DNA, 20 bp, Artificial Sequence
  Description of Artificial Sequence: Synthetic oligonucleotide
  Target: SCNA; (-) strand; PAM type: NRG; PAM sequence: AGG
tttgaaaatattaaattaaa

SEQ ID NO: 17785 - DNA, 20 bp, Artificial Sequence
  Description of Artificial Sequence: Synthetic oligonucleotide
  Target: SCNA; (-) strand; PAM type: NRG; PAM sequence: AAG
ctttgaaaatattaaattaa

SEQ ID NO: 17786 - DNA, 20 bp, Artificial Sequence
  Description of Artificial Sequence: Synthetic oligonucleotide
  Target: SCNA; (-) strand; PAM type: NRG; PAM sequence: GAG
aataacattcatttagaatt

SEQ ID NO: 17787 - DNA, 20 bp, Artificial Sequence
  Description of Artificial Sequence: Synthetic oligonucleotide
  Target: SCNA; (-) strand; PAM type: NRG; PAM sequence: TAG
ggtttgcaataacattcatt

SEQ ID NO: 17788 - DNA, 20 bp, Artificial Sequence
  Description of Artificial Sequence: Synthetic oligonucleotide
  Target: SCNA; (-) strand; PAM type: NRG; PAM sequence: AGG
tgcattcttcttataagcct

SEQ ID NO: 17789 - DNA, 20 bp, Artificial Sequence
  Description of Artificial Sequence: Synthetic oligonucleotide
  Target: SCNA; (-) strand; PAM type: NRG; PAM sequence: TAG
atgcattcttcttataagcc

SEQ ID NO: 17790 - DNA, 20 bp, Artificial Sequence
  Description of Artificial Sequence: Synthetic oligonucleotide
  Target: SCNA; (-) strand; PAM type: NRG; PAM sequence: AAG
tctaaatgcattcttcttat

SEQ ID NO: 17791 - DNA, 20 bp, Artificial Sequence
  Description of Artificial Sequence: Synthetic oligonucleotide
  Target: SCNA; (-) strand; PAM type: NRG; PAM sequence: GGG
tttatattgtatgttatcta

SEQ ID NO: 17792 - DNA, 20 bp, Artificial Sequence
  Description of Artificial Sequence: Synthetic oligonucleotide
  Target: SCNA; (-) strand; PAM type: NRG; PAM sequence: AGG
ttttatattgtatgttatct

SEQ ID NO: 17793 - DNA, 20 bp, Artificial Sequence
  Description of Artificial Sequence: Synthetic oligonucleotide
  Target: SCNA; (-) strand; PAM type: NRG; PAM sequence: TAG
tttttatattgtatgttatc

SEQ ID NO: 17794 - DNA, 20 bp, Artificial Sequence
  Description of Artificial Sequence: Synthetic oligonucleotide
  Target: SCNA; (-) strand; PAM type: NRG; PAM sequence: AAG
aaaaaaaaaaaaagaaagaa

SEQ ID NO: 17795 - DNA, 20 bp, Artificial Sequence
  Description of Artificial Sequence: Synthetic oligonucleotide
  Target: SCNA; (-) strand; PAM type: NRG; PAM sequence: AAG
caaaaaaaaaaaaaaaaaga

SEQ ID NO: 17796 - DNA, 20 bp, Artificial Sequence
  Description of Artificial Sequence: Synthetic oligonucleotide
  Target: SCNA; (-) strand; PAM type: NRG; PAM sequence: AAG
atctcaaaaaaaaaaaaaaa

SEQ ID NO: 17797 - DNA, 20 bp, Artificial Sequence
  Description of Artificial Sequence: Synthetic oligonucleotide
  Target: SCNA; (-) strand; PAM type: NRG; PAM sequence: GAG
tattctagcctaggcaacat

SEQ ID NO: 17798 - DNA, 20 bp, Artificial Sequence
  Description of Artificial Sequence: Synthetic oligonucleotide
  Target: SCNA; (-) strand; PAM type: NRG; PAM sequence: AGG
gtgccactgtattctagcct

SEQ ID NO: 17799 - DNA, 20 bp, Artificial Sequence
  Description of Artificial Sequence: Synthetic oligonucleotide
  Target: SCNA; (-) strand; PAM type: NRG; PAM sequence: TAG
tgtgccactgtattctagcc

SEQ ID NO: 17800 - DNA, 20 bp, Artificial Sequence
  Description of Artificial Sequence: Synthetic oligonucleotide
  Target: SCNA; (-) strand; PAM type: NRG; PAM sequence: TAG
gagattgtgccactgtattc

SEQ ID NO: 17801 - DNA, 20 bp, Artificial Sequence
  Description of Artificial Sequence: Synthetic oligonucleotide
  Target: SCNA; (-) strand; PAM type: NRG; PAM sequence: GAG
ggcggtggttgcagtgagcc

SEQ ID NO: 17802 - DNA, 20 bp, Artificial Sequence
  Description of Artificial Sequence: Synthetic oligonucleotide
  Target: SCNA; (-) strand; PAM type: NRG; PAM sequence: GAG
caggaggcggtggttgcagt

SEQ ID NO: 17803 - DNA, 20 bp, Artificial Sequence
  Description of Artificial Sequence: Synthetic oligonucleotide
  Target: SCNA; (-) strand; PAM type: NRG; PAM sequence: CAG
aacccaggaggcggtggttg

SEQ ID NO: 17804 - DNA, 20 bp, Artificial Sequence
  Description of Artificial Sequence: Synthetic oligonucleotide
  Target: SCNA; (-) strand; PAM type: NRG; PAM sequence: TGG
cgtttgaacccaggaggcgg

SEQ ID NO: 17805 - DNA, 20 bp, Artificial Sequence
  Description of Artificial Sequence: Synthetic oligonucleotide
  Target: SCNA; (-) strand; PAM type: NRG; PAM sequence: CGG
aatcgtttgaacccaggagg

SEQ ID NO: 17806 - DNA, 20 bp, Artificial Sequence
  Description of Artificial Sequence: Synthetic oligonucleotide
  Target: SCNA; (-) strand; PAM type: NRG; PAM sequence: AGG
aagaatcgtttgaacccagg

SEQ ID NO: 17807 - DNA, 20 bp, Artificial Sequence
  Description of Artificial Sequence: Synthetic oligonucleotide
  Target: SCNA; (-) strand; PAM type: NRG; PAM sequence: GAG
gaagaatcgtttgaacccag

SEQ ID NO: 17808 - DNA, 20 bp, Artificial Sequence
  Description of Artificial Sequence: Synthetic oligonucleotide
  Target: SCNA; (-) strand; PAM type: NRG; PAM sequence: AGG
cagaagaatcgtttgaaccc

SEQ ID NO: 17809 - DNA, 20 bp, Artificial Sequence
  Description of Artificial Sequence: Synthetic oligonucleotide
  Target: SCNA; (-) strand; PAM type: NRG; PAM sequence: CAG
gcagaagaatcgtttgaacc

SEQ ID NO: 17810 - DNA, 20 bp, Artificial Sequence
  Description of Artificial Sequence: Synthetic oligonucleotide
  Target: SCNA; (-) strand; PAM type: NRG; PAM sequence: AAG
tactggggaggctgaggcag

SEQ ID NO: 17811 - DNA, 20 bp, Artificial Sequence
  Description of Artificial Sequence: Synthetic oligonucleotide
  Target: SCNA; (-) strand; PAM type: NRG; PAM sequence: CAG
aactactggggaggctgagg

SEQ ID NO: 17812 - DNA, 20 bp, Artificial Sequence
  Description of Artificial Sequence: Synthetic oligonucleotide
  Target: SCNA; (-) strand; PAM type: NRG; PAM sequence: AGG
cccaactactggggaggctg

SEQ ID NO: 17813 - DNA, 20 bp, Artificial Sequence
  Description of Artificial Sequence: Synthetic oligonucleotide
  Target: SCNA; (-) strand; PAM type: NRG; PAM sequence: GAG
tcccaactactggggaggct

SEQ ID NO: 17814 - DNA, 20 bp, Artificial Sequence
  Description of Artificial Sequence: Synthetic oligonucleotide
  Target: SCNA; (-) strand; PAM type: NRG; PAM sequence: AGG
tgtaatcccaactactgggg

SEQ ID NO: 17815 - DNA, 20 bp, Artificial Sequence
  Description of Artificial Sequence: Synthetic oligonucleotide
  Target: SCNA; (-) strand; PAM type: NRG; PAM sequence: GAG
ctgtaatcccaactactggg

SEQ ID NO: 17816 - DNA, 20 bp, Artificial Sequence
  Description of Artificial Sequence: Synthetic oligonucleotide
  Target: SCNA; (-) strand; PAM type: NRG; PAM sequence: GGG
acctgtaatcccaactactg

SEQ ID NO: 17817 - DNA, 20 bp, Artificial Sequence
  Description of Artificial Sequence: Synthetic oligonucleotide
  Target: SCNA; (-) strand; PAM type: NRG; PAM sequence: GGG
tacctgtaatcccaactact

SEQ ID NO: 17818 - DNA, 20 bp, Artificial Sequence
  Description of Artificial Sequence: Synthetic oligonucleotide
  Target: SCNA; (-) strand; PAM type: NRG; PAM sequence: TGG
atacctgtaatcccaactac

SEQ ID NO: 17819 - DNA, 20 bp, Artificial Sequence
  Description of Artificial Sequence: Synthetic oligonucleotide
  Target: SCNA; (-) strand; PAM type: NRG; PAM sequence: TGG
acaaaattagccgggcatgg

SEQ ID NO: 17820 - DNA, 20 bp, Artificial Sequence
  Description of Artificial Sequence: Synthetic oligonucleotide
  Target: SCNA; (-) strand; PAM type: NRG; PAM sequence: TGG
aatacaaaattagccgggca

SEQ ID NO: 17821 - DNA, 20 bp, Artificial Sequence
  Description of Artificial Sequence: Synthetic oligonucleotide
  Target: SCNA; (-) strand; PAM type: NRG; PAM sequence: GGG
ctaaaaatacaaaattagcc

SEQ ID NO: 17822 - DNA, 20 bp, Artificial Sequence
  Description of Artificial Sequence: Synthetic oligonucleotide
  Target: SCNA; (-) strand; PAM type: NRG; PAM sequence: CGG
actaaaaatacaaaattagc

SEQ ID NO: 17823 - DNA, 20 bp, Artificial Sequence
  Description of Artificial Sequence: Synthetic oligonucleotide
  Target: SCNA; (-) strand; PAM type: NRG; PAM sequence: TAG
ctctactaaaaatacaaaat

SEQ ID NO: 17824 - DNA, 20 bp, Artificial Sequence
  Description of Artificial Sequence: Synthetic oligonucleotide
  Target: SCNA; (-) strand; PAM type: NRG; PAM sequence: GAG
agaccagcttgaccaacatg

SEQ ID NO: 17825 - DNA, 20 bp, Artificial Sequence
  Description of Artificial Sequence: Synthetic oligonucleotide
  Target: SCNA; (-) strand; PAM type: NRG; PAM sequence: TGG
caagaccagcttgaccaaca

SEQ ID NO: 17826 - DNA, 20 bp, Artificial Sequence
  Description of Artificial Sequence: Synthetic oligonucleotide
  Target: SCNA; (-) strand; PAM type: NRG; PAM sequence: CAG
tgaggtcgggagttcaagac

SEQ ID NO: 17827 - DNA, 20 bp, Artificial Sequence
  Description of Artificial Sequence: Synthetic oligonucleotide
  Target: SCNA; (-) strand; PAM type: NRG; PAM sequence: AAG
tcacctgaggtcgggagttc

SEQ ID NO: 17828 - DNA, 20 bp, Artificial Sequence
  Description of Artificial Sequence: Synthetic oligonucleotide
  Target: SCNA; (-) strand; PAM type: NRG; PAM sequence: GAG
ggtggatcacctgaggtcgg

SEQ ID NO: 17829 - DNA, 20 bp, Artificial Sequence
  Description of Artificial Sequence: Synthetic oligonucleotide
  Target: SCNA; (-) strand; PAM type: NRG; PAM sequence: GGG
cgggtggatcacctgaggtc

SEQ ID NO: 17830 - DNA, 20 bp, Artificial Sequence
  Description of Artificial Sequence: Synthetic oligonucleotide
  Target: SCNA; (-) strand; PAM type: NRG; PAM sequence: CGG
gcgggtggatcacctgaggt

SEQ ID NO: 17831 - DNA, 20 bp, Artificial Sequence
  Description of Artificial Sequence: Synthetic oligonucleotide
  Target: SCNA; (-) strand; PAM type: NRG; PAM sequence: AGG
caaggcgggtggatcacctg

SEQ ID NO: 17832 - DNA, 20 bp, Artificial Sequence
  Description of Artificial Sequence: Synthetic oligonucleotide
  Target: SCNA; (-) strand; PAM type: NRG; PAM sequence: GAG
ccaaggcgggtggatcacct

SEQ ID NO: 17833 - DNA, 20 bp, Artificial Sequence
  Description of Artificial Sequence: Synthetic oligonucleotide
  Target: SCNA; (-) strand; PAM type: NRG; PAM sequence: TGG
ctttgggaggccaaggcggg

SEQ ID NO: 17834 - DNA, 20 bp, Artificial Sequence
  Description of Artificial Sequence: Synthetic oligonucleotide
  Target: SCNA; (-) strand; PAM type: NRG; PAM sequence: GGG
gcactttgggaggccaaggc

SEQ ID NO: 17835 - DNA, 20 bp, Artificial Sequence
  Description of Artificial Sequence: Synthetic oligonucleotide
  Target: SCNA; (-) strand; PAM type: NRG; PAM sequence: CGG
agcactttgggaggccaagg

SEQ ID NO: 17836 - DNA, 20 bp, Artificial Sequence
  Description of Artificial Sequence: Synthetic oligonucleotide
  Target: SCNA; (-) strand; PAM type: NRG; PAM sequence: AGG
cccagcactttgggaggcca

SEQ ID NO: 17837 - DNA, 20 bp, Artificial Sequence
  Description of Artificial Sequence: Synthetic oligonucleotide
  Target: SCNA; (-) strand; PAM type: NRG; PAM sequence: AAG
tcccagcactttgggaggcc

SEQ ID NO: 17838 - DNA, 20 bp, Artificial Sequence
  Description of Artificial Sequence: Synthetic oligonucleotide
  Target: SCNA; (-) strand; PAM type: NRG; PAM sequence: AGG
tgtaatcccagcactttggg

SEQ ID NO: 17839 - DNA, 20 bp, Artificial Sequence
  Description of Artificial Sequence: Synthetic oligonucleotide
  Target: SCNA; (-) strand; PAM type: NRG; PAM sequence: GAG
ctgtaatcccagcactttgg

SEQ ID NO: 17840 - DNA, 20 bp, Artificial Sequence
  Description of Artificial Sequence: Synthetic oligonucleotide
  Target: SCNA; (-) strand; PAM type: NRG; PAM sequence: GGG
gcctgtaatcccagcacttt

SEQ ID NO: 17841 - DNA, 20 bp, Artificial Sequence
  Description of Artificial Sequence: Synthetic oligonucleotide
  Target: SCNA; (-) strand; PAM type: NRG; PAM sequence: TGG
ggcctgtaatcccagcactt

SEQ ID NO: 17842 - DNA, 20 bp, Artificial Sequence
  Description of Artificial Sequence: Synthetic oligonucleotide
  Target: SCNA; (-) strand; PAM type: NRG; PAM sequence: CAG
gtggctcaggcctgtaatcc

SEQ ID NO: 17843 - DNA, 20 bp, Artificial Sequence
  Description of Artificial Sequence: Synthetic oligonucleotide
  Target: SCNA; (-) strand; PAM type: NRG; PAM sequence: AGG
caggccaggcgcggtggctc

SEQ ID NO: 17844 - DNA, 20 bp, Artificial Sequence
  Description of Artificial Sequence: Synthetic oligonucleotide
  Target: SCNA; (-) strand; PAM type: NRG; PAM sequence: CAG
acaggccaggcgcggtggct

SEQ ID NO: 17845 - DNA, 20 bp, Artificial Sequence
  Description of Artificial Sequence: Synthetic oligonucleotide
  Target: SCNA; (-) strand; PAM type: NRG; PAM sequence: TGG
tgaaaacaggccaggcgcgg

SEQ ID NO: 17846 - DNA, 20 bp, Artificial Sequence
  Description of Artificial Sequence: Synthetic oligonucleotide
  Target: SCNA; (-) strand; PAM type: NRG; PAM sequence: CGG
aaatgaaaacaggccaggcg

SEQ ID NO: 17847 - DNA, 20 bp, Artificial Sequence
  Description of Artificial Sequence: Synthetic oligonucleotide
  Target: SCNA; (-) strand; PAM type: NRG; PAM sequence: AGG
acttaaaatgaaaacaggcc

SEQ ID NO: 17848 - DNA, 20 bp, Artificial Sequence
  Description of Artificial Sequence: Synthetic oligonucleotide
  Target: SCNA; (-) strand; PAM type: NRG; PAM sequence: CAG
cacttaaaatgaaaacaggc

SEQ ID NO: 17849 - DNA, 20 bp, Artificial Sequence
  Description of Artificial Sequence: Synthetic oligonucleotide
  Target: SCNA; (-) strand; PAM type: NRG; PAM sequence: AGG
actacacttaaaatgaaaac

SEQ ID NO: 17850 - DNA, 20 bp, Artificial Sequence
  Description of Artificial Sequence: Synthetic oligonucleotide
  Target: SCNA; (-) strand; PAM type: NRG; PAM sequence: CAG
aactacacttaaaatgaaaa

SEQ ID NO: 17851 - DNA, 20 bp, Artificial Sequence
  Description of Artificial Sequence: Synthetic oligonucleotide
  Target: SCNA; (-) strand; PAM type: NRG; PAM sequence: TAG
ggggaatgtattgaaaatgc

SEQ ID NO: 17852 - DNA, 20 bp, Artificial Sequence
  Description of Artificial Sequence: Synthetic oligonucleotide
  Target: SCNA; (-) strand; PAM type: NRG; PAM sequence: GGG
ataaaatttgtcaaacgggg

SEQ ID NO: 17853 - DNA, 20 bp, Artificial Sequence
  Description of Artificial Sequence: Synthetic oligonucleotide
  Target: SCNA; (-) strand; PAM type: NRG; PAM sequence: GGG
gataaaatttgtcaaacggg

SEQ ID NO: 17854 - DNA, 20 bp, Artificial Sequence
  Description of Artificial Sequence: Synthetic oligonucleotide
  Target: SCNA; (-) strand; PAM type: NRG; PAM sequence: GGG
agataaaatttgtcaaacgg

SEQ ID NO: 17855 - DNA, 20 bp, Artificial Sequence
  Description of Artificial Sequence: Synthetic oligonucleotide
  Target: SCNA; (-) strand; PAM type: NRG; PAM sequence: GGG
aagataaaatttgtcaaacg

SEQ ID NO: 17856 - DNA, 20 bp, Artificial Sequence
  Description of Artificial Sequence: Synthetic oligonucleotide
  Target: SCNA; (-) strand; PAM type: NRG; PAM sequence: GGG
caagataaaatttgtcaaac

SEQ ID NO: 17857 - DNA, 20 bp, Artificial Sequence
  Description of Artificial Sequence: Synthetic oligonucleotide
  Target: SCNA; (-) strand; PAM type: NRG; PAM sequence: CGG
gcaagataaaatttgtcaaa

SEQ ID NO: 17858 - DNA, 20 bp, Artificial Sequence
  Description of Artificial Sequence: Synthetic oligonucleotide
  Target: SCNA; (-) strand; PAM type: NRG; PAM sequence: AAG
ttgcccattagctaaatggc

SEQ ID NO: 17859 - DNA, 20 bp, Artificial Sequence
  Description of Artificial Sequence: Synthetic oligonucleotide
  Target: SCNA; (-) strand; PAM type: NRG; PAM sequence: TGG
ttgcttgcccattagctaaa

SEQ ID NO: 17860 - DNA, 20 bp, Artificial Sequence
  Description of Artificial Sequence: Synthetic oligonucleotide
  Target: SCNA; (-) strand; PAM type: NRG; PAM sequence: TAG
ttaattttttgcttgcccat

SEQ ID NO: 17861 - DNA, 20 bp, Artificial Sequence
  Description of Artificial Sequence: Synthetic oligonucleotide
  Target: SCNA; (-) strand; PAM type: NRG; PAM sequence: CAG
gttaccattgtttaggttac

SEQ ID NO: 17862 - DNA, 20 bp, Artificial Sequence
  Description of Artificial Sequence: Synthetic oligonucleotide
  Target: SCNA; (-) strand; PAM type: NRG; PAM sequence: AGG
atctcatgttaccattgttt

SEQ ID NO: 17863 - DNA, 20 bp, Artificial Sequence
  Description of Artificial Sequence: Synthetic oligonucleotide
  Target: SCNA; (-) strand; PAM type: NRG; PAM sequence: TAG
tatctcatgttaccattgtt

SEQ ID NO: 17864 - DNA, 20 bp, Artificial Sequence
  Description of Artificial Sequence: Synthetic oligonucleotide
  Target: SCNA; (-) strand; PAM type: NRG; PAM sequence: AAG
tagaacactagatagtttat

SEQ ID NO: 17865 - DNA, 20 bp, Artificial Sequence
  Description of Artificial Sequence: Synthetic oligonucleotide
  Target: SCNA; (-) strand; PAM type: NRG; PAM sequence: TAG
tctattattagaacactaga

SEQ ID NO: 17866 - DNA, 20 bp, Artificial Sequence
  Description of Artificial Sequence: Synthetic oligonucleotide
  Target: SCNA; (-) strand; PAM type: NRG; PAM sequence: TAG
tatgtctattattagaacac

SEQ ID NO: 17867 - DNA, 20 bp, Artificial Sequence
  Description of Artificial Sequence: Synthetic oligonucleotide
  Target: SCNA; (-) strand; PAM type: NRG; PAM sequence: TAG
taaaccattatgtctattat

SEQ ID NO: 17868 - DNA, 20 bp, Artificial Sequence
  Description of Artificial Sequence: Synthetic oligonucleotide
  Target: SCNA; (-) strand; PAM type: NRG; PAM sequence: TAG
ctaaggatgacagtagctat

SEQ ID NO: 17869 - DNA, 20 bp, Artificial Sequence
  Description of Artificial Sequence: Synthetic oligonucleotide
  Target: SCNA; (-) strand; PAM type: NRG; PAM sequence: TAG
ataacctctaaggatgacag

SEQ ID NO: 17870 - DNA, 20 bp, Artificial Sequence
  Description of Artificial Sequence: Synthetic oligonucleotide
  Target: SCNA; (-) strand; PAM type: NRG; PAM sequence: CAG
ttaataacctctaaggatga

SEQ ID NO: 17871 - DNA, 20 bp, Artificial Sequence
  Description of Artificial Sequence: Synthetic oligonucleotide
  Target: SCNA; (-) strand; PAM type: NRG; PAM sequence: AGG
tgagttgttaataacctcta

SEQ ID NO: 17872 - DNA, 20 bp, Artificial Sequence
  Description of Artificial Sequence: Synthetic oligonucleotide
  Target: SCNA; (-) strand; PAM type: NRG; PAM sequence: AAG
ttgagttgttaataacctct

SEQ ID NO: 17873 - DNA, 20 bp, Artificial Sequence
  Description of Artificial Sequence: Synthetic oligonucleotide
  Target: SCNA; (-) strand; PAM type: NRG; PAM sequence: GAG
tggatgtaattcactacttt

SEQ ID NO: 17874 - DNA, 20 bp, Artificial Sequence
  Description of Artificial Sequence: Synthetic oligonucleotide
  Target: SCNA; (-) strand; PAM type: NRG; PAM sequence: TGG
atacaaaagcaccctttagt

SEQ ID NO: 17875 - DNA, 20 bp, Artificial Sequence
  Description of Artificial Sequence: Synthetic oligonucleotide
  Target: SCNA; (-) strand; PAM type: NRG; PAM sequence: TAG
gtctatacaaaagcaccctt

SEQ ID NO: 17876 - DNA, 20 bp, Artificial Sequence
  Description of Artificial Sequence: Synthetic oligonucleotide
  Target: SCNA; (-) strand; PAM type: NRG; PAM sequence: AAG
aagaacaaatgtctatacaa

SEQ ID NO: 17877 - DNA, 20 bp, Artificial Sequence
  Description of Artificial Sequence: Synthetic oligonucleotide
  Target: SCNA; (-) strand; PAM type: NRG; PAM sequence: AAG
aagaataagtgaccagcaat

SEQ ID NO: 17878 - DNA, 20 bp, Artificial Sequence
  Description of Artificial Sequence: Synthetic oligonucleotide
  Target: SCNA; (-) strand; PAM type: NRG; PAM sequence: CAG
atatttgaagaataagtgac

SEQ ID NO: 17879 - DNA, 20 bp, Artificial Sequence
  Description of Artificial Sequence: Synthetic oligonucleotide
  Target: SCNA; (-) strand; PAM type: NRG; PAM sequence: AAG
ctaaaagatatttgaagaat

SEQ ID NO: 17880 - DNA, 20 bp, Artificial Sequence
  Description of Artificial Sequence: Synthetic oligonucleotide
  Target: SCNA; (-) strand; PAM type: NRG; PAM sequence: AAG
tggtgcctaaaagatatttg

SEQ ID NO: 17881 - DNA, 20 bp, Artificial Sequence
  Description of Artificial Sequence: Synthetic oligonucleotide
  Target: SCNA; (-) strand; PAM type: NRG; PAM sequence: AAG
tctttgtaaatggtgcctaa

SEQ ID NO: 17882 - DNA, 20 bp, Artificial Sequence
  Description of Artificial Sequence: Synthetic oligonucleotide
  Target: SCNA; (-) strand; PAM type: NRG; PAM sequence: TGG
cctctggtcatctttgtaaa

SEQ ID NO: 17883 - DNA, 20 bp, Artificial Sequence
  Description of Artificial Sequence: Synthetic oligonucleotide
  Target: SCNA; (-) strand; PAM type: NRG; PAM sequence: TGG
atatgcagattttgtacctc

SEQ ID NO: 17884 - DNA, 20 bp, Artificial Sequence
  Description of Artificial Sequence: Synthetic oligonucleotide
  Target: SCNA; (-) strand; PAM type: NRG; PAM sequence: CAG
ggctctttctattatatatg

SEQ ID NO: 17885 - DNA, 20 bp, Artificial Sequence
  Description of Artificial Sequence: Synthetic oligonucleotide
  Target: SCNA; (-) strand; PAM type: NRG; PAM sequence: TGG
tcttttattgaatgactacc

SEQ ID NO: 17886 - DNA, 20 bp, Artificial Sequence
  Description of Artificial Sequence: Synthetic oligonucleotide
  Target: SCNA; (-) strand; PAM type: NRG; PAM sequence: TGG
ctaagataaaaatcttttcc

SEQ ID NO: 17887 - DNA, 20 bp, Artificial Sequence
  Description of Artificial Sequence: Synthetic oligonucleotide
  Target: SCNA; (-) strand; PAM type: NRG; PAM sequence: AAG
aattcagactgccttaggct

SEQ ID NO: 17888 - DNA, 20 bp, Artificial Sequence
  Description of Artificial Sequence: Synthetic oligonucleotide
  Target: SCNA; (-) strand; PAM type: NRG; PAM sequence: AGG
ttgagaattcagactgcctt

SEQ ID NO: 17889 - DNA, 20 bp, Artificial Sequence
  Description of Artificial Sequence: Synthetic oligonucleotide
  Target: SCNA; (-) strand; PAM type: NRG; PAM sequence: TAG
cttgagaattcagactgcct

SEQ ID NO: 17890 - DNA, 20 bp, Artificial Sequence
  Description of Artificial Sequence: Synthetic oligonucleotide
  Target: SCNA; (-) strand; PAM type: NRG; PAM sequence: CAG
gtgctttgggcttgagaatt

SEQ ID NO: 17891 - DNA, 20 bp, Artificial Sequence
  Description of Artificial Sequence: Synthetic oligonucleotide
  Target: SCNA; (-) strand; PAM type: NRG; PAM sequence: GAG
aatttatgtgctttgggctt

SEQ ID NO: 17892 - DNA, 20 bp, Artificial Sequence
  Description of Artificial Sequence: Synthetic oligonucleotide
  Target: SCNA; (-) strand; PAM type: NRG; PAM sequence: GGG
ccaacaaatttatgtgcttt

SEQ ID NO: 17893 - DNA, 20 bp, Artificial Sequence
  Description of Artificial Sequence: Synthetic oligonucleotide
  Target: SCNA; (-) strand; PAM type: NRG; PAM sequence: TGG
tccaacaaatttatgtgctt

SEQ ID NO: 17894 - DNA, 20 bp, Artificial Sequence
  Description of Artificial Sequence: Synthetic oligonucleotide
  Target: SCNA; (-) strand; PAM type: NRG; PAM sequence: TAG
tgcgtcacatttttagtgac

SEQ ID NO: 17895 - DNA, 20 bp, Artificial Sequence
  Description of Artificial Sequence: Synthetic oligonucleotide
  Target: SCNA; (-) strand; PAM type: NRG; PAM sequence: TAG
gtaaatgtgcgtcacatttt

SEQ ID NO: 17896 - DNA, 20 bp, Artificial Sequence
  Description of Artificial Sequence: Synthetic oligonucleotide
  Target: SCNA; (-) strand; PAM type: NRG; PAM sequence: TGG
gaagtaatcaaccgaaccac

SEQ ID NO: 17897 - DNA, 20 bp, Artificial Sequence
  Description of Artificial Sequence: Synthetic oligonucleotide
  Target: SCNA; (-) strand; PAM type: NRG; PAM sequence: AAG
aagagactagggctgaagag

SEQ ID NO: 17898 - DNA, 20 bp, Artificial Sequence
  Description of Artificial Sequence: Synthetic oligonucleotide
  Target: SCNA; (-) strand; PAM type: NRG; PAM sequence: GAG
cttaagagactagggctgaa

SEQ ID NO: 17899 - DNA, 20 bp, Artificial Sequence
  Description of Artificial Sequence: Synthetic oligonucleotide
  Target: SCNA; (-) strand; PAM type: NRG; PAM sequence: AAG
tgcttaagagactagggctg

SEQ ID NO: 17900 - DNA, 20 bp, Artificial Sequence
  Description of Artificial Sequence: Synthetic oligonucleotide
  Target: SCNA; (-) strand; PAM type: NRG; PAM sequence: GGG
tacctgtgcttaagagacta

SEQ ID NO: 17901 - DNA, 20 bp, Artificial Sequence
  Description of Artificial Sequence: Synthetic oligonucleotide
  Target: SCNA; (-) strand; PAM type: NRG; PAM sequence: AGG
atacctgtgcttaagagact

SEQ ID NO: 17902 - DNA, 20 bp, Artificial Sequence
  Description of Artificial Sequence: Synthetic oligonucleotide
  Target: SCNA; (-) strand; PAM type: NRG; PAM sequence: TAG
tatacctgtgcttaagagac

SEQ ID NO: 17903 - DNA, 20 bp, Artificial Sequence
  Description of Artificial Sequence: Synthetic oligonucleotide
  Target: SCNA; (-) strand; PAM type: NRG; PAM sequence: GAG
gtgtgtatacctgtgcttaa

SEQ ID NO: 17904 - DNA, 20 bp, Artificial Sequence
  Description of Artificial Sequence: Synthetic oligonucleotide
  Target: SCNA; (-) strand; PAM type: NRG; PAM sequence: AAG
aagtgtgtatacctgtgctt

SEQ ID NO: 17905 - DNA, 20 bp, Artificial Sequence
  Description of Artificial Sequence: Synthetic oligonucleotide
  Target: SCNA; (-) strand; PAM type: NRG; PAM sequence: AAG
gtatgcagagatattgctgt

SEQ ID NO: 17906 - DNA, 20 bp, Artificial Sequence
  Description of Artificial Sequence: Synthetic oligonucleotide
  Target: SCNA; (-) strand; PAM type: NRG; PAM sequence: GAG
tgtcaaaaatattgtatgca

SEQ ID NO: 17907 - DNA, 20 bp, Artificial Sequence
  Description of Artificial Sequence: Synthetic oligonucleotide
  Target: SCNA; (-) strand; PAM type: NRG; PAM sequence: CAG
tctgtcaaaaatattgtatg

SEQ ID NO: 17908 - DNA, 20 bp, Artificial Sequence
  Description of Artificial Sequence: Synthetic oligonucleotide
  Target: SCNA; (-) strand; PAM type: NRG; PAM sequence: CAG
agaatttttataaaccattt

SEQ ID NO: 17909 - DNA, 20 bp, Artificial Sequence
  Description of Artificial Sequence: Synthetic oligonucleotide
  Target: SCNA; (-) strand; PAM type: NRG; PAM sequence: TAG
tcatgaatttcttatagtca

SEQ ID NO: 17910 - DNA, 20 bp, Artificial Sequence
  Description of Artificial Sequence: Synthetic oligonucleotide
  Target: SCNA; (-) strand; PAM type: NRG; PAM sequence: TAG
cattcctcatgaatttctta

SEQ ID NO: 17911 - DNA, 20 bp, Artificial Sequence
  Description of Artificial Sequence: Synthetic oligonucleotide
  Target: SCNA; (-) strand; PAM type: NRG; PAM sequence: AAG
acacgcatcctttttatgta

SEQ ID NO: 17912 - DNA, 20 bp, Artificial Sequence
  Description of Artificial Sequence: Synthetic oligonucleotide
  Target: SCNA; (-) strand; PAM type: NRG; PAM sequence: CAG
acacatttgtcactagattc

SEQ ID NO: 17913 - DNA, 20 bp, Artificial Sequence
  Description of Artificial Sequence: Synthetic oligonucleotide
  Target: SCNA; (-) strand; PAM type: NRG; PAM sequence: TAG
aaaagtgacacatttgtcac

SEQ ID NO: 17914 - DNA, 20 bp, Artificial Sequence
  Description of Artificial Sequence: Synthetic oligonucleotide
  Target: SCNA; (-) strand; PAM type: NRG; PAM sequence: AAG
tgaatcaagcacaccttaaa

SEQ ID NO: 17915 - DNA, 20 bp, Artificial Sequence
  Description of Artificial Sequence: Synthetic oligonucleotide
  Target: SCNA; (-) strand; PAM type: NRG; PAM sequence: AAG
aaagctgtcagctgtgaatc

SEQ ID NO: 17916 - DNA, 20 bp, Artificial Sequence
  Description of Artificial Sequence: Synthetic oligonucleotide
  Target: SCNA; (-) strand; PAM type: NRG; PAM sequence: CAG
caatttcaaatcaaagctgt

SEQ ID NO: 17917 - DNA, 20 bp, Artificial Sequence
  Description of Artificial Sequence: Synthetic oligonucleotide
  Target: SCNA; (-) strand; PAM type: NRG; PAM sequence: AAG
ttaaaggcaatttcaaatca

SEQ ID NO: 17918 - DNA, 20 bp, Artificial Sequence
  Description of Artificial Sequence: Synthetic oligonucleotide
  Target: SCNA; (-) strand; PAM type: NRG; PAM sequence: AGG
atacatagacattgttttaa

SEQ ID NO: 17919 - DNA, 20 bp, Artificial Sequence
  Description of Artificial Sequence: Synthetic oligonucleotide
  Target: SCNA; (-) strand; PAM type: NRG; PAM sequence: AAG
gatacatagacattgtttta

SEQ ID NO: 17920 - DNA, 20 bp, Artificial Sequence
  Description of Artificial Sequence: Synthetic oligonucleotide
  Target: SCNA; (-) strand; PAM type: NRG; PAM sequence: TAG
gaattcattgcactgataca

SEQ ID NO: 17921 - DNA, 20 bp, Artificial Sequence
  Description of Artificial Sequence: Synthetic oligonucleotide
  Target: SCNA; (-) strand; PAM type: NRG; PAM sequence: TAG
agctccaacaagcttttggt

SEQ ID NO: 17922 - DNA, 20 bp, Artificial Sequence
  Description of Artificial Sequence: Synthetic oligonucleotide
  Target: SCNA; (-) strand; PAM type: NRG; PAM sequence: TGG
ggttagctccaacaagcttt

SEQ ID NO: 17923 - DNA, 20 bp, Artificial Sequence
  Description of Artificial Sequence: Synthetic oligonucleotide
  Target: SCNA; (-) strand; PAM type: NRG; PAM sequence: AAG
gtactgtggttagctccaac

SEQ ID NO: 17924 - DNA, 20 bp, Artificial Sequence
  Description of Artificial Sequence: Synthetic oligonucleotide
  Target: SCNA; (-) strand; PAM type: NRG; PAM sequence: TAG
gaatatataggtactgtggt

SEQ ID NO: 17925 - DNA, 20 bp, Artificial Sequence
  Description of Artificial Sequence: Synthetic oligonucleotide
  Target: SCNA; (-) strand; PAM type: NRG; PAM sequence: TGG
tcttgaatatataggtactg

SEQ ID NO: 17926 - DNA, 20 bp, Artificial Sequence
  Description of Artificial Sequence: Synthetic oligonucleotide
  Target: SCNA; (-) strand; PAM type: NRG; PAM sequence: AGG
catgaacatcttgaatatat

SEQ ID NO: 17927 - DNA, 20 bp, Artificial Sequence
  Description of Artificial Sequence: Synthetic oligonucleotide
  Target: SCNA; (-) strand; PAM type: NRG; PAM sequence: TAG
ccatgaacatcttgaatata

SEQ ID NO: 17928 - DNA, 20 bp, Artificial Sequence
  Description of Artificial Sequence: Synthetic oligonucleotide
  Target: SCNA; (-) strand; PAM type: NRG; PAM sequence: CAG
taactatcatagcaaccctt

SEQ ID NO: 17929 - DNA, 20 bp, Artificial Sequence
  Description of Artificial Sequence: Synthetic oligonucleotide
  Target: SCNA; (-) strand; PAM type: NRG; PAM sequence: TAG
attgtgtataataactatca

SEQ ID NO: 17930 - DNA, 20 bp, Artificial Sequence
  Description of Artificial Sequence: Synthetic oligonucleotide
  Target: SCNA; (-) strand; PAM type: NRG; PAM sequence: TAG
tattttataacatttaataa

SEQ ID NO: 17931 - DNA, 20 bp, Artificial Sequence
  Description of Artificial Sequence: Synthetic oligonucleotide
  Target: SCNA; (-) strand; PAM type: NRG; PAM sequence: TAG
cttgtagtttataaattaca

SEQ ID NO: 17932 - DNA, 20 bp, Artificial Sequence
  Description of Artificial Sequence: Synthetic oligonucleotide
  Target: SCNA; (-) strand; PAM type: NRG; PAM sequence: TAG
tcctgatataaattttcttg

SEQ ID NO: 17933 - DNA, 20 bp, Artificial Sequence
  Description of Artificial Sequence: Synthetic oligonucleotide
  Target: SCNA; (-) strand; PAM type: NRG; PAM sequence: CAG
tgcatatattaggaaataag

SEQ ID NO: 17934 - DNA, 20 bp, Artificial Sequence
  Description of Artificial Sequence: Synthetic oligonucleotide
  Target: SCNA; (-) strand; PAM type: NRG; PAM sequence: AAG
cagtgcatatattaggaaat

SEQ ID NO: 17935 - DNA, 20 bp, Artificial Sequence
  Description of Artificial Sequence: Synthetic oligonucleotide
  Target: SCNA; (-) strand; PAM type: NRG; PAM sequence: AGG
ctgaagacagtgcatatatt

SEQ ID NO: 17936 - DNA, 20 bp, Artificial Sequence
  Description of Artificial Sequence: Synthetic oligonucleotide
  Target: SCNA; (-) strand; PAM type: NRG; PAM sequence: TAG
actgaagacagtgcatatat

SEQ ID NO: 17937 - DNA, 20 bp, Artificial Sequence
  Description of Artificial Sequence: Synthetic oligonucleotide
  Target: SCNA; (-) strand; PAM type: NRG; PAM sequence: CAG
agttttggagacactgaaga

SEQ ID NO: 17938 - DNA, 20 bp, Artificial Sequence
  Description of Artificial Sequence: Synthetic oligonucleotide
  Target: SCNA; (-) strand; PAM type: NRG; PAM sequence: AAG
tgacagttttggagacactg

SEQ ID NO: 17939 - DNA, 20 bp, Artificial Sequence
  Description of Artificial Sequence: Synthetic oligonucleotide
  Target: SCNA; (-) strand; PAM type: NRG; PAM sequence: GAG
tggcagagttgacagttttg

SEQ ID NO: 17940 - DNA, 20 bp, Artificial Sequence
  Description of Artificial Sequence: Synthetic oligonucleotide
  Target: SCNA; (-) strand; PAM type: NRG; PAM sequence: TGG
attggcagagttgacagttt

SEQ ID NO: 17941 - DNA, 20 bp, Artificial Sequence
  Description of Artificial Sequence: Synthetic oligonucleotide
  Target: SCNA; (-) strand; PAM type: NRG; PAM sequence: CAG
agtcacattggcagagttga

SEQ ID NO: 17942 - DNA, 20 bp, Artificial Sequence
  Description of Artificial Sequence: Synthetic oligonucleotide
  Target: SCNA; (-) strand; PAM type: NRG; PAM sequence: GAG
atctgctagtcacattggca

SEQ ID NO: 17943 - DNA, 20 bp, Artificial Sequence
  Description of Artificial Sequence: Synthetic oligonucleotide
  Target: SCNA; (-) strand; PAM type: NRG; PAM sequence: CAG
tcatctgctagtcacattgg

SEQ ID NO: 17944 - DNA, 20 bp, Artificial Sequence
  Description of Artificial Sequence: Synthetic oligonucleotide
  Target: SCNA; (-) strand; PAM type: NRG; PAM sequence: TGG
tcatcatctgctagtcacat

SEQ ID NO: 17945 - DNA, 20 bp, Artificial Sequence
  Description of Artificial Sequence: Synthetic oligonucleotide
  Target: SCNA; (-) strand; PAM type: NRG; PAM sequence: TAG
actgcctgctcatcatctgc

SEQ ID NO: 17946 - DNA, 20 bp, Artificial Sequence
  Description of Artificial Sequence: Synthetic oligonucleotide
  Target: SCNA; (-) strand; PAM type: NRG; PAM sequence: CGG
atgtaattgataatatcaca

SEQ ID NO: 17947 - DNA, 20 bp, Artificial Sequence
  Description of Artificial Sequence: Synthetic oligonucleotide
  Target: SCNA; (-) strand; PAM type: NRG; PAM sequence: CAG
cataaggtgaaagaaagact

SEQ ID NO: 17948 - DNA, 20 bp, Artificial Sequence
  Description of Artificial Sequence: Synthetic oligonucleotide
  Target: SCNA; (-) strand; PAM type: NRG; PAM sequence: AAG
acagctcataaggtgaaaga

SEQ ID NO: 17949 - DNA, 20 bp, Artificial Sequence
  Description of Artificial Sequence: Synthetic oligonucleotide
  Target: SCNA; (-) strand; PAM type: NRG; PAM sequence: AAG
ctaaacagctcataaggtga

SEQ ID NO: 17950 - DNA, 20 bp, Artificial Sequence
  Description of Artificial Sequence: Synthetic oligonucleotide
  Target: SCNA; (-) strand; PAM type: NRG; PAM sequence: AGG
ttcttcctaaacagctcata

SEQ ID NO: 17951 - DNA, 20 bp, Artificial Sequence
  Description of Artificial Sequence: Synthetic oligonucleotide
  Target: SCNA; (-) strand; PAM type: NRG; PAM sequence: AAG
cttcttcctaaacagctcat

SEQ ID NO: 17952 - DNA, 20 bp, Artificial Sequence
  Description of Artificial Sequence: Synthetic oligonucleotide
  Target: SCNA; (-) strand; PAM type: NRG; PAM sequence: CAG
atatacaccttcttcctaaa

SEQ ID NO: 17953 - DNA, 20 bp, Artificial Sequence
  Description of Artificial Sequence: Synthetic oligonucleotide
  Target: SCNA; (-) strand; PAM type: NRG; PAM sequence: AAG
tgcatcagataatggcttac

SEQ ID NO: 17954 - DNA, 20 bp, Artificial Sequence
  Description of Artificial Sequence: Synthetic oligonucleotide
  Target: SCNA; (-) strand; PAM type: NRG; PAM sequence: TGG
tctgcctttgcatcagataa

SEQ ID NO: 17955 - DNA, 20 bp, Artificial Sequence
  Description of Artificial Sequence: Synthetic oligonucleotide
  Target: SCNA; (-) strand; PAM type: NRG; PAM sequence: CAG
gtaaatgtctgcctttgcat

SEQ ID NO: 17956 - DNA, 20 bp, Artificial Sequence
  Description of Artificial Sequence: Synthetic oligonucleotide
  Target: SCNA; (-) strand; PAM type: NRG; PAM sequence: TAG
ccatctcttcacagatgact

SEQ ID NO: 17957 - DNA, 20 bp, Artificial Sequence
  Description of Artificial Sequence: Synthetic oligonucleotide
  Target: SCNA; (-) strand; PAM type: NRG; PAM sequence: CAG
attatcgaaccatctcttca

SEQ ID NO: 17958 - DNA, 20 bp, Artificial Sequence
  Description of Artificial Sequence: Synthetic oligonucleotide
  Target: SCNA; (-) strand; PAM type: NRG; PAM sequence: TAG
tgaagatttatatgaatgct

SEQ ID NO: 17959 - DNA, 20 bp, Artificial Sequence
  Description of Artificial Sequence: Synthetic oligonucleotide
  Target: SCNA; (-) strand; PAM type: NRG; PAM sequence: AAG
tgagagaattcgagtccctg

SEQ ID NO: 17960 - DNA, 20 bp, Artificial Sequence
  Description of Artificial Sequence: Synthetic oligonucleotide
  Target: SCNA; (-) strand; PAM type: NRG; PAM sequence: GAG
tgtcacacttgagagaattc

SEQ ID NO: 17961 - DNA, 20 bp, Artificial Sequence
  Description of Artificial Sequence: Synthetic oligonucleotide
  Target: SCNA; (-) strand; PAM type: NRG; PAM sequence: GAG
gagtattctgtcacacttga

SEQ ID NO: 17962 - DNA, 20 bp, Artificial Sequence
  Description of Artificial Sequence: Synthetic oligonucleotide
  Target: SCNA; (-) strand; PAM type: NRG; PAM sequence: GAG
aggagtattctgtcacactt

SEQ ID NO: 17963 - DNA, 20 bp, Artificial Sequence
  Description of Artificial Sequence: Synthetic oligonucleotide
  Target: SCNA; (-) strand; PAM type: NRG; PAM sequence: GAG
ggagcgctggcagttgagag

SEQ ID NO: 17964 - DNA, 20 bp, Artificial Sequence
  Description of Artificial Sequence: Synthetic oligonucleotide
  Target: SCNA; (-) strand; PAM type: NRG; PAM sequence: AGG
caggagcgctggcagttgag

SEQ ID NO: 17965 - DNA, 20 bp, Artificial Sequence
  Description of Artificial Sequence: Synthetic oligonucleotide
  Target: SCNA; (-) strand; PAM type: NRG; PAM sequence: GAG
acaggagcgctggcagttga

SEQ ID NO: 17966 - DNA, 20 bp, Artificial Sequence
  Description of Artificial Sequence: Synthetic oligonucleotide
  Target: SCNA; (-) strand; PAM type: NRG; PAM sequence: GAG
caacaggagcgctggcagtt

SEQ ID NO: 17967 - DNA, 20 bp, Artificial Sequence
  Description of Artificial Sequence: Synthetic oligonucleotide
  Target: SCNA; (-) strand; PAM type: NRG; PAM sequence: CAG
ttttacaacaggagcgctgg

SEQ ID NO: 17968 - DNA, 20 bp, Artificial Sequence
  Description of Artificial Sequence: Synthetic oligonucleotide
  Target: SCNA; (-) strand; PAM type: NRG; PAM sequence: TGG
attttttacaacaggagcgc

SEQ ID NO: 17969 - DNA, 20 bp, Artificial Sequence
  Description of Artificial Sequence: Synthetic oligonucleotide
  Target: SCNA; (-) strand; PAM type: NRG; PAM sequence: GAG
aatgtgattttttacaacag

SEQ ID NO: 17970 - DNA, 20 bp, Artificial Sequence
  Description of Artificial Sequence: Synthetic oligonucleotide
  Target: SCNA; (-) strand; PAM type: NRG; PAM sequence: AGG
caaatgtgattttttacaac

SEQ ID NO: 17971 - DNA, 20 bp, Artificial Sequence
  Description of Artificial Sequence: Synthetic oligonucleotide
  Target: SCNA; (-) strand; PAM type: NRG; PAM sequence: CAG
ccaaatgtgattttttacaa

SEQ ID NO: 17972 - DNA, 20 bp, Artificial Sequence
  Description of Artificial Sequence: Synthetic oligonucleotide
  Target: SCNA; (-) strand; PAM type: NRG; PAM sequence: GAG
gagcagaactcaaaacacca

SEQ ID NO: 17973 - DNA, 20 bp, Artificial Sequence
  Description of Artificial Sequence: Synthetic oligonucleotide
  Target: SCNA; (-) strand; PAM type: NRG; PAM sequence: CAG
ctgagcagaactcaaaacac

SEQ ID NO: 17974 - DNA, 20 bp, Artificial Sequence
  Description of Artificial Sequence: Synthetic oligonucleotide
  Target: SCNA; (-) strand; PAM type: NRG; PAM sequence: CAG
aaaacaaacctgtcactgag

SEQ ID NO: 17975 - DNA, 20 bp, Artificial Sequence
  Description of Artificial Sequence: Synthetic oligonucleotide
  Target: SCNA; (-) strand; PAM type: NRG; PAM sequence: GAG
cttaaaacaaacctgtcact

SEQ ID NO: 17976 - DNA, 20 bp, Artificial Sequence
  Description of Artificial Sequence: Synthetic oligonucleotide
  Target: SCNA; (-) strand; PAM type: NRG; PAM sequence: CAG
gaaggtcattttattgtcct

SEQ ID NO: 17977 - DNA, 20 bp, Artificial Sequence
  Description of Artificial Sequence: Synthetic oligonucleotide
  Target: SCNA; (-) strand; PAM type: NRG; PAM sequence: AGG
ttaaaaggagtcttaattga

SEQ ID NO: 17978 - DNA, 20 bp, Artificial Sequence
  Description of Artificial Sequence: Synthetic oligonucleotide
  Target: SCNA; (-) strand; PAM type: NRG; PAM sequence: AAG
tttaaaaggagtcttaattg

SEQ ID NO: 17979 - DNA, 20 bp, Artificial Sequence
  Description of Artificial Sequence: Synthetic oligonucleotide
  Target: SCNA; (-) strand; PAM type: NRG; PAM sequence: GAG
aggtagacaaaatttaaaag

SEQ ID NO: 17980 - DNA, 20 bp, Artificial Sequence
  Description of Artificial Sequence: Synthetic oligonucleotide
  Target: SCNA; (-) strand; PAM type: NRG; PAM sequence: AGG
tcaggtagacaaaatttaaa

SEQ ID NO: 17981 - DNA, 20 bp, Artificial Sequence
  Description of Artificial Sequence: Synthetic oligonucleotide
  Target: SCNA; (-) strand; PAM type: NRG; PAM sequence: AAG
atcaggtagacaaaatttaa

SEQ ID NO: 17982 - DNA, 20 bp, Artificial Sequence
  Description of Artificial Sequence: Synthetic oligonucleotide
  Target: SCNA; (-) strand; PAM type: NRG; PAM sequence: TAG
gaaccatagtggaaatcagg

SEQ ID NO: 17983 - DNA, 20 bp, Artificial Sequence
  Description of Artificial Sequence: Synthetic oligonucleotide
  Target: SCNA; (-) strand; PAM type: NRG; PAM sequence: AGG
cacgaaccatagtggaaatc

SEQ ID NO: 17984 - DNA, 20 bp, Artificial Sequence
  Description of Artificial Sequence: Synthetic oligonucleotide
  Target: SCNA; (-) strand; PAM type: NRG; PAM sequence: CAG
acacgaaccatagtggaaat

SEQ ID NO: 17985 - DNA, 20 bp, Artificial Sequence
  Description of Artificial Sequence: Synthetic oligonucleotide
  Target: SCNA; (-) strand; PAM type: NRG; PAM sequence: TGG
cagctagacacgaaccatag

SEQ ID NO: 17986 - DNA, 20 bp, Artificial Sequence
  Description of Artificial Sequence: Synthetic oligonucleotide
  Target: SCNA; (-) strand; PAM type: NRG; PAM sequence: TAG
gtacagctagacacgaacca

SEQ ID NO: 17987 - DNA, 20 bp, Artificial Sequence
  Description of Artificial Sequence: Synthetic oligonucleotide
  Target: SCNA; (-) strand; PAM type: NRG; PAM sequence: TAG
attcttagatagagtacagc

SEQ ID NO: 17988 - DNA, 20 bp, Artificial Sequence
  Description of Artificial Sequence: Synthetic oligonucleotide
  Target: SCNA; (-) strand; PAM type: NRG; PAM sequence: CAG
gatcattcttagatagagta

SEQ ID NO: 17989 - DNA, 20 bp, Artificial Sequence
  Description of Artificial Sequence: Synthetic oligonucleotide
  Target: SCNA; (-) strand; PAM type: NRG; PAM sequence: GAG
ttaaagatcattcttagata

SEQ ID NO: 17990 - DNA, 20 bp, Artificial Sequence
  Description of Artificial Sequence: Synthetic oligonucleotide
  Target: SCNA; (-) strand; PAM type: NRG; PAM sequence: TAG
ttttaaagatcattcttaga

SEQ ID NO: 17991 - DNA, 20 bp, Artificial Sequence
  Description of Artificial Sequence: Synthetic oligonucleotide
  Target: SCNA; (-) strand; PAM type: NRG; PAM sequence: TAG
aatgttttaaagatcattct

SEQ ID NO: 17992 - DNA, 20 bp, Artificial Sequence
  Description of Artificial Sequence: Synthetic oligonucleotide
  Target: SCNA; (-) strand; PAM type: NRG; PAM sequence: AAG
tcataatcctgaatgtttta

SEQ ID NO: 17993 - DNA, 20 bp, Artificial Sequence
  Description of Artificial Sequence: Synthetic oligonucleotide
  Target: SCNA; (-) strand; PAM type: NRG; PAM sequence: TAG
ggttatttcctatgacttcc

SEQ ID NO: 17994 - DNA, 20 bp, Artificial Sequence
  Description of Artificial Sequence: Synthetic oligonucleotide
  Target: SCNA; (-) strand; PAM type: NRG; PAM sequence: TGG
tacagaacagcattgaatag

SEQ ID NO: 17995 - DNA, 20 bp, Artificial Sequence
  Description of Artificial Sequence: Synthetic oligonucleotide
  Target: SCNA; (-) strand; PAM type: NRG; PAM sequence: TAG
gtgtacagaacagcattgaa

SEQ ID NO: 17996 - DNA, 20 bp, Artificial Sequence
  Description of Artificial Sequence: Synthetic oligonucleotide
  Target: SCNA; (-) strand; PAM type: NRG; PAM sequence: CAG
tttactaatggtgtacagaa

SEQ ID NO: 17997 - DNA, 20 bp, Artificial Sequence
  Description of Artificial Sequence: Synthetic oligonucleotide
  Target: SCNA; (-) strand; PAM type: NRG; PAM sequence: CAG
tatggtttactaatggtgta

SEQ ID NO: 17998 - DNA, 20 bp, Artificial Sequence
  Description of Artificial Sequence: Synthetic oligonucleotide
  Target: SCNA; (-) strand; PAM type: NRG; PAM sequence: TGG
cctctcttatggtttactaa

SEQ ID NO: 17999 - DNA, 20 bp, Artificial Sequence
  Description of Artificial Sequence: Synthetic oligonucleotide
  Target: SCNA; (-) strand; PAM type: NRG; PAM sequence: TGG
taaatgtttgtcctctctta

SEQ ID NO: 18000 - DNA, 20 bp, Artificial Sequence
  Description of Artificial Sequence: Synthetic oligonucleotide
  Target: SCNA; (-) strand; PAM type: NRG; PAM sequence: TGG
ctatgtaatagtctctttct

SEQ ID NO: 18001 - DNA, 20 bp, Artificial Sequence
  Description of Artificial Sequence: Synthetic oligonucleotide
  Target: SCNA; (-) strand; PAM type: NRG; PAM sequence: TAG
gggtcctggtggctatgtaa

SEQ ID NO: 18002 - DNA, 20 bp, Artificial Sequence
  Description of Artificial Sequence: Synthetic oligonucleotide
  Target: SCNA; (-) strand; PAM type: NRG; PAM sequence: TGG
gaatccatattgggtcctgg

SEQ ID NO: 18003 - DNA, 20 bp, Artificial Sequence
  Description of Artificial Sequence: Synthetic oligonucleotide
  Target: SCNA; (-) strand; PAM type: NRG; PAM sequence: TGG
gctgaatccatattgggtcc

SEQ ID NO: 18004 - DNA, 20 bp, Artificial Sequence
  Description of Artificial Sequence: Synthetic oligonucleotide
  Target: SCNA; (-) strand; PAM type: NRG; PAM sequence: GGG
aattgtgctgaatccatatt

SEQ ID NO: 18005 - DNA, 20 bp, Artificial Sequence
  Description of Artificial Sequence: Synthetic oligonucleotide
  Target: SCNA; (-) strand; PAM type: NRG; PAM sequence: TGG
caattgtgctgaatccatat

SEQ ID NO: 18006 - DNA, 20 bp, Artificial Sequence
  Description of Artificial Sequence: Synthetic oligonucleotide
  Target: SCNA; (-) strand; PAM type: NRG; PAM sequence: CAG
ttttagactaagcaattgag

SEQ ID NO: 18007 - DNA, 20 bp, Artificial Sequence
  Description of Artificial Sequence: Synthetic oligonucleotide
  Target: SCNA; (-) strand; PAM type: NRG; PAM sequence: GAG
gaattttagactaagcaatt

SEQ ID NO: 18008 - DNA, 20 bp, Artificial Sequence
  Description of Artificial Sequence: Synthetic oligonucleotide
  Target: SCNA; (-) strand; PAM type: NRG; PAM sequence: AAG
ttgagggagaattttagact

SEQ ID NO: 18009 - DNA, 20 bp, Artificial Sequence
  Description of Artificial Sequence: Synthetic oligonucleotide
  Target: SCNA; (-) strand; PAM type: NRG; PAM sequence: TAG
aaggaattgagggagaattt

SEQ ID NO: 18010 - DNA, 20 bp, Artificial Sequence
  Description of Artificial Sequence: Synthetic oligonucleotide
  Target: SCNA; (-) strand; PAM type: NRG; PAM sequence: GAG
gtgatgggaaggaattgagg

SEQ ID NO: 18011 - DNA, 20 bp, Artificial Sequence
  Description of Artificial Sequence: Synthetic oligonucleotide
  Target: SCNA; (-) strand; PAM type: NRG; PAM sequence: GGG
aggtgatgggaaggaattga

SEQ ID NO: 18012 - DNA, 20 bp, Artificial Sequence
  Description of Artificial Sequence: Synthetic oligonucleotide
  Target: SCNA; (-) strand; PAM type: NRG; PAM sequence: AGG
taggtgatgggaaggaattg

SEQ ID NO: 18013 - DNA, 20 bp, Artificial Sequence
  Description of Artificial Sequence: Synthetic oligonucleotide
  Target: SCNA; (-) strand; PAM type: NRG; PAM sequence: GAG
ttaggtgatgggaaggaatt

SEQ ID NO: 18014 - DNA, 20 bp, Artificial Sequence
  Description of Artificial Sequence: Synthetic oligonucleotide
  Target: SCNA; (-) strand; PAM type: NRG; PAM sequence: AGG
aaacaaattaggtgatggga

SEQ ID NO: 18015 - DNA, 20 bp, Artificial Sequence
  Description of Artificial Sequence: Synthetic oligonucleotide
  Target: SCNA; (-) strand; PAM type: NRG; PAM sequence: AAG
caaacaaattaggtgatggg

SEQ ID NO: 18016 - DNA, 20 bp, Artificial Sequence
  Description of Artificial Sequence: Synthetic oligonucleotide
  Target: SCNA; (-) strand; PAM type: NRG; PAM sequence: GGG
tgtcaaacaaattaggtgat

SEQ ID NO: 18017 - DNA, 20 bp, Artificial Sequence
  Description of Artificial Sequence: Synthetic oligonucleotide
  Target: SCNA; (-) strand; PAM type: NRG; PAM sequence: TGG
atgtcaaacaaattaggtga

SEQ ID NO: 18018 - DNA, 20 bp, Artificial Sequence
  Description of Artificial Sequence: Synthetic oligonucleotide
  Target: SCNA; (-) strand; PAM type: NRG; PAM sequence: AGG
gactagatgtcaaacaaatt

SEQ ID NO: 18019 - DNA, 20 bp, Artificial Sequence
  Description of Artificial Sequence: Synthetic oligonucleotide
  Target: SCNA; (-) strand; PAM type: NRG; PAM sequence: TAG
agactagatgtcaaacaaat

SEQ ID NO: 18020 - DNA, 20 bp, Artificial Sequence
  Description of Artificial Sequence: Synthetic oligonucleotide
  Target: SCNA; (-) strand; PAM type: NRG; PAM sequence: TAG
atattataatgtaaaaagac

SEQ ID NO: 18021 - DNA, 20 bp, Artificial Sequence
  Description of Artificial Sequence: Synthetic oligonucleotide
  Target: SCNA; (-) strand; PAM type: NRG; PAM sequence: AAG
atactatattataatgtaaa

SEQ ID NO: 18022 - DNA, 20 bp, Artificial Sequence
  Description of Artificial Sequence: Synthetic oligonucleotide
  Target: SCNA; (-) strand; PAM type: NRG; PAM sequence: AAG
tcaaaaaaaaaaaccataat

SEQ ID NO: 18023 - DNA, 20 bp, Artificial Sequence
  Description of Artificial Sequence: Synthetic oligonucleotide
  Target: SCNA; (-) strand; PAM type: NRG; PAM sequence: GAG
tccagcctgaacgacagagc

SEQ ID NO: 18024 - DNA, 20 bp, Artificial Sequence
  Description of Artificial Sequence: Synthetic oligonucleotide
  Target: SCNA; (-) strand; PAM type: NRG; PAM sequence: GAG
actctccagcctgaacgaca

SEQ ID NO: 18025 - DNA, 20 bp, Artificial Sequence
  Description of Artificial Sequence: Synthetic oligonucleotide
  Target: SCNA; (-) strand; PAM type: NRG; PAM sequence: CAG
ctactctccagcctgaacga

SEQ ID NO: 18026 - DNA, 20 bp, Artificial Sequence
  Description of Artificial Sequence: Synthetic oligonucleotide
  Target: SCNA; (-) strand; PAM type: NRG; PAM sequence: CAG
tttgcactgagcctactctc

SEQ ID NO: 18027 - DNA, 20 bp, Artificial Sequence
  Description of Artificial Sequence: Synthetic oligonucleotide
  Target: SCNA; (-) strand; PAM type: NRG; PAM sequence: GAG
caggaggcagagtttgcact

SEQ ID NO: 18028 - DNA, 20 bp, Artificial Sequence
  Description of Artificial Sequence: Synthetic oligonucleotide
  Target: SCNA; (-) strand; PAM type: NRG; PAM sequence: GAG
tggcatgaacccaggaggca

SEQ ID NO: 18029 - DNA, 20 bp, Artificial Sequence
  Description of Artificial Sequence: Synthetic oligonucleotide
  Target: SCNA; (-) strand; PAM type: NRG; PAM sequence: CAG
aatggcatgaacccaggagg

SEQ ID NO: 18030 - DNA, 20 bp, Artificial Sequence
  Description of Artificial Sequence: Synthetic oligonucleotide
  Target: SCNA; (-) strand; PAM type: NRG; PAM sequence: AGG
gagaatggcatgaacccagg

SEQ ID NO: 18031 - DNA, 20 bp, Artificial Sequence
  Description of Artificial Sequence: Synthetic oligonucleotide
  Target: SCNA; (-) strand; PAM type: NRG; PAM sequence: GAG
ggagaatggcatgaacccag

SEQ ID NO: 18032 - DNA, 20 bp, Artificial Sequence
  Description of Artificial Sequence: Synthetic oligonucleotide
  Target: SCNA; (-) strand; PAM type: NRG; PAM sequence: AGG
caggagaatggcatgaaccc

SEQ ID NO: 18033 - DNA, 20 bp, Artificial Sequence
  Description of Artificial Sequence: Synthetic oligonucleotide
  Target: SCNA; (-) strand; PAM type: NRG; PAM sequence: CAG
gcaggagaatggcatgaacc

SEQ ID NO: 18034 - DNA, 20 bp, Artificial Sequence
  Description of Artificial Sequence: Synthetic oligonucleotide
  Target: SCNA; (-) strand; PAM type: NRG; PAM sequence: TGG
gggaggctgaggcaggagaa

SEQ ID NO: 18035 - DNA, 20 bp, Artificial Sequence
  Description of Artificial Sequence: Synthetic oligonucleotide
  Target: SCNA; (-) strand; PAM type: NRG; PAM sequence: GAG
tactcgggaggctgaggcag

SEQ ID NO: 18036 - DNA, 20 bp, Artificial Sequence
  Description of Artificial Sequence: Synthetic oligonucleotide
  Target: SCNA; (-) strand; PAM type: NRG; PAM sequence: AGG
gctactcgggaggctgaggc

SEQ ID NO: 18037 - DNA, 20 bp, Artificial Sequence
  Description of Artificial Sequence: Synthetic oligonucleotide
  Target: SCNA; (-) strand; PAM type: NRG; PAM sequence: CAG
agctactcgggaggctgagg

SEQ ID NO: 18038 - DNA, 20 bp, Artificial Sequence
  Description of Artificial Sequence: Synthetic oligonucleotide
  Target: SCNA; (-) strand; PAM type: NRG; PAM sequence: AGG
cccagctactcgggaggctg

SEQ ID NO: 18039 - DNA, 20 bp, Artificial Sequence
  Description of Artificial Sequence: Synthetic oligonucleotide
  Target: SCNA; (-) strand; PAM type: NRG; PAM sequence: GAG
tcccagctactcgggaggct

SEQ ID NO: 18040 - DNA, 20 bp, Artificial Sequence
  Description of Artificial Sequence: Synthetic oligonucleotide
  Target: SCNA; (-) strand; PAM type: NRG; PAM sequence: AGG
tgtagtcccagctactcggg

SEQ ID NO: 18041 - DNA, 20 bp, Artificial Sequence
  Description of Artificial Sequence: Synthetic oligonucleotide
  Target: SCNA; (-) strand; PAM type: NRG; PAM sequence: GAG
ctgtagtcccagctactcgg

SEQ ID NO: 18042 - DNA, 20 bp, Artificial Sequence
  Description of Artificial Sequence: Synthetic oligonucleotide
  Target: SCNA; (-) strand; PAM type: NRG; PAM sequence: GGG
tcctgtagtcccagctactc

SEQ ID NO: 18043 - DNA, 20 bp, Artificial Sequence
  Description of Artificial Sequence: Synthetic oligonucleotide
  Target: SCNA; (-) strand; PAM type: NRG; PAM sequence: CGG
atcctgtagtcccagctact

SEQ ID NO: 18044 - DNA, 20 bp, Artificial Sequence
  Description of Artificial Sequence: Synthetic oligonucleotide
  Target: SCNA; (-) strand; PAM type: NRG; PAM sequence: CAG
gtggcgggatcctgtagtcc

SEQ ID NO: 18045 - DNA, 20 bp, Artificial Sequence
  Description of Artificial Sequence: Synthetic oligonucleotide
  Target: SCNA; (-) strand; PAM type: NRG; PAM sequence: TAG
gacgtggtggcgggatcctg

SEQ ID NO: 18046 - DNA, 20 bp, Artificial Sequence
  Description of Artificial Sequence: Synthetic oligonucleotide
  Target: SCNA; (-) strand; PAM type: NRG; PAM sequence: GGG
attggcccagacgtggtggc

SEQ ID NO: 18047 - DNA, 20 bp, Artificial Sequence
  Description of Artificial Sequence: Synthetic oligonucleotide
  Target: SCNA; (-) strand; PAM type: NRG; PAM sequence: CGG
aattggcccagacgtggtgg

SEQ ID NO: 18048 - DNA, 20 bp, Artificial Sequence
  Description of Artificial Sequence: Synthetic oligonucleotide
  Target: SCNA; (-) strand; PAM type: NRG; PAM sequence: TGG
aaaaattggcccagacgtgg

SEQ ID NO: 18049 - DNA, 20 bp, Artificial Sequence
  Description of Artificial Sequence: Synthetic oligonucleotide
  Target: SCNA; (-) strand; PAM type: NRG; PAM sequence: TGG
acaaaaaattggcccagacg

SEQ ID NO: 18050 - DNA, 20 bp, Artificial Sequence
  Description of Artificial Sequence: Synthetic oligonucleotide
  Target: SCNA; (-) strand; PAM type: NRG; PAM sequence: CAG
aaaaatacaaaaaattggcc

SEQ ID NO: 18051 - DNA, 20 bp, Artificial Sequence
  Description of Artificial Sequence: Synthetic oligonucleotide
  Target: SCNA; (-) strand; PAM type: NRG; PAM sequence: TGG
ttactaaaaatacaaaaaat

SEQ ID NO: 18052 - DNA, 20 bp, Artificial Sequence
  Description of Artificial Sequence: Synthetic oligonucleotide
  Target: SCNA; (-) strand; PAM type: NRG; PAM sequence: CAG
ctagctaacaccatgaaacc

SEQ ID NO: 18053 - DNA, 20 bp, Artificial Sequence
  Description of Artificial Sequence: Synthetic oligonucleotide
  Target: SCNA; (-) strand; PAM type: NRG; PAM sequence: TAG
tcaggagatcgagaccatcc

SEQ ID NO: 18054 - DNA, 20 bp, Artificial Sequence
  Description of Artificial Sequence: Synthetic oligonucleotide
  Target: SCNA; (-) strand; PAM type: NRG; PAM sequence: GAG
aatcatgaggtcaggagatc

SEQ ID NO: 18055 - DNA, 20 bp, Artificial Sequence
  Description of Artificial Sequence: Synthetic oligonucleotide
  Target: SCNA; (-) strand; PAM type: NRG; PAM sequence: GAG
tgggcaaatcatgaggtcag

SEQ ID NO: 18056 - DNA, 20 bp, Artificial Sequence
  Description of Artificial Sequence: Synthetic oligonucleotide
  Target: SCNA; (-) strand; PAM type: NRG; PAM sequence: AGG
ggtgggcaaatcatgaggtc

SEQ ID NO: 18057 - DNA, 20 bp, Artificial Sequence
  Description of Artificial Sequence: Synthetic oligonucleotide
  Target: SCNA; (-) strand; PAM type: NRG; PAM sequence: CAG
aggtgggcaaatcatgaggt

SEQ ID NO: 18058 - DNA, 20 bp, Artificial Sequence
  Description of Artificial Sequence: Synthetic oligonucleotide
  Target: SCNA; (-) strand; PAM type: NRG; PAM sequence: AGG
gccaaggtgggcaaatcatg

SEQ ID NO: 18059 - DNA, 20 bp, Artificial Sequence
  Description of Artificial Sequence: Synthetic oligonucleotide
  Target: SCNA; (-) strand; PAM type: NRG; PAM sequence: GAG
ggccaaggtgggcaaatcat

SEQ ID NO: 18060 - DNA, 20 bp, Artificial Sequence
  Description of Artificial Sequence: Synthetic oligonucleotide
  Target: SCNA; (-) strand; PAM type: NRG; PAM sequence: GGG
gcattttgggaggccaaggt

SEQ ID NO: 18061 - DNA, 20 bp, Artificial Sequence
  Description of Artificial Sequence: Synthetic oligonucleotide
  Target: SCNA; (-) strand; PAM type: NRG; PAM sequence: TGG
agcattttgggaggccaagg

SEQ ID NO: 18062 - DNA, 20 bp, Artificial Sequence
  Description of Artificial Sequence: Synthetic oligonucleotide
  Target: SCNA; (-) strand; PAM type: NRG; PAM sequence: AGG
ctcagcattttgggaggcca

SEQ ID NO: 18063 - DNA, 20 bp, Artificial Sequence
  Description of Artificial Sequence: Synthetic oligonucleotide
  Target: SCNA; (-) strand; PAM type: NRG; PAM sequence: AAG
tctcagcattttgggaggcc

SEQ ID NO: 18064 - DNA, 20 bp, Artificial Sequence
  Description of Artificial Sequence: Synthetic oligonucleotide
  Target: SCNA; (-) strand; PAM type: NRG; PAM sequence: AGG
tgtaatctcagcattttggg

SEQ ID NO: 18065 - DNA, 20 bp, Artificial Sequence
  Description of Artificial Sequence: Synthetic oligonucleotide
  Target: SCNA; (-) strand; PAM type: NRG; PAM sequence: GAG
ctgtaatctcagcattttgg

SEQ ID NO: 18066 - DNA, 20 bp, Artificial Sequence
  Description of Artificial Sequence: Synthetic oligonucleotide
  Target: SCNA; (-) strand; PAM type: NRG; PAM sequence: GGG
acctgtaatctcagcatttt

SEQ ID NO: 18067 - DNA, 20 bp, Artificial Sequence
  Description of Artificial Sequence: Synthetic oligonucleotide
  Target: SCNA; (-) strand; PAM type: NRG; PAM sequence: TGG
cacctgtaatctcagcattt

SEQ ID NO: 18068 - DNA, 20 bp, Artificial Sequence
  Description of Artificial Sequence: Synthetic oligonucleotide
  Target: SCNA; (-) strand; PAM type: NRG; PAM sequence: CAG
gtggctcacacctgtaatct

SEQ ID NO: 18069 - DNA, 20 bp, Artificial Sequence
  Description of Artificial Sequence: Synthetic oligonucleotide
  Target: SCNA; (-) strand; PAM type: NRG; PAM sequence: TGG
ataataagggccaggcgcgg

SEQ ID NO: 18070 - DNA, 20 bp, Artificial Sequence
  Description of Artificial Sequence: Synthetic oligonucleotide
  Target: SCNA; (-) strand; PAM type: NRG; PAM sequence: CGG
tctataataagggccaggcg

SEQ ID NO: 18071 - DNA, 20 bp, Artificial Sequence
  Description of Artificial Sequence: Synthetic oligonucleotide
  Target: SCNA; (-) strand; PAM type: NRG; PAM sequence: AGG
aaaattctataataagggcc

SEQ ID NO: 18072 - DNA, 20 bp, Artificial Sequence
  Description of Artificial Sequence: Synthetic oligonucleotide
  Target: SCNA; (-) strand; PAM type: NRG; PAM sequence: CAG
aaaaattctataataagggc

SEQ ID NO: 18073 - DNA, 20 bp, Artificial Sequence
  Description of Artificial Sequence: Synthetic oligonucleotide
  Target: SCNA; (-) strand; PAM type: NRG; PAM sequence: GGG
gcccaaaaattctataataa

SEQ ID NO: 18074 - DNA, 20 bp, Artificial Sequence
  Description of Artificial Sequence: Synthetic oligonucleotide
  Target: SCNA; (-) strand; PAM type: NRG; PAM sequence: AGG
tgcccaaaaattctataata

SEQ ID NO: 18075 - DNA, 20 bp, Artificial Sequence
  Description of Artificial Sequence: Synthetic oligonucleotide
  Target: SCNA; (-) strand; PAM type: NRG; PAM sequence: AAG
atgcccaaaaattctataat

SEQ ID NO: 18076 - DNA, 20 bp, Artificial Sequence
  Description of Artificial Sequence: Synthetic oligonucleotide
  Target: SCNA; (-) strand; PAM type: NRG; PAM sequence: TAG
tggtattattgaagcacaat

SEQ ID NO: 18077 - DNA, 20 bp, Artificial Sequence
  Description of Artificial Sequence: Synthetic oligonucleotide
  Target: SCNA; (-) strand; PAM type: NRG; PAM sequence: AAG
ccacttgtttggtattattg

SEQ ID NO: 18078 - DNA, 20 bp, Artificial Sequence
  Description of Artificial Sequence: Synthetic oligonucleotide
  Target: SCNA; (-) strand; PAM type: NRG; PAM sequence: TGG
gaagcatttgcccacttgtt

SEQ ID NO: 18079 - DNA, 20 bp, Artificial Sequence
  Description of Artificial Sequence: Synthetic oligonucleotide
  Target: SCNA; (-) strand; PAM type: NRG; PAM sequence: AAG
gatgcaaatgtagcccagtg

SEQ ID NO: 18080 - DNA, 20 bp, Artificial Sequence
  Description of Artificial Sequence: Synthetic oligonucleotide
  Target: SCNA; (-) strand; PAM type: NRG; PAM sequence: CAG
tcagggatgcaaatgtagcc

SEQ ID NO: 18081 - DNA, 20 bp, Artificial Sequence
  Description of Artificial Sequence: Synthetic oligonucleotide
  Target: SCNA; (-) strand; PAM type: NRG; PAM sequence: TAG
tgtactcagggatgcaaatg

SEQ ID NO: 18082 - DNA, 20 bp, Artificial Sequence
  Description of Artificial Sequence: Synthetic oligonucleotide
  Target: SCNA; (-) strand; PAM type: NRG; PAM sequence: GGG
ccaatgtgaaattgtactca

SEQ ID NO: 18083 - DNA, 20 bp, Artificial Sequence
  Description of Artificial Sequence: Synthetic oligonucleotide
  Target: SCNA; (-) strand; PAM type: NRG; PAM sequence: AGG
accaatgtgaaattgtactc

SEQ ID NO: 18084 - DNA, 20 bp, Artificial Sequence
  Description of Artificial Sequence: Synthetic oligonucleotide
  Target: SCNA; (-) strand; PAM type: NRG; PAM sequence: CAG
aaccaatgtgaaattgtact

SEQ ID NO: 18085 - DNA, 20 bp, Artificial Sequence
  Description of Artificial Sequence: Synthetic oligonucleotide
  Target: SCNA; (-) strand; PAM type: NRG; PAM sequence: GGG
tcagcattatttatttccag

SEQ ID NO: 18086 - DNA, 20 bp, Artificial Sequence
  Description of Artificial Sequence: Synthetic oligonucleotide
  Target: SCNA; (-) strand; PAM type: NRG; PAM sequence: GGG
atcagcattatttatttcca

SEQ ID NO: 18087 - DNA, 20 bp, Artificial Sequence
  Description of Artificial Sequence: Synthetic oligonucleotide
  Target: SCNA; (-) strand; PAM type: NRG; PAM sequence: AGG
catcagcattatttatttcc

SEQ ID NO: 18088 - DNA, 20 bp, Artificial Sequence
  Description of Artificial Sequence: Synthetic oligonucleotide
  Target: SCNA; (-) strand; PAM type: NRG; PAM sequence: CAG
acatcagcattatttatttc

SEQ ID NO: 18089 - DNA, 20 bp, Artificial Sequence
  Description of Artificial Sequence: Synthetic oligonucleotide
  Target: SCNA; (-) strand; PAM type: NRG; PAM sequence: CAG
ataaaattacaccaaaacat

SEQ ID NO: 18090 - DNA, 20 bp, Artificial Sequence
  Description of Artificial Sequence: Synthetic oligonucleotide
  Target: SCNA; (-) strand; PAM type: NRG; PAM sequence: TAG
tattttctgcctaatgctga

SEQ ID NO: 18091 - DNA, 20 bp, Artificial Sequence
  Description of Artificial Sequence: Synthetic oligonucleotide
  Target: SCNA; (-) strand; PAM type: NRG; PAM sequence: AAG
actactacctttctcggcaa

SEQ ID NO: 18092 - DNA, 20 bp, Artificial Sequence
  Description of Artificial Sequence: Synthetic oligonucleotide
  Target: SCNA; (-) strand; PAM type: NRG; PAM sequence: CGG
tggcaaactactacctttct

SEQ ID NO: 18093 - DNA, 20 bp, Artificial Sequence
  Description of Artificial Sequence: Synthetic oligonucleotide
  Target: SCNA; (-) strand; PAM type: NRG; PAM sequence: TGG
gttagaaagcttgtagttcc

SEQ ID NO: 18094 - DNA, 20 bp, Artificial Sequence
  Description of Artificial Sequence: Synthetic oligonucleotide
  Target: SCNA; (-) strand; PAM type: NRG; PAM sequence: TAG
aagttcagttagaaagcttg

SEQ ID NO: 18095 - DNA, 20 bp, Artificial Sequence
  Description of Artificial Sequence: Synthetic oligonucleotide
  Target: SCNA; (-) strand; PAM type: NRG; PAM sequence: AAG
tttttaaaagttcagttaga

SEQ ID NO: 18096 - DNA, 20 bp, Artificial Sequence
  Description of Artificial Sequence: Synthetic oligonucleotide
  Target: SCNA; (-) strand; PAM type: NRG; PAM sequence: TAG
tttatttttaaaagttcagt

SEQ ID NO: 18097 - DNA, 20 bp, Artificial Sequence
  Description of Artificial Sequence: Synthetic oligonucleotide
  Target: SCNA; (-) strand; PAM type: NRG; PAM sequence: CAG
aaaatttatttttaaaagtt

SEQ ID NO: 18098 - DNA, 20 bp, Artificial Sequence
  Description of Artificial Sequence: Synthetic oligonucleotide
  Target: SCNA; (-) strand; PAM type: NRG; PAM sequence: AAG
aaattaaaatttatttttaa

SEQ ID NO: 18099 - DNA, 20 bp, Artificial Sequence
  Description of Artificial Sequence: Synthetic oligonucleotide
  Target: SCNA; (-) strand; PAM type: NRG; PAM sequence: TAG
ttgtatgaaaatatcacaga

SEQ ID NO: 18100 - DNA, 20 bp, Artificial Sequence
  Description of Artificial Sequence: Synthetic oligonucleotide
  Target: SCNA; (-) strand; PAM type: NRG; PAM sequence: CAG
agtattgtatgaaaatatca

SEQ ID NO: 18101 - DNA, 20 bp, Artificial Sequence
  Description of Artificial Sequence: Synthetic oligonucleotide
  Target: SCNA; (-) strand; PAM type: NRG; PAM sequence: CAG
aatagtggcagtaaacatgg

SEQ ID NO: 18102 - DNA, 20 bp, Artificial Sequence
  Description of Artificial Sequence: Synthetic oligonucleotide
  Target: SCNA; (-) strand; PAM type: NRG; PAM sequence: TGG
gtgaatagtggcagtaaaca

SEQ ID NO: 18103 - DNA, 20 bp, Artificial Sequence
  Description of Artificial Sequence: Synthetic oligonucleotide
  Target: SCNA; (-) strand; PAM type: NRG; PAM sequence: CAG
gtggctattgtgaatagtgg

SEQ ID NO: 18104 - DNA, 20 bp, Artificial Sequence
  Description of Artificial Sequence: Synthetic oligonucleotide
  Target: SCNA; (-) strand; PAM type: NRG; PAM sequence: TGG
atcgtggctattgtgaatag

SEQ ID NO: 18105 - DNA, 20 bp, Artificial Sequence
  Description of Artificial Sequence: Synthetic oligonucleotide
  Target: SCNA; (-) strand; PAM type: NRG; PAM sequence: TAG
catatcgtggctattgtgaa

SEQ ID NO: 18106 - DNA, 20 bp, Artificial Sequence
  Description of Artificial Sequence: Synthetic oligonucleotide
  Target: SCNA; (-) strand; PAM type: NRG; PAM sequence: TGG
caaaggttgattccatatcg

SEQ ID NO: 18107 - DNA, 20 bp, Artificial Sequence
  Description of Artificial Sequence: Synthetic oligonucleotide
  Target: SCNA; (-) strand; PAM type: NRG; PAM sequence: AGG
cctcttctgttgatgaacaa

SEQ ID NO: 18108 - DNA, 20 bp, Artificial Sequence
  Description of Artificial Sequence: Synthetic oligonucleotide
  Target: SCNA; (-) strand; PAM type: NRG; PAM sequence: AAG
tcctcttctgttgatgaaca

SEQ ID NO: 18109 - DNA, 20 bp, Artificial Sequence
  Description of Artificial Sequence: Synthetic oligonucleotide
  Target: SCNA; (-) strand; PAM type: NRG; PAM sequence: AGG
agccagcacagaccaaagtc

SEQ ID NO: 18110 - DNA, 20 bp, Artificial Sequence
  Description of Artificial Sequence: Synthetic oligonucleotide
  Target: SCNA; (-) strand; PAM type: NRG; PAM sequence: CAG
cagccagcacagaccaaagt

SEQ ID NO: 18111 - DNA, 20 bp, Artificial Sequence
  Description of Artificial Sequence: Synthetic oligonucleotide
  Target: SCNA; (-) strand; PAM type: NRG; PAM sequence: AAG
cctgcagccagcacagacca

SEQ ID NO: 18112 - DNA, 20 bp, Artificial Sequence
  Description of Artificial Sequence: Synthetic oligonucleotide
  Target: SCNA; (-) strand; PAM type: NRG; PAM sequence: CAG
tccagaacctgcagccagca

SEQ ID NO: 18113 - DNA, 20 bp, Artificial Sequence
  Description of Artificial Sequence: Synthetic oligonucleotide
  Target: SCNA; (-) strand; PAM type: NRG; PAM sequence: CAG
agctctccagaacctgcagc

SEQ ID NO: 18114 - DNA, 20 bp, Artificial Sequence
  Description of Artificial Sequence: Synthetic oligonucleotide
  Target: SCNA; (-) strand; PAM type: NRG; PAM sequence: CAG
aaacagctctccagaacctg

SEQ ID NO: 18115 - DNA, 20 bp, Artificial Sequence
  Description of Artificial Sequence: Synthetic oligonucleotide
  Target: SCNA; (-) strand; PAM type: NRG; PAM sequence: CAG
tgtcacttcaaacagctctc

SEQ ID NO: 18116 - DNA, 20 bp, Artificial Sequence
  Description of Artificial Sequence: Synthetic oligonucleotide
  Target: SCNA; (-) strand; PAM type: NRG; PAM sequence: CAG
tgccatcttgtcacttcaaa

SEQ ID NO: 18117 - DNA, 20 bp, Artificial Sequence
  Description of Artificial Sequence: Synthetic oligonucleotide
  Target: SCNA; (-) strand; PAM type: NRG; PAM sequence: AGG
atgaggacgaataatccacc

SEQ ID NO: 18118 - DNA, 20 bp, Artificial Sequence
  Description of Artificial Sequence: Synthetic oligonucleotide
  Target: SCNA; (-) strand; PAM type: NRG; PAM sequence: CAG
tatgaggacgaataatccac

SEQ ID NO: 18119 - DNA, 20 bp, Artificial Sequence
  Description of Artificial Sequence: Synthetic oligonucleotide
  Target: SCNA; (-) strand; PAM type: NRG; PAM sequence: AGG
tttctaggtaaagtgttatg

SEQ ID NO: 18120 - DNA, 20 bp, Artificial Sequence
  Description of Artificial Sequence: Synthetic oligonucleotide
  Target: SCNA; (-) strand; PAM type: NRG; PAM sequence: GAG
atttctaggtaaagtgttat

SEQ ID NO: 18121 - DNA, 20 bp, Artificial Sequence
  Description of Artificial Sequence: Synthetic oligonucleotide
  Target: SCNA; (-) strand; PAM type: NRG; PAM sequence: AAG
aaaggcaaaatttctaggta

SEQ ID NO: 18122 - DNA, 20 bp, Artificial Sequence
  Description of Artificial Sequence: Synthetic oligonucleotide
  Target: SCNA; (-) strand; PAM type: NRG; PAM sequence: AGG
tgagaaaaggcaaaatttct

SEQ ID NO: 18123 - DNA, 20 bp, Artificial Sequence
  Description of Artificial Sequence: Synthetic oligonucleotide
  Target: SCNA; (-) strand; PAM type: NRG; PAM sequence: TAG
gtgagaaaaggcaaaatttc

SEQ ID NO: 18124 - DNA, 20 bp, Artificial Sequence
  Description of Artificial Sequence: Synthetic oligonucleotide
  Target: SCNA; (-) strand; PAM type: NRG; PAM sequence: AGG
tattatggttttgtgagaaa

SEQ ID NO: 18125 - DNA, 20 bp, Artificial Sequence
  Description of Artificial Sequence: Synthetic oligonucleotide
  Target: SCNA; (-) strand; PAM type: NRG; PAM sequence: AAG
ttattatggttttgtgagaa

SEQ ID NO: 18126 - DNA, 20 bp, Artificial Sequence
  Description of Artificial Sequence: Synthetic oligonucleotide
  Target: SCNA; (-) strand; PAM type: NRG; PAM sequence: GAG
gtccattattatggttttgt

SEQ ID NO: 18127 - DNA, 20 bp, Artificial Sequence
  Description of Artificial Sequence: Synthetic oligonucleotide
  Target: SCNA; (-) strand; PAM type: NRG; PAM sequence: TGG
atgctgtttgtccattatta

SEQ ID NO: 18128 - DNA, 20 bp, Artificial Sequence
  Description of Artificial Sequence: Synthetic oligonucleotide
  Target: SCNA; (-) strand; PAM type: NRG; PAM sequence: AGG
gtgactgggggtgcatatct

SEQ ID NO: 18129 - DNA, 20 bp, Artificial Sequence
  Description of Artificial Sequence: Synthetic oligonucleotide
  Target: SCNA; (-) strand; PAM type: NRG; PAM sequence: TAG
agtgactgggggtgcatatc

SEQ ID NO: 18130 - DNA, 20 bp, Artificial Sequence
  Description of Artificial Sequence: Synthetic oligonucleotide
  Target: SCNA; (-) strand; PAM type: NRG; PAM sequence: GGG
gaccttacgatagtgactgg

SEQ ID NO: 18131 - DNA, 20 bp, Artificial Sequence
  Description of Artificial Sequence: Synthetic oligonucleotide
  Target: SCNA; (-) strand; PAM type: NRG; PAM sequence: GGG
tgaccttacgatagtgactg

SEQ ID NO: 18132 - DNA, 20 bp, Artificial Sequence
  Description of Artificial Sequence: Synthetic oligonucleotide
  Target: SCNA; (-) strand; PAM type: NRG; PAM sequence: GGG
ttgaccttacgatagtgact

SEQ ID NO: 18133 - DNA, 20 bp, Artificial Sequence
  Description of Artificial Sequence: Synthetic oligonucleotide
  Target: SCNA; (-) strand; PAM type: NRG; PAM sequence: TGG
cttgaccttacgatagtgac

SEQ ID NO: 18134 - DNA, 20 bp, Artificial Sequence
  Description of Artificial Sequence: Synthetic oligonucleotide
  Target: SCNA; (-) strand; PAM type: NRG; PAM sequence: TAG
ataccaacttgaccttacga

SEQ ID NO: 18135 - DNA, 20 bp, Artificial Sequence
  Description of Artificial Sequence: Synthetic oligonucleotide
  Target: SCNA; (-) strand; PAM type: NRG; PAM sequence: TAG
tactattcagataaaacttc

SEQ ID NO: 18136 - DNA, 20 bp, Artificial Sequence
  Description of Artificial Sequence: Synthetic oligonucleotide
  Target: SCNA; (-) strand; PAM type: NRG; PAM sequence: CAG
gccactatgacaatactatt

SEQ ID NO: 18137 - DNA, 20 bp, Artificial Sequence
  Description of Artificial Sequence: Synthetic oligonucleotide
  Target: SCNA; (-) strand; PAM type: NRG; PAM sequence: TAG
ctacttttcactctcattcc

SEQ ID NO: 18138 - DNA, 20 bp, Artificial Sequence
  Description of Artificial Sequence: Synthetic oligonucleotide
  Target: SCNA; (-) strand; PAM type: NRG; PAM sequence: TAG
gccatatcaaagcacacatc

SEQ ID NO: 18139 - DNA, 20 bp, Artificial Sequence
  Description of Artificial Sequence: Synthetic oligonucleotide
  Target: SCNA; (-) strand; PAM type: NRG; PAM sequence: AAG
ttttgctccaagccatatca

SEQ ID NO: 18140 - DNA, 20 bp, Artificial Sequence
  Description of Artificial Sequence: Synthetic oligonucleotide
  Target: SCNA; (-) strand; PAM type: NRG; PAM sequence: AAG
aatacctgaccttttgctcc

SEQ ID NO: 18141 - DNA, 20 bp, Artificial Sequence
  Description of Artificial Sequence: Synthetic oligonucleotide
  Target: SCNA; (-) strand; PAM type: NRG; PAM sequence: AAG
aataatagatatcatttcag

SEQ ID NO: 18142 - DNA, 20 bp, Artificial Sequence
  Description of Artificial Sequence: Synthetic oligonucleotide
  Target: SCNA; (-) strand; PAM type: NRG; PAM sequence: CAG
ctaaataatagatatcattt

SEQ ID NO: 18143 - DNA, 20 bp, Artificial Sequence
  Description of Artificial Sequence: Synthetic oligonucleotide
  Target: SCNA; (-) strand; PAM type: NRG; PAM sequence: TAG
ctgacccagttcctaaataa

SEQ ID NO: 18144 - DNA, 20 bp, Artificial Sequence
  Description of Artificial Sequence: Synthetic oligonucleotide
  Target: SCNA; (-) strand; PAM type: NRG; PAM sequence: CAG
aattatagattttcctgacc

SEQ ID NO: 18145 - DNA, 20 bp, Artificial Sequence
  Description of Artificial Sequence: Synthetic oligonucleotide
  Target: SCNA; (-) strand; PAM type: NRG; PAM sequence: TAG
atacagtaggaatgtaatta

SEQ ID NO: 18146 - DNA, 20 bp, Artificial Sequence
  Description of Artificial Sequence: Synthetic oligonucleotide
  Target: SCNA; (-) strand; PAM type: NRG; PAM sequence: AGG
gaatggtatgtaaatacagt

SEQ ID NO: 18147 - DNA, 20 bp, Artificial Sequence
  Description of Artificial Sequence: Synthetic oligonucleotide
  Target: SCNA; (-) strand; PAM type: NRG; PAM sequence: TAG
tgaatggtatgtaaatacag

SEQ ID NO: 18148 - DNA, 20 bp, Artificial Sequence
  Description of Artificial Sequence: Synthetic oligonucleotide
  Target: SCNA; (-) strand; PAM type: NRG; PAM sequence: CAG
gaatgaatggtatgtaaata

SEQ ID NO: 18149 - DNA, 20 bp, Artificial Sequence
  Description of Artificial Sequence: Synthetic oligonucleotide
  Target: SCNA; (-) strand; PAM type: NRG; PAM sequence: TGG
agagctctcttaggaatgaa

SEQ ID NO: 18150 - DNA, 20 bp, Artificial Sequence
  Description of Artificial Sequence: Synthetic oligonucleotide
  Target: SCNA; (-) strand; PAM type: NRG; PAM sequence: AGG
ttttttggaagagctctctt

SEQ ID NO: 18151 - DNA, 20 bp, Artificial Sequence
  Description of Artificial Sequence: Synthetic oligonucleotide
  Target: SCNA; (-) strand; PAM type: NRG; PAM sequence: TAG
tttttttggaagagctctct

SEQ ID NO: 18152 - DNA, 20 bp, Artificial Sequence
  Description of Artificial Sequence: Synthetic oligonucleotide
  Target: SCNA; (-) strand; PAM type: NRG; PAM sequence: GAG
ctttttttttttttttggaa

SEQ ID NO: 18153 - DNA, 20 bp, Artificial Sequence
  Description of Artificial Sequence: Synthetic oligonucleotide
  Target: SCNA; (-) strand; PAM type: NRG; PAM sequence: AAG
ctctttttttttttttttgg

SEQ ID NO: 18154 - DNA, 20 bp, Artificial Sequence
  Description of Artificial Sequence: Synthetic oligonucleotide
  Target: SCNA; (-) strand; PAM type: NRG; PAM sequence: TGG
catctctttttttttttttt

SEQ ID NO: 18155 - DNA, 20 bp, Artificial Sequence
  Description of Artificial Sequence: Synthetic oligonucleotide
  Target: SCNA; (-) strand; PAM type: NRG; PAM sequence: GAG
ttgggcttgagaaagaaatg

SEQ ID NO: 18156 - DNA, 20 bp, Artificial Sequence
  Description of Artificial Sequence: Synthetic oligonucleotide
  Target: SCNA; (-) strand; PAM type: NRG; PAM sequence: TGG
ctttgggcttgagaaagaaa

SEQ ID NO: 18157 - DNA, 20 bp, Artificial Sequence
  Description of Artificial Sequence: Synthetic oligonucleotide
  Target: SCNA; (-) strand; PAM type: NRG; PAM sequence: AAG
tatgtactttgggcttgaga

SEQ ID NO: 18158 - DNA, 20 bp, Artificial Sequence
  Description of Artificial Sequence: Synthetic oligonucleotide
  Target: SCNA; (-) strand; PAM type: NRG; PAM sequence: GAG
gatttatgtactttgggctt

SEQ ID NO: 18159 - DNA, 20 bp, Artificial Sequence
  Description of Artificial Sequence: Synthetic oligonucleotide
  Target: SCNA; (-) strand; PAM type: NRG; PAM sequence: GGG
tttcaagatttatgtacttt

SEQ ID NO: 18160 - DNA, 20 bp, Artificial Sequence
  Description of Artificial Sequence: Synthetic oligonucleotide
  Target: SCNA; (-) strand; PAM type: NRG; PAM sequence: TGG
atttcaagatttatgtactt

SEQ ID NO: 18161 - DNA, 20 bp, Artificial Sequence
  Description of Artificial Sequence: Synthetic oligonucleotide
  Target: SCNA; (-) strand; PAM type: NRG; PAM sequence: AAG
ttttttagctggaaaatttc

SEQ ID NO: 18162 - DNA, 20 bp, Artificial Sequence
  Description of Artificial Sequence: Synthetic oligonucleotide
  Target: SCNA; (-) strand; PAM type: NRG; PAM sequence: TGG
acatatgcctattttttagc

SEQ ID NO: 18163 - DNA, 20 bp, Artificial Sequence
  Description of Artificial Sequence: Synthetic oligonucleotide
  Target: SCNA; (-) strand; PAM type: NRG; PAM sequence: TAG
tagaacatatgcctattttt

SEQ ID NO: 18164 - DNA, 20 bp, Artificial Sequence
  Description of Artificial Sequence: Synthetic oligonucleotide
  Target: SCNA; (-) strand; PAM type: NRG; PAM sequence: TAG
ggataaattaaagctgatgc

SEQ ID NO: 18165 - DNA, 20 bp, Artificial Sequence
  Description of Artificial Sequence: Synthetic oligonucleotide
  Target: SCNA; (-) strand; PAM type: NRG; PAM sequence: AAG
aatgaatgtgggataaatta

SEQ ID NO: 18166 - DNA, 20 bp, Artificial Sequence
  Description of Artificial Sequence: Synthetic oligonucleotide
  Target: SCNA; (-) strand; PAM type: NRG; PAM sequence: GGG
ttgtagcagagaatgaatgt

SEQ ID NO: 18167 - DNA, 20 bp, Artificial Sequence
  Description of Artificial Sequence: Synthetic oligonucleotide
  Target: SCNA; (-) strand; PAM type: NRG; PAM sequence: TGG
attgtagcagagaatgaatg

SEQ ID NO: 18168 - DNA, 20 bp, Artificial Sequence
  Description of Artificial Sequence: Synthetic oligonucleotide
  Target: SCNA; (-) strand; PAM type: NRG; PAM sequence: GAG
tttgtcactttattgtagca

SEQ ID NO: 18169 - DNA, 20 bp, Artificial Sequence
  Description of Artificial Sequence: Synthetic oligonucleotide
  Target: SCNA; (-) strand; PAM type: NRG; PAM sequence: CAG
gctttgtcactttattgtag

SEQ ID NO: 18170 - DNA, 20 bp, Artificial Sequence
  Description of Artificial Sequence: Synthetic oligonucleotide
  Target: SCNA; (-) strand; PAM type: NRG; PAM sequence: TAG
atggctttgtcactttattg

SEQ ID NO: 18171 - DNA, 20 bp, Artificial Sequence
  Description of Artificial Sequence: Synthetic oligonucleotide
  Target: SCNA; (-) strand; PAM type: NRG; PAM sequence: TGG
gatgtaacataaaatatgaa

SEQ ID NO: 18172 - DNA, 20 bp, Artificial Sequence
  Description of Artificial Sequence: Synthetic oligonucleotide
  Target: SCNA; (-) strand; PAM type: NRG; PAM sequence: TAG
ctaactgaaaaacagataat

SEQ ID NO: 18173 - DNA, 20 bp, Artificial Sequence
  Description of Artificial Sequence: Synthetic oligonucleotide
  Target: SCNA; (-) strand; PAM type: NRG; PAM sequence: CAG
atatttatctaactgaaaaa

SEQ ID NO: 18174 - DNA, 20 bp, Artificial Sequence
  Description of Artificial Sequence: Synthetic oligonucleotide
  Target: SCNA; (-) strand; PAM type: NRG; PAM sequence: AAG
ctgatggtacctaggatata

SEQ ID NO: 18175 - DNA, 20 bp, Artificial Sequence
  Description of Artificial Sequence: Synthetic oligonucleotide
  Target: SCNA; (-) strand; PAM type: NRG; PAM sequence: AGG
ttgaaattctgatggtacct

SEQ ID NO: 18176 - DNA, 20 bp, Artificial Sequence
  Description of Artificial Sequence: Synthetic oligonucleotide
  Target: SCNA; (-) strand; PAM type: NRG; PAM sequence: TAG
tttgaaattctgatggtacc

SEQ ID NO: 18177 - DNA, 20 bp, Artificial Sequence
  Description of Artificial Sequence: Synthetic oligonucleotide
  Target: SCNA; (-) strand; PAM type: NRG; PAM sequence: TGG
tctgagctttgaaattctga

SEQ ID NO: 18178 - DNA, 20 bp, Artificial Sequence
  Description of Artificial Sequence: Synthetic oligonucleotide
  Target: SCNA; (-) strand; PAM type: NRG; PAM sequence: GAG
attctcattagtgattttct

SEQ ID NO: 18179 - DNA, 20 bp, Artificial Sequence
  Description of Artificial Sequence: Synthetic oligonucleotide
  Target: SCNA; (-) strand; PAM type: NRG; PAM sequence: TAG
ttaattccttccattctcat

SEQ ID NO: 18180 - DNA, 20 bp, Artificial Sequence
  Description of Artificial Sequence: Synthetic oligonucleotide
  Target: SCNA; (-) strand; PAM type: NRG; PAM sequence: TGG
gcatgcttctgcttgcatga

SEQ ID NO: 18181 - DNA, 20 bp, Artificial Sequence
  Description of Artificial Sequence: Synthetic oligonucleotide
  Target: SCNA; (-) strand; PAM type: NRG; PAM sequence: TAG
ctctgagcaatgtagcatgg

SEQ ID NO: 18182 - DNA, 20 bp, Artificial Sequence
  Description of Artificial Sequence: Synthetic oligonucleotide
  Target: SCNA; (-) strand; PAM type: NRG; PAM sequence: TGG
gaactctgagcaatgtagca

SEQ ID NO: 18183 - DNA, 20 bp, Artificial Sequence
  Description of Artificial Sequence: Synthetic oligonucleotide
  Target: SCNA; (-) strand; PAM type: NRG; PAM sequence: TAG
tacatgaactctgagcaatg

SEQ ID NO: 18184 - DNA, 20 bp, Artificial Sequence
  Description of Artificial Sequence: Synthetic oligonucleotide
  Target: SCNA; (-) strand; PAM type: NRG; PAM sequence: GAG
taaactgctacatgaactct

SEQ ID NO: 18185 - DNA, 20 bp, Artificial Sequence
  Description of Artificial Sequence: Synthetic oligonucleotide
  Target: SCNA; (-) strand; PAM type: NRG; PAM sequence: CAG
ttccaacaaagctcattgca

SEQ ID NO: 18186 - DNA, 20 bp, Artificial Sequence
  Description of Artificial Sequence: Synthetic oligonucleotide
  Target: SCNA; (-) strand; PAM type: NRG; PAM sequence: AAG
gcgagactccagttccaaca

SEQ ID NO: 18187 - DNA, 20 bp, Artificial Sequence
  Description of Artificial Sequence: Synthetic oligonucleotide
  Target: SCNA; (-) strand; PAM type: NRG; PAM sequence: CAG
acatttaggatgcgagactc

SEQ ID NO: 18188 - DNA, 20 bp, Artificial Sequence
  Description of Artificial Sequence: Synthetic oligonucleotide
  Target: SCNA; (-) strand; PAM type: NRG; PAM sequence: GAG
atatttcacatttaggatgc

SEQ ID NO: 18189 - DNA, 20 bp, Artificial Sequence
  Description of Artificial Sequence: Synthetic oligonucleotide
  Target: SCNA; (-) strand; PAM type: NRG; PAM sequence: AGG
acagtagatatttcacattt

SEQ ID NO: 18190 - DNA, 20 bp, Artificial Sequence
  Description of Artificial Sequence: Synthetic oligonucleotide
  Target: SCNA; (-) strand; PAM type: NRG; PAM sequence: TAG
aacagtagatatttcacatt

SEQ ID NO: 18191 - DNA, 20 bp, Artificial Sequence
  Description of Artificial Sequence: Synthetic oligonucleotide
  Target: SCNA; (-) strand; PAM type: NRG; PAM sequence: TAG
gttatcaccctttcaaacag

SEQ ID NO: 18192 - DNA, 20 bp, Artificial Sequence
  Description of Artificial Sequence: Synthetic oligonucleotide
  Target: SCNA; (-) strand; PAM type: NRG; PAM sequence: CAG
aaagttatcaccctttcaaa

SEQ ID NO: 18193 - DNA, 20 bp, Artificial Sequence
  Description of Artificial Sequence: Synthetic oligonucleotide
  Target: SCNA; (-) strand; PAM type: NRG; PAM sequence: AAG
tgttttctttgcaaggcata

SEQ ID NO: 18194 - DNA, 20 bp, Artificial Sequence
  Description of Artificial Sequence: Synthetic oligonucleotide
  Target: SCNA; (-) strand; PAM type: NRG; PAM sequence: AGG
tgaggactgttttctttgca

SEQ ID NO: 18195 - DNA, 20 bp, Artificial Sequence
  Description of Artificial Sequence: Synthetic oligonucleotide
  Target: SCNA; (-) strand; PAM type: NRG; PAM sequence: AAG
ttgaggactgttttctttgc

SEQ ID NO: 18196 - DNA, 20 bp, Artificial Sequence
  Description of Artificial Sequence: Synthetic oligonucleotide
  Target: SCNA; (-) strand; PAM type: NRG; PAM sequence: AGG
tcattaaaaaataacacttg

SEQ ID NO: 18197 - DNA, 20 bp, Artificial Sequence
  Description of Artificial Sequence: Synthetic oligonucleotide
  Target: SCNA; (-) strand; PAM type: NRG; PAM sequence: GAG
ttcattaaaaaataacactt

SEQ ID NO: 18198 - DNA, 20 bp, Artificial Sequence
  Description of Artificial Sequence: Synthetic oligonucleotide
  Target: SCNA; (-) strand; PAM type: NRG; PAM sequence: GGG
aaggtgtgaggaaagataaa

SEQ ID NO: 18199 - DNA, 20 bp, Artificial Sequence
  Description of Artificial Sequence: Synthetic oligonucleotide
  Target: SCNA; (-) strand; PAM type: NRG; PAM sequence: AGG
aaaggtgtgaggaaagataa

SEQ ID NO: 18200 - DNA, 20 bp, Artificial Sequence
  Description of Artificial Sequence: Synthetic oligonucleotide
  Target: SCNA; (-) strand; PAM type: NRG; PAM sequence: AAG
aaaaggtgtgaggaaagata

SEQ ID NO: 18201 - DNA, 20 bp, Artificial Sequence
  Description of Artificial Sequence: Synthetic oligonucleotide
  Target: SCNA; (-) strand; PAM type: NRG; PAM sequence: AAG
gaagagaaaaggtgtgagga

SEQ ID NO: 18202 - DNA, 20 bp, Artificial Sequence
  Description of Artificial Sequence: Synthetic oligonucleotide
  Target: SCNA; (-) strand; PAM type: NRG; PAM sequence: AGG
aaaagaagagaaaaggtgtg

SEQ ID NO: 18203 - DNA, 20 bp, Artificial Sequence
  Description of Artificial Sequence: Synthetic oligonucleotide
  Target: SCNA; (-) strand; PAM type: NRG; PAM sequence: GAG
aaaaagaagagaaaaggtgt

SEQ ID NO: 18204 - DNA, 20 bp, Artificial Sequence
  Description of Artificial Sequence: Synthetic oligonucleotide
  Target: SCNA; (-) strand; PAM type: NRG; PAM sequence: AGG
aaaaaaaaaaagaagagaaa

SEQ ID NO: 18205 - DNA, 20 bp, Artificial Sequence
  Description of Artificial Sequence: Synthetic oligonucleotide
  Target: SCNA; (-) strand; PAM type: NRG; PAM sequence: AAG
aaaaaaaaaaaagaagagaa

SEQ ID NO: 18206 - DNA, 20 bp, Artificial Sequence
  Description of Artificial Sequence: Synthetic oligonucleotide
  Target: SCNA; (-) strand; PAM type: NRG; PAM sequence: GAG
aaaaaaaaaaaaaaaaagaa

SEQ ID NO: 18207 - DNA, 20 bp, Artificial Sequence
  Description of Artificial Sequence: Synthetic oligonucleotide
  Target: SCNA; (-) strand; PAM type: NRG; PAM sequence: AAG
gcaaaaaaaaaaaaaaaaag

SEQ ID NO: 18208 - DNA, 20 bp, Artificial Sequence
  Description of Artificial Sequence: Synthetic oligonucleotide
  Target: SCNA; (-) strand; PAM type: NRG; PAM sequence: AAG
agggcaaaaaaaaaaaaaaa

SEQ ID NO: 18209 - DNA, 20 bp, Artificial Sequence
  Description of Artificial Sequence: Synthetic oligonucleotide
  Target: SCNA; (-) strand; PAM type: NRG; PAM sequence: GGG
tatcctttaaatacttctga

SEQ ID NO: 18210 - DNA, 20 bp, Artificial Sequence
  Description of Artificial Sequence: Synthetic oligonucleotide
  Target: SCNA; (-) strand; PAM type: NRG; PAM sequence: AGG
ttatcctttaaatacttctg

SEQ ID NO: 18211 - DNA, 20 bp, Artificial Sequence
  Description of Artificial Sequence: Synthetic oligonucleotide
  Target: SCNA; (-) strand; PAM type: NRG; PAM sequence: GAG
attatcctttaaatacttct

SEQ ID NO: 18212 - DNA, 20 bp, Artificial Sequence
  Description of Artificial Sequence: Synthetic oligonucleotide
  Target: SCNA; (-) strand; PAM type: NRG; PAM sequence: GGG
ggcagtgtgagttatcatat

SEQ ID NO: 18213 - DNA, 20 bp, Artificial Sequence
  Description of Artificial Sequence: Synthetic oligonucleotide
  Target: SCNA; (-) strand; PAM type: NRG; PAM sequence: TGG
aggcagtgtgagttatcata

SEQ ID NO: 18214 - DNA, 20 bp, Artificial Sequence
  Description of Artificial Sequence: Synthetic oligonucleotide
  Target: SCNA; (-) strand; PAM type: NRG; PAM sequence: GAG
gtactgaagctaggcagtgt

SEQ ID NO: 18215 - DNA, 20 bp, Artificial Sequence
  Description of Artificial Sequence: Synthetic oligonucleotide
  Target: SCNA; (-) strand; PAM type: NRG; PAM sequence: CAG
gacattgtactgaagctagg

SEQ ID NO: 18216 - DNA, 20 bp, Artificial Sequence
  Description of Artificial Sequence: Synthetic oligonucleotide
  Target: SCNA; (-) strand; PAM type: NRG; PAM sequence: AGG
tgagacattgtactgaagct

SEQ ID NO: 18217 - DNA, 20 bp, Artificial Sequence
  Description of Artificial Sequence: Synthetic oligonucleotide
  Target: SCNA; (-) strand; PAM type: NRG; PAM sequence: TAG
atgagacattgtactgaagc

SEQ ID NO: 18218 - DNA, 20 bp, Artificial Sequence
  Description of Artificial Sequence: Synthetic oligonucleotide
  Target: SCNA; (-) strand; PAM type: NRG; PAM sequence: AAG
atgtatgagacattgtactg

SEQ ID NO: 18219 - DNA, 20 bp, Artificial Sequence
  Description of Artificial Sequence: Synthetic oligonucleotide
  Target: SCNA; (-) strand; PAM type: NRG; PAM sequence: GAG
tgtgagtgcctgcaatgtat

SEQ ID NO: 18220 - DNA, 20 bp, Artificial Sequence
  Description of Artificial Sequence: Synthetic oligonucleotide
  Target: SCNA; (-) strand; PAM type: NRG; PAM sequence: GAG
ttcattaaacaaatgtttgt

SEQ ID NO: 18221 - DNA, 20 bp, Artificial Sequence
  Description of Artificial Sequence: Synthetic oligonucleotide
  Target: SCNA; (-) strand; PAM type: NRG; PAM sequence: TGG
tcaacagtgtaattttccat

SEQ ID NO: 18222 - DNA, 20 bp, Artificial Sequence
  Description of Artificial Sequence: Synthetic oligonucleotide
  Target: SCNA; (-) strand; PAM type: NRG; PAM sequence: CAG
taaaaccattgtaaattcaa

SEQ ID NO: 18223 - DNA, 20 bp, Artificial Sequence
  Description of Artificial Sequence: Synthetic oligonucleotide
  Target: SCNA; (-) strand; PAM type: NRG; PAM sequence: GAG
taaataaatcaacaaattta

SEQ ID NO: 18224 - DNA, 20 bp, Artificial Sequence
  Description of Artificial Sequence: Synthetic oligonucleotide
  Target: SCNA; (-) strand; PAM type: NRG; PAM sequence: TAG
cctaaataaatcaacaaatt

SEQ ID NO: 18225 - DNA, 20 bp, Artificial Sequence
  Description of Artificial Sequence: Synthetic oligonucleotide
  Target: SCNA; (-) strand; PAM type: NRG; PAM sequence: CAG
atgaataatatgaaatttag

SEQ ID NO: 18226 - DNA, 20 bp, Artificial Sequence
  Description of Artificial Sequence: Synthetic oligonucleotide
  Target: SCNA; (-) strand; PAM type: NRG; PAM sequence: TAG
ttaatgaataatatgaaatt

SEQ ID NO: 18227 - DNA, 20 bp, Artificial Sequence
  Description of Artificial Sequence: Synthetic oligonucleotide
  Target: SCNA; (-) strand; PAM type: NRG; PAM sequence: TAG
tctgagtatattagaagtta

SEQ ID NO: 18228 - DNA, 20 bp, Artificial Sequence
  Description of Artificial Sequence: Synthetic oligonucleotide
  Target: SCNA; (-) strand; PAM type: NRG; PAM sequence: AAG
atgatgtctgagtatattag

SEQ ID NO: 18229 - DNA, 20 bp, Artificial Sequence
  Description of Artificial Sequence: Synthetic oligonucleotide
  Target: SCNA; (-) strand; PAM type: NRG; PAM sequence: TAG
aacatgatgtctgagtatat

SEQ ID NO: 18230 - DNA, 20 bp, Artificial Sequence
  Description of Artificial Sequence: Synthetic oligonucleotide
  Target: SCNA; (-) strand; PAM type: NRG; PAM sequence: GAG
gctagaaaaacatgatgtct

SEQ ID NO: 18231 - DNA, 20 bp, Artificial Sequence
  Description of Artificial Sequence: Synthetic oligonucleotide
  Target: SCNA; (-) strand; PAM type: NRG; PAM sequence: TAG
atattttaaaagttacatgc

SEQ ID NO: 18232 - DNA, 20 bp, Artificial Sequence
  Description of Artificial Sequence: Synthetic oligonucleotide
  Target: SCNA; (-) strand; PAM type: NRG; PAM sequence: AAG
ttggagagtttatattttaa

SEQ ID NO: 18233 - DNA, 20 bp, Artificial Sequence
  Description of Artificial Sequence: Synthetic oligonucleotide
  Target: SCNA; (-) strand; PAM type: NRG; PAM sequence: GAG
ttaaaactttaaatgttgga

SEQ ID NO: 18234 - DNA, 20 bp, Artificial Sequence
  Description of Artificial Sequence: Synthetic oligonucleotide
  Target: SCNA; (-) strand; PAM type: NRG; PAM sequence: GAG
tgttaaaactttaaatgttg

SEQ ID NO: 18235 - DNA, 20 bp, Artificial Sequence
  Description of Artificial Sequence: Synthetic oligonucleotide
  Target: SCNA; (-) strand; PAM type: NRG; PAM sequence: TGG
agtgttaaaactttaaatgt

SEQ ID NO: 18236 - DNA, 20 bp, Artificial Sequence
  Description of Artificial Sequence: Synthetic oligonucleotide
  Target: SCNA; (-) strand; PAM type: NRG; PAM sequence: AAG
tttcttaaaaaattactaaa

SEQ ID NO: 18237 - DNA, 20 bp, Artificial Sequence
  Description of Artificial Sequence: Synthetic oligonucleotide
  Target: SCNA; (-) strand; PAM type: NRG; PAM sequence: AAG
aataggcttttatttatgga

SEQ ID NO: 18238 - DNA, 20 bp, Artificial Sequence
  Description of Artificial Sequence: Synthetic oligonucleotide
  Target: SCNA; (-) strand; PAM type: NRG; PAM sequence: TGG
aattaataggcttttattta

SEQ ID NO: 18239 - DNA, 20 bp, Artificial Sequence
  Description of Artificial Sequence: Synthetic oligonucleotide
  Target: SCNA; (-) strand; PAM type: NRG; PAM sequence: AGG
gttatgttatacaaattaat

SEQ ID NO: 18240 - DNA, 20 bp, Artificial Sequence
  Description of Artificial Sequence: Synthetic oligonucleotide
  Target: SCNA; (-) strand; PAM type: NRG; PAM sequence: TAG
tgttatgttatacaaattaa

SEQ ID NO: 18241 - DNA, 20 bp, Artificial Sequence
  Description of Artificial Sequence: Synthetic oligonucleotide
  Target: SCNA; (-) strand; PAM type: NRG; PAM sequence: GAG
ctcctatagatttcttgtag

SEQ ID NO: 18242 - DNA, 20 bp, Artificial Sequence
  Description of Artificial Sequence: Synthetic oligonucleotide
  Target: SCNA; (-) strand; PAM type: NRG; PAM sequence: AGG
tactcctatagatttcttgt

SEQ ID NO: 18243 - DNA, 20 bp, Artificial Sequence
  Description of Artificial Sequence: Synthetic oligonucleotide
  Target: SCNA; (-) strand; PAM type: NRG; PAM sequence: TAG
ttactcctatagatttcttg

SEQ ID NO: 18244 - DNA, 20 bp, Artificial Sequence
  Description of Artificial Sequence: Synthetic oligonucleotide
  Target: SCNA; (-) strand; PAM type: NRG; PAM sequence: TAG
taatcataattttactccta

SEQ ID NO: 18245 - DNA, 20 bp, Artificial Sequence
  Description of Artificial Sequence: Synthetic oligonucleotide
  Target: SCNA; (-) strand; PAM type: NRG; PAM sequence: AAG
aagctgttatttgtttgttt

SEQ ID NO: 18246 - DNA, 20 bp, Artificial Sequence
  Description of Artificial Sequence: Synthetic oligonucleotide
  Target: SCNA; (-) strand; PAM type: NRG; PAM sequence: AAG
gtatctataaacttaattga

SEQ ID NO: 18247 - DNA, 20 bp, Artificial Sequence
  Description of Artificial Sequence: Synthetic oligonucleotide
  Target: SCNA; (-) strand; PAM type: NRG; PAM sequence: TGG
tgttaaaggttgaatgtctt

SEQ ID NO: 18248 - DNA, 20 bp, Artificial Sequence
  Description of Artificial Sequence: Synthetic oligonucleotide
  Target: SCNA; (-) strand; PAM type: NRG; PAM sequence: AGG
tttacacagtgggatgttaa

SEQ ID NO: 18249 - DNA, 20 bp, Artificial Sequence
  Description of Artificial Sequence: Synthetic oligonucleotide
  Target: SCNA; (-) strand; PAM type: NRG; PAM sequence: AAG
ttttacacagtgggatgtta

SEQ ID NO: 18250 - DNA, 20 bp, Artificial Sequence
  Description of Artificial Sequence: Synthetic oligonucleotide
  Target: SCNA; (-) strand; PAM type: NRG; PAM sequence: GGG
cccatttgattttacacagt

SEQ ID NO: 18251 - DNA, 20 bp, Artificial Sequence
  Description of Artificial Sequence: Synthetic oligonucleotide
  Target: SCNA; (-) strand; PAM type: NRG; PAM sequence: TGG
tcccatttgattttacacag

SEQ ID NO: 18252 - DNA, 20 bp, Artificial Sequence
  Description of Artificial Sequence: Synthetic oligonucleotide
  Target: SCNA; (-) strand; PAM type: NRG; PAM sequence: CAG
ctttcccatttgattttaca

SEQ ID NO: 18253 - DNA, 20 bp, Artificial Sequence
  Description of Artificial Sequence: Synthetic oligonucleotide
  Target: SCNA; (-) strand; PAM type: NRG; PAM sequence: TGG
tatattactaaccatagctt

SEQ ID NO: 18254 - DNA, 20 bp, Artificial Sequence
  Description of Artificial Sequence: Synthetic oligonucleotide
  Target: SCNA; (-) strand; PAM type: NRG; PAM sequence: TAG
atcaattatattactaacca

SEQ ID NO: 18255 - DNA, 20 bp, Artificial Sequence
  Description of Artificial Sequence: Synthetic oligonucleotide
  Target: SCNA; (-) strand; PAM type: NRG; PAM sequence: CAG
aaattagtttgtaggtaggg

SEQ ID NO: 18256 - DNA, 20 bp, Artificial Sequence
  Description of Artificial Sequence: Synthetic oligonucleotide
  Target: SCNA; (-) strand; PAM type: NRG; PAM sequence: GGG
aacaaattagtttgtaggta

SEQ ID NO: 18257 - DNA, 20 bp, Artificial Sequence
  Description of Artificial Sequence: Synthetic oligonucleotide
  Target: SCNA; (-) strand; PAM type: NRG; PAM sequence: AGG
aaacaaattagtttgtaggt

SEQ ID NO: 18258 - DNA, 20 bp, Artificial Sequence
  Description of Artificial Sequence: Synthetic oligonucleotide
  Target: SCNA; (-) strand; PAM type: NRG; PAM sequence: TAG
aaaacaaattagtttgtagg

SEQ ID NO: 18259 - DNA, 20 bp, Artificial Sequence
  Description of Artificial Sequence: Synthetic oligonucleotide
  Target: SCNA; (-) strand; PAM type: NRG; PAM sequence: AGG
attaaaacaaattagtttgt

SEQ ID NO: 18260 - DNA, 20 bp, Artificial Sequence
  Description of Artificial Sequence: Synthetic oligonucleotide
  Target: SCNA; (-) strand; PAM type: NRG; PAM sequence: TAG
tattaaaacaaattagtttg

SEQ ID NO: 18261 - DNA, 20 bp, Artificial Sequence
  Description of Artificial Sequence: Synthetic oligonucleotide
  Target: SCNA; (-) strand; PAM type: NRG; PAM sequence: TAG
gcacagatattaaaacaaat

SEQ ID NO: 18262 - DNA, 20 bp, Artificial Sequence
  Description of Artificial Sequence: Synthetic oligonucleotide
  Target: SCNA; (-) strand; PAM type: NRG; PAM sequence: CAG
gtaacatactggttctagca

SEQ ID NO: 18263 - DNA, 20 bp, Artificial Sequence
  Description of Artificial Sequence: Synthetic oligonucleotide
  Target: SCNA; (-) strand; PAM type: NRG; PAM sequence: TAG
aaggggtaacatactggttc

SEQ ID NO: 18264 - DNA, 20 bp, Artificial Sequence
  Description of Artificial Sequence: Synthetic oligonucleotide
  Target: SCNA; (-) strand; PAM type: NRG; PAM sequence: TGG
agttaaaaggggtaacatac

SEQ ID NO: 18265 - DNA, 20 bp, Artificial Sequence
  Description of Artificial Sequence: Synthetic oligonucleotide
  Target: SCNA; (-) strand; PAM type: NRG; PAM sequence: GGG
tatttagctaaagttaaaag

SEQ ID NO: 18266 - DNA, 20 bp, Artificial Sequence
  Description of Artificial Sequence: Synthetic oligonucleotide
  Target: SCNA; (-) strand; PAM type: NRG; PAM sequence: GGG
ttatttagctaaagttaaaa

SEQ ID NO: 18267 - DNA, 20 bp, Artificial Sequence
  Description of Artificial Sequence: Synthetic oligonucleotide
  Target: SCNA; (-) strand; PAM type: NRG; PAM sequence: AGG
attatttagctaaagttaaa

SEQ ID NO: 18268 - DNA, 20 bp, Artificial Sequence
  Description of Artificial Sequence: Synthetic oligonucleotide
  Target: SCNA; (-) strand; PAM type: NRG; PAM sequence: AAG
cattatttagctaaagttaa

SEQ ID NO: 18269 - DNA, 20 bp, Artificial Sequence
  Description of Artificial Sequence: Synthetic oligonucleotide
  Target: SCNA; (-) strand; PAM type: NRG; PAM sequence: AAG
gtataaacattatttagcta

SEQ ID NO: 18270 - DNA, 20 bp, Artificial Sequence
  Description of Artificial Sequence: Synthetic oligonucleotide
  Target: SCNA; (-) strand; PAM type: NRG; PAM sequence: TAG
aggtttgtataaacattatt

SEQ ID NO: 18271 - DNA, 20 bp, Artificial Sequence
  Description of Artificial Sequence: Synthetic oligonucleotide
  Target: SCNA; (-) strand; PAM type: NRG; PAM sequence: AGG
aaagatagctctgcatagta

SEQ ID NO: 18272 - DNA, 20 bp, Artificial Sequence
  Description of Artificial Sequence: Synthetic oligonucleotide
  Target: SCNA; (-) strand; PAM type: NRG; PAM sequence: AAG
taaagatagctctgcatagt

SEQ ID NO: 18273 - DNA, 20 bp, Artificial Sequence
  Description of Artificial Sequence: Synthetic oligonucleotide
  Target: SCNA; (-) strand; PAM type: NRG; PAM sequence: TAG
ttgttaaagatagctctgca

SEQ ID NO: 18274 - DNA, 20 bp, Artificial Sequence
  Description of Artificial Sequence: Synthetic oligonucleotide
  Target: SCNA; (-) strand; PAM type: NRG; PAM sequence: TAG
tgggatgctcttgttaaaga

SEQ ID NO: 18275 - DNA, 20 bp, Artificial Sequence
  Description of Artificial Sequence: Synthetic oligonucleotide
  Target: SCNA; (-) strand; PAM type: NRG; PAM sequence: AAG
tcaatgggatgctcttgtta

SEQ ID NO: 18276 - DNA, 20 bp, Artificial Sequence
  Description of Artificial Sequence: Synthetic oligonucleotide
  Target: SCNA; (-) strand; PAM type: NRG; PAM sequence: GGG
tattttcttttttcctcaat

SEQ ID NO: 18277 - DNA, 20 bp, Artificial Sequence
  Description of Artificial Sequence: Synthetic oligonucleotide
  Target: SCNA; (-) strand; PAM type: NRG; PAM sequence: TGG
ctattttcttttttcctcaa

SEQ ID NO: 18278 - DNA, 20 bp, Artificial Sequence
  Description of Artificial Sequence: Synthetic oligonucleotide
  Target: SCNA; (-) strand; PAM type: NRG; PAM sequence: AAG
tatctgttggtattagaaaa

SEQ ID NO: 18279 - DNA, 20 bp, Artificial Sequence
  Description of Artificial Sequence: Synthetic oligonucleotide
  Target: SCNA; (-) strand; PAM type: NRG; PAM sequence: TAG
aaagtgatatctgttggtat

SEQ ID NO: 18280 - DNA, 20 bp, Artificial Sequence
  Description of Artificial Sequence: Synthetic oligonucleotide
  Target: SCNA; (-) strand; PAM type: NRG; PAM sequence: TGG
atcaataaagtgatatctgt

SEQ ID NO: 18281 - DNA, 20 bp, Artificial Sequence
  Description of Artificial Sequence: Synthetic oligonucleotide
  Target: SCNA; (-) strand; PAM type: NRG; PAM sequence: AAG
acagaaatgcaatatcaata

SEQ ID NO: 18282 - DNA, 20 bp, Artificial Sequence
  Description of Artificial Sequence: Synthetic oligonucleotide
  Target: SCNA; (-) strand; PAM type: NRG; PAM sequence: CAG
atattctatgtcattatata

SEQ ID NO: 18283 - DNA, 20 bp, Artificial Sequence
  Description of Artificial Sequence: Synthetic oligonucleotide
  Target: SCNA; (-) strand; PAM type: NRG; PAM sequence: GGG
gtcagtaaaactgaactaca

SEQ ID NO: 18284 - DNA, 20 bp, Artificial Sequence
  Description of Artificial Sequence: Synthetic oligonucleotide
  Target: SCNA; (-) strand; PAM type: NRG; PAM sequence: AGG
tgtcagtaaaactgaactac

SEQ ID NO: 18285 - DNA, 20 bp, Artificial Sequence
  Description of Artificial Sequence: Synthetic oligonucleotide
  Target: SCNA; (-) strand; PAM type: NRG; PAM sequence: CAG
ctgtcagtaaaactgaacta

SEQ ID NO: 18286 - DNA, 20 bp, Artificial Sequence
  Description of Artificial Sequence: Synthetic oligonucleotide
  Target: SCNA; (-) strand; PAM type: NRG; PAM sequence: CAG
gatttgtgcaatgttactgt

SEQ ID NO: 18287 - DNA, 20 bp, Artificial Sequence
  Description of Artificial Sequence: Synthetic oligonucleotide
  Target: SCNA; (-) strand; PAM type: NRG; PAM sequence: TAG
caatgtctctgcatagcaca

SEQ ID NO: 18288 - DNA, 20 bp, Artificial Sequence
  Description of Artificial Sequence: Synthetic oligonucleotide
  Target: SCNA; (-) strand; PAM type: NRG; PAM sequence: TAG
aactgtacaatgtctctgca

SEQ ID NO: 18289 - DNA, 20 bp, Artificial Sequence
  Description of Artificial Sequence: Synthetic oligonucleotide
  Target: SCNA; (-) strand; PAM type: NRG; PAM sequence: AAG
caatttagcaatgtccaatc

SEQ ID NO: 18290 - DNA, 20 bp, Artificial Sequence
  Description of Artificial Sequence: Synthetic oligonucleotide
  Target: SCNA; (-) strand; PAM type: NRG; PAM sequence: TAG
tagagatctagtacccaatt

SEQ ID NO: 18291 - DNA, 20 bp, Artificial Sequence
  Description of Artificial Sequence: Synthetic oligonucleotide
  Target: SCNA; (-) strand; PAM type: NRG; PAM sequence: TAG
attccatctctttagagatc

SEQ ID NO: 18292 - DNA, 20 bp, Artificial Sequence
  Description of Artificial Sequence: Synthetic oligonucleotide
  Target: SCNA; (-) strand; PAM type: NRG; PAM sequence: GAG
gggtaaattccatctcttta

SEQ ID NO: 18293 - DNA, 20 bp, Artificial Sequence
  Description of Artificial Sequence: Synthetic oligonucleotide
  Target: SCNA; (-) strand; PAM type: NRG; PAM sequence: TAG
gggggtaaattccatctctt

SEQ ID NO: 18294 - DNA, 20 bp, Artificial Sequence
  Description of Artificial Sequence: Synthetic oligonucleotide
  Target: SCNA; (-) strand; PAM type: NRG; PAM sequence: GGG
aaaggataaagcctactagg

SEQ ID NO: 18295 - DNA, 20 bp, Artificial Sequence
  Description of Artificial Sequence: Synthetic oligonucleotide
  Target: SCNA; (-) strand; PAM type: NRG; PAM sequence: GGG
aaaaggataaagcctactag

SEQ ID NO: 18296 - DNA, 20 bp, Artificial Sequence
  Description of Artificial Sequence: Synthetic oligonucleotide
  Target: SCNA; (-) strand; PAM type: NRG; PAM sequence: GGG
aaaaaggataaagcctacta

SEQ ID NO: 18297 - DNA, 20 bp, Artificial Sequence
  Description of Artificial Sequence: Synthetic oligonucleotide
  Target: SCNA; (-) strand; PAM type: NRG; PAM sequence: AGG
gaaaaaggataaagcctact

SEQ ID NO: 18298 - DNA, 20 bp, Artificial Sequence
  Description of Artificial Sequence: Synthetic oligonucleotide
  Target: SCNA; (-) strand; PAM type: NRG; PAM sequence: TAG
tgaaaaaggataaagcctac

SEQ ID NO: 18299 - DNA, 20 bp, Artificial Sequence
  Description of Artificial Sequence: Synthetic oligonucleotide
  Target: SCNA; (-) strand; PAM type: NRG; PAM sequence: AAG
gagacaagtgaaaaaggata

SEQ ID NO: 18300 - DNA, 20 bp, Artificial Sequence
  Description of Artificial Sequence: Synthetic oligonucleotide
  Target: SCNA; (-) strand; PAM type: NRG; PAM sequence: AGG
aaatctgagacaagtgaaaa

SEQ ID NO: 18301 - DNA, 20 bp, Artificial Sequence
  Description of Artificial Sequence: Synthetic oligonucleotide
  Target: SCNA; (-) strand; PAM type: NRG; PAM sequence: AAG
caaatctgagacaagtgaaa

SEQ ID NO: 18302 - DNA, 20 bp, Artificial Sequence
  Description of Artificial Sequence: Synthetic oligonucleotide
  Target: SCNA; (-) strand; PAM type: NRG; PAM sequence: AAG
atgagttccaaatctgagac

SEQ ID NO: 18303 - DNA, 20 bp, Artificial Sequence
  Description of Artificial Sequence: Synthetic oligonucleotide
  Target: SCNA; (-) strand; PAM type: NRG; PAM sequence: GAG
aagaaatgagttccaaatct

SEQ ID NO: 18304 - DNA, 20 bp, Artificial Sequence
  Description of Artificial Sequence: Synthetic oligonucleotide
  Target: SCNA; (-) strand; PAM type: NRG; PAM sequence: GAG
attttcaacctaaaagaaat

SEQ ID NO: 18305 - DNA, 20 bp, Artificial Sequence
  Description of Artificial Sequence: Synthetic oligonucleotide
  Target: SCNA; (-) strand; PAM type: NRG; PAM sequence: AAG
acataaaattttcaacctaa

SEQ ID NO: 18306 - DNA, 20 bp, Artificial Sequence
  Description of Artificial Sequence: Synthetic oligonucleotide
  Target: SCNA; (-) strand; PAM type: NRG; PAM sequence: AAG
tcttttaattgttaaaattt

SEQ ID NO: 18307 - DNA, 20 bp, Artificial Sequence
  Description of Artificial Sequence: Synthetic oligonucleotide
  Target: SCNA; (-) strand; PAM type: NRG; PAM sequence: AAG
cgtgggtagcattgcatttc

SEQ ID NO: 18308 - DNA, 20 bp, Artificial Sequence
  Description of Artificial Sequence: Synthetic oligonucleotide
  Target: SCNA; (-) strand; PAM type: NRG; PAM sequence: TAG
aaatgacaggcagccgtggg

SEQ ID NO: 18309 - DNA, 20 bp, Artificial Sequence
  Description of Artificial Sequence: Synthetic oligonucleotide
  Target: SCNA; (-) strand; PAM type: NRG; PAM sequence: GGG
ccaaaatgacaggcagccgt

SEQ ID NO: 18310 - DNA, 20 bp, Artificial Sequence
  Description of Artificial Sequence: Synthetic oligonucleotide
  Target: SCNA; (-) strand; PAM type: NRG; PAM sequence: TGG
cccaaaatgacaggcagccg

SEQ ID NO: 18311 - DNA, 20 bp, Artificial Sequence
  Description of Artificial Sequence: Synthetic oligonucleotide
  Target: SCNA; (-) strand; PAM type: NRG; PAM sequence: CAG
gaaactcccaaaatgacagg

SEQ ID NO: 18312 - DNA, 20 bp, Artificial Sequence
  Description of Artificial Sequence: Synthetic oligonucleotide
  Target: SCNA; (-) strand; PAM type: NRG; PAM sequence: AGG
taagaaactcccaaaatgac

SEQ ID NO: 18313 - DNA, 20 bp, Artificial Sequence
  Description of Artificial Sequence: Synthetic oligonucleotide
  Target: SCNA; (-) strand; PAM type: NRG; PAM sequence: CAG
ataagaaactcccaaaatga

SEQ ID NO: 18314 - DNA, 20 bp, Artificial Sequence
  Description of Artificial Sequence: Synthetic oligonucleotide
  Target: SCNA; (-) strand; PAM type: NRG; PAM sequence: AAG
tatccctaaaaagaatctat

SEQ ID NO: 18315 - DNA, 20 bp, Artificial Sequence
  Description of Artificial Sequence: Synthetic oligonucleotide
  Target: SCNA; (-) strand; PAM type: NRG; PAM sequence: AAG
acataattcttatccctaaa

SEQ ID NO: 18316 - DNA, 20 bp, Artificial Sequence
  Description of Artificial Sequence: Synthetic oligonucleotide
  Target: SCNA; (-) strand; PAM type: NRG; PAM sequence: TGG
attaaagcaattctagcatc

SEQ ID NO: 18317 - DNA, 20 bp, Artificial Sequence
  Description of Artificial Sequence: Synthetic oligonucleotide
  Target: SCNA; (-) strand; PAM type: NRG; PAM sequence: TAG
aataaaaattaaagcaattc

SEQ ID NO: 18318 - DNA, 20 bp, Artificial Sequence
  Description of Artificial Sequence: Synthetic oligonucleotide
  Target: SCNA; (-) strand; PAM type: NRG; PAM sequence: AAG
aaactggggaataaaaatta

SEQ ID NO: 18319 - DNA, 20 bp, Artificial Sequence
  Description of Artificial Sequence: Synthetic oligonucleotide
  Target: SCNA; (-) strand; PAM type: NRG; PAM sequence: GGG
aaaatggaaatgagaaactg

SEQ ID NO: 18320 - DNA, 20 bp, Artificial Sequence
  Description of Artificial Sequence: Synthetic oligonucleotide
  Target: SCNA; (-) strand; PAM type: NRG; PAM sequence: GGG
caaaatggaaatgagaaact

SEQ ID NO: 18321 - DNA, 20 bp, Artificial Sequence
  Description of Artificial Sequence: Synthetic oligonucleotide
  Target: SCNA; (-) strand; PAM type: NRG; PAM sequence: TGG
tcaaaatggaaatgagaaac

SEQ ID NO: 18322 - DNA, 20 bp, Artificial Sequence
  Description of Artificial Sequence: Synthetic oligonucleotide
  Target: SCNA; (-) strand; PAM type: NRG; PAM sequence: GAG
ctctttgtcaaaatggaaat

SEQ ID NO: 18323 - DNA, 20 bp, Artificial Sequence
  Description of Artificial Sequence: Synthetic oligonucleotide
  Target: SCNA; (-) strand; PAM type: NRG; PAM sequence: TGG
tttgggcctctttgtcaaaa

SEQ ID NO: 18324 - DNA, 20 bp, Artificial Sequence
  Description of Artificial Sequence: Synthetic oligonucleotide
  Target: SCNA; (-) strand; PAM type: NRG; PAM sequence: GGG
caaaaggctattcatgtttt

SEQ ID NO: 18325 - DNA, 20 bp, Artificial Sequence
  Description of Artificial Sequence: Synthetic oligonucleotide
  Target: SCNA; (-) strand; PAM type: NRG; PAM sequence: TGG
tcaaaaggctattcatgttt

SEQ ID NO: 18326 - DNA, 20 bp, Artificial Sequence
  Description of Artificial Sequence: Synthetic oligonucleotide
  Target: SCNA; (-) strand; PAM type: NRG; PAM sequence: AGG
ggagaaaaaaacagatcaaa

SEQ ID NO: 18327 - DNA, 20 bp, Artificial Sequence
  Description of Artificial Sequence: Synthetic oligonucleotide
  Target: SCNA; (-) strand; PAM type: NRG; PAM sequence: AAG
gggagaaaaaaacagatcaa

SEQ ID NO: 18328 - DNA, 20 bp, Artificial Sequence
  Description of Artificial Sequence: Synthetic oligonucleotide
  Target: SCNA; (-) strand; PAM type: NRG; PAM sequence: CAG
actgatatgggagaaaaaaa

SEQ ID NO: 18329 - DNA, 20 bp, Artificial Sequence
  Description of Artificial Sequence: Synthetic oligonucleotide
  Target: SCNA; (-) strand; PAM type: NRG; PAM sequence: GAG
tctcatgggaactgatatgg

SEQ ID NO: 18330 - DNA, 20 bp, Artificial Sequence
  Description of Artificial Sequence: Synthetic oligonucleotide
  Target: SCNA; (-) strand; PAM type: NRG; PAM sequence: GGG
ggtctcatgggaactgatat

SEQ ID NO: 18331 - DNA, 20 bp, Artificial Sequence
  Description of Artificial Sequence: Synthetic oligonucleotide
  Target: SCNA; (-) strand; PAM type: NRG; PAM sequence: TGG
tggtctcatgggaactgata

SEQ ID NO: 18332 - DNA, 20 bp, Artificial Sequence
  Description of Artificial Sequence: Synthetic oligonucleotide
  Target: SCNA; (-) strand; PAM type: NRG; PAM sequence: GGG
aatgaagtcactggtctcat

SEQ ID NO: 18333 - DNA, 20 bp, Artificial Sequence
  Description of Artificial Sequence: Synthetic oligonucleotide
  Target: SCNA; (-) strand; PAM type: NRG; PAM sequence: TGG
gaatgaagtcactggtctca

SEQ ID NO: 18334 - DNA, 20 bp, Artificial Sequence
  Description of Artificial Sequence: Synthetic oligonucleotide
  Target: SCNA; (-) strand; PAM type: NRG; PAM sequence: TGG
aacagaaagaatgaagtcac

SEQ ID NO: 18335 - DNA, 20 bp, Artificial Sequence
  Description of Artificial Sequence: Synthetic oligonucleotide
  Target: SCNA; (-) strand; PAM type: NRG; PAM sequence: AAG
ctgcaataacagaaagaatg

SEQ ID NO: 18336 - DNA, 20 bp, Artificial Sequence
  Description of Artificial Sequence: Synthetic oligonucleotide
  Target: SCNA; (-) strand; PAM type: NRG; PAM sequence: AAG
tgtaaacctgcaataacaga

SEQ ID NO: 18337 - DNA, 20 bp, Artificial Sequence
  Description of Artificial Sequence: Synthetic oligonucleotide
  Target: SCNA; (-) strand; PAM type: NRG; PAM sequence: CAG
aaaatgtaaacctgcaataa

SEQ ID NO: 18338 - DNA, 20 bp, Artificial Sequence
  Description of Artificial Sequence: Synthetic oligonucleotide
  Target: SCNA; (-) strand; PAM type: NRG; PAM sequence: AAG
agatagtgatacaagaataa

SEQ ID NO: 18339 - DNA, 20 bp, Artificial Sequence
  Description of Artificial Sequence: Synthetic oligonucleotide
  Target: SCNA; (-) strand; PAM type: NRG; PAM sequence: AAG
atgattgaagatagtgatac

SEQ ID NO: 18340 - DNA, 20 bp, Artificial Sequence
  Description of Artificial Sequence: Synthetic oligonucleotide
  Target: SCNA; (-) strand; PAM type: NRG; PAM sequence: TAG
ttggccacaatgattgaaga

SEQ ID NO: 18341 - DNA, 20 bp, Artificial Sequence
  Description of Artificial Sequence: Synthetic oligonucleotide
  Target: SCNA; (-) strand; PAM type: NRG; PAM sequence: AAG
agaattggccacaatgattg

SEQ ID NO: 18342 - DNA, 20 bp, Artificial Sequence
  Description of Artificial Sequence: Synthetic oligonucleotide
  Target: SCNA; (-) strand; PAM type: NRG; PAM sequence: TGG
gagaatgacctggaaagaat

SEQ ID NO: 18343 - DNA, 20 bp, Artificial Sequence
  Description of Artificial Sequence: Synthetic oligonucleotide
  Target: SCNA; (-) strand; PAM type: NRG; PAM sequence: AAG
aggtttgagaatgacctgga

SEQ ID NO: 18344 - DNA, 20 bp, Artificial Sequence
  Description of Artificial Sequence: Synthetic oligonucleotide
  Target: SCNA; (-) strand; PAM type: NRG; PAM sequence: TGG
atggaggtttgagaatgacc

SEQ ID NO: 18345 - DNA, 20 bp, Artificial Sequence
  Description of Artificial Sequence: Synthetic oligonucleotide
  Target: SCNA; (-) strand; PAM type: NRG; PAM sequence: GAG
tagctttgatatggaggttt

SEQ ID NO: 18346 - DNA, 20 bp, Artificial Sequence
  Description of Artificial Sequence: Synthetic oligonucleotide
  Target: SCNA; (-) strand; PAM type: NRG; PAM sequence: AGG
gatctatagctttgatatgg

SEQ ID NO: 18347 - DNA, 20 bp, Artificial Sequence
  Description of Artificial Sequence: Synthetic oligonucleotide
  Target: SCNA; (-) strand; PAM type: NRG; PAM sequence: GAG
tgatctatagctttgatatg

SEQ ID NO: 18348 - DNA, 20 bp, Artificial Sequence
  Description of Artificial Sequence: Synthetic oligonucleotide
  Target: SCNA; (-) strand; PAM type: NRG; PAM sequence: TGG
attgatctatagctttgata

SEQ ID NO: 18349 - DNA, 20 bp, Artificial Sequence
  Description of Artificial Sequence: Synthetic oligonucleotide
  Target: SCNA; (-) strand; PAM type: NRG; PAM sequence: TAG
ttctgatagttattgatcta

SEQ ID NO: 18350 - DNA, 20 bp, Artificial Sequence
  Description of Artificial Sequence: Synthetic oligonucleotide
  Target: SCNA; (-) strand; PAM type: NRG; PAM sequence: TAG
taatgtttaacttgttctga

SEQ ID NO: 18351 - DNA, 20 bp, Artificial Sequence
  Description of Artificial Sequence: Synthetic oligonucleotide
  Target: SCNA; (-) strand; PAM type: NRG; PAM sequence: AAG
gtggttattattataaagaa

SEQ ID NO: 18352 - DNA, 20 bp, Artificial Sequence
  Description of Artificial Sequence: Synthetic oligonucleotide
  Target: SCNA; (-) strand; PAM type: NRG; PAM sequence: AAG
cagtggtggttattattata

SEQ ID NO: 18353 - DNA, 20 bp, Artificial Sequence
  Description of Artificial Sequence: Synthetic oligonucleotide
  Target: SCNA; (-) strand; PAM type: NRG; PAM sequence: TGG
taacaattgcaattcagtgg

SEQ ID NO: 18354 - DNA, 20 bp, Artificial Sequence
  Description of Artificial Sequence: Synthetic oligonucleotide
  Target: SCNA; (-) strand; PAM type: NRG; PAM sequence: TGG
tcataacaattgcaattcag

SEQ ID NO: 18355 - DNA, 20 bp, Artificial Sequence
  Description of Artificial Sequence: Synthetic oligonucleotide
  Target: SCNA; (-) strand; PAM type: NRG; PAM sequence: CAG
acctcataacaattgcaatt

SEQ ID NO: 18356 - DNA, 20 bp, Artificial Sequence
  Description of Artificial Sequence: Synthetic oligonucleotide
  Target: SCNA; (-) strand; PAM type: NRG; PAM sequence: TAG
ataagatttgataaagtgtt

SEQ ID NO: 18357 - DNA, 20 bp, Artificial Sequence
  Description of Artificial Sequence: Synthetic oligonucleotide
  Target: SCNA; (-) strand; PAM type: NRG; PAM sequence: AAG
ctatttcataagatttgata

SEQ ID NO: 18358 - DNA, 20 bp, Artificial Sequence
  Description of Artificial Sequence: Synthetic oligonucleotide
  Target: SCNA; (-) strand; PAM type: NRG; PAM sequence: AAG
aaaaattacccctatttcat

SEQ ID NO: 18359 - DNA, 20 bp, Artificial Sequence
  Description of Artificial Sequence: Synthetic oligonucleotide
  Target: SCNA; (-) strand; PAM type: NRG; PAM sequence: GAG
ctcaagttctcatgtgagat

SEQ ID NO: 18360 - DNA, 20 bp, Artificial Sequence
  Description of Artificial Sequence: Synthetic oligonucleotide
  Target: SCNA; (-) strand; PAM type: NRG; PAM sequence: GAG
tgtgcctcaagttctcatgt

SEQ ID NO: 18361 - DNA, 20 bp, Artificial Sequence
  Description of Artificial Sequence: Synthetic oligonucleotide
  Target: SCNA; (-) strand; PAM type: NRG; PAM sequence: AAG
ccttaatttttatgtgcctc

SEQ ID NO: 18362 - DNA, 20 bp, Artificial Sequence
  Description of Artificial Sequence: Synthetic oligonucleotide
  Target: SCNA; (-) strand; PAM type: NRG; PAM sequence: GGG
cttgccagccatgagacctg

SEQ ID NO: 18363 - DNA, 20 bp, Artificial Sequence
  Description of Artificial Sequence: Synthetic oligonucleotide
  Target: SCNA; (-) strand; PAM type: NRG; PAM sequence: GGG
acttgccagccatgagacct

SEQ ID NO: 18364 - DNA, 20 bp, Artificial Sequence
  Description of Artificial Sequence: Synthetic oligonucleotide
  Target: SCNA; (-) strand; PAM type: NRG; PAM sequence: TGG
cacttgccagccatgagacc

SEQ ID NO: 18365 - DNA, 20 bp, Artificial Sequence
  Description of Artificial Sequence: Synthetic oligonucleotide
  Target: SCNA; (-) strand; PAM type: NRG; PAM sequence: GAG
acagaccacttgccagccat

SEQ ID NO: 18366 - DNA, 20 bp, Artificial Sequence
  Description of Artificial Sequence: Synthetic oligonucleotide
  Target: SCNA; (-) strand; PAM type: NRG; PAM sequence: CAG
ctgtcagacagaccacttgc

SEQ ID NO: 18367 - DNA, 20 bp, Artificial Sequence
  Description of Artificial Sequence: Synthetic oligonucleotide
  Target: SCNA; (-) strand; PAM type: NRG; PAM sequence: CAG
gctggctctctactgtcaga

SEQ ID NO: 18368 - DNA, 20 bp, Artificial Sequence
  Description of Artificial Sequence: Synthetic oligonucleotide
  Target: SCNA; (-) strand; PAM type: NRG; PAM sequence: CAG
tgaagctggctctctactgt

SEQ ID NO: 18369 - DNA, 20 bp, Artificial Sequence
  Description of Artificial Sequence: Synthetic oligonucleotide
  Target: SCNA; (-) strand; PAM type: NRG; PAM sequence: TGG
tatagtacagtgcttgaagc

SEQ ID NO: 18370 - DNA, 20 bp, Artificial Sequence
  Description of Artificial Sequence: Synthetic oligonucleotide
  Target: SCNA; (-) strand; PAM type: NRG; PAM sequence: AAG
gccctatagtacagtgcttg

SEQ ID NO: 18371 - DNA, 20 bp, Artificial Sequence
  Description of Artificial Sequence: Synthetic oligonucleotide
  Target: SCNA; (-) strand; PAM type: NRG; PAM sequence: CAG
gacacagtggccctatagta

SEQ ID NO: 18372 - DNA, 20 bp, Artificial Sequence
  Description of Artificial Sequence: Synthetic oligonucleotide
  Target: SCNA; (-) strand; PAM type: NRG; PAM sequence: TAG
gtcatgacacagtggcccta

SEQ ID NO: 18373 - DNA, 20 bp, Artificial Sequence
  Description of Artificial Sequence: Synthetic oligonucleotide
  Target: SCNA; (-) strand; PAM type: NRG; PAM sequence: TGG
ggtttatagtcatgacacag

SEQ ID NO: 18374 - DNA, 20 bp, Artificial Sequence
  Description of Artificial Sequence: Synthetic oligonucleotide
  Target: SCNA; (-) strand; PAM type: NRG; PAM sequence: CAG
aaaggtttatagtcatgaca

SEQ ID NO: 18375 - DNA, 20 bp, Artificial Sequence
  Description of Artificial Sequence: Synthetic oligonucleotide
  Target: SCNA; (-) strand; PAM type: NRG; PAM sequence: TAG
accatgccatgaaaggttta

SEQ ID NO: 18376 - DNA, 20 bp, Artificial Sequence
  Description of Artificial Sequence: Synthetic oligonucleotide
  Target: SCNA; (-) strand; PAM type: NRG; PAM sequence: AGG
tgtatagaccatgccatgaa

SEQ ID NO: 18377 - DNA, 20 bp, Artificial Sequence
  Description of Artificial Sequence: Synthetic oligonucleotide
  Target: SCNA; (-) strand; PAM type: NRG; PAM sequence: AAG
atgtatagaccatgccatga

SEQ ID NO: 18378 - DNA, 20 bp, Artificial Sequence
  Description of Artificial Sequence: Synthetic oligonucleotide
  Target: SCNA; (-) strand; PAM type: NRG; PAM sequence: TAG
agctgaagagcccaaatgta

SEQ ID NO: 18379 - DNA, 20 bp, Artificial Sequence
  Description of Artificial Sequence: Synthetic oligonucleotide
  Target: SCNA; (-) strand; PAM type: NRG; PAM sequence: GAG
tagataaatttgaagctgaa

SEQ ID NO: 18380 - DNA, 20 bp, Artificial Sequence
  Description of Artificial Sequence: Synthetic oligonucleotide
  Target: SCNA; (-) strand; PAM type: NRG; PAM sequence: AAG
gatagataaatttgaagctg

SEQ ID NO: 18381 - DNA, 20 bp, Artificial Sequence
  Description of Artificial Sequence: Synthetic oligonucleotide
  Target: SCNA; (-) strand; PAM type: NRG; PAM sequence: AAG
ctgcatgatagataaatttg

SEQ ID NO: 18382 - DNA, 20 bp, Artificial Sequence
  Description of Artificial Sequence: Synthetic oligonucleotide
  Target: SCNA; (-) strand; PAM type: NRG; PAM sequence: TAG
ctagtgtcatgcctgcatga

SEQ ID NO: 18383 - DNA, 20 bp, Artificial Sequence
  Description of Artificial Sequence: Synthetic oligonucleotide
  Target: SCNA; (-) strand; PAM type: NRG; PAM sequence: TAG
ttccagtgcaagtgaaaacc

SEQ ID NO: 18384 - DNA, 20 bp, Artificial Sequence
  Description of Artificial Sequence: Synthetic oligonucleotide
  Target: SCNA; (-) strand; PAM type: NRG; PAM sequence: AAG
cagcagttgacttccagtgc

SEQ ID NO: 18385 - DNA, 20 bp, Artificial Sequence
  Description of Artificial Sequence: Synthetic oligonucleotide
  Target: SCNA; (-) strand; PAM type: NRG; PAM sequence: CAG
attttccagcagttgacttc

SEQ ID NO: 18386 - DNA, 20 bp, Artificial Sequence
  Description of Artificial Sequence: Synthetic oligonucleotide
  Target: SCNA; (-) strand; PAM type: NRG; PAM sequence: CAG
tctacagactaattttccag

SEQ ID NO: 18387 - DNA, 20 bp, Artificial Sequence
  Description of Artificial Sequence: Synthetic oligonucleotide
  Target: SCNA; (-) strand; PAM type: NRG; PAM sequence: CAG
ttttctacagactaattttc

SEQ ID NO: 18388 - DNA, 20 bp, Artificial Sequence
  Description of Artificial Sequence: Synthetic oligonucleotide
  Target: SCNA; (-) strand; PAM type: NRG; PAM sequence: CAG
ctgtggcctacggttttcta

SEQ ID NO: 18389 - DNA, 20 bp, Artificial Sequence
  Description of Artificial Sequence: Synthetic oligonucleotide
  Target: SCNA; (-) strand; PAM type: NRG; PAM sequence: CGG
ttcaggaactctgtggccta

SEQ ID NO: 18390 - DNA, 20 bp, Artificial Sequence
  Description of Artificial Sequence: Synthetic oligonucleotide
  Target: SCNA; (-) strand; PAM type: NRG; PAM sequence: TGG
taacacattcaggaactctg

SEQ ID NO: 18391 - DNA, 20 bp, Artificial Sequence
  Description of Artificial Sequence: Synthetic oligonucleotide
  Target: SCNA; (-) strand; PAM type: NRG; PAM sequence: AGG
agcctcttactaacacattc

SEQ ID NO: 18392 - DNA, 20 bp, Artificial Sequence
  Description of Artificial Sequence: Synthetic oligonucleotide
  Target: SCNA; (-) strand; PAM type: NRG; PAM sequence: CAG
aagcctcttactaacacatt

SEQ ID NO: 18393 - DNA, 20 bp, Artificial Sequence
  Description of Artificial Sequence: Synthetic oligonucleotide
  Target: SCNA; (-) strand; PAM type: NRG; PAM sequence: AAG
gcccatccaaaataaaatct

SEQ ID NO: 18394 - DNA, 20 bp, Artificial Sequence
  Description of Artificial Sequence: Synthetic oligonucleotide
  Target: SCNA; (-) strand; PAM type: NRG; PAM sequence: CAG
acaacccttcaattatttcc

SEQ ID NO: 18395 - DNA, 20 bp, Artificial Sequence
  Description of Artificial Sequence: Synthetic oligonucleotide
  Target: SCNA; (-) strand; PAM type: NRG; PAM sequence: TAG
tctttcccccaatctccaat

SEQ ID NO: 18396 - DNA, 20 bp, Artificial Sequence
  Description of Artificial Sequence: Synthetic oligonucleotide
  Target: SCNA; (-) strand; PAM type: NRG; PAM sequence: GGG
gccaacattatcacagttta

SEQ ID NO: 18397 - DNA, 20 bp, Artificial Sequence
  Description of Artificial Sequence: Synthetic oligonucleotide
  Target: SCNA; (-) strand; PAM type: NRG; PAM sequence: AGG
tgccaacattatcacagttt

SEQ ID NO: 18398 - DNA, 20 bp, Artificial Sequence
  Description of Artificial Sequence: Synthetic oligonucleotide
  Target: SCNA; (-) strand; PAM type: NRG; PAM sequence: TAG
ttgccaacattatcacagtt

SEQ ID NO: 18399 - DNA, 20 bp, Artificial Sequence
  Description of Artificial Sequence: Synthetic oligonucleotide
  Target: SCNA; (-) strand; PAM type: NRG; PAM sequence: CAG
caagcttgccaacattatca

SEQ ID NO: 18400 - DNA, 20 bp, Artificial Sequence
  Description of Artificial Sequence: Synthetic oligonucleotide
  Target: SCNA; (-) strand; PAM type: NRG; PAM sequence: AAG
ctgattctgtccctcccttc

SEQ ID NO: 18401 - DNA, 20 bp, Artificial Sequence
  Description of Artificial Sequence: Synthetic oligonucleotide
  Target: SCNA; (-) strand; PAM type: NRG; PAM sequence: TAG
gccagtaaatcacaggggcc

SEQ ID NO: 18402 - DNA, 20 bp, Artificial Sequence
  Description of Artificial Sequence: Synthetic oligonucleotide
  Target: SCNA; (-) strand; PAM type: NRG; PAM sequence: GGG
ctccagccagtaaatcacag

SEQ ID NO: 18403 - DNA, 20 bp, Artificial Sequence
  Description of Artificial Sequence: Synthetic oligonucleotide
  Target: SCNA; (-) strand; PAM type: NRG; PAM sequence: GGG
cctccagccagtaaatcaca

SEQ ID NO: 18404 - DNA, 20 bp, Artificial Sequence
  Description of Artificial Sequence: Synthetic oligonucleotide
  Target: SCNA; (-) strand; PAM type: NRG; PAM sequence: AGG
tcctccagccagtaaatcac

SEQ ID NO: 18405 - DNA, 20 bp, Artificial Sequence
  Description of Artificial Sequence: Synthetic oligonucleotide
  Target: SCNA; (-) strand; PAM type: NRG; PAM sequence: CAG
atcctccagccagtaaatca

SEQ ID NO: 18406 - DNA, 20 bp, Artificial Sequence
  Description of Artificial Sequence: Synthetic oligonucleotide
  Target: SCNA; (-) strand; PAM type: NRG; PAM sequence: CAG
tcacctgctcatcctccagc

SEQ ID NO: 18407 - DNA, 20 bp, Artificial Sequence
  Description of Artificial Sequence: Synthetic oligonucleotide
  Target: SCNA; (-) strand; PAM type: NRG; PAM sequence: CAG
cctctcacctgctcatcctc

SEQ ID NO: 18408 - DNA, 20 bp, Artificial Sequence
  Description of Artificial Sequence: Synthetic oligonucleotide
  Target: SCNA; (-) strand; PAM type: NRG; PAM sequence: AAG
ccccaactcatgaacacatg

SEQ ID NO: 18409 - DNA, 20 bp, Artificial Sequence
  Description of Artificial Sequence: Synthetic oligonucleotide
  Target: SCNA; (-) strand; PAM type: NRG; PAM sequence: TGG
ctggtctctgtgtcagtccc

SEQ ID NO: 18410 - DNA, 20 bp, Artificial Sequence
  Description of Artificial Sequence: Synthetic oligonucleotide
  Target: SCNA; (-) strand; PAM type: NRG; PAM sequence: CAG
tgtgtgtctggtctctgtgt

SEQ ID NO: 18411 - DNA, 20 bp, Artificial Sequence
  Description of Artificial Sequence: Synthetic oligonucleotide
  Target: SCNA; (-) strand; PAM type: NRG; PAM sequence: TGG
tgaagcacccactgtgtgtc

SEQ ID NO: 18412 - DNA, 20 bp, Artificial Sequence
  Description of Artificial Sequence: Synthetic oligonucleotide
  Target: SCNA; (-) strand; PAM type: NRG; PAM sequence: AAG
tcattcaacagctatccatg

SEQ ID NO: 18413 - DNA, 20 bp, Artificial Sequence
  Description of Artificial Sequence: Synthetic oligonucleotide
  Target: SCNA; (-) strand; PAM type: NRG; PAM sequence: CAG
gattttcacaaatcattcaa

SEQ ID NO: 18414 - DNA, 20 bp, Artificial Sequence
  Description of Artificial Sequence: Synthetic oligonucleotide
  Target: SCNA; (-) strand; PAM type: NRG; PAM sequence: AAG
ctcagatatggcaccttgag

SEQ ID NO: 18415 - DNA, 20 bp, Artificial Sequence
  Description of Artificial Sequence: Synthetic oligonucleotide
  Target: SCNA; (-) strand; PAM type: NRG; PAM sequence: GAG
caactcagatatggcacctt

SEQ ID NO: 18416 - DNA, 20 bp, Artificial Sequence
  Description of Artificial Sequence: Synthetic oligonucleotide
  Target: SCNA; (-) strand; PAM type: NRG; PAM sequence: TGG
tcaaagccacaactcagata

SEQ ID NO: 18417 - DNA, 20 bp, Artificial Sequence
  Description of Artificial Sequence: Synthetic oligonucleotide
  Target: SCNA; (-) strand; PAM type: NRG; PAM sequence: CAG
accagatcaaagccacaact

SEQ ID NO: 18418 - DNA, 20 bp, Artificial Sequence
  Description of Artificial Sequence: Synthetic oligonucleotide
  Target: SCNA; (-) strand; PAM type: NRG; PAM sequence: AAG
caaagtcaggaaccagatca

SEQ ID NO: 18419 - DNA, 20 bp, Artificial Sequence
  Description of Artificial Sequence: Synthetic oligonucleotide
  Target: SCNA; (-) strand; PAM type: NRG; PAM sequence: CAG
aataattcaaagtcaggaac

SEQ ID NO: 18420 - DNA, 20 bp, Artificial Sequence
  Description of Artificial Sequence: Synthetic oligonucleotide
  Target: SCNA; (-) strand; PAM type: NRG; PAM sequence: AGG
gaacaaaataattcaaagtc

SEQ ID NO: 18421 - DNA, 20 bp, Artificial Sequence
  Description of Artificial Sequence: Synthetic oligonucleotide
  Target: SCNA; (-) strand; PAM type: NRG; PAM sequence: CAG
ggaacaaaataattcaaagt

SEQ ID NO: 18422 - DNA, 20 bp, Artificial Sequence
  Description of Artificial Sequence: Synthetic oligonucleotide
  Target: SCNA; (-) strand; PAM type: NRG; PAM sequence: AAG
cataggaacaaaataattca

SEQ ID NO: 18423 - DNA, 20 bp, Artificial Sequence
  Description of Artificial Sequence: Synthetic oligonucleotide
  Target: SCNA; (-) strand; PAM type: NRG; PAM sequence: AGG
tacaaagtcctgtacttcat

SEQ ID NO: 18424 - DNA, 20 bp, Artificial Sequence
  Description of Artificial Sequence: Synthetic oligonucleotide
  Target: SCNA; (-) strand; PAM type: NRG; PAM sequence: TAG
ttacaaagtcctgtacttca

SEQ ID NO: 18425 - DNA, 20 bp, Artificial Sequence
  Description of Artificial Sequence: Synthetic oligonucleotide
  Target: SCNA; (-) strand; PAM type: NRG; PAM sequence: AAG
tatggtggatttttattaca

SEQ ID NO: 18426 - DNA, 20 bp, Artificial Sequence
  Description of Artificial Sequence: Synthetic oligonucleotide
  Target: SCNA; (-) strand; PAM type: NRG; PAM sequence: TGG
ccaggggattttgtgtatgg

SEQ ID NO: 18427 - DNA, 20 bp, Artificial Sequence
  Description of Artificial Sequence: Synthetic oligonucleotide
  Target: SCNA; (-) strand; PAM type: NRG; PAM sequence: TGG
agtccaggggattttgtgta

SEQ ID NO: 18428 - DNA, 20 bp, Artificial Sequence
  Description of Artificial Sequence: Synthetic oligonucleotide
  Target: SCNA; (-) strand; PAM type: NRG; PAM sequence: GGG
ggagatattcttaagtccag

SEQ ID NO: 18429 - DNA, 20 bp, Artificial Sequence
  Description of Artificial Sequence: Synthetic oligonucleotide
  Target: SCNA; (-) strand; PAM type: NRG; PAM sequence: GGG
tggagatattcttaagtcca

SEQ ID NO: 18430 - DNA, 20 bp, Artificial Sequence
  Description of Artificial Sequence: Synthetic oligonucleotide
  Target: SCNA; (-) strand; PAM type: NRG; PAM sequence: AGG
gtggagatattcttaagtcc

SEQ ID NO: 18431 - DNA, 20 bp, Artificial Sequence
  Description of Artificial Sequence: Synthetic oligonucleotide
  Target: SCNA; (-) strand; PAM type: NRG; PAM sequence: CAG
tgtggagatattcttaagtc

SEQ ID NO: 18432 - DNA, 20 bp, Artificial Sequence
  Description of Artificial Sequence: Synthetic oligonucleotide
  Target: SCNA; (-) strand; PAM type: NRG; PAM sequence: AAG
taacttgtggagatattctt

SEQ ID NO: 18433 - DNA, 20 bp, Artificial Sequence
  Description of Artificial Sequence: Synthetic oligonucleotide
  Target: SCNA; (-) strand; PAM type: NRG; PAM sequence: GAG
ttcaattcttataacttgtg

SEQ ID NO: 18434 - DNA, 20 bp, Artificial Sequence
  Description of Artificial Sequence: Synthetic oligonucleotide
  Target: SCNA; (-) strand; PAM type: NRG; PAM sequence: TGG
gtttcaattcttataacttg

SEQ ID NO: 18435 - DNA, 20 bp, Artificial Sequence
  Description of Artificial Sequence: Synthetic oligonucleotide
  Target: SCNA; (-) strand; PAM type: NRG; PAM sequence: CAG
aagcaattgttccttctaag

SEQ ID NO: 18436 - DNA, 20 bp, Artificial Sequence
  Description of Artificial Sequence: Synthetic oligonucleotide
  Target: SCNA; (-) strand; PAM type: NRG; PAM sequence: AAG
tacaagcaattgttccttct

SEQ ID NO: 18437 - DNA, 20 bp, Artificial Sequence
  Description of Artificial Sequence: Synthetic oligonucleotide
  Target: SCNA; (-) strand; PAM type: NRG; PAM sequence: AAG
gaggatgactggctgagtac

SEQ ID NO: 18438 - DNA, 20 bp, Artificial Sequence
  Description of Artificial Sequence: Synthetic oligonucleotide
  Target: SCNA; (-) strand; PAM type: NRG; PAM sequence: GAG
gcagctgaggatgactggct

SEQ ID NO: 18439 - DNA, 20 bp, Artificial Sequence
  Description of Artificial Sequence: Synthetic oligonucleotide
  Target: SCNA; (-) strand; PAM type: NRG; PAM sequence: TGG
ctcatgcagctgaggatgac

SEQ ID NO: 18440 - DNA, 20 bp, Artificial Sequence
  Description of Artificial Sequence: Synthetic oligonucleotide
  Target: SCNA; (-) strand; PAM type: NRG; PAM sequence: AGG
ttttgagactcatgcagctg

SEQ ID NO: 18441 - DNA, 20 bp, Artificial Sequence
  Description of Artificial Sequence: Synthetic oligonucleotide
  Target: SCNA; (-) strand; PAM type: NRG; PAM sequence: GAG
gttttgagactcatgcagct

SEQ ID NO: 18442 - DNA, 20 bp, Artificial Sequence
  Description of Artificial Sequence: Synthetic oligonucleotide
  Target: SCNA; (-) strand; PAM type: NRG; PAM sequence: CAG
cccccgttttgagactcatg

SEQ ID NO: 18443 - DNA, 20 bp, Artificial Sequence
  Description of Artificial Sequence: Synthetic oligonucleotide
  Target: SCNA; (-) strand; PAM type: NRG; PAM sequence: GAG
acactctccacccccgtttt

SEQ ID NO: 18444 - DNA, 20 bp, Artificial Sequence
  Description of Artificial Sequence: Synthetic oligonucleotide
  Target: SCNA; (-) strand; PAM type: NRG; PAM sequence: TAG
aaaaccttttctggaggagg

SEQ ID NO: 18445 - DNA, 20 bp, Artificial Sequence
  Description of Artificial Sequence: Synthetic oligonucleotide
  Target: SCNA; (-) strand; PAM type: NRG; PAM sequence: AGG
ctaaaaaccttttctggagg

SEQ ID NO: 18446 - DNA, 20 bp, Artificial Sequence
  Description of Artificial Sequence: Synthetic oligonucleotide
  Target: SCNA; (-) strand; PAM type: NRG; PAM sequence: GAG
tctaaaaaccttttctggag

SEQ ID NO: 18447 - DNA, 20 bp, Artificial Sequence
  Description of Artificial Sequence: Synthetic oligonucleotide
  Target: SCNA; (-) strand; PAM type: NRG; PAM sequence: AGG
gctctaaaaaccttttctgg

SEQ ID NO: 18448 - DNA, 20 bp, Artificial Sequence
  Description of Artificial Sequence: Synthetic oligonucleotide
  Target: SCNA; (-) strand; PAM type: NRG; PAM sequence: GAG
cgctctaaaaaccttttctg

SEQ ID NO: 18449 - DNA, 20 bp, Artificial Sequence
  Description of Artificial Sequence: Synthetic oligonucleotide
  Target: SCNA; (-) strand; PAM type: NRG; PAM sequence: TGG
ttcgctctaaaaaccttttc

SEQ ID NO: 18450 - DNA, 20 bp, Artificial Sequence
  Description of Artificial Sequence: Synthetic oligonucleotide
  Target: SCNA; (-) strand; PAM type: NRG; PAM sequence: CAG
taattttggtggagaagagg

SEQ ID NO: 18451 - DNA, 20 bp, Artificial Sequence
  Description of Artificial Sequence: Synthetic oligonucleotide
  Target: SCNA; (-) strand; PAM type: NRG; PAM sequence: AGG
aaataattttggtggagaag

SEQ ID NO: 18452 - DNA, 20 bp, Artificial Sequence
  Description of Artificial Sequence: Synthetic oligonucleotide
  Target: SCNA; (-) strand; PAM type: NRG; PAM sequence: GAG
caaataattttggtggagaa

SEQ ID NO: 18453 - DNA, 20 bp, Artificial Sequence
  Description of Artificial Sequence: Synthetic oligonucleotide
  Target: SCNA; (-) strand; PAM type: NRG; PAM sequence: AAG
gacaaataattttggtggag

SEQ ID NO: 18454 - DNA, 20 bp, Artificial Sequence
  Description of Artificial Sequence: Synthetic oligonucleotide
  Target: SCNA; (-) strand; PAM type: NRG; PAM sequence: GAG
taagacaaataattttggtg

SEQ ID NO: 18455 - DNA, 20 bp, Artificial Sequence
  Description of Artificial Sequence: Synthetic oligonucleotide
  Target: SCNA; (-) strand; PAM type: NRG; PAM sequence: TGG
cttaagacaaataattttgg

SEQ ID NO: 18456 - DNA, 20 bp, Artificial Sequence
  Description of Artificial Sequence: Synthetic oligonucleotide
  Target: SCNA; (-) strand; PAM type: NRG; PAM sequence: TGG
catcttaagacaaataattt

SEQ ID NO: 18457 - DNA, 20 bp, Artificial Sequence
  Description of Artificial Sequence: Synthetic oligonucleotide
  Target: SCNA; (-) strand; PAM type: NRG; PAM sequence: AAG
aggtttcttgtccccatctt

SEQ ID NO: 18458 - DNA, 20 bp, Artificial Sequence
  Description of Artificial Sequence: Synthetic oligonucleotide
  Target: SCNA; (-) strand; PAM type: NRG; PAM sequence: AGG
tgtccttactcctgggtgcc

SEQ ID NO: 18459 - DNA, 20 bp, Artificial Sequence
  Description of Artificial Sequence: Synthetic oligonucleotide
  Target: SCNA; (-) strand; PAM type: NRG; PAM sequence: CAG
gtgtccttactcctgggtgc

SEQ ID NO: 18460 - DNA, 20 bp, Artificial Sequence
  Description of Artificial Sequence: Synthetic oligonucleotide
  Target: SCNA; (-) strand; PAM type: NRG; PAM sequence: GGG
acgtctgtgtccttactcct

SEQ ID NO: 18461 - DNA, 20 bp, Artificial Sequence
  Description of Artificial Sequence: Synthetic oligonucleotide
  Target: SCNA; (-) strand; PAM type: NRG; PAM sequence: TGG
cacgtctgtgtccttactcc

SEQ ID NO: 18462 - DNA, 20 bp, Artificial Sequence
  Description of Artificial Sequence: Synthetic oligonucleotide
  Target: SCNA; (-) strand; PAM type: NRG; PAM sequence: GAG
agcttcagcttaaaatgaga

SEQ ID NO: 18463 - DNA, 20 bp, Artificial Sequence
  Description of Artificial Sequence: Synthetic oligonucleotide
  Target: SCNA; (-) strand; PAM type: NRG; PAM sequence: GAG
tcagcttcagcttaaaatga

SEQ ID NO: 18464 - DNA, 20 bp, Artificial Sequence
  Description of Artificial Sequence: Synthetic oligonucleotide
  Target: SCNA; (-) strand; PAM type: NRG; PAM sequence: GAG
gttcagcttcagcttaaaat

SEQ ID NO: 18465 - DNA, 20 bp, Artificial Sequence
  Description of Artificial Sequence: Synthetic oligonucleotide
  Target: SCNA; (-) strand; PAM type: NRG; PAM sequence: CAG
aggacaagacagttcagctt

SEQ ID NO: 18466 - DNA, 20 bp, Artificial Sequence
  Description of Artificial Sequence: Synthetic oligonucleotide
  Target: SCNA; (-) strand; PAM type: NRG; PAM sequence: CAG
gtttttaggacaagacagtt

SEQ ID NO: 18467 - DNA, 20 bp, Artificial Sequence
  Description of Artificial Sequence: Synthetic oligonucleotide
  Target: SCNA; (-) strand; PAM type: NRG; PAM sequence: CAG
catatgtttttaggacaaga

SEQ ID NO: 18468 - DNA, 20 bp, Artificial Sequence
  Description of Artificial Sequence: Synthetic oligonucleotide
  Target: SCNA; (-) strand; PAM type: NRG; PAM sequence: AAG
tgggcatatgtttttaggac

SEQ ID NO: 18469 - DNA, 20 bp, Artificial Sequence
  Description of Artificial Sequence: Synthetic oligonucleotide
  Target: SCNA; (-) strand; PAM type: NRG; PAM sequence: AGG
gagtctgggcatatgttttt

SEQ ID NO: 18470 - DNA, 20 bp, Artificial Sequence
  Description of Artificial Sequence: Synthetic oligonucleotide
  Target: SCNA; (-) strand; PAM type: NRG; PAM sequence: TAG
agagtctgggcatatgtttt

SEQ ID NO: 18471 - DNA, 20 bp, Artificial Sequence
  Description of Artificial Sequence: Synthetic oligonucleotide
  Target: SCNA; (-) strand; PAM type: NRG; PAM sequence: GGG
agagagcttttctagagtct

SEQ ID NO: 18472 - DNA, 20 bp, Artificial Sequence
  Description of Artificial Sequence: Synthetic oligonucleotide
  Target: SCNA; (-) strand; PAM type: NRG; PAM sequence: TGG
aagagagcttttctagagtc

SEQ ID NO: 18473 - DNA, 20 bp, Artificial Sequence
  Description of Artificial Sequence: Synthetic oligonucleotide
  Target: SCNA; (-) strand; PAM type: NRG; PAM sequence: GAG
tgtctaagagagcttttcta

SEQ ID NO: 18474 - DNA, 20 bp, Artificial Sequence
  Description of Artificial Sequence: Synthetic oligonucleotide
  Target: SCNA; (-) strand; PAM type: NRG; PAM sequence: TAG
tctgtctaagagagcttttc

SEQ ID NO: 18475 - DNA, 20 bp, Artificial Sequence
  Description of Artificial Sequence: Synthetic oligonucleotide
  Target: SCNA; (-) strand; PAM type: NRG; PAM sequence: GAG
aattagcagtctgtctaaga

SEQ ID NO: 18476 - DNA, 20 bp, Artificial Sequence
  Description of Artificial Sequence: Synthetic oligonucleotide
  Target: SCNA; (-) strand; PAM type: NRG; PAM sequence: GAG
gaaattagcagtctgtctaa

SEQ ID NO: 18477 - DNA, 20 bp, Artificial Sequence
  Description of Artificial Sequence: Synthetic oligonucleotide
  Target: SCNA; (-) strand; PAM type: NRG; PAM sequence: AAG
gagaaattagcagtctgtct

SEQ ID NO: 18478 - DNA, 20 bp, Artificial Sequence
  Description of Artificial Sequence: Synthetic oligonucleotide
  Target: SCNA; (-) strand; PAM type: NRG; PAM sequence: CAG
gacagaaatggagaaattag

SEQ ID NO: 18479 - DNA, 20 bp, Artificial Sequence
  Description of Artificial Sequence: Synthetic oligonucleotide
  Target: SCNA; (-) strand; PAM type: NRG; PAM sequence: TAG
agtgacagaaatggagaaat

SEQ ID NO: 18480 - DNA, 20 bp, Artificial Sequence
  Description of Artificial Sequence: Synthetic oligonucleotide
  Target: SCNA; (-) strand; PAM type: NRG; PAM sequence: GAG
cctcttaagtgacagaaatg

SEQ ID NO: 18481 - DNA, 20 bp, Artificial Sequence
  Description of Artificial Sequence: Synthetic oligonucleotide
  Target: SCNA; (-) strand; PAM type: NRG; PAM sequence: TGG
atcctcttaagtgacagaaa

SEQ ID NO: 18482 - DNA, 20 bp, Artificial Sequence
  Description of Artificial Sequence: Synthetic oligonucleotide
  Target: SCNA; (-) strand; PAM type: NRG; PAM sequence: CAG
cctaaaatcctcttaagtga

SEQ ID NO: 18483 - DNA, 20 bp, Artificial Sequence
  Description of Artificial Sequence: Synthetic oligonucleotide
  Target: SCNA; (-) strand; PAM type: NRG; PAM sequence: AAG
tatgtccctaaaatcctctt

SEQ ID NO: 18484 - DNA, 20 bp, Artificial Sequence
  Description of Artificial Sequence: Synthetic oligonucleotide
  Target: SCNA; (-) strand; PAM type: NRG; PAM sequence: AAG
gctgcagaatggaattctca

SEQ ID NO: 18485 - DNA, 20 bp, Artificial Sequence
  Description of Artificial Sequence: Synthetic oligonucleotide
  Target: SCNA; (-) strand; PAM type: NRG; PAM sequence: TGG
tacctctgaaagctgcagaa

SEQ ID NO: 18486 - DNA, 20 bp, Artificial Sequence
  Description of Artificial Sequence: Synthetic oligonucleotide
  Target: SCNA; (-) strand; PAM type: NRG; PAM sequence: CAG
tgtattacctctgaaagctg

SEQ ID NO: 18487 - DNA, 20 bp, Artificial Sequence
  Description of Artificial Sequence: Synthetic oligonucleotide
  Target: SCNA; (-) strand; PAM type: NRG; PAM sequence: AAG
ttggattgtattacctctga

SEQ ID NO: 18488 - DNA, 20 bp, Artificial Sequence
  Description of Artificial Sequence: Synthetic oligonucleotide
  Target: SCNA; (-) strand; PAM type: NRG; PAM sequence: TGG
cataagcccactatgagtat

SEQ ID NO: 18489 - DNA, 20 bp, Artificial Sequence
  Description of Artificial Sequence: Synthetic oligonucleotide
  Target: SCNA; (-) strand; PAM type: NRG; PAM sequence: GAG
gtacaccataagcccactat

SEQ ID NO: 18490 - DNA, 20 bp, Artificial Sequence
  Description of Artificial Sequence: Synthetic oligonucleotide
  Target: SCNA; (-) strand; PAM type: NRG; PAM sequence: AAG
aaaagtgccgggtacaccat

SEQ ID NO: 18491 - DNA, 20 bp, Artificial Sequence
  Description of Artificial Sequence: Synthetic oligonucleotide
  Target: SCNA; (-) strand; PAM type: NRG; PAM sequence: GGG
agaatgtttggaaaagtgcc

SEQ ID NO: 18492 - DNA, 20 bp, Artificial Sequence
  Description of Artificial Sequence: Synthetic oligonucleotide
  Target: SCNA; (-) strand; PAM type: NRG; PAM sequence: CGG
tagaatgtttggaaaagtgc

SEQ ID NO: 18493 - DNA, 20 bp, Artificial Sequence
  Description of Artificial Sequence: Synthetic oligonucleotide
  Target: SCNA; (-) strand; PAM type: NRG; PAM sequence: AAG
aacaagtagaatgtttggaa

SEQ ID NO: 18494 - DNA, 20 bp, Artificial Sequence
  Description of Artificial Sequence: Synthetic oligonucleotide
  Target: SCNA; (-) strand; PAM type: NRG; PAM sequence: TGG
gctataacaagtagaatgtt

SEQ ID NO: 18495 - DNA, 20 bp, Artificial Sequence
  Description of Artificial Sequence: Synthetic oligonucleotide
  Target: SCNA; (-) strand; PAM type: NRG; PAM sequence: TAG
attaaagaagctataacaag

SEQ ID NO: 18496 - DNA, 20 bp, Artificial Sequence
  Description of Artificial Sequence: Synthetic oligonucleotide
  Target: SCNA; (-) strand; PAM type: NRG; PAM sequence: AAG
tcaattaaagaagctataac

SEQ ID NO: 18497 - DNA, 20 bp, Artificial Sequence
  Description of Artificial Sequence: Synthetic oligonucleotide
  Target: SCNA; (-) strand; PAM type: NRG; PAM sequence: AAG
aatacgtacctcaattaaag

SEQ ID NO: 18498 - DNA, 20 bp, Artificial Sequence
  Description of Artificial Sequence: Synthetic oligonucleotide
  Target: SCNA; (-) strand; PAM type: NRG; PAM sequence: AAG
aagaatacgtacctcaatta

SEQ ID NO: 18499 - DNA, 20 bp, Artificial Sequence
  Description of Artificial Sequence: Synthetic oligonucleotide
  Target: SCNA; (-) strand; PAM type: NRG; PAM sequence: AAG
tctcccaaatggagaatgat

SEQ ID NO: 18500 - DNA, 20 bp, Artificial Sequence
  Description of Artificial Sequence: Synthetic oligonucleotide
  Target: SCNA; (-) strand; PAM type: NRG; PAM sequence: GAG
tctctcaaatctcccaaatg

SEQ ID NO: 18501 - DNA, 20 bp, Artificial Sequence
  Description of Artificial Sequence: Synthetic oligonucleotide
  Target: SCNA; (-) strand; PAM type: NRG; PAM sequence: TGG
tctctctcaaatctcccaaa

SEQ ID NO: 18502 - DNA, 20 bp, Artificial Sequence
  Description of Artificial Sequence: Synthetic oligonucleotide
  Target: SCNA; (-) strand; PAM type: NRG; PAM sequence: AGG
ttaccaactgtgtcatctta

SEQ ID NO: 18503 - DNA, 20 bp, Artificial Sequence
  Description of Artificial Sequence: Synthetic oligonucleotide
  Target: SCNA; (-) strand; PAM type: NRG; PAM sequence: AAG
cttaccaactgtgtcatctt

SEQ ID NO: 18504 - DNA, 20 bp, Artificial Sequence
  Description of Artificial Sequence: Synthetic oligonucleotide
  Target: SCNA; (-) strand; PAM type: NRG; PAM sequence: AAG
gggttttactgctgatgtta

SEQ ID NO: 18505 - DNA, 20 bp, Artificial Sequence
  Description of Artificial Sequence: Synthetic oligonucleotide
  Target: SCNA; (-) strand; PAM type: NRG; PAM sequence: GGG
acattaaaacaatagtctca

SEQ ID NO: 18506 - DNA, 20 bp, Artificial Sequence
  Description of Artificial Sequence: Synthetic oligonucleotide
  Target: SCNA; (-) strand; PAM type: NRG; PAM sequence: AGG
cacattaaaacaatagtctc

SEQ ID NO: 18507 - DNA, 20 bp, Artificial Sequence
  Description of Artificial Sequence: Synthetic oligonucleotide
  Target: SCNA; (-) strand; PAM type: NRG; PAM sequence: CAG
acacattaaaacaatagtct

SEQ ID NO: 18508 - DNA, 20 bp, Artificial Sequence
  Description of Artificial Sequence: Synthetic oligonucleotide
  Target: SCNA; (-) strand; PAM type: NRG; PAM sequence: TAG
tattaaacacattaaaacaa

SEQ ID NO: 18509 - DNA, 20 bp, Artificial Sequence
  Description of Artificial Sequence: Synthetic oligonucleotide
  Target: SCNA; (-) strand; PAM type: NRG; PAM sequence: GGG
tttgctctggtttcttagtg

SEQ ID NO: 18510 - DNA, 20 bp, Artificial Sequence
  Description of Artificial Sequence: Synthetic oligonucleotide
  Target: SCNA; (-) strand; PAM type: NRG; PAM sequence: GGG
atttgctctggtttcttagt

SEQ ID NO: 18511 - DNA, 20 bp, Artificial Sequence
  Description of Artificial Sequence: Synthetic oligonucleotide
  Target: SCNA; (-) strand; PAM type: NRG; PAM sequence: TGG
aatttgctctggtttcttag

SEQ ID NO: 18512 - DNA, 20 bp, Artificial Sequence
  Description of Artificial Sequence: Synthetic oligonucleotide
  Target: SCNA; (-) strand; PAM type: NRG; PAM sequence: TAG
tttaatttgctctggtttct

SEQ ID NO: 18513 - DNA, 20 bp, Artificial Sequence
  Description of Artificial Sequence: Synthetic oligonucleotide
  Target: SCNA; (-) strand; PAM type: NRG; PAM sequence: TGG
agcatacttttaatttgctc

SEQ ID NO: 18514 - DNA, 20 bp, Artificial Sequence
  Description of Artificial Sequence: Synthetic oligonucleotide
  Target: SCNA; (-) strand; PAM type: NRG; PAM sequence: CAG
tgtatcaaattaatagaaca

SEQ ID NO: 18515 - DNA, 20 bp, Artificial Sequence
  Description of Artificial Sequence: Synthetic oligonucleotide
  Target: SCNA; (-) strand; PAM type: NRG; PAM sequence: TAG
ttctgcctgtatcaaattaa

SEQ ID NO: 18516 - DNA, 20 bp, Artificial Sequence
  Description of Artificial Sequence: Synthetic oligonucleotide
  Target: SCNA; (-) strand; PAM type: NRG; PAM sequence: TAG
atatcattctttgctgtttt

SEQ ID NO: 18517 - DNA, 20 bp, Artificial Sequence
  Description of Artificial Sequence: Synthetic oligonucleotide
  Target: SCNA; (-) strand; PAM type: NRG; PAM sequence: GAG
tcctataactacttaaaata

SEQ ID NO: 18518 - DNA, 20 bp, Artificial Sequence
  Description of Artificial Sequence: Synthetic oligonucleotide
  Target: SCNA; (-) strand; PAM type: NRG; PAM sequence: TAG
tgtcctataactacttaaaa

SEQ ID NO: 18519 - DNA, 20 bp, Artificial Sequence
  Description of Artificial Sequence: Synthetic oligonucleotide
  Target: SCNA; (-) strand; PAM type: NRG; PAM sequence: AAG
ataaaaagttcactcagttt

SEQ ID NO: 18520 - DNA, 20 bp, Artificial Sequence
  Description of Artificial Sequence: Synthetic oligonucleotide
  Target: SCNA; (-) strand; PAM type: NRG; PAM sequence: CAG
aagttcataaaaagttcact

SEQ ID NO: 18521 - DNA, 20 bp, Artificial Sequence
  Description of Artificial Sequence: Synthetic oligonucleotide
  Target: SCNA; (-) strand; PAM type: NRG; PAM sequence: AAG
tctgatgaaaagttcataaa

SEQ ID NO: 18522 - DNA, 20 bp, Artificial Sequence
  Description of Artificial Sequence: Synthetic oligonucleotide
  Target: SCNA; (-) strand; PAM type: NRG; PAM sequence: AAG
aaaaaaaaatctctgatgaa

SEQ ID NO: 18523 - DNA, 20 bp, Artificial Sequence
  Description of Artificial Sequence: Synthetic oligonucleotide
  Target: SCNA; (-) strand; PAM type: NRG; PAM sequence: GAG
ttattcagtcacagacacag

SEQ ID NO: 18524 - DNA, 20 bp, Artificial Sequence
  Description of Artificial Sequence: Synthetic oligonucleotide
  Target: SCNA; (-) strand; PAM type: NRG; PAM sequence: AGG
atttattcagtcacagacac

SEQ ID NO: 18525 - DNA, 20 bp, Artificial Sequence
  Description of Artificial Sequence: Synthetic oligonucleotide
  Target: SCNA; (-) strand; PAM type: NRG; PAM sequence: CAG
catttattcagtcacagaca

SEQ ID NO: 18526 - DNA, 20 bp, Artificial Sequence
  Description of Artificial Sequence: Synthetic oligonucleotide
  Target: SCNA; (-) strand; PAM type: NRG; PAM sequence: CAG
agaggccatttattcagtca

SEQ ID NO: 18527 - DNA, 20 bp, Artificial Sequence
  Description of Artificial Sequence: Synthetic oligonucleotide
  Target: SCNA; (-) strand; PAM type: NRG; PAM sequence: CAG
gtgaacagaggccatttatt

SEQ ID NO: 18528 - DNA, 20 bp, Artificial Sequence
  Description of Artificial Sequence: Synthetic oligonucleotide
  Target: SCNA; (-) strand; PAM type: NRG; PAM sequence: AGG
tgaagcattccagtgaacag

SEQ ID NO: 18529 - DNA, 20 bp, Artificial Sequence
  Description of Artificial Sequence: Synthetic oligonucleotide
  Target: SCNA; (-) strand; PAM type: NRG; PAM sequence: GAG
gtgaagcattccagtgaaca

SEQ ID NO: 18530 - DNA, 20 bp, Artificial Sequence
  Description of Artificial Sequence: Synthetic oligonucleotide
  Target: SCNA; (-) strand; PAM type: NRG; PAM sequence: CAG
atgtgaagcattccagtgaa

SEQ ID NO: 18531 - DNA, 20 bp, Artificial Sequence
  Description of Artificial Sequence: Synthetic oligonucleotide
  Target: SCNA; (-) strand; PAM type: NRG; PAM sequence: CAG
aggaagcatgtgaagcattc

SEQ ID NO: 18532 - DNA, 20 bp, Artificial Sequence
  Description of Artificial Sequence: Synthetic oligonucleotide
  Target: SCNA; (-) strand; PAM type: NRG; PAM sequence: AAG
actgagagaggaagcatgtg

SEQ ID NO: 18533 - DNA, 20 bp, Artificial Sequence
  Description of Artificial Sequence: Synthetic oligonucleotide
  Target: SCNA; (-) strand; PAM type: NRG; PAM sequence: AAG
acacctacaactgagagagg

SEQ ID NO: 18534 - DNA, 20 bp, Artificial Sequence
  Description of Artificial Sequence: Synthetic oligonucleotide
  Target: SCNA; (-) strand; PAM type: NRG; PAM sequence: AGG
aacacacctacaactgagag

SEQ ID NO: 18535 - DNA, 20 bp, Artificial Sequence
  Description of Artificial Sequence: Synthetic oligonucleotide
  Target: SCNA; (-) strand; PAM type: NRG; PAM sequence: GAG
aaacacacctacaactgaga

SEQ ID NO: 18536 - DNA, 20 bp, Artificial Sequence
  Description of Artificial Sequence: Synthetic oligonucleotide
  Target: SCNA; (-) strand; PAM type: NRG; PAM sequence: GAG
ataaacacacctacaactga

SEQ ID NO: 18537 - DNA, 20 bp, Artificial Sequence
  Description of Artificial Sequence: Synthetic oligonucleotide
  Target: SCNA; (-) strand; PAM type: NRG; PAM sequence: GAG
aaataaacacacctacaact

SEQ ID NO: 18538 - DNA, 20 bp, Artificial Sequence
  Description of Artificial Sequence: Synthetic oligonucleotide
  Target: SCNA; (-) strand; PAM type: NRG; PAM sequence: TAG
ataggcctttggtgtctgaa

SEQ ID NO: 18539 - DNA, 20 bp, Artificial Sequence
  Description of Artificial Sequence: Synthetic oligonucleotide
  Target: SCNA; (-) strand; PAM type: NRG; PAM sequence: TGG
tgcagatacccataggcctt

SEQ ID NO: 18540 - DNA, 20 bp, Artificial Sequence
  Description of Artificial Sequence: Synthetic oligonucleotide
  Target: SCNA; (-) strand; PAM type: NRG; PAM sequence: AGG
gttaatttgcagatacccat

SEQ ID NO: 18541 - DNA, 20 bp, Artificial Sequence
  Description of Artificial Sequence: Synthetic oligonucleotide
  Target: SCNA; (-) strand; PAM type: NRG; PAM sequence: TAG
tgttaatttgcagataccca

SEQ ID NO: 18542 - DNA, 20 bp, Artificial Sequence
  Description of Artificial Sequence: Synthetic oligonucleotide
  Target: SCNA; (-) strand; PAM type: NRG; PAM sequence: CAG
caaatgaaactgttaatttg

SEQ ID NO: 18543 - DNA, 20 bp, Artificial Sequence
  Description of Artificial Sequence: Synthetic oligonucleotide
  Target: SCNA; (-) strand; PAM type: NRG; PAM sequence: TAG
ttcacaatgatggaacataa

SEQ ID NO: 18544 - DNA, 20 bp, Artificial Sequence
  Description of Artificial Sequence: Synthetic oligonucleotide
  Target: SCNA; (-) strand; PAM type: NRG; PAM sequence: TGG
cctgtgctgcttcacaatga

SEQ ID NO: 18545 - DNA, 20 bp, Artificial Sequence
  Description of Artificial Sequence: Synthetic oligonucleotide
  Target: SCNA; (-) strand; PAM type: NRG; PAM sequence: CAG
atatagtaagggcgtggtta

SEQ ID NO: 18546 - DNA, 20 bp, Artificial Sequence
  Description of Artificial Sequence: Synthetic oligonucleotide
  Target: SCNA; (-) strand; PAM type: NRG; PAM sequence: TGG
catattatatagtaagggcg

SEQ ID NO: 18547 - DNA, 20 bp, Artificial Sequence
  Description of Artificial Sequence: Synthetic oligonucleotide
  Target: SCNA; (-) strand; PAM type: NRG; PAM sequence: GGG
actttcatattatatagtaa

SEQ ID NO: 18548 - DNA, 20 bp, Artificial Sequence
  Description of Artificial Sequence: Synthetic oligonucleotide
  Target: SCNA; (-) strand; PAM type: NRG; PAM sequence: AGG
cactttcatattatatagta

SEQ ID NO: 18549 - DNA, 20 bp, Artificial Sequence
  Description of Artificial Sequence: Synthetic oligonucleotide
  Target: SCNA; (-) strand; PAM type: NRG; PAM sequence: AAG
acactttcatattatatagt

SEQ ID NO: 18550 - DNA, 20 bp, Artificial Sequence
  Description of Artificial Sequence: Synthetic oligonucleotide
  Target: SCNA; (-) strand; PAM type: NRG; PAM sequence: TAG
atttacactttcatattata

SEQ ID NO: 18551 - DNA, 20 bp, Artificial Sequence
  Description of Artificial Sequence: Synthetic oligonucleotide
  Target: SCNA; (-) strand; PAM type: NRG; PAM sequence: CGG
ttatctcagtttaatgaaca

SEQ ID NO: 18552 - DNA, 20 bp, Artificial Sequence
  Description of Artificial Sequence: Synthetic oligonucleotide
  Target: SCNA; (-) strand; PAM type: NRG; PAM sequence: CAG
ttcaaaatgtggttttatct

SEQ ID NO: 18553 - DNA, 20 bp, Artificial Sequence
  Description of Artificial Sequence: Synthetic oligonucleotide
  Target: SCNA; (-) strand; PAM type: NRG; PAM sequence: TGG
taaactttattttcaaaatg

SEQ ID NO: 18554 - DNA, 20 bp, Artificial Sequence
  Description of Artificial Sequence: Synthetic oligonucleotide
  Target: SCNA; (-) strand; PAM type: NRG; PAM sequence: AAG
agtatcgccaatgtgatact

SEQ ID NO: 18555 - DNA, 20 bp, Artificial Sequence
  Description of Artificial Sequence: Synthetic oligonucleotide
  Target: SCNA; (-) strand; PAM type: NRG; PAM sequence: TAG
ttaaaagcaagtcataagct

SEQ ID NO: 18556 - DNA, 20 bp, Artificial Sequence
  Description of Artificial Sequence: Synthetic oligonucleotide
  Target: SCNA; (-) strand; PAM type: NRG; PAM sequence: AAG
aaatattaaaagcaagtcat

SEQ ID NO: 18557 - DNA, 20 bp, Artificial Sequence
  Description of Artificial Sequence: Synthetic oligonucleotide
  Target: SCNA; (-) strand; PAM type: NRG; PAM sequence: AAG
gcaatccaaatattaaaagc

SEQ ID NO: 18558 - DNA, 20 bp, Artificial Sequence
  Description of Artificial Sequence: Synthetic oligonucleotide
  Target: SCNA; (-) strand; PAM type: NRG; PAM sequence: AAG
atttgcaatccaaatattaa

SEQ ID NO: 18559 - DNA, 20 bp, Artificial Sequence
  Description of Artificial Sequence: Synthetic oligonucleotide
  Target: SCNA; (-) strand; PAM type: NRG; PAM sequence: TAG
tattattgtactccatacat

SEQ ID NO: 18560 - DNA, 20 bp, Artificial Sequence
  Description of Artificial Sequence: Synthetic oligonucleotide
  Target: SCNA; (-) strand; PAM type: NRG; PAM sequence: AAG
catagccatgtctaatatca

SEQ ID NO: 18561 - DNA, 20 bp, Artificial Sequence
  Description of Artificial Sequence: Synthetic oligonucleotide
  Target: SCNA; (-) strand; PAM type: NRG; PAM sequence: TAG
taataagatattcggatgca

SEQ ID NO: 18562 - DNA, 20 bp, Artificial Sequence
  Description of Artificial Sequence: Synthetic oligonucleotide
  Target: SCNA; (-) strand; PAM type: NRG; PAM sequence: CGG
atatccaataataagatatt

SEQ ID NO: 18563 - DNA, 20 bp, Artificial Sequence
  Description of Artificial Sequence: Synthetic oligonucleotide
  Target: SCNA; (-) strand; PAM type: NRG; PAM sequence: AAG
tgaatcgaatatccaataat

SEQ ID NO: 18564 - DNA, 20 bp, Artificial Sequence
  Description of Artificial Sequence: Synthetic oligonucleotide
  Target: SCNA; (-) strand; PAM type: NRG; PAM sequence: CAG
ggttagttgcccttcaatct

SEQ ID NO: 18565 - DNA, 20 bp, Artificial Sequence
  Description of Artificial Sequence: Synthetic oligonucleotide
  Target: SCNA; (-) strand; PAM type: NRG; PAM sequence: TAG
atatcttctcctctgttggt

SEQ ID NO: 18566 - DNA, 20 bp, Artificial Sequence
  Description of Artificial Sequence: Synthetic oligonucleotide
  Target: SCNA; (-) strand; PAM type: NRG; PAM sequence: TGG
aataatatcttctcctctgt

SEQ ID NO: 18567 - DNA, 20 bp, Artificial Sequence
  Description of Artificial Sequence: Synthetic oligonucleotide
  Target: SCNA; (-) strand; PAM type: NRG; PAM sequence: TAG
agctttggaggataaatctt

SEQ ID NO: 18568 - DNA, 20 bp, Artificial Sequence
  Description of Artificial Sequence: Synthetic oligonucleotide
  Target: SCNA; (-) strand; PAM type: NRG; PAM sequence: AGG
agggtaaaggaaagctttgg

SEQ ID NO: 18569 - DNA, 20 bp, Artificial Sequence
  Description of Artificial Sequence: Synthetic oligonucleotide
  Target: SCNA; (-) strand; PAM type: NRG; PAM sequence: GAG
tagggtaaaggaaagctttg

SEQ ID NO: 18570 - DNA, 20 bp, Artificial Sequence
  Description of Artificial Sequence: Synthetic oligonucleotide
  Target: SCNA; (-) strand; PAM type: NRG; PAM sequence: TGG
gatagggtaaaggaaagctt

SEQ ID NO: 18571 - DNA, 20 bp, Artificial Sequence
  Description of Artificial Sequence: Synthetic oligonucleotide
  Target: SCNA; (-) strand; PAM type: NRG; PAM sequence: AAG
taacaagatagggtaaagga

SEQ ID NO: 18572 - DNA, 20 bp, Artificial Sequence
  Description of Artificial Sequence: Synthetic oligonucleotide
  Target: SCNA; (-) strand; PAM type: NRG; PAM sequence: AGG
gatgtaacaagatagggtaa

SEQ ID NO: 18573 - DNA, 20 bp, Artificial Sequence
  Description of Artificial Sequence: Synthetic oligonucleotide
  Target: SCNA; (-) strand; PAM type: NRG; PAM sequence: AAG
agatgtaacaagatagggta

SEQ ID NO: 18574 - DNA, 20 bp, Artificial Sequence
  Description of Artificial Sequence: Synthetic oligonucleotide
  Target: SCNA; (-) strand; PAM type: NRG; PAM sequence: GGG
aaaaaagatgtaacaagata

SEQ ID NO: 18575 - DNA, 20 bp, Artificial Sequence
  Description of Artificial Sequence: Synthetic oligonucleotide
  Target: SCNA; (-) strand; PAM type: NRG; PAM sequence: AGG
taaaaaagatgtaacaagat

SEQ ID NO: 18576 - DNA, 20 bp, Artificial Sequence
  Description of Artificial Sequence: Synthetic oligonucleotide
  Target: SCNA; (-) strand; PAM type: NRG; PAM sequence: TAG
ttaaaaaagatgtaacaaga

SEQ ID NO: 18577 - DNA, 20 bp, Artificial Sequence
  Description of Artificial Sequence: Synthetic oligonucleotide
  Target: SCNA; (-) strand; PAM type: NRG; PAM sequence: AAG
ttgtttaaaaaagatgtaac

SEQ ID NO: 18578 - DNA, 20 bp, Artificial Sequence
  Description of Artificial Sequence: Synthetic oligonucleotide
  Target: SCNA; (-) strand; PAM type: NRG; PAM sequence: AAG
acaattagcattgtttaaaa

SEQ ID NO: 18579 - DNA, 20 bp, Artificial Sequence
  Description of Artificial Sequence: Synthetic oligonucleotide
  Target: SCNA; (-) strand; PAM type: NRG; PAM sequence: TAG
atatgtacaagggacacaat

SEQ ID NO: 18580 - DNA, 20 bp, Artificial Sequence
  Description of Artificial Sequence: Synthetic oligonucleotide
  Target: SCNA; (-) strand; PAM type: NRG; PAM sequence: GGG
ttgaataagaatatgtacaa

SEQ ID NO: 18581 - DNA, 20 bp, Artificial Sequence
  Description of Artificial Sequence: Synthetic oligonucleotide
  Target: SCNA; (-) strand; PAM type: NRG; PAM sequence: AGG
gttgaataagaatatgtaca

SEQ ID NO: 18582 - DNA, 20 bp, Artificial Sequence
  Description of Artificial Sequence: Synthetic oligonucleotide
  Target: SCNA; (-) strand; PAM type: NRG; PAM sequence: AAG
agttgaataagaatatgtac

SEQ ID NO: 18583 - DNA, 20 bp, Artificial Sequence
  Description of Artificial Sequence: Synthetic oligonucleotide
  Target: SCNA; (-) strand; PAM type: NRG; PAM sequence: AAG
tgtttgctgaggagttgaat

SEQ ID NO: 18584 - DNA, 20 bp, Artificial Sequence
  Description of Artificial Sequence: Synthetic oligonucleotide
  Target: SCNA; (-) strand; PAM type: NRG; PAM sequence: GAG
catagaagatgtttgctgag

SEQ ID NO: 18585 - DNA, 20 bp, Artificial Sequence
  Description of Artificial Sequence: Synthetic oligonucleotide
  Target: SCNA; (-) strand; PAM type: NRG; PAM sequence: AGG
cacatagaagatgtttgctg

SEQ ID NO: 18586 - DNA, 20 bp, Artificial Sequence
  Description of Artificial Sequence: Synthetic oligonucleotide
  Target: SCNA; (-) strand; PAM type: NRG; PAM sequence: GAG
tcacatagaagatgtttgct

SEQ ID NO: 18587 - DNA, 20 bp, Artificial Sequence
  Description of Artificial Sequence: Synthetic oligonucleotide
  Target: SCNA; (-) strand; PAM type: NRG; PAM sequence: AAG
tcagaatgttggtcacatag

SEQ ID NO: 18588 - DNA, 20 bp, Artificial Sequence
  Description of Artificial Sequence: Synthetic oligonucleotide
  Target: SCNA; (-) strand; PAM type: NRG; PAM sequence: TAG
ctctcagaatgttggtcaca

SEQ ID NO: 18589 - DNA, 20 bp, Artificial Sequence
  Description of Artificial Sequence: Synthetic oligonucleotide
  Target: SCNA; (-) strand; PAM type: NRG; PAM sequence: TGG
tccagcacctctcagaatgt

SEQ ID NO: 18590 - DNA, 20 bp, Artificial Sequence
  Description of Artificial Sequence: Synthetic oligonucleotide
  Target: SCNA; (-) strand; PAM type: NRG; PAM sequence: CAG
cctgcatctccagcacctct

SEQ ID NO: 18591 - DNA, 20 bp, Artificial Sequence
  Description of Artificial Sequence: Synthetic oligonucleotide
  Target: SCNA; (-) strand; PAM type: NRG; PAM sequence: CAG
cttactcttccctgcatctc

SEQ ID NO: 18592 - DNA, 20 bp, Artificial Sequence
  Description of Artificial Sequence: Synthetic oligonucleotide
  Target: SCNA; (-) strand; PAM type: NRG; PAM sequence: TAG
aagatactgcaggtcaagca

SEQ ID NO: 18593 - DNA, 20 bp, Artificial Sequence
  Description of Artificial Sequence: Synthetic oligonucleotide
  Target: SCNA; (-) strand; PAM type: NRG; PAM sequence: AAG
gcttcaagatactgcaggtc

SEQ ID NO: 18594 - DNA, 20 bp, Artificial Sequence
  Description of Artificial Sequence: Synthetic oligonucleotide
  Target: SCNA; (-) strand; PAM type: NRG; PAM sequence: AGG
aactagcttcaagatactgc

SEQ ID NO: 18595 - DNA, 20 bp, Artificial Sequence
  Description of Artificial Sequence: Synthetic oligonucleotide
  Target: SCNA; (-) strand; PAM type: NRG; PAM sequence: CAG
caactagcttcaagatactg

SEQ ID NO: 18596 - DNA, 20 bp, Artificial Sequence
  Description of Artificial Sequence: Synthetic oligonucleotide
  Target: SCNA; (-) strand; PAM type: NRG; PAM sequence: AAG
ttgctgccccaactagcttc

SEQ ID NO: 18597 - DNA, 20 bp, Artificial Sequence
  Description of Artificial Sequence: Synthetic oligonucleotide
  Target: SCNA; (-) strand; PAM type: NRG; PAM sequence: TAG
taatggtttgctgccccaac

SEQ ID NO: 18598 - DNA, 20 bp, Artificial Sequence
  Description of Artificial Sequence: Synthetic oligonucleotide
  Target: SCNA; (-) strand; PAM type: NRG; PAM sequence: TGG
tatgctgctgaatgtcttaa

SEQ ID NO: 18599 - DNA, 20 bp, Artificial Sequence
  Description of Artificial Sequence: Synthetic oligonucleotide
  Target: SCNA; (-) strand; PAM type: NRG; PAM sequence: CAG
ccatctgtttctgcagacaa

SEQ ID NO: 18600 - DNA, 20 bp, Artificial Sequence
  Description of Artificial Sequence: Synthetic oligonucleotide
  Target: SCNA; (-) strand; PAM type: NRG; PAM sequence: CAG
tggatccccatctgtttctg

SEQ ID NO: 18601 - DNA, 20 bp, Artificial Sequence
  Description of Artificial Sequence: Synthetic oligonucleotide
  Target: SCNA; (-) strand; PAM type: NRG; PAM sequence: TGG
tctgtattatttccaaccct

SEQ ID NO: 18602 - DNA, 20 bp, Artificial Sequence
  Description of Artificial Sequence: Synthetic oligonucleotide
  Target: SCNA; (-) strand; PAM type: NRG; PAM sequence: GAG
ttatattaagcatgcaacaa

SEQ ID NO: 18603 - DNA, 20 bp, Artificial Sequence
  Description of Artificial Sequence: Synthetic oligonucleotide
  Target: SCNA; (-) strand; PAM type: NRG; PAM sequence: AAG
aattatattaagcatgcaac

SEQ ID NO: 18604 - DNA, 20 bp, Artificial Sequence
  Description of Artificial Sequence: Synthetic oligonucleotide
  Target: SCNA; (-) strand; PAM type: NRG; PAM sequence: AAG
ctaggcactttaattatatt

SEQ ID NO: 18605 - DNA, 20 bp, Artificial Sequence
  Description of Artificial Sequence: Synthetic oligonucleotide
  Target: SCNA; (-) strand; PAM type: NRG; PAM sequence: AGG
actgtcatctactagtggct

SEQ ID NO: 18606 - DNA, 20 bp, Artificial Sequence
  Description of Artificial Sequence: Synthetic oligonucleotide
  Target: SCNA; (-) strand; PAM type: NRG; PAM sequence: TAG
aactgtcatctactagtggc

SEQ ID NO: 18607 - DNA, 20 bp, Artificial Sequence
  Description of Artificial Sequence: Synthetic oligonucleotide
  Target: SCNA; (-) strand; PAM type: NRG; PAM sequence: TGG
agaaaactgtcatctactag

SEQ ID NO: 18608 - DNA, 20 bp, Artificial Sequence
  Description of Artificial Sequence: Synthetic oligonucleotide
  Target: SCNA; (-) strand; PAM type: NRG; PAM sequence: TAG
attagaaaactgtcatctac

SEQ ID NO: 18609 - DNA, 20 bp, Artificial Sequence
  Description of Artificial Sequence: Synthetic oligonucleotide
  Target: SCNA; (-) strand; PAM type: NRG; PAM sequence: TAG
gattacatgatgtgtaaaat

SEQ ID NO: 18610 - DNA, 20 bp, Artificial Sequence
  Description of Artificial Sequence: Synthetic oligonucleotide
  Target: SCNA; (-) strand; PAM type: NRG; PAM sequence: GGG
tcaatatcttcaagactaag

SEQ ID NO: 18611 - DNA, 20 bp, Artificial Sequence
  Description of Artificial Sequence: Synthetic oligonucleotide
  Target: SCNA; (-) strand; PAM type: NRG; PAM sequence: GGG
atcaatatcttcaagactaa

SEQ ID NO: 18612 - DNA, 20 bp, Artificial Sequence
  Description of Artificial Sequence: Synthetic oligonucleotide
  Target: SCNA; (-) strand; PAM type: NRG; PAM sequence: AGG
catcaatatcttcaagacta

SEQ ID NO: 18613 - DNA, 20 bp, Artificial Sequence
  Description of Artificial Sequence: Synthetic oligonucleotide
  Target: SCNA; (-) strand; PAM type: NRG; PAM sequence: AAG
ccatcaatatcttcaagact

SEQ ID NO: 18614 - DNA, 20 bp, Artificial Sequence
  Description of Artificial Sequence: Synthetic oligonucleotide
  Target: SCNA; (-) strand; PAM type: NRG; PAM sequence: AAG
ttaacaccatcaatatcttc

SEQ ID NO: 18615 - DNA, 20 bp, Artificial Sequence
  Description of Artificial Sequence: Synthetic oligonucleotide
  Target: SCNA; (-) strand; PAM type: NRG; PAM sequence: AAG
ttattaatgtcactgcattc

SEQ ID NO: 18616 - DNA, 20 bp, Artificial Sequence
  Description of Artificial Sequence: Synthetic oligonucleotide
  Target: SCNA; (-) strand; PAM type: NRG; PAM sequence: AAG
aaacagtatactttttatct

SEQ ID NO: 18617 - DNA, 20 bp, Artificial Sequence
  Description of Artificial Sequence: Synthetic oligonucleotide
  Target: SCNA; (-) strand; PAM type: NRG; PAM sequence: CAG
agggaatttatgattggaaa

SEQ ID NO: 18618 - DNA, 20 bp, Artificial Sequence
  Description of Artificial Sequence: Synthetic oligonucleotide
  Target: SCNA; (-) strand; PAM type: NRG; PAM sequence: TGG
ggaggcagggaatttatgat

SEQ ID NO: 18619 - DNA, 20 bp, Artificial Sequence
  Description of Artificial Sequence: Synthetic oligonucleotide
  Target: SCNA; (-) strand; PAM type: NRG; PAM sequence: GGG
cacagagagtctgggaggca

SEQ ID NO: 18620 - DNA, 20 bp, Artificial Sequence
  Description of Artificial Sequence: Synthetic oligonucleotide
  Target: SCNA; (-) strand; PAM type: NRG; PAM sequence: AGG
tcacagagagtctgggaggc

SEQ ID NO: 18621 - DNA, 20 bp, Artificial Sequence
  Description of Artificial Sequence: Synthetic oligonucleotide
  Target: SCNA; (-) strand; PAM type: NRG; PAM sequence: CAG
ctcacagagagtctgggagg

SEQ ID NO: 18622 - DNA, 20 bp, Artificial Sequence
  Description of Artificial Sequence: Synthetic oligonucleotide
  Target: SCNA; (-) strand; PAM type: NRG; PAM sequence: AGG
aggctcacagagagtctggg

SEQ ID NO: 18623 - DNA, 20 bp, Artificial Sequence
  Description of Artificial Sequence: Synthetic oligonucleotide
  Target: SCNA; (-) strand; PAM type: NRG; PAM sequence: GAG
gaggctcacagagagtctgg

SEQ ID NO: 18624 - DNA, 20 bp, Artificial Sequence
  Description of Artificial Sequence: Synthetic oligonucleotide
  Target: SCNA; (-) strand; PAM type: NRG; PAM sequence: GGG
atgaggctcacagagagtct

SEQ ID NO: 18625 - DNA, 20 bp, Artificial Sequence
  Description of Artificial Sequence: Synthetic oligonucleotide
  Target: SCNA; (-) strand; PAM type: NRG; PAM sequence: TGG
catgaggctcacagagagtc

SEQ ID NO: 18626 - DNA, 20 bp, Artificial Sequence
  Description of Artificial Sequence: Synthetic oligonucleotide
  Target: SCNA; (-) strand; PAM type: NRG; PAM sequence: GAG
atgcacatgaggctcacaga

SEQ ID NO: 18627 - DNA, 20 bp, Artificial Sequence
  Description of Artificial Sequence: Synthetic oligonucleotide
  Target: SCNA; (-) strand; PAM type: NRG; PAM sequence: GAG
ttatgcacatgaggctcaca

SEQ ID NO: 18628 - DNA, 20 bp, Artificial Sequence
  Description of Artificial Sequence: Synthetic oligonucleotide
  Target: SCNA; (-) strand; PAM type: NRG; PAM sequence: CAG
acttatgcacatgaggctca

SEQ ID NO: 18629 - DNA, 20 bp, Artificial Sequence
  Description of Artificial Sequence: Synthetic oligonucleotide
  Target: SCNA; (-) strand; PAM type: NRG; PAM sequence: AGG
tccctccacttatgcacatg

SEQ ID NO: 18630 - DNA, 20 bp, Artificial Sequence
  Description of Artificial Sequence: Synthetic oligonucleotide
  Target: SCNA; (-) strand; PAM type: NRG; PAM sequence: GAG
ttccctccacttatgcacat

SEQ ID NO: 18631 - DNA, 20 bp, Artificial Sequence
  Description of Artificial Sequence: Synthetic oligonucleotide
  Target: SCNA; (-) strand; PAM type: NRG; PAM sequence: AGG
aggggtattcttagatcagc

SEQ ID NO: 18632 - DNA, 20 bp, Artificial Sequence
  Description of Artificial Sequence: Synthetic oligonucleotide
  Target: SCNA; (-) strand; PAM type: NRG; PAM sequence: CAG
taggggtattcttagatcag

SEQ ID NO: 18633 - DNA, 20 bp, Artificial Sequence
  Description of Artificial Sequence: Synthetic oligonucleotide
  Target: SCNA; (-) strand; PAM type: NRG; PAM sequence: CAG
cactaggggtattcttagat

SEQ ID NO: 18634 - DNA, 20 bp, Artificial Sequence
  Description of Artificial Sequence: Synthetic oligonucleotide
  Target: SCNA; (-) strand; PAM type: NRG; PAM sequence: TAG
tttgacactaggggtattct

SEQ ID NO: 18635 - DNA, 20 bp, Artificial Sequence
  Description of Artificial Sequence: Synthetic oligonucleotide
  Target: SCNA; (-) strand; PAM type: NRG; PAM sequence: GGG
atttacttctttgacactag

SEQ ID NO: 18636 - DNA, 20 bp, Artificial Sequence
  Description of Artificial Sequence: Synthetic oligonucleotide
  Target: SCNA; (-) strand; PAM type: NRG; PAM sequence: GGG
catttacttctttgacacta

SEQ ID NO: 18637 - DNA, 20 bp, Artificial Sequence
  Description of Artificial Sequence: Synthetic oligonucleotide
  Target: SCNA; (-) strand; PAM type: NRG; PAM sequence: AGG
ccatttacttctttgacact

SEQ ID NO: 18638 - DNA, 20 bp, Artificial Sequence
  Description of Artificial Sequence: Synthetic oligonucleotide
  Target: SCNA; (-) strand; PAM type: NRG; PAM sequence: TAG
accatttacttctttgacac

SEQ ID NO: 18639 - DNA, 20 bp, Artificial Sequence
  Description of Artificial Sequence: Synthetic oligonucleotide
  Target: SCNA; (-) strand; PAM type: NRG; PAM sequence: AGG
aaggggtaacatggcttctt

SEQ ID NO: 18640 - DNA, 20 bp, Artificial Sequence
  Description of Artificial Sequence: Synthetic oligonucleotide
  Target: SCNA; (-) strand; PAM type: NRG; PAM sequence: TAG
gaaggggtaacatggcttct

SEQ ID NO: 18641 - DNA, 20 bp, Artificial Sequence
  Description of Artificial Sequence: Synthetic oligonucleotide
  Target: SCNA; (-) strand; PAM type: NRG; PAM sequence: TGG
caccagcagaaggggtaaca

SEQ ID NO: 18642 - DNA, 20 bp, Artificial Sequence
  Description of Artificial Sequence: Synthetic oligonucleotide
  Target: SCNA; (-) strand; PAM type: NRG; PAM sequence: GGG
tctgtgctcaccagcagaag

SEQ ID NO: 18643 - DNA, 20 bp, Artificial Sequence
  Description of Artificial Sequence: Synthetic oligonucleotide
  Target: SCNA; (-) strand; PAM type: NRG; PAM sequence: GGG
ctctgtgctcaccagcagaa

SEQ ID NO: 18644 - DNA, 20 bp, Artificial Sequence
  Description of Artificial Sequence: Synthetic oligonucleotide
  Target: SCNA; (-) strand; PAM type: NRG; PAM sequence: AGG
gctctgtgctcaccagcaga

SEQ ID NO: 18645 - DNA, 20 bp, Artificial Sequence
  Description of Artificial Sequence: Synthetic oligonucleotide
  Target: SCNA; (-) strand; PAM type: NRG; PAM sequence: AAG
ggctctgtgctcaccagcag

SEQ ID NO: 18646 - DNA, 20 bp, Artificial Sequence
  Description of Artificial Sequence: Synthetic oligonucleotide
  Target: SCNA; (-) strand; PAM type: NRG; PAM sequence: CAG
ctgggctctgtgctcaccag

SEQ ID NO: 18647 - DNA, 20 bp, Artificial Sequence
  Description of Artificial Sequence: Synthetic oligonucleotide
  Target: SCNA; (-) strand; PAM type: NRG; PAM sequence: CAG
tacctgggctctgtgctcac

SEQ ID NO: 18648 - DNA, 20 bp, Artificial Sequence
  Description of Artificial Sequence: Synthetic oligonucleotide
  Target: SCNA; (-) strand; PAM type: NRG; PAM sequence: GGG
aaaaaaaaaattttatacct

SEQ ID NO: 18649 - DNA, 20 bp, Artificial Sequence
  Description of Artificial Sequence: Synthetic oligonucleotide
  Target: SCNA; (-) strand; PAM type: NRG; PAM sequence: TGG
aaaaaaaaaaattttatacc

SEQ ID NO: 18650 - DNA, 20 bp, Artificial Sequence
  Description of Artificial Sequence: Synthetic oligonucleotide
  Target: SCNA; (-) strand; PAM type: NRG; PAM sequence: GAG
tccagcctgggtgacagagc

SEQ ID NO: 18651 - DNA, 20 bp, Artificial Sequence
  Description of Artificial Sequence: Synthetic oligonucleotide
  Target: SCNA; (-) strand; PAM type: NRG; PAM sequence: GAG
gcactccagcctgggtgaca

SEQ ID NO: 18652 - DNA, 20 bp, Artificial Sequence
  Description of Artificial Sequence: Synthetic oligonucleotide
  Target: SCNA; (-) strand; PAM type: NRG; PAM sequence: CAG
ctgcactccagcctgggtga

SEQ ID NO: 18653 - DNA, 20 bp, Artificial Sequence
  Description of Artificial Sequence: Synthetic oligonucleotide
  Target: SCNA; (-) strand; PAM type: NRG; PAM sequence: GGG
gcaccactgcactccagcct

SEQ ID NO: 18654 - DNA, 20 bp, Artificial Sequence
  Description of Artificial Sequence: Synthetic oligonucleotide
  Target: SCNA; (-) strand; PAM type: NRG; PAM sequence: TGG
tgcaccactgcactccagcc

SEQ ID NO: 18655 - DNA, 20 bp, Artificial Sequence
  Description of Artificial Sequence: Synthetic oligonucleotide
  Target: SCNA; (-) strand; PAM type: NRG; PAM sequence: CAG
gagattgcaccactgcactc

SEQ ID NO: 18656 - DNA, 20 bp, Artificial Sequence
  Description of Artificial Sequence: Synthetic oligonucleotide
  Target: SCNA; (-) strand; PAM type: NRG; PAM sequence: GAG
ggtggaggttgcggtgagcc

SEQ ID NO: 18657 - DNA, 20 bp, Artificial Sequence
  Description of Artificial Sequence: Synthetic oligonucleotide
  Target: SCNA; (-) strand; PAM type: NRG; PAM sequence: GAG
cgggaggtggaggttgcggt

SEQ ID NO: 18658 - DNA, 20 bp, Artificial Sequence
  Description of Artificial Sequence: Synthetic oligonucleotide
  Target: SCNA; (-) strand; PAM type: NRG; PAM sequence: CGG
aacccgggaggtggaggttg

SEQ ID NO: 18659 - DNA, 20 bp, Artificial Sequence
  Description of Artificial Sequence: Synthetic oligonucleotide
  Target: SCNA; (-) strand; PAM type: NRG; PAM sequence: AGG
cgcttgaacccgggaggtgg

SEQ ID NO: 18660 - DNA, 20 bp, Artificial Sequence
  Description of Artificial Sequence: Synthetic oligonucleotide
  Target: SCNA; (-) strand; PAM type: NRG; PAM sequence: GAG
tcgcttgaacccgggaggtg

SEQ ID NO: 18661 - DNA, 20 bp, Artificial Sequence
  Description of Artificial Sequence: Synthetic oligonucleotide
  Target: SCNA; (-) strand; PAM type: NRG; PAM sequence: TGG
aatcgcttgaacccgggagg

SEQ ID NO: 18662 - DNA, 20 bp, Artificial Sequence
  Description of Artificial Sequence: Synthetic oligonucleotide
  Target: SCNA; (-) strand; PAM type: NRG; PAM sequence: AGG
gagaatcgcttgaacccggg

SEQ ID NO: 18663 - DNA, 20 bp, Artificial Sequence
  Description of Artificial Sequence: Synthetic oligonucleotide
  Target: SCNA; (-) strand; PAM type: NRG; PAM sequence: GAG
ggagaatcgcttgaacccgg

SEQ ID NO: 18664 - DNA, 20 bp, Artificial Sequence
  Description of Artificial Sequence: Synthetic oligonucleotide
  Target: SCNA; (-) strand; PAM type: NRG; PAM sequence: GGG
caggagaatcgcttgaaccc

SEQ ID NO: 18665 - DNA, 20 bp, Artificial Sequence
  Description of Artificial Sequence: Synthetic oligonucleotide
  Target: SCNA; (-) strand; PAM type: NRG; PAM sequence: CGG
gcaggagaatcgcttgaacc

SEQ ID NO: 18666 - DNA, 20 bp, Artificial Sequence
  Description of Artificial Sequence: Synthetic oligonucleotide
  Target: SCNA; (-) strand; PAM type: NRG; PAM sequence: GAG
tgctcgggaggctaaggcag

SEQ ID NO: 18667 - DNA, 20 bp, Artificial Sequence
  Description of Artificial Sequence: Synthetic oligonucleotide
  Target: SCNA; (-) strand; PAM type: NRG; PAM sequence: AGG
gctgctcgggaggctaaggc

SEQ ID NO: 18668 - DNA, 20 bp, Artificial Sequence
  Description of Artificial Sequence: Synthetic oligonucleotide
  Target: SCNA; (-) strand; PAM type: NRG; PAM sequence: CAG
agctgctcgggaggctaagg

SEQ ID NO: 18669 - DNA, 20 bp, Artificial Sequence
  Description of Artificial Sequence: Synthetic oligonucleotide
  Target: SCNA; (-) strand; PAM type: NRG; PAM sequence: AGG
cccagctgctcgggaggcta

SEQ ID NO: 18670 - DNA, 20 bp, Artificial Sequence
  Description of Artificial Sequence: Synthetic oligonucleotide
  Target: SCNA; (-) strand; PAM type: NRG; PAM sequence: AAG
tcccagctgctcgggaggct

SEQ ID NO: 18671 - DNA, 20 bp, Artificial Sequence
  Description of Artificial Sequence: Synthetic oligonucleotide
  Target: SCNA; (-) strand; PAM type: NRG; PAM sequence: AGG
tgtagtcccagctgctcggg

SEQ ID NO: 18672 - DNA, 20 bp, Artificial Sequence
  Description of Artificial Sequence: Synthetic oligonucleotide
  Target: SCNA; (-) strand; PAM type: NRG; PAM sequence: GAG
ttgtagtcccagctgctcgg

SEQ ID NO: 18673 - DNA, 20 bp, Artificial Sequence
  Description of Artificial Sequence: Synthetic oligonucleotide
  Target: SCNA; (-) strand; PAM type: NRG; PAM sequence: GGG
gcttgtagtcccagctgctc

SEQ ID NO: 18674 - DNA, 20 bp, Artificial Sequence
  Description of Artificial Sequence: Synthetic oligonucleotide
  Target: SCNA; (-) strand; PAM type: NRG; PAM sequence: CGG
tgcttgtagtcccagctgct

SEQ ID NO: 18675 - DNA, 20 bp, Artificial Sequence
  Description of Artificial Sequence: Synthetic oligonucleotide
  Target: SCNA; (-) strand; PAM type: NRG; PAM sequence: CAG
gtgtcatgtgcttgtagtcc

SEQ ID NO: 18676 - DNA, 20 bp, Artificial Sequence
  Description of Artificial Sequence: Synthetic oligonucleotide
  Target: SCNA; (-) strand; PAM type: NRG; PAM sequence: TAG
ggtgtggtgtcatgtgcttg

SEQ ID NO: 18677 - DNA, 20 bp, Artificial Sequence
  Description of Artificial Sequence: Synthetic oligonucleotide
  Target: SCNA; (-) strand; PAM type: NRG; PAM sequence: TGG
tacaaaaaattagccaggtg

SEQ ID NO: 18678 - DNA, 20 bp, Artificial Sequence
  Description of Artificial Sequence: Synthetic oligonucleotide
  Target: SCNA; (-) strand; PAM type: NRG; PAM sequence: AGG
aaaaatacaaaaaattagcc

SEQ ID NO: 18679 - DNA, 20 bp, Artificial Sequence
  Description of Artificial Sequence: Synthetic oligonucleotide
  Target: SCNA; (-) strand; PAM type: NRG; PAM sequence: CAG
taaaaatacaaaaaattagc

SEQ ID NO: 18680 - DNA, 20 bp, Artificial Sequence
  Description of Artificial Sequence: Synthetic oligonucleotide
  Target: SCNA; (-) strand; PAM type: NRG; PAM sequence: TAG
ctactaaaaatacaaaaaat

SEQ ID NO: 18681 - DNA, 20 bp, Artificial Sequence
  Description of Artificial Sequence: Synthetic oligonucleotide
  Target: SCNA; (-) strand; PAM type: NRG; PAM sequence: TGG
cgagactatcctggctaaca

SEQ ID NO: 18682 - DNA, 20 bp, Artificial Sequence
  Description of Artificial Sequence: Synthetic oligonucleotide
  Target: SCNA; (-) strand; PAM type: NRG; PAM sequence: TGG
tcaggagatcgagactatcc

SEQ ID NO: 18683 - DNA, 20 bp, Artificial Sequence
  Description of Artificial Sequence: Synthetic oligonucleotide
  Target: SCNA; (-) strand; PAM type: NRG; PAM sequence: GAG
gatcatgaggtcaggagatc

SEQ ID NO: 18684 - DNA, 20 bp, Artificial Sequence
  Description of Artificial Sequence: Synthetic oligonucleotide
  Target: SCNA; (-) strand; PAM type: NRG; PAM sequence: GAG
cgggcagatcatgaggtcag

SEQ ID NO: 18685 - DNA, 20 bp, Artificial Sequence
  Description of Artificial Sequence: Synthetic oligonucleotide
  Target: SCNA; (-) strand; PAM type: NRG; PAM sequence: AGG
ggcgggcagatcatgaggtc

SEQ ID NO: 18686 - DNA, 20 bp, Artificial Sequence
  Description of Artificial Sequence: Synthetic oligonucleotide
  Target: SCNA; (-) strand; PAM type: NRG; PAM sequence: CAG
aggcgggcagatcatgaggt

SEQ ID NO: 18687 - DNA, 20 bp, Artificial Sequence
  Description of Artificial Sequence: Synthetic oligonucleotide
  Target: SCNA; (-) strand; PAM type: NRG; PAM sequence: AGG
gctgaggcgggcagatcatg

SEQ ID NO: 18688 - DNA, 20 bp, Artificial Sequence
  Description of Artificial Sequence: Synthetic oligonucleotide
  Target: SCNA; (-) strand; PAM type: NRG; PAM sequence: GAG
ggctgaggcgggcagatcat

SEQ ID NO: 18689 - DNA, 20 bp, Artificial Sequence
  Description of Artificial Sequence: Synthetic oligonucleotide
  Target: SCNA; (-) strand; PAM type: NRG; PAM sequence: CAG
ctttgggaggctgaggcggg

SEQ ID NO: 18690 - DNA, 20 bp, Artificial Sequence
  Description of Artificial Sequence: Synthetic oligonucleotide
  Target: SCNA; (-) strand; PAM type: NRG; PAM sequence: GGG
gcactttgggaggctgaggc

SEQ ID NO: 18691 - DNA, 20 bp, Artificial Sequence
  Description of Artificial Sequence: Synthetic oligonucleotide
  Target: SCNA; (-) strand; PAM type: NRG; PAM sequence: CGG
agcactttgggaggctgagg

SEQ ID NO: 18692 - DNA, 20 bp, Artificial Sequence
  Description of Artificial Sequence: Synthetic oligonucleotide
  Target: SCNA; (-) strand; PAM type: NRG; PAM sequence: AGG
cccagcactttgggaggctg

SEQ ID NO: 18693 - DNA, 20 bp, Artificial Sequence
  Description of Artificial Sequence: Synthetic oligonucleotide
  Target: SCNA; (-) strand; PAM type: NRG; PAM sequence: GAG
tcccagcactttgggaggct

SEQ ID NO: 18694 - DNA, 20 bp, Artificial Sequence
  Description of Artificial Sequence: Synthetic oligonucleotide
  Target: SCNA; (-) strand; PAM type: NRG; PAM sequence: AGG
tgtaatcccagcactttggg

SEQ ID NO: 18695 - DNA, 20 bp, Artificial Sequence
  Description of Artificial Sequence: Synthetic oligonucleotide
  Target: SCNA; (-) strand; PAM type: NRG; PAM sequence: GAG
ctgtaatcccagcactttgg

SEQ ID NO: 18696 - DNA, 20 bp, Artificial Sequence
  Description of Artificial Sequence: Synthetic oligonucleotide
  Target: SCNA; (-) strand; PAM type: NRG; PAM sequence: GGG
acctgtaatcccagcacttt

SEQ ID NO: 18697 - DNA, 20 bp, Artificial Sequence
  Description of Artificial Sequence: Synthetic oligonucleotide
  Target: SCNA; (-) strand; PAM type: NRG; PAM sequence: TGG
cacctgtaatcccagcactt

SEQ ID NO: 18698 - DNA, 20 bp, Artificial Sequence
  Description of Artificial Sequence: Synthetic oligonucleotide
  Target: SCNA; (-) strand; PAM type: NRG; PAM sequence: CAG
gtggctcacacctgtaatcc

SEQ ID NO: 18699 - DNA, 20 bp, Artificial Sequence
  Description of Artificial Sequence: Synthetic oligonucleotide
  Target: SCNA; (-) strand; PAM type: NRG; PAM sequence: TGG
gattctgcagccaggcgtgg

SEQ ID NO: 18700 - DNA, 20 bp, Artificial Sequence
  Description of Artificial Sequence: Synthetic oligonucleotide
  Target: SCNA; (-) strand; PAM type: NRG; PAM sequence: TGG
aaagattctgcagccaggcg

SEQ ID NO: 18701 - DNA, 20 bp, Artificial Sequence
  Description of Artificial Sequence: Synthetic oligonucleotide
  Target: SCNA; (-) strand; PAM type: NRG; PAM sequence: AGG
taggtaaagattctgcagcc

SEQ ID NO: 18702 - DNA, 20 bp, Artificial Sequence
  Description of Artificial Sequence: Synthetic oligonucleotide
  Target: SCNA; (-) strand; PAM type: NRG; PAM sequence: CAG
ctaggtaaagattctgcagc

SEQ ID NO: 18703 - DNA, 20 bp, Artificial Sequence
  Description of Artificial Sequence: Synthetic oligonucleotide
  Target: SCNA; (-) strand; PAM type: NRG; PAM sequence: CAG
taacctaggtaaagattctg

SEQ ID NO: 18704 - DNA, 20 bp, Artificial Sequence
  Description of Artificial Sequence: Synthetic oligonucleotide
  Target: SCNA; (-) strand; PAM type: NRG; PAM sequence: AAG
ggacaacagtaacctaggta

SEQ ID NO: 18705 - DNA, 20 bp, Artificial Sequence
  Description of Artificial Sequence: Synthetic oligonucleotide
  Target: SCNA; (-) strand; PAM type: NRG; PAM sequence: AGG
cacatggacaacagtaacct

SEQ ID NO: 18706 - DNA, 20 bp, Artificial Sequence
  Description of Artificial Sequence: Synthetic oligonucleotide
  Target: SCNA; (-) strand; PAM type: NRG; PAM sequence: TAG
ccacatggacaacagtaacc

SEQ ID NO: 18707 - DNA, 20 bp, Artificial Sequence
  Description of Artificial Sequence: Synthetic oligonucleotide
  Target: SCNA; (-) strand; PAM type: NRG; PAM sequence: CAG
attgttacccacatggacaa

SEQ ID NO: 18708 - DNA, 20 bp, Artificial Sequence
  Description of Artificial Sequence: Synthetic oligonucleotide
  Target: SCNA; (-) strand; PAM type: NRG; PAM sequence: TGG
tgtcaagattgttacccaca

SEQ ID NO: 18709 - DNA, 20 bp, Artificial Sequence
  Description of Artificial Sequence: Synthetic oligonucleotide
  Target: SCNA; (-) strand; PAM type: NRG; PAM sequence: AAG
caatgaacacttcagatgtc

SEQ ID NO: 18710 - DNA, 20 bp, Artificial Sequence
  Description of Artificial Sequence: Synthetic oligonucleotide
  Target: SCNA; (-) strand; PAM type: NRG; PAM sequence: CAG
tttttattcaatgaacactt

SEQ ID NO: 18711 - DNA, 20 bp, Artificial Sequence
  Description of Artificial Sequence: Synthetic oligonucleotide
  Target: SCNA; (-) strand; PAM type: NRG; PAM sequence: AAG
cttttttcagattttgttag

SEQ ID NO: 18712 - DNA, 20 bp, Artificial Sequence
  Description of Artificial Sequence: Synthetic oligonucleotide
  Target: SCNA; (-) strand; PAM type: NRG; PAM sequence: TAG
gtacttttttcagattttgt

SEQ ID NO: 18713 - DNA, 20 bp, Artificial Sequence
  Description of Artificial Sequence: Synthetic oligonucleotide
  Target: SCNA; (-) strand; PAM type: NRG; PAM sequence: CAG
aaatagctctgtactttttt

SEQ ID NO: 18714 - DNA, 20 bp, Artificial Sequence
  Description of Artificial Sequence: Synthetic oligonucleotide
  Target: SCNA; (-) strand; PAM type: NRG; PAM sequence: TAG
attctcatccatttcaaaaa

SEQ ID NO: 18715 - DNA, 20 bp, Artificial Sequence
  Description of Artificial Sequence: Synthetic oligonucleotide
  Target: SCNA; (-) strand; PAM type: NRG; PAM sequence: TAG
acaggacacatacaatgaac

SEQ ID NO: 18716 - DNA, 20 bp, Artificial Sequence
  Description of Artificial Sequence: Synthetic oligonucleotide
  Target: SCNA; (-) strand; PAM type: NRG; PAM sequence: AGG
tagcaatgataactgaaaac

SEQ ID NO: 18717 - DNA, 20 bp, Artificial Sequence
  Description of Artificial Sequence: Synthetic oligonucleotide
  Target: SCNA; (-) strand; PAM type: NRG; PAM sequence: CAG
gtagcaatgataactgaaaa

SEQ ID NO: 18718 - DNA, 20 bp, Artificial Sequence
  Description of Artificial Sequence: Synthetic oligonucleotide
  Target: SCNA; (-) strand; PAM type: NRG; PAM sequence: TAG
cctaaagataaataattcag

SEQ ID NO: 18719 - DNA, 20 bp, Artificial Sequence
  Description of Artificial Sequence: Synthetic oligonucleotide
  Target: SCNA; (-) strand; PAM type: NRG; PAM sequence: CAG
acacctaaagataaataatt

SEQ ID NO: 18720 - DNA, 20 bp, Artificial Sequence
  Description of Artificial Sequence: Synthetic oligonucleotide
  Target: SCNA; (-) strand; PAM type: NRG; PAM sequence: AAG
gactataatttatacaccta

SEQ ID NO: 18721 - DNA, 20 bp, Artificial Sequence
  Description of Artificial Sequence: Synthetic oligonucleotide
  Target: SCNA; (-) strand; PAM type: NRG; PAM sequence: AAG
attcttccttcatcaattgt

SEQ ID NO: 18722 - DNA, 20 bp, Artificial Sequence
  Description of Artificial Sequence: Synthetic oligonucleotide
  Target: SCNA; (-) strand; PAM type: NRG; PAM sequence: TAG
ttattcatggaggagaagaa

SEQ ID NO: 18723 - DNA, 20 bp, Artificial Sequence
  Description of Artificial Sequence: Synthetic oligonucleotide
  Target: SCNA; (-) strand; PAM type: NRG; PAM sequence: AAG
gccagttattcatggaggag

SEQ ID NO: 18724 - DNA, 20 bp, Artificial Sequence
  Description of Artificial Sequence: Synthetic oligonucleotide
  Target: SCNA; (-) strand; PAM type: NRG; PAM sequence: GAG
aatgccagttattcatggag

SEQ ID NO: 18725 - DNA, 20 bp, Artificial Sequence
  Description of Artificial Sequence: Synthetic oligonucleotide
  Target: SCNA; (-) strand; PAM type: NRG; PAM sequence: AGG
agaatgccagttattcatgg

SEQ ID NO: 18726 - DNA, 20 bp, Artificial Sequence
  Description of Artificial Sequence: Synthetic oligonucleotide
  Target: SCNA; (-) strand; PAM type: NRG; PAM sequence: GAG
cagaatgccagttattcatg

SEQ ID NO: 18727 - DNA, 20 bp, Artificial Sequence
  Description of Artificial Sequence: Synthetic oligonucleotide
  Target: SCNA; (-) strand; PAM type: NRG; PAM sequence: TGG
aacagaatgccagttattca

SEQ ID NO: 18728 - DNA, 20 bp, Artificial Sequence
  Description of Artificial Sequence: Synthetic oligonucleotide
  Target: SCNA; (-) strand; PAM type: NRG; PAM sequence: CAG
atacaatagaaacagaatgc

SEQ ID NO: 18729 - DNA, 20 bp, Artificial Sequence
  Description of Artificial Sequence: Synthetic oligonucleotide
  Target: SCNA; (-) strand; PAM type: NRG; PAM sequence: CAG
aacctaatatacaatagaaa

SEQ ID NO: 18730 - DNA, 20 bp, Artificial Sequence
  Description of Artificial Sequence: Synthetic oligonucleotide
  Target: SCNA; (-) strand; PAM type: NRG; PAM sequence: TAG
tatttcaacctaatatacaa

SEQ ID NO: 18731 - DNA, 20 bp, Artificial Sequence
  Description of Artificial Sequence: Synthetic oligonucleotide
  Target: SCNA; (-) strand; PAM type: NRG; PAM sequence: TGG
gtcttatcctgtggaaacac

SEQ ID NO: 18732 - DNA, 20 bp, Artificial Sequence
  Description of Artificial Sequence: Synthetic oligonucleotide
  Target: SCNA; (-) strand; PAM type: NRG; PAM sequence: TGG
gtgccttcagtcttatcctg

SEQ ID NO: 18733 - DNA, 20 bp, Artificial Sequence
  Description of Artificial Sequence: Synthetic oligonucleotide
  Target: SCNA; (-) strand; PAM type: NRG; PAM sequence: CAG
atattaaatgcttgtgcctt

SEQ ID NO: 18734 - DNA, 20 bp, Artificial Sequence
  Description of Artificial Sequence: Synthetic oligonucleotide
  Target: SCNA; (-) strand; PAM type: NRG; PAM sequence: CAG
tttttctgtttaagtgcttt

SEQ ID NO: 18735 - DNA, 20 bp, Artificial Sequence
  Description of Artificial Sequence: Synthetic oligonucleotide
  Target: SCNA; (-) strand; PAM type: NRG; PAM sequence: AAG
agccaatattttttctgttt

SEQ ID NO: 18736 - DNA, 20 bp, Artificial Sequence
  Description of Artificial Sequence: Synthetic oligonucleotide
  Target: SCNA; (-) strand; PAM type: NRG; PAM sequence: TAG
tatttcattcttaatctcac

SEQ ID NO: 18737 - DNA, 20 bp, Artificial Sequence
  Description of Artificial Sequence: Synthetic oligonucleotide
  Target: SCNA; (-) strand; PAM type: NRG; PAM sequence: CAG
tttaaggtctcttttgcagc

SEQ ID NO: 18738 - DNA, 20 bp, Artificial Sequence
  Description of Artificial Sequence: Synthetic oligonucleotide
  Target: SCNA; (-) strand; PAM type: NRG; PAM sequence: CAG
actttttaaggtctcttttg

SEQ ID NO: 18739 - DNA, 20 bp, Artificial Sequence
  Description of Artificial Sequence: Synthetic oligonucleotide
  Target: SCNA; (-) strand; PAM type: NRG; PAM sequence: AGG
aggctctgagaaacttttta

SEQ ID NO: 18740 - DNA, 20 bp, Artificial Sequence
  Description of Artificial Sequence: Synthetic oligonucleotide
  Target: SCNA; (-) strand; PAM type: NRG; PAM sequence: AAG
caggctctgagaaacttttt

SEQ ID NO: 18741 - DNA, 20 bp, Artificial Sequence
  Description of Artificial Sequence: Synthetic oligonucleotide
  Target: SCNA; (-) strand; PAM type: NRG; PAM sequence: GAG
tgccattttggccaggctct

SEQ ID NO: 18742 - DNA, 20 bp, Artificial Sequence
  Description of Artificial Sequence: Synthetic oligonucleotide
  Target: SCNA; (-) strand; PAM type: NRG; PAM sequence: AGG
ggggttttgccattttggcc

SEQ ID NO: 18743 - DNA, 20 bp, Artificial Sequence
  Description of Artificial Sequence: Synthetic oligonucleotide
  Target: SCNA; (-) strand; PAM type: NRG; PAM sequence: CAG
tggggttttgccattttggc

SEQ ID NO: 18744 - DNA, 20 bp, Artificial Sequence
  Description of Artificial Sequence: Synthetic oligonucleotide
  Target: SCNA; (-) strand; PAM type: NRG; PAM sequence: TGG
gagatggggttttgccattt

SEQ ID NO: 18745 - DNA, 20 bp, Artificial Sequence
  Description of Artificial Sequence: Synthetic oligonucleotide
  Target: SCNA; (-) strand; PAM type: NRG; PAM sequence: GGG
ttgtattcttagtagagatg

SEQ ID NO: 18746 - DNA, 20 bp, Artificial Sequence
  Description of Artificial Sequence: Synthetic oligonucleotide
  Target: SCNA; (-) strand; PAM type: NRG; PAM sequence: GGG
tttgtattcttagtagagat

SEQ ID NO: 18747 - DNA, 20 bp, Artificial Sequence
  Description of Artificial Sequence: Synthetic oligonucleotide
  Target: SCNA; (-) strand; PAM type: NRG; PAM sequence: TGG
ttttgtattcttagtagaga

SEQ ID NO: 18748 - DNA, 20 bp, Artificial Sequence
  Description of Artificial Sequence: Synthetic oligonucleotide
  Target: SCNA; (-) strand; PAM type: NRG; PAM sequence: GAG
taatttttgtattcttagta

SEQ ID NO: 18749 - DNA, 20 bp, Artificial Sequence
  Description of Artificial Sequence: Synthetic oligonucleotide
  Target: SCNA; (-) strand; PAM type: NRG; PAM sequence: TAG
actaatttttgtattcttag

SEQ ID NO: 18750 - DNA, 20 bp, Artificial Sequence
  Description of Artificial Sequence: Synthetic oligonucleotide
  Target: SCNA; (-) strand; PAM type: NRG; PAM sequence: TAG
cccactaatttttgtattct

SEQ ID NO: 18751 - DNA, 20 bp, Artificial Sequence
  Description of Artificial Sequence: Synthetic oligonucleotide
  Target: SCNA; (-) strand; PAM type: NRG; PAM sequence: TGG
tagctgagattacaggtgca

SEQ ID NO: 18752 - DNA, 20 bp, Artificial Sequence
  Description of Artificial Sequence: Synthetic oligonucleotide
  Target: SCNA; (-) strand; PAM type: NRG; PAM sequence: AGG
tcttgagtagctgagattac

SEQ ID NO: 18753 - DNA, 20 bp, Artificial Sequence
  Description of Artificial Sequence: Synthetic oligonucleotide
  Target: SCNA; (-) strand; PAM type: NRG; PAM sequence: CAG
ctcttgagtagctgagatta

SEQ ID NO: 18754 - DNA, 20 bp, Artificial Sequence
  Description of Artificial Sequence: Synthetic oligonucleotide
  Target: SCNA; (-) strand; PAM type: NRG; PAM sequence: GAG
cctcagcctcttgagtagct

SEQ ID NO: 18755 - DNA, 20 bp, Artificial Sequence
  Description of Artificial Sequence: Synthetic oligonucleotide
  Target: SCNA; (-) strand; PAM type: NRG; PAM sequence: TAG
tcctgcctcagcctcttgag

SEQ ID NO: 18756 - DNA, 20 bp, Artificial Sequence
  Description of Artificial Sequence: Synthetic oligonucleotide
  Target: SCNA; (-) strand; PAM type: NRG; PAM sequence: GAG
ttctcctgcctcagcctctt

SEQ ID NO: 18757 - DNA, 20 bp, Artificial Sequence
  Description of Artificial Sequence: Synthetic oligonucleotide
  Target: SCNA; (-) strand; PAM type: NRG; PAM sequence: CAG
ttcaagcaattctcctgcct

SEQ ID NO: 18758 - DNA, 20 bp, Artificial Sequence
  Description of Artificial Sequence: Synthetic oligonucleotide
  Target: SCNA; (-) strand; PAM type: NRG; PAM sequence: AAG
tacctctgcctcctgggttc

SEQ ID NO: 18759 - DNA, 20 bp, Artificial Sequence
  Description of Artificial Sequence: Synthetic oligonucleotide
  Target: SCNA; (-) strand; PAM type: NRG; PAM sequence: GGG
gcaacctacctctgcctcct

SEQ ID NO: 18760 - DNA, 20 bp, Artificial Sequence
  Description of Artificial Sequence: Synthetic oligonucleotide
  Target: SCNA; (-) strand; PAM type: NRG; PAM sequence: TGG
tgcaacctacctctgcctcc

SEQ ID NO: 18761 - DNA, 20 bp, Artificial Sequence
  Description of Artificial Sequence: Synthetic oligonucleotide
  Target: SCNA; (-) strand; PAM type: NRG; PAM sequence: TGG
ggaatacagtgccatgatct

SEQ ID NO: 18762 - DNA, 20 bp, Artificial Sequence
  Description of Artificial Sequence: Synthetic oligonucleotide
  Target: SCNA; (-) strand; PAM type: NRG; PAM sequence: CAG
ctattgcccaggctggaata

SEQ ID NO: 18763 - DNA, 20 bp, Artificial Sequence
  Description of Artificial Sequence: Synthetic oligonucleotide
  Target: SCNA; (-) strand; PAM type: NRG; PAM sequence: TGG
tcttgctctattgcccaggc

SEQ ID NO: 18764 - DNA, 20 bp, Artificial Sequence
  Description of Artificial Sequence: Synthetic oligonucleotide
  Target: SCNA; (-) strand; PAM type: NRG; PAM sequence: AGG
agagtcttgctctattgccc

SEQ ID NO: 18765 - DNA, 20 bp, Artificial Sequence
  Description of Artificial Sequence: Synthetic oligonucleotide
  Target: SCNA; (-) strand; PAM type: NRG; PAM sequence: CAG
cagagtcttgctctattgcc

SEQ ID NO: 18766 - DNA, 20 bp, Artificial Sequence
  Description of Artificial Sequence: Synthetic oligonucleotide
  Target: SCNA; (-) strand; PAM type: NRG; PAM sequence: GAG
aactttctttttttgagaca

SEQ ID NO: 18767 - DNA, 20 bp, Artificial Sequence
  Description of Artificial Sequence: Synthetic oligonucleotide
  Target: SCNA; (-) strand; PAM type: NRG; PAM sequence: CAG
taaactttctttttttgaga

SEQ ID NO: 18768 - DNA, 20 bp, Artificial Sequence
  Description of Artificial Sequence: Synthetic oligonucleotide
  Target: SCNA; (-) strand; PAM type: NRG; PAM sequence: GAG
ctgataaactttcttttttt

SEQ ID NO: 18769 - DNA, 20 bp, Artificial Sequence
  Description of Artificial Sequence: Synthetic oligonucleotide
  Target: SCNA; (-) strand; PAM type: NRG; PAM sequence: TAG
aaaatcaagtatattcttaa

SEQ ID NO: 18770 - DNA, 20 bp, Artificial Sequence
  Description of Artificial Sequence: Synthetic oligonucleotide
  Target: SCNA; (-) strand; PAM type: NRG; PAM sequence: AAG
tgattcttcttgtaaaaatc

SEQ ID NO: 18771 - DNA, 20 bp, Artificial Sequence
  Description of Artificial Sequence: Synthetic oligonucleotide
  Target: SCNA; (-) strand; PAM type: NRG; PAM sequence: AAG
tttagataaataactttgta

SEQ ID NO: 18772 - DNA, 20 bp, Artificial Sequence
  Description of Artificial Sequence: Synthetic oligonucleotide
  Target: SCNA; (-) strand; PAM type: NRG; PAM sequence: TAG
acatttttattcatacattt

SEQ ID NO: 18773 - DNA, 20 bp, Artificial Sequence
  Description of Artificial Sequence: Synthetic oligonucleotide
  Target: SCNA; (-) strand; PAM type: NRG; PAM sequence: TAG
tagttttatagatatgttta

SEQ ID NO: 18774 - DNA, 20 bp, Artificial Sequence
  Description of Artificial Sequence: Synthetic oligonucleotide
  Target: SCNA; (-) strand; PAM type: NRG; PAM sequence: TAG
tttgatctttactagtttta

SEQ ID NO: 18775 - DNA, 20 bp, Artificial Sequence
  Description of Artificial Sequence: Synthetic oligonucleotide
  Target: SCNA; (-) strand; PAM type: NRG; PAM sequence: TAG
cctgagcttttgatctttac

SEQ ID NO: 18776 - DNA, 20 bp, Artificial Sequence
  Description of Artificial Sequence: Synthetic oligonucleotide
  Target: SCNA; (-) strand; PAM type: NRG; PAM sequence: GAG
agagaaagttaaagatacct

SEQ ID NO: 18777 - DNA, 20 bp, Artificial Sequence
  Description of Artificial Sequence: Synthetic oligonucleotide
  Target: SCNA; (-) strand; PAM type: NRG; PAM sequence: AAG
agtagaagcagagaaagtta

SEQ ID NO: 18778 - DNA, 20 bp, Artificial Sequence
  Description of Artificial Sequence: Synthetic oligonucleotide
  Target: SCNA; (-) strand; PAM type: NRG; PAM sequence: AAG
gtgaatagtagaagcagaga

SEQ ID NO: 18779 - DNA, 20 bp, Artificial Sequence
  Description of Artificial Sequence: Synthetic oligonucleotide
  Target: SCNA; (-) strand; PAM type: NRG; PAM sequence: GAG
ttttgtgaatagtagaagca

SEQ ID NO: 18780 - DNA, 20 bp, Artificial Sequence
  Description of Artificial Sequence: Synthetic oligonucleotide
  Target: SCNA; (-) strand; PAM type: NRG; PAM sequence: CAG
atttttgtgaatagtagaag

SEQ ID NO: 18781 - DNA, 20 bp, Artificial Sequence
  Description of Artificial Sequence: Synthetic oligonucleotide
  Target: SCNA; (-) strand; PAM type: NRG; PAM sequence: AAG
aatatttttgtgaatagtag

SEQ ID NO: 18782 - DNA, 20 bp, Artificial Sequence
  Description of Artificial Sequence: Synthetic oligonucleotide
  Target: SCNA; (-) strand; PAM type: NRG; PAM sequence: TAG
gcaaatatttttgtgaatag

SEQ ID NO: 18783 - DNA, 20 bp, Artificial Sequence
  Description of Artificial Sequence: Synthetic oligonucleotide
  Target: SCNA; (-) strand; PAM type: NRG; PAM sequence: TAG
tgagcaaatatttttgtgaa

SEQ ID NO: 18784 - DNA, 20 bp, Artificial Sequence
  Description of Artificial Sequence: Synthetic oligonucleotide
  Target: SCNA; (-) strand; PAM type: NRG; PAM sequence: GAG
agatgagtttctgtgtctct

SEQ ID NO: 18785 - DNA, 20 bp, Artificial Sequence
  Description of Artificial Sequence: Synthetic oligonucleotide
  Target: SCNA; (-) strand; PAM type: NRG; PAM sequence: GAG
taaaaataaatcttgaagat

SEQ ID NO: 18786 - DNA, 20 bp, Artificial Sequence
  Description of Artificial Sequence: Synthetic oligonucleotide
  Target: SCNA; (-) strand; PAM type: NRG; PAM sequence: AAG
ccagataaaaataaatcttg

SEQ ID NO: 18787 - DNA, 20 bp, Artificial Sequence
  Description of Artificial Sequence: Synthetic oligonucleotide
  Target: SCNA; (-) strand; PAM type: NRG; PAM sequence: CAG
ggcaactctgtaactccacc

SEQ ID NO: 18788 - DNA, 20 bp, Artificial Sequence
  Description of Artificial Sequence: Synthetic oligonucleotide
  Target: SCNA; (-) strand; PAM type: NRG; PAM sequence: AGG
ggtgatagttgctgttacca

SEQ ID NO: 18789 - DNA, 20 bp, Artificial Sequence
  Description of Artificial Sequence: Synthetic oligonucleotide
  Target: SCNA; (-) strand; PAM type: NRG; PAM sequence: AAG
tggtgatagttgctgttacc

SEQ ID NO: 18790 - DNA, 20 bp, Artificial Sequence
  Description of Artificial Sequence: Synthetic oligonucleotide
  Target: SCNA; (-) strand; PAM type: NRG; PAM sequence: TAG
cttaacacttaatttggtga

SEQ ID NO: 18791 - DNA, 20 bp, Artificial Sequence
  Description of Artificial Sequence: Synthetic oligonucleotide
  Target: SCNA; (-) strand; PAM type: NRG; PAM sequence: TGG
cgtgtgcttaacacttaatt

SEQ ID NO: 18792 - DNA, 20 bp, Artificial Sequence
  Description of Artificial Sequence: Synthetic oligonucleotide
  Target: SCNA; (-) strand; PAM type: NRG; PAM sequence: TGG
ctcctgacattgctctcctt

SEQ ID NO: 18793 - DNA, 20 bp, Artificial Sequence
  Description of Artificial Sequence: Synthetic oligonucleotide
  Target: SCNA; (-) strand; PAM type: NRG; PAM sequence: GAG
aagtagatgtgggaaaaagg

SEQ ID NO: 18794 - DNA, 20 bp, Artificial Sequence
  Description of Artificial Sequence: Synthetic oligonucleotide
  Target: SCNA; (-) strand; PAM type: NRG; PAM sequence: GGG
tcaagtagatgtgggaaaaa

SEQ ID NO: 18795 - DNA, 20 bp, Artificial Sequence
  Description of Artificial Sequence: Synthetic oligonucleotide
  Target: SCNA; (-) strand; PAM type: NRG; PAM sequence: AGG
gtcaagtagatgtgggaaaa

SEQ ID NO: 18796 - DNA, 20 bp, Artificial Sequence
  Description of Artificial Sequence: Synthetic oligonucleotide
  Target: SCNA; (-) strand; PAM type: NRG; PAM sequence: AAG
tgtcaagtagatgtgggaaa

SEQ ID NO: 18797 - DNA, 20 bp, Artificial Sequence
  Description of Artificial Sequence: Synthetic oligonucleotide
  Target: SCNA; (-) strand; PAM type: NRG; PAM sequence: GGG
ttgtaatgtcaagtagatgt

SEQ ID NO: 18798 - DNA, 20 bp, Artificial Sequence
  Description of Artificial Sequence: Synthetic oligonucleotide
  Target: SCNA; (-) strand; PAM type: NRG; PAM sequence: TGG
cttgtaatgtcaagtagatg

SEQ ID NO: 18799 - DNA, 20 bp, Artificial Sequence
  Description of Artificial Sequence: Synthetic oligonucleotide
  Target: SCNA; (-) strand; PAM type: NRG; PAM sequence: TAG
acaaaccttgtaatgtcaag

SEQ ID NO: 18800 - DNA, 20 bp, Artificial Sequence
  Description of Artificial Sequence: Synthetic oligonucleotide
  Target: SCNA; (-) strand; PAM type: NRG; PAM sequence: AAG
agtacaaaccttgtaatgtc

SEQ ID NO: 18801 - DNA, 20 bp, Artificial Sequence
  Description of Artificial Sequence: Synthetic oligonucleotide
  Target: SCNA; (-) strand; PAM type: NRG; PAM sequence: TAG
cactggagaatttctgaaag

SEQ ID NO: 18802 - DNA, 20 bp, Artificial Sequence
  Description of Artificial Sequence: Synthetic oligonucleotide
  Target: SCNA; (-) strand; PAM type: NRG; PAM sequence: AAG
aaacactggagaatttctga

SEQ ID NO: 18803 - DNA, 20 bp, Artificial Sequence
  Description of Artificial Sequence: Synthetic oligonucleotide
  Target: SCNA; (-) strand; PAM type: NRG; PAM sequence: GAG
gacgcattttttaaacactg

SEQ ID NO: 18804 - DNA, 20 bp, Artificial Sequence
  Description of Artificial Sequence: Synthetic oligonucleotide
  Target: SCNA; (-) strand; PAM type: NRG; PAM sequence: TGG
tagacgcattttttaaacac

SEQ ID NO: 18805 - DNA, 20 bp, Artificial Sequence
  Description of Artificial Sequence: Synthetic oligonucleotide
  Target: SCNA; (-) strand; PAM type: NRG; PAM sequence: TAG
tctgtgtatatgtgtgttta

SEQ ID NO: 18806 - DNA, 20 bp, Artificial Sequence
  Description of Artificial Sequence: Synthetic oligonucleotide
  Target: SCNA; (-) strand; PAM type: NRG; PAM sequence: AAG
aaggtgattacttcaataag

SEQ ID NO: 18807 - DNA, 20 bp, Artificial Sequence
  Description of Artificial Sequence: Synthetic oligonucleotide
  Target: SCNA; (-) strand; PAM type: NRG; PAM sequence: AAG
tttaaggtgattacttcaat

SEQ ID NO: 18808 - DNA, 20 bp, Artificial Sequence
  Description of Artificial Sequence: Synthetic oligonucleotide
  Target: SCNA; (-) strand; PAM type: NRG; PAM sequence: AGG
attgcattacataattttta

SEQ ID NO: 18809 - DNA, 20 bp, Artificial Sequence
  Description of Artificial Sequence: Synthetic oligonucleotide
  Target: SCNA; (-) strand; PAM type: NRG; PAM sequence: AAG
cattgcattacataattttt

SEQ ID NO: 18810 - DNA, 20 bp, Artificial Sequence
  Description of Artificial Sequence: Synthetic oligonucleotide
  Target: SCNA; (-) strand; PAM type: NRG; PAM sequence: TGG
caatggtaggaaaaccattg

SEQ ID NO: 18811 - DNA, 20 bp, Artificial Sequence
  Description of Artificial Sequence: Synthetic oligonucleotide
  Target: SCNA; (-) strand; PAM type: NRG; PAM sequence: AGG
ttgctttcttagtcaatggt

SEQ ID NO: 18812 - DNA, 20 bp, Artificial Sequence
  Description of Artificial Sequence: Synthetic oligonucleotide
  Target: SCNA; (-) strand; PAM type: NRG; PAM sequence: TAG
tttgctttcttagtcaatgg

SEQ ID NO: 18813 - DNA, 20 bp, Artificial Sequence
  Description of Artificial Sequence: Synthetic oligonucleotide
  Target: SCNA; (-) strand; PAM type: NRG; PAM sequence: TGG
tcctttgctttcttagtcaa

SEQ ID NO: 18814 - DNA, 20 bp, Artificial Sequence
  Description of Artificial Sequence: Synthetic oligonucleotide
  Target: SCNA; (-) strand; PAM type: NRG; PAM sequence: TAG
agaaaggtcctttgctttct

SEQ ID NO: 18815 - DNA, 20 bp, Artificial Sequence
  Description of Artificial Sequence: Synthetic oligonucleotide
  Target: SCNA; (-) strand; PAM type: NRG; PAM sequence: AGG
cctcctcactttcagaagaa

SEQ ID NO: 18816 - DNA, 20 bp, Artificial Sequence
  Description of Artificial Sequence: Synthetic oligonucleotide
  Target: SCNA; (-) strand; PAM type: NRG; PAM sequence: AAG
tcctcctcactttcagaaga

SEQ ID NO: 18817 - DNA, 20 bp, Artificial Sequence
  Description of Artificial Sequence: Synthetic oligonucleotide
  Target: SCNA; (-) strand; PAM type: NRG; PAM sequence: AAG
gaggtcctcctcactttcag

SEQ ID NO: 18818 - DNA, 20 bp, Artificial Sequence
  Description of Artificial Sequence: Synthetic oligonucleotide
  Target: SCNA; (-) strand; PAM type: NRG; PAM sequence: CAG
caagaggtcctcctcacttt

SEQ ID NO: 18819 - DNA, 20 bp, Artificial Sequence
  Description of Artificial Sequence: Synthetic oligonucleotide
  Target: SCNA; (-) strand; PAM type: NRG; PAM sequence: AGG
cacaaatgacaggaggcaag

SEQ ID NO: 18820 - DNA, 20 bp, Artificial Sequence
  Description of Artificial Sequence: Synthetic oligonucleotide
  Target: SCNA; (-) strand; PAM type: NRG; PAM sequence: GAG
tcacaaatgacaggaggcaa

SEQ ID NO: 18821 - DNA, 20 bp, Artificial Sequence
  Description of Artificial Sequence: Synthetic oligonucleotide
  Target: SCNA; (-) strand; PAM type: NRG; PAM sequence: AAG
attcacaaatgacaggaggc

SEQ ID NO: 18822 - DNA, 20 bp, Artificial Sequence
  Description of Artificial Sequence: Synthetic oligonucleotide
  Target: SCNA; (-) strand; PAM type: NRG; PAM sequence: AGG
ttctattcacaaatgacagg

SEQ ID NO: 18823 - DNA, 20 bp, Artificial Sequence
  Description of Artificial Sequence: Synthetic oligonucleotide
  Target: SCNA; (-) strand; PAM type: NRG; PAM sequence: GAG
gttctattcacaaatgacag

SEQ ID NO: 18824 - DNA, 20 bp, Artificial Sequence
  Description of Artificial Sequence: Synthetic oligonucleotide
  Target: SCNA; (-) strand; PAM type: NRG; PAM sequence: AGG
gagttctattcacaaatgac

SEQ ID NO: 18825 - DNA, 20 bp, Artificial Sequence
  Description of Artificial Sequence: Synthetic oligonucleotide
  Target: SCNA; (-) strand; PAM type: NRG; PAM sequence: CAG
agagttctattcacaaatga

SEQ ID NO: 18826 - DNA, 20 bp, Artificial Sequence
  Description of Artificial Sequence: Synthetic oligonucleotide
  Target: SCNA; (-) strand; PAM type: NRG; PAM sequence: GAG
atgctctggttctgactaca

SEQ ID NO: 18827 - DNA, 20 bp, Artificial Sequence
  Description of Artificial Sequence: Synthetic oligonucleotide
  Target: SCNA; (-) strand; PAM type: NRG; PAM sequence: CAG
aaatgctctggttctgacta

SEQ ID NO: 18828 - DNA, 20 bp, Artificial Sequence
  Description of Artificial Sequence: Synthetic oligonucleotide
  Target: SCNA; (-) strand; PAM type: NRG; PAM sequence: TGG
accaaatgccagaaatgctc

SEQ ID NO: 18829 - DNA, 20 bp, Artificial Sequence
  Description of Artificial Sequence: Synthetic oligonucleotide
  Target: SCNA; (-) strand; PAM type: NRG; PAM sequence: CAG
aatgattctagaccaaatgc

SEQ ID NO: 18830 - DNA, 20 bp, Artificial Sequence
  Description of Artificial Sequence: Synthetic oligonucleotide
  Target: SCNA; (-) strand; PAM type: NRG; PAM sequence: TAG
cttgcccttcagaatgattc

SEQ ID NO: 18831 - DNA, 20 bp, Artificial Sequence
  Description of Artificial Sequence: Synthetic oligonucleotide
  Target: SCNA; (-) strand; PAM type: NRG; PAM sequence: CAG
acagcaccaggcttgccctt

SEQ ID NO: 18832 - DNA, 20 bp, Artificial Sequence
  Description of Artificial Sequence: Synthetic oligonucleotide
  Target: SCNA; (-) strand; PAM type: NRG; PAM sequence: AGG
gtgcttagcaacacagcacc

SEQ ID NO: 18833 - DNA, 20 bp, Artificial Sequence
  Description of Artificial Sequence: Synthetic oligonucleotide
  Target: SCNA; (-) strand; PAM type: NRG; PAM sequence: CAG
tgtgcttagcaacacagcac

SEQ ID NO: 18834 - DNA, 20 bp, Artificial Sequence
  Description of Artificial Sequence: Synthetic oligonucleotide
  Target: SCNA; (-) strand; PAM type: NRG; PAM sequence: CAG
attgtttgtgcttagcaaca

SEQ ID NO: 18835 - DNA, 20 bp, Artificial Sequence
  Description of Artificial Sequence: Synthetic oligonucleotide
  Target: SCNA; (-) strand; PAM type: NRG; PAM sequence: TAG
aataccaaattgtttgtgct

SEQ ID NO: 18836 - DNA, 20 bp, Artificial Sequence
  Description of Artificial Sequence: Synthetic oligonucleotide
  Target: SCNA; (-) strand; PAM type: NRG; PAM sequence: GAG
taatctcgagcatatttttg

SEQ ID NO: 18837 - DNA, 20 bp, Artificial Sequence
  Description of Artificial Sequence: Synthetic oligonucleotide
  Target: SCNA; (-) strand; PAM type: NRG; PAM sequence: TGG
actaatctcgagcatatttt

SEQ ID NO: 18838 - DNA, 20 bp, Artificial Sequence
  Description of Artificial Sequence: Synthetic oligonucleotide
  Target: SCNA; (-) strand; PAM type: NRG; PAM sequence: GAG
ctgagggaagaactaatctc

SEQ ID NO: 18839 - DNA, 20 bp, Artificial Sequence
  Description of Artificial Sequence: Synthetic oligonucleotide
  Target: SCNA; (-) strand; PAM type: NRG; PAM sequence: AAG
tgagcgcctgttgctgaggg

SEQ ID NO: 18840 - DNA, 20 bp, Artificial Sequence
  Description of Artificial Sequence: Synthetic oligonucleotide
  Target: SCNA; (-) strand; PAM type: NRG; PAM sequence: GGG
ggctgagcgcctgttgctga

SEQ ID NO: 18841 - DNA, 20 bp, Artificial Sequence
  Description of Artificial Sequence: Synthetic oligonucleotide
  Target: SCNA; (-) strand; PAM type: NRG; PAM sequence: AGG
tggctgagcgcctgttgctg

SEQ ID NO: 18842 - DNA, 20 bp, Artificial Sequence
  Description of Artificial Sequence: Synthetic oligonucleotide
  Target: SCNA; (-) strand; PAM type: NRG; PAM sequence: GAG
ttggctgagcgcctgttgct

SEQ ID NO: 18843 - DNA, 20 bp, Artificial Sequence
  Description of Artificial Sequence: Synthetic oligonucleotide
  Target: SCNA; (-) strand; PAM type: NRG; PAM sequence: GAG
tggttaaaaattatttggct

SEQ ID NO: 18844 - DNA, 20 bp, Artificial Sequence
  Description of Artificial Sequence: Synthetic oligonucleotide
  Target: SCNA; (-) strand; PAM type: NRG; PAM sequence: TGG
agagttggttaaaaattatt

SEQ ID NO: 18845 - DNA, 20 bp, Artificial Sequence
  Description of Artificial Sequence: Synthetic oligonucleotide
  Target: SCNA; (-) strand; PAM type: NRG; PAM sequence: TGG
caatactgggctctgagagt

SEQ ID NO: 18846 - DNA, 20 bp, Artificial Sequence
  Description of Artificial Sequence: Synthetic oligonucleotide
  Target: SCNA; (-) strand; PAM type: NRG; PAM sequence: GAG
caagcaatactgggctctga

SEQ ID NO: 18847 - DNA, 20 bp, Artificial Sequence
  Description of Artificial Sequence: Synthetic oligonucleotide
  Target: SCNA; (-) strand; PAM type: NRG; PAM sequence: GAG
ctcaagcaatactgggctct

SEQ ID NO: 18848 - DNA, 20 bp, Artificial Sequence
  Description of Artificial Sequence: Synthetic oligonucleotide
  Target: SCNA; (-) strand; PAM type: NRG; PAM sequence: GGG
tcagtagctcaagcaatact

SEQ ID NO: 18849 - DNA, 20 bp, Artificial Sequence
  Description of Artificial Sequence: Synthetic oligonucleotide
  Target: SCNA; (-) strand; PAM type: NRG; PAM sequence: TGG
ctcagtagctcaagcaatac

SEQ ID NO: 18850 - DNA, 20 bp, Artificial Sequence
  Description of Artificial Sequence: Synthetic oligonucleotide
  Target: SCNA; (-) strand; PAM type: NRG; PAM sequence: AAG
aaataggatctcagtagctc

SEQ ID NO: 18851 - DNA, 20 bp, Artificial Sequence
  Description of Artificial Sequence: Synthetic oligonucleotide
  Target: SCNA; (-) strand; PAM type: NRG; PAM sequence: TAG
aacttgaaataggatctcag

SEQ ID NO: 18852 - DNA, 20 bp, Artificial Sequence
  Description of Artificial Sequence: Synthetic oligonucleotide
  Target: SCNA; (-) strand; PAM type: NRG; PAM sequence: CAG
aataacttgaaataggatct

SEQ ID NO: 18853 - DNA, 20 bp, Artificial Sequence
  Description of Artificial Sequence: Synthetic oligonucleotide
  Target: SCNA; (-) strand; PAM type: NRG; PAM sequence: AGG
tgatagcaataacttgaaat

SEQ ID NO: 18854 - DNA, 20 bp, Artificial Sequence
  Description of Artificial Sequence: Synthetic oligonucleotide
  Target: SCNA; (-) strand; PAM type: NRG; PAM sequence: TAG
ttgatagcaataacttgaaa

SEQ ID NO: 18855 - DNA, 20 bp, Artificial Sequence
  Description of Artificial Sequence: Synthetic oligonucleotide
  Target: SCNA; (-) strand; PAM type: NRG; PAM sequence: TAG
cactctcctccatatcttga

SEQ ID NO: 18856 - DNA, 20 bp, Artificial Sequence
  Description of Artificial Sequence: Synthetic oligonucleotide
  Target: SCNA; (-) strand; PAM type: NRG; PAM sequence: CAG
tcttgggatctcacaagtgt

SEQ ID NO: 18857 - DNA, 20 bp, Artificial Sequence
  Description of Artificial Sequence: Synthetic oligonucleotide
  Target: SCNA; (-) strand; PAM type: NRG; PAM sequence: AAG
tgtaagtcttgggatctcac

SEQ ID NO: 18858 - DNA, 20 bp, Artificial Sequence
  Description of Artificial Sequence: Synthetic oligonucleotide
  Target: SCNA; (-) strand; PAM type: NRG; PAM sequence: GGG
atggatttagtgtaagtctt

SEQ ID NO: 18859 - DNA, 20 bp, Artificial Sequence
  Description of Artificial Sequence: Synthetic oligonucleotide
  Target: SCNA; (-) strand; PAM type: NRG; PAM sequence: TGG
tatggatttagtgtaagtct

SEQ ID NO: 18860 - DNA, 20 bp, Artificial Sequence
  Description of Artificial Sequence: Synthetic oligonucleotide
  Target: SCNA; (-) strand; PAM type: NRG; PAM sequence: AAG
aaattgtatggatttagtgt

SEQ ID NO: 18861 - DNA, 20 bp, Artificial Sequence
  Description of Artificial Sequence: Synthetic oligonucleotide
  Target: SCNA; (-) strand; PAM type: NRG; PAM sequence: TAG
ggacagaaattgtatggatt

SEQ ID NO: 18862 - DNA, 20 bp, Artificial Sequence
  Description of Artificial Sequence: Synthetic oligonucleotide
  Target: SCNA; (-) strand; PAM type: NRG; PAM sequence: TGG
aattcaggacagaaattgta

SEQ ID NO: 18863 - DNA, 20 bp, Artificial Sequence
  Description of Artificial Sequence: Synthetic oligonucleotide
  Target: SCNA; (-) strand; PAM type: NRG; PAM sequence: CAG
aaaaaatttttaattcagga

SEQ ID NO: 18864 - DNA, 20 bp, Artificial Sequence
  Description of Artificial Sequence: Synthetic oligonucleotide
  Target: SCNA; (-) strand; PAM type: NRG; PAM sequence: AGG
tttaaaaaaatttttaattc

SEQ ID NO: 18865 - DNA, 20 bp, Artificial Sequence
  Description of Artificial Sequence: Synthetic oligonucleotide
  Target: SCNA; (-) strand; PAM type: NRG; PAM sequence: CAG
ttttaaaaaaatttttaatt

SEQ ID NO: 18866 - DNA, 20 bp, Artificial Sequence
  Description of Artificial Sequence: Synthetic oligonucleotide
  Target: SCNA; (-) strand; PAM type: NRG; PAM sequence: TGG
aagaaaccaattacgtggtt

SEQ ID NO: 18867 - DNA, 20 bp, Artificial Sequence
  Description of Artificial Sequence: Synthetic oligonucleotide
  Target: SCNA; (-) strand; PAM type: NRG; PAM sequence: TGG
ggtgaaagaaaccaattacg

SEQ ID NO: 18868 - DNA, 20 bp, Artificial Sequence
  Description of Artificial Sequence: Synthetic oligonucleotide
  Target: SCNA; (-) strand; PAM type: NRG; PAM sequence: AAG
taacttggagtttaaggtga

SEQ ID NO: 18869 - DNA, 20 bp, Artificial Sequence
  Description of Artificial Sequence: Synthetic oligonucleotide
  Target: SCNA; (-) strand; PAM type: NRG; PAM sequence: AGG
cttctctaacttggagttta

SEQ ID NO: 18870 - DNA, 20 bp, Artificial Sequence
  Description of Artificial Sequence: Synthetic oligonucleotide
  Target: SCNA; (-) strand; PAM type: NRG; PAM sequence: AAG
acttctctaacttggagttt

SEQ ID NO: 18871 - DNA, 20 bp, Artificial Sequence
  Description of Artificial Sequence: Synthetic oligonucleotide
  Target: SCNA; (-) strand; PAM type: NRG; PAM sequence: GAG
caaaatacttctctaacttg

SEQ ID NO: 18872 - DNA, 20 bp, Artificial Sequence
  Description of Artificial Sequence: Synthetic oligonucleotide
  Target: SCNA; (-) strand; PAM type: NRG; PAM sequence: TGG
aacaaaatacttctctaact

SEQ ID NO: 18873 - DNA, 20 bp, Artificial Sequence
  Description of Artificial Sequence: Synthetic oligonucleotide
  Target: SCNA; (-) strand; PAM type: NRG; PAM sequence: TAG
gttctgtattccaccaagtc

SEQ ID NO: 18874 - DNA, 20 bp, Artificial Sequence
  Description of Artificial Sequence: Synthetic oligonucleotide
  Target: SCNA; (-) strand; PAM type: NRG; PAM sequence: AAG
tttatgttctgtattccacc

SEQ ID NO: 18875 - DNA, 20 bp, Artificial Sequence
  Description of Artificial Sequence: Synthetic oligonucleotide
  Target: SCNA; (-) strand; PAM type: NRG; PAM sequence: AAG
taagtgatccactgttctag

SEQ ID NO: 18876 - DNA, 20 bp, Artificial Sequence
  Description of Artificial Sequence: Synthetic oligonucleotide
  Target: SCNA; (-) strand; PAM type: NRG; PAM sequence: TAG
ttttaagtgatccactgttc

SEQ ID NO: 18877 - DNA, 20 bp, Artificial Sequence
  Description of Artificial Sequence: Synthetic oligonucleotide
  Target: SCNA; (-) strand; PAM type: NRG; PAM sequence: AAG
agtcttaaagttttcatttt

SEQ ID NO: 18878 - DNA, 20 bp, Artificial Sequence
  Description of Artificial Sequence: Synthetic oligonucleotide
  Target: SCNA; (-) strand; PAM type: NRG; PAM sequence: AAG
tcagtctaaggaaagtctta

SEQ ID NO: 18879 - DNA, 20 bp, Artificial Sequence
  Description of Artificial Sequence: Synthetic oligonucleotide
  Target: SCNA; (-) strand; PAM type: NRG; PAM sequence: AAG
taaaaaactcagtctaagga

SEQ ID NO: 18880 - DNA, 20 bp, Artificial Sequence
  Description of Artificial Sequence: Synthetic oligonucleotide
  Target: SCNA; (-) strand; PAM type: NRG; PAM sequence: AGG
agaataaaaaactcagtcta

SEQ ID NO: 18881 - DNA, 20 bp, Artificial Sequence
  Description of Artificial Sequence: Synthetic oligonucleotide
  Target: SCNA; (-) strand; PAM type: NRG; PAM sequence: AAG
aagaataaaaaactcagtct

SEQ ID NO: 18882 - DNA, 20 bp, Artificial Sequence
  Description of Artificial Sequence: Synthetic oligonucleotide
  Target: SCNA; (-) strand; PAM type: NRG; PAM sequence: CAG
ttttttaagaataaaaaact

SEQ ID NO: 18883 - DNA, 20 bp, Artificial Sequence
  Description of Artificial Sequence: Synthetic oligonucleotide
  Target: SCNA; (-) strand; PAM type: NRG; PAM sequence: AAG
acttccttttaatttttttt

SEQ ID NO: 18884 - DNA, 20 bp, Artificial Sequence
  Description of Artificial Sequence: Synthetic oligonucleotide
  Target: SCNA; (-) strand; PAM type: NRG; PAM sequence: TAG
ttcatttgtcctgcaccgtt

SEQ ID NO: 18885 - DNA, 20 bp, Artificial Sequence
  Description of Artificial Sequence: Synthetic oligonucleotide
  Target: SCNA; (-) strand; PAM type: NRG; PAM sequence: AGG
ctgttctaagtttaagacag

SEQ ID NO: 18886 - DNA, 20 bp, Artificial Sequence
  Description of Artificial Sequence: Synthetic oligonucleotide
  Target: SCNA; (-) strand; PAM type: NRG; PAM sequence: GAG
tctgttctaagtttaagaca

SEQ ID NO: 18887 - DNA, 20 bp, Artificial Sequence
  Description of Artificial Sequence: Synthetic oligonucleotide
  Target: SCNA; (-) strand; PAM type: NRG; PAM sequence: CAG
tatctgttctaagtttaaga

SEQ ID NO: 18888 - DNA, 20 bp, Artificial Sequence
  Description of Artificial Sequence: Synthetic oligonucleotide
  Target: SCNA; (-) strand; PAM type: NRG; PAM sequence: AAG
tgcgtatctgttctaagttt

SEQ ID NO: 18889 - DNA, 20 bp, Artificial Sequence
  Description of Artificial Sequence: Synthetic oligonucleotide
  Target: SCNA; (-) strand; PAM type: NRG; PAM sequence: AAG
agagattgcgtatctgttct

SEQ ID NO: 18890 - DNA, 20 bp, Artificial Sequence
  Description of Artificial Sequence: Synthetic oligonucleotide
  Target: SCNA; (-) strand; PAM type: NRG; PAM sequence: GAG
aatttttacatactgttaaa

SEQ ID NO: 18891 - DNA, 20 bp, Artificial Sequence
  Description of Artificial Sequence: Synthetic oligonucleotide
  Target: SCNA; (-) strand; PAM type: NRG; PAM sequence: AAG
tgaatttttacatactgtta

SEQ ID NO: 18892 - DNA, 20 bp, Artificial Sequence
  Description of Artificial Sequence: Synthetic oligonucleotide
  Target: SCNA; (-) strand; PAM type: NRG; PAM sequence: AAG
tttggaaaccaaagaaagaa

SEQ ID NO: 18893 - DNA, 20 bp, Artificial Sequence
  Description of Artificial Sequence: Synthetic oligonucleotide
  Target: SCNA; (-) strand; PAM type: NRG; PAM sequence: AAG
tgtaatttggaaaccaaaga

SEQ ID NO: 18894 - DNA, 20 bp, Artificial Sequence
  Description of Artificial Sequence: Synthetic oligonucleotide
  Target: SCNA; (-) strand; PAM type: NRG; PAM sequence: AAG
tcactgtaatttggaaacca

SEQ ID NO: 18895 - DNA, 20 bp, Artificial Sequence
  Description of Artificial Sequence: Synthetic oligonucleotide
  Target: SCNA; (-) strand; PAM type: NRG; PAM sequence: TGG
tgtttcatttcactgtaatt

SEQ ID NO: 18896 - DNA, 20 bp, Artificial Sequence
  Description of Artificial Sequence: Synthetic oligonucleotide
  Target: SCNA; (-) strand; PAM type: NRG; PAM sequence: AGG
ctgcactaattacacataaa

SEQ ID NO: 18897 - DNA, 20 bp, Artificial Sequence
  Description of Artificial Sequence: Synthetic oligonucleotide
  Target: SCNA; (-) strand; PAM type: NRG; PAM sequence: AAG
actgcactaattacacataa

SEQ ID NO: 18898 - DNA, 20 bp, Artificial Sequence
  Description of Artificial Sequence: Synthetic oligonucleotide
  Target: SCNA; (-) strand; PAM type: NRG; PAM sequence: TAG
gaaagatgctccataactct

SEQ ID NO: 18899 - DNA, 20 bp, Artificial Sequence
  Description of Artificial Sequence: Synthetic oligonucleotide
  Target: SCNA; (-) strand; PAM type: NRG; PAM sequence: AAG
tggatacaccatgaggtgga

SEQ ID NO: 18900 - DNA, 20 bp, Artificial Sequence
  Description of Artificial Sequence: Synthetic oligonucleotide
  Target: SCNA; (-) strand; PAM type: NRG; PAM sequence: TGG
tacatggatacaccatgagg

SEQ ID NO: 18901 - DNA, 20 bp, Artificial Sequence
  Description of Artificial Sequence: Synthetic oligonucleotide
  Target: SCNA; (-) strand; PAM type: NRG; PAM sequence: AGG
agctacatggatacaccatg

SEQ ID NO: 18902 - DNA, 20 bp, Artificial Sequence
  Description of Artificial Sequence: Synthetic oligonucleotide
  Target: SCNA; (-) strand; PAM type: NRG; PAM sequence: GAG
cagctacatggatacaccat

SEQ ID NO: 18903 - DNA, 20 bp, Artificial Sequence
  Description of Artificial Sequence: Synthetic oligonucleotide
  Target: SCNA; (-) strand; PAM type: NRG; PAM sequence: TGG
gctgaagaaattcagctaca

SEQ ID NO: 18904 - DNA, 20 bp, Artificial Sequence
  Description of Artificial Sequence: Synthetic oligonucleotide
  Target: SCNA; (-) strand; PAM type: NRG; PAM sequence: CAG
aagcaaatgctgaagaaatt

SEQ ID NO: 18905 - DNA, 20 bp, Artificial Sequence
  Description of Artificial Sequence: Synthetic oligonucleotide
  Target: SCNA; (-) strand; PAM type: NRG; PAM sequence: AAG
aattaaaaaagcaaatgctg

SEQ ID NO: 18906 - DNA, 20 bp, Artificial Sequence
  Description of Artificial Sequence: Synthetic oligonucleotide
  Target: SCNA; (-) strand; PAM type: NRG; PAM sequence: AAG
actccttatacaaattaaaa

SEQ ID NO: 18907 - DNA, 20 bp, Artificial Sequence
  Description of Artificial Sequence: Synthetic oligonucleotide
  Target: SCNA; (-) strand; PAM type: NRG; PAM sequence: CAG
aagatttctaagatatggaa

SEQ ID NO: 18908 - DNA, 20 bp, Artificial Sequence
  Description of Artificial Sequence: Synthetic oligonucleotide
  Target: SCNA; (-) strand; PAM type: NRG; PAM sequence: TGG
tttcaaagatttctaagata

SEQ ID NO: 18909 - DNA, 20 bp, Artificial Sequence
  Description of Artificial Sequence: Synthetic oligonucleotide
  Target: SCNA; (-) strand; PAM type: NRG; PAM sequence: AAG
ttctaatttcaaagatttct

SEQ ID NO: 18910 - DNA, 20 bp, Artificial Sequence
  Description of Artificial Sequence: Synthetic oligonucleotide
  Target: SCNA; (-) strand; PAM type: NRG; PAM sequence: AAG
tagatcaacttctaatttca

SEQ ID NO: 18911 - DNA, 20 bp, Artificial Sequence
  Description of Artificial Sequence: Synthetic oligonucleotide
  Target: SCNA; (-) strand; PAM type: NRG; PAM sequence: TAG
gactacattagagatgctat

SEQ ID NO: 18912 - DNA, 20 bp, Artificial Sequence
  Description of Artificial Sequence: Synthetic oligonucleotide
  Target: SCNA; (-) strand; PAM type: NRG; PAM sequence: GAG
ttcaaggagagactacatta

SEQ ID NO: 18913 - DNA, 20 bp, Artificial Sequence
  Description of Artificial Sequence: Synthetic oligonucleotide
  Target: SCNA; (-) strand; PAM type: NRG; PAM sequence: TAG
aattcaaggagagactacat

SEQ ID NO: 18914 - DNA, 20 bp, Artificial Sequence
  Description of Artificial Sequence: Synthetic oligonucleotide
  Target: SCNA; (-) strand; PAM type: NRG; PAM sequence: GAG
ttatatttaaaattcaagga

SEQ ID NO: 18915 - DNA, 20 bp, Artificial Sequence
  Description of Artificial Sequence: Synthetic oligonucleotide
  Target: SCNA; (-) strand; PAM type: NRG; PAM sequence: GAG
tattatatttaaaattcaag

SEQ ID NO: 18916 - DNA, 20 bp, Artificial Sequence
  Description of Artificial Sequence: Synthetic oligonucleotide
  Target: SCNA; (-) strand; PAM type: NRG; PAM sequence: AGG
tctattatatttaaaattca

SEQ ID NO: 18917 - DNA, 20 bp, Artificial Sequence
  Description of Artificial Sequence: Synthetic oligonucleotide
  Target: SCNA; (-) strand; PAM type: NRG; PAM sequence: AAG
atctattatatttaaaattc

SEQ ID NO: 18918 - DNA, 20 bp, Artificial Sequence
  Description of Artificial Sequence: Synthetic oligonucleotide
  Target: SCNA; (-) strand; PAM type: NRG; PAM sequence: AGG
cactatatcttttaaataac

SEQ ID NO: 18919 - DNA, 20 bp, Artificial Sequence
  Description of Artificial Sequence: Synthetic oligonucleotide
  Target: SCNA; (-) strand; PAM type: NRG; PAM sequence: CAG
acactatatcttttaaataa

SEQ ID NO: 18920 - DNA, 20 bp, Artificial Sequence
  Description of Artificial Sequence: Synthetic oligonucleotide
  Target: SCNA; (-) strand; PAM type: NRG; PAM sequence: CAG
tcaacacaactgttatatgc

SEQ ID NO: 18921 - DNA, 20 bp, Artificial Sequence
  Description of Artificial Sequence: Synthetic oligonucleotide
  Target: SCNA; (-) strand; PAM type: NRG; PAM sequence: GGG
ccataaaacaaaaatttcaa

SEQ ID NO: 18922 - DNA, 20 bp, Artificial Sequence
  Description of Artificial Sequence: Synthetic oligonucleotide
  Target: SCNA; (-) strand; PAM type: NRG; PAM sequence: AGG
accataaaacaaaaatttca

SEQ ID NO: 18923 - DNA, 20 bp, Artificial Sequence
  Description of Artificial Sequence: Synthetic oligonucleotide
  Target: SCNA; (-) strand; PAM type: NRG; PAM sequence: AAG
gaccataaaacaaaaatttc

SEQ ID NO: 18924 - DNA, 20 bp, Artificial Sequence
  Description of Artificial Sequence: Synthetic oligonucleotide
  Target: SCNA; (-) strand; PAM type: NRG; PAM sequence: GAG
ttgattcagaggtggattat

SEQ ID NO: 18925 - DNA, 20 bp, Artificial Sequence
  Description of Artificial Sequence: Synthetic oligonucleotide
  Target: SCNA; (-) strand; PAM type: NRG; PAM sequence: TGG
agtgttcattgattcagagg

SEQ ID NO: 18926 - DNA, 20 bp, Artificial Sequence
  Description of Artificial Sequence: Synthetic oligonucleotide
  Target: SCNA; (-) strand; PAM type: NRG; PAM sequence: AGG
acaagtgttcattgattcag

SEQ ID NO: 18927 - DNA, 20 bp, Artificial Sequence
  Description of Artificial Sequence: Synthetic oligonucleotide
  Target: SCNA; (-) strand; PAM type: NRG; PAM sequence: GAG
tacaagtgttcattgattca

SEQ ID NO: 18928 - DNA, 20 bp, Artificial Sequence
  Description of Artificial Sequence: Synthetic oligonucleotide
  Target: SCNA; (-) strand; PAM type: NRG; PAM sequence: CAG
aatacaagtgttcattgatt

SEQ ID NO: 18929 - DNA, 20 bp, Artificial Sequence
  Description of Artificial Sequence: Synthetic oligonucleotide
  Target: SCNA; (-) strand; PAM type: NRG; PAM sequence: AAG
tttgttttctccaccaatac

SEQ ID NO: 18930 - DNA, 20 bp, Artificial Sequence
  Description of Artificial Sequence: Synthetic oligonucleotide
  Target: SCNA; (-) strand; PAM type: NRG; PAM sequence: AGG
cacacagaaagtctgtctga

SEQ ID NO: 18931 - DNA, 20 bp, Artificial Sequence
  Description of Artificial Sequence: Synthetic oligonucleotide
  Target: SCNA; (-) strand; PAM type: NRG; PAM sequence: AAG
ccacacagaaagtctgtctg

SEQ ID NO: 18932 - DNA, 20 bp, Artificial Sequence
  Description of Artificial Sequence: Synthetic oligonucleotide
  Target: SCNA; (-) strand; PAM type: NRG; PAM sequence: AAG
gaaagaacataccacacaga

SEQ ID NO: 18933 - DNA, 20 bp, Artificial Sequence
  Description of Artificial Sequence: Synthetic oligonucleotide
  Target: SCNA; (-) strand; PAM type: NRG; PAM sequence: CAG
aacagaaagaacataccaca

SEQ ID NO: 18934 - DNA, 20 bp, Artificial Sequence
  Description of Artificial Sequence: Synthetic oligonucleotide
  Target: SCNA; (-) strand; PAM type: NRG; PAM sequence: AAG
gttattagaaaagaaacaga

SEQ ID NO: 18935 - DNA, 20 bp, Artificial Sequence
  Description of Artificial Sequence: Synthetic oligonucleotide
  Target: SCNA; (-) strand; PAM type: NRG; PAM sequence: CAG
taatgttattagaaaagaaa

SEQ ID NO: 18936 - DNA, 20 bp, Artificial Sequence
  Description of Artificial Sequence: Synthetic oligonucleotide
  Target: SCNA; (-) strand; PAM type: NRG; PAM sequence: AAG
gtaagttaatgttattagaa

SEQ ID NO: 18937 - DNA, 20 bp, Artificial Sequence
  Description of Artificial Sequence: Synthetic oligonucleotide
  Target: SCNA; (-) strand; PAM type: NRG; PAM sequence: TAG
taaatgtaagttaatgttat

SEQ ID NO: 18938 - DNA, 20 bp, Artificial Sequence
  Description of Artificial Sequence: Synthetic oligonucleotide
  Target: SCNA; (-) strand; PAM type: NRG; PAM sequence: AAG
attataataattttaaatgt

SEQ ID NO: 18939 - DNA, 20 bp, Artificial Sequence
  Description of Artificial Sequence: Synthetic oligonucleotide
  Target: SCNA; (-) strand; PAM type: NRG; PAM sequence: GAG
tttgatgatttgtgaaaata

SEQ ID NO: 18940 - DNA, 20 bp, Artificial Sequence
  Description of Artificial Sequence: Synthetic oligonucleotide
  Target: SCNA; (-) strand; PAM type: NRG; PAM sequence: TAG
gatttgatgatttgtgaaaa

SEQ ID NO: 18941 - DNA, 20 bp, Artificial Sequence
  Description of Artificial Sequence: Synthetic oligonucleotide
  Target: SCNA; (-) strand; PAM type: NRG; PAM sequence: GAG
aaatttatttttaaatatct

SEQ ID NO: 18942 - DNA, 20 bp, Artificial Sequence
  Description of Artificial Sequence: Synthetic oligonucleotide
  Target: SCNA; (-) strand; PAM type: NRG; PAM sequence: CAG
catatacattcatcttataa

SEQ ID NO: 18943 - DNA, 20 bp, Artificial Sequence
  Description of Artificial Sequence: Synthetic oligonucleotide
  Target: SCNA; (-) strand; PAM type: NRG; PAM sequence: TGG
taactacgtgagatagacaa

SEQ ID NO: 18944 - DNA, 20 bp, Artificial Sequence
  Description of Artificial Sequence: Synthetic oligonucleotide
  Target: SCNA; (-) strand; PAM type: NRG; PAM sequence: TAG
aagtgggtaactacgtgaga

SEQ ID NO: 18945 - DNA, 20 bp, Artificial Sequence
  Description of Artificial Sequence: Synthetic oligonucleotide
  Target: SCNA; (-) strand; PAM type: NRG; PAM sequence: GAG
gaaaaagtgggtaactacgt

SEQ ID NO: 18946 - DNA, 20 bp, Artificial Sequence
  Description of Artificial Sequence: Synthetic oligonucleotide
  Target: SCNA; (-) strand; PAM type: NRG; PAM sequence: GGG
cttgccacaggggaaaaagt

SEQ ID NO: 18947 - DNA, 20 bp, Artificial Sequence
  Description of Artificial Sequence: Synthetic oligonucleotide
  Target: SCNA; (-) strand; PAM type: NRG; PAM sequence: TGG
tcttgccacaggggaaaaag

SEQ ID NO: 18948 - DNA, 20 bp, Artificial Sequence
  Description of Artificial Sequence: Synthetic oligonucleotide
  Target: SCNA; (-) strand; PAM type: NRG; PAM sequence: AAG
tgctcttgccacaggggaaa

SEQ ID NO: 18949 - DNA, 20 bp, Artificial Sequence
  Description of Artificial Sequence: Synthetic oligonucleotide
  Target: SCNA; (-) strand; PAM type: NRG; PAM sequence: GGG
tatagctgctcttgccacag

SEQ ID NO: 18950 - DNA, 20 bp, Artificial Sequence
  Description of Artificial Sequence: Synthetic oligonucleotide
  Target: SCNA; (-) strand; PAM type: NRG; PAM sequence: GGG
ttatagctgctcttgccaca

SEQ ID NO: 18951 - DNA, 20 bp, Artificial Sequence
  Description of Artificial Sequence: Synthetic oligonucleotide
  Target: SCNA; (-) strand; PAM type: NRG; PAM sequence: AGG
attatagctgctcttgccac

SEQ ID NO: 18952 - DNA, 20 bp, Artificial Sequence
  Description of Artificial Sequence: Synthetic oligonucleotide
  Target: SCNA; (-) strand; PAM type: NRG; PAM sequence: CAG
gattatagctgctcttgcca

SEQ ID NO: 18953 - DNA, 20 bp, Artificial Sequence
  Description of Artificial Sequence: Synthetic oligonucleotide
  Target: SCNA; (-) strand; PAM type: NRG; PAM sequence: TAG
tttgctaattgagtagatta

SEQ ID NO: 18954 - DNA, 20 bp, Artificial Sequence
  Description of Artificial Sequence: Synthetic oligonucleotide
  Target: SCNA; (-) strand; PAM type: NRG; PAM sequence: TAG
caggatttttgctaattgag

SEQ ID NO: 18955 - DNA, 20 bp, Artificial Sequence
  Description of Artificial Sequence: Synthetic oligonucleotide
  Target: SCNA; (-) strand; PAM type: NRG; PAM sequence: GAG
attcaggatttttgctaatt

SEQ ID NO: 18956 - DNA, 20 bp, Artificial Sequence
  Description of Artificial Sequence: Synthetic oligonucleotide
  Target: SCNA; (-) strand; PAM type: NRG; PAM sequence: AGG
agtaatagtgtattgtattc

SEQ ID NO: 18957 - DNA, 20 bp, Artificial Sequence
  Description of Artificial Sequence: Synthetic oligonucleotide
  Target: SCNA; (-) strand; PAM type: NRG; PAM sequence: CAG
tagtaatagtgtattgtatt

SEQ ID NO: 18958 - DNA, 20 bp, Artificial Sequence
  Description of Artificial Sequence: Synthetic oligonucleotide
  Target: SCNA; (-) strand; PAM type: NRG; PAM sequence: TAG
atgacaactatagttagtaa

SEQ ID NO: 18959 - DNA, 20 bp, Artificial Sequence
  Description of Artificial Sequence: Synthetic oligonucleotide
  Target: SCNA; (-) strand; PAM type: NRG; PAM sequence: TAG
tgcaggatgacaactatagt

SEQ ID NO: 18960 - DNA, 20 bp, Artificial Sequence
  Description of Artificial Sequence: Synthetic oligonucleotide
  Target: SCNA; (-) strand; PAM type: NRG; PAM sequence: TAG
gacatgcaggatgacaacta

SEQ ID NO: 18961 - DNA, 20 bp, Artificial Sequence
  Description of Artificial Sequence: Synthetic oligonucleotide
  Target: SCNA; (-) strand; PAM type: NRG; PAM sequence: AGG
gaactaaaaagctgacatgc

SEQ ID NO: 18962 - DNA, 20 bp, Artificial Sequence
  Description of Artificial Sequence: Synthetic oligonucleotide
  Target: SCNA; (-) strand; PAM type: NRG; PAM sequence: CAG
ggaactaaaaagctgacatg

SEQ ID NO: 18963 - DNA, 20 bp, Artificial Sequence
  Description of Artificial Sequence: Synthetic oligonucleotide
  Target: SCNA; (-) strand; PAM type: NRG; PAM sequence: AAG
gatatgtaggaggaactaaa

SEQ ID NO: 18964 - DNA, 20 bp, Artificial Sequence
  Description of Artificial Sequence: Synthetic oligonucleotide
  Target: SCNA; (-) strand; PAM type: NRG; PAM sequence: AGG
caaagtagcagatatgtagg

SEQ ID NO: 18965 - DNA, 20 bp, Artificial Sequence
  Description of Artificial Sequence: Synthetic oligonucleotide
  Target: SCNA; (-) strand; PAM type: NRG; PAM sequence: GAG
acaaagtagcagatatgtag

SEQ ID NO: 18966 - DNA, 20 bp, Artificial Sequence
  Description of Artificial Sequence: Synthetic oligonucleotide
  Target: SCNA; (-) strand; PAM type: NRG; PAM sequence: AGG
atacaaagtagcagatatgt

SEQ ID NO: 18967 - DNA, 20 bp, Artificial Sequence
  Description of Artificial Sequence: Synthetic oligonucleotide
  Target: SCNA; (-) strand; PAM type: NRG; PAM sequence: TAG
gatacaaagtagcagatatg

SEQ ID NO: 18968 - DNA, 20 bp, Artificial Sequence
  Description of Artificial Sequence: Synthetic oligonucleotide
  Target: SCNA; (-) strand; PAM type: NRG; PAM sequence: CAG
gatctaaggatacaaagtag

SEQ ID NO: 18969 - DNA, 20 bp, Artificial Sequence
  Description of Artificial Sequence: Synthetic oligonucleotide
  Target: SCNA; (-) strand; PAM type: NRG; PAM sequence: TAG
gtagatctaaggatacaaag

SEQ ID NO: 18970 - DNA, 20 bp, Artificial Sequence
  Description of Artificial Sequence: Synthetic oligonucleotide
  Target: SCNA; (-) strand; PAM type: NRG; PAM sequence: AAG
gatgtagatctaaggataca

SEQ ID NO: 18971 - DNA, 20 bp, Artificial Sequence
  Description of Artificial Sequence: Synthetic oligonucleotide
  Target: SCNA; (-) strand; PAM type: NRG; PAM sequence: AGG
gattgggagatgtagatcta

SEQ ID NO: 18972 - DNA, 20 bp, Artificial Sequence
  Description of Artificial Sequence: Synthetic oligonucleotide
  Target: SCNA; (-) strand; PAM type: NRG; PAM sequence: AAG
agattgggagatgtagatct

SEQ ID NO: 18973 - DNA, 20 bp, Artificial Sequence
  Description of Artificial Sequence: Synthetic oligonucleotide
  Target: SCNA; (-) strand; PAM type: NRG; PAM sequence: TAG
agggaggagattgggagatg

SEQ ID NO: 18974 - DNA, 20 bp, Artificial Sequence
  Description of Artificial Sequence: Synthetic oligonucleotide
  Target: SCNA; (-) strand; PAM type: NRG; PAM sequence: GAG
ggtggcagggaggagattgg

SEQ ID NO: 18975 - DNA, 20 bp, Artificial Sequence
  Description of Artificial Sequence: Synthetic oligonucleotide
  Target: SCNA; (-) strand; PAM type: NRG; PAM sequence: GGG
gaggtggcagggaggagatt

SEQ ID NO: 18976 - DNA, 20 bp, Artificial Sequence
  Description of Artificial Sequence: Synthetic oligonucleotide
  Target: SCNA; (-) strand; PAM type: NRG; PAM sequence: TGG
tgaggtggcagggaggagat

SEQ ID NO: 18977 - DNA, 20 bp, Artificial Sequence
  Description of Artificial Sequence: Synthetic oligonucleotide
  Target: SCNA; (-) strand; PAM type: NRG; PAM sequence: GAG
atgagtgaggtggcagggag

SEQ ID NO: 18978 - DNA, 20 bp, Artificial Sequence
  Description of Artificial Sequence: Synthetic oligonucleotide
  Target: SCNA; (-) strand; PAM type: NRG; PAM sequence: AGG
ccatgagtgaggtggcaggg

SEQ ID NO: 18979 - DNA, 20 bp, Artificial Sequence
  Description of Artificial Sequence: Synthetic oligonucleotide
  Target: SCNA; (-) strand; PAM type: NRG; PAM sequence: GAG
accatgagtgaggtggcagg

SEQ ID NO: 18980 - DNA, 20 bp, Artificial Sequence
  Description of Artificial Sequence: Synthetic oligonucleotide
  Target: SCNA; (-) strand; PAM type: NRG; PAM sequence: GGG
ttaccatgagtgaggtggca

SEQ ID NO: 18981 - DNA, 20 bp, Artificial Sequence
  Description of Artificial Sequence: Synthetic oligonucleotide
  Target: SCNA; (-) strand; PAM type: NRG; PAM sequence: AGG
gttaccatgagtgaggtggc

SEQ ID NO: 18982 - DNA, 20 bp, Artificial Sequence
  Description of Artificial Sequence: Synthetic oligonucleotide
  Target: SCNA; (-) strand; PAM type: NRG; PAM sequence: CAG
ggttaccatgagtgaggtgg

SEQ ID NO: 18983 - DNA, 20 bp, Artificial Sequence
  Description of Artificial Sequence: Synthetic oligonucleotide
  Target: SCNA; (-) strand; PAM type: NRG; PAM sequence: TGG
actggttaccatgagtgagg

SEQ ID NO: 18984 - DNA, 20 bp, Artificial Sequence
  Description of Artificial Sequence: Synthetic oligonucleotide
  Target: SCNA; (-) strand; PAM type: NRG; PAM sequence: AGG
cacactggttaccatgagtg

SEQ ID NO: 18985 - DNA, 20 bp, Artificial Sequence
  Description of Artificial Sequence: Synthetic oligonucleotide
  Target: SCNA; (-) strand; PAM type: NRG; PAM sequence: GAG
acacactggttaccatgagt

SEQ ID NO: 18986 - DNA, 20 bp, Artificial Sequence
  Description of Artificial Sequence: Synthetic oligonucleotide
  Target: SCNA; (-) strand; PAM type: NRG; PAM sequence: GAG
gtccacacactggttaccat

SEQ ID NO: 18987 - DNA, 20 bp, Artificial Sequence
  Description of Artificial Sequence: Synthetic oligonucleotide
  Target: SCNA; (-) strand; PAM type: NRG; PAM sequence: TGG
aaaaaacacagtccacacac

SEQ ID NO: 18988 - DNA, 20 bp, Artificial Sequence
  Description of Artificial Sequence: Synthetic oligonucleotide
  Target: SCNA; (-) strand; PAM type: NRG; PAM sequence: CAG
aaataaaaaaacaaaaaaca

SEQ ID NO: 18989 - DNA, 20 bp, Artificial Sequence
  Description of Artificial Sequence: Synthetic oligonucleotide
  Target: SCNA; (-) strand; PAM type: NRG; PAM sequence: GAG
tcactccagcctgggcaaaa

SEQ ID NO: 18990 - DNA, 20 bp, Artificial Sequence
  Description of Artificial Sequence: Synthetic oligonucleotide
  Target: SCNA; (-) strand; PAM type: NRG; PAM sequence: AAG
cttcactccagcctgggcaa

SEQ ID NO: 18991 - DNA, 20 bp, Artificial Sequence
  Description of Artificial Sequence: Synthetic oligonucleotide
  Target: SCNA; (-) strand; PAM type: NRG; PAM sequence: GGG
gcgccacttcactccagcct

SEQ ID NO: 18992 - DNA, 20 bp, Artificial Sequence
  Description of Artificial Sequence: Synthetic oligonucleotide
  Target: SCNA; (-) strand; PAM type: NRG; PAM sequence: TGG
ggcgccacttcactccagcc

SEQ ID NO: 18993 - DNA, 20 bp, Artificial Sequence
  Description of Artificial Sequence: Synthetic oligonucleotide
  Target: SCNA; (-) strand; PAM type: NRG; PAM sequence: CAG
gagatggcgccacttcactc

SEQ ID NO: 18994 - DNA, 20 bp, Artificial Sequence
  Description of Artificial Sequence: Synthetic oligonucleotide
  Target: SCNA; (-) strand; PAM type: NRG; PAM sequence: TGG
taggttgcagtgagccgaga

SEQ ID NO: 18995 - DNA, 20 bp, Artificial Sequence
  Description of Artificial Sequence: Synthetic oligonucleotide
  Target: SCNA; (-) strand; PAM type: NRG; PAM sequence: GAG
ggcataggttgcagtgagcc

SEQ ID NO: 18996 - DNA, 20 bp, Artificial Sequence
  Description of Artificial Sequence: Synthetic oligonucleotide
  Target: SCNA; (-) strand; PAM type: NRG; PAM sequence: GAG
caggaggcataggttgcagt

SEQ ID NO: 18997 - DNA, 20 bp, Artificial Sequence
  Description of Artificial Sequence: Synthetic oligonucleotide
  Target: SCNA; (-) strand; PAM type: NRG; PAM sequence: CAG
aactcaggaggcataggttg

SEQ ID NO: 18998 - DNA, 20 bp, Artificial Sequence
  Description of Artificial Sequence: Synthetic oligonucleotide
  Target: SCNA; (-) strand; PAM type: NRG; PAM sequence: AGG
cacttgaactcaggaggcat

SEQ ID NO: 18999 - DNA, 20 bp, Artificial Sequence
  Description of Artificial Sequence: Synthetic oligonucleotide
  Target: SCNA; (-) strand; PAM type: NRG; PAM sequence: TAG
tcacttgaactcaggaggca

SEQ ID NO: 19000 - DNA, 20 bp, Artificial Sequence
  Description of Artificial Sequence: Synthetic oligonucleotide
  Target: SCNA; (-) strand; PAM type: NRG; PAM sequence: AGG
gagaatcacttgaactcagg

SEQ ID NO: 19001 - DNA, 20 bp, Artificial Sequence
  Description of Artificial Sequence: Synthetic oligonucleotide
  Target: SCNA; (-) strand; PAM type: NRG; PAM sequence: GAG
ggagaatcacttgaactcag

SEQ ID NO: 19002 - DNA, 20 bp, Artificial Sequence
  Description of Artificial Sequence: Synthetic oligonucleotide
  Target: SCNA; (-) strand; PAM type: NRG; PAM sequence: AGG
aaggagaatcacttgaactc

SEQ ID NO: 19003 - DNA, 20 bp, Artificial Sequence
  Description of Artificial Sequence: Synthetic oligonucleotide
  Target: SCNA; (-) strand; PAM type: NRG; PAM sequence: CAG
aaaggagaatcacttgaact

SEQ ID NO: 19004 - DNA, 20 bp, Artificial Sequence
  Description of Artificial Sequence: Synthetic oligonucleotide
  Target: SCNA; (-) strand; PAM type: NRG; PAM sequence: GAG
tactcaggcagttgagaaag

SEQ ID NO: 19005 - DNA, 20 bp, Artificial Sequence
  Description of Artificial Sequence: Synthetic oligonucleotide
  Target: SCNA; (-) strand; PAM type: NRG; PAM sequence: AGG
gctactcaggcagttgagaa

SEQ ID NO: 19006 - DNA, 20 bp, Artificial Sequence
  Description of Artificial Sequence: Synthetic oligonucleotide
  Target: SCNA; (-) strand; PAM type: NRG; PAM sequence: AAG
agctactcaggcagttgaga

SEQ ID NO: 19007 - DNA, 20 bp, Artificial Sequence
  Description of Artificial Sequence: Synthetic oligonucleotide
  Target: SCNA; (-) strand; PAM type: NRG; PAM sequence: GAG
tcccagctactcaggcagtt

SEQ ID NO: 19008 - DNA, 20 bp, Artificial Sequence
  Description of Artificial Sequence: Synthetic oligonucleotide
  Target: SCNA; (-) strand; PAM type: NRG; PAM sequence: CAG
tgtaatcccagctactcagg

SEQ ID NO: 19009 - DNA, 20 bp, Artificial Sequence
  Description of Artificial Sequence: Synthetic oligonucleotide
  Target: SCNA; (-) strand; PAM type: NRG; PAM sequence: AGG
gcctgtaatcccagctactc

SEQ ID NO: 19010 - DNA, 20 bp, Artificial Sequence
  Description of Artificial Sequence: Synthetic oligonucleotide
  Target: SCNA; (-) strand; PAM type: NRG; PAM sequence: CAG
tgcctgtaatcccagctact

SEQ ID NO: 19011 - DNA, 20 bp, Artificial Sequence
  Description of Artificial Sequence: Synthetic oligonucleotide
  Target: SCNA; (-) strand; PAM type: NRG; PAM sequence: CAG
gtggcaggtgcctgtaatcc

SEQ ID NO: 19012 - DNA, 20 bp, Artificial Sequence
  Description of Artificial Sequence: Synthetic oligonucleotide
  Target: SCNA; (-) strand; PAM type: NRG; PAM sequence: AGG
aattagccgggcatagtggc

SEQ ID NO: 19013 - DNA, 20 bp, Artificial Sequence
  Description of Artificial Sequence: Synthetic oligonucleotide
  Target: SCNA; (-) strand; PAM type: NRG; PAM sequence: CAG
aaattagccgggcatagtgg

SEQ ID NO: 19014 - DNA, 20 bp, Artificial Sequence
  Description of Artificial Sequence: Synthetic oligonucleotide
  Target: SCNA; (-) strand; PAM type: NRG; PAM sequence: TGG
caaaaattagccgggcatag

SEQ ID NO: 19015 - DNA, 20 bp, Artificial Sequence
  Description of Artificial Sequence: Synthetic oligonucleotide
  Target: SCNA; (-) strand; PAM type: NRG; PAM sequence: TAG
gtacaaaaattagccgggca

SEQ ID NO: 19016 - DNA, 20 bp, Artificial Sequence
  Description of Artificial Sequence: Synthetic oligonucleotide
  Target: SCNA; (-) strand; PAM type: NRG; PAM sequence: GGG
taaaagtacaaaaattagcc

SEQ ID NO: 19017 - DNA, 20 bp, Artificial Sequence
  Description of Artificial Sequence: Synthetic oligonucleotide
  Target: SCNA; (-) strand; PAM type: NRG; PAM sequence: CGG
ctaaaagtacaaaaattagc

SEQ ID NO: 19018 - DNA, 20 bp, Artificial Sequence
  Description of Artificial Sequence: Synthetic oligonucleotide
  Target: SCNA; (-) strand; PAM type: NRG; PAM sequence: TAG
tctactaaaagtacaaaaat

SEQ ID NO: 19019 - DNA, 20 bp, Artificial Sequence
  Description of Artificial Sequence: Synthetic oligonucleotide
  Target: SCNA; (-) strand; PAM type: NRG; PAM sequence: AAG
tgaaatcctgtttctactaa

SEQ ID NO: 19020 - DNA, 20 bp, Artificial Sequence
  Description of Artificial Sequence: Synthetic oligonucleotide
  Target: SCNA; (-) strand; PAM type: NRG; PAM sequence: TGG
caagaccagcctgaccaaca

SEQ ID NO: 19021 - DNA, 20 bp, Artificial Sequence
  Description of Artificial Sequence: Synthetic oligonucleotide
  Target: SCNA; (-) strand; PAM type: NRG; PAM sequence: CAG
tgaggtcaggagttcaagac

SEQ ID NO: 19022 - DNA, 20 bp, Artificial Sequence
  Description of Artificial Sequence: Synthetic oligonucleotide
  Target: SCNA; (-) strand; PAM type: NRG; PAM sequence: AAG
tcacctgaggtcaggagttc

SEQ ID NO: 19023 - DNA, 20 bp, Artificial Sequence
  Description of Artificial Sequence: Synthetic oligonucleotide
  Target: SCNA; (-) strand; PAM type: NRG; PAM sequence: GAG
ggtgaatcacctgaggtcag

SEQ ID NO: 19024 - DNA, 20 bp, Artificial Sequence
  Description of Artificial Sequence: Synthetic oligonucleotide
  Target: SCNA; (-) strand; PAM type: NRG; PAM sequence: AGG
tgggtgaatcacctgaggtc

SEQ ID NO: 19025 - DNA, 20 bp, Artificial Sequence
  Description of Artificial Sequence: Synthetic oligonucleotide
  Target: SCNA; (-) strand; PAM type: NRG; PAM sequence: CAG
gtgggtgaatcacctgaggt

SEQ ID NO: 19026 - DNA, 20 bp, Artificial Sequence
  Description of Artificial Sequence: Synthetic oligonucleotide
  Target: SCNA; (-) strand; PAM type: NRG; PAM sequence: AGG
cgaggtgggtgaatcacctg

SEQ ID NO: 19027 - DNA, 20 bp, Artificial Sequence
  Description of Artificial Sequence: Synthetic oligonucleotide
  Target: SCNA; (-) strand; PAM type: NRG; PAM sequence: GAG
ccgaggtgggtgaatcacct

SEQ ID NO: 19028 - DNA, 20 bp, Artificial Sequence
  Description of Artificial Sequence: Synthetic oligonucleotide
  Target: SCNA; (-) strand; PAM type: NRG; PAM sequence: GGG
gccctttgggaagccgaggt

SEQ ID NO: 19029 - DNA, 20 bp, Artificial Sequence
  Description of Artificial Sequence: Synthetic oligonucleotide
  Target: SCNA; (-) strand; PAM type: NRG; PAM sequence: TGG
agccctttgggaagccgagg

SEQ ID NO: 19030 - DNA, 20 bp, Artificial Sequence
  Description of Artificial Sequence: Synthetic oligonucleotide
  Target: SCNA; (-) strand; PAM type: NRG; PAM sequence: AGG
cctagccctttgggaagccg

SEQ ID NO: 19031 - DNA, 20 bp, Artificial Sequence
  Description of Artificial Sequence: Synthetic oligonucleotide
  Target: SCNA; (-) strand; PAM type: NRG; PAM sequence: GAG
tcctagccctttgggaagcc

SEQ ID NO: 19032 - DNA, 20 bp, Artificial Sequence
  Description of Artificial Sequence: Synthetic oligonucleotide
  Target: SCNA; (-) strand; PAM type: NRG; PAM sequence: AAG
tgtaatcctagccctttggg

SEQ ID NO: 19033 - DNA, 20 bp, Artificial Sequence
  Description of Artificial Sequence: Synthetic oligonucleotide
  Target: SCNA; (-) strand; PAM type: NRG; PAM sequence: GGG
gcctgtaatcctagcccttt

SEQ ID NO: 19034 - DNA, 20 bp, Artificial Sequence
  Description of Artificial Sequence: Synthetic oligonucleotide
  Target: SCNA; (-) strand; PAM type: NRG; PAM sequence: TGG
cgcctgtaatcctagccctt

SEQ ID NO: 19035 - DNA, 20 bp, Artificial Sequence
  Description of Artificial Sequence: Synthetic oligonucleotide
  Target: SCNA; (-) strand; PAM type: NRG; PAM sequence: TAG
gtagctcacgcctgtaatcc

SEQ ID NO: 19036 - DNA, 20 bp, Artificial Sequence
  Description of Artificial Sequence: Synthetic oligonucleotide
  Target: SCNA; (-) strand; PAM type: NRG; PAM sequence: TAG
tggttaccggccggatgtgg

SEQ ID NO: 19037 - DNA, 20 bp, Artificial Sequence
  Description of Artificial Sequence: Synthetic oligonucleotide
  Target: SCNA; (-) strand; PAM type: NRG; PAM sequence: TGG
cagtggttaccggccggatg

SEQ ID NO: 19038 - DNA, 20 bp, Artificial Sequence
  Description of Artificial Sequence: Synthetic oligonucleotide
  Target: SCNA; (-) strand; PAM type: NRG; PAM sequence: CGG
ataaaacagtggttaccggc

SEQ ID NO: 19039 - DNA, 20 bp, Artificial Sequence
  Description of Artificial Sequence: Synthetic oligonucleotide
  Target: SCNA; (-) strand; PAM type: NRG; PAM sequence: CGG
tagaataaaacagtggttac

SEQ ID NO: 19040 - DNA, 20 bp, Artificial Sequence
  Description of Artificial Sequence: Synthetic oligonucleotide
  Target: SCNA; (-) strand; PAM type: NRG; PAM sequence: TGG
ataaagttagaataaaacag

SEQ ID NO: 19041 - DNA, 20 bp, Artificial Sequence
  Description of Artificial Sequence: Synthetic oligonucleotide
  Target: SCNA; (-) strand; PAM type: NRG; PAM sequence: CAG
aatataaagttagaataaaa

SEQ ID NO: 19042 - DNA, 20 bp, Artificial Sequence
  Description of Artificial Sequence: Synthetic oligonucleotide
  Target: SCNA; (-) strand; PAM type: NRG; PAM sequence: TAG
aaaaagttcaaatataaagt

SEQ ID NO: 19043 - DNA, 20 bp, Artificial Sequence
  Description of Artificial Sequence: Synthetic oligonucleotide
  Target: SCNA; (-) strand; PAM type: NRG; PAM sequence: AAG
aaagaaaaagttcaaatata

SEQ ID NO: 19044 - DNA, 20 bp, Artificial Sequence
  Description of Artificial Sequence: Synthetic oligonucleotide
  Target: SCNA; (-) strand; PAM type: NRG; PAM sequence: AAG
atgtggaatctaaaaagaaa

SEQ ID NO: 19045 - DNA, 20 bp, Artificial Sequence
  Description of Artificial Sequence: Synthetic oligonucleotide
  Target: SCNA; (-) strand; PAM type: NRG; PAM sequence: AAG
acttatatgtggaatctaaa

SEQ ID NO: 19046 - DNA, 20 bp, Artificial Sequence
  Description of Artificial Sequence: Synthetic oligonucleotide
  Target: SCNA; (-) strand; PAM type: NRG; PAM sequence: TGG
tgcataatctcacttatatg

SEQ ID NO: 19047 - DNA, 20 bp, Artificial Sequence
  Description of Artificial Sequence: Synthetic oligonucleotide
  Target: SCNA; (-) strand; PAM type: NRG; PAM sequence: AAG
gatattaagctgtgggaaat

SEQ ID NO: 19048 - DNA, 20 bp, Artificial Sequence
  Description of Artificial Sequence: Synthetic oligonucleotide
  Target: SCNA; (-) strand; PAM type: NRG; PAM sequence: GGG
cctggaggatattaagctgt

SEQ ID NO: 19049 - DNA, 20 bp, Artificial Sequence
  Description of Artificial Sequence: Synthetic oligonucleotide
  Target: SCNA; (-) strand; PAM type: NRG; PAM sequence: TGG
acctggaggatattaagctg

SEQ ID NO: 19050 - DNA, 20 bp, Artificial Sequence
  Description of Artificial Sequence: Synthetic oligonucleotide
  Target: SCNA; (-) strand; PAM type: NRG; PAM sequence: AAG
gcatggacctggaggatatt

SEQ ID NO: 19051 - DNA, 20 bp, Artificial Sequence
  Description of Artificial Sequence: Synthetic oligonucleotide
  Target: SCNA; (-) strand; PAM type: NRG; PAM sequence: AGG
cacaacatgcatggacctgg

SEQ ID NO: 19052 - DNA, 20 bp, Artificial Sequence
  Description of Artificial Sequence: Synthetic oligonucleotide
  Target: SCNA; (-) strand; PAM type: NRG; PAM sequence: GAG
ccacaacatgcatggacctg

SEQ ID NO: 19053 - DNA, 20 bp, Artificial Sequence
  Description of Artificial Sequence: Synthetic oligonucleotide
  Target: SCNA; (-) strand; PAM type: NRG; PAM sequence: TGG
tgccacaacatgcatggacc

SEQ ID NO: 19054 - DNA, 20 bp, Artificial Sequence
  Description of Artificial Sequence: Synthetic oligonucleotide
  Target: SCNA; (-) strand; PAM type: NRG; PAM sequence: TGG
gtcatttgccacaacatgca

SEQ ID NO: 19055 - DNA, 20 bp, Artificial Sequence
  Description of Artificial Sequence: Synthetic oligonucleotide
  Target: SCNA; (-) strand; PAM type: NRG; PAM sequence: AAG
attcagccttaaaaaaggag

SEQ ID NO: 19056 - DNA, 20 bp, Artificial Sequence
  Description of Artificial Sequence: Synthetic oligonucleotide
  Target: SCNA; (-) strand; PAM type: NRG; PAM sequence: GAG
attattcagccttaaaaaag

SEQ ID NO: 19057 - DNA, 20 bp, Artificial Sequence
  Description of Artificial Sequence: Synthetic oligonucleotide
  Target: SCNA; (-) strand; PAM type: NRG; PAM sequence: AGG
atattattcagccttaaaaa

SEQ ID NO: 19058 - DNA, 20 bp, Artificial Sequence
  Description of Artificial Sequence: Synthetic oligonucleotide
  Target: SCNA; (-) strand; PAM type: NRG; PAM sequence: AAG
aatattattcagccttaaaa

SEQ ID NO: 19059 - DNA, 20 bp, Artificial Sequence
  Description of Artificial Sequence: Synthetic oligonucleotide
  Target: SCNA; (-) strand; PAM type: NRG; PAM sequence: CAG
atatacaatggaatattatt

SEQ ID NO: 19060 - DNA, 20 bp, Artificial Sequence
  Description of Artificial Sequence: Synthetic oligonucleotide
  Target: SCNA; (-) strand; PAM type: NRG; PAM sequence: TGG
tgtggtatatgtatatacaa

SEQ ID NO: 19061 - DNA, 20 bp, Artificial Sequence
  Description of Artificial Sequence: Synthetic oligonucleotide
  Target: SCNA; (-) strand; PAM type: NRG; PAM sequence: TGG
tgaatggataaaagaaactg

SEQ ID NO: 19062 - DNA, 20 bp, Artificial Sequence
  Description of Artificial Sequence: Synthetic oligonucleotide
  Target: SCNA; (-) strand; PAM type: NRG; PAM sequence: AAG
gttggtgcatgaatggataa

SEQ ID NO: 19063 - DNA, 20 bp, Artificial Sequence
  Description of Artificial Sequence: Synthetic oligonucleotide
  Target: SCNA; (-) strand; PAM type: NRG; PAM sequence: TGG
ggtatgtgttggtgcatgaa

SEQ ID NO: 19064 - DNA, 20 bp, Artificial Sequence
  Description of Artificial Sequence: Synthetic oligonucleotide
  Target: SCNA; (-) strand; PAM type: NRG; PAM sequence: TGG
gaaaccacctaggtatgtgt

SEQ ID NO: 19065 - DNA, 20 bp, Artificial Sequence
  Description of Artificial Sequence: Synthetic oligonucleotide
  Target: SCNA; (-) strand; PAM type: NRG; PAM sequence: AGG
ccaagatatggaaaccacct

SEQ ID NO: 19066 - DNA, 20 bp, Artificial Sequence
  Description of Artificial Sequence: Synthetic oligonucleotide
  Target: SCNA; (-) strand; PAM type: NRG; PAM sequence: TAG
gccaagatatggaaaccacc

SEQ ID NO: 19067 - DNA, 20 bp, Artificial Sequence
  Description of Artificial Sequence: Synthetic oligonucleotide
  Target: SCNA; (-) strand; PAM type: NRG; PAM sequence: TGG
tatttacagtagccaagata

SEQ ID NO: 19068 - DNA, 20 bp, Artificial Sequence
  Description of Artificial Sequence: Synthetic oligonucleotide
  Target: SCNA; (-) strand; PAM type: NRG; PAM sequence: AAG
cagcattatttacagtagcc

SEQ ID NO: 19069 - DNA, 20 bp, Artificial Sequence
  Description of Artificial Sequence: Synthetic oligonucleotide
  Target: SCNA; (-) strand; PAM type: NRG; PAM sequence: TAG
cattgcagcattatttacag

SEQ ID NO: 19070 - DNA, 20 bp, Artificial Sequence
  Description of Artificial Sequence: Synthetic oligonucleotide
  Target: SCNA; (-) strand; PAM type: NRG; PAM sequence: CAG
attcattgcagcattattta

SEQ ID NO: 19071 - DNA, 20 bp, Artificial Sequence
  Description of Artificial Sequence: Synthetic oligonucleotide
  Target: SCNA; (-) strand; PAM type: NRG; PAM sequence: CAG
ctgcactgctatattcattg

SEQ ID NO: 19072 - DNA, 20 bp, Artificial Sequence
  Description of Artificial Sequence: Synthetic oligonucleotide
  Target: SCNA; (-) strand; PAM type: NRG; PAM sequence: AAG
aataaaatcatcacctcata

SEQ ID NO: 19073 - DNA, 20 bp, Artificial Sequence
  Description of Artificial Sequence: Synthetic oligonucleotide
  Target: SCNA; (-) strand; PAM type: NRG; PAM sequence: AGG
cctcctctggatgtacccaa

SEQ ID NO: 19074 - DNA, 20 bp, Artificial Sequence
  Description of Artificial Sequence: Synthetic oligonucleotide
  Target: SCNA; (-) strand; PAM type: NRG; PAM sequence: AAG
ccctcctctggatgtaccca

SEQ ID NO: 19075 - DNA, 20 bp, Artificial Sequence
  Description of Artificial Sequence: Synthetic oligonucleotide
  Target: SCNA; (-) strand; PAM type: NRG; PAM sequence: TGG
agacccagcaatccctcctc

SEQ ID NO: 19076 - DNA, 20 bp, Artificial Sequence
  Description of Artificial Sequence: Synthetic oligonucleotide
  Target: SCNA; (-) strand; PAM type: NRG; PAM sequence: CAG
aattagaattacctaagacc

SEQ ID NO: 19077 - DNA, 20 bp, Artificial Sequence
  Description of Artificial Sequence: Synthetic oligonucleotide
  Target: SCNA; (-) strand; PAM type: NRG; PAM sequence: AAG
aattaaaattagaattacct

SEQ ID NO: 19078 - DNA, 20 bp, Artificial Sequence
  Description of Artificial Sequence: Synthetic oligonucleotide
  Target: SCNA; (-) strand; PAM type: NRG; PAM sequence: TAG
gttcctaaagaaattaaaat

SEQ ID NO: 19079 - DNA, 20 bp, Artificial Sequence
  Description of Artificial Sequence: Synthetic oligonucleotide
  Target: SCNA; (-) strand; PAM type: NRG; PAM sequence: AAG
caatagtacggaggttccta

SEQ ID NO: 19080 - DNA, 20 bp, Artificial Sequence
  Description of Artificial Sequence: Synthetic oligonucleotide
  Target: SCNA; (-) strand; PAM type: NRG; PAM sequence: AGG
cattatggacaatagtacgg

SEQ ID NO: 19081 - DNA, 20 bp, Artificial Sequence
  Description of Artificial Sequence: Synthetic oligonucleotide
  Target: SCNA; (-) strand; PAM type: NRG; PAM sequence: GAG
tcattatggacaatagtacg

SEQ ID NO: 19082 - DNA, 20 bp, Artificial Sequence
  Description of Artificial Sequence: Synthetic oligonucleotide
  Target: SCNA; (-) strand; PAM type: NRG; PAM sequence: CGG
agtcattatggacaatagta

SEQ ID NO: 19083 - DNA, 20 bp, Artificial Sequence
  Description of Artificial Sequence: Synthetic oligonucleotide
  Target: SCNA; (-) strand; PAM type: NRG; PAM sequence: TAG
ggtgcagtcattatggacaa

SEQ ID NO: 19084 - DNA, 20 bp, Artificial Sequence
  Description of Artificial Sequence: Synthetic oligonucleotide
  Target: SCNA; (-) strand; PAM type: NRG; PAM sequence: TGG
atagattggtgcagtcatta

SEQ ID NO: 19085 - DNA, 20 bp, Artificial Sequence
  Description of Artificial Sequence: Synthetic oligonucleotide
  Target: SCNA; (-) strand; PAM type: NRG; PAM sequence: CAG
ggtggaaatatagattggtg

SEQ ID NO: 19086 - DNA, 20 bp, Artificial Sequence
  Description of Artificial Sequence: Synthetic oligonucleotide
  Target: SCNA; (-) strand; PAM type: NRG; PAM sequence: TGG
ttgttggtggaaatatagat

SEQ ID NO: 19087 - DNA, 20 bp, Artificial Sequence
  Description of Artificial Sequence: Synthetic oligonucleotide
  Target: SCNA; (-) strand; PAM type: NRG; PAM sequence: TAG
gtacattgttggtggaaata

SEQ ID NO: 19088 - DNA, 20 bp, Artificial Sequence
  Description of Artificial Sequence: Synthetic oligonucleotide
  Target: SCNA; (-) strand; PAM type: NRG; PAM sequence: TGG
gaacccttgtacattgttgg

SEQ ID NO: 19089 - DNA, 20 bp, Artificial Sequence
  Description of Artificial Sequence: Synthetic oligonucleotide
  Target: SCNA; (-) strand; PAM type: NRG; PAM sequence: TGG
agggaacccttgtacattgt

SEQ ID NO: 19090 - DNA, 20 bp, Artificial Sequence
  Description of Artificial Sequence: Synthetic oligonucleotide
  Target: SCNA; (-) strand; PAM type: NRG; PAM sequence: GGG
tgataagtgtgtagagaaaa

SEQ ID NO: 19091 - DNA, 20 bp, Artificial Sequence
  Description of Artificial Sequence: Synthetic oligonucleotide
  Target: SCNA; (-) strand; PAM type: NRG; PAM sequence: AGG
ttgataagtgtgtagagaaa

SEQ ID NO: 19092 - DNA, 20 bp, Artificial Sequence
  Description of Artificial Sequence: Synthetic oligonucleotide
  Target: SCNA; (-) strand; PAM type: NRG; PAM sequence: AAG
gttgataagtgtgtagagaa

SEQ ID NO: 19093 - DNA, 20 bp, Artificial Sequence
  Description of Artificial Sequence: Synthetic oligonucleotide
  Target: SCNA; (-) strand; PAM type: NRG; PAM sequence: GAG
taagtgttgataagtgtgta

SEQ ID NO: 19094 - DNA, 20 bp, Artificial Sequence
  Description of Artificial Sequence: Synthetic oligonucleotide
  Target: SCNA; (-) strand; PAM type: NRG; PAM sequence: TAG
tttaagtgttgataagtgtg

SEQ ID NO: 19095 - DNA, 20 bp, Artificial Sequence
  Description of Artificial Sequence: Synthetic oligonucleotide
  Target: SCNA; (-) strand; PAM type: NRG; PAM sequence: AAG
tgttcagtttaagtgttgat

SEQ ID NO: 19096 - DNA, 20 bp, Artificial Sequence
  Description of Artificial Sequence: Synthetic oligonucleotide
  Target: SCNA; (-) strand; PAM type: NRG; PAM sequence: AAG
aaagtctacatgttcagttt

SEQ ID NO: 19097 - DNA, 20 bp, Artificial Sequence
  Description of Artificial Sequence: Synthetic oligonucleotide
  Target: SCNA; (-) strand; PAM type: NRG; PAM sequence: CAG
aaagaaaaagtctacatgtt

SEQ ID NO: 19098 - DNA, 20 bp, Artificial Sequence
  Description of Artificial Sequence: Synthetic oligonucleotide
  Target: SCNA; (-) strand; PAM type: NRG; PAM sequence: AAG
tagagaataatgaaaagaaa

SEQ ID NO: 19099 - DNA, 20 bp, Artificial Sequence
  Description of Artificial Sequence: Synthetic oligonucleotide
  Target: SCNA; (-) strand; PAM type: NRG; PAM sequence: AAG
attgtttagagaataatgaa

SEQ ID NO: 19100 - DNA, 20 bp, Artificial Sequence
  Description of Artificial Sequence: Synthetic oligonucleotide
  Target: SCNA; (-) strand; PAM type: NRG; PAM sequence: GAG
tttttatactatattgttta

SEQ ID NO: 19101 - DNA, 20 bp, Artificial Sequence
  Description of Artificial Sequence: Synthetic oligonucleotide
  Target: SCNA; (-) strand; PAM type: NRG; PAM sequence: TAG
agtttttatactatattgtt

SEQ ID NO: 19102 - DNA, 20 bp, Artificial Sequence
  Description of Artificial Sequence: Synthetic oligonucleotide
  Target: SCNA; (-) strand; PAM type: NRG; PAM sequence: TAG
caatgtaaattctatgtaaa

SEQ ID NO: 19103 - DNA, 20 bp, Artificial Sequence
  Description of Artificial Sequence: Synthetic oligonucleotide
  Target: SCNA; (-) strand; PAM type: NRG; PAM sequence: TAG
ctgctgctttaaataatctc

SEQ ID NO: 19104 - DNA, 20 bp, Artificial Sequence
  Description of Artificial Sequence: Synthetic oligonucleotide
  Target: SCNA; (-) strand; PAM type: NRG; PAM sequence: GGG
ccctggtgccagaaaggttg

SEQ ID NO: 19105 - DNA, 20 bp, Artificial Sequence
  Description of Artificial Sequence: Synthetic oligonucleotide
  Target: SCNA; (-) strand; PAM type: NRG; PAM sequence: GGG
tccctggtgccagaaaggtt

SEQ ID NO: 19106 - DNA, 20 bp, Artificial Sequence
  Description of Artificial Sequence: Synthetic oligonucleotide
  Target: SCNA; (-) strand; PAM type: NRG; PAM sequence: TGG
gtccctggtgccagaaaggt

SEQ ID NO: 19107 - DNA, 20 bp, Artificial Sequence
  Description of Artificial Sequence: Synthetic oligonucleotide
  Target: SCNA; (-) strand; PAM type: NRG; PAM sequence: AGG
accagtccctggtgccagaa

SEQ ID NO: 19108 - DNA, 20 bp, Artificial Sequence
  Description of Artificial Sequence: Synthetic oligonucleotide
  Target: SCNA; (-) strand; PAM type: NRG; PAM sequence: AAG
aaccagtccctggtgccaga

SEQ ID NO: 19109 - DNA, 20 bp, Artificial Sequence
  Description of Artificial Sequence: Synthetic oligonucleotide
  Target: SCNA; (-) strand; PAM type: NRG; PAM sequence: CAG
agaaaaccagtccctggtgc

SEQ ID NO: 19110 - DNA, 20 bp, Artificial Sequence
  Description of Artificial Sequence: Synthetic oligonucleotide
  Target: SCNA; (-) strand; PAM type: NRG; PAM sequence: TGG
tcttccagaaaaccagtccc

SEQ ID NO: 19111 - DNA, 20 bp, Artificial Sequence
  Description of Artificial Sequence: Synthetic oligonucleotide
  Target: SCNA; (-) strand; PAM type: NRG; PAM sequence: CAG
aaacatttcttccagaaaac

SEQ ID NO: 19112 - DNA, 20 bp, Artificial Sequence
  Description of Artificial Sequence: Synthetic oligonucleotide
  Target: SCNA; (-) strand; PAM type: NRG; PAM sequence: CAG
gtccgtggaaacatttcttc

SEQ ID NO: 19113 - DNA, 20 bp, Artificial Sequence
  Description of Artificial Sequence: Synthetic oligonucleotide
  Target: SCNA; (-) strand; PAM type: NRG; PAM sequence: TGG
cccctcaccatccctgtccg

SEQ ID NO: 19114 - DNA, 20 bp, Artificial Sequence
  Description of Artificial Sequence: Synthetic oligonucleotide
  Target: SCNA; (-) strand; PAM type: NRG; PAM sequence: GAG
ctaggttgtgcgctccttat

SEQ ID NO: 19115 - DNA, 20 bp, Artificial Sequence
  Description of Artificial Sequence: Synthetic oligonucleotide
  Target: SCNA; (-) strand; PAM type: NRG; PAM sequence: AGG
actgcacatgtgagggatct

SEQ ID NO: 19116 - DNA, 20 bp, Artificial Sequence
  Description of Artificial Sequence: Synthetic oligonucleotide
  Target: SCNA; (-) strand; PAM type: NRG; PAM sequence: TAG
aactgcacatgtgagggatc

SEQ ID NO: 19117 - DNA, 20 bp, Artificial Sequence
  Description of Artificial Sequence: Synthetic oligonucleotide
  Target: SCNA; (-) strand; PAM type: NRG; PAM sequence: GGG
attgtgaactgcacatgtga

SEQ ID NO: 19118 - DNA, 20 bp, Artificial Sequence
  Description of Artificial Sequence: Synthetic oligonucleotide
  Target: SCNA; (-) strand; PAM type: NRG; PAM sequence: AGG
tattgtgaactgcacatgtg

SEQ ID NO: 19119 - DNA, 20 bp, Artificial Sequence
  Description of Artificial Sequence: Synthetic oligonucleotide
  Target: SCNA; (-) strand; PAM type: NRG; PAM sequence: GAG
ctattgtgaactgcacatgt

SEQ ID NO: 19120 - DNA, 20 bp, Artificial Sequence
  Description of Artificial Sequence: Synthetic oligonucleotide
  Target: SCNA; (-) strand; PAM type: NRG; PAM sequence: GAG
gtggcattagattgccatag

SEQ ID NO: 19121 - DNA, 20 bp, Artificial Sequence
  Description of Artificial Sequence: Synthetic oligonucleotide
  Target: SCNA; (-) strand; PAM type: NRG; PAM sequence: AGG
tggtggcattagattgccat

SEQ ID NO: 19122 - DNA, 20 bp, Artificial Sequence
  Description of Artificial Sequence: Synthetic oligonucleotide
  Target: SCNA; (-) strand; PAM type: NRG; PAM sequence: TAG
gtggtggcattagattgcca

SEQ ID NO: 19123 - DNA, 20 bp, Artificial Sequence
  Description of Artificial Sequence: Synthetic oligonucleotide
  Target: SCNA; (-) strand; PAM type: NRG; PAM sequence: TAG
tgtcagctcagtggtggcat

SEQ ID NO: 19124 - DNA, 20 bp, Artificial Sequence
  Description of Artificial Sequence: Synthetic oligonucleotide
  Target: SCNA; (-) strand; PAM type: NRG; PAM sequence: TGG
tcctcctgtcagctcagtgg

SEQ ID NO: 19125 - DNA, 20 bp, Artificial Sequence
  Description of Artificial Sequence: Synthetic oligonucleotide
  Target: SCNA; (-) strand; PAM type: NRG; PAM sequence: TGG
tcctcctcctgtcagctcag

SEQ ID NO: 19126 - DNA, 20 bp, Artificial Sequence
  Description of Artificial Sequence: Synthetic oligonucleotide
  Target: SCNA; (-) strand; PAM type: NRG; PAM sequence: CAG
agctcctcctcctgtcagct

SEQ ID NO: 19127 - DNA, 20 bp, Artificial Sequence
  Description of Artificial Sequence: Synthetic oligonucleotide
  Target: SCNA; (-) strand; PAM type: NRG; PAM sequence: CAG
agctgagctcctcctcctgt

SEQ ID NO: 19128 - DNA, 20 bp, Artificial Sequence
  Description of Artificial Sequence: Synthetic oligonucleotide
  Target: SCNA; (-) strand; PAM type: NRG; PAM sequence: GAG
caggctgcacagcaagagct

SEQ ID NO: 19129 - DNA, 20 bp, Artificial Sequence
  Description of Artificial Sequence: Synthetic oligonucleotide
  Target: SCNA; (-) strand; PAM type: NRG; PAM sequence: GAG
gataccaggctgcacagcaa

SEQ ID NO: 19130 - DNA, 20 bp, Artificial Sequence
  Description of Artificial Sequence: Synthetic oligonucleotide
  Target: SCNA; (-) strand; PAM type: NRG; PAM sequence: AAG
tcgataccaggctgcacagc

SEQ ID NO: 19131 - DNA, 20 bp, Artificial Sequence
  Description of Artificial Sequence: Synthetic oligonucleotide
  Target: SCNA; (-) strand; PAM type: NRG; PAM sequence: CAG
ctgttcgataccaggctgca

SEQ ID NO: 19132 - DNA, 20 bp, Artificial Sequence
  Description of Artificial Sequence: Synthetic oligonucleotide
  Target: SCNA; (-) strand; PAM type: NRG; PAM sequence: AGG
ctgttaggctgttcgatacc

SEQ ID NO: 19133 - DNA, 20 bp, Artificial Sequence
  Description of Artificial Sequence: Synthetic oligonucleotide
  Target: SCNA; (-) strand; PAM type: NRG; PAM sequence: CAG
cctgttaggctgttcgatac

SEQ ID NO: 19134 - DNA, 20 bp, Artificial Sequence
  Description of Artificial Sequence: Synthetic oligonucleotide
  Target: SCNA; (-) strand; PAM type: NRG; PAM sequence: AGG
gtactggtccatagcctgtt

SEQ ID NO: 19135 - DNA, 20 bp, Artificial Sequence
  Description of Artificial Sequence: Synthetic oligonucleotide
  Target: SCNA; (-) strand; PAM type: NRG; PAM sequence: TAG
agtactggtccatagcctgt

SEQ ID NO: 19136 - DNA, 20 bp, Artificial Sequence
  Description of Artificial Sequence: Synthetic oligonucleotide
  Target: SCNA; (-) strand; PAM type: NRG; PAM sequence: TAG
ccatgaccagtactggtcca

SEQ ID NO: 19137 - DNA, 20 bp, Artificial Sequence
  Description of Artificial Sequence: Synthetic oligonucleotide
  Target: SCNA; (-) strand; PAM type: NRG; PAM sequence: TGG
cccagggccatgaccagtac

SEQ ID NO: 19138 - DNA, 20 bp, Artificial Sequence
  Description of Artificial Sequence: Synthetic oligonucleotide
  Target: SCNA; (-) strand; PAM type: NRG; PAM sequence: CAG
cccaaccccagggccatgac

SEQ ID NO: 19139 - DNA, 20 bp, Artificial Sequence
  Description of Artificial Sequence: Synthetic oligonucleotide
  Target: SCNA; (-) strand; PAM type: NRG; PAM sequence: GGG
atcaggggtccccaacccca

SEQ ID NO: 19140 - DNA, 20 bp, Artificial Sequence
  Description of Artificial Sequence: Synthetic oligonucleotide
  Target: SCNA; (-) strand; PAM type: NRG; PAM sequence: AGG
aatcaggggtccccaacccc

SEQ ID NO: 19141 - DNA, 20 bp, Artificial Sequence
  Description of Artificial Sequence: Synthetic oligonucleotide
  Target: SCNA; (-) strand; PAM type: NRG; PAM sequence: CAG
caatcaggggtccccaaccc

SEQ ID NO: 19142 - DNA, 20 bp, Artificial Sequence
  Description of Artificial Sequence: Synthetic oligonucleotide
  Target: SCNA; (-) strand; PAM type: NRG; PAM sequence: GGG
tctcatatactttcaatcag

SEQ ID NO: 19143 - DNA, 20 bp, Artificial Sequence
  Description of Artificial Sequence: Synthetic oligonucleotide
  Target: SCNA; (-) strand; PAM type: NRG; PAM sequence: GGG
ctctcatatactttcaatca

SEQ ID NO: 19144 - DNA, 20 bp, Artificial Sequence
  Description of Artificial Sequence: Synthetic oligonucleotide
  Target: SCNA; (-) strand; PAM type: NRG; PAM sequence: AGG
cctctcatatactttcaatc

SEQ ID NO: 19145 - DNA, 20 bp, Artificial Sequence
  Description of Artificial Sequence: Synthetic oligonucleotide
  Target: SCNA; (-) strand; PAM type: NRG; PAM sequence: CAG
tcctctcatatactttcaat

SEQ ID NO: 19146 - DNA, 20 bp, Artificial Sequence
  Description of Artificial Sequence: Synthetic oligonucleotide
  Target: SCNA; (-) strand; PAM type: NRG; PAM sequence: TAG
gcccctgttataaaatggct

SEQ ID NO: 19147 - DNA, 20 bp, Artificial Sequence
  Description of Artificial Sequence: Synthetic oligonucleotide
  Target: SCNA; (-) strand; PAM type: NRG; PAM sequence: TGG
cctaagcccctgttataaaa

SEQ ID NO: 19148 - DNA, 20 bp, Artificial Sequence
  Description of Artificial Sequence: Synthetic oligonucleotide
  Target: SCNA; (-) strand; PAM type: NRG; PAM sequence: AAG
actaaaatctgcagatgcct

SEQ ID NO: 19149 - DNA, 20 bp, Artificial Sequence
  Description of Artificial Sequence: Synthetic oligonucleotide
  Target: SCNA; (-) strand; PAM type: NRG; PAM sequence: CAG
cccttgggtactaaaatctg

SEQ ID NO: 19150 - DNA, 20 bp, Artificial Sequence
  Description of Artificial Sequence: Synthetic oligonucleotide
  Target: SCNA; (-) strand; PAM type: NRG; PAM sequence: GGG
ttggtttcaggacctccctt

SEQ ID NO: 19151 - DNA, 20 bp, Artificial Sequence
  Description of Artificial Sequence: Synthetic oligonucleotide
  Target: SCNA; (-) strand; PAM type: NRG; PAM sequence: TGG
attggtttcaggacctccct

SEQ ID NO: 19152 - DNA, 20 bp, Artificial Sequence
  Description of Artificial Sequence: Synthetic oligonucleotide
  Target: SCNA; (-) strand; PAM type: NRG; PAM sequence: AGG
agccataggggattggtttc

SEQ ID NO: 19153 - DNA, 20 bp, Artificial Sequence
  Description of Artificial Sequence: Synthetic oligonucleotide
  Target: SCNA; (-) strand; PAM type: NRG; PAM sequence: CAG
tagccataggggattggttt

SEQ ID NO: 19154 - DNA, 20 bp, Artificial Sequence
  Description of Artificial Sequence: Synthetic oligonucleotide
  Target: SCNA; (-) strand; PAM type: NRG; PAM sequence: TGG
cttcagtagccataggggat

SEQ ID NO: 19155 - DNA, 20 bp, Artificial Sequence
  Description of Artificial Sequence: Synthetic oligonucleotide
  Target: SCNA; (-) strand; PAM type: NRG; PAM sequence: GGG
ttgtccttcagtagccatag

SEQ ID NO: 19156 - DNA, 20 bp, Artificial Sequence
  Description of Artificial Sequence: Synthetic oligonucleotide
  Target: SCNA; (-) strand; PAM type: NRG; PAM sequence: GGG
gttgtccttcagtagccata

SEQ ID NO: 19157 - DNA, 20 bp, Artificial Sequence
  Description of Artificial Sequence: Synthetic oligonucleotide
  Target: SCNA; (-) strand; PAM type: NRG; PAM sequence: AGG
agttgtccttcagtagccat

SEQ ID NO: 19158 - DNA, 20 bp, Artificial Sequence
  Description of Artificial Sequence: Synthetic oligonucleotide
  Target: SCNA; (-) strand; PAM type: NRG; PAM sequence: TAG
cagttgtccttcagtagcca

SEQ ID NO: 19159 - DNA, 20 bp, Artificial Sequence
  Description of Artificial Sequence: Synthetic oligonucleotide
  Target: SCNA; (-) strand; PAM type: NRG; PAM sequence: TAG
gatacacagttgtccttcag

SEQ ID NO: 19160 - DNA, 20 bp, Artificial Sequence
  Description of Artificial Sequence: Synthetic oligonucleotide
  Target: SCNA; (-) strand; PAM type: NRG; PAM sequence: CAG
aatgatacacagttgtcctt

SEQ ID NO: 19161 - DNA, 20 bp, Artificial Sequence
  Description of Artificial Sequence: Synthetic oligonucleotide
  Target: SCNA; (-) strand; PAM type: NRG; PAM sequence: CAG
tttctgttaagaatgataca

SEQ ID NO: 19162 - DNA, 20 bp, Artificial Sequence
  Description of Artificial Sequence: Synthetic oligonucleotide
  Target: SCNA; (-) strand; PAM type: NRG; PAM sequence: AAG
agattttgtttttttctgtt

SEQ ID NO: 19163 - DNA, 20 bp, Artificial Sequence
  Description of Artificial Sequence: Synthetic oligonucleotide
  Target: SCNA; (-) strand; PAM type: NRG; PAM sequence: CAG
aaaaaattttatttacaaaa

SEQ ID NO: 19164 - DNA, 20 bp, Artificial Sequence
  Description of Artificial Sequence: Synthetic oligonucleotide
  Target: SCNA; (-) strand; PAM type: NRG; PAM sequence: TGG
aactaaattccagagtgaaa

SEQ ID NO: 19165 - DNA, 20 bp, Artificial Sequence
  Description of Artificial Sequence: Synthetic oligonucleotide
  Target: SCNA; (-) strand; PAM type: NRG; PAM sequence: GAG
taatttctaactaaattcca

SEQ ID NO: 19166 - DNA, 20 bp, Artificial Sequence
  Description of Artificial Sequence: Synthetic oligonucleotide
  Target: SCNA; (-) strand; PAM type: NRG; PAM sequence: CAG
cttaatttctaactaaattc

SEQ ID NO: 19167 - DNA, 20 bp, Artificial Sequence
  Description of Artificial Sequence: Synthetic oligonucleotide
  Target: SCNA; (-) strand; PAM type: NRG; PAM sequence: TAG
ctagtgctggtacattttag

SEQ ID NO: 19168 - DNA, 20 bp, Artificial Sequence
  Description of Artificial Sequence: Synthetic oligonucleotide
  Target: SCNA; (-) strand; PAM type: NRG; PAM sequence: TAG
ctgctagtgctggtacattt

SEQ ID NO: 19169 - DNA, 20 bp, Artificial Sequence
  Description of Artificial Sequence: Synthetic oligonucleotide
  Target: SCNA; (-) strand; PAM type: NRG; PAM sequence: TGG
ttggtatgtgctgctagtgc

SEQ ID NO: 19170 - DNA, 20 bp, Artificial Sequence
  Description of Artificial Sequence: Synthetic oligonucleotide
  Target: SCNA; (-) strand; PAM type: NRG; PAM sequence: TAG
tagtttttggtatgtgctgc

SEQ ID NO: 19171 - DNA, 20 bp, Artificial Sequence
  Description of Artificial Sequence: Synthetic oligonucleotide
  Target: SCNA; (-) strand; PAM type: NRG; PAM sequence: TGG
ggaatatttgtattagtttt

SEQ ID NO: 19172 - DNA, 20 bp, Artificial Sequence
  Description of Artificial Sequence: Synthetic oligonucleotide
  Target: SCNA; (-) strand; PAM type: NRG; PAM sequence: TAG
tattattggaatatttgtat

SEQ ID NO: 19173 - DNA, 20 bp, Artificial Sequence
  Description of Artificial Sequence: Synthetic oligonucleotide
  Target: SCNA; (-) strand; PAM type: NRG; PAM sequence: TGG
cagtcattatttaatattat

SEQ ID NO: 19174 - DNA, 20 bp, Artificial Sequence
  Description of Artificial Sequence: Synthetic oligonucleotide
  Target: SCNA; (-) strand; PAM type: NRG; PAM sequence: CAG
tctcagatgaaatacaaatg

SEQ ID NO: 19175 - DNA, 20 bp, Artificial Sequence
  Description of Artificial Sequence: Synthetic oligonucleotide
  Target: SCNA; (-) strand; PAM type: NRG; PAM sequence: CAG
gaagaaccataaaccactct

SEQ ID NO: 19176 - DNA, 20 bp, Artificial Sequence
  Description of Artificial Sequence: Synthetic oligonucleotide
  Target: SCNA; (-) strand; PAM type: NRG; PAM sequence: AAG
taaatcagccacttatgggg

SEQ ID NO: 19177 - DNA, 20 bp, Artificial Sequence
  Description of Artificial Sequence: Synthetic oligonucleotide
  Target: SCNA; (-) strand; PAM type: NRG; PAM sequence: GGG
caataaatcagccacttatg

SEQ ID NO: 19178 - DNA, 20 bp, Artificial Sequence
  Description of Artificial Sequence: Synthetic oligonucleotide
  Target: SCNA; (-) strand; PAM type: NRG; PAM sequence: GGG
tcaataaatcagccacttat

SEQ ID NO: 19179 - DNA, 20 bp, Artificial Sequence
  Description of Artificial Sequence: Synthetic oligonucleotide
  Target: SCNA; (-) strand; PAM type: NRG; PAM sequence: TGG
atcaataaatcagccactta

SEQ ID NO: 19180 - DNA, 20 bp, Artificial Sequence
  Description of Artificial Sequence: Synthetic oligonucleotide
  Target: SCNA; (-) strand; PAM type: NRG; PAM sequence: CAG
aaaagtggccatcaataaat

SEQ ID NO: 19181 - DNA, 20 bp, Artificial Sequence
  Description of Artificial Sequence: Synthetic oligonucleotide
  Target: SCNA; (-) strand; PAM type: NRG; PAM sequence: TGG
gaccaggagttaagaaaaag

SEQ ID NO: 19182 - DNA, 20 bp, Artificial Sequence
  Description of Artificial Sequence: Synthetic oligonucleotide
  Target: SCNA; (-) strand; PAM type: NRG; PAM sequence: AAG
aaagaccaggagttaagaaa

SEQ ID NO: 19183 - DNA, 20 bp, Artificial Sequence
  Description of Artificial Sequence: Synthetic oligonucleotide
  Target: SCNA; (-) strand; PAM type: NRG; PAM sequence: AAG
tgtgagaaagaccaggagtt

SEQ ID NO: 19184 - DNA, 20 bp, Artificial Sequence
  Description of Artificial Sequence: Synthetic oligonucleotide
  Target: SCNA; (-) strand; PAM type: NRG; PAM sequence: GAG
gtgattgtgagaaagaccag

SEQ ID NO: 19185 - DNA, 20 bp, Artificial Sequence
  Description of Artificial Sequence: Synthetic oligonucleotide
  Target: SCNA; (-) strand; PAM type: NRG; PAM sequence: AGG
ctgtgattgtgagaaagacc

SEQ ID NO: 19186 - DNA, 20 bp, Artificial Sequence
  Description of Artificial Sequence: Synthetic oligonucleotide
  Target: SCNA; (-) strand; PAM type: NRG; PAM sequence: CAG
tctgtgattgtgagaaagac

SEQ ID NO: 19187 - DNA, 20 bp, Artificial Sequence
  Description of Artificial Sequence: Synthetic oligonucleotide
  Target: SCNA; (-) strand; PAM type: NRG; PAM sequence: AAG
tgttttctgtgattgtgaga

SEQ ID NO: 19188 - DNA, 20 bp, Artificial Sequence
  Description of Artificial Sequence: Synthetic oligonucleotide
  Target: SCNA; (-) strand; PAM type: NRG; PAM sequence: GAG
ggactgttttctgtgattgt

SEQ ID NO: 19189 - DNA, 20 bp, Artificial Sequence
  Description of Artificial Sequence: Synthetic oligonucleotide
  Target: SCNA; (-) strand; PAM type: NRG; PAM sequence: GGG
cttttttatttgtgtgataa

SEQ ID NO: 19190 - DNA, 20 bp, Artificial Sequence
  Description of Artificial Sequence: Synthetic oligonucleotide
  Target: SCNA; (-) strand; PAM type: NRG; PAM sequence: AGG
acttttttatttgtgtgata

SEQ ID NO: 19191 - DNA, 20 bp, Artificial Sequence
  Description of Artificial Sequence: Synthetic oligonucleotide
  Target: SCNA; (-) strand; PAM type: NRG; PAM sequence: AAG
gacttttttatttgtgtgat

SEQ ID NO: 19192 - DNA, 20 bp, Artificial Sequence
  Description of Artificial Sequence: Synthetic oligonucleotide
  Target: SCNA; (-) strand; PAM type: NRG; PAM sequence: GAG
aaaaggtacagaggaatggt

SEQ ID NO: 19193 - DNA, 20 bp, Artificial Sequence
  Description of Artificial Sequence: Synthetic oligonucleotide
  Target: SCNA; (-) strand; PAM type: NRG; PAM sequence: TGG
agataaaaggtacagaggaa

SEQ ID NO: 19194 - DNA, 20 bp, Artificial Sequence
  Description of Artificial Sequence: Synthetic oligonucleotide
  Target: SCNA; (-) strand; PAM type: NRG; PAM sequence: AGG
tgttaagataaaaggtacag

SEQ ID NO: 19195 - DNA, 20 bp, Artificial Sequence
  Description of Artificial Sequence: Synthetic oligonucleotide
  Target: SCNA; (-) strand; PAM type: NRG; PAM sequence: GAG
ctgttaagataaaaggtaca

SEQ ID NO: 19196 - DNA, 20 bp, Artificial Sequence
  Description of Artificial Sequence: Synthetic oligonucleotide
  Target: SCNA; (-) strand; PAM type: NRG; PAM sequence: CAG
gtctgttaagataaaaggta

SEQ ID NO: 19197 - DNA, 20 bp, Artificial Sequence
  Description of Artificial Sequence: Synthetic oligonucleotide
  Target: SCNA; (-) strand; PAM type: NRG; PAM sequence: AGG
cacaagtctgttaagataaa

SEQ ID NO: 19198 - DNA, 20 bp, Artificial Sequence
  Description of Artificial Sequence: Synthetic oligonucleotide
  Target: SCNA; (-) strand; PAM type: NRG; PAM sequence: AAG
acacaagtctgttaagataa

SEQ ID NO: 19199 - DNA, 20 bp, Artificial Sequence
  Description of Artificial Sequence: Synthetic oligonucleotide
  Target: SCNA; (-) strand; PAM type: NRG; PAM sequence: AAG
tttcaaaacacaagtctgtt

SEQ ID NO: 19200 - DNA, 20 bp, Artificial Sequence
  Description of Artificial Sequence: Synthetic oligonucleotide
  Target: SCNA; (-) strand; PAM type: NRG; PAM sequence: AAG
taaataatatttcaaaacac

SEQ ID NO: 19201 - DNA, 20 bp, Artificial Sequence
  Description of Artificial Sequence: Synthetic oligonucleotide
  Target: SCNA; (-) strand; PAM type: NRG; PAM sequence: TAG
ggtctcaaaaaattaaaaaa

SEQ ID NO: 19202 - DNA, 20 bp, Artificial Sequence
  Description of Artificial Sequence: Synthetic oligonucleotide
  Target: SCNA; (-) strand; PAM type: NRG; PAM sequence: CGG
ctgggtgacagagaaagacc

SEQ ID NO: 19203 - DNA, 20 bp, Artificial Sequence
  Description of Artificial Sequence: Synthetic oligonucleotide
  Target: SCNA; (-) strand; PAM type: NRG; PAM sequence: AAG
tccagactgggtgacagaga

SEQ ID NO: 19204 - DNA, 20 bp, Artificial Sequence
  Description of Artificial Sequence: Synthetic oligonucleotide
  Target: SCNA; (-) strand; PAM type: NRG; PAM sequence: GAG
gcactccagactgggtgaca

SEQ ID NO: 19205 - DNA, 20 bp, Artificial Sequence
  Description of Artificial Sequence: Synthetic oligonucleotide
  Target: SCNA; (-) strand; PAM type: NRG; PAM sequence: CAG
ctgcactccagactgggtga

SEQ ID NO: 19206 - DNA, 20 bp, Artificial Sequence
  Description of Artificial Sequence: Synthetic oligonucleotide
  Target: SCNA; (-) strand; PAM type: NRG; PAM sequence: GGG
cgcgcactgcactccagact

SEQ ID NO: 19207 - DNA, 20 bp, Artificial Sequence
  Description of Artificial Sequence: Synthetic oligonucleotide
  Target: SCNA; (-) strand; PAM type: NRG; PAM sequence: TGG
tcgcgcactgcactccagac

SEQ ID NO: 19208 - DNA, 20 bp, Artificial Sequence
  Description of Artificial Sequence: Synthetic oligonucleotide
  Target: SCNA; (-) strand; PAM type: NRG; PAM sequence: CAG
caagatcgcgcactgcactc

SEQ ID NO: 19209 - DNA, 20 bp, Artificial Sequence
  Description of Artificial Sequence: Synthetic oligonucleotide
  Target: SCNA; (-) strand; PAM type: NRG; PAM sequence: AAG
agctggggctgcagtgagcc

SEQ ID NO: 19210 - DNA, 20 bp, Artificial Sequence
  Description of Artificial Sequence: Synthetic oligonucleotide
  Target: SCNA; (-) strand; PAM type: NRG; PAM sequence: GAG
ccggaagctggggctgcagt

SEQ ID NO: 19211 - DNA, 20 bp, Artificial Sequence
  Description of Artificial Sequence: Synthetic oligonucleotide
  Target: SCNA; (-) strand; PAM type: NRG; PAM sequence: CAG
gaacccggaagctggggctg

SEQ ID NO: 19212 - DNA, 20 bp, Artificial Sequence
  Description of Artificial Sequence: Synthetic oligonucleotide
  Target: SCNA; (-) strand; PAM type: NRG; PAM sequence: GGG
ttgcttgaacccggaagctg

SEQ ID NO: 19213 - DNA, 20 bp, Artificial Sequence
  Description of Artificial Sequence: Synthetic oligonucleotide
  Target: SCNA; (-) strand; PAM type: NRG; PAM sequence: GGG
attgcttgaacccggaagct

SEQ ID NO: 19214 - DNA, 20 bp, Artificial Sequence
  Description of Artificial Sequence: Synthetic oligonucleotide
  Target: SCNA; (-) strand; PAM type: NRG; PAM sequence: TGG
aattgcttgaacccggaagc

SEQ ID NO: 19215 - DNA, 20 bp, Artificial Sequence
  Description of Artificial Sequence: Synthetic oligonucleotide
  Target: SCNA; (-) strand; PAM type: NRG; PAM sequence: AAG
ggagaattgcttgaacccgg

SEQ ID NO: 19216 - DNA, 20 bp, Artificial Sequence
  Description of Artificial Sequence: Synthetic oligonucleotide
  Target: SCNA; (-) strand; PAM type: NRG; PAM sequence: CGG
gcaggagaattgcttgaacc

SEQ ID NO: 19217 - DNA, 20 bp, Artificial Sequence
  Description of Artificial Sequence: Synthetic oligonucleotide
  Target: SCNA; (-) strand; PAM type: NRG; PAM sequence: GAG
tactcaagaaactgaagcag

SEQ ID NO: 19218 - DNA, 20 bp, Artificial Sequence
  Description of Artificial Sequence: Synthetic oligonucleotide
  Target: SCNA; (-) strand; PAM type: NRG; PAM sequence: AGG
gctactcaagaaactgaagc

SEQ ID NO: 19219 - DNA, 20 bp, Artificial Sequence
  Description of Artificial Sequence: Synthetic oligonucleotide
  Target: SCNA; (-) strand; PAM type: NRG; PAM sequence: CAG
agctactcaagaaactgaag

SEQ ID NO: 19220 - DNA, 20 bp, Artificial Sequence
  Description of Artificial Sequence: Synthetic oligonucleotide
  Target: SCNA; (-) strand; PAM type: NRG; PAM sequence: AAG
cccagctactcaagaaactg

SEQ ID NO: 19221 - DNA, 20 bp, Artificial Sequence
  Description of Artificial Sequence: Synthetic oligonucleotide
  Target: SCNA; (-) strand; PAM type: NRG; PAM sequence: AAG
gctggtaatcccagctactc

SEQ ID NO: 19222 - DNA, 20 bp, Artificial Sequence
  Description of Artificial Sequence: Synthetic oligonucleotide
  Target: SCNA; (-) strand; PAM type: NRG; PAM sequence: CAG
gtgatgggcgctggtaatcc

SEQ ID NO: 19223 - DNA, 20 bp, Artificial Sequence
  Description of Artificial Sequence: Synthetic oligonucleotide
  Target: SCNA; (-) strand; PAM type: NRG; PAM sequence: TGG
ctgggtgtggtgatgggcgc

SEQ ID NO: 19224 - DNA, 20 bp, Artificial Sequence
  Description of Artificial Sequence: Synthetic oligonucleotide
  Target: SCNA; (-) strand; PAM type: NRG; PAM sequence: GGG
aattagctgggtgtggtgat

SEQ ID NO: 19225 - DNA, 20 bp, Artificial Sequence
  Description of Artificial Sequence: Synthetic oligonucleotide
  Target: SCNA; (-) strand; PAM type: NRG; PAM sequence: TGG
aaattagctgggtgtggtga

SEQ ID NO: 19226 - DNA, 20 bp, Artificial Sequence
  Description of Artificial Sequence: Synthetic oligonucleotide
  Target: SCNA; (-) strand; PAM type: NRG; PAM sequence: TGG
atacagaaattagctgggtg

SEQ ID NO: 19227 - DNA, 20 bp, Artificial Sequence
  Description of Artificial Sequence: Synthetic oligonucleotide
  Target: SCNA; (-) strand; PAM type: NRG; PAM sequence: GGG
taaaaatacagaaattagct

SEQ ID NO: 19228 - DNA, 20 bp, Artificial Sequence
  Description of Artificial Sequence: Synthetic oligonucleotide
  Target: SCNA; (-) strand; PAM type: NRG; PAM sequence: TGG
ctaaaaatacagaaattagc

SEQ ID NO: 19229 - DNA, 20 bp, Artificial Sequence
  Description of Artificial Sequence: Synthetic oligonucleotide
  Target: SCNA; (-) strand; PAM type: NRG; PAM sequence: TAG
tctactaaaaatacagaaat

SEQ ID NO: 19230 - DNA, 20 bp, Artificial Sequence
  Description of Artificial Sequence: Synthetic oligonucleotide
  Target: SCNA; (-) strand; PAM type: NRG; PAM sequence: CAG
acccatctctactaaaaata

SEQ ID NO: 19231 - DNA, 20 bp, Artificial Sequence
  Description of Artificial Sequence: Synthetic oligonucleotide
  Target: SCNA; (-) strand; PAM type: NRG; PAM sequence: TGG
agagacaagcctagccaaca

SEQ ID NO: 19232 - DNA, 20 bp, Artificial Sequence
  Description of Artificial Sequence: Synthetic oligonucleotide
  Target: SCNA; (-) strand; PAM type: NRG; PAM sequence: TAG
acaggggatagagacaagcc

SEQ ID NO: 19233 - DNA, 20 bp, Artificial Sequence
  Description of Artificial Sequence: Synthetic oligonucleotide
  Target: SCNA; (-) strand; PAM type: NRG; PAM sequence: AAG
tgaggacaggggatagagac

SEQ ID NO: 19234 - DNA, 20 bp, Artificial Sequence
  Description of Artificial Sequence: Synthetic oligonucleotide
  Target: SCNA; (-) strand; PAM type: NRG; PAM sequence: GAG
tcacttgaggacaggggata

SEQ ID NO: 19235 - DNA, 20 bp, Artificial Sequence
  Description of Artificial Sequence: Synthetic oligonucleotide
  Target: SCNA; (-) strand; PAM type: NRG; PAM sequence: TAG
gatcacttgaggacagggga

SEQ ID NO: 19236 - DNA, 20 bp, Artificial Sequence
  Description of Artificial Sequence: Synthetic oligonucleotide
  Target: SCNA; (-) strand; PAM type: NRG; PAM sequence: GGG
cagggatcacttgaggacag

SEQ ID NO: 19237 - DNA, 20 bp, Artificial Sequence
  Description of Artificial Sequence: Synthetic oligonucleotide
  Target: SCNA; (-) strand; PAM type: NRG; PAM sequence: GGG
gcagggatcacttgaggaca

SEQ ID NO: 19238 - DNA, 20 bp, Artificial Sequence
  Description of Artificial Sequence: Synthetic oligonucleotide
  Target: SCNA; (-) strand; PAM type: NRG; PAM sequence: AGG
tgcagggatcacttgaggac

SEQ ID NO: 19239 - DNA, 20 bp, Artificial Sequence
  Description of Artificial Sequence: Synthetic oligonucleotide
  Target: SCNA; (-) strand; PAM type: NRG; PAM sequence: CAG
ttgcagggatcacttgagga

SEQ ID NO: 19240 - DNA, 20 bp, Artificial Sequence
  Description of Artificial Sequence: Synthetic oligonucleotide
  Target: SCNA; (-) strand; PAM type: NRG; PAM sequence: AGG
caagttgcagggatcacttg

SEQ ID NO: 19241 - DNA, 20 bp, Artificial Sequence
  Description of Artificial Sequence: Synthetic oligonucleotide
  Target: SCNA; (-) strand; PAM type: NRG; PAM sequence: GAG
tcaagttgcagggatcactt

SEQ ID NO: 19242 - DNA, 20 bp, Artificial Sequence
  Description of Artificial Sequence: Synthetic oligonucleotide
  Target: SCNA; (-) strand; PAM type: NRG; PAM sequence: GGG
cttttggaggtcaagttgca

SEQ ID NO: 19243 - DNA, 20 bp, Artificial Sequence
  Description of Artificial Sequence: Synthetic oligonucleotide
  Target: SCNA; (-) strand; PAM type: NRG; PAM sequence: AGG
acttttggaggtcaagttgc

SEQ ID NO: 19244 - DNA, 20 bp, Artificial Sequence
  Description of Artificial Sequence: Synthetic oligonucleotide
  Target: SCNA; (-) strand; PAM type: NRG; PAM sequence: CAG
cacttttggaggtcaagttg

SEQ ID NO: 19245 - DNA, 20 bp, Artificial Sequence
  Description of Artificial Sequence: Synthetic oligonucleotide
  Target: SCNA; (-) strand; PAM type: NRG; PAM sequence: AAG
tcccagcacttttggaggtc

SEQ ID NO: 19246 - DNA, 20 bp, Artificial Sequence
  Description of Artificial Sequence: Synthetic oligonucleotide
  Target: SCNA; (-) strand; PAM type: NRG; PAM sequence: AGG
tataatcccagcacttttgg

SEQ ID NO: 19247 - DNA, 20 bp, Artificial Sequence
  Description of Artificial Sequence: Synthetic oligonucleotide
  Target: SCNA; (-) strand; PAM type: NRG; PAM sequence: GAG
ctataatcccagcacttttg

SEQ ID NO: 19248 - DNA, 20 bp, Artificial Sequence
  Description of Artificial Sequence: Synthetic oligonucleotide
  Target: SCNA; (-) strand; PAM type: NRG; PAM sequence: TGG
gcctataatcccagcacttt

SEQ ID NO: 19249 - DNA, 20 bp, Artificial Sequence
  Description of Artificial Sequence: Synthetic oligonucleotide
  Target: SCNA; (-) strand; PAM type: NRG; PAM sequence: CAG
gtggctcatgcctataatcc

SEQ ID NO: 19250 - DNA, 20 bp, Artificial Sequence
  Description of Artificial Sequence: Synthetic oligonucleotide
  Target: SCNA; (-) strand; PAM type: NRG; PAM sequence: TGG
ataaataaggccaggcatgg

SEQ ID NO: 19251 - DNA, 20 bp, Artificial Sequence
  Description of Artificial Sequence: Synthetic oligonucleotide
  Target: SCNA; (-) strand; PAM type: NRG; PAM sequence: TGG
aatataaataaggccaggca

SEQ ID NO: 19252 - DNA, 20 bp, Artificial Sequence
  Description of Artificial Sequence: Synthetic oligonucleotide
  Target: SCNA; (-) strand; PAM type: NRG; PAM sequence: AGG
aatataatataaataaggcc

SEQ ID NO: 19253 - DNA, 20 bp, Artificial Sequence
  Description of Artificial Sequence: Synthetic oligonucleotide
  Target: SCNA; (-) strand; PAM type: NRG; PAM sequence: CAG
taatataatataaataaggc

SEQ ID NO: 19254 - DNA, 20 bp, Artificial Sequence
  Description of Artificial Sequence: Synthetic oligonucleotide
  Target: SCNA; (-) strand; PAM type: NRG; PAM sequence: AGG
gagttaatataatataaata

SEQ ID NO: 19255 - DNA, 20 bp, Artificial Sequence
  Description of Artificial Sequence: Synthetic oligonucleotide
  Target: SCNA; (-) strand; PAM type: NRG; PAM sequence: AAG
agagttaatataatataaat

SEQ ID NO: 19256 - DNA, 20 bp, Artificial Sequence
  Description of Artificial Sequence: Synthetic oligonucleotide
  Target: SCNA; (-) strand; PAM type: NRG; PAM sequence: GAG
aagtggcatagtgattatta

SEQ ID NO: 19257 - DNA, 20 bp, Artificial Sequence
  Description of Artificial Sequence: Synthetic oligonucleotide
  Target: SCNA; (-) strand; PAM type: NRG; PAM sequence: TAG
gaaagtggcatagtgattat

SEQ ID NO: 19258 - DNA, 20 bp, Artificial Sequence
  Description of Artificial Sequence: Synthetic oligonucleotide
  Target: SCNA; (-) strand; PAM type: NRG; PAM sequence: TAG
aattacaacagaaagtggca

SEQ ID NO: 19259 - DNA, 20 bp, Artificial Sequence
  Description of Artificial Sequence: Synthetic oligonucleotide
  Target: SCNA; (-) strand; PAM type: NRG; PAM sequence: TGG
taaagaattacaacagaaag

SEQ ID NO: 19260 - DNA, 20 bp, Artificial Sequence
  Description of Artificial Sequence: Synthetic oligonucleotide
  Target: SCNA; (-) strand; PAM type: NRG; PAM sequence: AAG
gcctaaagaattacaacaga

SEQ ID NO: 19261 - DNA, 20 bp, Artificial Sequence
  Description of Artificial Sequence: Synthetic oligonucleotide
  Target: SCNA; (-) strand; PAM type: NRG; PAM sequence: CAG
aagtgcctaaagaattacaa

SEQ ID NO: 19262 - DNA, 20 bp, Artificial Sequence
  Description of Artificial Sequence: Synthetic oligonucleotide
  Target: SCNA; (-) strand; PAM type: NRG; PAM sequence: AAG
atacaaagaagaagtgccta

SEQ ID NO: 19263 - DNA, 20 bp, Artificial Sequence
  Description of Artificial Sequence: Synthetic oligonucleotide
  Target: SCNA; (-) strand; PAM type: NRG; PAM sequence: AAG
attaaaaacatacaaagaag

SEQ ID NO: 19264 - DNA, 20 bp, Artificial Sequence
  Description of Artificial Sequence: Synthetic oligonucleotide
  Target: SCNA; (-) strand; PAM type: NRG; PAM sequence: AAG
ctaattaaaaacatacaaag

SEQ ID NO: 19265 - DNA, 20 bp, Artificial Sequence
  Description of Artificial Sequence: Synthetic oligonucleotide
  Target: SCNA; (-) strand; PAM type: NRG; PAM sequence: AAG
atgctaattaaaaacataca

SEQ ID NO: 19266 - DNA, 20 bp, Artificial Sequence
  Description of Artificial Sequence: Synthetic oligonucleotide
  Target: SCNA; (-) strand; PAM type: NRG; PAM sequence: AGG
gtagaatattggctacttgg

SEQ ID NO: 19267 - DNA, 20 bp, Artificial Sequence
  Description of Artificial Sequence: Synthetic oligonucleotide
  Target: SCNA; (-) strand; PAM type: NRG; PAM sequence: GAG
tgtagaatattggctacttg

SEQ ID NO: 19268 - DNA, 20 bp, Artificial Sequence
  Description of Artificial Sequence: Synthetic oligonucleotide
  Target: SCNA; (-) strand; PAM type: NRG; PAM sequence: TGG
catgtagaatattggctact

SEQ ID NO: 19269 - DNA, 20 bp, Artificial Sequence
  Description of Artificial Sequence: Synthetic oligonucleotide
  Target: SCNA; (-) strand; PAM type: NRG; PAM sequence: TGG
tatcacttcatgtagaatat

SEQ ID NO: 19270 - DNA, 20 bp, Artificial Sequence
  Description of Artificial Sequence: Synthetic oligonucleotide
  Target: SCNA; (-) strand; PAM type: NRG; PAM sequence: TAG
aaatcctttatcacttcatg

SEQ ID NO: 19271 - DNA, 20 bp, Artificial Sequence
  Description of Artificial Sequence: Synthetic oligonucleotide
  Target: SCNA; (-) strand; PAM type: NRG; PAM sequence: GGG
gcagacttttcataatttca

SEQ ID NO: 19272 - DNA, 20 bp, Artificial Sequence
  Description of Artificial Sequence: Synthetic oligonucleotide
  Target: SCNA; (-) strand; PAM type: NRG; PAM sequence: AGG
ggcagacttttcataatttc

SEQ ID NO: 19273 - DNA, 20 bp, Artificial Sequence
  Description of Artificial Sequence: Synthetic oligonucleotide
  Target: SCNA; (-) strand; PAM type: NRG; PAM sequence: CAG
aggcagacttttcataattt

SEQ ID NO: 19274 - DNA, 20 bp, Artificial Sequence
  Description of Artificial Sequence: Synthetic oligonucleotide
  Target: SCNA; (-) strand; PAM type: NRG; PAM sequence: CAG
gcaagaaagaaaaaacaagg

SEQ ID NO: 19275 - DNA, 20 bp, Artificial Sequence
  Description of Artificial Sequence: Synthetic oligonucleotide
  Target: SCNA; (-) strand; PAM type: NRG; PAM sequence: AGG
aatgcaagaaagaaaaaaca

SEQ ID NO: 19276 - DNA, 20 bp, Artificial Sequence
  Description of Artificial Sequence: Synthetic oligonucleotide
  Target: SCNA; (-) strand; PAM type: NRG; PAM sequence: AAG
caatgcaagaaagaaaaaac

SEQ ID NO: 19277 - DNA, 20 bp, Artificial Sequence
  Description of Artificial Sequence: Synthetic oligonucleotide
  Target: SCNA; (-) strand; PAM type: NRG; PAM sequence: AAG
tactgtagcacaatgcaaga

SEQ ID NO: 19278 - DNA, 20 bp, Artificial Sequence
  Description of Artificial Sequence: Synthetic oligonucleotide
  Target: SCNA; (-) strand; PAM type: NRG; PAM sequence: AAG
tgtgtactgtagcacaatgc

SEQ ID NO: 19279 - DNA, 20 bp, Artificial Sequence
  Description of Artificial Sequence: Synthetic oligonucleotide
  Target: SCNA; (-) strand; PAM type: NRG; PAM sequence: TAG
gtccgtgtatgtgtgtactg

SEQ ID NO: 19280 - DNA, 20 bp, Artificial Sequence
  Description of Artificial Sequence: Synthetic oligonucleotide
  Target: SCNA; (-) strand; PAM type: NRG; PAM sequence: CAG
aaatgataattagcagaacc

SEQ ID NO: 19281 - DNA, 20 bp, Artificial Sequence
  Description of Artificial Sequence: Synthetic oligonucleotide
  Target: SCNA; (-) strand; PAM type: NRG; PAM sequence: CAG
actaaggaaatgataattag

SEQ ID NO: 19282 - DNA, 20 bp, Artificial Sequence
  Description of Artificial Sequence: Synthetic oligonucleotide
  Target: SCNA; (-) strand; PAM type: NRG; PAM sequence: TAG
ggaactaaggaaatgataat

SEQ ID NO: 19283 - DNA, 20 bp, Artificial Sequence
  Description of Artificial Sequence: Synthetic oligonucleotide
  Target: SCNA; (-) strand; PAM type: NRG; PAM sequence: AGG
tggggaatgatatggaacta

SEQ ID NO: 19284 - DNA, 20 bp, Artificial Sequence
  Description of Artificial Sequence: Synthetic oligonucleotide
  Target: SCNA; (-) strand; PAM type: NRG; PAM sequence: AAG
ttggggaatgatatggaact

SEQ ID NO: 19285 - DNA, 20 bp, Artificial Sequence
  Description of Artificial Sequence: Synthetic oligonucleotide
  Target: SCNA; (-) strand; PAM type: NRG; PAM sequence: TGG
ttaggggttggggaatgata

SEQ ID NO: 19286 - DNA, 20 bp, Artificial Sequence
  Description of Artificial Sequence: Synthetic oligonucleotide
  Target: SCNA; (-) strand; PAM type: NRG; PAM sequence: GGG
cacaggtggcttaggggttg

SEQ ID NO: 19287 - DNA, 20 bp, Artificial Sequence
  Description of Artificial Sequence: Synthetic oligonucleotide
  Target: SCNA; (-) strand; PAM type: NRG; PAM sequence: GGG
acacaggtggcttaggggtt

SEQ ID NO: 19288 - DNA, 20 bp, Artificial Sequence
  Description of Artificial Sequence: Synthetic oligonucleotide
  Target: SCNA; (-) strand; PAM type: NRG; PAM sequence: TGG
gacacaggtggcttaggggt

SEQ ID NO: 19289 - DNA, 20 bp, Artificial Sequence
  Description of Artificial Sequence: Synthetic oligonucleotide
  Target: SCNA; (-) strand; PAM type: NRG; PAM sequence: GGG
tatggacacaggtggcttag

SEQ ID NO: 19290 - DNA, 20 bp, Artificial Sequence
  Description of Artificial Sequence: Synthetic oligonucleotide
  Target: SCNA; (-) strand; PAM type: NRG; PAM sequence: GGG
gtatggacacaggtggctta

SEQ ID NO: 19291 - DNA, 20 bp, Artificial Sequence
  Description of Artificial Sequence: Synthetic oligonucleotide
  Target: SCNA; (-) strand; PAM type: NRG; PAM sequence: AGG
ggtatggacacaggtggctt

SEQ ID NO: 19292 - DNA, 20 bp, Artificial Sequence
  Description of Artificial Sequence: Synthetic oligonucleotide
  Target: SCNA; (-) strand; PAM type: NRG; PAM sequence: TAG
tggtatggacacaggtggct

SEQ ID NO: 19293 - DNA, 20 bp, Artificial Sequence
  Description of Artificial Sequence: Synthetic oligonucleotide
  Target: SCNA; (-) strand; PAM type: NRG; PAM sequence: TGG
aagactggtatggacacagg

SEQ ID NO: 19294 - DNA, 20 bp, Artificial Sequence
  Description of Artificial Sequence: Synthetic oligonucleotide
  Target: SCNA; (-) strand; PAM type: NRG; PAM sequence: AGG
gggaagactggtatggacac

SEQ ID NO: 19295 - DNA, 20 bp, Artificial Sequence
  Description of Artificial Sequence: Synthetic oligonucleotide
  Target: SCNA; (-) strand; PAM type: NRG; PAM sequence: CAG
tgggaagactggtatggaca

SEQ ID NO: 19296 - DNA, 20 bp, Artificial Sequence
  Description of Artificial Sequence: Synthetic oligonucleotide
  Target: SCNA; (-) strand; PAM type: NRG; PAM sequence: TGG
aggcagtgggaagactggta

SEQ ID NO: 19297 - DNA, 20 bp, Artificial Sequence
  Description of Artificial Sequence: Synthetic oligonucleotide
  Target: SCNA; (-) strand; PAM type: NRG; PAM sequence: TGG
ctggtaggcagtgggaagac

SEQ ID NO: 19298 - DNA, 20 bp, Artificial Sequence
  Description of Artificial Sequence: Synthetic oligonucleotide
  Target: SCNA; (-) strand; PAM type: NRG; PAM sequence: AAG
tggggctggtaggcagtggg

SEQ ID NO: 19299 - DNA, 20 bp, Artificial Sequence
  Description of Artificial Sequence: Synthetic oligonucleotide
  Target: SCNA; (-) strand; PAM type: NRG; PAM sequence: GGG
acatggggctggtaggcagt

SEQ ID NO: 19300 - DNA, 20 bp, Artificial Sequence
  Description of Artificial Sequence: Synthetic oligonucleotide
  Target: SCNA; (-) strand; PAM type: NRG; PAM sequence: TGG
gacatggggctggtaggcag

SEQ ID NO: 19301 - DNA, 20 bp, Artificial Sequence
  Description of Artificial Sequence: Synthetic oligonucleotide
  Target: SCNA; (-) strand; PAM type: NRG; PAM sequence: CAG
tctgacatggggctggtagg

SEQ ID NO: 19302 - DNA, 20 bp, Artificial Sequence
  Description of Artificial Sequence: Synthetic oligonucleotide
  Target: SCNA; (-) strand; PAM type: NRG; PAM sequence: AGG
tcatctgacatggggctggt

SEQ ID NO: 19303 - DNA, 20 bp, Artificial Sequence
  Description of Artificial Sequence: Synthetic oligonucleotide
  Target: SCNA; (-) strand; PAM type: NRG; PAM sequence: TAG
gtcatctgacatggggctgg

SEQ ID NO: 19304 - DNA, 20 bp, Artificial Sequence
  Description of Artificial Sequence: Synthetic oligonucleotide
  Target: SCNA; (-) strand; PAM type: NRG; PAM sequence: TGG
gaggtcatctgacatggggc

SEQ ID NO: 19305 - DNA, 20 bp, Artificial Sequence
  Description of Artificial Sequence: Synthetic oligonucleotide
  Target: SCNA; (-) strand; PAM type: NRG; PAM sequence: GGG
gatggaggtcatctgacatg

SEQ ID NO: 19306 - DNA, 20 bp, Artificial Sequence
  Description of Artificial Sequence: Synthetic oligonucleotide
  Target: SCNA; (-) strand; PAM type: NRG; PAM sequence: GGG
tgatggaggtcatctgacat

SEQ ID NO: 19307 - DNA, 20 bp, Artificial Sequence
  Description of Artificial Sequence: Synthetic oligonucleotide
  Target: SCNA; (-) strand; PAM type: NRG; PAM sequence: TGG
ctgatggaggtcatctgaca

SEQ ID NO: 19308 - DNA, 20 bp, Artificial Sequence
  Description of Artificial Sequence: Synthetic oligonucleotide
  Target: SCNA; (-) strand; PAM type: NRG; PAM sequence: AGG
aatggagatactactgatgg

SEQ ID NO: 19309 - DNA, 20 bp, Artificial Sequence
  Description of Artificial Sequence: Synthetic oligonucleotide
  Target: SCNA; (-) strand; PAM type: NRG; PAM sequence: GAG
aaatggagatactactgatg

SEQ ID NO: 19310 - DNA, 20 bp, Artificial Sequence
  Description of Artificial Sequence: Synthetic oligonucleotide
  Target: SCNA; (-) strand; PAM type: NRG; PAM sequence: TGG
ataaatggagatactactga

SEQ ID NO: 19311 - DNA, 20 bp, Artificial Sequence
  Description of Artificial Sequence: Synthetic oligonucleotide
  Target: SCNA; (-) strand; PAM type: NRG; PAM sequence: GAG
aaggcgagacaccataaatg

SEQ ID NO: 19312 - DNA, 20 bp, Artificial Sequence
  Description of Artificial Sequence: Synthetic oligonucleotide
  Target: SCNA; (-) strand; PAM type: NRG; PAM sequence: TGG
gaaaggcgagacaccataaa

SEQ ID NO: 19313 - DNA, 20 bp, Artificial Sequence
  Description of Artificial Sequence: Synthetic oligonucleotide
  Target: SCNA; (-) strand; PAM type: NRG; PAM sequence: GAG
ttactatgtgtcagaaaggc

SEQ ID NO: 19314 - DNA, 20 bp, Artificial Sequence
  Description of Artificial Sequence: Synthetic oligonucleotide
  Target: SCNA; (-) strand; PAM type: NRG; PAM sequence: AGG
cttgttactatgtgtcagaa

SEQ ID NO: 19315 - DNA, 20 bp, Artificial Sequence
  Description of Artificial Sequence: Synthetic oligonucleotide
  Target: SCNA; (-) strand; PAM type: NRG; PAM sequence: AAG
acttgttactatgtgtcaga

SEQ ID NO: 19316 - DNA, 20 bp, Artificial Sequence
  Description of Artificial Sequence: Synthetic oligonucleotide
  Target: SCNA; (-) strand; PAM type: NRG; PAM sequence: CAG
cctcacttgttactatgtgt

SEQ ID NO: 19317 - DNA, 20 bp, Artificial Sequence
  Description of Artificial Sequence: Synthetic oligonucleotide
  Target: SCNA; (-) strand; PAM type: NRG; PAM sequence: TAG
taatgccttctttctcttgt

SEQ ID NO: 19318 - DNA, 20 bp, Artificial Sequence
  Description of Artificial Sequence: Synthetic oligonucleotide
  Target: SCNA; (-) strand; PAM type: NRG; PAM sequence: AAG
tgttttctttctagccagat

SEQ ID NO: 19319 - DNA, 20 bp, Artificial Sequence
  Description of Artificial Sequence: Synthetic oligonucleotide
  Target: SCNA; (-) strand; PAM type: NRG; PAM sequence: CAG
ctgattgttttctttctagc

SEQ ID NO: 19320 - DNA, 20 bp, Artificial Sequence
  Description of Artificial Sequence: Synthetic oligonucleotide
  Target: SCNA; (-) strand; PAM type: NRG; PAM sequence: TAG
gttgctgattgttttctttc

SEQ ID NO: 19321 - DNA, 20 bp, Artificial Sequence
  Description of Artificial Sequence: Synthetic oligonucleotide
  Target: SCNA; (-) strand; PAM type: NRG; PAM sequence: AAG
tcttcccttaaataaaagac

SEQ ID NO: 19322 - DNA, 20 bp, Artificial Sequence
  Description of Artificial Sequence: Synthetic oligonucleotide
  Target: SCNA; (-) strand; PAM type: NRG; PAM sequence: AAG
agccttcttcccttaaataa

SEQ ID NO: 19323 - DNA, 20 bp, Artificial Sequence
  Description of Artificial Sequence: Synthetic oligonucleotide
  Target: SCNA; (-) strand; PAM type: NRG; PAM sequence: AAG
cttgaaaatatagtagagtg

SEQ ID NO: 19324 - DNA, 20 bp, Artificial Sequence
  Description of Artificial Sequence: Synthetic oligonucleotide
  Target: SCNA; (-) strand; PAM type: NRG; PAM sequence: GAG
aatatcttgaaaatatagta

SEQ ID NO: 19325 - DNA, 20 bp, Artificial Sequence
  Description of Artificial Sequence: Synthetic oligonucleotide
  Target: SCNA; (-) strand; PAM type: NRG; PAM sequence: TAG
ggaatatcttgaaaatatag

SEQ ID NO: 19326 - DNA, 20 bp, Artificial Sequence
  Description of Artificial Sequence: Synthetic oligonucleotide
  Target: SCNA; (-) strand; PAM type: NRG; PAM sequence: TAG
tttggaatatcttgaaaata

SEQ ID NO: 19327 - DNA, 20 bp, Artificial Sequence
  Description of Artificial Sequence: Synthetic oligonucleotide
  Target: SCNA; (-) strand; PAM type: NRG; PAM sequence: TGG
gaaagggtctgttgcagttt

SEQ ID NO: 19328 - DNA, 20 bp, Artificial Sequence
  Description of Artificial Sequence: Synthetic oligonucleotide
  Target: SCNA; (-) strand; PAM type: NRG; PAM sequence: CAG
ataattgaaagggtctgttg

SEQ ID NO: 19329 - DNA, 20 bp, Artificial Sequence
  Description of Artificial Sequence: Synthetic oligonucleotide
  Target: SCNA; (-) strand; PAM type: NRG; PAM sequence: GGG
tgaaagtaaaataattgaaa

SEQ ID NO: 19330 - DNA, 20 bp, Artificial Sequence
  Description of Artificial Sequence: Synthetic oligonucleotide
  Target: SCNA; (-) strand; PAM type: NRG; PAM sequence: AGG
atgaaagtaaaataattgaa

SEQ ID NO: 19331 - DNA, 20 bp, Artificial Sequence
  Description of Artificial Sequence: Synthetic oligonucleotide
  Target: SCNA; (-) strand; PAM type: NRG; PAM sequence: AAG
gatgaaagtaaaataattga

SEQ ID NO: 19332 - DNA, 20 bp, Artificial Sequence
  Description of Artificial Sequence: Synthetic oligonucleotide
  Target: SCNA; (-) strand; PAM type: NRG; PAM sequence: AAG
gcctttttggtaatagatga

SEQ ID NO: 19333 - DNA, 20 bp, Artificial Sequence
  Description of Artificial Sequence: Synthetic oligonucleotide
  Target: SCNA; (-) strand; PAM type: NRG; PAM sequence: TAG
aaagttggcctttttggtaa

SEQ ID NO: 19334 - DNA, 20 bp, Artificial Sequence
  Description of Artificial Sequence: Synthetic oligonucleotide
  Target: SCNA; (-) strand; PAM type: NRG; PAM sequence: TGG
aatctaaaagttggcctttt

SEQ ID NO: 19335 - DNA, 20 bp, Artificial Sequence
  Description of Artificial Sequence: Synthetic oligonucleotide
  Target: SCNA; (-) strand; PAM type: NRG; PAM sequence: TGG
cattgcctcaatctaaaagt

SEQ ID NO: 19336 - DNA, 20 bp, Artificial Sequence
  Description of Artificial Sequence: Synthetic oligonucleotide
  Target: SCNA; (-) strand; PAM type: NRG; PAM sequence: AAG
ttttcattgcctcaatctaa

SEQ ID NO: 19337 - DNA, 20 bp, Artificial Sequence
  Description of Artificial Sequence: Synthetic oligonucleotide
  Target: SCNA; (-) strand; PAM type: NRG; PAM sequence: GAG
gtcattccaaaaaagtttct

SEQ ID NO: 19338 - DNA, 20 bp, Artificial Sequence
  Description of Artificial Sequence: Synthetic oligonucleotide
  Target: SCNA; (-) strand; PAM type: NRG; PAM sequence: AAG
atctgaaggtcattccaaaa

SEQ ID NO: 19339 - DNA, 20 bp, Artificial Sequence
  Description of Artificial Sequence: Synthetic oligonucleotide
  Target: SCNA; (-) strand; PAM type: NRG; PAM sequence: AGG
agtggtcatctcaaatctga

SEQ ID NO: 19340 - DNA, 20 bp, Artificial Sequence
  Description of Artificial Sequence: Synthetic oligonucleotide
  Target: SCNA; (-) strand; PAM type: NRG; PAM sequence: AAG
cagtggtcatctcaaatctg

SEQ ID NO: 19341 - DNA, 20 bp, Artificial Sequence
  Description of Artificial Sequence: Synthetic oligonucleotide
  Target: SCNA; (-) strand; PAM type: NRG; PAM sequence: TGG
ctgaaatattgttgaaacag

SEQ ID NO: 19342 - DNA, 20 bp, Artificial Sequence
  Description of Artificial Sequence: Synthetic oligonucleotide
  Target: SCNA; (-) strand; PAM type: NRG; PAM sequence: CAG
taactgaaatattgttgaaa

SEQ ID NO: 19343 - DNA, 20 bp, Artificial Sequence
  Description of Artificial Sequence: Synthetic oligonucleotide
  Target: SCNA; (-) strand; PAM type: NRG; PAM sequence: AAG
tccctaaatgaatatagaga

SEQ ID NO: 19344 - DNA, 20 bp, Artificial Sequence
  Description of Artificial Sequence: Synthetic oligonucleotide
  Target: SCNA; (-) strand; PAM type: NRG; PAM sequence: GAG
aatttccctaaatgaatata

SEQ ID NO: 19345 - DNA, 20 bp, Artificial Sequence
  Description of Artificial Sequence: Synthetic oligonucleotide
  Target: SCNA; (-) strand; PAM type: NRG; PAM sequence: TAG
caaatttccctaaatgaata

SEQ ID NO: 19346 - DNA, 20 bp, Artificial Sequence
  Description of Artificial Sequence: Synthetic oligonucleotide
  Target: SCNA; (-) strand; PAM type: NRG; PAM sequence: CAG
aggaagctatttgtattttt

SEQ ID NO: 19347 - DNA, 20 bp, Artificial Sequence
  Description of Artificial Sequence: Synthetic oligonucleotide
  Target: SCNA; (-) strand; PAM type: NRG; PAM sequence: AAG
gtcctagctcaggagaaagg

SEQ ID NO: 19348 - DNA, 20 bp, Artificial Sequence
  Description of Artificial Sequence: Synthetic oligonucleotide
  Target: SCNA; (-) strand; PAM type: NRG; PAM sequence: AGG
acagtcctagctcaggagaa

SEQ ID NO: 19349 - DNA, 20 bp, Artificial Sequence
  Description of Artificial Sequence: Synthetic oligonucleotide
  Target: SCNA; (-) strand; PAM type: NRG; PAM sequence: AAG
tacagtcctagctcaggaga

SEQ ID NO: 19350 - DNA, 20 bp, Artificial Sequence
  Description of Artificial Sequence: Synthetic oligonucleotide
  Target: SCNA; (-) strand; PAM type: NRG; PAM sequence: GAG
taaatacagtcctagctcag

SEQ ID NO: 19351 - DNA, 20 bp, Artificial Sequence
  Description of Artificial Sequence: Synthetic oligonucleotide
  Target: SCNA; (-) strand; PAM type: NRG; PAM sequence: AGG
tctaaatacagtcctagctc

SEQ ID NO: 19352 - DNA, 20 bp, Artificial Sequence
  Description of Artificial Sequence: Synthetic oligonucleotide
  Target: SCNA; (-) strand; PAM type: NRG; PAM sequence: CAG
ttctaaatacagtcctagct

SEQ ID NO: 19353 - DNA, 20 bp, Artificial Sequence
  Description of Artificial Sequence: Synthetic oligonucleotide
  Target: SCNA; (-) strand; PAM type: NRG; PAM sequence: TAG
ttcccttctaaatacagtcc

SEQ ID NO: 19354 - DNA, 20 bp, Artificial Sequence
  Description of Artificial Sequence: Synthetic oligonucleotide
  Target: SCNA; (-) strand; PAM type: NRG; PAM sequence: CAG
aatttattcccttctaaata

SEQ ID NO: 19355 - DNA, 20 bp, Artificial Sequence
  Description of Artificial Sequence: Synthetic oligonucleotide
  Target: SCNA; (-) strand; PAM type: NRG; PAM sequence: AAG
actgtgtcgtagcacaaaaa

SEQ ID NO: 19356 - DNA, 20 bp, Artificial Sequence
  Description of Artificial Sequence: Synthetic oligonucleotide
  Target: SCNA; (-) strand; PAM type: NRG; PAM sequence: TAG
tctacattgctactgtgtcg

SEQ ID NO: 19357 - DNA, 20 bp, Artificial Sequence
  Description of Artificial Sequence: Synthetic oligonucleotide
  Target: SCNA; (-) strand; PAM type: NRG; PAM sequence: AAG
aattttaaaaatacatgtaa

SEQ ID NO: 19358 - DNA, 20 bp, Artificial Sequence
  Description of Artificial Sequence: Synthetic oligonucleotide
  Target: SCNA; (-) strand; PAM type: NRG; PAM sequence: TGG
ttaatacaaataattctcta

SEQ ID NO: 19359 - DNA, 20 bp, Artificial Sequence
  Description of Artificial Sequence: Synthetic oligonucleotide
  Target: SCNA; (-) strand; PAM type: NRG; PAM sequence: TGG
ctatttagcttttgcagcct

SEQ ID NO: 19360 - DNA, 20 bp, Artificial Sequence
  Description of Artificial Sequence: Synthetic oligonucleotide
  Target: SCNA; (-) strand; PAM type: NRG; PAM sequence: CAG
gctttactatttagcttttg

SEQ ID NO: 19361 - DNA, 20 bp, Artificial Sequence
  Description of Artificial Sequence: Synthetic oligonucleotide
  Target: SCNA; (-) strand; PAM type: NRG; PAM sequence: TAG
ttattatatgctttactatt

SEQ ID NO: 19362 - DNA, 20 bp, Artificial Sequence
  Description of Artificial Sequence: Synthetic oligonucleotide
  Target: SCNA; (-) strand; PAM type: NRG; PAM sequence: TGG
tagactcatgttttgctagc

SEQ ID NO: 19363 - DNA, 20 bp, Artificial Sequence
  Description of Artificial Sequence: Synthetic oligonucleotide
  Target: SCNA; (-) strand; PAM type: NRG; PAM sequence: TAG
catctagactcatgttttgc

SEQ ID NO: 19364 - DNA, 20 bp, Artificial Sequence
  Description of Artificial Sequence: Synthetic oligonucleotide
  Target: SCNA; (-) strand; PAM type: NRG; PAM sequence: TAG
ttgaacatgatatctacatc

SEQ ID NO: 19365 - DNA, 20 bp, Artificial Sequence
  Description of Artificial Sequence: Synthetic oligonucleotide
  Target: SCNA; (-) strand; PAM type: NRG; PAM sequence: TGG
aacttggttcaattttttgc

SEQ ID NO: 19366 - DNA, 20 bp, Artificial Sequence
  Description of Artificial Sequence: Synthetic oligonucleotide
  Target: SCNA; (-) strand; PAM type: NRG; PAM sequence: TGG
ttttctgaaggggaaaaact

SEQ ID NO: 19367 - DNA, 20 bp, Artificial Sequence
  Description of Artificial Sequence: Synthetic oligonucleotide
  Target: SCNA; (-) strand; PAM type: NRG; PAM sequence: GGG
ataaagctagttttctgaag

SEQ ID NO: 19368 - DNA, 20 bp, Artificial Sequence
  Description of Artificial Sequence: Synthetic oligonucleotide
  Target: SCNA; (-) strand; PAM type: NRG; PAM sequence: GGG
aataaagctagttttctgaa

SEQ ID NO: 19369 - DNA, 20 bp, Artificial Sequence
  Description of Artificial Sequence: Synthetic oligonucleotide
  Target: SCNA; (-) strand; PAM type: NRG; PAM sequence: AGG
aaataaagctagttttctga

SEQ ID NO: 19370 - DNA, 20 bp, Artificial Sequence
  Description of Artificial Sequence: Synthetic oligonucleotide
  Target: SCNA; (-) strand; PAM type: NRG; PAM sequence: AAG
taaataaagctagttttctg

SEQ ID NO: 19371 - DNA, 20 bp, Artificial Sequence
  Description of Artificial Sequence: Synthetic oligonucleotide
  Target: SCNA; (-) strand; PAM type: NRG; PAM sequence: TAG
gaaatttttttaaataaagc

SEQ ID NO: 19372 - DNA, 20 bp, Artificial Sequence
  Description of Artificial Sequence: Synthetic oligonucleotide
  Target: SCNA; (-) strand; PAM type: NRG; PAM sequence: AAG
ttaggaaatttttttaaata

SEQ ID NO: 19373 - DNA, 20 bp, Artificial Sequence
  Description of Artificial Sequence: Synthetic oligonucleotide
  Target: SCNA; (-) strand; PAM type: NRG; PAM sequence: AGG
tgtgaatcaatttaaatatt

SEQ ID NO: 19374 - DNA, 20 bp, Artificial Sequence
  Description of Artificial Sequence: Synthetic oligonucleotide
  Target: SCNA; (-) strand; PAM type: NRG; PAM sequence: TAG
gtgtgaatcaatttaaatat

SEQ ID NO: 19375 - DNA, 20 bp, Artificial Sequence
  Description of Artificial Sequence: Synthetic oligonucleotide
  Target: SCNA; (-) strand; PAM type: NRG; PAM sequence: TAG
gaaacaaggaaacccttgta

SEQ ID NO: 19376 - DNA, 20 bp, Artificial Sequence
  Description of Artificial Sequence: Synthetic oligonucleotide
  Target: SCNA; (-) strand; PAM type: NRG; PAM sequence: AGG
cttatttctttgatgaaaca

SEQ ID NO: 19377 - DNA, 20 bp, Artificial Sequence
  Description of Artificial Sequence: Synthetic oligonucleotide
  Target: SCNA; (-) strand; PAM type: NRG; PAM sequence: AAG
acttatttctttgatgaaac

SEQ ID NO: 19378 - DNA, 20 bp, Artificial Sequence
  Description of Artificial Sequence: Synthetic oligonucleotide
  Target: SCNA; (-) strand; PAM type: NRG; PAM sequence: GAG
cctacttattcctttgttcc

SEQ ID NO: 19379 - DNA, 20 bp, Artificial Sequence
  Description of Artificial Sequence: Synthetic oligonucleotide
  Target: SCNA; (-) strand; PAM type: NRG; PAM sequence: TAG
gaaaagaattcatttgtttt

SEQ ID NO: 19380 - DNA, 20 bp, Artificial Sequence
  Description of Artificial Sequence: Synthetic oligonucleotide
  Target: SCNA; (-) strand; PAM type: NRG; PAM sequence: AAG
caaacgagagggatggggaa

SEQ ID NO: 19381 - DNA, 20 bp, Artificial Sequence
  Description of Artificial Sequence: Synthetic oligonucleotide
  Target: SCNA; (-) strand; PAM type: NRG; PAM sequence: GGG
ggagacaaacgagagggatg

SEQ ID NO: 19382 - DNA, 20 bp, Artificial Sequence
  Description of Artificial Sequence: Synthetic oligonucleotide
  Target: SCNA; (-) strand; PAM type: NRG; PAM sequence: GGG
tggagacaaacgagagggat

SEQ ID NO: 19383 - DNA, 20 bp, Artificial Sequence
  Description of Artificial Sequence: Synthetic oligonucleotide
  Target: SCNA; (-) strand; PAM type: NRG; PAM sequence: TGG
ttggagacaaacgagaggga

SEQ ID NO: 19384 - DNA, 20 bp, Artificial Sequence
  Description of Artificial Sequence: Synthetic oligonucleotide
  Target: SCNA; (-) strand; PAM type: NRG; PAM sequence: GGG
ctgattggagacaaacgaga

SEQ ID NO: 19385 - DNA, 20 bp, Artificial Sequence
  Description of Artificial Sequence: Synthetic oligonucleotide
  Target: SCNA; (-) strand; PAM type: NRG; PAM sequence: AGG
actgattggagacaaacgag

SEQ ID NO: 19386 - DNA, 20 bp, Artificial Sequence
  Description of Artificial Sequence: Synthetic oligonucleotide
  Target: SCNA; (-) strand; PAM type: NRG; PAM sequence: GAG
aactgattggagacaaacga

SEQ ID NO: 19387 - DNA, 20 bp, Artificial Sequence
  Description of Artificial Sequence: Synthetic oligonucleotide
  Target: SCNA; (-) strand; PAM type: NRG; PAM sequence: GAG
ttaactgattggagacaaac

SEQ ID NO: 19388 - DNA, 20 bp, Artificial Sequence
  Description of Artificial Sequence: Synthetic oligonucleotide
  Target: SCNA; (-) strand; PAM type: NRG; PAM sequence: GAG
taaaaggatttaactgattg

SEQ ID NO: 19389 - DNA, 20 bp, Artificial Sequence
  Description of Artificial Sequence: Synthetic oligonucleotide
  Target: SCNA; (-) strand; PAM type: NRG; PAM sequence: TGG
attaaaaggatttaactgat

SEQ ID NO: 19390 - DNA, 20 bp, Artificial Sequence
  Description of Artificial Sequence: Synthetic oligonucleotide
  Target: SCNA; (-) strand; PAM type: NRG; PAM sequence: AGG
acttatgatatatcattaaa

SEQ ID NO: 19391 - DNA, 20 bp, Artificial Sequence
  Description of Artificial Sequence: Synthetic oligonucleotide
  Target: SCNA; (-) strand; PAM type: NRG; PAM sequence: AAG
tacttatgatatatcattaa

SEQ ID NO: 19392 - DNA, 20 bp, Artificial Sequence
  Description of Artificial Sequence: Synthetic oligonucleotide
  Target: SCNA; (-) strand; PAM type: NRG; PAM sequence: AAG
tcaatgtgaactaaagcatg

SEQ ID NO: 19393 - DNA, 20 bp, Artificial Sequence
  Description of Artificial Sequence: Synthetic oligonucleotide
  Target: SCNA; (-) strand; PAM type: NRG; PAM sequence: AAG
aatatcgtcaatgtgaacta

SEQ ID NO: 19394 - DNA, 20 bp, Artificial Sequence
  Description of Artificial Sequence: Synthetic oligonucleotide
  Target: SCNA; (-) strand; PAM type: NRG; PAM sequence: AAG
attattaatgatgtagatat

SEQ ID NO: 19395 - DNA, 20 bp, Artificial Sequence
  Description of Artificial Sequence: Synthetic oligonucleotide
  Target: SCNA; (-) strand; PAM type: NRG; PAM sequence: TAG
tattttgattattaatgatg

SEQ ID NO: 19396 - DNA, 20 bp, Artificial Sequence
  Description of Artificial Sequence: Synthetic oligonucleotide
  Target: SCNA; (-) strand; PAM type: NRG; PAM sequence: AAG
acagcaaaactaaagacaga

SEQ ID NO: 19397 - DNA, 20 bp, Artificial Sequence
  Description of Artificial Sequence: Synthetic oligonucleotide
  Target: SCNA; (-) strand; PAM type: NRG; PAM sequence: CAG
agagacagcaaaactaaaga

SEQ ID NO: 19398 - DNA, 20 bp, Artificial Sequence
  Description of Artificial Sequence: Synthetic oligonucleotide
  Target: SCNA; (-) strand; PAM type: NRG; PAM sequence: AAG
acttagagacagcaaaacta

SEQ ID NO: 19399 - DNA, 20 bp, Artificial Sequence
  Description of Artificial Sequence: Synthetic oligonucleotide
  Target: SCNA; (-) strand; PAM type: NRG; PAM sequence: CAG
attgagttctgacttagaga

SEQ ID NO: 19400 - DNA, 20 bp, Artificial Sequence
  Description of Artificial Sequence: Synthetic oligonucleotide
  Target: SCNA; (-) strand; PAM type: NRG; PAM sequence: GAG
cagtattgagttctgactta

SEQ ID NO: 19401 - DNA, 20 bp, Artificial Sequence
  Description of Artificial Sequence: Synthetic oligonucleotide
  Target: SCNA; (-) strand; PAM type: NRG; PAM sequence: TAG
aacagtattgagttctgact

SEQ ID NO: 19402 - DNA, 20 bp, Artificial Sequence
  Description of Artificial Sequence: Synthetic oligonucleotide
  Target: SCNA; (-) strand; PAM type: NRG; PAM sequence: GAG
tattttagagcaacagtatt

SEQ ID NO: 19403 - DNA, 20 bp, Artificial Sequence
  Description of Artificial Sequence: Synthetic oligonucleotide
  Target: SCNA; (-) strand; PAM type: NRG; PAM sequence: CAG
acatttgtattttagagcaa

SEQ ID NO: 19404 - DNA, 20 bp, Artificial Sequence
  Description of Artificial Sequence: Synthetic oligonucleotide
  Target: SCNA; (-) strand; PAM type: NRG; PAM sequence: GAG
atcttaacatttgtatttta

SEQ ID NO: 19405 - DNA, 20 bp, Artificial Sequence
  Description of Artificial Sequence: Synthetic oligonucleotide
  Target: SCNA; (-) strand; PAM type: NRG; PAM sequence: TAG
tcatcttaacatttgtattt

SEQ ID NO: 19406 - DNA, 20 bp, Artificial Sequence
  Description of Artificial Sequence: Synthetic oligonucleotide
  Target: SCNA; (-) strand; PAM type: NRG; PAM sequence: AAG
caggtgatgagaagctcctg

SEQ ID NO: 19407 - DNA, 20 bp, Artificial Sequence
  Description of Artificial Sequence: Synthetic oligonucleotide
  Target: SCNA; (-) strand; PAM type: NRG; PAM sequence: AAG
attatagtacaggtgatgag

SEQ ID NO: 19408 - DNA, 20 bp, Artificial Sequence
  Description of Artificial Sequence: Synthetic oligonucleotide
  Target: SCNA; (-) strand; PAM type: NRG; PAM sequence: GAG
agcattatagtacaggtgat

SEQ ID NO: 19409 - DNA, 20 bp, Artificial Sequence
  Description of Artificial Sequence: Synthetic oligonucleotide
  Target: SCNA; (-) strand; PAM type: NRG; PAM sequence: AGG
tgctagtagcattatagtac

SEQ ID NO: 19410 - DNA, 20 bp, Artificial Sequence
  Description of Artificial Sequence: Synthetic oligonucleotide
  Target: SCNA; (-) strand; PAM type: NRG; PAM sequence: CAG
atgctagtagcattatagta

SEQ ID NO: 19411 - DNA, 20 bp, Artificial Sequence
  Description of Artificial Sequence: Synthetic oligonucleotide
  Target: SCNA; (-) strand; PAM type: NRG; PAM sequence: TAG
ctctcatgctagtagcatta

SEQ ID NO: 19412 - DNA, 20 bp, Artificial Sequence
  Description of Artificial Sequence: Synthetic oligonucleotide
  Target: SCNA; (-) strand; PAM type: NRG; PAM sequence: TAG
ggtgggtgctctcatgctag

SEQ ID NO: 19413 - DNA, 20 bp, Artificial Sequence
  Description of Artificial Sequence: Synthetic oligonucleotide
  Target: SCNA; (-) strand; PAM type: NRG; PAM sequence: TAG
ctaggtgggtgctctcatgc

SEQ ID NO: 19414 - DNA, 20 bp, Artificial Sequence
  Description of Artificial Sequence: Synthetic oligonucleotide
  Target: SCNA; (-) strand; PAM type: NRG; PAM sequence: GGG
ttgagataagaaggctaggt

SEQ ID NO: 19415 - DNA, 20 bp, Artificial Sequence
  Description of Artificial Sequence: Synthetic oligonucleotide
  Target: SCNA; (-) strand; PAM type: NRG; PAM sequence: TGG
cttgagataagaaggctagg

SEQ ID NO: 19416 - DNA, 20 bp, Artificial Sequence
  Description of Artificial Sequence: Synthetic oligonucleotide
  Target: SCNA; (-) strand; PAM type: NRG; PAM sequence: AGG
ggacttgagataagaaggct

SEQ ID NO: 19417 - DNA, 20 bp, Artificial Sequence
  Description of Artificial Sequence: Synthetic oligonucleotide
  Target: SCNA; (-) strand; PAM type: NRG; PAM sequence: TAG
aggacttgagataagaaggc

SEQ ID NO: 19418 - DNA, 20 bp, Artificial Sequence
  Description of Artificial Sequence: Synthetic oligonucleotide
  Target: SCNA; (-) strand; PAM type: NRG; PAM sequence: AGG
gggcaggacttgagataaga

SEQ ID NO: 19419 - DNA, 20 bp, Artificial Sequence
  Description of Artificial Sequence: Synthetic oligonucleotide
  Target: SCNA; (-) strand; PAM type: NRG; PAM sequence: AAG
agggcaggacttgagataag

SEQ ID NO: 19420 - DNA, 20 bp, Artificial Sequence
  Description of Artificial Sequence: Synthetic oligonucleotide
  Target: SCNA; (-) strand; PAM type: NRG; PAM sequence: AAG
ggcagggcaggacttgagat

SEQ ID NO: 19421 - DNA, 20 bp, Artificial Sequence
  Description of Artificial Sequence: Synthetic oligonucleotide
  Target: SCNA; (-) strand; PAM type: NRG; PAM sequence: GAG
agagtggcagggcaggactt

SEQ ID NO: 19422 - DNA, 20 bp, Artificial Sequence
  Description of Artificial Sequence: Synthetic oligonucleotide
  Target: SCNA; (-) strand; PAM type: NRG; PAM sequence: AGG
tatgtacagagtggcagggc

SEQ ID NO: 19423 - DNA, 20 bp, Artificial Sequence
  Description of Artificial Sequence: Synthetic oligonucleotide
  Target: SCNA; (-) strand; PAM type: NRG; PAM sequence: CAG
atatgtacagagtggcaggg

SEQ ID NO: 19424 - DNA, 20 bp, Artificial Sequence
  Description of Artificial Sequence: Synthetic oligonucleotide
  Target: SCNA; (-) strand; PAM type: NRG; PAM sequence: GGG
gatatatgtacagagtggca

SEQ ID NO: 19425 - DNA, 20 bp, Artificial Sequence
  Description of Artificial Sequence: Synthetic oligonucleotide
  Target: SCNA; (-) strand; PAM type: NRG; PAM sequence: AGG
ggatatatgtacagagtggc

SEQ ID NO: 19426 - DNA, 20 bp, Artificial Sequence
  Description of Artificial Sequence: Synthetic oligonucleotide
  Target: SCNA; (-) strand; PAM type: NRG; PAM sequence: CAG
gggatatatgtacagagtgg

SEQ ID NO: 19427 - DNA, 20 bp, Artificial Sequence
  Description of Artificial Sequence: Synthetic oligonucleotide
  Target: SCNA; (-) strand; PAM type: NRG; PAM sequence: TGG
gaggggatatatgtacagag

SEQ ID NO: 19428 - DNA, 20 bp, Artificial Sequence
  Description of Artificial Sequence: Synthetic oligonucleotide
  Target: SCNA; (-) strand; PAM type: NRG; PAM sequence: GAG
aaagaggggatatatgtaca

SEQ ID NO: 19429 - DNA, 20 bp, Artificial Sequence
  Description of Artificial Sequence: Synthetic oligonucleotide
  Target: SCNA; (-) strand; PAM type: NRG; PAM sequence: CAG
ttaaagaggggatatatgta

SEQ ID NO: 19430 - DNA, 20 bp, Artificial Sequence
  Description of Artificial Sequence: Synthetic oligonucleotide
  Target: SCNA; (-) strand; PAM type: NRG; PAM sequence: GGG
tctaagggtgaattaaagag

SEQ ID NO: 19431 - DNA, 20 bp, Artificial Sequence
  Description of Artificial Sequence: Synthetic oligonucleotide
  Target: SCNA; (-) strand; PAM type: NRG; PAM sequence: GGG
gtctaagggtgaattaaaga

SEQ ID NO: 19432 - DNA, 20 bp, Artificial Sequence
  Description of Artificial Sequence: Synthetic oligonucleotide
  Target: SCNA; (-) strand; PAM type: NRG; PAM sequence: AGG
tgtctaagggtgaattaaag

SEQ ID NO: 19433 - DNA, 20 bp, Artificial Sequence
  Description of Artificial Sequence: Synthetic oligonucleotide
  Target: SCNA; (-) strand; PAM type: NRG; PAM sequence: GAG
ctgtctaagggtgaattaaa

SEQ ID NO: 19434 - DNA, 20 bp, Artificial Sequence
  Description of Artificial Sequence: Synthetic oligonucleotide
  Target: SCNA; (-) strand; PAM type: NRG; PAM sequence: AAG
ctctgtctaagggtgaatta

SEQ ID NO: 19435 - DNA, 20 bp, Artificial Sequence
  Description of Artificial Sequence: Synthetic oligonucleotide
  Target: SCNA; (-) strand; PAM type: NRG; PAM sequence: GGG
ccctctctgtctctgtctaa

SEQ ID NO: 19436 - DNA, 20 bp, Artificial Sequence
  Description of Artificial Sequence: Synthetic oligonucleotide
  Target: SCNA; (-) strand; PAM type: NRG; PAM sequence: AGG
gccctctctgtctctgtcta

SEQ ID NO: 19437 - DNA, 20 bp, Artificial Sequence
  Description of Artificial Sequence: Synthetic oligonucleotide
  Target: SCNA; (-) strand; PAM type: NRG; PAM sequence: AAG
ggccctctctgtctctgtct

SEQ ID NO: 19438 - DNA, 20 bp, Artificial Sequence
  Description of Artificial Sequence: Synthetic oligonucleotide
  Target: SCNA; (-) strand; PAM type: NRG; PAM sequence: TGG
tcaggaaaagacaagatgcg

SEQ ID NO: 19439 - DNA, 20 bp, Artificial Sequence
  Description of Artificial Sequence: Synthetic oligonucleotide
  Target: SCNA; (-) strand; PAM type: NRG; PAM sequence: AAG
atattaattcaggaaaagac

SEQ ID NO: 19440 - DNA, 20 bp, Artificial Sequence
  Description of Artificial Sequence: Synthetic oligonucleotide
  Target: SCNA; (-) strand; PAM type: NRG; PAM sequence: AAG
accacatattaattcaggaa

SEQ ID NO: 19441 - DNA, 20 bp, Artificial Sequence
  Description of Artificial Sequence: Synthetic oligonucleotide
  Target: SCNA; (-) strand; PAM type: NRG; PAM sequence: AGG
caaaaaccacatattaattc

SEQ ID NO: 19442 - DNA, 20 bp, Artificial Sequence
  Description of Artificial Sequence: Synthetic oligonucleotide
  Target: SCNA; (-) strand; PAM type: NRG; PAM sequence: CAG
gcaaaaaccacatattaatt

SEQ ID NO: 19443 - DNA, 20 bp, Artificial Sequence
  Description of Artificial Sequence: Synthetic oligonucleotide
  Target: SCNA; (-) strand; PAM type: NRG; PAM sequence: GGG
ttcacatgtgctaaagcatg

SEQ ID NO: 19444 - DNA, 20 bp, Artificial Sequence
  Description of Artificial Sequence: Synthetic oligonucleotide
  Target: SCNA; (-) strand; PAM type: NRG; PAM sequence: GGG
attcacatgtgctaaagcat

SEQ ID NO: 19445 - DNA, 20 bp, Artificial Sequence
  Description of Artificial Sequence: Synthetic oligonucleotide
  Target: SCNA; (-) strand; PAM type: NRG; PAM sequence: TGG
gattcacatgtgctaaagca

SEQ ID NO: 19446 - DNA, 20 bp, Artificial Sequence
  Description of Artificial Sequence: Synthetic oligonucleotide
  Target: SCNA; (-) strand; PAM type: NRG; PAM sequence: AAG
aaatggattcacatgtgcta

SEQ ID NO: 19447 - DNA, 20 bp, Artificial Sequence
  Description of Artificial Sequence: Synthetic oligonucleotide
  Target: SCNA; (-) strand; PAM type: NRG; PAM sequence: TGG
gcaaaggcatgctggacaaa

SEQ ID NO: 19448 - DNA, 20 bp, Artificial Sequence
  Description of Artificial Sequence: Synthetic oligonucleotide
  Target: SCNA; (-) strand; PAM type: NRG; PAM sequence: TGG
acaggtgagcaaaggcatgc

SEQ ID NO: 19449 - DNA, 20 bp, Artificial Sequence
  Description of Artificial Sequence: Synthetic oligonucleotide
  Target: SCNA; (-) strand; PAM type: NRG; PAM sequence: AGG
tcttgtacacaggtgagcaa

SEQ ID NO: 19450 - DNA, 20 bp, Artificial Sequence
  Description of Artificial Sequence: Synthetic oligonucleotide
  Target: SCNA; (-) strand; PAM type: NRG; PAM sequence: AAG
ttcttgtacacaggtgagca

SEQ ID NO: 19451 - DNA, 20 bp, Artificial Sequence
  Description of Artificial Sequence: Synthetic oligonucleotide
  Target: SCNA; (-) strand; PAM type: NRG; PAM sequence: GAG
agctcttcttgtacacaggt

SEQ ID NO: 19452 - DNA, 20 bp, Artificial Sequence
  Description of Artificial Sequence: Synthetic oligonucleotide
  Target: SCNA; (-) strand; PAM type: NRG; PAM sequence: AGG
atgtagctcttcttgtacac

SEQ ID NO: 19453 - DNA, 20 bp, Artificial Sequence
  Description of Artificial Sequence: Synthetic oligonucleotide
  Target: SCNA; (-) strand; PAM type: NRG; PAM sequence: CAG
tatgtagctcttcttgtaca

SEQ ID NO: 19454 - DNA, 20 bp, Artificial Sequence
  Description of Artificial Sequence: Synthetic oligonucleotide
  Target: SCNA; (-) strand; PAM type: NRG; PAM sequence: TAG
gttccttttgatctgttatg

SEQ ID NO: 19455 - DNA, 20 bp, Artificial Sequence
  Description of Artificial Sequence: Synthetic oligonucleotide
  Target: SCNA; (-) strand; PAM type: NRG; PAM sequence: CAG
ggacatgagactctaagaac

SEQ ID NO: 19456 - DNA, 20 bp, Artificial Sequence
  Description of Artificial Sequence: Synthetic oligonucleotide
  Target: SCNA; (-) strand; PAM type: NRG; PAM sequence: AAG
aggaatggacatgagactct

SEQ ID NO: 19457 - DNA, 20 bp, Artificial Sequence
  Description of Artificial Sequence: Synthetic oligonucleotide
  Target: SCNA; (-) strand; PAM type: NRG; PAM sequence: GAG
agaattggaggaatggacat

SEQ ID NO: 19458 - DNA, 20 bp, Artificial Sequence
  Description of Artificial Sequence: Synthetic oligonucleotide
  Target: SCNA; (-) strand; PAM type: NRG; PAM sequence: TGG
agtggcgagaattggaggaa

SEQ ID NO: 19459 - DNA, 20 bp, Artificial Sequence
  Description of Artificial Sequence: Synthetic oligonucleotide
  Target: SCNA; (-) strand; PAM type: NRG; PAM sequence: AGG
ccagaagtggcgagaattgg

SEQ ID NO: 19460 - DNA, 20 bp, Artificial Sequence
  Description of Artificial Sequence: Synthetic oligonucleotide
  Target: SCNA; (-) strand; PAM type: NRG; PAM sequence: GAG
tccagaagtggcgagaattg

SEQ ID NO: 19461 - DNA, 20 bp, Artificial Sequence
  Description of Artificial Sequence: Synthetic oligonucleotide
  Target: SCNA; (-) strand; PAM type: NRG; PAM sequence: TGG
catccagaagtggcgagaat

SEQ ID NO: 19462 - DNA, 20 bp, Artificial Sequence
  Description of Artificial Sequence: Synthetic oligonucleotide
  Target: SCNA; (-) strand; PAM type: NRG; PAM sequence: GAG
acagtgcatccagaagtggc

SEQ ID NO: 19463 - DNA, 20 bp, Artificial Sequence
  Description of Artificial Sequence: Synthetic oligonucleotide
  Target: SCNA; (-) strand; PAM type: NRG; PAM sequence: TGG
agaaacagtgcatccagaag

SEQ ID NO: 19464 - DNA, 20 bp, Artificial Sequence
  Description of Artificial Sequence: Synthetic oligonucleotide
  Target: SCNA; (-) strand; PAM type: NRG; PAM sequence: AAG
ataagaaacagtgcatccag

SEQ ID NO: 19465 - DNA, 20 bp, Artificial Sequence
  Description of Artificial Sequence: Synthetic oligonucleotide
  Target: SCNA; (-) strand; PAM type: NRG; PAM sequence: CAG
ctcataagaaacagtgcatc

SEQ ID NO: 19466 - DNA, 20 bp, Artificial Sequence
  Description of Artificial Sequence: Synthetic oligonucleotide
  Target: SCNA; (-) strand; PAM type: NRG; PAM sequence: CAG
ttaaggaagctcataagaaa

SEQ ID NO: 19467 - DNA, 20 bp, Artificial Sequence
  Description of Artificial Sequence: Synthetic oligonucleotide
  Target: SCNA; (-) strand; PAM type: NRG; PAM sequence: AAG
gcatatttaaggaagctcat

SEQ ID NO: 19468 - DNA, 20 bp, Artificial Sequence
  Description of Artificial Sequence: Synthetic oligonucleotide
  Target: SCNA; (-) strand; PAM type: NRG; PAM sequence: AAG
aaggcacagcatatttaagg

SEQ ID NO: 19469 - DNA, 20 bp, Artificial Sequence
  Description of Artificial Sequence: Synthetic oligonucleotide
  Target: SCNA; (-) strand; PAM type: NRG; PAM sequence: AGG
aaaaaggcacagcatattta

SEQ ID NO: 19470 - DNA, 20 bp, Artificial Sequence
  Description of Artificial Sequence: Synthetic oligonucleotide
  Target: SCNA; (-) strand; PAM type: NRG; PAM sequence: AAG
caaaaaggcacagcatattt

SEQ ID NO: 19471 - DNA, 20 bp, Artificial Sequence
  Description of Artificial Sequence: Synthetic oligonucleotide
  Target: SCNA; (-) strand; PAM type: NRG; PAM sequence: CAG
acgcagaaagcaaaaaggca

SEQ ID NO: 19472 - DNA, 20 bp, Artificial Sequence
  Description of Artificial Sequence: Synthetic oligonucleotide
  Target: SCNA; (-) strand; PAM type: NRG; PAM sequence: AGG
cccatacgcagaaagcaaaa

SEQ ID NO: 19473 - DNA, 20 bp, Artificial Sequence
  Description of Artificial Sequence: Synthetic oligonucleotide
  Target: SCNA; (-) strand; PAM type: NRG; PAM sequence: AAG
gcccatacgcagaaagcaaa

SEQ ID NO: 19474 - DNA, 20 bp, Artificial Sequence
  Description of Artificial Sequence: Synthetic oligonucleotide
  Target: SCNA; (-) strand; PAM type: NRG; PAM sequence: AAG
tggagatgcccatacgcaga

SEQ ID NO: 19475 - DNA, 20 bp, Artificial Sequence
  Description of Artificial Sequence: Synthetic oligonucleotide
  Target: SCNA; (-) strand; PAM type: NRG; PAM sequence: CAG
gcactggagatgcccatacg

SEQ ID NO: 19476 - DNA, 20 bp, Artificial Sequence
  Description of Artificial Sequence: Synthetic oligonucleotide
  Target: SCNA; (-) strand; PAM type: NRG; PAM sequence: GAG
ctcctcttactttggcactg

SEQ ID NO: 19477 - DNA, 20 bp, Artificial Sequence
  Description of Artificial Sequence: Synthetic oligonucleotide
  Target: SCNA; (-) strand; PAM type: NRG; PAM sequence: TGG
atctcctcttactttggcac

SEQ ID NO: 19478 - DNA, 20 bp, Artificial Sequence
  Description of Artificial Sequence: Synthetic oligonucleotide
  Target: SCNA; (-) strand; PAM type: NRG; PAM sequence: TGG
gcagaaatctcctcttactt

SEQ ID NO: 19479 - DNA, 20 bp, Artificial Sequence
  Description of Artificial Sequence: Synthetic oligonucleotide
  Target: SCNA; (-) strand; PAM type: NRG; PAM sequence: CAG
attaacttcctgaaattctg

SEQ ID NO: 19480 - DNA, 20 bp, Artificial Sequence
  Description of Artificial Sequence: Synthetic oligonucleotide
  Target: SCNA; (-) strand; PAM type: NRG; PAM sequence: AGG
attgtctgagagctgccact

SEQ ID NO: 19481 - DNA, 20 bp, Artificial Sequence
  Description of Artificial Sequence: Synthetic oligonucleotide
  Target: SCNA; (-) strand; PAM type: NRG; PAM sequence: TAG
cattgtctgagagctgccac

SEQ ID NO: 19482 - DNA, 20 bp, Artificial Sequence
  Description of Artificial Sequence: Synthetic oligonucleotide
  Target: SCNA; (-) strand; PAM type: NRG; PAM sequence: GAG
tcctgtctcccattgtctga

SEQ ID NO: 19483 - DNA, 20 bp, Artificial Sequence
  Description of Artificial Sequence: Synthetic oligonucleotide
  Target: SCNA; (-) strand; PAM type: NRG; PAM sequence: GAG
gctcctgtctcccattgtct

SEQ ID NO: 19484 - DNA, 20 bp, Artificial Sequence
  Description of Artificial Sequence: Synthetic oligonucleotide
  Target: SCNA; (-) strand; PAM type: NRG; PAM sequence: TAG
caaaacgaagaaacagccat

SEQ ID NO: 19485 - DNA, 20 bp, Artificial Sequence
  Description of Artificial Sequence: Synthetic oligonucleotide
  Target: SCNA; (-) strand; PAM type: NRG; PAM sequence: CAG
tgaaggacaaaacgaagaaa

SEQ ID NO: 19486 - DNA, 20 bp, Artificial Sequence
  Description of Artificial Sequence: Synthetic oligonucleotide
  Target: SCNA; (-) strand; PAM type: NRG; PAM sequence: AAG
tcagcctgaaggacaaaacg

SEQ ID NO: 19487 - DNA, 20 bp, Artificial Sequence
  Description of Artificial Sequence: Synthetic oligonucleotide
  Target: SCNA; (-) strand; PAM type: NRG; PAM sequence: AGG
tttctggattatcagcctga

SEQ ID NO: 19488 - DNA, 20 bp, Artificial Sequence
  Description of Artificial Sequence: Synthetic oligonucleotide
  Target: SCNA; (-) strand; PAM type: NRG; PAM sequence: AAG
ttttctggattatcagcctg

SEQ ID NO: 19489 - DNA, 20 bp, Artificial Sequence
  Description of Artificial Sequence: Synthetic oligonucleotide
  Target: SCNA; (-) strand; PAM type: NRG; PAM sequence: CAG
agattggttttctggattat

SEQ ID NO: 19490 - DNA, 20 bp, Artificial Sequence
  Description of Artificial Sequence: Synthetic oligonucleotide
  Target: SCNA; (-) strand; PAM type: NRG; PAM sequence: TGG
cattgtgcagattggttttc

SEQ ID NO: 19491 - DNA, 20 bp, Artificial Sequence
  Description of Artificial Sequence: Synthetic oligonucleotide
  Target: SCNA; (-) strand; PAM type: NRG; PAM sequence: TGG
ttctcaagcattgtgcagat

SEQ ID NO: 19492 - DNA, 20 bp, Artificial Sequence
  Description of Artificial Sequence: Synthetic oligonucleotide
  Target: SCNA; (-) strand; PAM type: NRG; PAM sequence: CAG
gcaccttctcaagcattgtg

SEQ ID NO: 19493 - DNA, 20 bp, Artificial Sequence
  Description of Artificial Sequence: Synthetic oligonucleotide
  Target: SCNA; (-) strand; PAM type: NRG; PAM sequence: AAG
ctaattctctgcaccttctc

SEQ ID NO: 19494 - DNA, 20 bp, Artificial Sequence
  Description of Artificial Sequence: Synthetic oligonucleotide
  Target: SCNA; (-) strand; PAM type: NRG; PAM sequence: GGG
tactgcattgagggcaatga

SEQ ID NO: 19495 - DNA, 20 bp, Artificial Sequence
  Description of Artificial Sequence: Synthetic oligonucleotide
  Target: SCNA; (-) strand; PAM type: NRG; PAM sequence: AGG
gtactgcattgagggcaatg

SEQ ID NO: 19496 - DNA, 20 bp, Artificial Sequence
  Description of Artificial Sequence: Synthetic oligonucleotide
  Target: SCNA; (-) strand; PAM type: NRG; PAM sequence: GAG
ggtactgcattgagggcaat

SEQ ID NO: 19497 - DNA, 20 bp, Artificial Sequence
  Description of Artificial Sequence: Synthetic oligonucleotide
  Target: SCNA; (-) strand; PAM type: NRG; PAM sequence: GGG
atataaaggtactgcattga

SEQ ID NO: 19498 - DNA, 20 bp, Artificial Sequence
  Description of Artificial Sequence: Synthetic oligonucleotide
  Target: SCNA; (-) strand; PAM type: NRG; PAM sequence: AGG
aatataaaggtactgcattg

SEQ ID NO: 19499 - DNA, 20 bp, Artificial Sequence
  Description of Artificial Sequence: Synthetic oligonucleotide
  Target: SCNA; (-) strand; PAM type: NRG; PAM sequence: GAG
caatataaaggtactgcatt

SEQ ID NO: 19500 - DNA, 20 bp, Artificial Sequence
  Description of Artificial Sequence: Synthetic oligonucleotide
  Target: SCNA; (-) strand; PAM type: NRG; PAM sequence: AGG
aggagaaaaagccaatataa

SEQ ID NO: 19501 - DNA, 20 bp, Artificial Sequence
  Description of Artificial Sequence: Synthetic oligonucleotide
  Target: SCNA; (-) strand; PAM type: NRG; PAM sequence: AAG
aaggagaaaaagccaatata

SEQ ID NO: 19502 - DNA, 20 bp, Artificial Sequence
  Description of Artificial Sequence: Synthetic oligonucleotide
  Target: SCNA; (-) strand; PAM type: NRG; PAM sequence: AAG
atgtgatgaataaggagaaa

SEQ ID NO: 19503 - DNA, 20 bp, Artificial Sequence
  Description of Artificial Sequence: Synthetic oligonucleotide
  Target: SCNA; (-) strand; PAM type: NRG; PAM sequence: GAG
aggagcatgtgatgaataag

SEQ ID NO: 19504 - DNA, 20 bp, Artificial Sequence
  Description of Artificial Sequence: Synthetic oligonucleotide
  Target: SCNA; (-) strand; PAM type: NRG; PAM sequence: AGG
acaggagcatgtgatgaata

SEQ ID NO: 19505 - DNA, 20 bp, Artificial Sequence
  Description of Artificial Sequence: Synthetic oligonucleotide
  Target: SCNA; (-) strand; PAM type: NRG; PAM sequence: AAG
aacaggagcatgtgatgaat

SEQ ID NO: 19506 - DNA, 20 bp, Artificial Sequence
  Description of Artificial Sequence: Synthetic oligonucleotide
  Target: SCNA; (-) strand; PAM type: NRG; PAM sequence: GAG
gtggcaatctcgggaaacag

SEQ ID NO: 19507 - DNA, 20 bp, Artificial Sequence
  Description of Artificial Sequence: Synthetic oligonucleotide
  Target: SCNA; (-) strand; PAM type: NRG; PAM sequence: AGG
gggtggcaatctcgggaaac

SEQ ID NO: 19508 - DNA, 20 bp, Artificial Sequence
  Description of Artificial Sequence: Synthetic oligonucleotide
  Target: SCNA; (-) strand; PAM type: NRG; PAM sequence: CAG
tgggtggcaatctcgggaaa

SEQ ID NO: 19509 - DNA, 20 bp, Artificial Sequence
  Description of Artificial Sequence: Synthetic oligonucleotide
  Target: SCNA; (-) strand; PAM type: NRG; PAM sequence: GGG
tatatgtgggtggcaatctc

SEQ ID NO: 19510 - DNA, 20 bp, Artificial Sequence
  Description of Artificial Sequence: Synthetic oligonucleotide
  Target: SCNA; (-) strand; PAM type: NRG; PAM sequence: CGG
gtatatgtgggtggcaatct

SEQ ID NO: 19511 - DNA, 20 bp, Artificial Sequence
  Description of Artificial Sequence: Synthetic oligonucleotide
  Target: SCNA; (-) strand; PAM type: NRG; PAM sequence: TGG
gtgcaagtagtatatgtggg

SEQ ID NO: 19512 - DNA, 20 bp, Artificial Sequence
  Description of Artificial Sequence: Synthetic oligonucleotide
  Target: SCNA; (-) strand; PAM type: NRG; PAM sequence: GGG
agggtgcaagtagtatatgt

SEQ ID NO: 19513 - DNA, 20 bp, Artificial Sequence
  Description of Artificial Sequence: Synthetic oligonucleotide
  Target: SCNA; (-) strand; PAM type: NRG; PAM sequence: TGG
tagggtgcaagtagtatatg

SEQ ID NO: 19514 - DNA, 20 bp, Artificial Sequence
  Description of Artificial Sequence: Synthetic oligonucleotide
  Target: SCNA; (-) strand; PAM type: NRG; PAM sequence: TAG
aatatagtgtagggtgcaag

SEQ ID NO: 19515 - DNA, 20 bp, Artificial Sequence
  Description of Artificial Sequence: Synthetic oligonucleotide
  Target: SCNA; (-) strand; PAM type: NRG; PAM sequence: AAG
tgaaatatagtgtagggtgc

SEQ ID NO: 19516 - DNA, 20 bp, Artificial Sequence
  Description of Artificial Sequence: Synthetic oligonucleotide
  Target: SCNA; (-) strand; PAM type: NRG; PAM sequence: GGG
agagcctgaaatatagtgta

SEQ ID NO: 19517 - DNA, 20 bp, Artificial Sequence
  Description of Artificial Sequence: Synthetic oligonucleotide
  Target: SCNA; (-) strand; PAM type: NRG; PAM sequence: AGG
aagagcctgaaatatagtgt

SEQ ID NO: 19518 - DNA, 20 bp, Artificial Sequence
  Description of Artificial Sequence: Synthetic oligonucleotide
  Target: SCNA; (-) strand; PAM type: NRG; PAM sequence: TAG
gaagagcctgaaatatagtg

SEQ ID NO: 19519 - DNA, 20 bp, Artificial Sequence
  Description of Artificial Sequence: Synthetic oligonucleotide
  Target: SCNA; (-) strand; PAM type: NRG; PAM sequence: TAG
tgaaggaagagcctgaaata

SEQ ID NO: 19520 - DNA, 20 bp, Artificial Sequence
  Description of Artificial Sequence: Synthetic oligonucleotide
  Target: SCNA; (-) strand; PAM type: NRG; PAM sequence: GAG
gtttcattatcctgaaggaa

SEQ ID NO: 19521 - DNA, 20 bp, Artificial Sequence
  Description of Artificial Sequence: Synthetic oligonucleotide
  Target: SCNA; (-) strand; PAM type: NRG; PAM sequence: AAG
tggtttcattatcctgaagg

SEQ ID NO: 19522 - DNA, 20 bp, Artificial Sequence
  Description of Artificial Sequence: Synthetic oligonucleotide
  Target: SCNA; (-) strand; PAM type: NRG; PAM sequence: AGG
gcttggtttcattatcctga

SEQ ID NO: 19523 - DNA, 20 bp, Artificial Sequence
  Description of Artificial Sequence: Synthetic oligonucleotide
  Target: SCNA; (-) strand; PAM type: NRG; PAM sequence: AAG
agcttggtttcattatcctg

SEQ ID NO: 19524 - DNA, 20 bp, Artificial Sequence
  Description of Artificial Sequence: Synthetic oligonucleotide
  Target: SCNA; (-) strand; PAM type: NRG; PAM sequence: TGG
gttggattttgcctttagct

SEQ ID NO: 19525 - DNA, 20 bp, Artificial Sequence
  Description of Artificial Sequence: Synthetic oligonucleotide
  Target: SCNA; (-) strand; PAM type: NRG; PAM sequence: TAG
caaaagttggattttgcctt

SEQ ID NO: 19526 - DNA, 20 bp, Artificial Sequence
  Description of Artificial Sequence: Synthetic oligonucleotide
  Target: SCNA; (-) strand; PAM type: NRG; PAM sequence: TGG
aggatgagttaaacaaaagt

SEQ ID NO: 19527 - DNA, 20 bp, Artificial Sequence
  Description of Artificial Sequence: Synthetic oligonucleotide
  Target: SCNA; (-) strand; PAM type: NRG; PAM sequence: AAG
aagcaggatgagttaaacaa

SEQ ID NO: 19528 - DNA, 20 bp, Artificial Sequence
  Description of Artificial Sequence: Synthetic oligonucleotide
  Target: SCNA; (-) strand; PAM type: NRG; PAM sequence: GAG
tgggagctcagaagcaggat

SEQ ID NO: 19529 - DNA, 20 bp, Artificial Sequence
  Description of Artificial Sequence: Synthetic oligonucleotide
  Target: SCNA; (-) strand; PAM type: NRG; PAM sequence: AGG
gatcttgggagctcagaagc

SEQ ID NO: 19530 - DNA, 20 bp, Artificial Sequence
  Description of Artificial Sequence: Synthetic oligonucleotide
  Target: SCNA; (-) strand; PAM type: NRG; PAM sequence: CAG
ggatcttgggagctcagaag

SEQ ID NO: 19531 - DNA, 20 bp, Artificial Sequence
  Description of Artificial Sequence: Synthetic oligonucleotide
  Target: SCNA; (-) strand; PAM type: NRG; PAM sequence: AAG
cagggatcttgggagctcag

SEQ ID NO: 19532 - DNA, 20 bp, Artificial Sequence
  Description of Artificial Sequence: Synthetic oligonucleotide
  Target: SCNA; (-) strand; PAM type: NRG; PAM sequence: CAG
gttcagggatcttgggagct

SEQ ID NO: 19533 - DNA, 20 bp, Artificial Sequence
  Description of Artificial Sequence: Synthetic oligonucleotide
  Target: SCNA; (-) strand; PAM type: NRG; PAM sequence: GAG
agtaggttcagggatcttgg

SEQ ID NO: 19534 - DNA, 20 bp, Artificial Sequence
  Description of Artificial Sequence: Synthetic oligonucleotide
  Target: SCNA; (-) strand; PAM type: NRG; PAM sequence: GGG
gaagtaggttcagggatctt

SEQ ID NO: 19535 - DNA, 20 bp, Artificial Sequence
  Description of Artificial Sequence: Synthetic oligonucleotide
  Target: SCNA; (-) strand; PAM type: NRG; PAM sequence: TGG
agaagtaggttcagggatct

SEQ ID NO: 19536 - DNA, 20 bp, Artificial Sequence
  Description of Artificial Sequence: Synthetic oligonucleotide
  Target: SCNA; (-) strand; PAM type: NRG; PAM sequence: GGG
atataagagaagtaggttca

SEQ ID NO: 19537 - DNA, 20 bp, Artificial Sequence
  Description of Artificial Sequence: Synthetic oligonucleotide
  Target: SCNA; (-) strand; PAM type: NRG; PAM sequence: AGG
tatataagagaagtaggttc

SEQ ID NO: 19538 - DNA, 20 bp, Artificial Sequence
  Description of Artificial Sequence: Synthetic oligonucleotide
  Target: SCNA; (-) strand; PAM type: NRG; PAM sequence: CAG
ttatataagagaagtaggtt

SEQ ID NO: 19539 - DNA, 20 bp, Artificial Sequence
  Description of Artificial Sequence: Synthetic oligonucleotide
  Target: SCNA; (-) strand; PAM type: NRG; PAM sequence: AGG
ataaattatataagagaagt

SEQ ID NO: 19540 - DNA, 20 bp, Artificial Sequence
  Description of Artificial Sequence: Synthetic oligonucleotide
  Target: SCNA; (-) strand; PAM type: NRG; PAM sequence: TAG
aataaattatataagagaag

SEQ ID NO: 19541 - DNA, 20 bp, Artificial Sequence
  Description of Artificial Sequence: Synthetic oligonucleotide
  Target: SCNA; (-) strand; PAM type: NRG; PAM sequence: AAG
tataataaattatataagag

SEQ ID NO: 19542 - DNA, 20 bp, Artificial Sequence
  Description of Artificial Sequence: Synthetic oligonucleotide
  Target: SCNA; (-) strand; PAM type: NRG; PAM sequence: GAG
ttctataataaattatataa

SEQ ID NO: 19543 - DNA, 20 bp, Artificial Sequence
  Description of Artificial Sequence: Synthetic oligonucleotide
  Target: SCNA; (-) strand; PAM type: NRG; PAM sequence: AAG
ctttctataataaattatat

SEQ ID NO: 19544 - DNA, 20 bp, Artificial Sequence
  Description of Artificial Sequence: Synthetic oligonucleotide
  Target: SCNA; (-) strand; PAM type: NRG; PAM sequence: GAG
ggagattcaaagataaacta

SEQ ID NO: 19545 - DNA, 20 bp, Artificial Sequence
  Description of Artificial Sequence: Synthetic oligonucleotide
  Target: SCNA; (-) strand; PAM type: NRG; PAM sequence: TAG
gtggagattcaaagataaac

SEQ ID NO: 19546 - DNA, 20 bp, Artificial Sequence
  Description of Artificial Sequence: Synthetic oligonucleotide
  Target: SCNA; (-) strand; PAM type: NRG; PAM sequence: AAG
atattgacagtggagattca

SEQ ID NO: 19547 - DNA, 20 bp, Artificial Sequence
  Description of Artificial Sequence: Synthetic oligonucleotide
  Target: SCNA; (-) strand; PAM type: NRG; PAM sequence: GAG
cagagactatattgacagtg

SEQ ID NO: 19548 - DNA, 20 bp, Artificial Sequence
  Description of Artificial Sequence: Synthetic oligonucleotide
  Target: SCNA; (-) strand; PAM type: NRG; PAM sequence: TGG
gccagagactatattgacag

SEQ ID NO: 19549 - DNA, 20 bp, Artificial Sequence
  Description of Artificial Sequence: Synthetic oligonucleotide
  Target: SCNA; (-) strand; PAM type: NRG; PAM sequence: CAG
ttggccagagactatattga

SEQ ID NO: 19550 - DNA, 20 bp, Artificial Sequence
  Description of Artificial Sequence: Synthetic oligonucleotide
  Target: SCNA; (-) strand; PAM type: NRG; PAM sequence: GAG
tgaacagctttcattggcca

SEQ ID NO: 19551 - DNA, 20 bp, Artificial Sequence
  Description of Artificial Sequence: Synthetic oligonucleotide
  Target: SCNA; (-) strand; PAM type: NRG; PAM sequence: CAG
actgaacagctttcattggc

SEQ ID NO: 19552 - DNA, 20 bp, Artificial Sequence
  Description of Artificial Sequence: Synthetic oligonucleotide
  Target: SCNA; (-) strand; PAM type: NRG; PAM sequence: TGG
attaactgaacagctttcat

SEQ ID NO: 19553 - DNA, 20 bp, Artificial Sequence
  Description of Artificial Sequence: Synthetic oligonucleotide
  Target: SCNA; (-) strand; PAM type: NRG; PAM sequence: CAG
atcaccacacattaactgaa

SEQ ID NO: 19554 - DNA, 20 bp, Artificial Sequence
  Description of Artificial Sequence: Synthetic oligonucleotide
  Target: SCNA; (-) strand; PAM type: NRG; PAM sequence: GAG
tgttcataaatgagaattag

SEQ ID NO: 19555 - DNA, 20 bp, Artificial Sequence
  Description of Artificial Sequence: Synthetic oligonucleotide
  Target: SCNA; (-) strand; PAM type: NRG; PAM sequence: AGG
aatgttcataaatgagaatt

SEQ ID NO: 19556 - DNA, 20 bp, Artificial Sequence
  Description of Artificial Sequence: Synthetic oligonucleotide
  Target: SCNA; (-) strand; PAM type: NRG; PAM sequence: TAG
aaatgttcataaatgagaat

SEQ ID NO: 19557 - DNA, 20 bp, Artificial Sequence
  Description of Artificial Sequence: Synthetic oligonucleotide
  Target: SCNA; (-) strand; PAM type: NRG; PAM sequence: GAG
ttaacaaaatgttcataaat

SEQ ID NO: 19558 - DNA, 20 bp, Artificial Sequence
  Description of Artificial Sequence: Synthetic oligonucleotide
  Target: SCNA; (-) strand; PAM type: NRG; PAM sequence: AGG
tttacatgcctatttcctat

SEQ ID NO: 19559 - DNA, 20 bp, Artificial Sequence
  Description of Artificial Sequence: Synthetic oligonucleotide
  Target: SCNA; (-) strand; PAM type: NRG; PAM sequence: TAG
ttttacatgcctatttccta

SEQ ID NO: 19560 - DNA, 20 bp, Artificial Sequence
  Description of Artificial Sequence: Synthetic oligonucleotide
  Target: SCNA; (-) strand; PAM type: NRG; PAM sequence: AGG
ctaggtgctataaaacttac

SEQ ID NO: 19561 - DNA, 20 bp, Artificial Sequence
  Description of Artificial Sequence: Synthetic oligonucleotide
  Target: SCNA; (-) strand; PAM type: NRG; PAM sequence: CAG
actaggtgctataaaactta

SEQ ID NO: 19562 - DNA, 20 bp, Artificial Sequence
  Description of Artificial Sequence: Synthetic oligonucleotide
  Target: SCNA; (-) strand; PAM type: NRG; PAM sequence: AGG
ttgagctgtcactctgtact

SEQ ID NO: 19563 - DNA, 20 bp, Artificial Sequence
  Description of Artificial Sequence: Synthetic oligonucleotide
  Target: SCNA; (-) strand; PAM type: NRG; PAM sequence: TAG
tttgagctgtcactctgtac

SEQ ID NO: 19564 - DNA, 20 bp, Artificial Sequence
  Description of Artificial Sequence: Synthetic oligonucleotide
  Target: SCNA; (-) strand; PAM type: NRG; PAM sequence: GAG
ttcattctgcaaatagtttt

SEQ ID NO: 19565 - DNA, 20 bp, Artificial Sequence
  Description of Artificial Sequence: Synthetic oligonucleotide
  Target: SCNA; (-) strand; PAM type: NRG; PAM sequence: TAG
tttttctttcattctgcaaa

SEQ ID NO: 19566 - DNA, 20 bp, Artificial Sequence
  Description of Artificial Sequence: Synthetic oligonucleotide
  Target: SCNA; (-) strand; PAM type: NRG; PAM sequence: GAG
gccatgtgtattgttttgga

SEQ ID NO: 19567 - DNA, 20 bp, Artificial Sequence
  Description of Artificial Sequence: Synthetic oligonucleotide
  Target: SCNA; (-) strand; PAM type: NRG; PAM sequence: GAG
tggccatgtgtattgttttg

SEQ ID NO: 19568 - DNA, 20 bp, Artificial Sequence
  Description of Artificial Sequence: Synthetic oligonucleotide
  Target: SCNA; (-) strand; PAM type: NRG; PAM sequence: TGG
tttggccatgtgtattgttt

SEQ ID NO: 19569 - DNA, 20 bp, Artificial Sequence
  Description of Artificial Sequence: Synthetic oligonucleotide
  Target: SCNA; (-) strand; PAM type: NRG; PAM sequence: TGG
tattacttttttccaggctt

SEQ ID NO: 19570 - DNA, 20 bp, Artificial Sequence
  Description of Artificial Sequence: Synthetic oligonucleotide
  Target: SCNA; (-) strand; PAM type: NRG; PAM sequence: AGG
ggacactattacttttttcc

SEQ ID NO: 19571 - DNA, 20 bp, Artificial Sequence
  Description of Artificial Sequence: Synthetic oligonucleotide
  Target: SCNA; (-) strand; PAM type: NRG; PAM sequence: CAG
gggacactattacttttttc

SEQ ID NO: 19572 - DNA, 20 bp, Artificial Sequence
  Description of Artificial Sequence: Synthetic oligonucleotide
  Target: SCNA; (-) strand; PAM type: NRG; PAM sequence: GGG
cacctcctagaagttacact

SEQ ID NO: 19573 - DNA, 20 bp, Artificial Sequence
  Description of Artificial Sequence: Synthetic oligonucleotide
  Target: SCNA; (-) strand; PAM type: NRG; PAM sequence: TGG
acacctcctagaagttacac

SEQ ID NO: 19574 - DNA, 20 bp, Artificial Sequence
  Description of Artificial Sequence: Synthetic oligonucleotide
  Target: SCNA; (-) strand; PAM type: NRG; PAM sequence: AAG
ttcttcctcacacctcctag

SEQ ID NO: 19575 - DNA, 20 bp, Artificial Sequence
  Description of Artificial Sequence: Synthetic oligonucleotide
  Target: SCNA; (-) strand; PAM type: NRG; PAM sequence: TAG
tctttcttcctcacacctcc

SEQ ID NO: 19576 - DNA, 20 bp, Artificial Sequence
  Description of Artificial Sequence: Synthetic oligonucleotide
  Target: SCNA; (-) strand; PAM type: NRG; PAM sequence: AGG
tcagtctaaagcctgggaaa

SEQ ID NO: 19577 - DNA, 20 bp, Artificial Sequence
  Description of Artificial Sequence: Synthetic oligonucleotide
  Target: SCNA; (-) strand; PAM type: NRG; PAM sequence: AAG
ctcagtctaaagcctgggaa

SEQ ID NO: 19578 - DNA, 20 bp, Artificial Sequence
  Description of Artificial Sequence: Synthetic oligonucleotide
  Target: SCNA; (-) strand; PAM type: NRG; PAM sequence: GGG
tatctctcagtctaaagcct

SEQ ID NO: 19579 - DNA, 20 bp, Artificial Sequence
  Description of Artificial Sequence: Synthetic oligonucleotide
  Target: SCNA; (-) strand; PAM type: NRG; PAM sequence: TGG
atatctctcagtctaaagcc

SEQ ID NO: 19580 - DNA, 20 bp, Artificial Sequence
  Description of Artificial Sequence: Synthetic oligonucleotide
  Target: SCNA; (-) strand; PAM type: NRG; PAM sequence: AAG
agttaatatctctcagtcta

SEQ ID NO: 19581 - DNA, 20 bp, Artificial Sequence
  Description of Artificial Sequence: Synthetic oligonucleotide
  Target: SCNA; (-) strand; PAM type: NRG; PAM sequence: CAG
ctctccaagttaatatctct

SEQ ID NO: 19582 - DNA, 20 bp, Artificial Sequence
  Description of Artificial Sequence: Synthetic oligonucleotide
  Target: SCNA; (-) strand; PAM type: NRG; PAM sequence: AAG
gactatgctttcccctctcc

SEQ ID NO: 19583 - DNA, 20 bp, Artificial Sequence
  Description of Artificial Sequence: Synthetic oligonucleotide
  Target: SCNA; (-) strand; PAM type: NRG; PAM sequence: TAG
tccttagccctgtttctctt

SEQ ID NO: 19584 - DNA, 20 bp, Artificial Sequence
  Description of Artificial Sequence: Synthetic oligonucleotide
  Target: SCNA; (-) strand; PAM type: NRG; PAM sequence: TAG
aaagaaagtgataccttcct

SEQ ID NO: 19585 - DNA, 20 bp, Artificial Sequence
  Description of Artificial Sequence: Synthetic oligonucleotide
  Target: SCNA; (-) strand; PAM type: NRG; PAM sequence: AAG
gtctgagagatagtaaaaga

SEQ ID NO: 19586 - DNA, 20 bp, Artificial Sequence
  Description of Artificial Sequence: Synthetic oligonucleotide
  Target: SCNA; (-) strand; PAM type: NRG; PAM sequence: AAG
atctgtctgagagatagtaa

SEQ ID NO: 19587 - DNA, 20 bp, Artificial Sequence
  Description of Artificial Sequence: Synthetic oligonucleotide
  Target: SCNA; (-) strand; PAM type: NRG; PAM sequence: TAG
attgcaatctgtctgagaga

SEQ ID NO: 19588 - DNA, 20 bp, Artificial Sequence
  Description of Artificial Sequence: Synthetic oligonucleotide
  Target: SCNA; (-) strand; PAM type: NRG; PAM sequence: GAG
ttgcattgcaatctgtctga

SEQ ID NO: 19589 - DNA, 20 bp, Artificial Sequence
  Description of Artificial Sequence: Synthetic oligonucleotide
  Target: SCNA; (-) strand; PAM type: NRG; PAM sequence: GAG
gattgcattgcaatctgtct

SEQ ID NO: 19590 - DNA, 20 bp, Artificial Sequence
  Description of Artificial Sequence: Synthetic oligonucleotide
  Target: SCNA; (-) strand; PAM type: NRG; PAM sequence: GAG
gtccagtgtagtgctgcctt

SEQ ID NO: 19591 - DNA, 20 bp, Artificial Sequence
  Description of Artificial Sequence: Synthetic oligonucleotide
  Target: SCNA; (-) strand; PAM type: NRG; PAM sequence: TAG
tcctagtaccttgtccagtg

SEQ ID NO: 19592 - DNA, 20 bp, Artificial Sequence
  Description of Artificial Sequence: Synthetic oligonucleotide
  Target: SCNA; (-) strand; PAM type: NRG; PAM sequence: CAG
cagagtcctagtaccttgtc

SEQ ID NO: 19593 - DNA, 20 bp, Artificial Sequence
  Description of Artificial Sequence: Synthetic oligonucleotide
  Target: SCNA; (-) strand; PAM type: NRG; PAM sequence: TAG
aacaagaatggtcagagtcc

SEQ ID NO: 19594 - DNA, 20 bp, Artificial Sequence
  Description of Artificial Sequence: Synthetic oligonucleotide
  Target: SCNA; (-) strand; PAM type: NRG; PAM sequence: GAG
aataaaaacaagaatggtca

SEQ ID NO: 19595 - DNA, 20 bp, Artificial Sequence
  Description of Artificial Sequence: Synthetic oligonucleotide
  Target: SCNA; (-) strand; PAM type: NRG; PAM sequence: CAG
agaataaaaacaagaatggt

SEQ ID NO: 19596 - DNA, 20 bp, Artificial Sequence
  Description of Artificial Sequence: Synthetic oligonucleotide
  Target: SCNA; (-) strand; PAM type: NRG; PAM sequence: TGG
aaaaagaataaaaacaagaa

SEQ ID NO: 19597 - DNA, 20 bp, Artificial Sequence
  Description of Artificial Sequence: Synthetic oligonucleotide
  Target: SCNA; (-) strand; PAM type: NRG; PAM sequence: AAG
aaaaaaaaaagaataaaaac

SEQ ID NO: 19598 - DNA, 20 bp, Artificial Sequence
  Description of Artificial Sequence: Synthetic oligonucleotide
  Target: SCNA; (-) strand; PAM type: NRG; PAM sequence: AAG
tctgtctcaaaaaaaaaaaa

SEQ ID NO: 19599 - DNA, 20 bp, Artificial Sequence
  Description of Artificial Sequence: Synthetic oligonucleotide
  Target: SCNA; (-) strand; PAM type: NRG; PAM sequence: GAG
tccagcctgggtgacatagt

SEQ ID NO: 19600 - DNA, 20 bp, Artificial Sequence
  Description of Artificial Sequence: Synthetic oligonucleotide
  Target: SCNA; (-) strand; PAM type: NRG; PAM sequence: TAG
gtgctccagcctgggtgaca

SEQ ID NO: 19601 - DNA, 20 bp, Artificial Sequence
  Description of Artificial Sequence: Synthetic oligonucleotide
  Target: SCNA; (-) strand; PAM type: NRG; PAM sequence: GGG
gtgccactgtgctccagcct

SEQ ID NO: 19602 - DNA, 20 bp, Artificial Sequence
  Description of Artificial Sequence: Synthetic oligonucleotide
  Target: SCNA; (-) strand; PAM type: NRG; PAM sequence: TGG
agtgccactgtgctccagcc

SEQ ID NO: 19603 - DNA, 20 bp, Artificial Sequence
  Description of Artificial Sequence: Synthetic oligonucleotide
  Target: SCNA; (-) strand; PAM type: NRG; PAM sequence: CAG
aagatagtgccactgtgctc

SEQ ID NO: 19604 - DNA, 20 bp, Artificial Sequence
  Description of Artificial Sequence: Synthetic oligonucleotide
  Target: SCNA; (-) strand; PAM type: NRG; PAM sequence: TAG
gaggttgcagtgagccaaga

SEQ ID NO: 19605 - DNA, 20 bp, Artificial Sequence
  Description of Artificial Sequence: Synthetic oligonucleotide
  Target: SCNA; (-) strand; PAM type: NRG; PAM sequence: AAG
ggcagaggttgcagtgagcc

SEQ ID NO: 19606 - DNA, 20 bp, Artificial Sequence
  Description of Artificial Sequence: Synthetic oligonucleotide
  Target: SCNA; (-) strand; PAM type: NRG; PAM sequence: GAG
cgggaggcagaggttgcagt

SEQ ID NO: 19607 - DNA, 20 bp, Artificial Sequence
  Description of Artificial Sequence: Synthetic oligonucleotide
  Target: SCNA; (-) strand; PAM type: NRG; PAM sequence: CAG
aacccgggaggcagaggttg

SEQ ID NO: 19608 - DNA, 20 bp, Artificial Sequence
  Description of Artificial Sequence: Synthetic oligonucleotide
  Target: SCNA; (-) strand; PAM type: NRG; PAM sequence: AGG
cacttgaacccgggaggcag

SEQ ID NO: 19609 - DNA, 20 bp, Artificial Sequence
  Description of Artificial Sequence: Synthetic oligonucleotide
  Target: SCNA; (-) strand; PAM type: NRG; PAM sequence: GAG
tcacttgaacccgggaggca

SEQ ID NO: 19610 - DNA, 20 bp, Artificial Sequence
  Description of Artificial Sequence: Synthetic oligonucleotide
  Target: SCNA; (-) strand; PAM type: NRG; PAM sequence: CAG
aatcacttgaacccgggagg

SEQ ID NO: 19611 - DNA, 20 bp, Artificial Sequence
  Description of Artificial Sequence: Synthetic oligonucleotide
  Target: SCNA; (-) strand; PAM type: NRG; PAM sequence: AGG
gagaatcacttgaacccggg

SEQ ID NO: 19612 - DNA, 20 bp, Artificial Sequence
  Description of Artificial Sequence: Synthetic oligonucleotide
  Target: SCNA; (-) strand; PAM type: NRG; PAM sequence: GAG
ggagaatcacttgaacccgg

SEQ ID NO: 19613 - DNA, 20 bp, Artificial Sequence
  Description of Artificial Sequence: Synthetic oligonucleotide
  Target: SCNA; (-) strand; PAM type: NRG; PAM sequence: GGG
caggagaatcacttgaaccc

SEQ ID NO: 19614 - DNA, 20 bp, Artificial Sequence
  Description of Artificial Sequence: Synthetic oligonucleotide
  Target: SCNA; (-) strand; PAM type: NRG; PAM sequence: CGG
gcaggagaatcacttgaacc

SEQ ID NO: 19615 - DNA, 20 bp, Artificial Sequence
  Description of Artificial Sequence: Synthetic oligonucleotide
  Target: SCNA; (-) strand; PAM type: NRG; PAM sequence: GAG
tacttgggaggctgaggcag

SEQ ID NO: 19616 - DNA, 20 bp, Artificial Sequence
  Description of Artificial Sequence: Synthetic oligonucleotide
  Target: SCNA; (-) strand; PAM type: NRG; PAM sequence: AGG
gctacttgggaggctgaggc

SEQ ID NO: 19617 - DNA, 20 bp, Artificial Sequence
  Description of Artificial Sequence: Synthetic oligonucleotide
  Target: SCNA; (-) strand; PAM type: NRG; PAM sequence: CAG
agctacttgggaggctgagg

SEQ ID NO: 19618 - DNA, 20 bp, Artificial Sequence
  Description of Artificial Sequence: Synthetic oligonucleotide
  Target: SCNA; (-) strand; PAM type: NRG; PAM sequence: AGG
cccagctacttgggaggctg

SEQ ID NO: 19619 - DNA, 20 bp, Artificial Sequence
  Description of Artificial Sequence: Synthetic oligonucleotide
  Target: SCNA; (-) strand; PAM type: NRG; PAM sequence: GAG
tcccagctacttgggaggct

SEQ ID NO: 19620 - DNA, 20 bp, Artificial Sequence
  Description of Artificial Sequence: Synthetic oligonucleotide
  Target: SCNA; (-) strand; PAM type: NRG; PAM sequence: AGG
tgtattcccagctacttggg

SEQ ID NO: 19621 - DNA, 20 bp, Artificial Sequence
  Description of Artificial Sequence: Synthetic oligonucleotide
  Target: SCNA; (-) strand; PAM type: NRG; PAM sequence: GAG
ctgtattcccagctacttgg

SEQ ID NO: 19622 - DNA, 20 bp, Artificial Sequence
  Description of Artificial Sequence: Synthetic oligonucleotide
  Target: SCNA; (-) strand; PAM type: NRG; PAM sequence: GGG
acctgtattcccagctactt

SEQ ID NO: 19623 - DNA, 20 bp, Artificial Sequence
  Description of Artificial Sequence: Synthetic oligonucleotide
  Target: SCNA; (-) strand; PAM type: NRG; PAM sequence: TGG
cacctgtattcccagctact

SEQ ID NO: 19624 - DNA, 20 bp, Artificial Sequence
  Description of Artificial Sequence: Synthetic oligonucleotide
  Target: SCNA; (-) strand; PAM type: NRG; PAM sequence: CAG
gtgacaggcacctgtattcc

SEQ ID NO: 19625 - DNA, 20 bp, Artificial Sequence
  Description of Artificial Sequence: Synthetic oligonucleotide
  Target: SCNA; (-) strand; PAM type: NRG; PAM sequence: AGG
aaatagccaggtgtggtgac

SEQ ID NO: 19626 - DNA, 20 bp, Artificial Sequence
  Description of Artificial Sequence: Synthetic oligonucleotide
  Target: SCNA; (-) strand; PAM type: NRG; PAM sequence: CAG
aaaatagccaggtgtggtga

SEQ ID NO: 19627 - DNA, 20 bp, Artificial Sequence
  Description of Artificial Sequence: Synthetic oligonucleotide
  Target: SCNA; (-) strand; PAM type: NRG; PAM sequence: TGG
aaaaaaaaaatagccaggtg

SEQ ID NO: 19628 - DNA, 20 bp, Artificial Sequence
  Description of Artificial Sequence: Synthetic oligonucleotide
  Target: SCNA; (-) strand; PAM type: NRG; PAM sequence: AGG
atacaaaaaaaaaaatagcc

SEQ ID NO: 19629 - DNA, 20 bp, Artificial Sequence
  Description of Artificial Sequence: Synthetic oligonucleotide
  Target: SCNA; (-) strand; PAM type: NRG; PAM sequence: CAG
aatacaaaaaaaaaaatagc

SEQ ID NO: 19630 - DNA, 20 bp, Artificial Sequence
  Description of Artificial Sequence: Synthetic oligonucleotide
  Target: SCNA; (-) strand; PAM type: NRG; PAM sequence: TAG
aaaaaatacaaaaaaaaaaa

SEQ ID NO: 19631 - DNA, 20 bp, Artificial Sequence
  Description of Artificial Sequence: Synthetic oligonucleotide
  Target: SCNA; (-) strand; PAM type: NRG; PAM sequence: TAG
caagaccagccaggccaaca

SEQ ID NO: 19632 - DNA, 20 bp, Artificial Sequence
  Description of Artificial Sequence: Synthetic oligonucleotide
  Target: SCNA; (-) strand; PAM type: NRG; PAM sequence: AGG
ttaggagttcaagaccagcc

SEQ ID NO: 19633 - DNA, 20 bp, Artificial Sequence
  Description of Artificial Sequence: Synthetic oligonucleotide
  Target: SCNA; (-) strand; PAM type: NRG; PAM sequence: CAG
gttaggagttcaagaccagc

SEQ ID NO: 19634 - DNA, 20 bp, Artificial Sequence
  Description of Artificial Sequence: Synthetic oligonucleotide
  Target: SCNA; (-) strand; PAM type: NRG; PAM sequence: CAG
caaggttaggagttcaagac

SEQ ID NO: 19635 - DNA, 20 bp, Artificial Sequence
  Description of Artificial Sequence: Synthetic oligonucleotide
  Target: SCNA; (-) strand; PAM type: NRG; PAM sequence: AAG
gatcacaaggttaggagttc

SEQ ID NO: 19636 - DNA, 20 bp, Artificial Sequence
  Description of Artificial Sequence: Synthetic oligonucleotide
  Target: SCNA; (-) strand; PAM type: NRG; PAM sequence: GAG
cgggtggatcacaaggttag

SEQ ID NO: 19637 - DNA, 20 bp, Artificial Sequence
  Description of Artificial Sequence: Synthetic oligonucleotide
  Target: SCNA; (-) strand; PAM type: NRG; PAM sequence: AGG
ggcgggtggatcacaaggtt

SEQ ID NO: 19638 - DNA, 20 bp, Artificial Sequence
  Description of Artificial Sequence: Synthetic oligonucleotide
  Target: SCNA; (-) strand; PAM type: NRG; PAM sequence: TAG
aggcgggtggatcacaaggt

SEQ ID NO: 19639 - DNA, 20 bp, Artificial Sequence
  Description of Artificial Sequence: Synthetic oligonucleotide
  Target: SCNA; (-) strand; PAM type: NRG; PAM sequence: AGG
gccaaggcgggtggatcaca

SEQ ID NO: 19640 - DNA, 20 bp, Artificial Sequence
  Description of Artificial Sequence: Synthetic oligonucleotide
  Target: SCNA; (-) strand; PAM type: NRG; PAM sequence: AAG
ggccaaggcgggtggatcac

SEQ ID NO: 19641 - DNA, 20 bp, Artificial Sequence
  Description of Artificial Sequence: Synthetic oligonucleotide
  Target: SCNA; (-) strand; PAM type: NRG; PAM sequence: TGG
ttgtgggaggccaaggcggg

SEQ ID NO: 19642 - DNA, 20 bp, Artificial Sequence
  Description of Artificial Sequence: Synthetic oligonucleotide
  Target: SCNA; (-) strand; PAM type: NRG; PAM sequence: GGG
actttgtgggaggccaaggc

SEQ ID NO: 19643 - DNA, 20 bp, Artificial Sequence
  Description of Artificial Sequence: Synthetic oligonucleotide
  Target: SCNA; (-) strand; PAM type: NRG; PAM sequence: CGG
cactttgtgggaggccaagg

SEQ ID NO: 19644 - DNA, 20 bp, Artificial Sequence
  Description of Artificial Sequence: Synthetic oligonucleotide
  Target: SCNA; (-) strand; PAM type: NRG; PAM sequence: AGG
cagcactttgtgggaggcca

SEQ ID NO: 19645 - DNA, 20 bp, Artificial Sequence
  Description of Artificial Sequence: Synthetic oligonucleotide
  Target: SCNA; (-) strand; PAM type: NRG; PAM sequence: AAG
ccagcactttgtgggaggcc

SEQ ID NO: 19646 - DNA, 20 bp, Artificial Sequence
  Description of Artificial Sequence: Synthetic oligonucleotide
  Target: SCNA; (-) strand; PAM type: NRG; PAM sequence: AGG
taatcccagcactttgtggg

SEQ ID NO: 19647 - DNA, 20 bp, Artificial Sequence
  Description of Artificial Sequence: Synthetic oligonucleotide
  Target: SCNA; (-) strand; PAM type: NRG; PAM sequence: GAG
gtaatcccagcactttgtgg

SEQ ID NO: 19648 - DNA, 20 bp, Artificial Sequence
  Description of Artificial Sequence: Synthetic oligonucleotide
  Target: SCNA; (-) strand; PAM type: NRG; PAM sequence: GGG
ctgtaatcccagcactttgt

SEQ ID NO: 19649 - DNA, 20 bp, Artificial Sequence
  Description of Artificial Sequence: Synthetic oligonucleotide
  Target: SCNA; (-) strand; PAM type: NRG; PAM sequence: TGG
cctgtaatcccagcactttg

SEQ ID NO: 19650 - DNA, 20 bp, Artificial Sequence
  Description of Artificial Sequence: Synthetic oligonucleotide
  Target: SCNA; (-) strand; PAM type: NRG; PAM sequence: CAG
gtggctcatgcctgtaatcc

SEQ ID NO: 19651 - DNA, 20 bp, Artificial Sequence
  Description of Artificial Sequence: Synthetic oligonucleotide
  Target: SCNA; (-) strand; PAM type: NRG; PAM sequence: TGG
aaaatatgggccgggcccgg

SEQ ID NO: 19652 - DNA, 20 bp, Artificial Sequence
  Description of Artificial Sequence: Synthetic oligonucleotide
  Target: SCNA; (-) strand; PAM type: NRG; PAM sequence: CGG
ataaaaatatgggccgggcc

SEQ ID NO: 19653 - DNA, 20 bp, Artificial Sequence
  Description of Artificial Sequence: Synthetic oligonucleotide
  Target: SCNA; (-) strand; PAM type: NRG; PAM sequence: GGG
taagaataaaaatatgggcc

SEQ ID NO: 19654 - DNA, 20 bp, Artificial Sequence
  Description of Artificial Sequence: Synthetic oligonucleotide
  Target: SCNA; (-) strand; PAM type: NRG; PAM sequence: CGG
ttaagaataaaaatatgggc

SEQ ID NO: 19655 - DNA, 20 bp, Artificial Sequence
  Description of Artificial Sequence: Synthetic oligonucleotide
  Target: SCNA; (-) strand; PAM type: NRG; PAM sequence: GGG
ttctttaagaataaaaatat

SEQ ID NO: 19656 - DNA, 20 bp, Artificial Sequence
  Description of Artificial Sequence: Synthetic oligonucleotide
  Target: SCNA; (-) strand; PAM type: NRG; PAM sequence: TGG
gttctttaagaataaaaata

SEQ ID NO: 19657 - DNA, 20 bp, Artificial Sequence
  Description of Artificial Sequence: Synthetic oligonucleotide
  Target: SCNA; (-) strand; PAM type: NRG; PAM sequence: AAG
gcatatagttctggttcttt

SEQ ID NO: 19658 - DNA, 20 bp, Artificial Sequence
  Description of Artificial Sequence: Synthetic oligonucleotide
  Target: SCNA; (-) strand; PAM type: NRG; PAM sequence: TGG
acactagatgcatatagttc

SEQ ID NO: 19659 - DNA, 20 bp, Artificial Sequence
  Description of Artificial Sequence: Synthetic oligonucleotide
  Target: SCNA; (-) strand; PAM type: NRG; PAM sequence: TAG
tggggaacactagatgcata

SEQ ID NO: 19660 - DNA, 20 bp, Artificial Sequence
  Description of Artificial Sequence: Synthetic oligonucleotide
  Target: SCNA; (-) strand; PAM type: NRG; PAM sequence: TAG
gaagaaaacttggggaacac

SEQ ID NO: 19661 - DNA, 20 bp, Artificial Sequence
  Description of Artificial Sequence: Synthetic oligonucleotide
  Target: SCNA; (-) strand; PAM type: NRG; PAM sequence: GGG
aagacaaagaagaaaacttg

SEQ ID NO: 19662 - DNA, 20 bp, Artificial Sequence
  Description of Artificial Sequence: Synthetic oligonucleotide
  Target: SCNA; (-) strand; PAM type: NRG; PAM sequence: GGG
aaagacaaagaagaaaactt

SEQ ID NO: 19663 - DNA, 20 bp, Artificial Sequence
  Description of Artificial Sequence: Synthetic oligonucleotide
  Target: SCNA; (-) strand; PAM type: NRG; PAM sequence: TGG
aaaagacaaagaagaaaact

SEQ ID NO: 19664 - DNA, 20 bp, Artificial Sequence
  Description of Artificial Sequence: Synthetic oligonucleotide
  Target: SCNA; (-) strand; PAM type: NRG; PAM sequence: AAG
tggaatgttaaaagacaaag

SEQ ID NO: 19665 - DNA, 20 bp, Artificial Sequence
  Description of Artificial Sequence: Synthetic oligonucleotide
  Target: SCNA; (-) strand; PAM type: NRG; PAM sequence: AAG
tcctggaatgttaaaagaca

SEQ ID NO: 19666 - DNA, 20 bp, Artificial Sequence
  Description of Artificial Sequence: Synthetic oligonucleotide
  Target: SCNA; (-) strand; PAM type: NRG; PAM sequence: AAG
ctgttttcctggaatgttaa

SEQ ID NO: 19667 - DNA, 20 bp, Artificial Sequence
  Description of Artificial Sequence: Synthetic oligonucleotide
  Target: SCNA; (-) strand; PAM type: NRG; PAM sequence: TGG
acactcaatatctgttttcc

SEQ ID NO: 19668 - DNA, 20 bp, Artificial Sequence
  Description of Artificial Sequence: Synthetic oligonucleotide
  Target: SCNA; (-) strand; PAM type: NRG; PAM sequence: CAG
atatggaactatgcatgatc

SEQ ID NO: 19669 - DNA, 20 bp, Artificial Sequence
  Description of Artificial Sequence: Synthetic oligonucleotide
  Target: SCNA; (-) strand; PAM type: NRG; PAM sequence: TGG
aacagagggtcaaaaggata

SEQ ID NO: 19670 - DNA, 20 bp, Artificial Sequence
  Description of Artificial Sequence: Synthetic oligonucleotide
  Target: SCNA; (-) strand; PAM type: NRG; PAM sequence: AGG
acagcaaacagagggtcaaa

SEQ ID NO: 19671 - DNA, 20 bp, Artificial Sequence
  Description of Artificial Sequence: Synthetic oligonucleotide
  Target: SCNA; (-) strand; PAM type: NRG; PAM sequence: AAG
tacagcaaacagagggtcaa

SEQ ID NO: 19672 - DNA, 20 bp, Artificial Sequence
  Description of Artificial Sequence: Synthetic oligonucleotide
  Target: SCNA; (-) strand; PAM type: NRG; PAM sequence: GGG
agctggctacagcaaacaga

SEQ ID NO: 19673 - DNA, 20 bp, Artificial Sequence
  Description of Artificial Sequence: Synthetic oligonucleotide
  Target: SCNA; (-) strand; PAM type: NRG; PAM sequence: AGG
aagctggctacagcaaacag

SEQ ID NO: 19674 - DNA, 20 bp, Artificial Sequence
  Description of Artificial Sequence: Synthetic oligonucleotide
  Target: SCNA; (-) strand; PAM type: NRG; PAM sequence: GAG
aaagctggctacagcaaaca

SEQ ID NO: 19675 - DNA, 20 bp, Artificial Sequence
  Description of Artificial Sequence: Synthetic oligonucleotide
  Target: SCNA; (-) strand; PAM type: NRG; PAM sequence: CAG
tcaaagctggctacagcaaa

SEQ ID NO: 19676 - DNA, 20 bp, Artificial Sequence
  Description of Artificial Sequence: Synthetic oligonucleotide
  Target: SCNA; (-) strand; PAM type: NRG; PAM sequence: CAG
caaagaatcaaagctggcta

SEQ ID NO: 19677 - DNA, 20 bp, Artificial Sequence
  Description of Artificial Sequence: Synthetic oligonucleotide
  Target: SCNA; (-) strand; PAM type: NRG; PAM sequence: TGG
tgaatccaaagaatcaaagc

SEQ ID NO: 19678 - DNA, 20 bp, Artificial Sequence
  Description of Artificial Sequence: Synthetic oligonucleotide
  Target: SCNA; (-) strand; PAM type: NRG; PAM sequence: AAG
accatgaatccaaagaatca

SEQ ID NO: 19679 - DNA, 20 bp, Artificial Sequence
  Description of Artificial Sequence: Synthetic oligonucleotide
  Target: SCNA; (-) strand; PAM type: NRG; PAM sequence: AAG
atagggtgaccatgaatcca

SEQ ID NO: 19680 - DNA, 20 bp, Artificial Sequence
  Description of Artificial Sequence: Synthetic oligonucleotide
  Target: SCNA; (-) strand; PAM type: NRG; PAM sequence: GGG
ggattagtgaatatgttata

SEQ ID NO: 19681 - DNA, 20 bp, Artificial Sequence
  Description of Artificial Sequence: Synthetic oligonucleotide
  Target: SCNA; (-) strand; PAM type: NRG; PAM sequence: AGG
tggattagtgaatatgttat

SEQ ID NO: 19682 - DNA, 20 bp, Artificial Sequence
  Description of Artificial Sequence: Synthetic oligonucleotide
  Target: SCNA; (-) strand; PAM type: NRG; PAM sequence: TAG
gtggattagtgaatatgtta

SEQ ID NO: 19683 - DNA, 20 bp, Artificial Sequence
  Description of Artificial Sequence: Synthetic oligonucleotide
  Target: SCNA; (-) strand; PAM type: NRG; PAM sequence: TAG
ataacctttcattggtggat

SEQ ID NO: 19684 - DNA, 20 bp, Artificial Sequence
  Description of Artificial Sequence: Synthetic oligonucleotide
  Target: SCNA; (-) strand; PAM type: NRG; PAM sequence: TGG
attacataacctttcattgg

SEQ ID NO: 19685 - DNA, 20 bp, Artificial Sequence
  Description of Artificial Sequence: Synthetic oligonucleotide
  Target: SCNA; (-) strand; PAM type: NRG; PAM sequence: TGG
tacattacataacctttcat

SEQ ID NO: 19686 - DNA, 20 bp, Artificial Sequence
  Description of Artificial Sequence: Synthetic oligonucleotide
  Target: SCNA; (-) strand; PAM type: NRG; PAM sequence: GAG
gattgtcattagaaaaccct

SEQ ID NO: 19687 - DNA, 20 bp, Artificial Sequence
  Description of Artificial Sequence: Synthetic oligonucleotide
  Target: SCNA; (-) strand; PAM type: NRG; PAM sequence: TAG
acattgataaagattgtcat

SEQ ID NO: 19688 - DNA, 20 bp, Artificial Sequence
  Description of Artificial Sequence: Synthetic oligonucleotide
  Target: SCNA; (-) strand; PAM type: NRG; PAM sequence: AAG
aagcttatagaacattgata

SEQ ID NO: 19689 - DNA, 20 bp, Artificial Sequence
  Description of Artificial Sequence: Synthetic oligonucleotide
  Target: SCNA; (-) strand; PAM type: NRG; PAM sequence: TAG
taaattaattttcaagctta

SEQ ID NO: 19690 - DNA, 20 bp, Artificial Sequence
  Description of Artificial Sequence: Synthetic oligonucleotide
  Target: SCNA; (-) strand; PAM type: NRG; PAM sequence: AAG
aaattattaaattaattttc

SEQ ID NO: 19691 - DNA, 20 bp, Artificial Sequence
  Description of Artificial Sequence: Synthetic oligonucleotide
  Target: SCNA; (-) strand; PAM type: NRG; PAM sequence: TGG
ttattatattttatgcacaa

SEQ ID NO: 19692 - DNA, 20 bp, Artificial Sequence
  Description of Artificial Sequence: Synthetic oligonucleotide
  Target: SCNA; (-) strand; PAM type: NRG; PAM sequence: AAG
tgaatttcgttattaaatta

SEQ ID NO: 19693 - DNA, 20 bp, Artificial Sequence
  Description of Artificial Sequence: Synthetic oligonucleotide
  Target: SCNA; (-) strand; PAM type: NRG; PAM sequence: AAG
aatgactgataagtttgtaa

SEQ ID NO: 19694 - DNA, 20 bp, Artificial Sequence
  Description of Artificial Sequence: Synthetic oligonucleotide
  Target: SCNA; (-) strand; PAM type: NRG; PAM sequence: AAG
tttacttctgaatgactgat

SEQ ID NO: 19695 - DNA, 20 bp, Artificial Sequence
  Description of Artificial Sequence: Synthetic oligonucleotide
  Target: SCNA; (-) strand; PAM type: NRG; PAM sequence: AAG
aacccctgcccacaaaactg

SEQ ID NO: 19696 - DNA, 20 bp, Artificial Sequence
  Description of Artificial Sequence: Synthetic oligonucleotide
  Target: SCNA; (-) strand; PAM type: NRG; PAM sequence: TAG
ctgatcttttctccaaactt

SEQ ID NO: 19697 - DNA, 20 bp, Artificial Sequence
  Description of Artificial Sequence: Synthetic oligonucleotide
  Target: SCNA; (-) strand; PAM type: NRG; PAM sequence: TGG
actatttctaataatgctat

SEQ ID NO: 19698 - DNA, 20 bp, Artificial Sequence
  Description of Artificial Sequence: Synthetic oligonucleotide
  Target: SCNA; (-) strand; PAM type: NRG; PAM sequence: AAG
tagtagtttagtcacttaaa

SEQ ID NO: 19699 - DNA, 20 bp, Artificial Sequence
  Description of Artificial Sequence: Synthetic oligonucleotide
  Target: SCNA; (-) strand; PAM type: NRG; PAM sequence: TAG
taaatgtttctttagtagtt

SEQ ID NO: 19700 - DNA, 20 bp, Artificial Sequence
  Description of Artificial Sequence: Synthetic oligonucleotide
  Target: SCNA; (-) strand; PAM type: NRG; PAM sequence: TAG
ttaactaaatgtttctttag

SEQ ID NO: 19701 - DNA, 20 bp, Artificial Sequence
  Description of Artificial Sequence: Synthetic oligonucleotide
  Target: SCNA; (-) strand; PAM type: NRG; PAM sequence: TAG
gagttaactaaatgtttctt

SEQ ID NO: 19702 - DNA, 20 bp, Artificial Sequence
  Description of Artificial Sequence: Synthetic oligonucleotide
  Target: SCNA; (-) strand; PAM type: NRG; PAM sequence: GAG
aattttacaacaatatttta

SEQ ID NO: 19703 - DNA, 20 bp, Artificial Sequence
  Description of Artificial Sequence: Synthetic oligonucleotide
  Target: SCNA; (-) strand; PAM type: NRG; PAM sequence: TAG
gaaattttacaacaatattt

SEQ ID NO: 19704 - DNA, 20 bp, Artificial Sequence
  Description of Artificial Sequence: Synthetic oligonucleotide
  Target: SCNA; (-) strand; PAM type: NRG; PAM sequence: TAG
gtatttttcctcaaaacaca

SEQ ID NO: 19705 - DNA, 20 bp, Artificial Sequence
  Description of Artificial Sequence: Synthetic oligonucleotide
  Target: SCNA; (-) strand; PAM type: NRG; PAM sequence: AAG
aaaattttatgatggaataa

SEQ ID NO: 19706 - DNA, 20 bp, Artificial Sequence
  Description of Artificial Sequence: Synthetic oligonucleotide
  Target: SCNA; (-) strand; PAM type: NRG; PAM sequence: TGG
ctaagttgaaaattttatga

SEQ ID NO: 19707 - DNA, 20 bp, Artificial Sequence
  Description of Artificial Sequence: Synthetic oligonucleotide
  Target: SCNA; (-) strand; PAM type: NRG; PAM sequence: AAG
agtaaacaaattgtttctct

SEQ ID NO: 19708 - DNA, 20 bp, Artificial Sequence
  Description of Artificial Sequence: Synthetic oligonucleotide
  Target: SCNA; (-) strand; PAM type: NRG; PAM sequence: AAG
tgaaaatattataatttttc

SEQ ID NO: 19709 - DNA, 20 bp, Artificial Sequence
  Description of Artificial Sequence: Synthetic oligonucleotide
  Target: SCNA; (-) strand; PAM type: NRG; PAM sequence: CAG
tttatgttttaataaattgt

SEQ ID NO: 19710 - DNA, 20 bp, Artificial Sequence
  Description of Artificial Sequence: Synthetic oligonucleotide
  Target: SCNA; (-) strand; PAM type: NRG; PAM sequence: AAG
atcatgtgtcaaagtgtggg

SEQ ID NO: 19711 - DNA, 20 bp, Artificial Sequence
  Description of Artificial Sequence: Synthetic oligonucleotide
  Target: SCNA; (-) strand; PAM type: NRG; PAM sequence: GGG
ctaatcatgtgtcaaagtgt

SEQ ID NO: 19712 - DNA, 20 bp, Artificial Sequence
  Description of Artificial Sequence: Synthetic oligonucleotide
  Target: SCNA; (-) strand; PAM type: NRG; PAM sequence: TGG
tctaatcatgtgtcaaagtg

SEQ ID NO: 19713 - DNA, 20 bp, Artificial Sequence
  Description of Artificial Sequence: Synthetic oligonucleotide
  Target: SCNA; (-) strand; PAM type: NRG; PAM sequence: AAG
ttttttctaatcatgtgtca

SEQ ID NO: 19714 - DNA, 20 bp, Artificial Sequence
  Description of Artificial Sequence: Synthetic oligonucleotide
  Target: SCNA; (-) strand; PAM type: NRG; PAM sequence: CAG
aagtgaattctacttaaccc

SEQ ID NO: 19715 - DNA, 20 bp, Artificial Sequence
  Description of Artificial Sequence: Synthetic oligonucleotide
  Target: SCNA; (-) strand; PAM type: NRG; PAM sequence: AAG
catcttagaccagcaaacac

SEQ ID NO: 19716 - DNA, 20 bp, Artificial Sequence
  Description of Artificial Sequence: Synthetic oligonucleotide
  Target: SCNA; (-) strand; PAM type: NRG; PAM sequence: CAG
aattccattgcatcttagac

SEQ ID NO: 19717 - DNA, 20 bp, Artificial Sequence
  Description of Artificial Sequence: Synthetic oligonucleotide
  Target: SCNA; (-) strand; PAM type: NRG; PAM sequence: TAG
ctccaaattccattgcatct

SEQ ID NO: 19718 - DNA, 20 bp, Artificial Sequence
  Description of Artificial Sequence: Synthetic oligonucleotide
  Target: SCNA; (-) strand; PAM type: NRG; PAM sequence: CAG
gtgtctgatttgatagaatc

SEQ ID NO: 19719 - DNA, 20 bp, Artificial Sequence
  Description of Artificial Sequence: Synthetic oligonucleotide
  Target: SCNA; (-) strand; PAM type: NRG; PAM sequence: TAG
cttccgtgtgtctgatttga

SEQ ID NO: 19720 - DNA, 20 bp, Artificial Sequence
  Description of Artificial Sequence: Synthetic oligonucleotide
  Target: SCNA; (-) strand; PAM type: NRG; PAM sequence: GAG
tgttatttcaagtgtgggct

SEQ ID NO: 19721 - DNA, 20 bp, Artificial Sequence
  Description of Artificial Sequence: Synthetic oligonucleotide
  Target: SCNA; (-) strand; PAM type: NRG; PAM sequence: GGG
caaattgttatttcaagtgt

SEQ ID NO: 19722 - DNA, 20 bp, Artificial Sequence
  Description of Artificial Sequence: Synthetic oligonucleotide
  Target: SCNA; (-) strand; PAM type: NRG; PAM sequence: TGG
gcaaattgttatttcaagtg

SEQ ID NO: 19723 - DNA, 20 bp, Artificial Sequence
  Description of Artificial Sequence: Synthetic oligonucleotide
  Target: SCNA; (-) strand; PAM type: NRG; PAM sequence: AAG
ctcttgcaaattgttatttc

SEQ ID NO: 19724 - DNA, 20 bp, Artificial Sequence
  Description of Artificial Sequence: Synthetic oligonucleotide
  Target: SCNA; (-) strand; PAM type: NRG; PAM sequence: AAG
atcaggcctaatattgagca

SEQ ID NO: 19725 - DNA, 20 bp, Artificial Sequence
  Description of Artificial Sequence: Synthetic oligonucleotide
  Target: SCNA; (-) strand; PAM type: NRG; PAM sequence: GAG
agctaatcaggcctaatatt

SEQ ID NO: 19726 - DNA, 20 bp, Artificial Sequence
  Description of Artificial Sequence: Synthetic oligonucleotide
  Target: SCNA; (-) strand; PAM type: NRG; PAM sequence: AGG
tttgagcattttagctaatc

SEQ ID NO: 19727 - DNA, 20 bp, Artificial Sequence
  Description of Artificial Sequence: Synthetic oligonucleotide
  Target: SCNA; (-) strand; PAM type: NRG; PAM sequence: CAG
atttgagcattttagctaat

SEQ ID NO: 19728 - DNA, 20 bp, Artificial Sequence
  Description of Artificial Sequence: Synthetic oligonucleotide
  Target: SCNA; (-) strand; PAM type: NRG; PAM sequence: TAG
gaatggaaatttgagcattt

SEQ ID NO: 19729 - DNA, 20 bp, Artificial Sequence
  Description of Artificial Sequence: Synthetic oligonucleotide
  Target: SCNA; (-) strand; PAM type: NRG; PAM sequence: GAG
taaggattgaatggaaattt

SEQ ID NO: 19730 - DNA, 20 bp, Artificial Sequence
  Description of Artificial Sequence: Synthetic oligonucleotide
  Target: SCNA; (-) strand; PAM type: NRG; PAM sequence: TGG
atctgtttttaaggattgaa

SEQ ID NO: 19731 - DNA, 20 bp, Artificial Sequence
  Description of Artificial Sequence: Synthetic oligonucleotide
  Target: SCNA; (-) strand; PAM type: NRG; PAM sequence: AGG
taagtgtggatctgttttta

SEQ ID NO: 19732 - DNA, 20 bp, Artificial Sequence
  Description of Artificial Sequence: Synthetic oligonucleotide
  Target: SCNA; (-) strand; PAM type: NRG; PAM sequence: AAG
ctaagtgtggatctgttttt

SEQ ID NO: 19733 - DNA, 20 bp, Artificial Sequence
  Description of Artificial Sequence: Synthetic oligonucleotide
  Target: SCNA; (-) strand; PAM type: NRG; PAM sequence: TGG
gtgtgaagaatgactaagtg

SEQ ID NO: 19734 - DNA, 20 bp, Artificial Sequence
  Description of Artificial Sequence: Synthetic oligonucleotide
  Target: SCNA; (-) strand; PAM type: NRG; PAM sequence: AAG
gagaggtgtgaagaatgact

SEQ ID NO: 19735 - DNA, 20 bp, Artificial Sequence
  Description of Artificial Sequence: Synthetic oligonucleotide
  Target: SCNA; (-) strand; PAM type: NRG; PAM sequence: AAG
gggcgagggagagaggtgtg

SEQ ID NO: 19736 - DNA, 20 bp, Artificial Sequence
  Description of Artificial Sequence: Synthetic oligonucleotide
  Target: SCNA; (-) strand; PAM type: NRG; PAM sequence: AGG
tgtgaaagggcgagggagag

SEQ ID NO: 19737 - DNA, 20 bp, Artificial Sequence
  Description of Artificial Sequence: Synthetic oligonucleotide
  Target: SCNA; (-) strand; PAM type: NRG; PAM sequence: GAG
gtgtgaaagggcgagggaga

SEQ ID NO: 19738 - DNA, 20 bp, Artificial Sequence
  Description of Artificial Sequence: Synthetic oligonucleotide
  Target: SCNA; (-) strand; PAM type: NRG; PAM sequence: GAG
gggtgtgaaagggcgaggga

SEQ ID NO: 19739 - DNA, 20 bp, Artificial Sequence
  Description of Artificial Sequence: Synthetic oligonucleotide
  Target: SCNA; (-) strand; PAM type: NRG; PAM sequence: GAG
ttgggtgtgaaagggcgagg

SEQ ID NO: 19740 - DNA, 20 bp, Artificial Sequence
  Description of Artificial Sequence: Synthetic oligonucleotide
  Target: SCNA; (-) strand; PAM type: NRG; PAM sequence: GGG
atttgggtgtgaaagggcga

SEQ ID NO: 19741 - DNA, 20 bp, Artificial Sequence
  Description of Artificial Sequence: Synthetic oligonucleotide
  Target: SCNA; (-) strand; PAM type: NRG; PAM sequence: AGG
aatttgggtgtgaaagggcg

SEQ ID NO: 19742 - DNA, 20 bp, Artificial Sequence
  Description of Artificial Sequence: Synthetic oligonucleotide
  Target: SCNA; (-) strand; PAM type: NRG; PAM sequence: GAG
caatttgggtgtgaaagggc

SEQ ID NO: 19743 - DNA, 20 bp, Artificial Sequence
  Description of Artificial Sequence: Synthetic oligonucleotide
  Target: SCNA; (-) strand; PAM type: NRG; PAM sequence: GGG
ttaacaatttgggtgtgaaa

SEQ ID NO: 19744 - DNA, 20 bp, Artificial Sequence
  Description of Artificial Sequence: Synthetic oligonucleotide
  Target: SCNA; (-) strand; PAM type: NRG; PAM sequence: AGG
gttaacaatttgggtgtgaa

SEQ ID NO: 19745 - DNA, 20 bp, Artificial Sequence
  Description of Artificial Sequence: Synthetic oligonucleotide
  Target: SCNA; (-) strand; PAM type: NRG; PAM sequence: AAG
agttaacaatttgggtgtga

SEQ ID NO: 19746 - DNA, 20 bp, Artificial Sequence
  Description of Artificial Sequence: Synthetic oligonucleotide
  Target: SCNA; (-) strand; PAM type: NRG; PAM sequence: GGG
gagaaaaaagttaacaattt

SEQ ID NO: 19747 - DNA, 20 bp, Artificial Sequence
  Description of Artificial Sequence: Synthetic oligonucleotide
  Target: SCNA; (-) strand; PAM type: NRG; PAM sequence: TGG
agagaaaaaagttaacaatt

SEQ ID NO: 19748 - DNA, 20 bp, Artificial Sequence
  Description of Artificial Sequence: Synthetic oligonucleotide
  Target: SCNA; (-) strand; PAM type: NRG; PAM sequence: AAG
aaatgtgagaatagagaaaa

SEQ ID NO: 19749 - DNA, 20 bp, Artificial Sequence
  Description of Artificial Sequence: Synthetic oligonucleotide
  Target: SCNA; (-) strand; PAM type: NRG; PAM sequence: GAG
agactataaatgtgagaata

SEQ ID NO: 19750 - DNA, 20 bp, Artificial Sequence
  Description of Artificial Sequence: Synthetic oligonucleotide
  Target: SCNA; (-) strand; PAM type: NRG; PAM sequence: TAG
ccagactataaatgtgagaa

SEQ ID NO: 19751 - DNA, 20 bp, Artificial Sequence
  Description of Artificial Sequence: Synthetic oligonucleotide
  Target: SCNA; (-) strand; PAM type: NRG; PAM sequence: GAG
ctgaaccagactataaatgt

SEQ ID NO: 19752 - DNA, 20 bp, Artificial Sequence
  Description of Artificial Sequence: Synthetic oligonucleotide
  Target: SCNA; (-) strand; PAM type: NRG; PAM sequence: CAG
cagatcacggaagtctgaac

SEQ ID NO: 19753 - DNA, 20 bp, Artificial Sequence
  Description of Artificial Sequence: Synthetic oligonucleotide
  Target: SCNA; (-) strand; PAM type: NRG; PAM sequence: AAG
gagcaagtgacagatcacgg

SEQ ID NO: 19754 - DNA, 20 bp, Artificial Sequence
  Description of Artificial Sequence: Synthetic oligonucleotide
  Target: SCNA; (-) strand; PAM type: NRG; PAM sequence: CGG
caagagcaagtgacagatca

SEQ ID NO: 19755 - DNA, 20 bp, Artificial Sequence
  Description of Artificial Sequence: Synthetic oligonucleotide
  Target: SCNA; (-) strand; PAM type: NRG; PAM sequence: CAG
ttaaccacaagagcaagtga

SEQ ID NO: 19756 - DNA, 20 bp, Artificial Sequence
  Description of Artificial Sequence: Synthetic oligonucleotide
  Target: SCNA; (-) strand; PAM type: NRG; PAM sequence: AAG
agaaatttaaccacaagagc

SEQ ID NO: 19757 - DNA, 20 bp, Artificial Sequence
  Description of Artificial Sequence: Synthetic oligonucleotide
  Target: SCNA; (-) strand; PAM type: NRG; PAM sequence: GAG
cttcagaaatttaaccacaa

SEQ ID NO: 19758 - DNA, 20 bp, Artificial Sequence
  Description of Artificial Sequence: Synthetic oligonucleotide
  Target: SCNA; (-) strand; PAM type: NRG; PAM sequence: AAG
cacttcagaaatttaaccac

SEQ ID NO: 19759 - DNA, 20 bp, Artificial Sequence
  Description of Artificial Sequence: Synthetic oligonucleotide
  Target: SCNA; (-) strand; PAM type: NRG; PAM sequence: CAG
tagagataggaatttcactt

SEQ ID NO: 19760 - DNA, 20 bp, Artificial Sequence
  Description of Artificial Sequence: Synthetic oligonucleotide
  Target: SCNA; (-) strand; PAM type: NRG; PAM sequence: AGG
taggagaagagattagagat

SEQ ID NO: 19761 - DNA, 20 bp, Artificial Sequence
  Description of Artificial Sequence: Synthetic oligonucleotide
  Target: SCNA; (-) strand; PAM type: NRG; PAM sequence: TAG
ataggagaagagattagaga

SEQ ID NO: 19762 - DNA, 20 bp, Artificial Sequence
  Description of Artificial Sequence: Synthetic oligonucleotide
  Target: SCNA; (-) strand; PAM type: NRG; PAM sequence: GAG
atacataggagaagagatta

SEQ ID NO: 19763 - DNA, 20 bp, Artificial Sequence
  Description of Artificial Sequence: Synthetic oligonucleotide
  Target: SCNA; (-) strand; PAM type: NRG; PAM sequence: TAG
acatacataggagaagagat

SEQ ID NO: 19764 - DNA, 20 bp, Artificial Sequence
  Description of Artificial Sequence: Synthetic oligonucleotide
  Target: SCNA; (-) strand; PAM type: NRG; PAM sequence: GAG
tgatgacatacataggagaa

SEQ ID NO: 19765 - DNA, 20 bp, Artificial Sequence
  Description of Artificial Sequence: Synthetic oligonucleotide
  Target: SCNA; (-) strand; PAM type: NRG; PAM sequence: AAG
tctgatgacatacataggag

SEQ ID NO: 19766 - DNA, 20 bp, Artificial Sequence
  Description of Artificial Sequence: Synthetic oligonucleotide
  Target: SCNA; (-) strand; PAM type: NRG; PAM sequence: GAG
aagtctgatgacatacatag

SEQ ID NO: 19767 - DNA, 20 bp, Artificial Sequence
  Description of Artificial Sequence: Synthetic oligonucleotide
  Target: SCNA; (-) strand; PAM type: NRG; PAM sequence: AGG
gcaagtctgatgacatacat

SEQ ID NO: 19768 - DNA, 20 bp, Artificial Sequence
  Description of Artificial Sequence: Synthetic oligonucleotide
  Target: SCNA; (-) strand; PAM type: NRG; PAM sequence: TAG
tgcaagtctgatgacataca

SEQ ID NO: 19769 - DNA, 20 bp, Artificial Sequence
  Description of Artificial Sequence: Synthetic oligonucleotide
  Target: SCNA; (-) strand; PAM type: NRG; PAM sequence: AAG
ttgggtttagaaaaaattgc

SEQ ID NO: 19770 - DNA, 20 bp, Artificial Sequence
  Description of Artificial Sequence: Synthetic oligonucleotide
  Target: SCNA; (-) strand; PAM type: NRG; PAM sequence: TAG
gtgaaaacacattttgggtt

SEQ ID NO: 19771 - DNA, 20 bp, Artificial Sequence
  Description of Artificial Sequence: Synthetic oligonucleotide
  Target: SCNA; (-) strand; PAM type: NRG; PAM sequence: GGG
gactagtgaaaacacatttt

SEQ ID NO: 19772 - DNA, 20 bp, Artificial Sequence
  Description of Artificial Sequence: Synthetic oligonucleotide
  Target: SCNA; (-) strand; PAM type: NRG; PAM sequence: TGG
ggactagtgaaaacacattt

SEQ ID NO: 19773 - DNA, 20 bp, Artificial Sequence
  Description of Artificial Sequence: Synthetic oligonucleotide
  Target: SCNA; (-) strand; PAM type: NRG; PAM sequence: TAG
acagttttttaacaggggac

SEQ ID NO: 19774 - DNA, 20 bp, Artificial Sequence
  Description of Artificial Sequence: Synthetic oligonucleotide
  Target: SCNA; (-) strand; PAM type: NRG; PAM sequence: GGG
tgttgacagttttttaacag

SEQ ID NO: 19775 - DNA, 20 bp, Artificial Sequence
  Description of Artificial Sequence: Synthetic oligonucleotide
  Target: SCNA; (-) strand; PAM type: NRG; PAM sequence: GGG
gtgttgacagttttttaaca

SEQ ID NO: 19776 - DNA, 20 bp, Artificial Sequence
  Description of Artificial Sequence: Synthetic oligonucleotide
  Target: SCNA; (-) strand; PAM type: NRG; PAM sequence: AGG
tgtgttgacagttttttaac

SEQ ID NO: 19777 - DNA, 20 bp, Artificial Sequence
  Description of Artificial Sequence: Synthetic oligonucleotide
  Target: SCNA; (-) strand; PAM type: NRG; PAM sequence: CAG
atgtgttgacagttttttaa

SEQ ID NO: 19778 - DNA, 20 bp, Artificial Sequence
  Description of Artificial Sequence: Synthetic oligonucleotide
  Target: SCNA; (-) strand; PAM type: NRG; PAM sequence: CAG
gggcaatgtggatgtgttga

SEQ ID NO: 19779 - DNA, 20 bp, Artificial Sequence
  Description of Artificial Sequence: Synthetic oligonucleotide
  Target: SCNA; (-) strand; PAM type: NRG; PAM sequence: TGG
tctatagccagtgggcaatg

SEQ ID NO: 19780 - DNA, 20 bp, Artificial Sequence
  Description of Artificial Sequence: Synthetic oligonucleotide
  Target: SCNA; (-) strand; PAM type: NRG; PAM sequence: GGG
aattgaactctatagccagt

SEQ ID NO: 19781 - DNA, 20 bp, Artificial Sequence
  Description of Artificial Sequence: Synthetic oligonucleotide
  Target: SCNA; (-) strand; PAM type: NRG; PAM sequence: TGG
gaattgaactctatagccag

SEQ ID NO: 19782 - DNA, 20 bp, Artificial Sequence
  Description of Artificial Sequence: Synthetic oligonucleotide
  Target: SCNA; (-) strand; PAM type: NRG; PAM sequence: CAG
tttgaattgaactctatagc

SEQ ID NO: 19783 - DNA, 20 bp, Artificial Sequence
  Description of Artificial Sequence: Synthetic oligonucleotide
  Target: SCNA; (-) strand; PAM type: NRG; PAM sequence: TAG
ctagtttgaattgaactcta

SEQ ID NO: 19784 - DNA, 20 bp, Artificial Sequence
  Description of Artificial Sequence: Synthetic oligonucleotide
  Target: SCNA; (-) strand; PAM type: NRG; PAM sequence: TAG
gtccaagtagtgaatgactc

SEQ ID NO: 19785 - DNA, 20 bp, Artificial Sequence
  Description of Artificial Sequence: Synthetic oligonucleotide
  Target: SCNA; (-) strand; PAM type: NRG; PAM sequence: TAG
tgggaagctggttgtccaag

SEQ ID NO: 19786 - DNA, 20 bp, Artificial Sequence
  Description of Artificial Sequence: Synthetic oligonucleotide
  Target: SCNA; (-) strand; PAM type: NRG; PAM sequence: AAG
agctgggaagctggttgtcc

SEQ ID NO: 19787 - DNA, 20 bp, Artificial Sequence
  Description of Artificial Sequence: Synthetic oligonucleotide
  Target: SCNA; (-) strand; PAM type: NRG; PAM sequence: TGG
cagaggtggagctgggaagc

SEQ ID NO: 19788 - DNA, 20 bp, Artificial Sequence
  Description of Artificial Sequence: Synthetic oligonucleotide
  Target: SCNA; (-) strand; PAM type: NRG; PAM sequence: AAG
tacccagaggtggagctggg

SEQ ID NO: 19789 - DNA, 20 bp, Artificial Sequence
  Description of Artificial Sequence: Synthetic oligonucleotide
  Target: SCNA; (-) strand; PAM type: NRG; PAM sequence: GGG
gaatacccagaggtggagct

SEQ ID NO: 19790 - DNA, 20 bp, Artificial Sequence
  Description of Artificial Sequence: Synthetic oligonucleotide
  Target: SCNA; (-) strand; PAM type: NRG; PAM sequence: TGG
agaatacccagaggtggagc

SEQ ID NO: 19791 - DNA, 20 bp, Artificial Sequence
  Description of Artificial Sequence: Synthetic oligonucleotide
  Target: SCNA; (-) strand; PAM type: NRG; PAM sequence: GAG
agaaagaatacccagaggtg

SEQ ID NO: 19792 - DNA, 20 bp, Artificial Sequence
  Description of Artificial Sequence: Synthetic oligonucleotide
  Target: SCNA; (-) strand; PAM type: NRG; PAM sequence: TGG
agagaaagaatacccagagg

SEQ ID NO: 19793 - DNA, 20 bp, Artificial Sequence
  Description of Artificial Sequence: Synthetic oligonucleotide
  Target: SCNA; (-) strand; PAM type: NRG; PAM sequence: AGG
gcaagagaaagaatacccag

SEQ ID NO: 19794 - DNA, 20 bp, Artificial Sequence
  Description of Artificial Sequence: Synthetic oligonucleotide
  Target: SCNA; (-) strand; PAM type: NRG; PAM sequence: GAG
ggcaagagaaagaataccca

SEQ ID NO: 19795 - DNA, 20 bp, Artificial Sequence
  Description of Artificial Sequence: Synthetic oligonucleotide
  Target: SCNA; (-) strand; PAM type: NRG; PAM sequence: CAG
aaggcaagagaaagaatacc

SEQ ID NO: 19796 - DNA, 20 bp, Artificial Sequence
  Description of Artificial Sequence: Synthetic oligonucleotide
  Target: SCNA; (-) strand; PAM type: NRG; PAM sequence: AAG
accattctgaaggcaagaga

SEQ ID NO: 19797 - DNA, 20 bp, Artificial Sequence
  Description of Artificial Sequence: Synthetic oligonucleotide
  Target: SCNA; (-) strand; PAM type: NRG; PAM sequence: GAG
caacaccattctgaaggcaa

SEQ ID NO: 19798 - DNA, 20 bp, Artificial Sequence
  Description of Artificial Sequence: Synthetic oligonucleotide
  Target: SCNA; (-) strand; PAM type: NRG; PAM sequence: AAG
ctcaacaccattctgaaggc

SEQ ID NO: 19799 - DNA, 20 bp, Artificial Sequence
  Description of Artificial Sequence: Synthetic oligonucleotide
  Target: SCNA; (-) strand; PAM type: NRG; PAM sequence: AGG
tatcctcaacaccattctga

SEQ ID NO: 19800 - DNA, 20 bp, Artificial Sequence
  Description of Artificial Sequence: Synthetic oligonucleotide
  Target: SCNA; (-) strand; PAM type: NRG; PAM sequence: AAG
atatcctcaacaccattctg

SEQ ID NO: 19801 - DNA, 20 bp, Artificial Sequence
  Description of Artificial Sequence: Synthetic oligonucleotide
  Target: SCNA; (-) strand; PAM type: NRG; PAM sequence: TGG
tatgagctcactgagagcaa

SEQ ID NO: 19802 - DNA, 20 bp, Artificial Sequence
  Description of Artificial Sequence: Synthetic oligonucleotide
  Target: SCNA; (-) strand; PAM type: NRG; PAM sequence: GAG
ttagactatgagctcactga

SEQ ID NO: 19803 - DNA, 20 bp, Artificial Sequence
  Description of Artificial Sequence: Synthetic oligonucleotide
  Target: SCNA; (-) strand; PAM type: NRG; PAM sequence: GAG
acttagactatgagctcact

SEQ ID NO: 19804 - DNA, 20 bp, Artificial Sequence
  Description of Artificial Sequence: Synthetic oligonucleotide
  Target: SCNA; (-) strand; PAM type: NRG; PAM sequence: GAG
tgtctcctcacttagactat

SEQ ID NO: 19805 - DNA, 20 bp, Artificial Sequence
  Description of Artificial Sequence: Synthetic oligonucleotide
  Target: SCNA; (-) strand; PAM type: NRG; PAM sequence: TAG
tgctcatctgtctcctcact

SEQ ID NO: 19806 - DNA, 20 bp, Artificial Sequence
  Description of Artificial Sequence: Synthetic oligonucleotide
  Target: SCNA; (-) strand; PAM type: NRG; PAM sequence: TAG
atccttcctcttggttccca

SEQ ID NO: 19807 - DNA, 20 bp, Artificial Sequence
  Description of Artificial Sequence: Synthetic oligonucleotide
  Target: SCNA; (-) strand; PAM type: NRG; PAM sequence: TGG
ttattatatatccttcctct

SEQ ID NO: 19808 - DNA, 20 bp, Artificial Sequence
  Description of Artificial Sequence: Synthetic oligonucleotide
  Target: SCNA; (-) strand; PAM type: NRG; PAM sequence: TGG
tgaatcttctcttccttccc

SEQ ID NO: 19809 - DNA, 20 bp, Artificial Sequence
  Description of Artificial Sequence: Synthetic oligonucleotide
  Target: SCNA; (-) strand; PAM type: NRG; PAM sequence: AAG
agggcaattcatcctccagt

SEQ ID NO: 19810 - DNA, 20 bp, Artificial Sequence
  Description of Artificial Sequence: Synthetic oligonucleotide
  Target: SCNA; (-) strand; PAM type: NRG; PAM sequence: CAG
tctgagggcaattcatcctc

SEQ ID NO: 19811 - DNA, 20 bp, Artificial Sequence
  Description of Artificial Sequence: Synthetic oligonucleotide
  Target: SCNA; (-) strand; PAM type: NRG; PAM sequence: GGG
tacacttcaatactttctga

SEQ ID NO: 19812 - DNA, 20 bp, Artificial Sequence
  Description of Artificial Sequence: Synthetic oligonucleotide
  Target: SCNA; (-) strand; PAM type: NRG; PAM sequence: AGG
ctacacttcaatactttctg

SEQ ID NO: 19813 - DNA, 20 bp, Artificial Sequence
  Description of Artificial Sequence: Synthetic oligonucleotide
  Target: SCNA; (-) strand; PAM type: NRG; PAM sequence: GAG
cctacacttcaatactttct

SEQ ID NO: 19814 - DNA, 20 bp, Artificial Sequence
  Description of Artificial Sequence: Synthetic oligonucleotide
  Target: SCNA; (-) strand; PAM type: NRG; PAM sequence: TGG
tacccaggcttttcttattt

SEQ ID NO: 19815 - DNA, 20 bp, Artificial Sequence
  Description of Artificial Sequence: Synthetic oligonucleotide
  Target: SCNA; (-) strand; PAM type: NRG; PAM sequence: AGG
ttctcttggcagtattaccc

SEQ ID NO: 19816 - DNA, 20 bp, Artificial Sequence
  Description of Artificial Sequence: Synthetic oligonucleotide
  Target: SCNA; (-) strand; PAM type: NRG; PAM sequence: CAG
tttctcttggcagtattacc

SEQ ID NO: 19817 - DNA, 20 bp, Artificial Sequence
  Description of Artificial Sequence: Synthetic oligonucleotide
  Target: SCNA; (-) strand; PAM type: NRG; PAM sequence: CAG
taattgtagatttctcttgg

SEQ ID NO: 19818 - DNA, 20 bp, Artificial Sequence
  Description of Artificial Sequence: Synthetic oligonucleotide
  Target: SCNA; (-) strand; PAM type: NRG; PAM sequence: TGG
atttaattgtagatttctct

SEQ ID NO: 19819 - DNA, 20 bp, Artificial Sequence
  Description of Artificial Sequence: Synthetic oligonucleotide
  Target: SCNA; (-) strand; PAM type: NRG; PAM sequence: TAG
atgggaattgcatttaattg

SEQ ID NO: 19820 - DNA, 20 bp, Artificial Sequence
  Description of Artificial Sequence: Synthetic oligonucleotide
  Target: SCNA; (-) strand; PAM type: NRG; PAM sequence: GGG
aatgatggtggtattttgat

SEQ ID NO: 19821 - DNA, 20 bp, Artificial Sequence
  Description of Artificial Sequence: Synthetic oligonucleotide
  Target: SCNA; (-) strand; PAM type: NRG; PAM sequence: TGG
gaatgatggtggtattttga

SEQ ID NO: 19822 - DNA, 20 bp, Artificial Sequence
  Description of Artificial Sequence: Synthetic oligonucleotide
  Target: SCNA; (-) strand; PAM type: NRG; PAM sequence: TGG
agttctgtgaagaatgatgg

SEQ ID NO: 19823 - DNA, 20 bp, Artificial Sequence
  Description of Artificial Sequence: Synthetic oligonucleotide
  Target: SCNA; (-) strand; PAM type: NRG; PAM sequence: TGG
tctagttctgtgaagaatga

SEQ ID NO: 19824 - DNA, 20 bp, Artificial Sequence
  Description of Artificial Sequence: Synthetic oligonucleotide
  Target: SCNA; (-) strand; PAM type: NRG; PAM sequence: AAG
ttgttttttctagttctgtg

SEQ ID NO: 19825 - DNA, 20 bp, Artificial Sequence
  Description of Artificial Sequence: Synthetic oligonucleotide
  Target: SCNA; (-) strand; PAM type: NRG; PAM sequence: TAG
aattttaggattgttttttc

SEQ ID NO: 19826 - DNA, 20 bp, Artificial Sequence
  Description of Artificial Sequence: Synthetic oligonucleotide
  Target: SCNA; (-) strand; PAM type: NRG; PAM sequence: AGG
tttggttccatatgaatttt

SEQ ID NO: 19827 - DNA, 20 bp, Artificial Sequence
  Description of Artificial Sequence: Synthetic oligonucleotide
  Target: SCNA; (-) strand; PAM type: NRG; PAM sequence: TAG
ttttggttccatatgaattt

SEQ ID NO: 19828 - DNA, 20 bp, Artificial Sequence
  Description of Artificial Sequence: Synthetic oligonucleotide
  Target: SCNA; (-) strand; PAM type: NRG; PAM sequence: TGG
tggctatgtgggctcttttt

SEQ ID NO: 19829 - DNA, 20 bp, Artificial Sequence
  Description of Artificial Sequence: Synthetic oligonucleotide
  Target: SCNA; (-) strand; PAM type: NRG; PAM sequence: GGG
taatcttgctttggctatgt

SEQ ID NO: 19830 - DNA, 20 bp, Artificial Sequence
  Description of Artificial Sequence: Synthetic oligonucleotide
  Target: SCNA; (-) strand; PAM type: NRG; PAM sequence: TGG
ttaatcttgctttggctatg

SEQ ID NO: 19831 - DNA, 20 bp, Artificial Sequence
  Description of Artificial Sequence: Synthetic oligonucleotide
  Target: SCNA; (-) strand; PAM type: NRG; PAM sequence: TGG
ctttttgcttaatcttgctt

SEQ ID NO: 19832 - DNA, 20 bp, Artificial Sequence
  Description of Artificial Sequence: Synthetic oligonucleotide
  Target: SCNA; (-) strand; PAM type: NRG; PAM sequence: CAG
agcaggtaatgtgatgcctc

SEQ ID NO: 19833 - DNA, 20 bp, Artificial Sequence
  Description of Artificial Sequence: Synthetic oligonucleotide
  Target: SCNA; (-) strand; PAM type: NRG; PAM sequence: AGG
ttatagtatagtttgaaagc

SEQ ID NO: 19834 - DNA, 20 bp, Artificial Sequence
  Description of Artificial Sequence: Synthetic oligonucleotide
  Target: SCNA; (-) strand; PAM type: NRG; PAM sequence: CAG
cttatagtatagtttgaaag

SEQ ID NO: 19835 - DNA, 20 bp, Artificial Sequence
  Description of Artificial Sequence: Synthetic oligonucleotide
  Target: SCNA; (-) strand; PAM type: NRG; PAM sequence: AAG
ggccttatagtatagtttga

SEQ ID NO: 19836 - DNA, 20 bp, Artificial Sequence
  Description of Artificial Sequence: Synthetic oligonucleotide
  Target: SCNA; (-) strand; PAM type: NRG; PAM sequence: TAG
gtgactatggccttatagta

SEQ ID NO: 19837 - DNA, 20 bp, Artificial Sequence
  Description of Artificial Sequence: Synthetic oligonucleotide
  Target: SCNA; (-) strand; PAM type: NRG; PAM sequence: TAG
ttttggtgactatggcctta

SEQ ID NO: 19838 - DNA, 20 bp, Artificial Sequence
  Description of Artificial Sequence: Synthetic oligonucleotide
  Target: SCNA; (-) strand; PAM type: NRG; PAM sequence: TGG
ccatgctgttttggtgacta

SEQ ID NO: 19839 - DNA, 20 bp, Artificial Sequence
  Description of Artificial Sequence: Synthetic oligonucleotide
  Target: SCNA; (-) strand; PAM type: NRG; PAM sequence: TGG
ataccagtgccatgctgttt

SEQ ID NO: 19840 - DNA, 20 bp, Artificial Sequence
  Description of Artificial Sequence: Synthetic oligonucleotide
  Target: SCNA; (-) strand; PAM type: NRG; PAM sequence: CAG
ctgtgtgcctatttttatac

SEQ ID NO: 19841 - DNA, 20 bp, Artificial Sequence
  Description of Artificial Sequence: Synthetic oligonucleotide
  Target: SCNA; (-) strand; PAM type: NRG; PAM sequence: TGG
ggttctctattctgttttat

SEQ ID NO: 19842 - DNA, 20 bp, Artificial Sequence
  Description of Artificial Sequence: Synthetic oligonucleotide
  Target: SCNA; (-) strand; PAM type: NRG; PAM sequence: AGG
tagcatttgggtttatttct

SEQ ID NO: 19843 - DNA, 20 bp, Artificial Sequence
  Description of Artificial Sequence: Synthetic oligonucleotide
  Target: SCNA; (-) strand; PAM type: NRG; PAM sequence: TAG
ttagcatttgggtttatttc

SEQ ID NO: 19844 - DNA, 20 bp, Artificial Sequence
  Description of Artificial Sequence: Synthetic oligonucleotide
  Target: SCNA; (-) strand; PAM type: NRG; PAM sequence: GGG
tcacttggctgttagcattt

SEQ ID NO: 19845 - DNA, 20 bp, Artificial Sequence
  Description of Artificial Sequence: Synthetic oligonucleotide
  Target: SCNA; (-) strand; PAM type: NRG; PAM sequence: TGG
atcacttggctgttagcatt

SEQ ID NO: 19846 - DNA, 20 bp, Artificial Sequence
  Description of Artificial Sequence: Synthetic oligonucleotide
  Target: SCNA; (-) strand; PAM type: NRG; PAM sequence: TAG
gtcaaagatcacttggctgt

SEQ ID NO: 19847 - DNA, 20 bp, Artificial Sequence
  Description of Artificial Sequence: Synthetic oligonucleotide
  Target: SCNA; (-) strand; PAM type: NRG; PAM sequence: TGG
ttgctttgtcaaagatcact

SEQ ID NO: 19848 - DNA, 20 bp, Artificial Sequence
  Description of Artificial Sequence: Synthetic oligonucleotide
  Target: SCNA; (-) strand; PAM type: NRG; PAM sequence: AAG
tgtttttatttgctttgtca

SEQ ID NO: 19849 - DNA, 20 bp, Artificial Sequence
  Description of Artificial Sequence: Synthetic oligonucleotide
  Target: SCNA; (-) strand; PAM type: NRG; PAM sequence: AAG
agtttacaatatacaacaaa

SEQ ID NO: 19850 - DNA, 20 bp, Artificial Sequence
  Description of Artificial Sequence: Synthetic oligonucleotide
  Target: SCNA; (-) strand; PAM type: NRG; PAM sequence: TAG
ttgccactaatatttaaaaa

SEQ ID NO: 19851 - DNA, 20 bp, Artificial Sequence
  Description of Artificial Sequence: Synthetic oligonucleotide
  Target: SCNA; (-) strand; PAM type: NRG; PAM sequence: TAG
ttgggaatatttatccatat

SEQ ID NO: 19852 - DNA, 20 bp, Artificial Sequence
  Description of Artificial Sequence: Synthetic oligonucleotide
  Target: SCNA; (-) strand; PAM type: NRG; PAM sequence: GGG
acatcaaatatcaaattgtt

SEQ ID NO: 19853 - DNA, 20 bp, Artificial Sequence
  Description of Artificial Sequence: Synthetic oligonucleotide
  Target: SCNA; (-) strand; PAM type: NRG; PAM sequence: TGG
gacatcaaatatcaaattgt

SEQ ID NO: 19854 - DNA, 20 bp, Artificial Sequence
  Description of Artificial Sequence: Synthetic oligonucleotide
  Target: SCNA; (-) strand; PAM type: NRG; PAM sequence: GGG
aaccaatctcacaatagttt

SEQ ID NO: 19855 - DNA, 20 bp, Artificial Sequence
  Description of Artificial Sequence: Synthetic oligonucleotide
  Target: SCNA; (-) strand; PAM type: NRG; PAM sequence: TGG
taaccaatctcacaatagtt

SEQ ID NO: 19856 - DNA, 20 bp, Artificial Sequence
  Description of Artificial Sequence: Synthetic oligonucleotide
  Target: SCNA; (-) strand; PAM type: NRG; PAM sequence: TAG
tattataaccaatctcacaa

SEQ ID NO: 19857 - DNA, 20 bp, Artificial Sequence
  Description of Artificial Sequence: Synthetic oligonucleotide
  Target: SCNA; (-) strand; PAM type: NRG; PAM sequence: TAG
ttcatgggaaatcagcaggg

SEQ ID NO: 19858 - DNA, 20 bp, Artificial Sequence
  Description of Artificial Sequence: Synthetic oligonucleotide
  Target: SCNA; (-) strand; PAM type: NRG; PAM sequence: GGG
agcttcatgggaaatcagca

SEQ ID NO: 19859 - DNA, 20 bp, Artificial Sequence
  Description of Artificial Sequence: Synthetic oligonucleotide
  Target: SCNA; (-) strand; PAM type: NRG; PAM sequence: AGG
aagcttcatgggaaatcagc

SEQ ID NO: 19860 - DNA, 20 bp, Artificial Sequence
  Description of Artificial Sequence: Synthetic oligonucleotide
  Target: SCNA; (-) strand; PAM type: NRG; PAM sequence: CAG
taagcttcatgggaaatcag

SEQ ID NO: 19861 - DNA, 20 bp, Artificial Sequence
  Description of Artificial Sequence: Synthetic oligonucleotide
  Target: SCNA; (-) strand; PAM type: NRG; PAM sequence: CAG
ggttaagcttcatgggaaat

SEQ ID NO: 19862 - DNA, 20 bp, Artificial Sequence
  Description of Artificial Sequence: Synthetic oligonucleotide
  Target: SCNA; (-) strand; PAM type: NRG; PAM sequence: GGG
gagagagggttaagcttcat

SEQ ID NO: 19863 - DNA, 20 bp, Artificial Sequence
  Description of Artificial Sequence: Synthetic oligonucleotide
  Target: SCNA; (-) strand; PAM type: NRG; PAM sequence: TGG
tgagagagggttaagcttca

SEQ ID NO: 19864 - DNA, 20 bp, Artificial Sequence
  Description of Artificial Sequence: Synthetic oligonucleotide
  Target: SCNA; (-) strand; PAM type: NRG; PAM sequence: AAG
ctgaaatgtgagagagggtt

SEQ ID NO: 19865 - DNA, 20 bp, Artificial Sequence
  Description of Artificial Sequence: Synthetic oligonucleotide
  Target: SCNA; (-) strand; PAM type: NRG; PAM sequence: GGG
tggttctgaaatgtgagaga

SEQ ID NO: 19866 - DNA, 20 bp, Artificial Sequence
  Description of Artificial Sequence: Synthetic oligonucleotide
  Target: SCNA; (-) strand; PAM type: NRG; PAM sequence: AGG
ctggttctgaaatgtgagag

SEQ ID NO: 19867 - DNA, 20 bp, Artificial Sequence
  Description of Artificial Sequence: Synthetic oligonucleotide
  Target: SCNA; (-) strand; PAM type: NRG; PAM sequence: GAG
gctggttctgaaatgtgaga

SEQ ID NO: 19868 - DNA, 20 bp, Artificial Sequence
  Description of Artificial Sequence: Synthetic oligonucleotide
  Target: SCNA; (-) strand; PAM type: NRG; PAM sequence: GAG
aggctggttctgaaatgtga

SEQ ID NO: 19869 - DNA, 20 bp, Artificial Sequence
  Description of Artificial Sequence: Synthetic oligonucleotide
  Target: SCNA; (-) strand; PAM type: NRG; PAM sequence: GAG
tcaggctggttctgaaatgt

SEQ ID NO: 19870 - DNA, 20 bp, Artificial Sequence
  Description of Artificial Sequence: Synthetic oligonucleotide
  Target: SCNA; (-) strand; PAM type: NRG; PAM sequence: TGG
tgtagaggcttaagtcaggc

SEQ ID NO: 19871 - DNA, 20 bp, Artificial Sequence
  Description of Artificial Sequence: Synthetic oligonucleotide
  Target: SCNA; (-) strand; PAM type: NRG; PAM sequence: AGG
agtatgtagaggcttaagtc

SEQ ID NO: 19872 - DNA, 20 bp, Artificial Sequence
  Description of Artificial Sequence: Synthetic oligonucleotide
  Target: SCNA; (-) strand; PAM type: NRG; PAM sequence: CAG
aagtatgtagaggcttaagt

SEQ ID NO: 19873 - DNA, 20 bp, Artificial Sequence
  Description of Artificial Sequence: Synthetic oligonucleotide
  Target: SCNA; (-) strand; PAM type: NRG; PAM sequence: AAG
gtttaagtatgtagaggctt

SEQ ID NO: 19874 - DNA, 20 bp, Artificial Sequence
  Description of Artificial Sequence: Synthetic oligonucleotide
  Target: SCNA; (-) strand; PAM type: NRG; PAM sequence: AGG
gaagctgtttaagtatgtag

SEQ ID NO: 19875 - DNA, 20 bp, Artificial Sequence
  Description of Artificial Sequence: Synthetic oligonucleotide
  Target: SCNA; (-) strand; PAM type: NRG; PAM sequence: GAG
tgaagctgtttaagtatgta

SEQ ID NO: 19876 - DNA, 20 bp, Artificial Sequence
  Description of Artificial Sequence: Synthetic oligonucleotide
  Target: SCNA; (-) strand; PAM type: NRG; PAM sequence: TAG
tttgaagctgtttaagtatg

SEQ ID NO: 19877 - DNA, 20 bp, Artificial Sequence
  Description of Artificial Sequence: Synthetic oligonucleotide
  Target: SCNA; (-) strand; PAM type: NRG; PAM sequence: AAG
ataggcatttgaagctgttt

SEQ ID NO: 19878 - DNA, 20 bp, Artificial Sequence
  Description of Artificial Sequence: Synthetic oligonucleotide
  Target: SCNA; (-) strand; PAM type: NRG; PAM sequence: AAG
ctgtctcagataggcatttg

SEQ ID NO: 19879 - DNA, 20 bp, Artificial Sequence
  Description of Artificial Sequence: Synthetic oligonucleotide
  Target: SCNA; (-) strand; PAM type: NRG; PAM sequence: AGG
attacaaagctgtctcagat

SEQ ID NO: 19880 - DNA, 20 bp, Artificial Sequence
  Description of Artificial Sequence: Synthetic oligonucleotide
  Target: SCNA; (-) strand; PAM type: NRG; PAM sequence: TAG
cattacaaagctgtctcaga

SEQ ID NO: 19881 - DNA, 20 bp, Artificial Sequence
  Description of Artificial Sequence: Synthetic oligonucleotide
  Target: SCNA; (-) strand; PAM type: NRG; PAM sequence: CAG
gacccattacaaagctgtct

SEQ ID NO: 19882 - DNA, 20 bp, Artificial Sequence
  Description of Artificial Sequence: Synthetic oligonucleotide
  Target: SCNA; (-) strand; PAM type: NRG; PAM sequence: AAG
aggggcagagacccattaca

SEQ ID NO: 19883 - DNA, 20 bp, Artificial Sequence
  Description of Artificial Sequence: Synthetic oligonucleotide
  Target: SCNA; (-) strand; PAM type: NRG; PAM sequence: GAG
tggacagagaaacaggggca

SEQ ID NO: 19884 - DNA, 20 bp, Artificial Sequence
  Description of Artificial Sequence: Synthetic oligonucleotide
  Target: SCNA; (-) strand; PAM type: NRG; PAM sequence: CAG
tgtggacagagaaacagggg

SEQ ID NO: 19885 - DNA, 20 bp, Artificial Sequence
  Description of Artificial Sequence: Synthetic oligonucleotide
  Target: SCNA; (-) strand; PAM type: NRG; PAM sequence: GGG
tcttgtggacagagaaacag

SEQ ID NO: 19886 - DNA, 20 bp, Artificial Sequence
  Description of Artificial Sequence: Synthetic oligonucleotide
  Target: SCNA; (-) strand; PAM type: NRG; PAM sequence: GGG
ctcttgtggacagagaaaca

SEQ ID NO: 19887 - DNA, 20 bp, Artificial Sequence
  Description of Artificial Sequence: Synthetic oligonucleotide
  Target: SCNA; (-) strand; PAM type: NRG; PAM sequence: AGG
cctcttgtggacagagaaac

SEQ ID NO: 19888 - DNA, 20 bp, Artificial Sequence
  Description of Artificial Sequence: Synthetic oligonucleotide
  Target: SCNA; (-) strand; PAM type: NRG; PAM sequence: CAG
acctcttgtggacagagaaa

SEQ ID NO: 19889 - DNA, 20 bp, Artificial Sequence
  Description of Artificial Sequence: Synthetic oligonucleotide
  Target: SCNA; (-) strand; PAM type: NRG; PAM sequence: GAG
attagtacctcttgtggaca

SEQ ID NO: 19890 - DNA, 20 bp, Artificial Sequence
  Description of Artificial Sequence: Synthetic oligonucleotide
  Target: SCNA; (-) strand; PAM type: NRG; PAM sequence: CAG
gaattagtacctcttgtgga

SEQ ID NO: 19891 - DNA, 20 bp, Artificial Sequence
  Description of Artificial Sequence: Synthetic oligonucleotide
  Target: SCNA; (-) strand; PAM type: NRG; PAM sequence: TGG
aagtgaattagtacctcttg

SEQ ID NO: 19892 - DNA, 20 bp, Artificial Sequence
  Description of Artificial Sequence: Synthetic oligonucleotide
  Target: SCNA; (-) strand; PAM type: NRG; PAM sequence: TAG
acaactgaagagaagtgaat

SEQ ID NO: 19893 - DNA, 20 bp, Artificial Sequence
  Description of Artificial Sequence: Synthetic oligonucleotide
  Target: SCNA; (-) strand; PAM type: NRG; PAM sequence: AAG
taggtctaacaactgaagag

SEQ ID NO: 19894 - DNA, 20 bp, Artificial Sequence
  Description of Artificial Sequence: Synthetic oligonucleotide
  Target: SCNA; (-) strand; PAM type: NRG; PAM sequence: GAG
tcctaggtctaacaactgaa

SEQ ID NO: 19895 - DNA, 20 bp, Artificial Sequence
  Description of Artificial Sequence: Synthetic oligonucleotide
  Target: SCNA; (-) strand; PAM type: NRG; PAM sequence: AAG
tgtcctaggtctaacaactg

SEQ ID NO: 19896 - DNA, 20 bp, Artificial Sequence
  Description of Artificial Sequence: Synthetic oligonucleotide
  Target: SCNA; (-) strand; PAM type: NRG; PAM sequence: AGG
cttggtgtctattgtgtcct

SEQ ID NO: 19897 - DNA, 20 bp, Artificial Sequence
  Description of Artificial Sequence: Synthetic oligonucleotide
  Target: SCNA; (-) strand; PAM type: NRG; PAM sequence: TAG
acttggtgtctattgtgtcc

SEQ ID NO: 19898 - DNA, 20 bp, Artificial Sequence
  Description of Artificial Sequence: Synthetic oligonucleotide
  Target: SCNA; (-) strand; PAM type: NRG; PAM sequence: TGG
cacctaacagaaatgtaact

SEQ ID NO: 19899 - DNA, 20 bp, Artificial Sequence
  Description of Artificial Sequence: Synthetic oligonucleotide
  Target: SCNA; (-) strand; PAM type: NRG; PAM sequence: CAG
cacttccaagatgcacctaa

SEQ ID NO: 19900 - DNA, 20 bp, Artificial Sequence
  Description of Artificial Sequence: Synthetic oligonucleotide
  Target: SCNA; (-) strand; PAM type: NRG; PAM sequence: AAG
gtcagttctcaggcacttcc

SEQ ID NO: 19901 - DNA, 20 bp, Artificial Sequence
  Description of Artificial Sequence: Synthetic oligonucleotide
  Target: SCNA; (-) strand; PAM type: NRG; PAM sequence: AGG
gtgcccagtggtcagttctc

SEQ ID NO: 19902 - DNA, 20 bp, Artificial Sequence
  Description of Artificial Sequence: Synthetic oligonucleotide
  Target: SCNA; (-) strand; PAM type: NRG; PAM sequence: CAG
ggtgcccagtggtcagttct

SEQ ID NO: 19903 - DNA, 20 bp, Artificial Sequence
  Description of Artificial Sequence: Synthetic oligonucleotide
  Target: SCNA; (-) strand; PAM type: NRG; PAM sequence: CAG
aaaggtaggtgcccagtggt

SEQ ID NO: 19904 - DNA, 20 bp, Artificial Sequence
  Description of Artificial Sequence: Synthetic oligonucleotide
  Target: SCNA; (-) strand; PAM type: NRG; PAM sequence: TGG
gtaaaaaggtaggtgcccag

SEQ ID NO: 19905 - DNA, 20 bp, Artificial Sequence
  Description of Artificial Sequence: Synthetic oligonucleotide
  Target: SCNA; (-) strand; PAM type: NRG; PAM sequence: CAG
taggtaaaaaggtaggtgcc

SEQ ID NO: 19906 - DNA, 20 bp, Artificial Sequence
  Description of Artificial Sequence: Synthetic oligonucleotide
  Target: SCNA; (-) strand; PAM type: NRG; PAM sequence: AGG
agagacttaggtaaaaaggt

SEQ ID NO: 19907 - DNA, 20 bp, Artificial Sequence
  Description of Artificial Sequence: Synthetic oligonucleotide
  Target: SCNA; (-) strand; PAM type: NRG; PAM sequence: TAG
cagagacttaggtaaaaagg

SEQ ID NO: 19908 - DNA, 20 bp, Artificial Sequence
  Description of Artificial Sequence: Synthetic oligonucleotide
  Target: SCNA; (-) strand; PAM type: NRG; PAM sequence: AGG
taacagagacttaggtaaaa

SEQ ID NO: 19909 - DNA, 20 bp, Artificial Sequence
  Description of Artificial Sequence: Synthetic oligonucleotide
  Target: SCNA; (-) strand; PAM type: NRG; PAM sequence: AAG
ttaacagagacttaggtaaa

SEQ ID NO: 19910 - DNA, 20 bp, Artificial Sequence
  Description of Artificial Sequence: Synthetic oligonucleotide
  Target: SCNA; (-) strand; PAM type: NRG; PAM sequence: AGG
accaacattaacagagactt

SEQ ID NO: 19911 - DNA, 20 bp, Artificial Sequence
  Description of Artificial Sequence: Synthetic oligonucleotide
  Target: SCNA; (-) strand; PAM type: NRG; PAM sequence: TAG
gaccaacattaacagagact

SEQ ID NO: 19912 - DNA, 20 bp, Artificial Sequence
  Description of Artificial Sequence: Synthetic oligonucleotide
  Target: SCNA; (-) strand; PAM type: NRG; PAM sequence: GAG
taaacagaccaacattaaca

SEQ ID NO: 19913 - DNA, 20 bp, Artificial Sequence
  Description of Artificial Sequence: Synthetic oligonucleotide
  Target: SCNA; (-) strand; PAM type: NRG; PAM sequence: CAG
ggtaaacagaccaacattaa

SEQ ID NO: 19914 - DNA, 20 bp, Artificial Sequence
  Description of Artificial Sequence: Synthetic oligonucleotide
  Target: SCNA; (-) strand; PAM type: NRG; PAM sequence: CAG
ctccactactaacaggtaaa

SEQ ID NO: 19915 - DNA, 20 bp, Artificial Sequence
  Description of Artificial Sequence: Synthetic oligonucleotide
  Target: SCNA; (-) strand; PAM type: NRG; PAM sequence: AGG
caccaggctccactactaac

SEQ ID NO: 19916 - DNA, 20 bp, Artificial Sequence
  Description of Artificial Sequence: Synthetic oligonucleotide
  Target: SCNA; (-) strand; PAM type: NRG; PAM sequence: CAG
gcaccaggctccactactaa

SEQ ID NO: 19917 - DNA, 20 bp, Artificial Sequence
  Description of Artificial Sequence: Synthetic oligonucleotide
  Target: SCNA; (-) strand; PAM type: NRG; PAM sequence: AGG
aggagataattctatgcacc

SEQ ID NO: 19918 - DNA, 20 bp, Artificial Sequence
  Description of Artificial Sequence: Synthetic oligonucleotide
  Target: SCNA; (-) strand; PAM type: NRG; PAM sequence: CAG
aaggagataattctatgcac

SEQ ID NO: 19919 - DNA, 20 bp, Artificial Sequence
  Description of Artificial Sequence: Synthetic oligonucleotide
  Target: SCNA; (-) strand; PAM type: NRG; PAM sequence: GAG
tgtgggacacagatggcaag

SEQ ID NO: 19920 - DNA, 20 bp, Artificial Sequence
  Description of Artificial Sequence: Synthetic oligonucleotide
  Target: SCNA; (-) strand; PAM type: NRG; PAM sequence: AGG
gttgtgggacacagatggca

SEQ ID NO: 19921 - DNA, 20 bp, Artificial Sequence
  Description of Artificial Sequence: Synthetic oligonucleotide
  Target: SCNA; (-) strand; PAM type: NRG; PAM sequence: AAG
tgttgtgggacacagatggc

SEQ ID NO: 19922 - DNA, 20 bp, Artificial Sequence
  Description of Artificial Sequence: Synthetic oligonucleotide
  Target: SCNA; (-) strand; PAM type: NRG; PAM sequence: TGG
tatgtgttgtgggacacaga

SEQ ID NO: 19923 - DNA, 20 bp, Artificial Sequence
  Description of Artificial Sequence: Synthetic oligonucleotide
  Target: SCNA; (-) strand; PAM type: NRG; PAM sequence: CAG
tatatatgtgttgtgggaca

SEQ ID NO: 19924 - DNA, 20 bp, Artificial Sequence
  Description of Artificial Sequence: Synthetic oligonucleotide
  Target: SCNA; (-) strand; PAM type: NRG; PAM sequence: GGG
gggggttatatatgtgttgt

SEQ ID NO: 19925 - DNA, 20 bp, Artificial Sequence
  Description of Artificial Sequence: Synthetic oligonucleotide
  Target: SCNA; (-) strand; PAM type: NRG; PAM sequence: TGG
agggggttatatatgtgttg

SEQ ID NO: 19926 - DNA, 20 bp, Artificial Sequence
  Description of Artificial Sequence: Synthetic oligonucleotide
  Target: SCNA; (-) strand; PAM type: NRG; PAM sequence: GGG
ggcctcatatgccatgcagg

SEQ ID NO: 19927 - DNA, 20 bp, Artificial Sequence
  Description of Artificial Sequence: Synthetic oligonucleotide
  Target: SCNA; (-) strand; PAM type: NRG; PAM sequence: GGG
aggcctcatatgccatgcag

SEQ ID NO: 19928 - DNA, 20 bp, Artificial Sequence
  Description of Artificial Sequence: Synthetic oligonucleotide
  Target: SCNA; (-) strand; PAM type: NRG; PAM sequence: GGG
aaggcctcatatgccatgca

SEQ ID NO: 19929 - DNA, 20 bp, Artificial Sequence
  Description of Artificial Sequence: Synthetic oligonucleotide
  Target: SCNA; (-) strand; PAM type: NRG; PAM sequence: AGG
aaaggcctcatatgccatgc

SEQ ID NO: 19930 - DNA, 20 bp, Artificial Sequence
  Description of Artificial Sequence: Synthetic oligonucleotide
  Target: SCNA; (-) strand; PAM type: NRG; PAM sequence: CAG
gaaaggcctcatatgccatg

SEQ ID NO: 19931 - DNA, 20 bp, Artificial Sequence
  Description of Artificial Sequence: Synthetic oligonucleotide
  Target: SCNA; (-) strand; PAM type: NRG; PAM sequence: AGG
aaaagcacccctctcaggaa

SEQ ID NO: 19932 - DNA, 20 bp, Artificial Sequence
  Description of Artificial Sequence: Synthetic oligonucleotide
  Target: SCNA; (-) strand; PAM type: NRG; PAM sequence: AAG
taaaagcacccctctcagga

SEQ ID NO: 19933 - DNA, 20 bp, Artificial Sequence
  Description of Artificial Sequence: Synthetic oligonucleotide
  Target: SCNA; (-) strand; PAM type: NRG; PAM sequence: AGG
ggcttaaaagcacccctctc

SEQ ID NO: 19934 - DNA, 20 bp, Artificial Sequence
  Description of Artificial Sequence: Synthetic oligonucleotide
  Target: SCNA; (-) strand; PAM type: NRG; PAM sequence: CAG
tggcttaaaagcacccctct

SEQ ID NO: 19935 - DNA, 20 bp, Artificial Sequence
  Description of Artificial Sequence: Synthetic oligonucleotide
  Target: SCNA; (-) strand; PAM type: NRG; PAM sequence: AAG
tctctggaatgttggcttaa

SEQ ID NO: 19936 - DNA, 20 bp, Artificial Sequence
  Description of Artificial Sequence: Synthetic oligonucleotide
  Target: SCNA; (-) strand; PAM type: NRG; PAM sequence: TGG
gaactaggtctctggaatgt

SEQ ID NO: 19937 - DNA, 20 bp, Artificial Sequence
  Description of Artificial Sequence: Synthetic oligonucleotide
  Target: SCNA; (-) strand; PAM type: NRG; PAM sequence: TGG
gggcaggggaactaggtctc

SEQ ID NO: 19938 - DNA, 20 bp, Artificial Sequence
  Description of Artificial Sequence: Synthetic oligonucleotide
  Target: SCNA; (-) strand; PAM type: NRG; PAM sequence: AGG
gcacctggggcaggggaact

SEQ ID NO: 19939 - DNA, 20 bp, Artificial Sequence
  Description of Artificial Sequence: Synthetic oligonucleotide
  Target: SCNA; (-) strand; PAM type: NRG; PAM sequence: TAG
ggcacctggggcaggggaac

SEQ ID NO: 19940 - DNA, 20 bp, Artificial Sequence
  Description of Artificial Sequence: Synthetic oligonucleotide
  Target: SCNA; (-) strand; PAM type: NRG; PAM sequence: GGG
aactgaggcacctggggcag

SEQ ID NO: 19941 - DNA, 20 bp, Artificial Sequence
  Description of Artificial Sequence: Synthetic oligonucleotide
  Target: SCNA; (-) strand; PAM type: NRG; PAM sequence: GGG
aaactgaggcacctggggca

SEQ ID NO: 19942 - DNA, 20 bp, Artificial Sequence
  Description of Artificial Sequence: Synthetic oligonucleotide
  Target: SCNA; (-) strand; PAM type: NRG; PAM sequence: AGG
aaaactgaggcacctggggc

SEQ ID NO: 19943 - DNA, 20 bp, Artificial Sequence
  Description of Artificial Sequence: Synthetic oligonucleotide
  Target: SCNA; (-) strand; PAM type: NRG; PAM sequence: CAG
aaaaactgaggcacctgggg

SEQ ID NO: 19944 - DNA, 20 bp, Artificial Sequence
  Description of Artificial Sequence: Synthetic oligonucleotide
  Target: SCNA; (-) strand; PAM type: NRG; PAM sequence: GGG
tgtaaaaactgaggcacctg

SEQ ID NO: 19945 - DNA, 20 bp, Artificial Sequence
  Description of Artificial Sequence: Synthetic oligonucleotide
  Target: SCNA; (-) strand; PAM type: NRG; PAM sequence: GGG
gtgtaaaaactgaggcacct

SEQ ID NO: 19946 - DNA, 20 bp, Artificial Sequence
  Description of Artificial Sequence: Synthetic oligonucleotide
  Target: SCNA; (-) strand; PAM type: NRG; PAM sequence: TGG
ggtgtaaaaactgaggcacc

SEQ ID NO: 19947 - DNA, 20 bp, Artificial Sequence
  Description of Artificial Sequence: Synthetic oligonucleotide
  Target: SCNA; (-) strand; PAM type: NRG; PAM sequence: AGG
catcctaggtgtaaaaactg

SEQ ID NO: 19948 - DNA, 20 bp, Artificial Sequence
  Description of Artificial Sequence: Synthetic oligonucleotide
  Target: SCNA; (-) strand; PAM type: NRG; PAM sequence: GAG
gcatcctaggtgtaaaaact

SEQ ID NO: 19949 - DNA, 20 bp, Artificial Sequence
  Description of Artificial Sequence: Synthetic oligonucleotide
  Target: SCNA; (-) strand; PAM type: NRG; PAM sequence: AGG
aagattcaaaatagcatcct

SEQ ID NO: 19950 - DNA, 20 bp, Artificial Sequence
  Description of Artificial Sequence: Synthetic oligonucleotide
  Target: SCNA; (-) strand; PAM type: NRG; PAM sequence: TAG
gaagattcaaaatagcatcc

SEQ ID NO: 19951 - DNA, 20 bp, Artificial Sequence
  Description of Artificial Sequence: Synthetic oligonucleotide
  Target: SCNA; (-) strand; PAM type: NRG; PAM sequence: TAG
attgaggagaagattcaaaa

SEQ ID NO: 19952 - DNA, 20 bp, Artificial Sequence
  Description of Artificial Sequence: Synthetic oligonucleotide
  Target: SCNA; (-) strand; PAM type: NRG; PAM sequence: AAG
agatacttgtcattgaggag

SEQ ID NO: 19953 - DNA, 20 bp, Artificial Sequence
  Description of Artificial Sequence: Synthetic oligonucleotide
  Target: SCNA; (-) strand; PAM type: NRG; PAM sequence: GAG
tacagatacttgtcattgag

SEQ ID NO: 19954 - DNA, 20 bp, Artificial Sequence
  Description of Artificial Sequence: Synthetic oligonucleotide
  Target: SCNA; (-) strand; PAM type: NRG; PAM sequence: AGG
agtacagatacttgtcattg

SEQ ID NO: 19955 - DNA, 20 bp, Artificial Sequence
  Description of Artificial Sequence: Synthetic oligonucleotide
  Target: SCNA; (-) strand; PAM type: NRG; PAM sequence: GAG
gagtacagatacttgtcatt

SEQ ID NO: 19956 - DNA, 20 bp, Artificial Sequence
  Description of Artificial Sequence: Synthetic oligonucleotide
  Target: SCNA; (-) strand; PAM type: NRG; PAM sequence: CAG
ggacccaaactaagtgagta

SEQ ID NO: 19957 - DNA, 20 bp, Artificial Sequence
  Description of Artificial Sequence: Synthetic oligonucleotide
  Target: SCNA; (-) strand; PAM type: NRG; PAM sequence: GAG
ggcatggacccaaactaagt

SEQ ID NO: 19958 - DNA, 20 bp, Artificial Sequence
  Description of Artificial Sequence: Synthetic oligonucleotide
  Target: SCNA; (-) strand; PAM type: NRG; PAM sequence: AAG
atgtggcatggacccaaact

SEQ ID NO: 19959 - DNA, 20 bp, Artificial Sequence
  Description of Artificial Sequence: Synthetic oligonucleotide
  Target: SCNA; (-) strand; PAM type: NRG; PAM sequence: TGG
gttgcctcaggaatgtggca

SEQ ID NO: 19960 - DNA, 20 bp, Artificial Sequence
  Description of Artificial Sequence: Synthetic oligonucleotide
  Target: SCNA; (-) strand; PAM type: NRG; PAM sequence: TGG
tttcagttgcctcaggaatg

SEQ ID NO: 19961 - DNA, 20 bp, Artificial Sequence
  Description of Artificial Sequence: Synthetic oligonucleotide
  Target: SCNA; (-) strand; PAM type: NRG; PAM sequence: AGG
aggtgggtttcagttgcctc

SEQ ID NO: 19962 - DNA, 20 bp, Artificial Sequence
  Description of Artificial Sequence: Synthetic oligonucleotide
  Target: SCNA; (-) strand; PAM type: NRG; PAM sequence: CAG
taggtgggtttcagttgcct

SEQ ID NO: 19963 - DNA, 20 bp, Artificial Sequence
  Description of Artificial Sequence: Synthetic oligonucleotide
  Target: SCNA; (-) strand; PAM type: NRG; PAM sequence: CAG
atcaaggagtaggtgggttt

SEQ ID NO: 19964 - DNA, 20 bp, Artificial Sequence
  Description of Artificial Sequence: Synthetic oligonucleotide
  Target: SCNA; (-) strand; PAM type: NRG; PAM sequence: GGG
aaggccatcaaggagtaggt

SEQ ID NO: 19965 - DNA, 20 bp, Artificial Sequence
  Description of Artificial Sequence: Synthetic oligonucleotide
  Target: SCNA; (-) strand; PAM type: NRG; PAM sequence: TGG
gaaggccatcaaggagtagg

SEQ ID NO: 19966 - DNA, 20 bp, Artificial Sequence
  Description of Artificial Sequence: Synthetic oligonucleotide
  Target: SCNA; (-) strand; PAM type: NRG; PAM sequence: AGG
ctggaaggccatcaaggagt

SEQ ID NO: 19967 - DNA, 20 bp, Artificial Sequence
  Description of Artificial Sequence: Synthetic oligonucleotide
  Target: SCNA; (-) strand; PAM type: NRG; PAM sequence: TAG
cctggaaggccatcaaggag

SEQ ID NO: 19968 - DNA, 20 bp, Artificial Sequence
  Description of Artificial Sequence: Synthetic oligonucleotide
  Target: SCNA; (-) strand; PAM type: NRG; PAM sequence: GAG
catcctggaaggccatcaag

SEQ ID NO: 19969 - DNA, 20 bp, Artificial Sequence
  Description of Artificial Sequence: Synthetic oligonucleotide
  Target: SCNA; (-) strand; PAM type: NRG; PAM sequence: AGG
agcatcctggaaggccatca

SEQ ID NO: 19970 - DNA, 20 bp, Artificial Sequence
  Description of Artificial Sequence: Synthetic oligonucleotide
  Target: SCNA; (-) strand; PAM type: NRG; PAM sequence: AAG
aagcatcctggaaggccatc

SEQ ID NO: 19971 - DNA, 20 bp, Artificial Sequence
  Description of Artificial Sequence: Synthetic oligonucleotide
  Target: SCNA; (-) strand; PAM type: NRG; PAM sequence: AGG
gtacagacaagcatcctgga

SEQ ID NO: 19972 - DNA, 20 bp, Artificial Sequence
  Description of Artificial Sequence: Synthetic oligonucleotide
  Target: SCNA; (-) strand; PAM type: NRG; PAM sequence: AAG
agtacagacaagcatcctgg

SEQ ID NO: 19973 - DNA, 20 bp, Artificial Sequence
  Description of Artificial Sequence: Synthetic oligonucleotide
  Target: SCNA; (-) strand; PAM type: NRG; PAM sequence: TGG
tatagtacagacaagcatcc

SEQ ID NO: 19974 - DNA, 20 bp, Artificial Sequence
  Description of Artificial Sequence: Synthetic oligonucleotide
  Target: SCNA; (-) strand; PAM type: NRG; PAM sequence: AAG
atgtccactatagtacagac

SEQ ID NO: 19975 - DNA, 20 bp, Artificial Sequence
  Description of Artificial Sequence: Synthetic oligonucleotide
  Target: SCNA; (-) strand; PAM type: NRG; PAM sequence: CAG
aagggatgtccactatagta

SEQ ID NO: 19976 - DNA, 20 bp, Artificial Sequence
  Description of Artificial Sequence: Synthetic oligonucleotide
  Target: SCNA; (-) strand; PAM type: NRG; PAM sequence: TAG
gcaggaagggatgtccacta

SEQ ID NO: 19977 - DNA, 20 bp, Artificial Sequence
  Description of Artificial Sequence: Synthetic oligonucleotide
  Target: SCNA; (-) strand; PAM type: NRG; PAM sequence: GGG
ggacatccgtgaggcaggaa

SEQ ID NO: 19978 - DNA, 20 bp, Artificial Sequence
  Description of Artificial Sequence: Synthetic oligonucleotide
  Target: SCNA; (-) strand; PAM type: NRG; PAM sequence: AGG
cggacatccgtgaggcagga

SEQ ID NO: 19979 - DNA, 20 bp, Artificial Sequence
  Description of Artificial Sequence: Synthetic oligonucleotide
  Target: SCNA; (-) strand; PAM type: NRG; PAM sequence: AAG
acggacatccgtgaggcagg

SEQ ID NO: 19980 - DNA, 20 bp, Artificial Sequence
  Description of Artificial Sequence: Synthetic oligonucleotide
  Target: SCNA; (-) strand; PAM type: NRG; PAM sequence: AGG
cacacggacatccgtgaggc

SEQ ID NO: 19981 - DNA, 20 bp, Artificial Sequence
  Description of Artificial Sequence: Synthetic oligonucleotide
  Target: SCNA; (-) strand; PAM type: NRG; PAM sequence: CAG
acacacggacatccgtgagg

SEQ ID NO: 19982 - DNA, 20 bp, Artificial Sequence
  Description of Artificial Sequence: Synthetic oligonucleotide
  Target: SCNA; (-) strand; PAM type: NRG; PAM sequence: AGG
cacacacacggacatccgtg

SEQ ID NO: 19983 - DNA, 20 bp, Artificial Sequence
  Description of Artificial Sequence: Synthetic oligonucleotide
  Target: SCNA; (-) strand; PAM type: NRG; PAM sequence: GAG
acacacacacggacatccgt

SEQ ID NO: 19984 - DNA, 20 bp, Artificial Sequence
  Description of Artificial Sequence: Synthetic oligonucleotide
  Target: SCNA; (-) strand; PAM type: NRG; PAM sequence: CGG
caaacatacacacacacaca

SEQ ID NO: 19985 - DNA, 20 bp, Artificial Sequence
  Description of Artificial Sequence: Synthetic oligonucleotide
  Target: SCNA; (-) strand; PAM type: NRG; PAM sequence: CAG
gaaggccttcctcaggaatc

SEQ ID NO: 19986 - DNA, 20 bp, Artificial Sequence
  Description of Artificial Sequence: Synthetic oligonucleotide
  Target: SCNA; (-) strand; PAM type: NRG; PAM sequence: AGG
ttcagtggaaggccttcctc

SEQ ID NO: 19987 - DNA, 20 bp, Artificial Sequence
  Description of Artificial Sequence: Synthetic oligonucleotide
  Target: SCNA; (-) strand; PAM type: NRG; PAM sequence: CAG
gttcagtggaaggccttcct

SEQ ID NO: 19988 - DNA, 20 bp, Artificial Sequence
  Description of Artificial Sequence: Synthetic oligonucleotide
  Target: SCNA; (-) strand; PAM type: NRG; PAM sequence: AGG
catgaatgaagttcagtgga

SEQ ID NO: 19989 - DNA, 20 bp, Artificial Sequence
  Description of Artificial Sequence: Synthetic oligonucleotide
  Target: SCNA; (-) strand; PAM type: NRG; PAM sequence: AAG
acatgaatgaagttcagtgg

SEQ ID NO: 19990 - DNA, 20 bp, Artificial Sequence
  Description of Artificial Sequence: Synthetic oligonucleotide
  Target: SCNA; (-) strand; PAM type: NRG; PAM sequence: TGG
agcacatgaatgaagttcag

SEQ ID NO: 19991 - DNA, 20 bp, Artificial Sequence
  Description of Artificial Sequence: Synthetic oligonucleotide
  Target: SCNA; (-) strand; PAM type: NRG; PAM sequence: CAG
caaagcacatgaatgaagtt

SEQ ID NO: 19992 - DNA, 20 bp, Artificial Sequence
  Description of Artificial Sequence: Synthetic oligonucleotide
  Target: SCNA; (-) strand; PAM type: NRG; PAM sequence: AAG
ggtagcaaagcacatgaatg

SEQ ID NO: 19993 - DNA, 20 bp, Artificial Sequence
  Description of Artificial Sequence: Synthetic oligonucleotide
  Target: SCNA; (-) strand; PAM type: NRG; PAM sequence: AAG
acattttctaacaggtagca

SEQ ID NO: 19994 - DNA, 20 bp, Artificial Sequence
  Description of Artificial Sequence: Synthetic oligonucleotide
  Target: SCNA; (-) strand; PAM type: NRG; PAM sequence: TAG
aggttacattttctaacagg

SEQ ID NO: 19995 - DNA, 20 bp, Artificial Sequence
  Description of Artificial Sequence: Synthetic oligonucleotide
  Target: SCNA; (-) strand; PAM type: NRG; PAM sequence: AGG
attaggttacattttctaac

SEQ ID NO: 19996 - DNA, 20 bp, Artificial Sequence
  Description of Artificial Sequence: Synthetic oligonucleotide
  Target: SCNA; (-) strand; PAM type: NRG; PAM sequence: CAG
cattaggttacattttctaa

SEQ ID NO: 19997 - DNA, 20 bp, Artificial Sequence
  Description of Artificial Sequence: Synthetic oligonucleotide
  Target: SCNA; (-) strand; PAM type: NRG; PAM sequence: AGG
cagaggtttacatttacatt

SEQ ID NO: 19998 - DNA, 20 bp, Artificial Sequence
  Description of Artificial Sequence: Synthetic oligonucleotide
  Target: SCNA; (-) strand; PAM type: NRG; PAM sequence: TAG
ccagaggtttacatttacat

SEQ ID NO: 19999 - DNA, 20 bp, Artificial Sequence
  Description of Artificial Sequence: Synthetic oligonucleotide
  Target: SCNA; (-) strand; PAM type: NRG; PAM sequence: AGG
agtaaaactagaggcaccag

SEQ ID NO: 20000 - DNA, 20 bp, Artificial Sequence
  Description of Artificial Sequence: Synthetic oligonucleotide
  Target: SCNA; (-) strand; PAM type: NRG; PAM sequence: GAG
cagtaaaactagaggcacca

SEQ ID NO: 20001 - DNA, 20 bp, Artificial Sequence
  Description of Artificial Sequence: Synthetic oligonucleotide
  Target: SCNA; (-) strand; PAM type: NRG; PAM sequence: CAG
gtcagtaaaactagaggcac

SEQ ID NO: 20002 - DNA, 20 bp, Artificial Sequence
  Description of Artificial Sequence: Synthetic oligonucleotide
  Target: SCNA; (-) strand; PAM type: NRG; PAM sequence: AGG
acataagtcagtaaaactag

SEQ ID NO: 20003 - DNA, 20 bp, Artificial Sequence
  Description of Artificial Sequence: Synthetic oligonucleotide
  Target: SCNA; (-) strand; PAM type: NRG; PAM sequence: GAG
aacataagtcagtaaaacta

SEQ ID NO: 20004 - DNA, 20 bp, Artificial Sequence
  Description of Artificial Sequence: Synthetic oligonucleotide
  Target: SCNA; (-) strand; PAM type: NRG; PAM sequence: TAG
ataacataagtcagtaaaac

SEQ ID NO: 20005 - DNA, 20 bp, Artificial Sequence
  Description of Artificial Sequence: Synthetic oligonucleotide
  Target: SCNA; (-) strand; PAM type: NRG; PAM sequence: CAG
aagatttatataacataagt

SEQ ID NO: 20006 - DNA, 20 bp, Artificial Sequence
  Description of Artificial Sequence: Synthetic oligonucleotide
  Target: SCNA; (-) strand; PAM type: NRG; PAM sequence: AAG
aaccaagatttatataacat

SEQ ID NO: 20007 - DNA, 20 bp, Artificial Sequence
  Description of Artificial Sequence: Synthetic oligonucleotide
  Target: SCNA; (-) strand; PAM type: NRG; PAM sequence: AAG
aacagaaagaaccaggaacc

SEQ ID NO: 20008 - DNA, 20 bp, Artificial Sequence
  Description of Artificial Sequence: Synthetic oligonucleotide
  Target: SCNA; (-) strand; PAM type: NRG; PAM sequence: AGG
acagggcaacagaaagaacc

SEQ ID NO: 20009 - DNA, 20 bp, Artificial Sequence
  Description of Artificial Sequence: Synthetic oligonucleotide
  Target: SCNA; (-) strand; PAM type: NRG; PAM sequence: CAG
aacagggcaacagaaagaac

SEQ ID NO: 20010 - DNA, 20 bp, Artificial Sequence
  Description of Artificial Sequence: Synthetic oligonucleotide
  Target: SCNA; (-) strand; PAM type: NRG; PAM sequence: AAG
tctcataacagggcaacaga

SEQ ID NO: 20011 - DNA, 20 bp, Artificial Sequence
  Description of Artificial Sequence: Synthetic oligonucleotide
  Target: SCNA; (-) strand; PAM type: NRG; PAM sequence: CAG
tacatctcataacagggcaa

SEQ ID NO: 20012 - DNA, 20 bp, Artificial Sequence
  Description of Artificial Sequence: Synthetic oligonucleotide
  Target: SCNA; (-) strand; PAM type: NRG; PAM sequence: GGG
gagtgatacatctcataaca

SEQ ID NO: 20013 - DNA, 20 bp, Artificial Sequence
  Description of Artificial Sequence: Synthetic oligonucleotide
  Target: SCNA; (-) strand; PAM type: NRG; PAM sequence: AGG
agagtgatacatctcataac

SEQ ID NO: 20014 - DNA, 20 bp, Artificial Sequence
  Description of Artificial Sequence: Synthetic oligonucleotide
  Target: SCNA; (-) strand; PAM type: NRG; PAM sequence: CAG
tagagtgatacatctcataa

SEQ ID NO: 20015 - DNA, 20 bp, Artificial Sequence
  Description of Artificial Sequence: Synthetic oligonucleotide
  Target: SCNA; (-) strand; PAM type: NRG; PAM sequence: GAG
tagtgtttgggcttggctta

SEQ ID NO: 20016 - DNA, 20 bp, Artificial Sequence
  Description of Artificial Sequence: Synthetic oligonucleotide
  Target: SCNA; (-) strand; PAM type: NRG; PAM sequence: TAG
cttagtgtttgggcttggct

SEQ ID NO: 20017 - DNA, 20 bp, Artificial Sequence
  Description of Artificial Sequence: Synthetic oligonucleotide
  Target: SCNA; (-) strand; PAM type: NRG; PAM sequence: TGG
gttatcttagtgtttgggct

SEQ ID NO: 20018 - DNA, 20 bp, Artificial Sequence
  Description of Artificial Sequence: Synthetic oligonucleotide
  Target: SCNA; (-) strand; PAM type: NRG; PAM sequence: GGG
cacttgttatcttagtgttt

SEQ ID NO: 20019 - DNA, 20 bp, Artificial Sequence
  Description of Artificial Sequence: Synthetic oligonucleotide
  Target: SCNA; (-) strand; PAM type: NRG; PAM sequence: TGG
gcacttgttatcttagtgtt

SEQ ID NO: 20020 - DNA, 20 bp, Artificial Sequence
  Description of Artificial Sequence: Synthetic oligonucleotide
  Target: SCNA; (-) strand; PAM type: NRG; PAM sequence: TAG
atctttagcacttgttatct

SEQ ID NO: 20021 - DNA, 20 bp, Artificial Sequence
  Description of Artificial Sequence: Synthetic oligonucleotide
  Target: SCNA; (-) strand; PAM type: NRG; PAM sequence: TAG
ttcagaatattcgtcatctt

SEQ ID NO: 20022 - DNA, 20 bp, Artificial Sequence
  Description of Artificial Sequence: Synthetic oligonucleotide
  Target: SCNA; (-) strand; PAM type: NRG; PAM sequence: CAG
tgtgtgtcctgaaaactctt

SEQ ID NO: 20023 - DNA, 20 bp, Artificial Sequence
  Description of Artificial Sequence: Synthetic oligonucleotide
  Target: SCNA; (-) strand; PAM type: NRG; PAM sequence: TGG
tgttattggtactgaggtgc

SEQ ID NO: 20024 - DNA, 20 bp, Artificial Sequence
  Description of Artificial Sequence: Synthetic oligonucleotide
  Target: SCNA; (-) strand; PAM type: NRG; PAM sequence: AGG
aatatctgttattggtactg

SEQ ID NO: 20025 - DNA, 20 bp, Artificial Sequence
  Description of Artificial Sequence: Synthetic oligonucleotide
  Target: SCNA; (-) strand; PAM type: NRG; PAM sequence: GAG
aaatatctgttattggtact

SEQ ID NO: 20026 - DNA, 20 bp, Artificial Sequence
  Description of Artificial Sequence: Synthetic oligonucleotide
  Target: SCNA; (-) strand; PAM type: NRG; PAM sequence: TGG
taacatgaaatatctgttat

SEQ ID NO: 20027 - DNA, 20 bp, Artificial Sequence
  Description of Artificial Sequence: Synthetic oligonucleotide
  Target: SCNA; (-) strand; PAM type: NRG; PAM sequence: AAG
tcttgattattccctcaaat

SEQ ID NO: 20028 - DNA, 20 bp, Artificial Sequence
  Description of Artificial Sequence: Synthetic oligonucleotide
  Target: SCNA; (-) strand; PAM type: NRG; PAM sequence: AAG
agatctctagcaagactagg

SEQ ID NO: 20029 - DNA, 20 bp, Artificial Sequence
  Description of Artificial Sequence: Synthetic oligonucleotide
  Target: SCNA; (-) strand; PAM type: NRG; PAM sequence: AGG
tctagatctctagcaagact

SEQ ID NO: 20030 - DNA, 20 bp, Artificial Sequence
  Description of Artificial Sequence: Synthetic oligonucleotide
  Target: SCNA; (-) strand; PAM type: NRG; PAM sequence: TAG
atctagatctctagcaagac

SEQ ID NO: 20031 - DNA, 20 bp, Artificial Sequence
  Description of Artificial Sequence: Synthetic oligonucleotide
  Target: SCNA; (-) strand; PAM type: NRG; PAM sequence: AAG
tggatatctagatctctagc

SEQ ID NO: 20032 - DNA, 20 bp, Artificial Sequence
  Description of Artificial Sequence: Synthetic oligonucleotide
  Target: SCNA; (-) strand; PAM type: NRG; PAM sequence: TAG
tatttggatatctagatctc

SEQ ID NO: 20033 - DNA, 20 bp, Artificial Sequence
  Description of Artificial Sequence: Synthetic oligonucleotide
  Target: SCNA; (-) strand; PAM type: NRG; PAM sequence: TAG
gcttcttatatttggatatc

SEQ ID NO: 20034 - DNA, 20 bp, Artificial Sequence
  Description of Artificial Sequence: Synthetic oligonucleotide
  Target: SCNA; (-) strand; PAM type: NRG; PAM sequence: TGG
ttctttgtgcttcttatatt

SEQ ID NO: 20035 - DNA, 20 bp, Artificial Sequence
  Description of Artificial Sequence: Synthetic oligonucleotide
  Target: SCNA; (-) strand; PAM type: NRG; PAM sequence: AGG
ctttttgcattgaatttccc

SEQ ID NO: 20036 - DNA, 20 bp, Artificial Sequence
  Description of Artificial Sequence: Synthetic oligonucleotide
  Target: SCNA; (-) strand; PAM type: NRG; PAM sequence: CAG
tctttttgcattgaatttcc

SEQ ID NO: 20037 - DNA, 20 bp, Artificial Sequence
  Description of Artificial Sequence: Synthetic oligonucleotide
  Target: SCNA; (-) strand; PAM type: NRG; PAM sequence: TGG
ctgatggctgtgtgcccagg

SEQ ID NO: 20038 - DNA, 20 bp, Artificial Sequence
  Description of Artificial Sequence: Synthetic oligonucleotide
  Target: SCNA; (-) strand; PAM type: NRG; PAM sequence: AGG
aacctgatggctgtgtgccc

SEQ ID NO: 20039 - DNA, 20 bp, Artificial Sequence
  Description of Artificial Sequence: Synthetic oligonucleotide
  Target: SCNA; (-) strand; PAM type: NRG; PAM sequence: CAG
caacctgatggctgtgtgcc

SEQ ID NO: 20040 - DNA, 20 bp, Artificial Sequence
  Description of Artificial Sequence: Synthetic oligonucleotide
  Target: SCNA; (-) strand; PAM type: NRG; PAM sequence: TGG
cttgactttagacaacctga

SEQ ID NO: 20041 - DNA, 20 bp, Artificial Sequence
  Description of Artificial Sequence: Synthetic oligonucleotide
  Target: SCNA; (-) strand; PAM type: NRG; PAM sequence: TAG
tctttccttcatcttgactt

SEQ ID NO: 20042 - DNA, 20 bp, Artificial Sequence
  Description of Artificial Sequence: Synthetic oligonucleotide
  Target: SCNA; (-) strand; PAM type: NRG; PAM sequence: AAG
gcttttgcctcacagctctt

SEQ ID NO: 20043 - DNA, 20 bp, Artificial Sequence
  Description of Artificial Sequence: Synthetic oligonucleotide
  Target: SCNA; (-) strand; PAM type: NRG; PAM sequence: CAG
tacctgatgcttttgcctca

SEQ ID NO: 20044 - DNA, 20 bp, Artificial Sequence
  Description of Artificial Sequence: Synthetic oligonucleotide
  Target: SCNA; (-) strand; PAM type: NRG; PAM sequence: AGG
tctgctatgttttcttttat

SEQ ID NO: 20045 - DNA, 20 bp, Artificial Sequence
  Description of Artificial Sequence: Synthetic oligonucleotide
  Target: SCNA; (-) strand; PAM type: NRG; PAM sequence: TAG
atctgctatgttttctttta

SEQ ID NO: 20046 - DNA, 20 bp, Artificial Sequence
  Description of Artificial Sequence: Synthetic oligonucleotide
  Target: SCNA; (-) strand; PAM type: NRG; PAM sequence: GAG
tggctagcagggtttatgct

SEQ ID NO: 20047 - DNA, 20 bp, Artificial Sequence
  Description of Artificial Sequence: Synthetic oligonucleotide
  Target: SCNA; (-) strand; PAM type: NRG; PAM sequence: GGG
ccaatctcttctggctagca

SEQ ID NO: 20048 - DNA, 20 bp, Artificial Sequence
  Description of Artificial Sequence: Synthetic oligonucleotide
  Target: SCNA; (-) strand; PAM type: NRG; PAM sequence: AGG
cccaatctcttctggctagc

SEQ ID NO: 20049 - DNA, 20 bp, Artificial Sequence
  Description of Artificial Sequence: Synthetic oligonucleotide
  Target: SCNA; (-) strand; PAM type: NRG; PAM sequence: CAG
gcccaatctcttctggctag

SEQ ID NO: 20050 - DNA, 20 bp, Artificial Sequence
  Description of Artificial Sequence: Synthetic oligonucleotide
  Target: SCNA; (-) strand; PAM type: NRG; PAM sequence: TAG
agggcccaatctcttctggc

SEQ ID NO: 20051 - DNA, 20 bp, Artificial Sequence
  Description of Artificial Sequence: Synthetic oligonucleotide
  Target: SCNA; (-) strand; PAM type: NRG; PAM sequence: TGG
atatagggcccaatctcttc

SEQ ID NO: 20052 - DNA, 20 bp, Artificial Sequence
  Description of Artificial Sequence: Synthetic oligonucleotide
  Target: SCNA; (-) strand; PAM type: NRG; PAM sequence: GGG
tgtttaagaggctaaatata

SEQ ID NO: 20053 - DNA, 20 bp, Artificial Sequence
  Description of Artificial Sequence: Synthetic oligonucleotide
  Target: SCNA; (-) strand; PAM type: NRG; PAM sequence: AGG
ttgtttaagaggctaaatat

SEQ ID NO: 20054 - DNA, 20 bp, Artificial Sequence
  Description of Artificial Sequence: Synthetic oligonucleotide
  Target: SCNA; (-) strand; PAM type: NRG; PAM sequence: TAG
tttgtttaagaggctaaata

SEQ ID NO: 20055 - DNA, 20 bp, Artificial Sequence
  Description of Artificial Sequence: Synthetic oligonucleotide
  Target: SCNA; (-) strand; PAM type: NRG; PAM sequence: AGG
tgataattattttgtttaag

SEQ ID NO: 20056 - DNA, 20 bp, Artificial Sequence
  Description of Artificial Sequence: Synthetic oligonucleotide
  Target: SCNA; (-) strand; PAM type: NRG; PAM sequence: GAG
ctgataattattttgtttaa

SEQ ID NO: 20057 - DNA, 20 bp, Artificial Sequence
  Description of Artificial Sequence: Synthetic oligonucleotide
  Target: SCNA; (-) strand; PAM type: NRG; PAM sequence: AAG
ggctgataattattttgttt

SEQ ID NO: 20058 - DNA, 20 bp, Artificial Sequence
  Description of Artificial Sequence: Synthetic oligonucleotide
  Target: SCNA; (-) strand; PAM type: NRG; PAM sequence: TGG
ttcactggatacaaaattct

SEQ ID NO: 20059 - DNA, 20 bp, Artificial Sequence
  Description of Artificial Sequence: Synthetic oligonucleotide
  Target: SCNA; (-) strand; PAM type: NRG; PAM sequence: TGG
tttatgaagcttagtttcac

SEQ ID NO: 20060 - DNA, 20 bp, Artificial Sequence
  Description of Artificial Sequence: Synthetic oligonucleotide
  Target: SCNA; (-) strand; PAM type: NRG; PAM sequence: TAG
tctctttcatttatgaagct

SEQ ID NO: 20061 - DNA, 20 bp, Artificial Sequence
  Description of Artificial Sequence: Synthetic oligonucleotide
  Target: SCNA; (-) strand; PAM type: NRG; PAM sequence: AAG
ttatctctctttcatttatg

SEQ ID NO: 20062 - DNA, 20 bp, Artificial Sequence
  Description of Artificial Sequence: Synthetic oligonucleotide
  Target: SCNA; (-) strand; PAM type: NRG; PAM sequence: AAG
cagcatttgtttgtctgaaa

SEQ ID NO: 20063 - DNA, 20 bp, Artificial Sequence
  Description of Artificial Sequence: Synthetic oligonucleotide
  Target: SCNA; (-) strand; PAM type: NRG; PAM sequence: CAG
tggcttggtagtggcaaatt

SEQ ID NO: 20064 - DNA, 20 bp, Artificial Sequence
  Description of Artificial Sequence: Synthetic oligonucleotide
  Target: SCNA; (-) strand; PAM type: NRG; PAM sequence: TGG
tctcagtgctggcttggtag

SEQ ID NO: 20065 - DNA, 20 bp, Artificial Sequence
  Description of Artificial Sequence: Synthetic oligonucleotide
  Target: SCNA; (-) strand; PAM type: NRG; PAM sequence: TAG
atttctcagtgctggcttgg

SEQ ID NO: 20066 - DNA, 20 bp, Artificial Sequence
  Description of Artificial Sequence: Synthetic oligonucleotide
  Target: SCNA; (-) strand; PAM type: NRG; PAM sequence: TGG
agcatttctcagtgctggct

SEQ ID NO: 20067 - DNA, 20 bp, Artificial Sequence
  Description of Artificial Sequence: Synthetic oligonucleotide
  Target: SCNA; (-) strand; PAM type: NRG; PAM sequence: TGG
cttttagcatttctcagtgc

SEQ ID NO: 20068 - DNA, 20 bp, Artificial Sequence
  Description of Artificial Sequence: Synthetic oligonucleotide
  Target: SCNA; (-) strand; PAM type: NRG; PAM sequence: CAG
gagctccttttagcatttct

SEQ ID NO: 20069 - DNA, 20 bp, Artificial Sequence
  Description of Artificial Sequence: Synthetic oligonucleotide
  Target: SCNA; (-) strand; PAM type: NRG; PAM sequence: TAG
tcaagatttagagctccttt

SEQ ID NO: 20070 - DNA, 20 bp, Artificial Sequence
  Description of Artificial Sequence: Synthetic oligonucleotide
  Target: SCNA; (-) strand; PAM type: NRG; PAM sequence: GAG
agttactgtttcaagattta

SEQ ID NO: 20071 - DNA, 20 bp, Artificial Sequence
  Description of Artificial Sequence: Synthetic oligonucleotide
  Target: SCNA; (-) strand; PAM type: NRG; PAM sequence: TAG
caagttactgtttcaagatt

SEQ ID NO: 20072 - DNA, 20 bp, Artificial Sequence
  Description of Artificial Sequence: Synthetic oligonucleotide
  Target: SCNA; (-) strand; PAM type: NRG; PAM sequence: AAG
tgtattcaagttactgtttc

SEQ ID NO: 20073 - DNA, 20 bp, Artificial Sequence
  Description of Artificial Sequence: Synthetic oligonucleotide
  Target: SCNA; (-) strand; PAM type: NRG; PAM sequence: AAG
ggttctattttgatgtattc

SEQ ID NO: 20074 - DNA, 20 bp, Artificial Sequence
  Description of Artificial Sequence: Synthetic oligonucleotide
  Target: SCNA; (-) strand; PAM type: NRG; PAM sequence: AGG
gttaaatttatgctttaagg

SEQ ID NO: 20075 - DNA, 20 bp, Artificial Sequence
  Description of Artificial Sequence: Synthetic oligonucleotide
  Target: SCNA; (-) strand; PAM type: NRG; PAM sequence: GAG
tgttaaatttatgctttaag

SEQ ID NO: 20076 - DNA, 20 bp, Artificial Sequence
  Description of Artificial Sequence: Synthetic oligonucleotide
  Target: SCNA; (-) strand; PAM type: NRG; PAM sequence: AGG
cctgttaaatttatgcttta

SEQ ID NO: 20077 - DNA, 20 bp, Artificial Sequence
  Description of Artificial Sequence: Synthetic oligonucleotide
  Target: SCNA; (-) strand; PAM type: NRG; PAM sequence: AAG
tcctgttaaatttatgcttt

SEQ ID NO: 20078 - DNA, 20 bp, Artificial Sequence
  Description of Artificial Sequence: Synthetic oligonucleotide
  Target: SCNA; (-) strand; PAM type: NRG; PAM sequence: GGG
taattgtgttattattttat

SEQ ID NO: 20079 - DNA, 20 bp, Artificial Sequence
  Description of Artificial Sequence: Synthetic oligonucleotide
  Target: SCNA; (-) strand; PAM type: NRG; PAM sequence: TGG
ttaattgtgttattatttta

SEQ ID NO: 20080 - DNA, 20 bp, Artificial Sequence
  Description of Artificial Sequence: Synthetic oligonucleotide
  Target: SCNA; (-) strand; PAM type: NRG; PAM sequence: TAG
tactgttctattcatcatga

SEQ ID NO: 20081 - DNA, 20 bp, Artificial Sequence
  Description of Artificial Sequence: Synthetic oligonucleotide
  Target: SCNA; (-) strand; PAM type: NRG; PAM sequence: AGG
aacattagtattgaggtatg

SEQ ID NO: 20082 - DNA, 20 bp, Artificial Sequence
  Description of Artificial Sequence: Synthetic oligonucleotide
  Target: SCNA; (-) strand; PAM type: NRG; PAM sequence: GAG
caacattagtattgaggtat

SEQ ID NO: 20083 - DNA, 20 bp, Artificial Sequence
  Description of Artificial Sequence: Synthetic oligonucleotide
  Target: SCNA; (-) strand; PAM type: NRG; PAM sequence: AGG
tacattcaacattagtattg

SEQ ID NO: 20084 - DNA, 20 bp, Artificial Sequence
  Description of Artificial Sequence: Synthetic oligonucleotide
  Target: SCNA; (-) strand; PAM type: NRG; PAM sequence: GAG
ttacattcaacattagtatt

SEQ ID NO: 20085 - DNA, 20 bp, Artificial Sequence
  Description of Artificial Sequence: Synthetic oligonucleotide
  Target: SCNA; (-) strand; PAM type: NRG; PAM sequence: TAG
aggccatttacattcaacat

SEQ ID NO: 20086 - DNA, 20 bp, Artificial Sequence
  Description of Artificial Sequence: Synthetic oligonucleotide
  Target: SCNA; (-) strand; PAM type: NRG; PAM sequence: AGG
atcttttaagtggagcattt

SEQ ID NO: 20087 - DNA, 20 bp, Artificial Sequence
  Description of Artificial Sequence: Synthetic oligonucleotide
  Target: SCNA; (-) strand; PAM type: NRG; PAM sequence: TAG
tatcttttaagtggagcatt

SEQ ID NO: 20088 - DNA, 20 bp, Artificial Sequence
  Description of Artificial Sequence: Synthetic oligonucleotide
  Target: SCNA; (-) strand; PAM type: NRG; PAM sequence: GAG
cattctgtatcttttaagtg

SEQ ID NO: 20089 - DNA, 20 bp, Artificial Sequence
  Description of Artificial Sequence: Synthetic oligonucleotide
  Target: SCNA; (-) strand; PAM type: NRG; PAM sequence: TGG
gccattctgtatcttttaag

SEQ ID NO: 20090 - DNA, 20 bp, Artificial Sequence
  Description of Artificial Sequence: Synthetic oligonucleotide
  Target: SCNA; (-) strand; PAM type: NRG; PAM sequence: AAG
tctgccattctgtatctttt

SEQ ID NO: 20091 - DNA, 20 bp, Artificial Sequence
  Description of Artificial Sequence: Synthetic oligonucleotide
  Target: SCNA; (-) strand; PAM type: NRG; PAM sequence: TGG
gacagcagatacttggttga

SEQ ID NO: 20092 - DNA, 20 bp, Artificial Sequence
  Description of Artificial Sequence: Synthetic oligonucleotide
  Target: SCNA; (-) strand; PAM type: NRG; PAM sequence: TGG
tcttgaagacagcagatact

SEQ ID NO: 20093 - DNA, 20 bp, Artificial Sequence
  Description of Artificial Sequence: Synthetic oligonucleotide
  Target: SCNA; (-) strand; PAM type: NRG; PAM sequence: CAG
ggtgagtctcttgaagacag

SEQ ID NO: 20094 - DNA, 20 bp, Artificial Sequence
  Description of Artificial Sequence: Synthetic oligonucleotide
  Target: SCNA; (-) strand; PAM type: NRG; PAM sequence: CAG
ttaggtgagtctcttgaaga

SEQ ID NO: 20095 - DNA, 20 bp, Artificial Sequence
  Description of Artificial Sequence: Synthetic oligonucleotide
  Target: SCNA; (-) strand; PAM type: NRG; PAM sequence: AAG
cgtgttaggtgagtctcttg

SEQ ID NO: 20096 - DNA, 20 bp, Artificial Sequence
  Description of Artificial Sequence: Synthetic oligonucleotide
  Target: SCNA; (-) strand; PAM type: NRG; PAM sequence: GAG
tgagtccttacgtgttaggt

SEQ ID NO: 20097 - DNA, 20 bp, Artificial Sequence
  Description of Artificial Sequence: Synthetic oligonucleotide
  Target: SCNA; (-) strand; PAM type: NRG; PAM sequence: AGG
tatgtgagtccttacgtgtt

SEQ ID NO: 20098 - DNA, 20 bp, Artificial Sequence
  Description of Artificial Sequence: Synthetic oligonucleotide
  Target: SCNA; (-) strand; PAM type: NRG; PAM sequence: TAG
ttatgtgagtccttacgtgt

SEQ ID NO: 20099 - DNA, 20 bp, Artificial Sequence
  Description of Artificial Sequence: Synthetic oligonucleotide
  Target: SCNA; (-) strand; PAM type: NRG; PAM sequence: GAG
cctttaccttaagtttatgt

SEQ ID NO: 20100 - DNA, 20 bp, Artificial Sequence
  Description of Artificial Sequence: Synthetic oligonucleotide
  Target: SCNA; (-) strand; PAM type: NRG; PAM sequence: AAG
tttttccacccctttacctt

SEQ ID NO: 20101 - DNA, 20 bp, Artificial Sequence
  Description of Artificial Sequence: Synthetic oligonucleotide
  Target: SCNA; (-) strand; PAM type: NRG; PAM sequence: TGG
actttgagtttccatttgca

SEQ ID NO: 20102 - DNA, 20 bp, Artificial Sequence
  Description of Artificial Sequence: Synthetic oligonucleotide
  Target: SCNA; (-) strand; PAM type: NRG; PAM sequence: GAG
ttgctattctttctcacttt

SEQ ID NO: 20103 - DNA, 20 bp, Artificial Sequence
  Description of Artificial Sequence: Synthetic oligonucleotide
  Target: SCNA; (-) strand; PAM type: NRG; PAM sequence: AAG
aaatcttttttgtctgatat

SEQ ID NO: 20104 - DNA, 20 bp, Artificial Sequence
  Description of Artificial Sequence: Synthetic oligonucleotide
  Target: SCNA; (-) strand; PAM type: NRG; PAM sequence: AAG
tgttagatgcatatacactt

SEQ ID NO: 20105 - DNA, 20 bp, Artificial Sequence
  Description of Artificial Sequence: Synthetic oligonucleotide
  Target: SCNA; (-) strand; PAM type: NRG; PAM sequence: TAG
aaatttgggagcccaagtgt

SEQ ID NO: 20106 - DNA, 20 bp, Artificial Sequence
  Description of Artificial Sequence: Synthetic oligonucleotide
  Target: SCNA; (-) strand; PAM type: NRG; PAM sequence: AAG
ctttataaatttgggagccc

SEQ ID NO: 20107 - DNA, 20 bp, Artificial Sequence
  Description of Artificial Sequence: Synthetic oligonucleotide
  Target: SCNA; (-) strand; PAM type: NRG; PAM sequence: GAG
tgattgctttataaatttgg

SEQ ID NO: 20108 - DNA, 20 bp, Artificial Sequence
  Description of Artificial Sequence: Synthetic oligonucleotide
  Target: SCNA; (-) strand; PAM type: NRG; PAM sequence: GGG
agtgattgctttataaattt

SEQ ID NO: 20109 - DNA, 20 bp, Artificial Sequence
  Description of Artificial Sequence: Synthetic oligonucleotide
  Target: SCNA; (-) strand; PAM type: NRG; PAM sequence: TGG
tagtgattgctttataaatt

SEQ ID NO: 20110 - DNA, 20 bp, Artificial Sequence
  Description of Artificial Sequence: Synthetic oligonucleotide
  Target: SCNA; (-) strand; PAM type: NRG; PAM sequence: TAG
atctcatgtcttaggtctag

SEQ ID NO: 20111 - DNA, 20 bp, Artificial Sequence
  Description of Artificial Sequence: Synthetic oligonucleotide
  Target: SCNA; (-) strand; PAM type: NRG; PAM sequence: TAG
tctatctcatgtcttaggtc

SEQ ID NO: 20112 - DNA, 20 bp, Artificial Sequence
  Description of Artificial Sequence: Synthetic oligonucleotide
  Target: SCNA; (-) strand; PAM type: NRG; PAM sequence: AGG
tgctgtctatctcatgtctt

SEQ ID NO: 20113 - DNA, 20 bp, Artificial Sequence
  Description of Artificial Sequence: Synthetic oligonucleotide
  Target: SCNA; (-) strand; PAM type: NRG; PAM sequence: TAG
ttgctgtctatctcatgtct

SEQ ID NO: 20114 - DNA, 20 bp, Artificial Sequence
  Description of Artificial Sequence: Synthetic oligonucleotide
  Target: SCNA; (-) strand; PAM type: NRG; PAM sequence: AAG
gtgctgtcagtggagtactg

SEQ ID NO: 20115 - DNA, 20 bp, Artificial Sequence
  Description of Artificial Sequence: Synthetic oligonucleotide
  Target: SCNA; (-) strand; PAM type: NRG; PAM sequence: GAG
cctgtctagtgctgtcagtg

SEQ ID NO: 20116 - DNA, 20 bp, Artificial Sequence
  Description of Artificial Sequence: Synthetic oligonucleotide
  Target: SCNA; (-) strand; PAM type: NRG; PAM sequence: TGG
gacctgtctagtgctgtcag

SEQ ID NO: 20117 - DNA, 20 bp, Artificial Sequence
  Description of Artificial Sequence: Synthetic oligonucleotide
  Target: SCNA; (-) strand; PAM type: NRG; PAM sequence: CAG
gatgacctgtctagtgctgt

SEQ ID NO: 20118 - DNA, 20 bp, Artificial Sequence
  Description of Artificial Sequence: Synthetic oligonucleotide
  Target: SCNA; (-) strand; PAM type: NRG; PAM sequence: TAG
ttctgtcttgatgacctgtc

SEQ ID NO: 20119 - DNA, 20 bp, Artificial Sequence
  Description of Artificial Sequence: Synthetic oligonucleotide
  Target: SCNA; (-) strand; PAM type: NRG; PAM sequence: AAG
tttgttctagggtatagttt

SEQ ID NO: 20120 - DNA, 20 bp, Artificial Sequence
  Description of Artificial Sequence: Synthetic oligonucleotide
  Target: SCNA; (-) strand; PAM type: NRG; PAM sequence: TAG
agtccatttgttctagggta

SEQ ID NO: 20121 - DNA, 20 bp, Artificial Sequence
  Description of Artificial Sequence: Synthetic oligonucleotide
  Target: SCNA; (-) strand; PAM type: NRG; PAM sequence: GGG
tgttaagtccatttgttcta

SEQ ID NO: 20122 - DNA, 20 bp, Artificial Sequence
  Description of Artificial Sequence: Synthetic oligonucleotide
  Target: SCNA; (-) strand; PAM type: NRG; PAM sequence: AGG
ctgttaagtccatttgttct

SEQ ID NO: 20123 - DNA, 20 bp, Artificial Sequence
  Description of Artificial Sequence: Synthetic oligonucleotide
  Target: SCNA; (-) strand; PAM type: NRG; PAM sequence: TAG
tctgttaagtccatttgttc

SEQ ID NO: 20124 - DNA, 20 bp, Artificial Sequence
  Description of Artificial Sequence: Synthetic oligonucleotide
  Target: SCNA; (-) strand; PAM type: NRG; PAM sequence: AAG
attttttgtaaatatctgtt

SEQ ID NO: 20125 - DNA, 20 bp, Artificial Sequence
  Description of Artificial Sequence: Synthetic oligonucleotide
  Target: SCNA; (-) strand; PAM type: NRG; PAM sequence: AGG
aaaggatgtagttgttgggt

SEQ ID NO: 20126 - DNA, 20 bp, Artificial Sequence
  Description of Artificial Sequence: Synthetic oligonucleotide
  Target: SCNA; (-) strand; PAM type: NRG; PAM sequence: TAG
aaaaggatgtagttgttggg

SEQ ID NO: 20127 - DNA, 20 bp, Artificial Sequence
  Description of Artificial Sequence: Synthetic oligonucleotide
  Target: SCNA; (-) strand; PAM type: NRG; PAM sequence: GGG
atgaaaaggatgtagttgtt

SEQ ID NO: 20128 - DNA, 20 bp, Artificial Sequence
  Description of Artificial Sequence: Synthetic oligonucleotide
  Target: SCNA; (-) strand; PAM type: NRG; PAM sequence: TGG
gatgaaaaggatgtagttgt

SEQ ID NO: 20129 - DNA, 20 bp, Artificial Sequence
  Description of Artificial Sequence: Synthetic oligonucleotide
  Target: SCNA; (-) strand; PAM type: NRG; PAM sequence: TAG
atgtgttgatgaaaaggatg

SEQ ID NO: 20130 - DNA, 20 bp, Artificial Sequence
  Description of Artificial Sequence: Synthetic oligonucleotide
  Target: SCNA; (-) strand; PAM type: NRG; PAM sequence: AGG
tattccatgtgttgatgaaa

SEQ ID NO: 20131 - DNA, 20 bp, Artificial Sequence
  Description of Artificial Sequence: Synthetic oligonucleotide
  Target: SCNA; (-) strand; PAM type: NRG; PAM sequence: AAG
atattccatgtgttgatgaa

SEQ ID NO: 20132 - DNA, 20 bp, Artificial Sequence
  Description of Artificial Sequence: Synthetic oligonucleotide
  Target: SCNA; (-) strand; PAM type: NRG; PAM sequence: GAG
tgttcatatggtctgtcttg

SEQ ID NO: 20133 - DNA, 20 bp, Artificial Sequence
  Description of Artificial Sequence: Synthetic oligonucleotide
  Target: SCNA; (-) strand; PAM type: NRG; PAM sequence: TGG
cttgttcatatggtctgtct

SEQ ID NO: 20134 - DNA, 20 bp, Artificial Sequence
  Description of Artificial Sequence: Synthetic oligonucleotide
  Target: SCNA; (-) strand; PAM type: NRG; PAM sequence: TGG
tttattgagacttgttcata

SEQ ID NO: 20135 - DNA, 20 bp, Artificial Sequence
  Description of Artificial Sequence: Synthetic oligonucleotide
  Target: SCNA; (-) strand; PAM type: NRG; PAM sequence: GAG
ttgattttcttaaatttatt

SEQ ID NO: 20136 - DNA, 20 bp, Artificial Sequence
  Description of Artificial Sequence: Synthetic oligonucleotide
  Target: SCNA; (-) strand; PAM type: NRG; PAM sequence: GAG
tttattccactgtggtctga

SEQ ID NO: 20137 - DNA, 20 bp, Artificial Sequence
  Description of Artificial Sequence: Synthetic oligonucleotide
  Target: SCNA; (-) strand; PAM type: NRG; PAM sequence: GAG
attttattccactgtggtct

SEQ ID NO: 20138 - DNA, 20 bp, Artificial Sequence
  Description of Artificial Sequence: Synthetic oligonucleotide
  Target: SCNA; (-) strand; PAM type: NRG; PAM sequence: TGG
tttttaattttattccactg

SEQ ID NO: 20139 - DNA, 20 bp, Artificial Sequence
  Description of Artificial Sequence: Synthetic oligonucleotide
  Target: SCNA; (-) strand; PAM type: NRG; PAM sequence: GAG
agttttgagggtttcttttg

SEQ ID NO: 20140 - DNA, 20 bp, Artificial Sequence
  Description of Artificial Sequence: Synthetic oligonucleotide
  Target: SCNA; (-) strand; PAM type: NRG; PAM sequence: TGG
atagttttgagggtttcttt

SEQ ID NO: 20141 - DNA, 20 bp, Artificial Sequence
  Description of Artificial Sequence: Synthetic oligonucleotide
  Target: SCNA; (-) strand; PAM type: NRG; PAM sequence: GGG
atgtatttgtatagttttga

SEQ ID NO: 20142 - DNA, 20 bp, Artificial Sequence
  Description of Artificial Sequence: Synthetic oligonucleotide
  Target: SCNA; (-) strand; PAM type: NRG; PAM sequence: AGG
catgtatttgtatagttttg

SEQ ID NO: 20143 - DNA, 20 bp, Artificial Sequence
  Description of Artificial Sequence: Synthetic oligonucleotide
  Target: SCNA; (-) strand; PAM type: NRG; PAM sequence: GAG
ccatgtatttgtatagtttt

SEQ ID NO: 20144 - DNA, 20 bp, Artificial Sequence
  Description of Artificial Sequence: Synthetic oligonucleotide
  Target: SCNA; (-) strand; PAM type: NRG; PAM sequence: TAG
tcgatttccatgtatttgta

SEQ ID NO: 20145 - DNA, 20 bp, Artificial Sequence
  Description of Artificial Sequence: Synthetic oligonucleotide
  Target: SCNA; (-) strand; PAM type: NRG; PAM sequence: CAG
acccaaagatcattcaggag

SEQ ID NO: 20146 - DNA, 20 bp, Artificial Sequence
  Description of Artificial Sequence: Synthetic oligonucleotide
  Target: SCNA; (-) strand; PAM type: NRG; PAM sequence: GAG
ttgacccaaagatcattcag

SEQ ID NO: 20147 - DNA, 20 bp, Artificial Sequence
  Description of Artificial Sequence: Synthetic oligonucleotide
  Target: SCNA; (-) strand; PAM type: NRG; PAM sequence: AGG
tgttgacccaaagatcattc

SEQ ID NO: 20148 - DNA, 20 bp, Artificial Sequence
  Description of Artificial Sequence: Synthetic oligonucleotide
  Target: SCNA; (-) strand; PAM type: NRG; PAM sequence: CAG
ttgttgacccaaagatcatt

SEQ ID NO: 20149 - DNA, 20 bp, Artificial Sequence
  Description of Artificial Sequence: Synthetic oligonucleotide
  Target: SCNA; (-) strand; PAM type: NRG; PAM sequence: AAG
ttgatttcattgttgaccca

SEQ ID NO: 20150 - DNA, 20 bp, Artificial Sequence
  Description of Artificial Sequence: Synthetic oligonucleotide
  Target: SCNA; (-) strand; PAM type: NRG; PAM sequence: AGG
tgtatcccagaggttgtgat

SEQ ID NO: 20151 - DNA, 20 bp, Artificial Sequence
  Description of Artificial Sequence: Synthetic oligonucleotide
  Target: SCNA; (-) strand; PAM type: NRG; PAM sequence: TAG
ctgtatcccagaggttgtga

SEQ ID NO: 20152 - DNA, 20 bp, Artificial Sequence
  Description of Artificial Sequence: Synthetic oligonucleotide
  Target: SCNA; (-) strand; PAM type: NRG; PAM sequence: AGG
tggcttttgctgtatcccag

SEQ ID NO: 20153 - DNA, 20 bp, Artificial Sequence
  Description of Artificial Sequence: Synthetic oligonucleotide
  Target: SCNA; (-) strand; PAM type: NRG; PAM sequence: GAG
atggcttttgctgtatccca

SEQ ID NO: 20154 - DNA, 20 bp, Artificial Sequence
  Description of Artificial Sequence: Synthetic oligonucleotide
  Target: SCNA; (-) strand; PAM type: NRG; PAM sequence: CAG
acatggcttttgctgtatcc

SEQ ID NO: 20155 - DNA, 20 bp, Artificial Sequence
  Description of Artificial Sequence: Synthetic oligonucleotide
  Target: SCNA; (-) strand; PAM type: NRG; PAM sequence: TGG
tatgaactttgctcttaaca

SEQ ID NO: 20156 - DNA, 20 bp, Artificial Sequence
  Description of Artificial Sequence: Synthetic oligonucleotide
  Target: SCNA; (-) strand; PAM type: NRG; PAM sequence: TAG
ctctttcagactttttgatg

SEQ ID NO: 20157 - DNA, 20 bp, Artificial Sequence
  Description of Artificial Sequence: Synthetic oligonucleotide
  Target: SCNA; (-) strand; PAM type: NRG; PAM sequence: CAG
attgtctatttgtgctcttt

SEQ ID NO: 20158 - DNA, 20 bp, Artificial Sequence
  Description of Artificial Sequence: Synthetic oligonucleotide
  Target: SCNA; (-) strand; PAM type: NRG; PAM sequence: CAG
agttcctagaggtgtaagct

SEQ ID NO: 20159 - DNA, 20 bp, Artificial Sequence
  Description of Artificial Sequence: Synthetic oligonucleotide
  Target: SCNA; (-) strand; PAM type: NRG; PAM sequence: AAG
tttccagttcctagaggtgt

SEQ ID NO: 20160 - DNA, 20 bp, Artificial Sequence
  Description of Artificial Sequence: Synthetic oligonucleotide
  Target: SCNA; (-) strand; PAM type: NRG; PAM sequence: AGG
cttgtttttccagttcctag

SEQ ID NO: 20161 - DNA, 20 bp, Artificial Sequence
  Description of Artificial Sequence: Synthetic oligonucleotide
  Target: SCNA; (-) strand; PAM type: NRG; PAM sequence: GAG
tcttgtttttccagttccta

SEQ ID NO: 20162 - DNA, 20 bp, Artificial Sequence
  Description of Artificial Sequence: Synthetic oligonucleotide
  Target: SCNA; (-) strand; PAM type: NRG; PAM sequence: TAG
tgtcttgtttttccagttcc

SEQ ID NO: 20163 - DNA, 20 bp, Artificial Sequence
  Description of Artificial Sequence: Synthetic oligonucleotide
  Target: SCNA; (-) strand; PAM type: NRG; PAM sequence: CAG
tttgctttgtcttgtttttc

SEQ ID NO: 20164 - DNA, 20 bp, Artificial Sequence
  Description of Artificial Sequence: Synthetic oligonucleotide
  Target: SCNA; (-) strand; PAM type: NRG; PAM sequence: GGG
tcttttcttctgctgggttt

SEQ ID NO: 20165 - DNA, 20 bp, Artificial Sequence
  Description of Artificial Sequence: Synthetic oligonucleotide
  Target: SCNA; (-) strand; PAM type: NRG; PAM sequence: TGG
ttcttttcttctgctgggtt

SEQ ID NO: 20166 - DNA, 20 bp, Artificial Sequence
  Description of Artificial Sequence: Synthetic oligonucleotide
  Target: SCNA; (-) strand; PAM type: NRG; PAM sequence: GGG
gttatttcttttcttctgct

SEQ ID NO: 20167 - DNA, 20 bp, Artificial Sequence
  Description of Artificial Sequence: Synthetic oligonucleotide
  Target: SCNA; (-) strand; PAM type: NRG; PAM sequence: TGG
tgttatttcttttcttctgc

SEQ ID NO: 20168 - DNA, 20 bp, Artificial Sequence
  Description of Artificial Sequence: Synthetic oligonucleotide
  Target: SCNA; (-) strand; PAM type: NRG; PAM sequence: AAG
caggtgtgagccaccacact

SEQ ID NO: 20169 - DNA, 20 bp, Artificial Sequence
  Description of Artificial Sequence: Synthetic oligonucleotide
  Target: SCNA; (-) strand; PAM type: NRG; PAM sequence: GAG
agtgctgcgattacaggtgt

SEQ ID NO: 20170 - DNA, 20 bp, Artificial Sequence
  Description of Artificial Sequence: Synthetic oligonucleotide
  Target: SCNA; (-) strand; PAM type: NRG; PAM sequence: AGG
tcccaaagtgctgcgattac

SEQ ID NO: 20171 - DNA, 20 bp, Artificial Sequence
  Description of Artificial Sequence: Synthetic oligonucleotide
  Target: SCNA; (-) strand; PAM type: NRG; PAM sequence: CAG
ctcccaaagtgctgcgatta

SEQ ID NO: 20172 - DNA, 20 bp, Artificial Sequence
  Description of Artificial Sequence: Synthetic oligonucleotide
  Target: SCNA; (-) strand; PAM type: NRG; PAM sequence: AAG
ccgcctgccttggcctccca

SEQ ID NO: 20173 - DNA, 20 bp, Artificial Sequence
  Description of Artificial Sequence: Synthetic oligonucleotide
  Target: SCNA; (-) strand; PAM type: NRG; PAM sequence: TGG
ttatggtgatccgcctgcct

SEQ ID NO: 20174 - DNA, 20 bp, Artificial Sequence
  Description of Artificial Sequence: Synthetic oligonucleotide
  Target: SCNA; (-) strand; PAM type: NRG; PAM sequence: TGG
ggtctcaaactcctgactta

SEQ ID NO: 20175 - DNA, 20 bp, Artificial Sequence
  Description of Artificial Sequence: Synthetic oligonucleotide
  Target: SCNA; (-) strand; PAM type: NRG; PAM sequence: AGG
tttcaccatgttggccaggc

SEQ ID NO: 20176 - DNA, 20 bp, Artificial Sequence
  Description of Artificial Sequence: Synthetic oligonucleotide
  Target: SCNA; (-) strand; PAM type: NRG; PAM sequence: CAG
gtttcaccatgttggccagg

SEQ ID NO: 20177 - DNA, 20 bp, Artificial Sequence
  Description of Artificial Sequence: Synthetic oligonucleotide
  Target: SCNA; (-) strand; PAM type: NRG; PAM sequence: AGG
ggggtttcaccatgttggcc

SEQ ID NO: 20178 - DNA, 20 bp, Artificial Sequence
  Description of Artificial Sequence: Synthetic oligonucleotide
  Target: SCNA; (-) strand; PAM type: NRG; PAM sequence: CAG
cggggtttcaccatgttggc

SEQ ID NO: 20179 - DNA, 20 bp, Artificial Sequence
  Description of Artificial Sequence: Synthetic oligonucleotide
  Target: SCNA; (-) strand; PAM type: NRG; PAM sequence: TGG
gagacggggtttcaccatgt

SEQ ID NO: 20180 - DNA, 20 bp, Artificial Sequence
  Description of Artificial Sequence: Synthetic oligonucleotide
  Target: SCNA; (-) strand; PAM type: NRG; PAM sequence: GGG
ttgtatttttagtagagacg

SEQ ID NO: 20181 - DNA, 20 bp, Artificial Sequence
  Description of Artificial Sequence: Synthetic oligonucleotide
  Target: SCNA; (-) strand; PAM type: NRG; PAM sequence: GGG
tttgtatttttagtagagac

SEQ ID NO: 20182 - DNA, 20 bp, Artificial Sequence
  Description of Artificial Sequence: Synthetic oligonucleotide
  Target: SCNA; (-) strand; PAM type: NRG; PAM sequence: CGG
ttttgtatttttagtagaga

SEQ ID NO: 20183 - DNA, 20 bp, Artificial Sequence
  Description of Artificial Sequence: Synthetic oligonucleotide
  Target: SCNA; (-) strand; PAM type: NRG; PAM sequence: GAG
taatttttgtatttttagta

SEQ ID NO: 20184 - DNA, 20 bp, Artificial Sequence
  Description of Artificial Sequence: Synthetic oligonucleotide
  Target: SCNA; (-) strand; PAM type: NRG; PAM sequence: TAG
gctaatttttgtatttttag

SEQ ID NO: 20185 - DNA, 20 bp, Artificial Sequence
  Description of Artificial Sequence: Synthetic oligonucleotide
  Target: SCNA; (-) strand; PAM type: NRG; PAM sequence: TAG
ctggctaatttttgtatttt

SEQ ID NO: 20186 - DNA, 20 bp, Artificial Sequence
  Description of Artificial Sequence: Synthetic oligonucleotide
  Target: SCNA; (-) strand; PAM type: NRG; PAM sequence: TGG
caggtgcctgccaccacacc

SEQ ID NO: 20187 - DNA, 20 bp, Artificial Sequence
  Description of Artificial Sequence: Synthetic oligonucleotide
  Target: SCNA; (-) strand; PAM type: NRG; PAM sequence: AGG
gcccgagtagctgggactac

SEQ ID NO: 20188 - DNA, 20 bp, Artificial Sequence
  Description of Artificial Sequence: Synthetic oligonucleotide
  Target: SCNA; (-) strand; PAM type: NRG; PAM sequence: CAG
tgcccgagtagctgggacta

SEQ ID NO: 20189 - DNA, 20 bp, Artificial Sequence
  Description of Artificial Sequence: Synthetic oligonucleotide
  Target: SCNA; (-) strand; PAM type: NRG; PAM sequence: GGG
cctcagctgcccgagtagct

SEQ ID NO: 20190 - DNA, 20 bp, Artificial Sequence
  Description of Artificial Sequence: Synthetic oligonucleotide
  Target: SCNA; (-) strand; PAM type: NRG; PAM sequence: TGG
gcctcagctgcccgagtagc

SEQ ID NO: 20191 - DNA, 20 bp, Artificial Sequence
  Description of Artificial Sequence: Synthetic oligonucleotide
  Target: SCNA; (-) strand; PAM type: NRG; PAM sequence: TAG
tcttgcctcagctgcccgag

SEQ ID NO: 20192 - DNA, 20 bp, Artificial Sequence
  Description of Artificial Sequence: Synthetic oligonucleotide
  Target: SCNA; (-) strand; PAM type: NRG; PAM sequence: GAG
ttctcttgcctcagctgccc

SEQ ID NO: 20193 - DNA, 20 bp, Artificial Sequence
  Description of Artificial Sequence: Synthetic oligonucleotide
  Target: SCNA; (-) strand; PAM type: NRG; PAM sequence: CAG
ttcaagtgattctcttgcct

SEQ ID NO: 20194 - DNA, 20 bp, Artificial Sequence
  Description of Artificial Sequence: Synthetic oligonucleotide
  Target: SCNA; (-) strand; PAM type: NRG; PAM sequence: AAG
aacatctgccttccaggttc

SEQ ID NO: 20195 - DNA, 20 bp, Artificial Sequence
  Description of Artificial Sequence: Synthetic oligonucleotide
  Target: SCNA; (-) strand; PAM type: NRG; PAM sequence: AGG
cactgcaacatctgccttcc

SEQ ID NO: 20196 - DNA, 20 bp, Artificial Sequence
  Description of Artificial Sequence: Synthetic oligonucleotide
  Target: SCNA; (-) strand; PAM type: NRG; PAM sequence: CAG
tcactgcaacatctgccttc

SEQ ID NO: 20197 - DNA, 20 bp, Artificial Sequence
  Description of Artificial Sequence: Synthetic oligonucleotide
  Target: SCNA; (-) strand; PAM type: NRG; PAM sequence: TGG
ggaatgcaacagtatgatct

SEQ ID NO: 20198 - DNA, 20 bp, Artificial Sequence
  Description of Artificial Sequence: Synthetic oligonucleotide
  Target: SCNA; (-) strand; PAM type: NRG; PAM sequence: CAG
ttacccaggctggaatgcaa

SEQ ID NO: 20199 - DNA, 20 bp, Artificial Sequence
  Description of Artificial Sequence: Synthetic oligonucleotide
  Target: SCNA; (-) strand; PAM type: NRG; PAM sequence: TGG
ctcactcttgttacccaggc

SEQ ID NO: 20200 - DNA, 20 bp, Artificial Sequence
  Description of Artificial Sequence: Synthetic oligonucleotide
  Target: SCNA; (-) strand; PAM type: NRG; PAM sequence: AGG
gagtctcactcttgttaccc

SEQ ID NO: 20201 - DNA, 20 bp, Artificial Sequence
  Description of Artificial Sequence: Synthetic oligonucleotide
  Target: SCNA; (-) strand; PAM type: NRG; PAM sequence: CAG
ggagtctcactcttgttacc

SEQ ID NO: 20202 - DNA, 20 bp, Artificial Sequence
  Description of Artificial Sequence: Synthetic oligonucleotide
  Target: SCNA; (-) strand; PAM type: NRG; PAM sequence: GAG
tatttttattttttgagatg

SEQ ID NO: 20203 - DNA, 20 bp, Artificial Sequence
  Description of Artificial Sequence: Synthetic oligonucleotide
  Target: SCNA; (-) strand; PAM type: NRG; PAM sequence: TGG
tttatttttattttttgaga

SEQ ID NO: 20204 - DNA, 20 bp, Artificial Sequence
  Description of Artificial Sequence: Synthetic oligonucleotide
  Target: SCNA; (-) strand; PAM type: NRG; PAM sequence: GAG
tatttttatttttatttttt

SEQ ID NO: 20205 - DNA, 20 bp, Artificial Sequence
  Description of Artificial Sequence: Synthetic oligonucleotide
  Target: SCNA; (-) strand; PAM type: NRG; PAM sequence: AGG
gtttatcttttcaaagaagc

SEQ ID NO: 20206 - DNA, 20 bp, Artificial Sequence
  Description of Artificial Sequence: Synthetic oligonucleotide
  Target: SCNA; (-) strand; PAM type: NRG; PAM sequence: CAG
tgtttatcttttcaaagaag

SEQ ID NO: 20207 - DNA, 20 bp, Artificial Sequence
  Description of Artificial Sequence: Synthetic oligonucleotide
  Target: SCNA; (-) strand; PAM type: NRG; PAM sequence: AAG
ttttgtttatcttttcaaag

SEQ ID NO: 20208 - DNA, 20 bp, Artificial Sequence
  Description of Artificial Sequence: Synthetic oligonucleotide
  Target: SCNA; (-) strand; PAM type: NRG; PAM sequence: AAG
tgattttgtttatcttttca

SEQ ID NO: 20209 - DNA, 20 bp, Artificial Sequence
  Description of Artificial Sequence: Synthetic oligonucleotide
  Target: SCNA; (-) strand; PAM type: NRG; PAM sequence: TGG
ttcttggttaatcttgccaa

SEQ ID NO: 20210 - DNA, 20 bp, Artificial Sequence
  Description of Artificial Sequence: Synthetic oligonucleotide
  Target: SCNA; (-) strand; PAM type: NRG; PAM sequence: TGG
gatcttttttcttgttttct

SEQ ID NO: 20211 - DNA, 20 bp, Artificial Sequence
  Description of Artificial Sequence: Synthetic oligonucleotide
  Target: SCNA; (-) strand; PAM type: NRG; PAM sequence: TAG
catttctaattgagcttgtt

SEQ ID NO: 20212 - DNA, 20 bp, Artificial Sequence
  Description of Artificial Sequence: Synthetic oligonucleotide
  Target: SCNA; (-) strand; PAM type: NRG; PAM sequence: GAG
ctcccatttcatttctaatt

SEQ ID NO: 20213 - DNA, 20 bp, Artificial Sequence
  Description of Artificial Sequence: Synthetic oligonucleotide
  Target: SCNA; (-) strand; PAM type: NRG; PAM sequence: TAG
tatttctgtggtatcagttg

SEQ ID NO: 20214 - DNA, 20 bp, Artificial Sequence
  Description of Artificial Sequence: Synthetic oligonucleotide
  Target: SCNA; (-) strand; PAM type: NRG; PAM sequence: CAG
cttttttatttctgtggtat

SEQ ID NO: 20215 - DNA, 20 bp, Artificial Sequence
  Description of Artificial Sequence: Synthetic oligonucleotide
  Target: SCNA; (-) strand; PAM type: NRG; PAM sequence: TGG
aataatcttttttatttctg

SEQ ID NO: 20216 - DNA, 20 bp, Artificial Sequence
  Description of Artificial Sequence: Synthetic oligonucleotide
  Target: SCNA; (-) strand; PAM type: NRG; PAM sequence: TAG
gtacgtaaatgtgttcacag

SEQ ID NO: 20217 - DNA, 20 bp, Artificial Sequence
  Description of Artificial Sequence: Synthetic oligonucleotide
  Target: SCNA; (-) strand; PAM type: NRG; PAM sequence: CAG
tgtgtacgtaaatgtgttca

SEQ ID NO: 20218 - DNA, 20 bp, Artificial Sequence
  Description of Artificial Sequence: Synthetic oligonucleotide
  Target: SCNA; (-) strand; PAM type: NRG; PAM sequence: TAG
tccatctcttcttggttttc

SEQ ID NO: 20219 - DNA, 20 bp, Artificial Sequence
  Description of Artificial Sequence: Synthetic oligonucleotide
  Target: SCNA; (-) strand; PAM type: NRG; PAM sequence: TGG
ggaatttgtccatctcttct

SEQ ID NO: 20220 - DNA, 20 bp, Artificial Sequence
  Description of Artificial Sequence: Synthetic oligonucleotide
  Target: SCNA; (-) strand; PAM type: NRG; PAM sequence: AGG
taggaggtttgtatatatgc

SEQ ID NO: 20221 - DNA, 20 bp, Artificial Sequence
  Description of Artificial Sequence: Synthetic oligonucleotide
  Target: SCNA; (-) strand; PAM type: NRG; PAM sequence: CAG
ctaggaggtttgtatatatg

SEQ ID NO: 20222 - DNA, 20 bp, Artificial Sequence
  Description of Artificial Sequence: Synthetic oligonucleotide
  Target: SCNA; (-) strand; PAM type: NRG; PAM sequence: AGG
tcttcctgttttaatctagg

SEQ ID NO: 20223 - DNA, 20 bp, Artificial Sequence
  Description of Artificial Sequence: Synthetic oligonucleotide
  Target: SCNA; (-) strand; PAM type: NRG; PAM sequence: GAG
ttcttcctgttttaatctag

SEQ ID NO: 20224 - DNA, 20 bp, Artificial Sequence
  Description of Artificial Sequence: Synthetic oligonucleotide
  Target: SCNA; (-) strand; PAM type: NRG; PAM sequence: AGG
atttcttcctgttttaatct

SEQ ID NO: 20225 - DNA, 20 bp, Artificial Sequence
  Description of Artificial Sequence: Synthetic oligonucleotide
  Target: SCNA; (-) strand; PAM type: NRG; PAM sequence: TAG
tatttcttcctgttttaatc

SEQ ID NO: 20226 - DNA, 20 bp, Artificial Sequence
  Description of Artificial Sequence: Synthetic oligonucleotide
  Target: SCNA; (-) strand; PAM type: NRG; PAM sequence: TGG
tcactctcactatgcattat

SEQ ID NO: 20227 - DNA, 20 bp, Artificial Sequence
  Description of Artificial Sequence: Synthetic oligonucleotide
  Target: SCNA; (-) strand; PAM type: NRG; PAM sequence: TAG
cctgtgaatccatctggtcc

SEQ ID NO: 20228 - DNA, 20 bp, Artificial Sequence
  Description of Artificial Sequence: Synthetic oligonucleotide
  Target: SCNA; (-) strand; PAM type: NRG; PAM sequence: TGG
cattcacctgtgaatccatc

SEQ ID NO: 20229 - DNA, 20 bp, Artificial Sequence
  Description of Artificial Sequence: Synthetic oligonucleotide
  Target: SCNA; (-) strand; PAM type: NRG; PAM sequence: TAG
atttttctttgaatttctga

SEQ ID NO: 20230 - DNA, 20 bp, Artificial Sequence
  Description of Artificial Sequence: Synthetic oligonucleotide
  Target: SCNA; (-) strand; PAM type: NRG; PAM sequence: TAG
atcttttggaacagtttcaa

SEQ ID NO: 20231 - DNA, 20 bp, Artificial Sequence
  Description of Artificial Sequence: Synthetic oligonucleotide
  Target: SCNA; (-) strand; PAM type: NRG; PAM sequence: CAG
tctgtctctatcttttggaa

SEQ ID NO: 20232 - DNA, 20 bp, Artificial Sequence
  Description of Artificial Sequence: Synthetic oligonucleotide
  Target: SCNA; (-) strand; PAM type: NRG; PAM sequence: TGG
ttccctctgtctctatcttt

SEQ ID NO: 20233 - DNA, 20 bp, Artificial Sequence
  Description of Artificial Sequence: Synthetic oligonucleotide
  Target: SCNA; (-) strand; PAM type: NRG; PAM sequence: AGG
cttcatagaatgatttaggg

SEQ ID NO: 20234 - DNA, 20 bp, Artificial Sequence
  Description of Artificial Sequence: Synthetic oligonucleotide
  Target: SCNA; (-) strand; PAM type: NRG; PAM sequence: GAG
gcttcatagaatgatttagg

SEQ ID NO: 20235 - DNA, 20 bp, Artificial Sequence
  Description of Artificial Sequence: Synthetic oligonucleotide
  Target: SCNA; (-) strand; PAM type: NRG; PAM sequence: GGG
tggcttcatagaatgattta

SEQ ID NO: 20236 - DNA, 20 bp, Artificial Sequence
  Description of Artificial Sequence: Synthetic oligonucleotide
  Target: SCNA; (-) strand; PAM type: NRG; PAM sequence: AGG
ctggcttcatagaatgattt

SEQ ID NO: 20237 - DNA, 20 bp, Artificial Sequence
  Description of Artificial Sequence: Synthetic oligonucleotide
  Target: SCNA; (-) strand; PAM type: NRG; PAM sequence: TAG
actggcttcatagaatgatt

SEQ ID NO: 20238 - DNA, 20 bp, Artificial Sequence
  Description of Artificial Sequence: Synthetic oligonucleotide
  Target: SCNA; (-) strand; PAM type: NRG; PAM sequence: TAG
ttagggtaatactggcttca

SEQ ID NO: 20239 - DNA, 20 bp, Artificial Sequence
  Description of Artificial Sequence: Synthetic oligonucleotide
  Target: SCNA; (-) strand; PAM type: NRG; PAM sequence: TGG
ttttgatattagggtaatac

SEQ ID NO: 20240 - DNA, 20 bp, Artificial Sequence
  Description of Artificial Sequence: Synthetic oligonucleotide
  Target: SCNA; (-) strand; PAM type: NRG; PAM sequence: GGG
cttttctggttttgatatta

SEQ ID NO: 20241 - DNA, 20 bp, Artificial Sequence
  Description of Artificial Sequence: Synthetic oligonucleotide
  Target: SCNA; (-) strand; PAM type: NRG; PAM sequence: AGG
ccttttctggttttgatatt

SEQ ID NO: 20242 - DNA, 20 bp, Artificial Sequence
  Description of Artificial Sequence: Synthetic oligonucleotide
  Target: SCNA; (-) strand; PAM type: NRG; PAM sequence: TAG
tccttttctggttttgatat

SEQ ID NO: 20243 - DNA, 20 bp, Artificial Sequence
  Description of Artificial Sequence: Synthetic oligonucleotide
  Target: SCNA; (-) strand; PAM type: NRG; PAM sequence: TGG
ttttttgttatgtccttttc

SEQ ID NO: 20244 - DNA, 20 bp, Artificial Sequence
  Description of Artificial Sequence: Synthetic oligonucleotide
  Target: SCNA; (-) strand; PAM type: NRG; PAM sequence: TAG
tcatcagggatattggtctg

SEQ ID NO: 20245 - DNA, 20 bp, Artificial Sequence
  Description of Artificial Sequence: Synthetic oligonucleotide
  Target: SCNA; (-) strand; PAM type: NRG; PAM sequence: TGG
tctctgttcatcagggatat

SEQ ID NO: 20246 - DNA, 20 bp, Artificial Sequence
  Description of Artificial Sequence: Synthetic oligonucleotide
  Target: SCNA; (-) strand; PAM type: NRG; PAM sequence: GGG
ttttacatctctgttcatca

SEQ ID NO: 20247 - DNA, 20 bp, Artificial Sequence
  Description of Artificial Sequence: Synthetic oligonucleotide
  Target: SCNA; (-) strand; PAM type: NRG; PAM sequence: AGG
tttttacatctctgttcatc

SEQ ID NO: 20248 - DNA, 20 bp, Artificial Sequence
  Description of Artificial Sequence: Synthetic oligonucleotide
  Target: SCNA; (-) strand; PAM type: NRG; PAM sequence: CAG
atttttacatctctgttcat

SEQ ID NO: 20249 - DNA, 20 bp, Artificial Sequence
  Description of Artificial Sequence: Synthetic oligonucleotide
  Target: SCNA; (-) strand; PAM type: NRG; PAM sequence: AGG
atttagctagtattttattg

SEQ ID NO: 20250 - DNA, 20 bp, Artificial Sequence
  Description of Artificial Sequence: Synthetic oligonucleotide
  Target: SCNA; (-) strand; PAM type: NRG; PAM sequence: GAG
catttagctagtattttatt

SEQ ID NO: 20251 - DNA, 20 bp, Artificial Sequence
  Description of Artificial Sequence: Synthetic oligonucleotide
  Target: SCNA; (-) strand; PAM type: NRG; PAM sequence: TAG
tgctgctggattcatttagc

SEQ ID NO: 20252 - DNA, 20 bp, Artificial Sequence
  Description of Artificial Sequence: Synthetic oligonucleotide
  Target: SCNA; (-) strand; PAM type: NRG; PAM sequence: TAG
gatatgctgctggattcatt

SEQ ID NO: 20253 - DNA, 20 bp, Artificial Sequence
  Description of Artificial Sequence: Synthetic oligonucleotide
  Target: SCNA; (-) strand; PAM type: NRG; PAM sequence: TGG
ttatctttttgatatgctgc

SEQ ID NO: 20254 - DNA, 20 bp, Artificial Sequence
  Description of Artificial Sequence: Synthetic oligonucleotide
  Target: SCNA; (-) strand; PAM type: NRG; PAM sequence: TGG
tgaaacccacctgatcatgg

SEQ ID NO: 20255 - DNA, 20 bp, Artificial Sequence
  Description of Artificial Sequence: Synthetic oligonucleotide
  Target: SCNA; (-) strand; PAM type: NRG; PAM sequence: TGG
gtatgaaacccacctgatca

SEQ ID NO: 20256 - DNA, 20 bp, Artificial Sequence
  Description of Artificial Sequence: Synthetic oligonucleotide
  Target: SCNA; (-) strand; PAM type: NRG; PAM sequence: CGG
ttaaagcaaccctgcatccc

SEQ ID NO: 20257 - DNA, 20 bp, Artificial Sequence
  Description of Artificial Sequence: Synthetic oligonucleotide
  Target: SCNA; (-) strand; PAM type: NRG; PAM sequence: AAG
ttattgacttgcatatgtta

SEQ ID NO: 20258 - DNA, 20 bp, Artificial Sequence
  Description of Artificial Sequence: Synthetic oligonucleotide
  Target: SCNA; (-) strand; PAM type: NRG; PAM sequence: TGG
tgtttttactcctgcttata

SEQ ID NO: 20259 - DNA, 20 bp, Artificial Sequence
  Description of Artificial Sequence: Synthetic oligonucleotide
  Target: SCNA; (-) strand; PAM type: NRG; PAM sequence: GAG
atgctttttctgcatctatt

SEQ ID NO: 20260 - DNA, 20 bp, Artificial Sequence
  Description of Artificial Sequence: Synthetic oligonucleotide
  Target: SCNA; (-) strand; PAM type: NRG; PAM sequence: AAG
tgctgagggttttaatcata

SEQ ID NO: 20261 - DNA, 20 bp, Artificial Sequence
  Description of Artificial Sequence: Synthetic oligonucleotide
  Target: SCNA; (-) strand; PAM type: NRG; PAM sequence: GGG
ttatatgccagttttgctga

SEQ ID NO: 20262 - DNA, 20 bp, Artificial Sequence
  Description of Artificial Sequence: Synthetic oligonucleotide
  Target: SCNA; (-) strand; PAM type: NRG; PAM sequence: AGG
cttatatgccagttttgctg

SEQ ID NO: 20263 - DNA, 20 bp, Artificial Sequence
  Description of Artificial Sequence: Synthetic oligonucleotide
  Target: SCNA; (-) strand; PAM type: NRG; PAM sequence: GAG
tcttatatgccagttttgct

SEQ ID NO: 20264 - DNA, 20 bp, Artificial Sequence
  Description of Artificial Sequence: Synthetic oligonucleotide
  Target: SCNA; (-) strand; PAM type: NRG; PAM sequence: CAG
aaggtgtgtatcttatatgc

SEQ ID NO: 20265 - DNA, 20 bp, Artificial Sequence
  Description of Artificial Sequence: Synthetic oligonucleotide
  Target: SCNA; (-) strand; PAM type: NRG; PAM sequence: AGG
aagtggcttttattacctta

SEQ ID NO: 20266 - DNA, 20 bp, Artificial Sequence
  Description of Artificial Sequence: Synthetic oligonucleotide
  Target: SCNA; (-) strand; PAM type: NRG; PAM sequence: AAG
taagtggcttttattacctt

SEQ ID NO: 20267 - DNA, 20 bp, Artificial Sequence
  Description of Artificial Sequence: Synthetic oligonucleotide
  Target: SCNA; (-) strand; PAM type: NRG; PAM sequence: TGG
ggctgtgggtttgtcataag

SEQ ID NO: 20268 - DNA, 20 bp, Artificial Sequence
  Description of Artificial Sequence: Synthetic oligonucleotide
  Target: SCNA; (-) strand; PAM type: NRG; PAM sequence: AAG
gttggctgtgggtttgtcat

SEQ ID NO: 20269 - DNA, 20 bp, Artificial Sequence
  Description of Artificial Sequence: Synthetic oligonucleotide
  Target: SCNA; (-) strand; PAM type: NRG; PAM sequence: GGG
ttcaatataatgttggctgt

SEQ ID NO: 20270 - DNA, 20 bp, Artificial Sequence
  Description of Artificial Sequence: Synthetic oligonucleotide
  Target: SCNA; (-) strand; PAM type: NRG; PAM sequence: TGG
gttcaatataatgttggctg

SEQ ID NO: 20271 - DNA, 20 bp, Artificial Sequence
  Description of Artificial Sequence: Synthetic oligonucleotide
  Target: SCNA; (-) strand; PAM type: NRG; PAM sequence: TGG
tcccccgttcaatataatgt

SEQ ID NO: 20272 - DNA, 20 bp, Artificial Sequence
  Description of Artificial Sequence: Synthetic oligonucleotide
  Target: SCNA; (-) strand; PAM type: NRG; PAM sequence: GGG
tgtcttattccagttctcgg

SEQ ID NO: 20273 - DNA, 20 bp, Artificial Sequence
  Description of Artificial Sequence: Synthetic oligonucleotide
  Target: SCNA; (-) strand; PAM type: NRG; PAM sequence: GGG
ttgtcttattccagttctcg

SEQ ID NO: 20274 - DNA, 20 bp, Artificial Sequence
  Description of Artificial Sequence: Synthetic oligonucleotide
  Target: SCNA; (-) strand; PAM type: NRG; PAM sequence: GGG
cttgtcttattccagttctc

SEQ ID NO: 20275 - DNA, 20 bp, Artificial Sequence
  Description of Artificial Sequence: Synthetic oligonucleotide
  Target: SCNA; (-) strand; PAM type: NRG; PAM sequence: CGG
tcttgtcttattccagttct

SEQ ID NO: 20276 - DNA, 20 bp, Artificial Sequence
  Description of Artificial Sequence: Synthetic oligonucleotide
  Target: SCNA; (-) strand; PAM type: NRG; PAM sequence: CAG
caggcattcttgtcttattc

SEQ ID NO: 20277 - DNA, 20 bp, Artificial Sequence
  Description of Artificial Sequence: Synthetic oligonucleotide
  Target: SCNA; (-) strand; PAM type: NRG; PAM sequence: AGG
tgaatagaagtggtgaaagc

SEQ ID NO: 20278 - DNA, 20 bp, Artificial Sequence
  Description of Artificial Sequence: Synthetic oligonucleotide
  Target: SCNA; (-) strand; PAM type: NRG; PAM sequence: CAG
ttgaatagaagtggtgaaag

SEQ ID NO: 20279 - DNA, 20 bp, Artificial Sequence
  Description of Artificial Sequence: Synthetic oligonucleotide
  Target: SCNA; (-) strand; PAM type: NRG; PAM sequence: AAG
atgttgaatagaagtggtga

SEQ ID NO: 20280 - DNA, 20 bp, Artificial Sequence
  Description of Artificial Sequence: Synthetic oligonucleotide
  Target: SCNA; (-) strand; PAM type: NRG; PAM sequence: TGG
agtactatgttgaatagaag

SEQ ID NO: 20281 - DNA, 20 bp, Artificial Sequence
  Description of Artificial Sequence: Synthetic oligonucleotide
  Target: SCNA; (-) strand; PAM type: NRG; PAM sequence: AAG
tccagtactatgttgaatag

SEQ ID NO: 20282 - DNA, 20 bp, Artificial Sequence
  Description of Artificial Sequence: Synthetic oligonucleotide
  Target: SCNA; (-) strand; PAM type: NRG; PAM sequence: TAG
atttccagtactatgttgaa

SEQ ID NO: 20283 - DNA, 20 bp, Artificial Sequence
  Description of Artificial Sequence: Synthetic oligonucleotide
  Target: SCNA; (-) strand; PAM type: NRG; PAM sequence: CAG
attgctctggctaggatttc

SEQ ID NO: 20284 - DNA, 20 bp, Artificial Sequence
  Description of Artificial Sequence: Synthetic oligonucleotide
  Target: SCNA; (-) strand; PAM type: NRG; PAM sequence: AGG
cttgtctgattgctctggct

SEQ ID NO: 20285 - DNA, 20 bp, Artificial Sequence
  Description of Artificial Sequence: Synthetic oligonucleotide
  Target: SCNA; (-) strand; PAM type: NRG; PAM sequence: TAG
tcttgtctgattgctctggc

SEQ ID NO: 20286 - DNA, 20 bp, Artificial Sequence
  Description of Artificial Sequence: Synthetic oligonucleotide
  Target: SCNA; (-) strand; PAM type: NRG; PAM sequence: TGG
tttctcttgtctgattgctc

SEQ ID NO: 20287 - DNA, 20 bp, Artificial Sequence
  Description of Artificial Sequence: Synthetic oligonucleotide
  Target: SCNA; (-) strand; PAM type: NRG; PAM sequence: TGG
tgacttcctctttagcagtt

SEQ ID NO: 20288 - DNA, 20 bp, Artificial Sequence
  Description of Artificial Sequence: Synthetic oligonucleotide
  Target: SCNA; (-) strand; PAM type: NRG; PAM sequence: CAG
cagtttgacttcctctttag

SEQ ID NO: 20289 - DNA, 20 bp, Artificial Sequence
  Description of Artificial Sequence: Synthetic oligonucleotide
  Target: SCNA; (-) strand; PAM type: NRG; PAM sequence: TAG
caacagtttgacttcctctt

SEQ ID NO: 20290 - DNA, 20 bp, Artificial Sequence
  Description of Artificial Sequence: Synthetic oligonucleotide
  Target: SCNA; (-) strand; PAM type: NRG; PAM sequence: CAG
atatcatcggcaaagagcaa

SEQ ID NO: 20291 - DNA, 20 bp, Artificial Sequence
  Description of Artificial Sequence: Synthetic oligonucleotide
  Target: SCNA; (-) strand; PAM type: NRG; PAM sequence: GAG
acaaacatatcatcggcaaa

SEQ ID NO: 20292 - DNA, 20 bp, Artificial Sequence
  Description of Artificial Sequence: Synthetic oligonucleotide
  Target: SCNA; (-) strand; PAM type: NRG; PAM sequence: AAG
atacaaacatatcatcggca

SEQ ID NO: 20293 - DNA, 20 bp, Artificial Sequence
  Description of Artificial Sequence: Synthetic oligonucleotide
  Target: SCNA; (-) strand; PAM type: NRG; PAM sequence: CGG
taggtatacaaacatatcat

SEQ ID NO: 20294 - DNA, 20 bp, Artificial Sequence
  Description of Artificial Sequence: Synthetic oligonucleotide
  Target: SCNA; (-) strand; PAM type: NRG; PAM sequence: AGG
gatgagtctttaggttttct

SEQ ID NO: 20295 - DNA, 20 bp, Artificial Sequence
  Description of Artificial Sequence: Synthetic oligonucleotide
  Target: SCNA; (-) strand; PAM type: NRG; PAM sequence: TAG
ggatgagtctttaggttttc

SEQ ID NO: 20296 - DNA, 20 bp, Artificial Sequence
  Description of Artificial Sequence: Synthetic oligonucleotide
  Target: SCNA; (-) strand; PAM type: NRG; PAM sequence: AGG
agctttttggatgagtcttt

SEQ ID NO: 20297 - DNA, 20 bp, Artificial Sequence
  Description of Artificial Sequence: Synthetic oligonucleotide
  Target: SCNA; (-) strand; PAM type: NRG; PAM sequence: TAG
gagctttttggatgagtctt

SEQ ID NO: 20298 - DNA, 20 bp, Artificial Sequence
  Description of Artificial Sequence: Synthetic oligonucleotide
  Target: SCNA; (-) strand; PAM type: NRG; PAM sequence: GAG
gatctaggagctttttggat

SEQ ID NO: 20299 - DNA, 20 bp, Artificial Sequence
  Description of Artificial Sequence: Synthetic oligonucleotide
  Target: SCNA; (-) strand; PAM type: NRG; PAM sequence: TGG
tatcagatctaggagctttt

SEQ ID NO: 20300 - DNA, 20 bp, Artificial Sequence
  Description of Artificial Sequence: Synthetic oligonucleotide
  Target: SCNA; (-) strand; PAM type: NRG; PAM sequence: GAG
aattaacttatcagatctag

SEQ ID NO: 20301 - DNA, 20 bp, Artificial Sequence
  Description of Artificial Sequence: Synthetic oligonucleotide
  Target: SCNA; (-) strand; PAM type: NRG; PAM sequence: AGG
tgaattaacttatcagatct

SEQ ID NO: 20302 - DNA, 20 bp, Artificial Sequence
  Description of Artificial Sequence: Synthetic oligonucleotide
  Target: SCNA; (-) strand; PAM type: NRG; PAM sequence: TAG
ctgaattaacttatcagatc

SEQ ID NO: 20303 - DNA, 20 bp, Artificial Sequence
  Description of Artificial Sequence: Synthetic oligonucleotide
  Target: SCNA; (-) strand; PAM type: NRG; PAM sequence: CAG
actttactgaattaacttat

SEQ ID NO: 20304 - DNA, 20 bp, Artificial Sequence
  Description of Artificial Sequence: Synthetic oligonucleotide
  Target: SCNA; (-) strand; PAM type: NRG; PAM sequence: TGG
gtgtacattgattttgtatc

SEQ ID NO: 20305 - DNA, 20 bp, Artificial Sequence
  Description of Artificial Sequence: Synthetic oligonucleotide
  Target: SCNA; (-) strand; PAM type: NRG; PAM sequence: TGG
ttgctgttggtgtatagcac

SEQ ID NO: 20306 - DNA, 20 bp, Artificial Sequence
  Description of Artificial Sequence: Synthetic oligonucleotide
  Target: SCNA; (-) strand; PAM type: NRG; PAM sequence: TAG
gttttgttgctgttggtgta

SEQ ID NO: 20307 - DNA, 20 bp, Artificial Sequence
  Description of Artificial Sequence: Synthetic oligonucleotide
  Target: SCNA; (-) strand; PAM type: NRG; PAM sequence: TGG
attctcagttttgttgctgt

SEQ ID NO: 20308 - DNA, 20 bp, Artificial Sequence
  Description of Artificial Sequence: Synthetic oligonucleotide
  Target: SCNA; (-) strand; PAM type: NRG; PAM sequence: CAG
caagttcttaatttgattct

SEQ ID NO: 20309 - DNA, 20 bp, Artificial Sequence
  Description of Artificial Sequence: Synthetic oligonucleotide
  Target: SCNA; (-) strand; PAM type: NRG; PAM sequence: AAG
cagctgttgtaaaaaggctc

SEQ ID NO: 20310 - DNA, 20 bp, Artificial Sequence
  Description of Artificial Sequence: Synthetic oligonucleotide
  Target: SCNA; (-) strand; PAM type: NRG; PAM sequence: AGG
tttttgcagctgttgtaaaa

SEQ ID NO: 20311 - DNA, 20 bp, Artificial Sequence
  Description of Artificial Sequence: Synthetic oligonucleotide
  Target: SCNA; (-) strand; PAM type: NRG; PAM sequence: AAG
ttttttgcagctgttgtaaa

SEQ ID NO: 20312 - DNA, 20 bp, Artificial Sequence
  Description of Artificial Sequence: Synthetic oligonucleotide
  Target: SCNA; (-) strand; PAM type: NRG; PAM sequence: CAG
ctaagcattttttttttttg

SEQ ID NO: 20313 - DNA, 20 bp, Artificial Sequence
  Description of Artificial Sequence: Synthetic oligonucleotide
  Target: SCNA; (-) strand; PAM type: NRG; PAM sequence: AAG
ctttggttaggtatattcct

SEQ ID NO: 20314 - DNA, 20 bp, Artificial Sequence
  Description of Artificial Sequence: Synthetic oligonucleotide
  Target: SCNA; (-) strand; PAM type: NRG; PAM sequence: AGG
gatcttccacctctttggtt

SEQ ID NO: 20315 - DNA, 20 bp, Artificial Sequence
  Description of Artificial Sequence: Synthetic oligonucleotide
  Target: SCNA; (-) strand; PAM type: NRG; PAM sequence: TAG
agatcttccacctctttggt

SEQ ID NO: 20316 - DNA, 20 bp, Artificial Sequence
  Description of Artificial Sequence: Synthetic oligonucleotide
  Target: SCNA; (-) strand; PAM type: NRG; PAM sequence: TGG
gtagagatcttccacctctt

SEQ ID NO: 20317 - DNA, 20 bp, Artificial Sequence
  Description of Artificial Sequence: Synthetic oligonucleotide
  Target: SCNA; (-) strand; PAM type: NRG; PAM sequence: GAG
tattttgtagttttcctgta

SEQ ID NO: 20318 - DNA, 20 bp, Artificial Sequence
  Description of Artificial Sequence: Synthetic oligonucleotide
  Target: SCNA; (-) strand; PAM type: NRG; PAM sequence: TAG
aatattttgtagttttcctg

SEQ ID NO: 20319 - DNA, 20 bp, Artificial Sequence
  Description of Artificial Sequence: Synthetic oligonucleotide
  Target: SCNA; (-) strand; PAM type: NRG; PAM sequence: TAG
tttctttcagcaatattttg

SEQ ID NO: 20320 - DNA, 20 bp, Artificial Sequence
  Description of Artificial Sequence: Synthetic oligonucleotide
  Target: SCNA; (-) strand; PAM type: NRG; PAM sequence: CAG
ctgttgtctgtgatttcttt

SEQ ID NO: 20321 - DNA, 20 bp, Artificial Sequence
  Description of Artificial Sequence: Synthetic oligonucleotide
  Target: SCNA; (-) strand; PAM type: NRG; PAM sequence: TAG
aataagggatgtgttttcat

SEQ ID NO: 20322 - DNA, 20 bp, Artificial Sequence
  Description of Artificial Sequence: Synthetic oligonucleotide
  Target: SCNA; (-) strand; PAM type: NRG; PAM sequence: GGG
ttctgccaatccatgaataa

SEQ ID NO: 20323 - DNA, 20 bp, Artificial Sequence
  Description of Artificial Sequence: Synthetic oligonucleotide
  Target: SCNA; (-) strand; PAM type: NRG; PAM sequence: AGG
attctgccaatccatgaata

SEQ ID NO: 20324 - DNA, 20 bp, Artificial Sequence
  Description of Artificial Sequence: Synthetic oligonucleotide
  Target: SCNA; (-) strand; PAM type: NRG; PAM sequence: AAG
gattctgccaatccatgaat

SEQ ID NO: 20325 - DNA, 20 bp, Artificial Sequence
  Description of Artificial Sequence: Synthetic oligonucleotide
  Target: SCNA; (-) strand; PAM type: NRG; PAM sequence: CAG
aatttatagattgtttttgg

SEQ ID NO: 20326 - DNA, 20 bp, Artificial Sequence
  Description of Artificial Sequence: Synthetic oligonucleotide
  Target: SCNA; (-) strand; PAM type: NRG; PAM sequence: TGG
ttgaatttatagattgtttt

SEQ ID NO: 20327 - DNA, 20 bp, Artificial Sequence
  Description of Artificial Sequence: Synthetic oligonucleotide
  Target: SCNA; (-) strand; PAM type: NRG; PAM sequence: TAG
tgggagtcgcattgaattta

SEQ ID NO: 20328 - DNA, 20 bp, Artificial Sequence
  Description of Artificial Sequence: Synthetic oligonucleotide
  Target: SCNA; (-) strand; PAM type: NRG; PAM sequence: GAG
tgatggtggcattttgatgg

SEQ ID NO: 20329 - DNA, 20 bp, Artificial Sequence
  Description of Artificial Sequence: Synthetic oligonucleotide
  Target: SCNA; (-) strand; PAM type: NRG; PAM sequence: GGG
aatgatggtggcattttgat

SEQ ID NO: 20330 - DNA, 20 bp, Artificial Sequence
  Description of Artificial Sequence: Synthetic oligonucleotide
  Target: SCNA; (-) strand; PAM type: NRG; PAM sequence: TGG
gaatgatggtggcattttga

SEQ ID NO: 20331 - DNA, 20 bp, Artificial Sequence
  Description of Artificial Sequence: Synthetic oligonucleotide
  Target: SCNA; (-) strand; PAM type: NRG; PAM sequence: TGG
tgttctttgaagaatgatgg

SEQ ID NO: 20332 - DNA, 20 bp, Artificial Sequence
  Description of Artificial Sequence: Synthetic oligonucleotide
  Target: SCNA; (-) strand; PAM type: NRG; PAM sequence: TGG
tcttgttctttgaagaatga

SEQ ID NO: 20333 - DNA, 20 bp, Artificial Sequence
  Description of Artificial Sequence: Synthetic oligonucleotide
  Target: SCNA; (-) strand; PAM type: NRG; PAM sequence: AAG
attttttttcttgttctttg

SEQ ID NO: 20334 - DNA, 20 bp, Artificial Sequence
  Description of Artificial Sequence: Synthetic oligonucleotide
  Target: SCNA; (-) strand; PAM type: NRG; PAM sequence: AAG
ttttgttccatgtgaatttt

SEQ ID NO: 20335 - DNA, 20 bp, Artificial Sequence
  Description of Artificial Sequence: Synthetic oligonucleotide
  Target: SCNA; (-) strand; PAM type: NRG; PAM sequence: GGG
tagtcttgctttggctgtat

SEQ ID NO: 20336 - DNA, 20 bp, Artificial Sequence
  Description of Artificial Sequence: Synthetic oligonucleotide
  Target: SCNA; (-) strand; PAM type: NRG; PAM sequence: TGG
ttagtcttgctttggctgta

SEQ ID NO: 20337 - DNA, 20 bp, Artificial Sequence
  Description of Artificial Sequence: Synthetic oligonucleotide
  Target: SCNA; (-) strand; PAM type: NRG; PAM sequence: TGG
ttttttgcttagtcttgctt

SEQ ID NO: 20338 - DNA, 20 bp, Artificial Sequence
  Description of Artificial Sequence: Synthetic oligonucleotide
  Target: SCNA; (-) strand; PAM type: NRG; PAM sequence: TAG
cagatttgttattttttgct

SEQ ID NO: 20339 - DNA, 20 bp, Artificial Sequence
  Description of Artificial Sequence: Synthetic oligonucleotide
  Target: SCNA; (-) strand; PAM type: NRG; PAM sequence: CAG
gttgggtaatctagtgcctc

SEQ ID NO: 20340 - DNA, 20 bp, Artificial Sequence
  Description of Artificial Sequence: Synthetic oligonucleotide
  Target: SCNA; (-) strand; PAM type: NRG; PAM sequence: TAG
tagtttgaagttgggtaatc

SEQ ID NO: 20341 - DNA, 20 bp, Artificial Sequence
  Description of Artificial Sequence: Synthetic oligonucleotide
  Target: SCNA; (-) strand; PAM type: NRG; PAM sequence: GGG
ttgtagtatagtttgaagtt

SEQ ID NO: 20342 - DNA, 20 bp, Artificial Sequence
  Description of Artificial Sequence: Synthetic oligonucleotide
  Target: SCNA; (-) strand; PAM type: NRG; PAM sequence: TGG
cttgtagtatagtttgaagt

SEQ ID NO: 20343 - DNA, 20 bp, Artificial Sequence
  Description of Artificial Sequence: Synthetic oligonucleotide
  Target: SCNA; (-) strand; PAM type: NRG; PAM sequence: AAG
tagtcttgtagtatagtttg

SEQ ID NO: 20344 - DNA, 20 bp, Artificial Sequence
  Description of Artificial Sequence: Synthetic oligonucleotide
  Target: SCNA; (-) strand; PAM type: NRG; PAM sequence: TAG
ctaactatagtcttgtagta

SEQ ID NO: 20345 - DNA, 20 bp, Artificial Sequence
  Description of Artificial Sequence: Synthetic oligonucleotide
  Target: SCNA; (-) strand; PAM type: NRG; PAM sequence: TAG
ttttcctaactatagtcttg

SEQ ID NO: 20346 - DNA, 20 bp, Artificial Sequence
  Description of Artificial Sequence: Synthetic oligonucleotide
  Target: SCNA; (-) strand; PAM type: NRG; PAM sequence: TAG
ccatgctgttttcctaacta

SEQ ID NO: 20347 - DNA, 20 bp, Artificial Sequence
  Description of Artificial Sequence: Synthetic oligonucleotide
  Target: SCNA; (-) strand; PAM type: NRG; PAM sequence: TAG
ctacatgtctatttttatag

SEQ ID NO: 20348 - DNA, 20 bp, Artificial Sequence
  Description of Artificial Sequence: Synthetic oligonucleotide
  Target: SCNA; (-) strand; PAM type: NRG; PAM sequence: TAG
gatctacatgtctattttta

SEQ ID NO: 20349 - DNA, 20 bp, Artificial Sequence
  Description of Artificial Sequence: Synthetic oligonucleotide
  Target: SCNA; (-) strand; PAM type: NRG; PAM sequence: TGG
taagtatttagctttatttc

SEQ ID NO: 20350 - DNA, 20 bp, Artificial Sequence
  Description of Artificial Sequence: Synthetic oligonucleotide
  Target: SCNA; (-) strand; PAM type: NRG; PAM sequence: TAG
atcagttggctgtaagtatt

SEQ ID NO: 20351 - DNA, 20 bp, Artificial Sequence
  Description of Artificial Sequence: Synthetic oligonucleotide
  Target: SCNA; (-) strand; PAM type: NRG; PAM sequence: AAG
gttgaagatcagttggctgt

SEQ ID NO: 20352 - DNA, 20 bp, Artificial Sequence
  Description of Artificial Sequence: Synthetic oligonucleotide
  Target: SCNA; (-) strand; PAM type: NRG; PAM sequence: TGG
ttgctttgttgaagatcagt

SEQ ID NO: 20353 - DNA, 20 bp, Artificial Sequence
  Description of Artificial Sequence: Synthetic oligonucleotide
  Target: SCNA; (-) strand; PAM type: NRG; PAM sequence: CAG
ttgtttgctttgttgaagat

SEQ ID NO: 20354 - DNA, 20 bp, Artificial Sequence
  Description of Artificial Sequence: Synthetic oligonucleotide
  Target: SCNA; (-) strand; PAM type: NRG; PAM sequence: AAG
tgtttttgtttgctttgttg

SEQ ID NO: 20355 - DNA, 20 bp, Artificial Sequence
  Description of Artificial Sequence: Synthetic oligonucleotide
  Target: SCNA; (-) strand; PAM type: NRG; PAM sequence: AGG
cccaacaccatttgttgaat

SEQ ID NO: 20356 - DNA, 20 bp, Artificial Sequence
  Description of Artificial Sequence: Synthetic oligonucleotide
  Target: SCNA; (-) strand; PAM type: NRG; PAM sequence: TAG
tcccaacaccatttgttgaa

SEQ ID NO: 20357 - DNA, 20 bp, Artificial Sequence
  Description of Artificial Sequence: Synthetic oligonucleotide
  Target: SCNA; (-) strand; PAM type: NRG; PAM sequence: TGG
cagcttcattcttctacatg

SEQ ID NO: 20358 - DNA, 20 bp, Artificial Sequence
  Description of Artificial Sequence: Synthetic oligonucleotide
  Target: SCNA; (-) strand; PAM type: NRG; PAM sequence: CAG
taagttgagagatgaggatc

SEQ ID NO: 20359 - DNA, 20 bp, Artificial Sequence
  Description of Artificial Sequence: Synthetic oligonucleotide
  Target: SCNA; (-) strand; PAM type: NRG; PAM sequence: AGG
tttgtataagttgagagatg

SEQ ID NO: 20360 - DNA, 20 bp, Artificial Sequence
  Description of Artificial Sequence: Synthetic oligonucleotide
  Target: SCNA; (-) strand; PAM type: NRG; PAM sequence: GAG
ttttgtataagttgagagat

SEQ ID NO: 20361 - DNA, 20 bp, Artificial Sequence
  Description of Artificial Sequence: Synthetic oligonucleotide
  Target: SCNA; (-) strand; PAM type: NRG; PAM sequence: GAG
tggatttttgtataagttga

SEQ ID NO: 20362 - DNA, 20 bp, Artificial Sequence
  Description of Artificial Sequence: Synthetic oligonucleotide
  Target: SCNA; (-) strand; PAM type: NRG; PAM sequence: GAG
agtggatttttgtataagtt

SEQ ID NO: 20363 - DNA, 20 bp, Artificial Sequence
  Description of Artificial Sequence: Synthetic oligonucleotide
  Target: SCNA; (-) strand; PAM type: NRG; PAM sequence: AAG
tcttgagtggatttttgtat

SEQ ID NO: 20364 - DNA, 20 bp, Artificial Sequence
  Description of Artificial Sequence: Synthetic oligonucleotide
  Target: SCNA; (-) strand; PAM type: NRG; PAM sequence: TGG
agtctttgatccatcttgag

SEQ ID NO: 20365 - DNA, 20 bp, Artificial Sequence
  Description of Artificial Sequence: Synthetic oligonucleotide
  Target: SCNA; (-) strand; PAM type: NRG; PAM sequence: GAG
ttaagtctttgatccatctt

SEQ ID NO: 20366 - DNA, 20 bp, Artificial Sequence
  Description of Artificial Sequence: Synthetic oligonucleotide
  Target: SCNA; (-) strand; PAM type: NRG; PAM sequence: AAG
aggttttgggtcttagattt

SEQ ID NO: 20367 - DNA, 20 bp, Artificial Sequence
  Description of Artificial Sequence: Synthetic oligonucleotide
  Target: SCNA; (-) strand; PAM type: NRG; PAM sequence: TAG
atttttaaggttttgggtct

SEQ ID NO: 20368 - DNA, 20 bp, Artificial Sequence
  Description of Artificial Sequence: Synthetic oligonucleotide
  Target: SCNA; (-) strand; PAM type: NRG; PAM sequence: GGG
tctataatttttaaggtttt

SEQ ID NO: 20369 - DNA, 20 bp, Artificial Sequence
  Description of Artificial Sequence: Synthetic oligonucleotide
  Target: SCNA; (-) strand; PAM type: NRG; PAM sequence: TGG
ttctataatttttaaggttt

SEQ ID NO: 20370 - DNA, 20 bp, Artificial Sequence
  Description of Artificial Sequence: Synthetic oligonucleotide
  Target: SCNA; (-) strand; PAM type: NRG; PAM sequence: AGG
gttatcttctataattttta

SEQ ID NO: 20371 - DNA, 20 bp, Artificial Sequence
  Description of Artificial Sequence: Synthetic oligonucleotide
  Target: SCNA; (-) strand; PAM type: NRG; PAM sequence: AAG
tgttatcttctataattttt

SEQ ID NO: 20372 - DNA, 20 bp, Artificial Sequence
  Description of Artificial Sequence: Synthetic oligonucleotide
  Target: SCNA; (-) strand; PAM type: NRG; PAM sequence: GAG
gcttaagccagtgtctagaa

SEQ ID NO: 20373 - DNA, 20 bp, Artificial Sequence
  Description of Artificial Sequence: Synthetic oligonucleotide
  Target: SCNA; (-) strand; PAM type: NRG; PAM sequence: AAG
ttgcttaagccagtgtctag

SEQ ID NO: 20374 - DNA, 20 bp, Artificial Sequence
  Description of Artificial Sequence: Synthetic oligonucleotide
  Target: SCNA; (-) strand; PAM type: NRG; PAM sequence: TAG
tctttgcttaagccagtgtc

SEQ ID NO: 20375 - DNA, 20 bp, Artificial Sequence
  Description of Artificial Sequence: Synthetic oligonucleotide
  Target: SCNA; (-) strand; PAM type: NRG; PAM sequence: CAG
catgaactctttgcttaagc

SEQ ID NO: 20376 - DNA, 20 bp, Artificial Sequence
  Description of Artificial Sequence: Synthetic oligonucleotide
  Target: SCNA; (-) strand; PAM type: NRG; PAM sequence: AAG
tggtcatgaactctttgctt

SEQ ID NO: 20377 - DNA, 20 bp, Artificial Sequence
  Description of Artificial Sequence: Synthetic oligonucleotide
  Target: SCNA; (-) strand; PAM type: NRG; PAM sequence: TGG
tgcatttgcttttggtttct

SEQ ID NO: 20378 - DNA, 20 bp, Artificial Sequence
  Description of Artificial Sequence: Synthetic oligonucleotide
  Target: SCNA; (-) strand; PAM type: NRG; PAM sequence: TGG
gttgttgttgcatttgcttt

SEQ ID NO: 20379 - DNA, 20 bp, Artificial Sequence
  Description of Artificial Sequence: Synthetic oligonucleotide
  Target: SCNA; (-) strand; PAM type: NRG; PAM sequence: AGG
tgcagaagctttatagtttt

SEQ ID NO: 20380 - DNA, 20 bp, Artificial Sequence
  Description of Artificial Sequence: Synthetic oligonucleotide
  Target: SCNA; (-) strand; PAM type: NRG; PAM sequence: TAG
gtgcagaagctttatagttt

SEQ ID NO: 20381 - DNA, 20 bp, Artificial Sequence
  Description of Artificial Sequence: Synthetic oligonucleotide
  Target: SCNA; (-) strand; PAM type: NRG; PAM sequence: TAG
tttgctgtgcagaagcttta

SEQ ID NO: 20382 - DNA, 20 bp, Artificial Sequence
  Description of Artificial Sequence: Synthetic oligonucleotide
  Target: SCNA; (-) strand; PAM type: NRG; PAM sequence: AAG
ttatttcttttgctgtgcag

SEQ ID NO: 20383 - DNA, 20 bp, Artificial Sequence
  Description of Artificial Sequence: Synthetic oligonucleotide
  Target: SCNA; (-) strand; PAM type: NRG; PAM sequence: CAG
tgattatttcttttgctgtg

SEQ ID NO: 20384 - DNA, 20 bp, Artificial Sequence
  Description of Artificial Sequence: Synthetic oligonucleotide
  Target: SCNA; (-) strand; PAM type: NRG; PAM sequence: GGG
agatatttctcccattctgt

SEQ ID NO: 20385 - DNA, 20 bp, Artificial Sequence
  Description of Artificial Sequence: Synthetic oligonucleotide
  Target: SCNA; (-) strand; PAM type: NRG; PAM sequence: TGG
cagatatttctcccattctg

SEQ ID NO: 20386 - DNA, 20 bp, Artificial Sequence
  Description of Artificial Sequence: Synthetic oligonucleotide
  Target: SCNA; (-) strand; PAM type: NRG; PAM sequence: CAG
tttgtcagatggatagtttg

SEQ ID NO: 20387 - DNA, 20 bp, Artificial Sequence
  Description of Artificial Sequence: Synthetic oligonucleotide
  Target: SCNA; (-) strand; PAM type: NRG; PAM sequence: TAG
ttagtcctttgtcagatgga

SEQ ID NO: 20388 - DNA, 20 bp, Artificial Sequence
  Description of Artificial Sequence: Synthetic oligonucleotide
  Target: SCNA; (-) strand; PAM type: NRG; PAM sequence: TGG
gatattagtcctttgtcaga

SEQ ID NO: 20389 - DNA, 20 bp, Artificial Sequence
  Description of Artificial Sequence: Synthetic oligonucleotide
  Target: SCNA; (-) strand; PAM type: NRG; PAM sequence: CAG
tctggatattagtcctttgt

SEQ ID NO: 20390 - DNA, 20 bp, Artificial Sequence
  Description of Artificial Sequence: Synthetic oligonucleotide
  Target: SCNA; (-) strand; PAM type: NRG; PAM sequence: TAG
tccttgtagattctggatat

SEQ ID NO: 20391 - DNA, 20 bp, Artificial Sequence
  Description of Artificial Sequence: Synthetic oligonucleotide
  Target: SCNA; (-) strand; PAM type: NRG; PAM sequence: TGG
tttgagttccttgtagattc

SEQ ID NO: 20392 - DNA, 20 bp, Artificial Sequence
  Description of Artificial Sequence: Synthetic oligonucleotide
  Target: SCNA; (-) strand; PAM type: NRG; PAM sequence: TAG
tgatttgtttgagttccttg

SEQ ID NO: 20393 - DNA, 20 bp, Artificial Sequence
  Description of Artificial Sequence: Synthetic oligonucleotide
  Target: SCNA; (-) strand; PAM type: NRG; PAM sequence: GAG
tttttcttactgatttgttt

SEQ ID NO: 20394 - DNA, 20 bp, Artificial Sequence
  Description of Artificial Sequence: Synthetic oligonucleotide
  Target: SCNA; (-) strand; PAM type: NRG; PAM sequence: AGG
tccttagcccactttttgat

SEQ ID NO: 20395 - DNA, 20 bp, Artificial Sequence
  Description of Artificial Sequence: Synthetic oligonucleotide
  Target: SCNA; (-) strand; PAM type: NRG; PAM sequence: TAG
gtccttagcccactttttga

SEQ ID NO: 20396 - DNA, 20 bp, Artificial Sequence
  Description of Artificial Sequence: Synthetic oligonucleotide
  Target: SCNA; (-) strand; PAM type: NRG; PAM sequence: TAG
gaattgtctattcatgtcct

SEQ ID NO: 20397 - DNA, 20 bp, Artificial Sequence
  Description of Artificial Sequence: Synthetic oligonucleotide
  Target: SCNA; (-) strand; PAM type: NRG; PAM sequence: GAG
ctgtttgtctatcttctttt

SEQ ID NO: 20398 - DNA, 20 bp, Artificial Sequence
  Description of Artificial Sequence: Synthetic oligonucleotide
  Target: SCNA; (-) strand; PAM type: NRG; PAM sequence: TGG
gcattttttcatatgtttgt

SEQ ID NO: 20399 - DNA, 20 bp, Artificial Sequence
  Description of Artificial Sequence: Synthetic oligonucleotide
  Target: SCNA; (-) strand; PAM type: NRG; PAM sequence: GAG
ccctggtcattaaagatgtt

SEQ ID NO: 20400 - DNA, 20 bp, Artificial Sequence
  Description of Artificial Sequence: Synthetic oligonucleotide
  Target: SCNA; (-) strand; PAM type: NRG; PAM sequence: AAG
ttgcatttccctggtcatta

SEQ ID NO: 20401 - DNA, 20 bp, Artificial Sequence
  Description of Artificial Sequence: Synthetic oligonucleotide
  Target: SCNA; (-) strand; PAM type: NRG; PAM sequence: TGG
ggttttgatttgcatttccc

SEQ ID NO: 20402 - DNA, 20 bp, Artificial Sequence
  Description of Artificial Sequence: Synthetic oligonucleotide
  Target: SCNA; (-) strand; PAM type: NRG; PAM sequence: TGG
agtaaggtggtatcacattg

SEQ ID NO: 20403 - DNA, 20 bp, Artificial Sequence
  Description of Artificial Sequence: Synthetic oligonucleotide
  Target: SCNA; (-) strand; PAM type: NRG; PAM sequence: TGG
caattcttgcaggagtaagg

SEQ ID NO: 20404 - DNA, 20 bp, Artificial Sequence
  Description of Artificial Sequence: Synthetic oligonucleotide
  Target: SCNA; (-) strand; PAM type: NRG; PAM sequence: AGG
tggcaattcttgcaggagta

SEQ ID NO: 20405 - DNA, 20 bp, Artificial Sequence
  Description of Artificial Sequence: Synthetic oligonucleotide
  Target: SCNA; (-) strand; PAM type: NRG; PAM sequence: AAG
atggcaattcttgcaggagt

SEQ ID NO: 20406 - DNA, 20 bp, Artificial Sequence
  Description of Artificial Sequence: Synthetic oligonucleotide
  Target: SCNA; (-) strand; PAM type: NRG; PAM sequence: GAG
aattatggcaattcttgcag

SEQ ID NO: 20407 - DNA, 20 bp, Artificial Sequence
  Description of Artificial Sequence: Synthetic oligonucleotide
  Target: SCNA; (-) strand; PAM type: NRG; PAM sequence: AGG
ttaattatggcaattcttgc

SEQ ID NO: 20408 - DNA, 20 bp, Artificial Sequence
  Description of Artificial Sequence: Synthetic oligonucleotide
  Target: SCNA; (-) strand; PAM type: NRG; PAM sequence: CAG
tttaattatggcaattcttg

SEQ ID NO: 20409 - DNA, 20 bp, Artificial Sequence
  Description of Artificial Sequence: Synthetic oligonucleotide
  Target: SCNA; (-) strand; PAM type: NRG; PAM sequence: TGG
atttttttattttttaatta

SEQ ID NO: 20410 - DNA, 20 bp, Artificial Sequence
  Description of Artificial Sequence: Synthetic oligonucleotide
  Target: SCNA; (-) strand; PAM type: NRG; PAM sequence: CAG
ctagtttacattcctaccag

SEQ ID NO: 20411 - DNA, 20 bp, Artificial Sequence
  Description of Artificial Sequence: Synthetic oligonucleotide
  Target: SCNA; (-) strand; PAM type: NRG; PAM sequence: CAG
gtactagtttacattcctac

SEQ ID NO: 20412 - DNA, 20 bp, Artificial Sequence
  Description of Artificial Sequence: Synthetic oligonucleotide
  Target: SCNA; (-) strand; PAM type: NRG; PAM sequence: TAG
cttttccatggtggttgtac

SEQ ID NO: 20413 - DNA, 20 bp, Artificial Sequence
  Description of Artificial Sequence: Synthetic oligonucleotide
  Target: SCNA; (-) strand; PAM type: NRG; PAM sequence: TGG
tctccataacttttccatgg

SEQ ID NO: 20414 - DNA, 20 bp, Artificial Sequence
  Description of Artificial Sequence: Synthetic oligonucleotide
  Target: SCNA; (-) strand; PAM type: NRG; PAM sequence: TGG
gaatctccataacttttcca

SEQ ID NO: 20415 - DNA, 20 bp, Artificial Sequence
  Description of Artificial Sequence: Synthetic oligonucleotide
  Target: SCNA; (-) strand; PAM type: NRG; PAM sequence: AGG
gttctacttttagttcttta

SEQ ID NO: 20416 - DNA, 20 bp, Artificial Sequence
  Description of Artificial Sequence: Synthetic oligonucleotide
  Target: SCNA; (-) strand; PAM type: NRG; PAM sequence: AAG
tgttctacttttagttcttt

SEQ ID NO: 20417 - DNA, 20 bp, Artificial Sequence
  Description of Artificial Sequence: Synthetic oligonucleotide
  Target: SCNA; (-) strand; PAM type: NRG; PAM sequence: TAG
acaaatgattgttctacttt

SEQ ID NO: 20418 - DNA, 20 bp, Artificial Sequence
  Description of Artificial Sequence: Synthetic oligonucleotide
  Target: SCNA; (-) strand; PAM type: NRG; PAM sequence: TGG
atacctaggagtgggatcgc

SEQ ID NO: 20419 - DNA, 20 bp, Artificial Sequence
  Description of Artificial Sequence: Synthetic oligonucleotide
  Target: SCNA; (-) strand; PAM type: NRG; PAM sequence: GGG
ctgggtagatacctaggagt

SEQ ID NO: 20420 - DNA, 20 bp, Artificial Sequence
  Description of Artificial Sequence: Synthetic oligonucleotide
  Target: SCNA; (-) strand; PAM type: NRG; PAM sequence: TGG
tctgggtagatacctaggag

SEQ ID NO: 20421 - DNA, 20 bp, Artificial Sequence
  Description of Artificial Sequence: Synthetic oligonucleotide
  Target: SCNA; (-) strand; PAM type: NRG; PAM sequence: GAG
tcctctgggtagatacctag

SEQ ID NO: 20422 - DNA, 20 bp, Artificial Sequence
  Description of Artificial Sequence: Synthetic oligonucleotide
  Target: SCNA; (-) strand; PAM type: NRG; PAM sequence: AGG
tttcctctgggtagatacct

SEQ ID NO: 20423 - DNA, 20 bp, Artificial Sequence
  Description of Artificial Sequence: Synthetic oligonucleotide
  Target: SCNA; (-) strand; PAM type: NRG; PAM sequence: TAG
ttttcctctgggtagatacc

SEQ ID NO: 20424 - DNA, 20 bp, Artificial Sequence
  Description of Artificial Sequence: Synthetic oligonucleotide
  Target: SCNA; (-) strand; PAM type: NRG; PAM sequence: TAG
atgacttcttttcctctggg

SEQ ID NO: 20425 - DNA, 20 bp, Artificial Sequence
  Description of Artificial Sequence: Synthetic oligonucleotide
  Target: SCNA; (-) strand; PAM type: NRG; PAM sequence: GGG
ataatgacttcttttcctct

SEQ ID NO: 20426 - DNA, 20 bp, Artificial Sequence
  Description of Artificial Sequence: Synthetic oligonucleotide
  Target: SCNA; (-) strand; PAM type: NRG; PAM sequence: TGG
tataatgacttcttttcctc

SEQ ID NO: 20427 - DNA, 20 bp, Artificial Sequence
  Description of Artificial Sequence: Synthetic oligonucleotide
  Target: SCNA; (-) strand; PAM type: NRG; PAM sequence: AAG
agctataaacatgcatgtgc

SEQ ID NO: 20428 - DNA, 20 bp, Artificial Sequence
  Description of Artificial Sequence: Synthetic oligonucleotide
  Target: SCNA; (-) strand; PAM type: NRG; PAM sequence: CAG
ttttgcaattgtgaattgtg

SEQ ID NO: 20429 - DNA, 20 bp, Artificial Sequence
  Description of Artificial Sequence: Synthetic oligonucleotide
  Target: SCNA; (-) strand; PAM type: NRG; PAM sequence: TGG
tggttgatgggtatttaggc

SEQ ID NO: 20430 - DNA, 20 bp, Artificial Sequence
  Description of Artificial Sequence: Synthetic oligonucleotide
  Target: SCNA; (-) strand; PAM type: NRG; PAM sequence: AGG
tcattggttgatgggtattt

SEQ ID NO: 20431 - DNA, 20 bp, Artificial Sequence
  Description of Artificial Sequence: Synthetic oligonucleotide
  Target: SCNA; (-) strand; PAM type: NRG; PAM sequence: TAG
ctcattggttgatgggtatt

SEQ ID NO: 20432 - DNA, 20 bp, Artificial Sequence
  Description of Artificial Sequence: Synthetic oligonucleotide
  Target: SCNA; (-) strand; PAM type: NRG; PAM sequence: GGG
ttatccactcattggttgat

SEQ ID NO: 20433 - DNA, 20 bp, Artificial Sequence
  Description of Artificial Sequence: Synthetic oligonucleotide
  Target: SCNA; (-) strand; PAM type: NRG; PAM sequence: TGG
tttatccactcattggttga

SEQ ID NO: 20434 - DNA, 20 bp, Artificial Sequence
  Description of Artificial Sequence: Synthetic oligonucleotide
  Target: SCNA; (-) strand; PAM type: NRG; PAM sequence: TGG
cattttctttatccactcat

SEQ ID NO: 20435 - DNA, 20 bp, Artificial Sequence
  Description of Artificial Sequence: Synthetic oligonucleotide
  Target: SCNA; (-) strand; PAM type: NRG; PAM sequence: TAG
tatggctgagtagtattcca

SEQ ID NO: 20436 - DNA, 20 bp, Artificial Sequence
  Description of Artificial Sequence: Synthetic oligonucleotide
  Target: SCNA; (-) strand; PAM type: NRG; PAM sequence: TAG
tgttcctttttatggctgag

SEQ ID NO: 20437 - DNA, 20 bp, Artificial Sequence
  Description of Artificial Sequence: Synthetic oligonucleotide
  Target: SCNA; (-) strand; PAM type: NRG; PAM sequence: GAG
ttttgttcctttttatggct

SEQ ID NO: 20438 - DNA, 20 bp, Artificial Sequence
  Description of Artificial Sequence: Synthetic oligonucleotide
  Target: SCNA; (-) strand; PAM type: NRG; PAM sequence: TGG
cattattttgttccttttta

SEQ ID NO: 20439 - DNA, 20 bp, Artificial Sequence
  Description of Artificial Sequence: Synthetic oligonucleotide
  Target: SCNA; (-) strand; PAM type: NRG; PAM sequence: TAG
ggtctccaactctatctacg

SEQ ID NO: 20440 - DNA, 20 bp, Artificial Sequence
  Description of Artificial Sequence: Synthetic oligonucleotide
  Target: SCNA; (-) strand; PAM type: NRG; PAM sequence: TGG
agttacttcacttagaataa

SEQ ID NO: 20441 - DNA, 20 bp, Artificial Sequence
  Description of Artificial Sequence: Synthetic oligonucleotide
  Target: SCNA; (-) strand; PAM type: NRG; PAM sequence: TAG
cactcctgagttacttcact

SEQ ID NO: 20442 - DNA, 20 bp, Artificial Sequence
  Description of Artificial Sequence: Synthetic oligonucleotide
  Target: SCNA; (-) strand; PAM type: NRG; PAM sequence: GAG
atgtttggttttccactcct

SEQ ID NO: 20443 - DNA, 20 bp, Artificial Sequence
  Description of Artificial Sequence: Synthetic oligonucleotide
  Target: SCNA; (-) strand; PAM type: NRG; PAM sequence: TGG
aaatgagaacatgtaatgtt

SEQ ID NO: 20444 - DNA, 20 bp, Artificial Sequence
  Description of Artificial Sequence: Synthetic oligonucleotide
  Target: SCNA; (-) strand; PAM type: NRG; PAM sequence: GAG
tttaggtggcagttataaat

SEQ ID NO: 20445 - DNA, 20 bp, Artificial Sequence
  Description of Artificial Sequence: Synthetic oligonucleotide
  Target: SCNA; (-) strand; PAM type: NRG; PAM sequence: CAG
gcatcctttagtttaggtgg

SEQ ID NO: 20446 - DNA, 20 bp, Artificial Sequence
  Description of Artificial Sequence: Synthetic oligonucleotide
  Target: SCNA; (-) strand; PAM type: NRG; PAM sequence: TGG
tttgcatcctttagtttagg

SEQ ID NO: 20447 - DNA, 20 bp, Artificial Sequence
  Description of Artificial Sequence: Synthetic oligonucleotide
  Target: SCNA; (-) strand; PAM type: NRG; PAM sequence: AGG
gcctttgcatcctttagttt

SEQ ID NO: 20448 - DNA, 20 bp, Artificial Sequence
  Description of Artificial Sequence: Synthetic oligonucleotide
  Target: SCNA; (-) strand; PAM type: NRG; PAM sequence: TAG
tgcctttgcatcctttagtt

SEQ ID NO: 20449 - DNA, 20 bp, Artificial Sequence
  Description of Artificial Sequence: Synthetic oligonucleotide
  Target: SCNA; (-) strand; PAM type: NRG; PAM sequence: TAG
tcttatgcctttgcatcctt

SEQ ID NO: 20450 - DNA, 20 bp, Artificial Sequence
  Description of Artificial Sequence: Synthetic oligonucleotide
  Target: SCNA; (-) strand; PAM type: NRG; PAM sequence: GAG
cccttcccctcaagtctcca

SEQ ID NO: 20451 - DNA, 20 bp, Artificial Sequence
  Description of Artificial Sequence: Synthetic oligonucleotide
  Target: SCNA; (-) strand; PAM type: NRG; PAM sequence: CAG
cacccttcccctcaagtctc

SEQ ID NO: 20452 - DNA, 20 bp, Artificial Sequence
  Description of Artificial Sequence: Synthetic oligonucleotide
  Target: SCNA; (-) strand; PAM type: NRG; PAM sequence: AAG
ttcctcccacccttcccctc

SEQ ID NO: 20453 - DNA, 20 bp, Artificial Sequence
  Description of Artificial Sequence: Synthetic oligonucleotide
  Target: SCNA; (-) strand; PAM type: NRG; PAM sequence: TAG
catacactgcacccaatgtg

SEQ ID NO: 20454 - DNA, 20 bp, Artificial Sequence
  Description of Artificial Sequence: Synthetic oligonucleotide
  Target: SCNA; (-) strand; PAM type: NRG; PAM sequence: CAG
tggtacactcataacctgag

SEQ ID NO: 20455 - DNA, 20 bp, Artificial Sequence
  Description of Artificial Sequence: Synthetic oligonucleotide
  Target: SCNA; (-) strand; PAM type: NRG; PAM sequence: GAG
ttttggtacactcataacct

SEQ ID NO: 20456 - DNA, 20 bp, Artificial Sequence
  Description of Artificial Sequence: Synthetic oligonucleotide
  Target: SCNA; (-) strand; PAM type: NRG; PAM sequence: TGG
aggtatgatttctgagattt

SEQ ID NO: 20457 - DNA, 20 bp, Artificial Sequence
  Description of Artificial Sequence: Synthetic oligonucleotide
  Target: SCNA; (-) strand; PAM type: NRG; PAM sequence: GAG
gttgtttaggtatgatttct

SEQ ID NO: 20458 - DNA, 20 bp, Artificial Sequence
  Description of Artificial Sequence: Synthetic oligonucleotide
  Target: SCNA; (-) strand; PAM type: NRG; PAM sequence: AGG
gttatatggagaagttgttt

SEQ ID NO: 20459 - DNA, 20 bp, Artificial Sequence
  Description of Artificial Sequence: Synthetic oligonucleotide
  Target: SCNA; (-) strand; PAM type: NRG; PAM sequence: TAG
ggttatatggagaagttgtt

SEQ ID NO: 20460 - DNA, 20 bp, Artificial Sequence
  Description of Artificial Sequence: Synthetic oligonucleotide
  Target: SCNA; (-) strand; PAM type: NRG; PAM sequence: AAG
tggtttttggttatatggag

SEQ ID NO: 20461 - DNA, 20 bp, Artificial Sequence
  Description of Artificial Sequence: Synthetic oligonucleotide
  Target: SCNA; (-) strand; PAM type: NRG; PAM sequence: GAG
aggtggtttttggttatatg

SEQ ID NO: 20462 - DNA, 20 bp, Artificial Sequence
  Description of Artificial Sequence: Synthetic oligonucleotide
  Target: SCNA; (-) strand; PAM type: NRG; PAM sequence: TGG
gcaggtggtttttggttata

SEQ ID NO: 20463 - DNA, 20 bp, Artificial Sequence
  Description of Artificial Sequence: Synthetic oligonucleotide
  Target: SCNA; (-) strand; PAM type: NRG; PAM sequence: TGG
tttggggagcaggtggtttt

SEQ ID NO: 20464 - DNA, 20 bp, Artificial Sequence
  Description of Artificial Sequence: Synthetic oligonucleotide
  Target: SCNA; (-) strand; PAM type: NRG; PAM sequence: TGG
aatagcttttggggagcagg

SEQ ID NO: 20465 - DNA, 20 bp, Artificial Sequence
  Description of Artificial Sequence: Synthetic oligonucleotide
  Target: SCNA; (-) strand; PAM type: NRG; PAM sequence: AGG
ttcaatagcttttggggagc

SEQ ID NO: 20466 - DNA, 20 bp, Artificial Sequence
  Description of Artificial Sequence: Synthetic oligonucleotide
  Target: SCNA; (-) strand; PAM type: NRG; PAM sequence: CAG
tttcaatagcttttggggag

SEQ ID NO: 20467 - DNA, 20 bp, Artificial Sequence
  Description of Artificial Sequence: Synthetic oligonucleotide
  Target: SCNA; (-) strand; PAM type: NRG; PAM sequence: GAG
ttatttcaatagcttttggg

SEQ ID NO: 20468 - DNA, 20 bp, Artificial Sequence
  Description of Artificial Sequence: Synthetic oligonucleotide
  Target: SCNA; (-) strand; PAM type: NRG; PAM sequence: GGG
tattatttcaatagcttttg

SEQ ID NO: 20469 - DNA, 20 bp, Artificial Sequence
  Description of Artificial Sequence: Synthetic oligonucleotide
  Target: SCNA; (-) strand; PAM type: NRG; PAM sequence: GGG
ttattatttcaatagctttt

SEQ ID NO: 20470 - DNA, 20 bp, Artificial Sequence
  Description of Artificial Sequence: Synthetic oligonucleotide
  Target: SCNA; (-) strand; PAM type: NRG; PAM sequence: TGG
attattatttcaatagcttt

SEQ ID NO: 20471 - DNA, 20 bp, Artificial Sequence
  Description of Artificial Sequence: Synthetic oligonucleotide
  Target: SCNA; (-) strand; PAM type: NRG; PAM sequence: TAG
ctttattattattatttcaa

SEQ ID NO: 20472 - DNA, 20 bp, Artificial Sequence
  Description of Artificial Sequence: Synthetic oligonucleotide
  Target: SCNA; (-) strand; PAM type: NRG; PAM sequence: TAG
aaaataatatattggtgtta

SEQ ID NO: 20473 - DNA, 20 bp, Artificial Sequence
  Description of Artificial Sequence: Synthetic oligonucleotide
  Target: SCNA; (-) strand; PAM type: NRG; PAM sequence: TGG
cattaataaaaataatatat

SEQ ID NO: 20474 - DNA, 20 bp, Artificial Sequence
  Description of Artificial Sequence: Synthetic oligonucleotide
  Target: SCNA; (-) strand; PAM type: NRG; PAM sequence: AAG
gacaaataacaatacattaa

SEQ ID NO: 20475 - DNA, 20 bp, Artificial Sequence
  Description of Artificial Sequence: Synthetic oligonucleotide
  Target: SCNA; (-) strand; PAM type: NRG; PAM sequence: TAG
tataacaacagatcgcttaa

SEQ ID NO: 20476 - DNA, 20 bp, Artificial Sequence
  Description of Artificial Sequence: Synthetic oligonucleotide
  Target: SCNA; (-) strand; PAM type: NRG; PAM sequence: CAG
taattaattaattataacaa

SEQ ID NO: 20477 - DNA, 20 bp, Artificial Sequence
  Description of Artificial Sequence: Synthetic oligonucleotide
  Target: SCNA; (-) strand; PAM type: NRG; PAM sequence: AGG
ataatttaattgataaaggg

SEQ ID NO: 20478 - DNA, 20 bp, Artificial Sequence
  Description of Artificial Sequence: Synthetic oligonucleotide
  Target: SCNA; (-) strand; PAM type: NRG; PAM sequence: GAG
tataatttaattgataaagg

SEQ ID NO: 20479 - DNA, 20 bp, Artificial Sequence
  Description of Artificial Sequence: Synthetic oligonucleotide
  Target: SCNA; (-) strand; PAM type: NRG; PAM sequence: GGG
tttataatttaattgataaa

SEQ ID NO: 20480 - DNA, 20 bp, Artificial Sequence
  Description of Artificial Sequence: Synthetic oligonucleotide
  Target: SCNA; (-) strand; PAM type: NRG; PAM sequence: AGG
ctttataatttaattgataa

SEQ ID NO: 20481 - DNA, 20 bp, Artificial Sequence
  Description of Artificial Sequence: Synthetic oligonucleotide
  Target: SCNA; (-) strand; PAM type: NRG; PAM sequence: AAG
gctttataatttaattgata

SEQ ID NO: 20482 - DNA, 20 bp, Artificial Sequence
  Description of Artificial Sequence: Synthetic oligonucleotide
  Target: SCNA; (-) strand; PAM type: NRG; PAM sequence: GGG
cctctactcagttgccttca

SEQ ID NO: 20483 - DNA, 20 bp, Artificial Sequence
  Description of Artificial Sequence: Synthetic oligonucleotide
  Target: SCNA; (-) strand; PAM type: NRG; PAM sequence: AGG
gcctctactcagttgccttc

SEQ ID NO: 20484 - DNA, 20 bp, Artificial Sequence
  Description of Artificial Sequence: Synthetic oligonucleotide
  Target: SCNA; (-) strand; PAM type: NRG; PAM sequence: CAG
ggcctctactcagttgcctt

SEQ ID NO: 20485 - DNA, 20 bp, Artificial Sequence
  Description of Artificial Sequence: Synthetic oligonucleotide
  Target: SCNA; (-) strand; PAM type: NRG; PAM sequence: CAG
tcacttattgggcctctact

SEQ ID NO: 20486 - DNA, 20 bp, Artificial Sequence
  Description of Artificial Sequence: Synthetic oligonucleotide
  Target: SCNA; (-) strand; PAM type: NRG; PAM sequence: GGG
caattcagcaatcacttatt

SEQ ID NO: 20487 - DNA, 20 bp, Artificial Sequence
  Description of Artificial Sequence: Synthetic oligonucleotide
  Target: SCNA; (-) strand; PAM type: NRG; PAM sequence: TGG
tcaattcagcaatcacttat

SEQ ID NO: 20488 - DNA, 20 bp, Artificial Sequence
  Description of Artificial Sequence: Synthetic oligonucleotide
  Target: SCNA; (-) strand; PAM type: NRG; PAM sequence: CAG
ttcagttcagcatttcaatt

SEQ ID NO: 20489 - DNA, 20 bp, Artificial Sequence
  Description of Artificial Sequence: Synthetic oligonucleotide
  Target: SCNA; (-) strand; PAM type: NRG; PAM sequence: CAG
taatgaagtataattcagtt

SEQ ID NO: 20490 - DNA, 20 bp, Artificial Sequence
  Description of Artificial Sequence: Synthetic oligonucleotide
  Target: SCNA; (-) strand; PAM type: NRG; PAM sequence: CAG
ctatataatgaagtataatt

SEQ ID NO: 20491 - DNA, 20 bp, Artificial Sequence
  Description of Artificial Sequence: Synthetic oligonucleotide
  Target: SCNA; (-) strand; PAM type: NRG; PAM sequence: AAG
atgaggctttctatataatg

SEQ ID NO: 20492 - DNA, 20 bp, Artificial Sequence
  Description of Artificial Sequence: Synthetic oligonucleotide
  Target: SCNA; (-) strand; PAM type: NRG; PAM sequence: AGG
tatgtgaggccctatatatg

SEQ ID NO: 20493 - DNA, 20 bp, Artificial Sequence
  Description of Artificial Sequence: Synthetic oligonucleotide
  Target: SCNA; (-) strand; PAM type: NRG; PAM sequence: GAG
atatgtgaggccctatatat

SEQ ID NO: 20494 - DNA, 20 bp, Artificial Sequence
  Description of Artificial Sequence: Synthetic oligonucleotide
  Target: SCNA; (-) strand; PAM type: NRG; PAM sequence: AGG
tttgtgtaagggtatatgtg

SEQ ID NO: 20495 - DNA, 20 bp, Artificial Sequence
  Description of Artificial Sequence: Synthetic oligonucleotide
  Target: SCNA; (-) strand; PAM type: NRG; PAM sequence: GAG
ttttgtgtaagggtatatgt

SEQ ID NO: 20496 - DNA, 20 bp, Artificial Sequence
  Description of Artificial Sequence: Synthetic oligonucleotide
  Target: SCNA; (-) strand; PAM type: NRG; PAM sequence: GGG
gattcttatattttgtgtaa

SEQ ID NO: 20497 - DNA, 20 bp, Artificial Sequence
  Description of Artificial Sequence: Synthetic oligonucleotide
  Target: SCNA; (-) strand; PAM type: NRG; PAM sequence: AGG
ggattcttatattttgtgta

SEQ ID NO: 20498 - DNA, 20 bp, Artificial Sequence
  Description of Artificial Sequence: Synthetic oligonucleotide
  Target: SCNA; (-) strand; PAM type: NRG; PAM sequence: AAG
tggattcttatattttgtgt

SEQ ID NO: 20499 - DNA, 20 bp, Artificial Sequence
  Description of Artificial Sequence: Synthetic oligonucleotide
  Target: SCNA; (-) strand; PAM type: NRG; PAM sequence: TGG
atcgatgaagtgatttgtag

SEQ ID NO: 20500 - DNA, 20 bp, Artificial Sequence
  Description of Artificial Sequence: Synthetic oligonucleotide
  Target: SCNA; (-) strand; PAM type: NRG; PAM sequence: TAG
ttaatcgatgaagtgatttg

SEQ ID NO: 20501 - DNA, 20 bp, Artificial Sequence
  Description of Artificial Sequence: Synthetic oligonucleotide
  Target: SCNA; (-) strand; PAM type: NRG; PAM sequence: AAG
agccagttgattaatcgatg

SEQ ID NO: 20502 - DNA, 20 bp, Artificial Sequence
  Description of Artificial Sequence: Synthetic oligonucleotide
  Target: SCNA; (-) strand; PAM type: NRG; PAM sequence: CAG
accttgttacaaagtacagc

SEQ ID NO: 20503 - DNA, 20 bp, Artificial Sequence
  Description of Artificial Sequence: Synthetic oligonucleotide
  Target: SCNA; (-) strand; PAM type: NRG; PAM sequence: CAG
gcaaaccttgttacaaagta

SEQ ID NO: 20504 - DNA, 20 bp, Artificial Sequence
  Description of Artificial Sequence: Synthetic oligonucleotide
  Target: SCNA; (-) strand; PAM type: NRG; PAM sequence: AAG
tttgtgcaaaccttgttaca

SEQ ID NO: 20505 - DNA, 20 bp, Artificial Sequence
  Description of Artificial Sequence: Synthetic oligonucleotide
  Target: SCNA; (-) strand; PAM type: NRG; PAM sequence: AAG
atattttacacttttcctga

SEQ ID NO: 20506 - DNA, 20 bp, Artificial Sequence
  Description of Artificial Sequence: Synthetic oligonucleotide
  Target: SCNA; (-) strand; PAM type: NRG; PAM sequence: CAG
aacttccagttgcattttca

SEQ ID NO: 20507 - DNA, 20 bp, Artificial Sequence
  Description of Artificial Sequence: Synthetic oligonucleotide
  Target: SCNA; (-) strand; PAM type: NRG; PAM sequence: CAG
ctaggaagccacaaaacttc

SEQ ID NO: 20508 - DNA, 20 bp, Artificial Sequence
  Description of Artificial Sequence: Synthetic oligonucleotide
  Target: SCNA; (-) strand; PAM type: NRG; PAM sequence: AAG
tgggcggagttcaaactagg

SEQ ID NO: 20509 - DNA, 20 bp, Artificial Sequence
  Description of Artificial Sequence: Synthetic oligonucleotide
  Target: SCNA; (-) strand; PAM type: NRG; PAM sequence: AGG
tcttgggcggagttcaaact

SEQ ID NO: 20510 - DNA, 20 bp, Artificial Sequence
  Description of Artificial Sequence: Synthetic oligonucleotide
  Target: SCNA; (-) strand; PAM type: NRG; PAM sequence: TAG
ttcttgggcggagttcaaac

SEQ ID NO: 20511 - DNA, 20 bp, Artificial Sequence
  Description of Artificial Sequence: Synthetic oligonucleotide
  Target: SCNA; (-) strand; PAM type: NRG; PAM sequence: GAG
aggttttgccttcttgggcg

SEQ ID NO: 20512 - DNA, 20 bp, Artificial Sequence
  Description of Artificial Sequence: Synthetic oligonucleotide
  Target: SCNA; (-) strand; PAM type: NRG; PAM sequence: CGG
aaaggttttgccttcttggg

SEQ ID NO: 20513 - DNA, 20 bp, Artificial Sequence
  Description of Artificial Sequence: Synthetic oligonucleotide
  Target: SCNA; (-) strand; PAM type: NRG; PAM sequence: GGG
tataaaggttttgccttctt

SEQ ID NO: 20514 - DNA, 20 bp, Artificial Sequence
  Description of Artificial Sequence: Synthetic oligonucleotide
  Target: SCNA; (-) strand; PAM type: NRG; PAM sequence: TGG
ctataaaggttttgccttct

SEQ ID NO: 20515 - DNA, 20 bp, Artificial Sequence
  Description of Artificial Sequence: Synthetic oligonucleotide
  Target: SCNA; (-) strand; PAM type: NRG; PAM sequence: AGG
gggaaactatgggtctataa

SEQ ID NO: 20516 - DNA, 20 bp, Artificial Sequence
  Description of Artificial Sequence: Synthetic oligonucleotide
  Target: SCNA; (-) strand; PAM type: NRG; PAM sequence: AAG
cgggaaactatgggtctata

SEQ ID NO: 20517 - DNA, 20 bp, Artificial Sequence
  Description of Artificial Sequence: Synthetic oligonucleotide
  Target: SCNA; (-) strand; PAM type: NRG; PAM sequence: GGG
gtacctagacgggaaactat

SEQ ID NO: 20518 - DNA, 20 bp, Artificial Sequence
  Description of Artificial Sequence: Synthetic oligonucleotide
  Target: SCNA; (-) strand; PAM type: NRG; PAM sequence: TGG
agtacctagacgggaaacta

SEQ ID NO: 20519 - DNA, 20 bp, Artificial Sequence
  Description of Artificial Sequence: Synthetic oligonucleotide
  Target: SCNA; (-) strand; PAM type: NRG; PAM sequence: GGG
tgaaagagcagtacctagac

SEQ ID NO: 20520 - DNA, 20 bp, Artificial Sequence
  Description of Artificial Sequence: Synthetic oligonucleotide
  Target: SCNA; (-) strand; PAM type: NRG; PAM sequence: CGG
gtgaaagagcagtacctaga

SEQ ID NO: 20521 - DNA, 20 bp, Artificial Sequence
  Description of Artificial Sequence: Synthetic oligonucleotide
  Target: SCNA; (-) strand; PAM type: NRG; PAM sequence: TAG
atgtgtgaaagagcagtacc

SEQ ID NO: 20522 - DNA, 20 bp, Artificial Sequence
  Description of Artificial Sequence: Synthetic oligonucleotide
  Target: SCNA; (-) strand; PAM type: NRG; PAM sequence: CAG
cttagagatgtgtgaaagag

SEQ ID NO: 20523 - DNA, 20 bp, Artificial Sequence
  Description of Artificial Sequence: Synthetic oligonucleotide
  Target: SCNA; (-) strand; PAM type: NRG; PAM sequence: GAG
agacttagagatgtgtgaaa

SEQ ID NO: 20524 - DNA, 20 bp, Artificial Sequence
  Description of Artificial Sequence: Synthetic oligonucleotide
  Target: SCNA; (-) strand; PAM type: NRG; PAM sequence: AAG
tcagacttagagatgtgtga

SEQ ID NO: 20525 - DNA, 20 bp, Artificial Sequence
  Description of Artificial Sequence: Synthetic oligonucleotide
  Target: SCNA; (-) strand; PAM type: NRG; PAM sequence: GAG
aatgtgtctagtcagactta

SEQ ID NO: 20526 - DNA, 20 bp, Artificial Sequence
  Description of Artificial Sequence: Synthetic oligonucleotide
  Target: SCNA; (-) strand; PAM type: NRG; PAM sequence: TAG
acaatgtgtctagtcagact

SEQ ID NO: 20527 - DNA, 20 bp, Artificial Sequence
  Description of Artificial Sequence: Synthetic oligonucleotide
  Target: SCNA; (-) strand; PAM type: NRG; PAM sequence: CAG
tatgttacaatgtgtctagt

SEQ ID NO: 20528 - DNA, 20 bp, Artificial Sequence
  Description of Artificial Sequence: Synthetic oligonucleotide
  Target: SCNA; (-) strand; PAM type: NRG; PAM sequence: TAG
agcttatgttacaatgtgtc

SEQ ID NO: 20529 - DNA, 20 bp, Artificial Sequence
  Description of Artificial Sequence: Synthetic oligonucleotide
  Target: SCNA; (-) strand; PAM type: NRG; PAM sequence: CAG
acctacctgtcatgtgacca

SEQ ID NO: 20530 - DNA, 20 bp, Artificial Sequence
  Description of Artificial Sequence: Synthetic oligonucleotide
  Target: SCNA; (-) strand; PAM type: NRG; PAM sequence: GAG
gactggtgttgcctgttact

SEQ ID NO: 20531 - DNA, 20 bp, Artificial Sequence
  Description of Artificial Sequence: Synthetic oligonucleotide
  Target: SCNA; (-) strand; PAM type: NRG; PAM sequence: TGG
tagttttgtttttccatgac

SEQ ID NO: 20532 - DNA, 20 bp, Artificial Sequence
  Description of Artificial Sequence: Synthetic oligonucleotide
  Target: SCNA; (-) strand; PAM type: NRG; PAM sequence: TAG
tctgcactcatttggacact

SEQ ID NO: 20533 - DNA, 20 bp, Artificial Sequence
  Description of Artificial Sequence: Synthetic oligonucleotide
  Target: SCNA; (-) strand; PAM type: NRG; PAM sequence: TGG
atcaggattctgcactcatt

SEQ ID NO: 20534 - DNA, 20 bp, Artificial Sequence
  Description of Artificial Sequence: Synthetic oligonucleotide
  Target: SCNA; (-) strand; PAM type: NRG; PAM sequence: AGG
agtaaatgtgagctgcaatc

SEQ ID NO: 20535 - DNA, 20 bp, Artificial Sequence
  Description of Artificial Sequence: Synthetic oligonucleotide
  Target: SCNA; (-) strand; PAM type: NRG; PAM sequence: CAG
gagtaaatgtgagctgcaat

SEQ ID NO: 20536 - DNA, 20 bp, Artificial Sequence
  Description of Artificial Sequence: Synthetic oligonucleotide
  Target: SCNA; (-) strand; PAM type: NRG; PAM sequence: GAG
tcttgtttaagagtaaatgt

SEQ ID NO: 20537 - DNA, 20 bp, Artificial Sequence
  Description of Artificial Sequence: Synthetic oligonucleotide
  Target: SCNA; (-) strand; PAM type: NRG; PAM sequence: GAG
gaagagggcctcttgtttaa

SEQ ID NO: 20538 - DNA, 20 bp, Artificial Sequence
  Description of Artificial Sequence: Synthetic oligonucleotide
  Target: SCNA; (-) strand; PAM type: NRG; PAM sequence: AAG
aagaagagggcctcttgttt

SEQ ID NO: 20539 - DNA, 20 bp, Artificial Sequence
  Description of Artificial Sequence: Synthetic oligonucleotide
  Target: SCNA; (-) strand; PAM type: NRG; PAM sequence: GGG
tacctgagaatataagaaga

SEQ ID NO: 20540 - DNA, 20 bp, Artificial Sequence
  Description of Artificial Sequence: Synthetic oligonucleotide
  Target: SCNA; (-) strand; PAM type: NRG; PAM sequence: AGG
ttacctgagaatataagaag

SEQ ID NO: 20541 - DNA, 20 bp, Artificial Sequence
  Description of Artificial Sequence: Synthetic oligonucleotide
  Target: SCNA; (-) strand; PAM type: NRG; PAM sequence: GAG
cttacctgagaatataagaa

SEQ ID NO: 20542 - DNA, 20 bp, Artificial Sequence
  Description of Artificial Sequence: Synthetic oligonucleotide
  Target: SCNA; (-) strand; PAM type: NRG; PAM sequence: AAG
cacttacctgagaatataag

SEQ ID NO: 20543 - DNA, 20 bp, Artificial Sequence
  Description of Artificial Sequence: Synthetic oligonucleotide
  Target: SCNA; (-) strand; PAM type: NRG; PAM sequence: AAG
agtcacttacctgagaatat

SEQ ID NO: 20544 - DNA, 20 bp, Artificial Sequence
  Description of Artificial Sequence: Synthetic oligonucleotide
  Target: SCNA; (-) strand; PAM type: NRG; PAM sequence: GAG
tattacagagtcacttacct

SEQ ID NO: 20545 - DNA, 20 bp, Artificial Sequence
  Description of Artificial Sequence: Synthetic oligonucleotide
  Target: SCNA; (-) strand; PAM type: NRG; PAM sequence: GAG
tacacaatcctcttattaca

SEQ ID NO: 20546 - DNA, 20 bp, Artificial Sequence
  Description of Artificial Sequence: Synthetic oligonucleotide
  Target: SCNA; (-) strand; PAM type: NRG; PAM sequence: CAG
gctacacaatcctcttatta

SEQ ID NO: 20547 - DNA, 20 bp, Artificial Sequence
  Description of Artificial Sequence: Synthetic oligonucleotide
  Target: SCNA; (-) strand; PAM type: NRG; PAM sequence: AGG
agtcctaaagtaaagctgtt

SEQ ID NO: 20548 - DNA, 20 bp, Artificial Sequence
  Description of Artificial Sequence: Synthetic oligonucleotide
  Target: SCNA; (-) strand; PAM type: NRG; PAM sequence: TAG
cagtcctaaagtaaagctgt

SEQ ID NO: 20549 - DNA, 20 bp, Artificial Sequence
  Description of Artificial Sequence: Synthetic oligonucleotide
  Target: SCNA; (-) strand; PAM type: NRG; PAM sequence: AAG
cagtatacagtcctaaagta

SEQ ID NO: 20550 - DNA, 20 bp, Artificial Sequence
  Description of Artificial Sequence: Synthetic oligonucleotide
  Target: SCNA; (-) strand; PAM type: NRG; PAM sequence: AAG
aaggacagtatacagtccta

SEQ ID NO: 20551 - DNA, 20 bp, Artificial Sequence
  Description of Artificial Sequence: Synthetic oligonucleotide
  Target: SCNA; (-) strand; PAM type: NRG; PAM sequence: CAG
aaatatctaaggacagtata

SEQ ID NO: 20552 - DNA, 20 bp, Artificial Sequence
  Description of Artificial Sequence: Synthetic oligonucleotide
  Target: SCNA; (-) strand; PAM type: NRG; PAM sequence: CAG
gttttaaaaatatctaagga

SEQ ID NO: 20553 - DNA, 20 bp, Artificial Sequence
  Description of Artificial Sequence: Synthetic oligonucleotide
  Target: SCNA; (-) strand; PAM type: NRG; PAM sequence: AGG
aaaagttttaaaaatatcta

SEQ ID NO: 20554 - DNA, 20 bp, Artificial Sequence
  Description of Artificial Sequence: Synthetic oligonucleotide
  Target: SCNA; (-) strand; PAM type: NRG; PAM sequence: AAG
aaaaagttttaaaaatatct

SEQ ID NO: 20555 - DNA, 20 bp, Artificial Sequence
  Description of Artificial Sequence: Synthetic oligonucleotide
  Target: SCNA; (-) strand; PAM type: NRG; PAM sequence: AAG
atttagaaatgaaatataaa

SEQ ID NO: 20556 - DNA, 20 bp, Artificial Sequence
  Description of Artificial Sequence: Synthetic oligonucleotide
  Target: SCNA; (-) strand; PAM type: NRG; PAM sequence: TAG
ttttttgtaatattcttatt

SEQ ID NO: 20557 - DNA, 20 bp, Artificial Sequence
  Description of Artificial Sequence: Synthetic oligonucleotide
  Target: SCNA; (-) strand; PAM type: NRG; PAM sequence: AGG
aattatgttatataaatgtt

SEQ ID NO: 20558 - DNA, 20 bp, Artificial Sequence
  Description of Artificial Sequence: Synthetic oligonucleotide
  Target: SCNA; (-) strand; PAM type: NRG; PAM sequence: TAG
gaattatgttatataaatgt

SEQ ID NO: 20559 - DNA, 20 bp, Artificial Sequence
  Description of Artificial Sequence: Synthetic oligonucleotide
  Target: SCNA; (-) strand; PAM type: NRG; PAM sequence: GAG
tatttggctctatctacttt

SEQ ID NO: 20560 - DNA, 20 bp, Artificial Sequence
  Description of Artificial Sequence: Synthetic oligonucleotide
  Target: SCNA; (-) strand; PAM type: NRG; PAM sequence: TGG
actagcagaagtcagttatt

SEQ ID NO: 20561 - DNA, 20 bp, Artificial Sequence
  Description of Artificial Sequence: Synthetic oligonucleotide
  Target: SCNA; (-) strand; PAM type: NRG; PAM sequence: CAG
gaaaaaaaactagcagaagt

SEQ ID NO: 20562 - DNA, 20 bp, Artificial Sequence
  Description of Artificial Sequence: Synthetic oligonucleotide
  Target: SCNA; (-) strand; PAM type: NRG; PAM sequence: AAG
tctggaaaaaaaactagcag

SEQ ID NO: 20563 - DNA, 20 bp, Artificial Sequence
  Description of Artificial Sequence: Synthetic oligonucleotide
  Target: SCNA; (-) strand; PAM type: NRG; PAM sequence: CAG
atatctggaaaaaaaactag

SEQ ID NO: 20564 - DNA, 20 bp, Artificial Sequence
  Description of Artificial Sequence: Synthetic oligonucleotide
  Target: SCNA; (-) strand; PAM type: NRG; PAM sequence: TAG
caaatatctggaaaaaaaac

SEQ ID NO: 20565 - DNA, 20 bp, Artificial Sequence
  Description of Artificial Sequence: Synthetic oligonucleotide
  Target: SCNA; (-) strand; PAM type: NRG; PAM sequence: TGG
gtacataaaagacaaatatc

SEQ ID NO: 20566 - DNA, 20 bp, Artificial Sequence
  Description of Artificial Sequence: Synthetic oligonucleotide
  Target: SCNA; (-) strand; PAM type: NRG; PAM sequence: AAG
gtttctggccatgtacataa

SEQ ID NO: 20567 - DNA, 20 bp, Artificial Sequence
  Description of Artificial Sequence: Synthetic oligonucleotide
  Target: SCNA; (-) strand; PAM type: NRG; PAM sequence: TGG
tgcaagttctaagtggtttc

SEQ ID NO: 20568 - DNA, 20 bp, Artificial Sequence
  Description of Artificial Sequence: Synthetic oligonucleotide
  Target: SCNA; (-) strand; PAM type: NRG; PAM sequence: TGG
gtttttatgcaagttctaag

SEQ ID NO: 20569 - DNA, 20 bp, Artificial Sequence
  Description of Artificial Sequence: Synthetic oligonucleotide
  Target: SCNA; (-) strand; PAM type: NRG; PAM sequence: AAG
cttgtttttatgcaagttct

SEQ ID NO: 20570 - DNA, 20 bp, Artificial Sequence
  Description of Artificial Sequence: Synthetic oligonucleotide
  Target: SCNA; (-) strand; PAM type: NRG; PAM sequence: AAG
ttcttaacttgtttttatgc

SEQ ID NO: 20571 - DNA, 20 bp, Artificial Sequence
  Description of Artificial Sequence: Synthetic oligonucleotide
  Target: SCNA; (-) strand; PAM type: NRG; PAM sequence: AGG
gtgcgctctgggatagagaa

SEQ ID NO: 20572 - DNA, 20 bp, Artificial Sequence
  Description of Artificial Sequence: Synthetic oligonucleotide
  Target: SCNA; (-) strand; PAM type: NRG; PAM sequence: AAG
agtgcgctctgggatagaga

SEQ ID NO: 20573 - DNA, 20 bp, Artificial Sequence
  Description of Artificial Sequence: Synthetic oligonucleotide
  Target: SCNA; (-) strand; PAM type: NRG; PAM sequence: GAG
aaacagtgcgctctgggata

SEQ ID NO: 20574 - DNA, 20 bp, Artificial Sequence
  Description of Artificial Sequence: Synthetic oligonucleotide
  Target: SCNA; (-) strand; PAM type: NRG; PAM sequence: TAG
tgaaacagtgcgctctggga

SEQ ID NO: 20575 - DNA, 20 bp, Artificial Sequence
  Description of Artificial Sequence: Synthetic oligonucleotide
  Target: SCNA; (-) strand; PAM type: NRG; PAM sequence: GGG
ctaatgaaacagtgcgctct

SEQ ID NO: 20576 - DNA, 20 bp, Artificial Sequence
  Description of Artificial Sequence: Synthetic oligonucleotide
  Target: SCNA; (-) strand; PAM type: NRG; PAM sequence: TGG
cctaatgaaacagtgcgctc

SEQ ID NO: 20577 - DNA, 20 bp, Artificial Sequence
  Description of Artificial Sequence: Synthetic oligonucleotide
  Target: SCNA; (-) strand; PAM type: NRG; PAM sequence: CAG
ttgaaaaattcctaatgaaa

SEQ ID NO: 20578 - DNA, 20 bp, Artificial Sequence
  Description of Artificial Sequence: Synthetic oligonucleotide
  Target: SCNA; (-) strand; PAM type: NRG; PAM sequence: AAG
gctcaatttcactatatatc

SEQ ID NO: 20579 - DNA, 20 bp, Artificial Sequence
  Description of Artificial Sequence: Synthetic oligonucleotide
  Target: SCNA; (-) strand; PAM type: NRG; PAM sequence: TAG
cgaaagatatttttcttttc

SEQ ID NO: 20580 - DNA, 20 bp, Artificial Sequence
  Description of Artificial Sequence: Synthetic oligonucleotide
  Target: SCNA; (-) strand; PAM type: NRG; PAM sequence: AAG
accatctgttctcaaatcga

SEQ ID NO: 20581 - DNA, 20 bp, Artificial Sequence
  Description of Artificial Sequence: Synthetic oligonucleotide
  Target: SCNA; (-) strand; PAM type: NRG; PAM sequence: AGG
ttaaaacaagtttagcatgt

SEQ ID NO: 20582 - DNA, 20 bp, Artificial Sequence
  Description of Artificial Sequence: Synthetic oligonucleotide
  Target: SCNA; (-) strand; PAM type: NRG; PAM sequence: TAG
attaaaacaagtttagcatg

SEQ ID NO: 20583 - DNA, 20 bp, Artificial Sequence
  Description of Artificial Sequence: Synthetic oligonucleotide
  Target: SCNA; (-) strand; PAM type: NRG; PAM sequence: TAG
tttaaaaattaaaacaagtt

SEQ ID NO: 20584 - DNA, 20 bp, Artificial Sequence
  Description of Artificial Sequence: Synthetic oligonucleotide
  Target: SCNA; (-) strand; PAM type: NRG; PAM sequence: AAG
tggcttttaaaaattaaaac

SEQ ID NO: 20585 - DNA, 20 bp, Artificial Sequence
  Description of Artificial Sequence: Synthetic oligonucleotide
  Target: SCNA; (-) strand; PAM type: NRG; PAM sequence: TGG
agggagttttcagttagtaa

SEQ ID NO: 20586 - DNA, 20 bp, Artificial Sequence
  Description of Artificial Sequence: Synthetic oligonucleotide
  Target: SCNA; (-) strand; PAM type: NRG; PAM sequence: TAG
taaagcagggagttttcagt

SEQ ID NO: 20587 - DNA, 20 bp, Artificial Sequence
  Description of Artificial Sequence: Synthetic oligonucleotide
  Target: SCNA; (-) strand; PAM type: NRG; PAM sequence: CAG
cagctaaagcagggagtttt

SEQ ID NO: 20588 - DNA, 20 bp, Artificial Sequence
  Description of Artificial Sequence: Synthetic oligonucleotide
  Target: SCNA; (-) strand; PAM type: NRG; PAM sequence: GAG
gttggttcagctaaagcagg

SEQ ID NO: 20589 - DNA, 20 bp, Artificial Sequence
  Description of Artificial Sequence: Synthetic oligonucleotide
  Target: SCNA; (-) strand; PAM type: NRG; PAM sequence: GGG
gtgttggttcagctaaagca

SEQ ID NO: 20590 - DNA, 20 bp, Artificial Sequence
  Description of Artificial Sequence: Synthetic oligonucleotide
  Target: SCNA; (-) strand; PAM type: NRG; PAM sequence: AGG
agtgttggttcagctaaagc

SEQ ID NO: 20591 - DNA, 20 bp, Artificial Sequence
  Description of Artificial Sequence: Synthetic oligonucleotide
  Target: SCNA; (-) strand; PAM type: NRG; PAM sequence: CAG
aagtgttggttcagctaaag

SEQ ID NO: 20592 - DNA, 20 bp, Artificial Sequence
  Description of Artificial Sequence: Synthetic oligonucleotide
  Target: SCNA; (-) strand; PAM type: NRG; PAM sequence: AAG
gttaagtgttggttcagcta

SEQ ID NO: 20593 - DNA, 20 bp, Artificial Sequence
  Description of Artificial Sequence: Synthetic oligonucleotide
  Target: SCNA; (-) strand; PAM type: NRG; PAM sequence: CAG
acacttgttaagtgttggtt

SEQ ID NO: 20594 - DNA, 20 bp, Artificial Sequence
  Description of Artificial Sequence: Synthetic oligonucleotide
  Target: SCNA; (-) strand; PAM type: NRG; PAM sequence: TGG
aaaaaacacttgttaagtgt

SEQ ID NO: 20595 - DNA, 20 bp, Artificial Sequence
  Description of Artificial Sequence: Synthetic oligonucleotide
  Target: SCNA; (-) strand; PAM type: NRG; PAM sequence: AAG
atctttaaaaaacacttgtt

SEQ ID NO: 20596 - DNA, 20 bp, Artificial Sequence
  Description of Artificial Sequence: Synthetic oligonucleotide
  Target: SCNA; (-) strand; PAM type: NRG; PAM sequence: AAG
agaacttctctgaaggtatc

SEQ ID NO: 20597 - DNA, 20 bp, Artificial Sequence
  Description of Artificial Sequence: Synthetic oligonucleotide
  Target: SCNA; (-) strand; PAM type: NRG; PAM sequence: AGG
cagcaggagaacttctctga

SEQ ID NO: 20598 - DNA, 20 bp, Artificial Sequence
  Description of Artificial Sequence: Synthetic oligonucleotide
  Target: SCNA; (-) strand; PAM type: NRG; PAM sequence: AAG
gcagcaggagaacttctctg

SEQ ID NO: 20599 - DNA, 20 bp, Artificial Sequence
  Description of Artificial Sequence: Synthetic oligonucleotide
  Target: SCNA; (-) strand; PAM type: NRG; PAM sequence: GAG
ccagagaaaactagcagcag

SEQ ID NO: 20600 - DNA, 20 bp, Artificial Sequence
  Description of Artificial Sequence: Synthetic oligonucleotide
  Target: SCNA; (-) strand; PAM type: NRG; PAM sequence: AGG
ctccagagaaaactagcagc

SEQ ID NO: 20601 - DNA, 20 bp, Artificial Sequence
  Description of Artificial Sequence: Synthetic oligonucleotide
  Target: SCNA; (-) strand; PAM type: NRG; PAM sequence: CAG
gctccagagaaaactagcag

SEQ ID NO: 20602 - DNA, 20 bp, Artificial Sequence
  Description of Artificial Sequence: Synthetic oligonucleotide
  Target: SCNA; (-) strand; PAM type: NRG; PAM sequence: CAG
gttgctccagagaaaactag

SEQ ID NO: 20603 - DNA, 20 bp, Artificial Sequence
  Description of Artificial Sequence: Synthetic oligonucleotide
  Target: SCNA; (-) strand; PAM type: NRG; PAM sequence: TAG
actgttgctccagagaaaac

SEQ ID NO: 20604 - DNA, 20 bp, Artificial Sequence
  Description of Artificial Sequence: Synthetic oligonucleotide
  Target: SCNA; (-) strand; PAM type: NRG; PAM sequence: GAG
ggtttcccactgttgctcca

SEQ ID NO: 20605 - DNA, 20 bp, Artificial Sequence
  Description of Artificial Sequence: Synthetic oligonucleotide
  Target: SCNA; (-) strand; PAM type: NRG; PAM sequence: CAG
ggggtttcccactgttgctc

SEQ ID NO: 20606 - DNA, 20 bp, Artificial Sequence
  Description of Artificial Sequence: Synthetic oligonucleotide
  Target: SCNA; (-) strand; PAM type: NRG; PAM sequence: GGG
cacaaaggagtaaccacctg

SEQ ID NO: 20607 - DNA, 20 bp, Artificial Sequence
  Description of Artificial Sequence: Synthetic oligonucleotide
  Target: SCNA; (-) strand; PAM type: NRG; PAM sequence: GGG
tcacaaaggagtaaccacct

SEQ ID NO: 20608 - DNA, 20 bp, Artificial Sequence
  Description of Artificial Sequence: Synthetic oligonucleotide
  Target: SCNA; (-) strand; PAM type: NRG; PAM sequence: TGG
ttcacaaaggagtaaccacc

SEQ ID NO: 20609 - DNA, 20 bp, Artificial Sequence
  Description of Artificial Sequence: Synthetic oligonucleotide
  Target: SCNA; (-) strand; PAM type: NRG; PAM sequence: GAG
ggatgcttatattcacaaag

SEQ ID NO: 20610 - DNA, 20 bp, Artificial Sequence
  Description of Artificial Sequence: Synthetic oligonucleotide
  Target: SCNA; (-) strand; PAM type: NRG; PAM sequence: AGG
gtggatgcttatattcacaa

SEQ ID NO: 20611 - DNA, 20 bp, Artificial Sequence
  Description of Artificial Sequence: Synthetic oligonucleotide
  Target: SCNA; (-) strand; PAM type: NRG; PAM sequence: AAG
tgtggatgcttatattcaca

SEQ ID NO: 20612 - DNA, 20 bp, Artificial Sequence
  Description of Artificial Sequence: Synthetic oligonucleotide
  Target: SCNA; (-) strand; PAM type: NRG; PAM sequence: TGG
cggaaacaaccaatttcatg

SEQ ID NO: 20613 - DNA, 20 bp, Artificial Sequence
  Description of Artificial Sequence: Synthetic oligonucleotide
  Target: SCNA; (-) strand; PAM type: NRG; PAM sequence: CGG
aacatgtttgcccgtgcatg

SEQ ID NO: 20614 - DNA, 20 bp, Artificial Sequence
  Description of Artificial Sequence: Synthetic oligonucleotide
  Target: SCNA; (-) strand; PAM type: NRG; PAM sequence: TAG
acaatttgtacttcagacat

SEQ ID NO: 20615 - DNA, 20 bp, Artificial Sequence
  Description of Artificial Sequence: Synthetic oligonucleotide
  Target: SCNA; (-) strand; PAM type: NRG; PAM sequence: CAG
ttctacaacaatttgtactt

SEQ ID NO: 20616 - DNA, 20 bp, Artificial Sequence
  Description of Artificial Sequence: Synthetic oligonucleotide
  Target: SCNA; (-) strand; PAM type: NRG; PAM sequence: TGG
gaattagacttggaagtcta

SEQ ID NO: 20617 - DNA, 20 bp, Artificial Sequence
  Description of Artificial Sequence: Synthetic oligonucleotide
  Target: SCNA; (-) strand; PAM type: NRG; PAM sequence: AAG
agtattagaattagacttgg

SEQ ID NO: 20618 - DNA, 20 bp, Artificial Sequence
  Description of Artificial Sequence: Synthetic oligonucleotide
  Target: SCNA; (-) strand; PAM type: NRG; PAM sequence: TGG
gttagtattagaattagact

SEQ ID NO: 20619 - DNA, 20 bp, Artificial Sequence
  Description of Artificial Sequence: Synthetic oligonucleotide
  Target: SCNA; (-) strand; PAM type: NRG; PAM sequence: TAG
atggaagttagtattagaat

SEQ ID NO: 20620 - DNA, 20 bp, Artificial Sequence
  Description of Artificial Sequence: Synthetic oligonucleotide
  Target: SCNA; (-) strand; PAM type: NRG; PAM sequence: TAG
ctattgatggaagttagtat

SEQ ID NO: 20621 - DNA, 20 bp, Artificial Sequence
  Description of Artificial Sequence: Synthetic oligonucleotide
  Target: SCNA; (-) strand; PAM type: NRG; PAM sequence: TAG
atttaactattgatggaagt

SEQ ID NO: 20622 - DNA, 20 bp, Artificial Sequence
  Description of Artificial Sequence: Synthetic oligonucleotide
  Target: SCNA; (-) strand; PAM type: NRG; PAM sequence: AAG
aataatttaactattgatgg

SEQ ID NO: 20623 - DNA, 20 bp, Artificial Sequence
  Description of Artificial Sequence: Synthetic oligonucleotide
  Target: SCNA; (-) strand; PAM type: NRG; PAM sequence: TGG
aataataatttaactattga

SEQ ID NO: 20624 - DNA, 20 bp, Artificial Sequence
  Description of Artificial Sequence: Synthetic oligonucleotide
  Target: SCNA; (-) strand; PAM type: NRG; PAM sequence: AAG
ttcaggtagcctttggatag

SEQ ID NO: 20625 - DNA, 20 bp, Artificial Sequence
  Description of Artificial Sequence: Synthetic oligonucleotide
  Target: SCNA; (-) strand; PAM type: NRG; PAM sequence: TAG
accttcaggtagcctttgga

SEQ ID NO: 20626 - DNA, 20 bp, Artificial Sequence
  Description of Artificial Sequence: Synthetic oligonucleotide
  Target: SCNA; (-) strand; PAM type: NRG; PAM sequence: TGG
taggaccttcaggtagcctt

SEQ ID NO: 20627 - DNA, 20 bp, Artificial Sequence
  Description of Artificial Sequence: Synthetic oligonucleotide
  Target: SCNA; (-) strand; PAM type: NRG; PAM sequence: TAG
aaagtgataggaccttcagg

SEQ ID NO: 20628 - DNA, 20 bp, Artificial Sequence
  Description of Artificial Sequence: Synthetic oligonucleotide
  Target: SCNA; (-) strand; PAM type: NRG; PAM sequence: AGG
accaaagtgataggaccttc

SEQ ID NO: 20629 - DNA, 20 bp, Artificial Sequence
  Description of Artificial Sequence: Synthetic oligonucleotide
  Target: SCNA; (-) strand; PAM type: NRG; PAM sequence: CAG
caccaaagtgataggacctt

SEQ ID NO: 20630 - DNA, 20 bp, Artificial Sequence
  Description of Artificial Sequence: Synthetic oligonucleotide
  Target: SCNA; (-) strand; PAM type: NRG; PAM sequence: AGG
tcttctcacaccaaagtgat

SEQ ID NO: 20631 - DNA, 20 bp, Artificial Sequence
  Description of Artificial Sequence: Synthetic oligonucleotide
  Target: SCNA; (-) strand; PAM type: NRG; PAM sequence: TAG
ttcttctcacaccaaagtga

SEQ ID NO: 20632 - DNA, 20 bp, Artificial Sequence
  Description of Artificial Sequence: Synthetic oligonucleotide
  Target: SCNA; (-) strand; PAM type: NRG; PAM sequence: AAG
acccgattcttctcacacca

SEQ ID NO: 20633 - DNA, 20 bp, Artificial Sequence
  Description of Artificial Sequence: Synthetic oligonucleotide
  Target: SCNA; (-) strand; PAM type: NRG; PAM sequence: AAG
attctattgataactggtgc

SEQ ID NO: 20634 - DNA, 20 bp, Artificial Sequence
  Description of Artificial Sequence: Synthetic oligonucleotide
  Target: SCNA; (-) strand; PAM type: NRG; PAM sequence: TGG
cttaatattctattgataac

SEQ ID NO: 20635 - DNA, 20 bp, Artificial Sequence
  Description of Artificial Sequence: Synthetic oligonucleotide
  Target: SCNA; (-) strand; PAM type: NRG; PAM sequence: TGG
agtatcaaatatgtggaacc

SEQ ID NO: 20636 - DNA, 20 bp, Artificial Sequence
  Description of Artificial Sequence: Synthetic oligonucleotide
  Target: SCNA; (-) strand; PAM type: NRG; PAM sequence: TGG
ggtgaaaagtatcaaatatg

SEQ ID NO: 20637 - DNA, 20 bp, Artificial Sequence
  Description of Artificial Sequence: Synthetic oligonucleotide
  Target: SCNA; (-) strand; PAM type: NRG; PAM sequence: AAG
ctttcctattttctggtgaa

SEQ ID NO: 20638 - DNA, 20 bp, Artificial Sequence
  Description of Artificial Sequence: Synthetic oligonucleotide
  Target: SCNA; (-) strand; PAM type: NRG; PAM sequence: TGG
aatccgtctttcctattttc

SEQ ID NO: 20639 - DNA, 20 bp, Artificial Sequence
  Description of Artificial Sequence: Synthetic oligonucleotide
  Target: SCNA; (-) strand; PAM type: NRG; PAM sequence: CAG
ttgactttgaaaatacattg

SEQ ID NO: 20640 - DNA, 20 bp, Artificial Sequence
  Description of Artificial Sequence: Synthetic oligonucleotide
  Target: SCNA; (-) strand; PAM type: NRG; PAM sequence: AAG
tacattaaatagaggaatag

SEQ ID NO: 20641 - DNA, 20 bp, Artificial Sequence
  Description of Artificial Sequence: Synthetic oligonucleotide
  Target: SCNA; (-) strand; PAM type: NRG; PAM sequence: TAG
aaatacattaaatagaggaa

SEQ ID NO: 20642 - DNA, 20 bp, Artificial Sequence
  Description of Artificial Sequence: Synthetic oligonucleotide
  Target: SCNA; (-) strand; PAM type: NRG; PAM sequence: AGG
tgtaaaaatacattaaatag

SEQ ID NO: 20643 - DNA, 20 bp, Artificial Sequence
  Description of Artificial Sequence: Synthetic oligonucleotide
  Target: SCNA; (-) strand; PAM type: NRG; PAM sequence: GAG
ctgtaaaaatacattaaata

SEQ ID NO: 20644 - DNA, 20 bp, Artificial Sequence
  Description of Artificial Sequence: Synthetic oligonucleotide
  Target: SCNA; (-) strand; PAM type: NRG; PAM sequence: TAG
ctctgtaaaaatacattaaa

SEQ ID NO: 20645 - DNA, 20 bp, Artificial Sequence
  Description of Artificial Sequence: Synthetic oligonucleotide
  Target: SCNA; (-) strand; PAM type: NRG; PAM sequence: AAG
aaagaaatgtgtgttttctc

SEQ ID NO: 20646 - DNA, 20 bp, Artificial Sequence
  Description of Artificial Sequence: Synthetic oligonucleotide
  Target: SCNA; (-) strand; PAM type: NRG; PAM sequence: AAG
atatatacatcaagattcaa

SEQ ID NO: 20647 - DNA, 20 bp, Artificial Sequence
  Description of Artificial Sequence: Synthetic oligonucleotide
  Target: SCNA; (-) strand; PAM type: NRG; PAM sequence: AAG
ccgtcaaaaatatatacatc

SEQ ID NO: 20648 - DNA, 20 bp, Artificial Sequence
  Description of Artificial Sequence: Synthetic oligonucleotide
  Target: SCNA; (-) strand; PAM type: NRG; PAM sequence: GAG
agatcacctagctcaagtaa

SEQ ID NO: 20649 - DNA, 20 bp, Artificial Sequence
  Description of Artificial Sequence: Synthetic oligonucleotide
  Target: SCNA; (-) strand; PAM type: NRG; PAM sequence: AAG
tgagatcacctagctcaagt

SEQ ID NO: 20650 - DNA, 20 bp, Artificial Sequence
  Description of Artificial Sequence: Synthetic oligonucleotide
  Target: SCNA; (-) strand; PAM type: NRG; PAM sequence: AAG
gatgtgagatcacctagctc

SEQ ID NO: 20651 - DNA, 20 bp, Artificial Sequence
  Description of Artificial Sequence: Synthetic oligonucleotide
  Target: SCNA; (-) strand; PAM type: NRG; PAM sequence: TAG
gataatgatgtgagatcacc

SEQ ID NO: 20652 - DNA, 20 bp, Artificial Sequence
  Description of Artificial Sequence: Synthetic oligonucleotide
  Target: SCNA; (-) strand; PAM type: NRG; PAM sequence: GAG
atagcaacagataatgatgt

SEQ ID NO: 20653 - DNA, 20 bp, Artificial Sequence
  Description of Artificial Sequence: Synthetic oligonucleotide
  Target: SCNA; (-) strand; PAM type: NRG; PAM sequence: CAG
gaaacaatagcacatagcaa

SEQ ID NO: 20654 - DNA, 20 bp, Artificial Sequence
  Description of Artificial Sequence: Synthetic oligonucleotide
  Target: SCNA; (-) strand; PAM type: NRG; PAM sequence: TAG
gctacagaaacaatagcaca

SEQ ID NO: 20655 - DNA, 20 bp, Artificial Sequence
  Description of Artificial Sequence: Synthetic oligonucleotide
  Target: SCNA; (-) strand; PAM type: NRG; PAM sequence: TAG
tcatttggctacagaaacaa

SEQ ID NO: 20656 - DNA, 20 bp, Artificial Sequence
  Description of Artificial Sequence: Synthetic oligonucleotide
  Target: SCNA; (-) strand; PAM type: NRG; PAM sequence: CAG
atggcccattcatttggcta

SEQ ID NO: 20657 - DNA, 20 bp, Artificial Sequence
  Description of Artificial Sequence: Synthetic oligonucleotide
  Target: SCNA; (-) strand; PAM type: NRG; PAM sequence: TGG
ttgccaatggcccattcatt

SEQ ID NO: 20658 - DNA, 20 bp, Artificial Sequence
  Description of Artificial Sequence: Synthetic oligonucleotide
  Target: SCNA; (-) strand; PAM type: NRG; PAM sequence: TGG
ttgtttggcttgattgccaa

SEQ ID NO: 20659 - DNA, 20 bp, Artificial Sequence
  Description of Artificial Sequence: Synthetic oligonucleotide
  Target: SCNA; (-) strand; PAM type: NRG; PAM sequence: TGG
gtgtaaaagcaaaatttgtt

SEQ ID NO: 20660 - DNA, 20 bp, Artificial Sequence
  Description of Artificial Sequence: Synthetic oligonucleotide
  Target: SCNA; (-) strand; PAM type: NRG; PAM sequence: AAG
aatgctaaaatcgggtgtaa

SEQ ID NO: 20661 - DNA, 20 bp, Artificial Sequence
  Description of Artificial Sequence: Synthetic oligonucleotide
  Target: SCNA; (-) strand; PAM type: NRG; PAM sequence: GGG
tgtagattaatgctaaaatc

SEQ ID NO: 20662 - DNA, 20 bp, Artificial Sequence
  Description of Artificial Sequence: Synthetic oligonucleotide
  Target: SCNA; (-) strand; PAM type: NRG; PAM sequence: CGG
ctgtagattaatgctaaaat

SEQ ID NO: 20663 - DNA, 20 bp, Artificial Sequence
  Description of Artificial Sequence: Synthetic oligonucleotide
  Target: SCNA; (-) strand; PAM type: NRG; PAM sequence: TAG
ctattgaaaagccgtgtctg

SEQ ID NO: 20664 - DNA, 20 bp, Artificial Sequence
  Description of Artificial Sequence: Synthetic oligonucleotide
  Target: SCNA; (-) strand; PAM type: NRG; PAM sequence: AAG
atatcttttctactattgaa

SEQ ID NO: 20665 - DNA, 20 bp, Artificial Sequence
  Description of Artificial Sequence: Synthetic oligonucleotide
  Target: SCNA; (-) strand; PAM type: NRG; PAM sequence: GAG
ttaaatttggactaaaatgg

SEQ ID NO: 20666 - DNA, 20 bp, Artificial Sequence
  Description of Artificial Sequence: Synthetic oligonucleotide
  Target: SCNA; (-) strand; PAM type: NRG; PAM sequence: GGG
acttaaatttggactaaaat

SEQ ID NO: 20667 - DNA, 20 bp, Artificial Sequence
  Description of Artificial Sequence: Synthetic oligonucleotide
  Target: SCNA; (-) strand; PAM type: NRG; PAM sequence: TGG
tacttaaatttggactaaaa

SEQ ID NO: 20668 - DNA, 20 bp, Artificial Sequence
  Description of Artificial Sequence: Synthetic oligonucleotide
  Target: SCNA; (-) strand; PAM type: NRG; PAM sequence: TGG
gctttaactatacttaaatt

SEQ ID NO: 20669 - DNA, 20 bp, Artificial Sequence
  Description of Artificial Sequence: Synthetic oligonucleotide
  Target: SCNA; (-) strand; PAM type: NRG; PAM sequence: TAG
aaaacatttttcccaaaatg

SEQ ID NO: 20670 - DNA, 20 bp, Artificial Sequence
  Description of Artificial Sequence: Synthetic oligonucleotide
  Target: SCNA; (-) strand; PAM type: NRG; PAM sequence: AAG
aatcctacttttcatcccac

SEQ ID NO: 20671 - DNA, 20 bp, Artificial Sequence
  Description of Artificial Sequence: Synthetic oligonucleotide
  Target: SCNA; (-) strand; PAM type: NRG; PAM sequence: TGG
gttagagaaggtagagataa

SEQ ID NO: 20672 - DNA, 20 bp, Artificial Sequence
  Description of Artificial Sequence: Synthetic oligonucleotide
  Target: SCNA; (-) strand; PAM type: NRG; PAM sequence: GAG
aaaggcagttagagaaggta

SEQ ID NO: 20673 - DNA, 20 bp, Artificial Sequence
  Description of Artificial Sequence: Synthetic oligonucleotide
  Target: SCNA; (-) strand; PAM type: NRG; PAM sequence: TAG
gtaaaggcagttagagaagg

SEQ ID NO: 20674 - DNA, 20 bp, Artificial Sequence
  Description of Artificial Sequence: Synthetic oligonucleotide
  Target: SCNA; (-) strand; PAM type: NRG; PAM sequence: AGG
ttagtaaaggcagttagaga

SEQ ID NO: 20675 - DNA, 20 bp, Artificial Sequence
  Description of Artificial Sequence: Synthetic oligonucleotide
  Target: SCNA; (-) strand; PAM type: NRG; PAM sequence: AAG
tttagtaaaggcagttagag

SEQ ID NO: 20676 - DNA, 20 bp, Artificial Sequence
  Description of Artificial Sequence: Synthetic oligonucleotide
  Target: SCNA; (-) strand; PAM type: NRG; PAM sequence: GAG
aattttagtaaaggcagtta

SEQ ID NO: 20677 - DNA, 20 bp, Artificial Sequence
  Description of Artificial Sequence: Synthetic oligonucleotide
  Target: SCNA; (-) strand; PAM type: NRG; PAM sequence: TAG
aaaattttagtaaaggcagt

SEQ ID NO: 20678 - DNA, 20 bp, Artificial Sequence
  Description of Artificial Sequence: Synthetic oligonucleotide
  Target: SCNA; (-) strand; PAM type: NRG; PAM sequence: CAG
ttttaaaattttagtaaagg

SEQ ID NO: 20679 - DNA, 20 bp, Artificial Sequence
  Description of Artificial Sequence: Synthetic oligonucleotide
  Target: SCNA; (-) strand; PAM type: NRG; PAM sequence: AGG
atattttaaaattttagtaa

SEQ ID NO: 20680 - DNA, 20 bp, Artificial Sequence
  Description of Artificial Sequence: Synthetic oligonucleotide
  Target: SCNA; (-) strand; PAM type: NRG; PAM sequence: AAG
aatattttaaaattttagta

SEQ ID NO: 20681 - DNA, 20 bp, Artificial Sequence
  Description of Artificial Sequence: Synthetic oligonucleotide
  Target: SCNA; (-) strand; PAM type: NRG; PAM sequence: TAG
aaagaaatattttaaaattt

SEQ ID NO: 20682 - DNA, 20 bp, Artificial Sequence
  Description of Artificial Sequence: Synthetic oligonucleotide
  Target: SCNA; (-) strand; PAM type: NRG; PAM sequence: AAG
attatgttttgtttcttcaa

SEQ ID NO: 20683 - DNA, 20 bp, Artificial Sequence
  Description of Artificial Sequence: Synthetic oligonucleotide
  Target: SCNA; (-) strand; PAM type: NRG; PAM sequence: TGG
gtcatacttttaagatttaa

SEQ ID NO: 20684 - DNA, 20 bp, Artificial Sequence
  Description of Artificial Sequence: Synthetic oligonucleotide
  Target: SCNA; (-) strand; PAM type: NRG; PAM sequence: AAG
catttagttgtcatactttt

SEQ ID NO: 20685 - DNA, 20 bp, Artificial Sequence
  Description of Artificial Sequence: Synthetic oligonucleotide
  Target: SCNA; (-) strand; PAM type: NRG; PAM sequence: TAG
caattgtcttagcatccatt

SEQ ID NO: 20686 - DNA, 20 bp, Artificial Sequence
  Description of Artificial Sequence: Synthetic oligonucleotide
  Target: SCNA; (-) strand; PAM type: NRG; PAM sequence: TAG
cagttgaaacacaattgtct

SEQ ID NO: 20687 - DNA, 20 bp, Artificial Sequence
  Description of Artificial Sequence: Synthetic oligonucleotide
  Target: SCNA; (-) strand; PAM type: NRG; PAM sequence: CAG
caatagagtttataagccca

SEQ ID NO: 20688 - DNA, 20 bp, Artificial Sequence
  Description of Artificial Sequence: Synthetic oligonucleotide
  Target: SCNA; (-) strand; PAM type: NRG; PAM sequence: AAG
agtttctcaatagagtttat

SEQ ID NO: 20689 - DNA, 20 bp, Artificial Sequence
  Description of Artificial Sequence: Synthetic oligonucleotide
  Target: SCNA; (-) strand; PAM type: NRG; PAM sequence: GAG
cataaatgagtttctcaata

SEQ ID NO: 20690 - DNA, 20 bp, Artificial Sequence
  Description of Artificial Sequence: Synthetic oligonucleotide
  Target: SCNA; (-) strand; PAM type: NRG; PAM sequence: TAG
atcataaatgagtttctcaa

SEQ ID NO: 20691 - DNA, 20 bp, Artificial Sequence
  Description of Artificial Sequence: Synthetic oligonucleotide
  Target: SCNA; (-) strand; PAM type: NRG; PAM sequence: GAG
aaaaactcatgatcataaat

SEQ ID NO: 20692 - DNA, 20 bp, Artificial Sequence
  Description of Artificial Sequence: Synthetic oligonucleotide
  Target: SCNA; (-) strand; PAM type: NRG; PAM sequence: TGG
ccatctttatatgtccatcc

SEQ ID NO: 20693 - DNA, 20 bp, Artificial Sequence
  Description of Artificial Sequence: Synthetic oligonucleotide
  Target: SCNA; (-) strand; PAM type: NRG; PAM sequence: CAG
tctctccctattctccaggc

SEQ ID NO: 20694 - DNA, 20 bp, Artificial Sequence
  Description of Artificial Sequence: Synthetic oligonucleotide
  Target: SCNA; (-) strand; PAM type: NRG; PAM sequence: AGG
ctcttctctccctattctcc

SEQ ID NO: 20695 - DNA, 20 bp, Artificial Sequence
  Description of Artificial Sequence: Synthetic oligonucleotide
  Target: SCNA; (-) strand; PAM type: NRG; PAM sequence: CAG
cctcttctctccctattctc

SEQ ID NO: 20696 - DNA, 20 bp, Artificial Sequence
  Description of Artificial Sequence: Synthetic oligonucleotide
  Target: SCNA; (-) strand; PAM type: NRG; PAM sequence: AAG
taaaaagatatgtctcatat

SEQ ID NO: 20697 - DNA, 20 bp, Artificial Sequence
  Description of Artificial Sequence: Synthetic oligonucleotide
  Target: SCNA; (-) strand; PAM type: NRG; PAM sequence: AAG
ttaaatatagatattataaa

SEQ ID NO: 20698 - DNA, 20 bp, Artificial Sequence
  Description of Artificial Sequence: Synthetic oligonucleotide
  Target: SCNA; (-) strand; PAM type: NRG; PAM sequence: TAG
actttaaaatgttttaaata

SEQ ID NO: 20699 - DNA, 20 bp, Artificial Sequence
  Description of Artificial Sequence: Synthetic oligonucleotide
  Target: SCNA; (-) strand; PAM type: NRG; PAM sequence: CAG
ctgtatattgtattatagta

SEQ ID NO: 20700 - DNA, 20 bp, Artificial Sequence
  Description of Artificial Sequence: Synthetic oligonucleotide
  Target: SCNA; (-) strand; PAM type: NRG; PAM sequence: TAG
taatactgtatattgtatta

SEQ ID NO: 20701 - DNA, 20 bp, Artificial Sequence
  Description of Artificial Sequence: Synthetic oligonucleotide
  Target: SCNA; (-) strand; PAM type: NRG; PAM sequence: CAG
acagtaattaccgtaaatca

SEQ ID NO: 20702 - DNA, 20 bp, Artificial Sequence
  Description of Artificial Sequence: Synthetic oligonucleotide
  Target: SCNA; (-) strand; PAM type: NRG; PAM sequence: CAG
aattcagaaaaaatgaccca

SEQ ID NO: 20703 - DNA, 20 bp, Artificial Sequence
  Description of Artificial Sequence: Synthetic oligonucleotide
  Target: SCNA; (-) strand; PAM type: NRG; PAM sequence: CAG
gttcacttataaaattaatt

SEQ ID NO: 20704 - DNA, 20 bp, Artificial Sequence
  Description of Artificial Sequence: Synthetic oligonucleotide
  Target: SCNA; (-) strand; PAM type: NRG; PAM sequence: TGG
tggatcatagatcattctct

SEQ ID NO: 20705 - DNA, 20 bp, Artificial Sequence
  Description of Artificial Sequence: Synthetic oligonucleotide
  Target: SCNA; (-) strand; PAM type: NRG; PAM sequence: TAG
tgaaagttatttctggatca

SEQ ID NO: 20706 - DNA, 20 bp, Artificial Sequence
  Description of Artificial Sequence: Synthetic oligonucleotide
  Target: SCNA; (-) strand; PAM type: NRG; PAM sequence: TGG
ttatcattgaaagttatttc

SEQ ID NO: 20707 - DNA, 20 bp, Artificial Sequence
  Description of Artificial Sequence: Synthetic oligonucleotide
  Target: SCNA; (-) strand; PAM type: NRG; PAM sequence: AAG
ttcaggttttttatcattga

SEQ ID NO: 20708 - DNA, 20 bp, Artificial Sequence
  Description of Artificial Sequence: Synthetic oligonucleotide
  Target: SCNA; (-) strand; PAM type: NRG; PAM sequence: AGG
tgacttctttgttgtacttc

SEQ ID NO: 20709 - DNA, 20 bp, Artificial Sequence
  Description of Artificial Sequence: Synthetic oligonucleotide
  Target: SCNA; (-) strand; PAM type: NRG; PAM sequence: CAG
ctgacttctttgttgtactt

SEQ ID NO: 20710 - DNA, 20 bp, Artificial Sequence
  Description of Artificial Sequence: Synthetic oligonucleotide
  Target: SCNA; (-) strand; PAM type: NRG; PAM sequence: TAG
atatttagttccattttgtc

SEQ ID NO: 20711 - DNA, 20 bp, Artificial Sequence
  Description of Artificial Sequence: Synthetic oligonucleotide
  Target: SCNA; (-) strand; PAM type: NRG; PAM sequence: TAG
ctgcaccttcttagtatatt

SEQ ID NO: 20712 - DNA, 20 bp, Artificial Sequence
  Description of Artificial Sequence: Synthetic oligonucleotide
  Target: SCNA; (-) strand; PAM type: NRG; PAM sequence: TAG
cttctttttctgcaccttct

SEQ ID NO: 20713 - DNA, 20 bp, Artificial Sequence
  Description of Artificial Sequence: Synthetic oligonucleotide
  Target: SCNA; (-) strand; PAM type: NRG; PAM sequence: AAG
ccatggggaaatatggggtt

SEQ ID NO: 20714 - DNA, 20 bp, Artificial Sequence
  Description of Artificial Sequence: Synthetic oligonucleotide
  Target: SCNA; (-) strand; PAM type: NRG; PAM sequence: GGG
ttctgccatggggaaatatg

SEQ ID NO: 20715 - DNA, 20 bp, Artificial Sequence
  Description of Artificial Sequence: Synthetic oligonucleotide
  Target: SCNA; (-) strand; PAM type: NRG; PAM sequence: GGG
cttctgccatggggaaatat

SEQ ID NO: 20716 - DNA, 20 bp, Artificial Sequence
  Description of Artificial Sequence: Synthetic oligonucleotide
  Target: SCNA; (-) strand; PAM type: NRG; PAM sequence: TGG
ccttctgccatggggaaata

SEQ ID NO: 20717 - DNA, 20 bp, Artificial Sequence
  Description of Artificial Sequence: Synthetic oligonucleotide
  Target: SCNA; (-) strand; PAM type: NRG; PAM sequence: GGG
gtttctgtccttctgccatg

SEQ ID NO: 20718 - DNA, 20 bp, Artificial Sequence
  Description of Artificial Sequence: Synthetic oligonucleotide
  Target: SCNA; (-) strand; PAM type: NRG; PAM sequence: GGG
agtttctgtccttctgccat

SEQ ID NO: 20719 - DNA, 20 bp, Artificial Sequence
  Description of Artificial Sequence: Synthetic oligonucleotide
  Target: SCNA; (-) strand; PAM type: NRG; PAM sequence: TGG
tagtttctgtccttctgcca

SEQ ID NO: 20720 - DNA, 20 bp, Artificial Sequence
  Description of Artificial Sequence: Synthetic oligonucleotide
  Target: SCNA; (-) strand; PAM type: NRG; PAM sequence: TAG
tgttgagttgccctcagatt

SEQ ID NO: 20721 - DNA, 20 bp, Artificial Sequence
  Description of Artificial Sequence: Synthetic oligonucleotide
  Target: SCNA; (-) strand; PAM type: NRG; PAM sequence: CAG
gactactgttgagttgccct

SEQ ID NO: 20722 - DNA, 20 bp, Artificial Sequence
  Description of Artificial Sequence: Synthetic oligonucleotide
  Target: SCNA; (-) strand; PAM type: NRG; PAM sequence: GAG
gataattattgactactgtt

SEQ ID NO: 20723 - DNA, 20 bp, Artificial Sequence
  Description of Artificial Sequence: Synthetic oligonucleotide
  Target: SCNA; (-) strand; PAM type: NRG; PAM sequence: TGG
cacctattcatccattgatt

SEQ ID NO: 20724 - DNA, 20 bp, Artificial Sequence
  Description of Artificial Sequence: Synthetic oligonucleotide
  Target: SCNA; (-) strand; PAM type: NRG; PAM sequence: AGG
atgatgacagaagggttccc

SEQ ID NO: 20725 - DNA, 20 bp, Artificial Sequence
  Description of Artificial Sequence: Synthetic oligonucleotide
  Target: SCNA; (-) strand; PAM type: NRG; PAM sequence: CAG
catgatgacagaagggttcc

SEQ ID NO: 20726 - DNA, 20 bp, Artificial Sequence
  Description of Artificial Sequence: Synthetic oligonucleotide
  Target: SCNA; (-) strand; PAM type: NRG; PAM sequence: GGG
gcttatgcatgatgacagaa

SEQ ID NO: 20727 - DNA, 20 bp, Artificial Sequence
  Description of Artificial Sequence: Synthetic oligonucleotide
  Target: SCNA; (-) strand; PAM type: NRG; PAM sequence: AGG
tgcttatgcatgatgacaga

SEQ ID NO: 20728 - DNA, 20 bp, Artificial Sequence
  Description of Artificial Sequence: Synthetic oligonucleotide
  Target: SCNA; (-) strand; PAM type: NRG; PAM sequence: AAG
ctgcttatgcatgatgacag

SEQ ID NO: 20729 - DNA, 20 bp, Artificial Sequence
  Description of Artificial Sequence: Synthetic oligonucleotide
  Target: SCNA; (-) strand; PAM type: NRG; PAM sequence: CAG
aggctgcttatgcatgatga

SEQ ID NO: 20730 - DNA, 20 bp, Artificial Sequence
  Description of Artificial Sequence: Synthetic oligonucleotide
  Target: SCNA; (-) strand; PAM type: NRG; PAM sequence: AGG
tatagtattatctaagactc

SEQ ID NO: 20731 - DNA, 20 bp, Artificial Sequence
  Description of Artificial Sequence: Synthetic oligonucleotide
  Target: SCNA; (-) strand; PAM type: NRG; PAM sequence: CAG
atatagtattatctaagact

SEQ ID NO: 20732 - DNA, 20 bp, Artificial Sequence
  Description of Artificial Sequence: Synthetic oligonucleotide
  Target: SCNA; (-) strand; PAM type: NRG; PAM sequence: AAG
catgtcatatagtattatct

SEQ ID NO: 20733 - DNA, 20 bp, Artificial Sequence
  Description of Artificial Sequence: Synthetic oligonucleotide
  Target: SCNA; (-) strand; PAM type: NRG; PAM sequence: TAG
catgaagaaagcatgtcata

SEQ ID NO: 20734 - DNA, 20 bp, Artificial Sequence
  Description of Artificial Sequence: Synthetic oligonucleotide
  Target: SCNA; (-) strand; PAM type: NRG; PAM sequence: AAG
tctgtttattcacatgaaga

SEQ ID NO: 20735 - DNA, 20 bp, Artificial Sequence
  Description of Artificial Sequence: Synthetic oligonucleotide
  Target: SCNA; (-) strand; PAM type: NRG; PAM sequence: AAG
taggtctgtttattcacatg

SEQ ID NO: 20736 - DNA, 20 bp, Artificial Sequence
  Description of Artificial Sequence: Synthetic oligonucleotide
  Target: SCNA; (-) strand; PAM type: NRG; PAM sequence: AGG
gtctcctagtgcctgtcttt

SEQ ID NO: 20737 - DNA, 20 bp, Artificial Sequence
  Description of Artificial Sequence: Synthetic oligonucleotide
  Target: SCNA; (-) strand; PAM type: NRG; PAM sequence: TAG
ggtctcctagtgcctgtctt

SEQ ID NO: 20738 - DNA, 20 bp, Artificial Sequence
  Description of Artificial Sequence: Synthetic oligonucleotide
  Target: SCNA; (-) strand; PAM type: NRG; PAM sequence: TAG
tttgtggtcccagggtctcc

SEQ ID NO: 20739 - DNA, 20 bp, Artificial Sequence
  Description of Artificial Sequence: Synthetic oligonucleotide
  Target: SCNA; (-) strand; PAM type: NRG; PAM sequence: GGG
atctgagctttgtggtccca

SEQ ID NO: 20740 - DNA, 20 bp, Artificial Sequence
  Description of Artificial Sequence: Synthetic oligonucleotide
  Target: SCNA; (-) strand; PAM type: NRG; PAM sequence: AGG
aatctgagctttgtggtccc

SEQ ID NO: 20741 - DNA, 20 bp, Artificial Sequence
  Description of Artificial Sequence: Synthetic oligonucleotide
  Target: SCNA; (-) strand; PAM type: NRG; PAM sequence: CAG
caatctgagctttgtggtcc

SEQ ID NO: 20742 - DNA, 20 bp, Artificial Sequence
  Description of Artificial Sequence: Synthetic oligonucleotide
  Target: SCNA; (-) strand; PAM type: NRG; PAM sequence: TGG
ttataacaatctgagctttg

SEQ ID NO: 20743 - DNA, 20 bp, Artificial Sequence
  Description of Artificial Sequence: Synthetic oligonucleotide
  Target: SCNA; (-) strand; PAM type: NRG; PAM sequence: GAG
tccttttattataacaatct

SEQ ID NO: 20744 - DNA, 20 bp, Artificial Sequence
  Description of Artificial Sequence: Synthetic oligonucleotide
  Target: SCNA; (-) strand; PAM type: NRG; PAM sequence: GAG
caaaaattttcttcaacagg

SEQ ID NO: 20745 - DNA, 20 bp, Artificial Sequence
  Description of Artificial Sequence: Synthetic oligonucleotide
  Target: SCNA; (-) strand; PAM type: NRG; PAM sequence: GGG
tgcaaaaattttcttcaaca

SEQ ID NO: 20746 - DNA, 20 bp, Artificial Sequence
  Description of Artificial Sequence: Synthetic oligonucleotide
  Target: SCNA; (-) strand; PAM type: NRG; PAM sequence: AGG
gtgcaaaaattttcttcaac

SEQ ID NO: 20747 - DNA, 20 bp, Artificial Sequence
  Description of Artificial Sequence: Synthetic oligonucleotide
  Target: SCNA; (-) strand; PAM type: NRG; PAM sequence: CAG
tgtgcaaaaattttcttcaa

SEQ ID NO: 20748 - DNA, 20 bp, Artificial Sequence
  Description of Artificial Sequence: Synthetic oligonucleotide
  Target: SCNA; (-) strand; PAM type: NRG; PAM sequence: AAG
tagtagaaatattgtatatc

SEQ ID NO: 20749 - DNA, 20 bp, Artificial Sequence
  Description of Artificial Sequence: Synthetic oligonucleotide
  Target: SCNA; (-) strand; PAM type: NRG; PAM sequence: TAG
aagctttctctgttcattag

SEQ ID NO: 20750 - DNA, 20 bp, Artificial Sequence
  Description of Artificial Sequence: Synthetic oligonucleotide
  Target: SCNA; (-) strand; PAM type: NRG; PAM sequence: TAG
gtcaagctttctctgttcat

SEQ ID NO: 20751 - DNA, 20 bp, Artificial Sequence
  Description of Artificial Sequence: Synthetic oligonucleotide
  Target: SCNA; (-) strand; PAM type: NRG; PAM sequence: AAG
taaatgtgtcctttcaagtc

SEQ ID NO: 20752 - DNA, 20 bp, Artificial Sequence
  Description of Artificial Sequence: Synthetic oligonucleotide
  Target: SCNA; (-) strand; PAM type: NRG; PAM sequence: AAG
taatataaatgtgtcctttc

SEQ ID NO: 20753 - DNA, 20 bp, Artificial Sequence
  Description of Artificial Sequence: Synthetic oligonucleotide
  Target: SCNA; (-) strand; PAM type: NRG; PAM sequence: GGG
atagtaatggcctctagata

SEQ ID NO: 20754 - DNA, 20 bp, Artificial Sequence
  Description of Artificial Sequence: Synthetic oligonucleotide
  Target: SCNA; (-) strand; PAM type: NRG; PAM sequence: AGG
gatagtaatggcctctagat

SEQ ID NO: 20755 - DNA, 20 bp, Artificial Sequence
  Description of Artificial Sequence: Synthetic oligonucleotide
  Target: SCNA; (-) strand; PAM type: NRG; PAM sequence: TAG
tgatagtaatggcctctaga

SEQ ID NO: 20756 - DNA, 20 bp, Artificial Sequence
  Description of Artificial Sequence: Synthetic oligonucleotide
  Target: SCNA; (-) strand; PAM type: NRG; PAM sequence: TAG
tgcttgatagtaatggcctc

SEQ ID NO: 20757 - DNA, 20 bp, Artificial Sequence
  Description of Artificial Sequence: Synthetic oligonucleotide
  Target: SCNA; (-) strand; PAM type: NRG; PAM sequence: TGG
tgacagatgcttgatagtaa

SEQ ID NO: 20758 - DNA, 20 bp, Artificial Sequence
  Description of Artificial Sequence: Synthetic oligonucleotide
  Target: SCNA; (-) strand; PAM type: NRG; PAM sequence: TAG
tttacctgacagatgcttga

SEQ ID NO: 20759 - DNA, 20 bp, Artificial Sequence
  Description of Artificial Sequence: Synthetic oligonucleotide
  Target: SCNA; (-) strand; PAM type: NRG; PAM sequence: CAG
atctcatctcctttacctga

SEQ ID NO: 20760 - DNA, 20 bp, Artificial Sequence
  Description of Artificial Sequence: Synthetic oligonucleotide
  Target: SCNA; (-) strand; PAM type: NRG; PAM sequence: AGG
atatttaaagaaaaaattac

SEQ ID NO: 20761 - DNA, 20 bp, Artificial Sequence
  Description of Artificial Sequence: Synthetic oligonucleotide
  Target: SCNA; (-) strand; PAM type: NRG; PAM sequence: CAG
aatatttaaagaaaaaatta

SEQ ID NO: 20762 - DNA, 20 bp, Artificial Sequence
  Description of Artificial Sequence: Synthetic oligonucleotide
  Target: SCNA; (-) strand; PAM type: NRG; PAM sequence: AAG
cttagaaaaaacaatattta

SEQ ID NO: 20763 - DNA, 20 bp, Artificial Sequence
  Description of Artificial Sequence: Synthetic oligonucleotide
  Target: SCNA; (-) strand; PAM type: NRG; PAM sequence: TAG
tccccatttccaacacaact

SEQ ID NO: 20764 - DNA, 20 bp, Artificial Sequence
  Description of Artificial Sequence: Synthetic oligonucleotide
  Target: SCNA; (-) strand; PAM type: NRG; PAM sequence: TGG
tgttttctatttttaagcaa

SEQ ID NO: 20765 - DNA, 20 bp, Artificial Sequence
  Description of Artificial Sequence: Synthetic oligonucleotide
  Target: SCNA; (-) strand; PAM type: NRG; PAM sequence: AAG
ttcatctgttttctattttt

SEQ ID NO: 20766 - DNA, 20 bp, Artificial Sequence
  Description of Artificial Sequence: Synthetic oligonucleotide
  Target: SCNA; (-) strand; PAM type: NRG; PAM sequence: TAG
ttgctttttcttaagagttt

SEQ ID NO: 20767 - DNA, 20 bp, Artificial Sequence
  Description of Artificial Sequence: Synthetic oligonucleotide
  Target: SCNA; (-) strand; PAM type: NRG; PAM sequence: GAG
taaatattgctttttcttaa

SEQ ID NO: 20768 - DNA, 20 bp, Artificial Sequence
  Description of Artificial Sequence: Synthetic oligonucleotide
  Target: SCNA; (-) strand; PAM type: NRG; PAM sequence: AAG
aataaatattgctttttctt

SEQ ID NO: 20769 - DNA, 20 bp, Artificial Sequence
  Description of Artificial Sequence: Synthetic oligonucleotide
  Target: SCNA; (-) strand; PAM type: NRG; PAM sequence: TAG
tctcatggtaggttgggcac

SEQ ID NO: 20770 - DNA, 20 bp, Artificial Sequence
  Description of Artificial Sequence: Synthetic oligonucleotide
  Target: SCNA; (-) strand; PAM type: NRG; PAM sequence: GGG
caactttctcatggtaggtt

SEQ ID NO: 20771 - DNA, 20 bp, Artificial Sequence
  Description of Artificial Sequence: Synthetic oligonucleotide
  Target: SCNA; (-) strand; PAM type: NRG; PAM sequence: TGG
acaactttctcatggtaggt

SEQ ID NO: 20772 - DNA, 20 bp, Artificial Sequence
  Description of Artificial Sequence: Synthetic oligonucleotide
  Target: SCNA; (-) strand; PAM type: NRG; PAM sequence: AGG
tcgcacaactttctcatggt

SEQ ID NO: 20773 - DNA, 20 bp, Artificial Sequence
  Description of Artificial Sequence: Synthetic oligonucleotide
  Target: SCNA; (-) strand; PAM type: NRG; PAM sequence: TAG
gtcgcacaactttctcatgg

SEQ ID NO: 20774 - DNA, 20 bp, Artificial Sequence
  Description of Artificial Sequence: Synthetic oligonucleotide
  Target: SCNA; (-) strand; PAM type: NRG; PAM sequence: TGG
aaagtcgcacaactttctca

SEQ ID NO: 20775 - DNA, 20 bp, Artificial Sequence
  Description of Artificial Sequence: Synthetic oligonucleotide
  Target: SCNA; (-) strand; PAM type: NRG; PAM sequence: AAG
ggaattaaataacttgccca

SEQ ID NO: 20776 - DNA, 20 bp, Artificial Sequence
  Description of Artificial Sequence: Synthetic oligonucleotide
  Target: SCNA; (-) strand; PAM type: NRG; PAM sequence: AGG
agactcatcttcagacccag

SEQ ID NO: 20777 - DNA, 20 bp, Artificial Sequence
  Description of Artificial Sequence: Synthetic oligonucleotide
  Target: SCNA; (-) strand; PAM type: NRG; PAM sequence: GAG
cagactcatcttcagaccca

SEQ ID NO: 20778 - DNA, 20 bp, Artificial Sequence
  Description of Artificial Sequence: Synthetic oligonucleotide
  Target: SCNA; (-) strand; PAM type: NRG; PAM sequence: CAG
tgcagactcatcttcagacc

SEQ ID NO: 20779 - DNA, 20 bp, Artificial Sequence
  Description of Artificial Sequence: Synthetic oligonucleotide
  Target: SCNA; (-) strand; PAM type: NRG; PAM sequence: CAG
cttgtgtgcagactcatctt

SEQ ID NO: 20780 - DNA, 20 bp, Artificial Sequence
  Description of Artificial Sequence: Synthetic oligonucleotide
  Target: SCNA; (-) strand; PAM type: NRG; PAM sequence: CAG
tcattataggctcttgtgtg

SEQ ID NO: 20781 - DNA, 20 bp, Artificial Sequence
  Description of Artificial Sequence: Synthetic oligonucleotide
  Target: SCNA; (-) strand; PAM type: NRG; PAM sequence: AGG
gtgttggaagggatcattat

SEQ ID NO: 20782 - DNA, 20 bp, Artificial Sequence
  Description of Artificial Sequence: Synthetic oligonucleotide
  Target: SCNA; (-) strand; PAM type: NRG; PAM sequence: TAG
ggtgttggaagggatcatta

SEQ ID NO: 20783 - DNA, 20 bp, Artificial Sequence
  Description of Artificial Sequence: Synthetic oligonucleotide
  Target: SCNA; (-) strand; PAM type: NRG; PAM sequence: GGG
cgccagtcccggtgttggaa

SEQ ID NO: 20784 - DNA, 20 bp, Artificial Sequence
  Description of Artificial Sequence: Synthetic oligonucleotide
  Target: SCNA; (-) strand; PAM type: NRG; PAM sequence: AGG
ccgccagtcccggtgttgga

SEQ ID NO: 20785 - DNA, 20 bp, Artificial Sequence
  Description of Artificial Sequence: Synthetic oligonucleotide
  Target: SCNA; (-) strand; PAM type: NRG; PAM sequence: AAG
cccgccagtcccggtgttgg

SEQ ID NO: 20786 - DNA, 20 bp, Artificial Sequence
  Description of Artificial Sequence: Synthetic oligonucleotide
  Target: SCNA; (-) strand; PAM type: NRG; PAM sequence: TGG
agacccgccagtcccggtgt

SEQ ID NO: 20787 - DNA, 20 bp, Artificial Sequence
  Description of Artificial Sequence: Synthetic oligonucleotide
  Target: SCNA; (-) strand; PAM type: NRG; PAM sequence: CGG
ggctgcagacccgccagtcc

SEQ ID NO: 20788 - DNA, 20 bp, Artificial Sequence
  Description of Artificial Sequence: Synthetic oligonucleotide
  Target: SCNA; (-) strand; PAM type: NRG; PAM sequence: CAG
aactgtggctgcagacccgc

SEQ ID NO: 20789 - DNA, 20 bp, Artificial Sequence
  Description of Artificial Sequence: Synthetic oligonucleotide
  Target: SCNA; (-) strand; PAM type: NRG; PAM sequence: CAG
tccagatgtaactgtggctg

SEQ ID NO: 20790 - DNA, 20 bp, Artificial Sequence
  Description of Artificial Sequence: Synthetic oligonucleotide
  Target: SCNA; (-) strand; PAM type: NRG; PAM sequence: TGG
ggagtttccagatgtaactg

SEQ ID NO: 20791 - DNA, 20 bp, Artificial Sequence
  Description of Artificial Sequence: Synthetic oligonucleotide
  Target: SCNA; (-) strand; PAM type: NRG; PAM sequence: CAG
aaaagcaccagtggagtttc

SEQ ID NO: 20792 - DNA, 20 bp, Artificial Sequence
  Description of Artificial Sequence: Synthetic oligonucleotide
  Target: SCNA; (-) strand; PAM type: NRG; PAM sequence: GAG
aagctccaaaagcaccagtg

SEQ ID NO: 20793 - DNA, 20 bp, Artificial Sequence
  Description of Artificial Sequence: Synthetic oligonucleotide
  Target: SCNA; (-) strand; PAM type: NRG; PAM sequence: TGG
ggaagctccaaaagcaccag

SEQ ID NO: 20794 - DNA, 20 bp, Artificial Sequence
  Description of Artificial Sequence: Synthetic oligonucleotide
  Target: SCNA; (-) strand; PAM type: NRG; PAM sequence: CAG
ttgggaagctccaaaagcac

SEQ ID NO: 20795 - DNA, 20 bp, Artificial Sequence
  Description of Artificial Sequence: Synthetic oligonucleotide
  Target: SCNA; (-) strand; PAM type: NRG; PAM sequence: AAG
atactcttgggaagctccaa

SEQ ID NO: 20796 - DNA, 20 bp, Artificial Sequence
  Description of Artificial Sequence: Synthetic oligonucleotide
  Target: SCNA; (-) strand; PAM type: NRG; PAM sequence: AAG
gaattcctgatactcttggg

SEQ ID NO: 20797 - DNA, 20 bp, Artificial Sequence
  Description of Artificial Sequence: Synthetic oligonucleotide
  Target: SCNA; (-) strand; PAM type: NRG; PAM sequence: GGG
attgaattcctgatactctt

SEQ ID NO: 20798 - DNA, 20 bp, Artificial Sequence
  Description of Artificial Sequence: Synthetic oligonucleotide
  Target: SCNA; (-) strand; PAM type: NRG; PAM sequence: TGG
tattgaattcctgatactct

SEQ ID NO: 20799 - DNA, 20 bp, Artificial Sequence
  Description of Artificial Sequence: Synthetic oligonucleotide
  Target: SCNA; (-) strand; PAM type: NRG; PAM sequence: GAG
acatggcagtgttgtactta

SEQ ID NO: 20800 - DNA, 20 bp, Artificial Sequence
  Description of Artificial Sequence: Synthetic oligonucleotide
  Target: SCNA; (-) strand; PAM type: NRG; PAM sequence: TAG
acacatggcagtgttgtact

SEQ ID NO: 20801 - DNA, 20 bp, Artificial Sequence
  Description of Artificial Sequence: Synthetic oligonucleotide
  Target: SCNA; (-) strand; PAM type: NRG; PAM sequence: CAG
atatctcttcacacacatgg

SEQ ID NO: 20802 - DNA, 20 bp, Artificial Sequence
  Description of Artificial Sequence: Synthetic oligonucleotide
  Target: SCNA; (-) strand; PAM type: NRG; PAM sequence: TGG
aagatatctcttcacacaca

SEQ ID NO: 20803 - DNA, 20 bp, Artificial Sequence
  Description of Artificial Sequence: Synthetic oligonucleotide
  Target: SCNA; (-) strand; PAM type: NRG; PAM sequence: AAG
acttaagaaaaattttaata

SEQ ID NO: 20804 - DNA, 20 bp, Artificial Sequence
  Description of Artificial Sequence: Synthetic oligonucleotide
  Target: SCNA; (-) strand; PAM type: NRG; PAM sequence: AAG
actttaggaaggaacaactt

SEQ ID NO: 20805 - DNA, 20 bp, Artificial Sequence
  Description of Artificial Sequence: Synthetic oligonucleotide
  Target: SCNA; (-) strand; PAM type: NRG; PAM sequence: AGG
cagctttcactactttagga

SEQ ID NO: 20806 - DNA, 20 bp, Artificial Sequence
  Description of Artificial Sequence: Synthetic oligonucleotide
  Target: SCNA; (-) strand; PAM type: NRG; PAM sequence: AAG
tcagctttcactactttagg

SEQ ID NO: 20807 - DNA, 20 bp, Artificial Sequence
  Description of Artificial Sequence: Synthetic oligonucleotide
  Target: SCNA; (-) strand; PAM type: NRG; PAM sequence: AGG
tgctcagctttcactacttt

SEQ ID NO: 20808 - DNA, 20 bp, Artificial Sequence
  Description of Artificial Sequence: Synthetic oligonucleotide
  Target: SCNA; (-) strand; PAM type: NRG; PAM sequence: TAG
ctgctcagctttcactactt

SEQ ID NO: 20809 - DNA, 20 bp, Artificial Sequence
  Description of Artificial Sequence: Synthetic oligonucleotide
  Target: SCNA; (-) strand; PAM type: NRG; PAM sequence: CAG
atgaatttctaagatctgct

SEQ ID NO: 20810 - DNA, 20 bp, Artificial Sequence
  Description of Artificial Sequence: Synthetic oligonucleotide
  Target: SCNA; (-) strand; PAM type: NRG; PAM sequence: AAG
tgaattctaaatgaatttct

SEQ ID NO: 20811 - DNA, 20 bp, Artificial Sequence
  Description of Artificial Sequence: Synthetic oligonucleotide
  Target: SCNA; (-) strand; PAM type: NRG; PAM sequence: GAG
tgttatagtcaagtgtaatt

SEQ ID NO: 20812 - DNA, 20 bp, Artificial Sequence
  Description of Artificial Sequence: Synthetic oligonucleotide
  Target: SCNA; (-) strand; PAM type: NRG; PAM sequence: AAG
gattcttaagtgttatagtc

SEQ ID NO: 20813 - DNA, 20 bp, Artificial Sequence
  Description of Artificial Sequence: Synthetic oligonucleotide
  Target: SCNA; (-) strand; PAM type: NRG; PAM sequence: TAG
aactagattcttaagtgtta

SEQ ID NO: 20814 - DNA, 20 bp, Artificial Sequence
  Description of Artificial Sequence: Synthetic oligonucleotide
  Target: SCNA; (-) strand; PAM type: NRG; PAM sequence: AAG
aggaaaataactagattctt

SEQ ID NO: 20815 - DNA, 20 bp, Artificial Sequence
  Description of Artificial Sequence: Synthetic oligonucleotide
  Target: SCNA; (-) strand; PAM type: NRG; PAM sequence: TAG
tactacaaaaggaaaataac

SEQ ID NO: 20816 - DNA, 20 bp, Artificial Sequence
  Description of Artificial Sequence: Synthetic oligonucleotide
  Target: SCNA; (-) strand; PAM type: NRG; PAM sequence: AGG
aaatatatttttactacaaa

SEQ ID NO: 20817 - DNA, 20 bp, Artificial Sequence
  Description of Artificial Sequence: Synthetic oligonucleotide
  Target: SCNA; (-) strand; PAM type: NRG; PAM sequence: AAG
aaaatatatttttactacaa

SEQ ID NO: 20818 - DNA, 20 bp, Artificial Sequence
  Description of Artificial Sequence: Synthetic oligonucleotide
  Target: SCNA; (-) strand; PAM type: NRG; PAM sequence: AAG
tcatgtagattaaaatgact

SEQ ID NO: 20819 - DNA, 20 bp, Artificial Sequence
  Description of Artificial Sequence: Synthetic oligonucleotide
  Target: SCNA; (-) strand; PAM type: NRG; PAM sequence: TAG
ttaaggttaaatttttcatg

SEQ ID NO: 20820 - DNA, 20 bp, Artificial Sequence
  Description of Artificial Sequence: Synthetic oligonucleotide
  Target: SCNA; (-) strand; PAM type: NRG; PAM sequence: AGG
tttaaaatagagttacttta

SEQ ID NO: 20821 - DNA, 20 bp, Artificial Sequence
  Description of Artificial Sequence: Synthetic oligonucleotide
  Target: SCNA; (-) strand; PAM type: NRG; PAM sequence: AAG
ttttaaaatagagttacttt

SEQ ID NO: 20822 - DNA, 20 bp, Artificial Sequence
  Description of Artificial Sequence: Synthetic oligonucleotide
  Target: SCNA; (-) strand; PAM type: NRG; PAM sequence: GAG
catttcatatttttaaaata

SEQ ID NO: 20823 - DNA, 20 bp, Artificial Sequence
  Description of Artificial Sequence: Synthetic oligonucleotide
  Target: SCNA; (-) strand; PAM type: NRG; PAM sequence: TAG
ctcatttcatatttttaaaa

SEQ ID NO: 20824 - DNA, 20 bp, Artificial Sequence
  Description of Artificial Sequence: Synthetic oligonucleotide
  Target: SCNA; (-) strand; PAM type: NRG; PAM sequence: TAG
gcttcataagtaccgattga

SEQ ID NO: 20825 - DNA, 20 bp, Artificial Sequence
  Description of Artificial Sequence: Synthetic oligonucleotide
  Target: SCNA; (-) strand; PAM type: NRG; PAM sequence: AAG
aagaataaacattgcttcat

SEQ ID NO: 20826 - DNA, 20 bp, Artificial Sequence
  Description of Artificial Sequence: Synthetic oligonucleotide
  Target: SCNA; (-) strand; PAM type: NRG; PAM sequence: AAG
ctcttcccacactatattag

SEQ ID NO: 20827 - DNA, 20 bp, Artificial Sequence
  Description of Artificial Sequence: Synthetic oligonucleotide
  Target: SCNA; (-) strand; PAM type: NRG; PAM sequence: TAG
tttctcttcccacactatat

SEQ ID NO: 20828 - DNA, 20 bp, Artificial Sequence
  Description of Artificial Sequence: Synthetic oligonucleotide
  Target: SCNA; (-) strand; PAM type: NRG; PAM sequence: AAG
aacaatcccttttgtgttgc

SEQ ID NO: 20829 - DNA, 20 bp, Artificial Sequence
  Description of Artificial Sequence: Synthetic oligonucleotide
  Target: SCNA; (-) strand; PAM type: NRG; PAM sequence: GAG
ctcacaaacctatgatttgt

SEQ ID NO: 20830 - DNA, 20 bp, Artificial Sequence
  Description of Artificial Sequence: Synthetic oligonucleotide
  Target: SCNA; (-) strand; PAM type: NRG; PAM sequence: GAG
cttggttctttaaaaacaat

SEQ ID NO: 20831 - DNA, 20 bp, Artificial Sequence
  Description of Artificial Sequence: Synthetic oligonucleotide
  Target: SCNA; (-) strand; PAM type: NRG; PAM sequence: TGG
cttgctcatgaagaacagct

SEQ ID NO: 20832 - DNA, 20 bp, Artificial Sequence
  Description of Artificial Sequence: Synthetic oligonucleotide
  Target: SCNA; (-) strand; PAM type: NRG; PAM sequence: CAG
gtgttcttgctcatgaagaa

SEQ ID NO: 20833 - DNA, 20 bp, Artificial Sequence
  Description of Artificial Sequence: Synthetic oligonucleotide
  Target: SCNA; (-) strand; PAM type: NRG; PAM sequence: AAG
attcagtgttcttgctcatg

SEQ ID NO: 20834 - DNA, 20 bp, Artificial Sequence
  Description of Artificial Sequence: Synthetic oligonucleotide
  Target: SCNA; (-) strand; PAM type: NRG; PAM sequence: CAG
aaaaagaaaaccagggaatt

SEQ ID NO: 20835 - DNA, 20 bp, Artificial Sequence
  Description of Artificial Sequence: Synthetic oligonucleotide
  Target: SCNA; (-) strand; PAM type: NRG; PAM sequence: GGG
tgactagaaaaagaaaacca

SEQ ID NO: 20836 - DNA, 20 bp, Artificial Sequence
  Description of Artificial Sequence: Synthetic oligonucleotide
  Target: SCNA; (-) strand; PAM type: NRG; PAM sequence: AGG
gtgactagaaaaagaaaacc

SEQ ID NO: 20837 - DNA, 20 bp, Artificial Sequence
  Description of Artificial Sequence: Synthetic oligonucleotide
  Target: SCNA; (-) strand; PAM type: NRG; PAM sequence: CAG
agtgactagaaaaagaaaac

SEQ ID NO: 20838 - DNA, 20 bp, Artificial Sequence
  Description of Artificial Sequence: Synthetic oligonucleotide
  Target: SCNA; (-) strand; PAM type: NRG; PAM sequence: AAG
aggggtatagtgactagaaa

SEQ ID NO: 20839 - DNA, 20 bp, Artificial Sequence
  Description of Artificial Sequence: Synthetic oligonucleotide
  Target: SCNA; (-) strand; PAM type: NRG; PAM sequence: TAG
gatgccaggggtatagtgac

SEQ ID NO: 20840 - DNA, 20 bp, Artificial Sequence
  Description of Artificial Sequence: Synthetic oligonucleotide
  Target: SCNA; (-) strand; PAM type: NRG; PAM sequence: TAG
gtgttatgatgccaggggta

SEQ ID NO: 20841 - DNA, 20 bp, Artificial Sequence
  Description of Artificial Sequence: Synthetic oligonucleotide
  Target: SCNA; (-) strand; PAM type: NRG; PAM sequence: GGG
cagtagtgttatgatgccag

SEQ ID NO: 20842 - DNA, 20 bp, Artificial Sequence
  Description of Artificial Sequence: Synthetic oligonucleotide
  Target: SCNA; (-) strand; PAM type: NRG; PAM sequence: GGG
acagtagtgttatgatgcca

SEQ ID NO: 20843 - DNA, 20 bp, Artificial Sequence
  Description of Artificial Sequence: Synthetic oligonucleotide
  Target: SCNA; (-) strand; PAM type: NRG; PAM sequence: AGG
gacagtagtgttatgatgcc

SEQ ID NO: 20844 - DNA, 20 bp, Artificial Sequence
  Description of Artificial Sequence: Synthetic oligonucleotide
  Target: SCNA; (-) strand; PAM type: NRG; PAM sequence: CAG
tgacagtagtgttatgatgc

SEQ ID NO: 20845 - DNA, 20 bp, Artificial Sequence
  Description of Artificial Sequence: Synthetic oligonucleotide
  Target: SCNA; (-) strand; PAM type: NRG; PAM sequence: TAG
tggatgcagttgattgacag

SEQ ID NO: 20846 - DNA, 20 bp, Artificial Sequence
  Description of Artificial Sequence: Synthetic oligonucleotide
  Target: SCNA; (-) strand; PAM type: NRG; PAM sequence: CAG
ttctggatgcagttgattga

SEQ ID NO: 20847 - DNA, 20 bp, Artificial Sequence
  Description of Artificial Sequence: Synthetic oligonucleotide
  Target: SCNA; (-) strand; PAM type: NRG; PAM sequence: CAG
tttattctaccttctggatg

SEQ ID NO: 20848 - DNA, 20 bp, Artificial Sequence
  Description of Artificial Sequence: Synthetic oligonucleotide
  Target: SCNA; (-) strand; PAM type: NRG; PAM sequence: TGG
tggcattttattctaccttc

SEQ ID NO: 20849 - DNA, 20 bp, Artificial Sequence
  Description of Artificial Sequence: Synthetic oligonucleotide
  Target: SCNA; (-) strand; PAM type: NRG; PAM sequence: TGG
attctgccgaaagtatcact

SEQ ID NO: 20850 - DNA, 20 bp, Artificial Sequence
  Description of Artificial Sequence: Synthetic oligonucleotide
  Target: SCNA; (-) strand; PAM type: NRG; PAM sequence: AAG
aatctctggaattctgccga

SEQ ID NO: 20851 - DNA, 20 bp, Artificial Sequence
  Description of Artificial Sequence: Synthetic oligonucleotide
  Target: SCNA; (-) strand; PAM type: NRG; PAM sequence: TGG
aaaaaccatctgagaatctc

SEQ ID NO: 20852 - DNA, 20 bp, Artificial Sequence
  Description of Artificial Sequence: Synthetic oligonucleotide
  Target: SCNA; (-) strand; PAM type: NRG; PAM sequence: GAG
gggaaaagaaaaaaccatct

SEQ ID NO: 20853 - DNA, 20 bp, Artificial Sequence
  Description of Artificial Sequence: Synthetic oligonucleotide
  Target: SCNA; (-) strand; PAM type: NRG; PAM sequence: AAG
gtacagtttttaagagggaa

SEQ ID NO: 20854 - DNA, 20 bp, Artificial Sequence
  Description of Artificial Sequence: Synthetic oligonucleotide
  Target: SCNA; (-) strand; PAM type: NRG; PAM sequence: GGG
atatggtacagtttttaaga

SEQ ID NO: 20855 - DNA, 20 bp, Artificial Sequence
  Description of Artificial Sequence: Synthetic oligonucleotide
  Target: SCNA; (-) strand; PAM type: NRG; PAM sequence: AGG
catatggtacagtttttaag

SEQ ID NO: 20856 - DNA, 20 bp, Artificial Sequence
  Description of Artificial Sequence: Synthetic oligonucleotide
  Target: SCNA; (-) strand; PAM type: NRG; PAM sequence: GAG
tcatatggtacagtttttaa

SEQ ID NO: 20857 - DNA, 20 bp, Artificial Sequence
  Description of Artificial Sequence: Synthetic oligonucleotide
  Target: SCNA; (-) strand; PAM type: NRG; PAM sequence: AAG
actcatatggtacagttttt

SEQ ID NO: 20858 - DNA, 20 bp, Artificial Sequence
  Description of Artificial Sequence: Synthetic oligonucleotide
  Target: SCNA; (-) strand; PAM type: NRG; PAM sequence: CAG
taaacctaactcatatggta

SEQ ID NO: 20859 - DNA, 20 bp, Artificial Sequence
  Description of Artificial Sequence: Synthetic oligonucleotide
  Target: SCNA; (-) strand; PAM type: NRG; PAM sequence: TGG
caaaataaacctaactcata

SEQ ID NO: 20860 - DNA, 20 bp, Artificial Sequence
  Description of Artificial Sequence: Synthetic oligonucleotide
  Target: SCNA; (-) strand; PAM type: NRG; PAM sequence: TGG
aatatctgacttctttttca

SEQ ID NO: 20861 - DNA, 20 bp, Artificial Sequence
  Description of Artificial Sequence: Synthetic oligonucleotide
  Target: SCNA; (-) strand; PAM type: NRG; PAM sequence: AAG
atctaagaggggccaatttt

SEQ ID NO: 20862 - DNA, 20 bp, Artificial Sequence
  Description of Artificial Sequence: Synthetic oligonucleotide
  Target: SCNA; (-) strand; PAM type: NRG; PAM sequence: GGG
tccccagaaatatctaagag

SEQ ID NO: 20863 - DNA, 20 bp, Artificial Sequence
  Description of Artificial Sequence: Synthetic oligonucleotide
  Target: SCNA; (-) strand; PAM type: NRG; PAM sequence: GGG
ttccccagaaatatctaaga

SEQ ID NO: 20864 - DNA, 20 bp, Artificial Sequence
  Description of Artificial Sequence: Synthetic oligonucleotide
  Target: SCNA; (-) strand; PAM type: NRG; PAM sequence: AGG
cttccccagaaatatctaag

SEQ ID NO: 20865 - DNA, 20 bp, Artificial Sequence
  Description of Artificial Sequence: Synthetic oligonucleotide
  Target: SCNA; (-) strand; PAM type: NRG; PAM sequence: GAG
gcttccccagaaatatctaa

SEQ ID NO: 20866 - DNA, 20 bp, Artificial Sequence
  Description of Artificial Sequence: Synthetic oligonucleotide
  Target: SCNA; (-) strand; PAM type: NRG; PAM sequence: AAG
aagcttccccagaaatatct

SEQ ID NO: 20867 - DNA, 20 bp, Artificial Sequence
  Description of Artificial Sequence: Synthetic oligonucleotide
  Target: SCNA; (-) strand; PAM type: NRG; PAM sequence: CAG
ggaattatatgaagcttccc

SEQ ID NO: 20868 - DNA, 20 bp, Artificial Sequence
  Description of Artificial Sequence: Synthetic oligonucleotide
  Target: SCNA; (-) strand; PAM type: NRG; PAM sequence: AAG
tgaacaaatggaattatatg

SEQ ID NO: 20869 - DNA, 20 bp, Artificial Sequence
  Description of Artificial Sequence: Synthetic oligonucleotide
  Target: SCNA; (-) strand; PAM type: NRG; PAM sequence: TGG
aaaggaataacatgaacaaa

SEQ ID NO: 20870 - DNA, 20 bp, Artificial Sequence
  Description of Artificial Sequence: Synthetic oligonucleotide
  Target: SCNA; (-) strand; PAM type: NRG; PAM sequence: AGG
aggactgatttatgatgaaa

SEQ ID NO: 20871 - DNA, 20 bp, Artificial Sequence
  Description of Artificial Sequence: Synthetic oligonucleotide
  Target: SCNA; (-) strand; PAM type: NRG; PAM sequence: AAG
gaggactgatttatgatgaa

SEQ ID NO: 20872 - DNA, 20 bp, Artificial Sequence
  Description of Artificial Sequence: Synthetic oligonucleotide
  Target: SCNA; (-) strand; PAM type: NRG; PAM sequence: AGG
aaatttgaagctctttatag

SEQ ID NO: 20873 - DNA, 20 bp, Artificial Sequence
  Description of Artificial Sequence: Synthetic oligonucleotide
  Target: SCNA; (-) strand; PAM type: NRG; PAM sequence: GAG
aaaatttgaagctctttata

SEQ ID NO: 20874 - DNA, 20 bp, Artificial Sequence
  Description of Artificial Sequence: Synthetic oligonucleotide
  Target: SCNA; (-) strand; PAM type: NRG; PAM sequence: TAG
tgaaaatttgaagctcttta

SEQ ID NO: 20875 - DNA, 20 bp, Artificial Sequence
  Description of Artificial Sequence: Synthetic oligonucleotide
  Target: SCNA; (-) strand; PAM type: NRG; PAM sequence: AAG
catcaggcagtgaaaatttg

SEQ ID NO: 20876 - DNA, 20 bp, Artificial Sequence
  Description of Artificial Sequence: Synthetic oligonucleotide
  Target: SCNA; (-) strand; PAM type: NRG; PAM sequence: CAG
atttttacagtagcatcagg

SEQ ID NO: 20877 - DNA, 20 bp, Artificial Sequence
  Description of Artificial Sequence: Synthetic oligonucleotide
  Target: SCNA; (-) strand; PAM type: NRG; PAM sequence: AGG
tatatttttacagtagcatc

SEQ ID NO: 20878 - DNA, 20 bp, Artificial Sequence
  Description of Artificial Sequence: Synthetic oligonucleotide
  Target: SCNA; (-) strand; PAM type: NRG; PAM sequence: CAG
gtatatttttacagtagcat

SEQ ID NO: 20879 - DNA, 20 bp, Artificial Sequence
  Description of Artificial Sequence: Synthetic oligonucleotide
  Target: SCNA; (-) strand; PAM type: NRG; PAM sequence: TAG
tattaggtatatttttacag

SEQ ID NO: 20880 - DNA, 20 bp, Artificial Sequence
  Description of Artificial Sequence: Synthetic oligonucleotide
  Target: SCNA; (-) strand; PAM type: NRG; PAM sequence: CAG
acatattaggtatattttta

SEQ ID NO: 20881 - DNA, 20 bp, Artificial Sequence
  Description of Artificial Sequence: Synthetic oligonucleotide
  Target: SCNA; (-) strand; PAM type: NRG; PAM sequence: AGG
gtctttcgatcaaacatatt

SEQ ID NO: 20882 - DNA, 20 bp, Artificial Sequence
  Description of Artificial Sequence: Synthetic oligonucleotide
  Target: SCNA; (-) strand; PAM type: NRG; PAM sequence: TAG
tgtctttcgatcaaacatat

SEQ ID NO: 20883 - DNA, 20 bp, Artificial Sequence
  Description of Artificial Sequence: Synthetic oligonucleotide
  Target: SCNA; (-) strand; PAM type: NRG; PAM sequence: AAG
tttcttaagattagtgaata

SEQ ID NO: 20884 - DNA, 20 bp, Artificial Sequence
  Description of Artificial Sequence: Synthetic oligonucleotide
  Target: SCNA; (-) strand; PAM type: NRG; PAM sequence: TAG
cctctagtatttcttaagat

SEQ ID NO: 20885 - DNA, 20 bp, Artificial Sequence
  Description of Artificial Sequence: Synthetic oligonucleotide
  Target: SCNA; (-) strand; PAM type: NRG; PAM sequence: AAG
gatttcctctagtatttctt

SEQ ID NO: 20886 - DNA, 20 bp, Artificial Sequence
  Description of Artificial Sequence: Synthetic oligonucleotide
  Target: SCNA; (-) strand; PAM type: NRG; PAM sequence: TAG
agattgtactggatttcctc

SEQ ID NO: 20887 - DNA, 20 bp, Artificial Sequence
  Description of Artificial Sequence: Synthetic oligonucleotide
  Target: SCNA; (-) strand; PAM type: NRG; PAM sequence: TGG
gttttaacttcagattgtac

SEQ ID NO: 20888 - DNA, 20 bp, Artificial Sequence
  Description of Artificial Sequence: Synthetic oligonucleotide
  Target: SCNA; (-) strand; PAM type: NRG; PAM sequence: CAG
ataatcattagttttaactt

SEQ ID NO: 20889 - DNA, 20 bp, Artificial Sequence
  Description of Artificial Sequence: Synthetic oligonucleotide
  Target: SCNA; (-) strand; PAM type: NRG; PAM sequence: TAG
aacattcatttaataatcat

SEQ ID NO: 20890 - DNA, 20 bp, Artificial Sequence
  Description of Artificial Sequence: Synthetic oligonucleotide
  Target: SCNA; (-) strand; PAM type: NRG; PAM sequence: TGG
attattaatttttaataaaa

SEQ ID NO: 20891 - DNA, 20 bp, Artificial Sequence
  Description of Artificial Sequence: Synthetic oligonucleotide
  Target: SCNA; (-) strand; PAM type: NRG; PAM sequence: TAG
ggaaatgtgaaagtactttg

SEQ ID NO: 20892 - DNA, 20 bp, Artificial Sequence
  Description of Artificial Sequence: Synthetic oligonucleotide
  Target: SCNA; (-) strand; PAM type: NRG; PAM sequence: AAG
agagtcaaatggaaatgtga

SEQ ID NO: 20893 - DNA, 20 bp, Artificial Sequence
  Description of Artificial Sequence: Synthetic oligonucleotide
  Target: SCNA; (-) strand; PAM type: NRG; PAM sequence: TGG
gagttattgtgagagtcaaa

SEQ ID NO: 20894 - DNA, 20 bp, Artificial Sequence
  Description of Artificial Sequence: Synthetic oligonucleotide
  Target: SCNA; (-) strand; PAM type: NRG; PAM sequence: GAG
taaaagcagagttattgtga

SEQ ID NO: 20895 - DNA, 20 bp, Artificial Sequence
  Description of Artificial Sequence: Synthetic oligonucleotide
  Target: SCNA; (-) strand; PAM type: NRG; PAM sequence: GAG
tgtaaaagcagagttattgt

SEQ ID NO: 20896 - DNA, 20 bp, Artificial Sequence
  Description of Artificial Sequence: Synthetic oligonucleotide
  Target: SCNA; (-) strand; PAM type: NRG; PAM sequence: GAG
tatgcttatgtgtaaaagca

SEQ ID NO: 20897 - DNA, 20 bp, Artificial Sequence
  Description of Artificial Sequence: Synthetic oligonucleotide
  Target: SCNA; (-) strand; PAM type: NRG; PAM sequence: CAG
tatatgcttatgtgtaaaag

SEQ ID NO: 20898 - DNA, 20 bp, Artificial Sequence
  Description of Artificial Sequence: Synthetic oligonucleotide
  Target: SCNA; (-) strand; PAM type: NRG; PAM sequence: AAG
gtatatatgcttatgtgtaa

SEQ ID NO: 20899 - DNA, 20 bp, Artificial Sequence
  Description of Artificial Sequence: Synthetic oligonucleotide
  Target: SCNA; (-) strand; PAM type: NRG; PAM sequence: AAG
gtacatgtatacaggtaagt

SEQ ID NO: 20900 - DNA, 20 bp, Artificial Sequence
  Description of Artificial Sequence: Synthetic oligonucleotide
  Target: SCNA; (-) strand; PAM type: NRG; PAM sequence: AAG
atgtgtacatgtatacaggt

SEQ ID NO: 20901 - DNA, 20 bp, Artificial Sequence
  Description of Artificial Sequence: Synthetic oligonucleotide
  Target: SCNA; (-) strand; PAM type: NRG; PAM sequence: AGG
taatatgtgtacatgtatac

SEQ ID NO: 20902 - DNA, 20 bp, Artificial Sequence
  Description of Artificial Sequence: Synthetic oligonucleotide
  Target: SCNA; (-) strand; PAM type: NRG; PAM sequence: CAG
ataatatgtgtacatgtata

SEQ ID NO: 20903 - DNA, 20 bp, Artificial Sequence
  Description of Artificial Sequence: Synthetic oligonucleotide
  Target: SCNA; (-) strand; PAM type: NRG; PAM sequence: GGG
gaatcttacatatagtaaga

SEQ ID NO: 20904 - DNA, 20 bp, Artificial Sequence
  Description of Artificial Sequence: Synthetic oligonucleotide
  Target: SCNA; (-) strand; PAM type: NRG; PAM sequence: AGG
tgaatcttacatatagtaag

SEQ ID NO: 20905 - DNA, 20 bp, Artificial Sequence
  Description of Artificial Sequence: Synthetic oligonucleotide
  Target: SCNA; (-) strand; PAM type: NRG; PAM sequence: GAG
ctgaatcttacatatagtaa

SEQ ID NO: 20906 - DNA, 20 bp, Artificial Sequence
  Description of Artificial Sequence: Synthetic oligonucleotide
  Target: SCNA; (-) strand; PAM type: NRG; PAM sequence: AAG
ctctgaatcttacatatagt

SEQ ID NO: 20907 - DNA, 20 bp, Artificial Sequence
  Description of Artificial Sequence: Synthetic oligonucleotide
  Target: SCNA; (-) strand; PAM type: NRG; PAM sequence: TAG
ccctctctgaatcttacata

SEQ ID NO: 20908 - DNA, 20 bp, Artificial Sequence
  Description of Artificial Sequence: Synthetic oligonucleotide
  Target: SCNA; (-) strand; PAM type: NRG; PAM sequence: TGG
cacataatttaagagtcctg

SEQ ID NO: 20909 - DNA, 20 bp, Artificial Sequence
  Description of Artificial Sequence: Synthetic oligonucleotide
  Target: SCNA; (-) strand; PAM type: NRG; PAM sequence: GAG
atcactagcacataatttaa

SEQ ID NO: 20910 - DNA, 20 bp, Artificial Sequence
  Description of Artificial Sequence: Synthetic oligonucleotide
  Target: SCNA; (-) strand; PAM type: NRG; PAM sequence: AAG
taatcactagcacataattt

SEQ ID NO: 20911 - DNA, 20 bp, Artificial Sequence
  Description of Artificial Sequence: Synthetic oligonucleotide
  Target: SCNA; (-) strand; PAM type: NRG; PAM sequence: TAG
aatgtaggaattataatcac

SEQ ID NO: 20912 - DNA, 20 bp, Artificial Sequence
  Description of Artificial Sequence: Synthetic oligonucleotide
  Target: SCNA; (-) strand; PAM type: NRG; PAM sequence: AGG
tgatcctatagaaataatgt

SEQ ID NO: 20913 - DNA, 20 bp, Artificial Sequence
  Description of Artificial Sequence: Synthetic oligonucleotide
  Target: SCNA; (-) strand; PAM type: NRG; PAM sequence: TAG
ctgatcctatagaaataatg

SEQ ID NO: 20914 - DNA, 20 bp, Artificial Sequence
  Description of Artificial Sequence: Synthetic oligonucleotide
  Target: SCNA; (-) strand; PAM type: NRG; PAM sequence: TAG
agtgaagccagctgatccta

SEQ ID NO: 20915 - DNA, 20 bp, Artificial Sequence
  Description of Artificial Sequence: Synthetic oligonucleotide
  Target: SCNA; (-) strand; PAM type: NRG; PAM sequence: CAG
tcttttgatatcagtgaagc

SEQ ID NO: 20916 - DNA, 20 bp, Artificial Sequence
  Description of Artificial Sequence: Synthetic oligonucleotide
  Target: SCNA; (-) strand; PAM type: NRG; PAM sequence: AAG
ataatcttttgatatcagtg

SEQ ID NO: 20917 - DNA, 20 bp, Artificial Sequence
  Description of Artificial Sequence: Synthetic oligonucleotide
  Target: SCNA; (-) strand; PAM type: NRG; PAM sequence: CAG
tatatataatcttttgatat

SEQ ID NO: 20918 - DNA, 20 bp, Artificial Sequence
  Description of Artificial Sequence: Synthetic oligonucleotide
  Target: SCNA; (-) strand; PAM type: NRG; PAM sequence: CAG
atataaagtcactaagttag

SEQ ID NO: 20919 - DNA, 20 bp, Artificial Sequence
  Description of Artificial Sequence: Synthetic oligonucleotide
  Target: SCNA; (-) strand; PAM type: NRG; PAM sequence: TAG
tgcatataaagtcactaagt

SEQ ID NO: 20920 - DNA, 20 bp, Artificial Sequence
  Description of Artificial Sequence: Synthetic oligonucleotide
  Target: SCNA; (-) strand; PAM type: NRG; PAM sequence: AAG
aaaatgcatataaagtcact

SEQ ID NO: 20921 - DNA, 20 bp, Artificial Sequence
  Description of Artificial Sequence: Synthetic oligonucleotide
  Target: SCNA; (-) strand; PAM type: NRG; PAM sequence: AAG
tttcctgaaaaatgcatata

SEQ ID NO: 20922 - DNA, 20 bp, Artificial Sequence
  Description of Artificial Sequence: Synthetic oligonucleotide
  Target: SCNA; (-) strand; PAM type: NRG; PAM sequence: AAG
attcaccttcttgtttttgc

SEQ ID NO: 20923 - DNA, 20 bp, Artificial Sequence
  Description of Artificial Sequence: Synthetic oligonucleotide
  Target: SCNA; (-) strand; PAM type: NRG; PAM sequence: AAG
agtgaactcttctcatttcg

SEQ ID NO: 20924 - DNA, 20 bp, Artificial Sequence
  Description of Artificial Sequence: Synthetic oligonucleotide
  Target: SCNA; (-) strand; PAM type: NRG; PAM sequence: TAG
caaaataaatgcattatgct

SEQ ID NO: 20925 - DNA, 20 bp, Artificial Sequence
  Description of Artificial Sequence: Synthetic oligonucleotide
  Target: SCNA; (-) strand; PAM type: NRG; PAM sequence: CGG
taaattttggagatgtatgt

SEQ ID NO: 20926 - DNA, 20 bp, Artificial Sequence
  Description of Artificial Sequence: Synthetic oligonucleotide
  Target: SCNA; (-) strand; PAM type: NRG; PAM sequence: GAG
gattggagaagtaaattttg

SEQ ID NO: 20927 - DNA, 20 bp, Artificial Sequence
  Description of Artificial Sequence: Synthetic oligonucleotide
  Target: SCNA; (-) strand; PAM type: NRG; PAM sequence: TGG
aagattggagaagtaaattt

SEQ ID NO: 20928 - DNA, 20 bp, Artificial Sequence
  Description of Artificial Sequence: Synthetic oligonucleotide
  Target: SCNA; (-) strand; PAM type: NRG; PAM sequence: AAG
ttcttttggaaagattggag

SEQ ID NO: 20929 - DNA, 20 bp, Artificial Sequence
  Description of Artificial Sequence: Synthetic oligonucleotide
  Target: SCNA; (-) strand; PAM type: NRG; PAM sequence: GAG
caattcttttggaaagattg

SEQ ID NO: 20930 - DNA, 20 bp, Artificial Sequence
  Description of Artificial Sequence: Synthetic oligonucleotide
  Target: SCNA; (-) strand; PAM type: NRG; PAM sequence: TGG
atcaattcttttggaaagat

SEQ ID NO: 20931 - DNA, 20 bp, Artificial Sequence
  Description of Artificial Sequence: Synthetic oligonucleotide
  Target: SCNA; (-) strand; PAM type: NRG; PAM sequence: AAG
ttttcatcaattcttttgga

SEQ ID NO: 20932 - DNA, 20 bp, Artificial Sequence
  Description of Artificial Sequence: Synthetic oligonucleotide
  Target: SCNA; (-) strand; PAM type: NRG; PAM sequence: TGG
tacattttcatcaattcttt

SEQ ID NO: 20933 - DNA, 20 bp, Artificial Sequence
  Description of Artificial Sequence: Synthetic oligonucleotide
  Target: SCNA; (-) strand; PAM type: NRG; PAM sequence: TGG
tcatccttacatctaaatct

SEQ ID NO: 20934 - DNA, 20 bp, Artificial Sequence
  Description of Artificial Sequence: Synthetic oligonucleotide
  Target: SCNA; (-) strand; PAM type: NRG; PAM sequence: AAG
tttcagtttacttgtgaata

SEQ ID NO: 20935 - DNA, 20 bp, Artificial Sequence
  Description of Artificial Sequence: Synthetic oligonucleotide
  Target: SCNA; (-) strand; PAM type: NRG; PAM sequence: CAG
tcatgtgatctctctggttt

SEQ ID NO: 20936 - DNA, 20 bp, Artificial Sequence
  Description of Artificial Sequence: Synthetic oligonucleotide
  Target: SCNA; (-) strand; PAM type: NRG; PAM sequence: TGG
accaaatcatgtgatctctc

SEQ ID NO: 20937 - DNA, 20 bp, Artificial Sequence
  Description of Artificial Sequence: Synthetic oligonucleotide
  Target: SCNA; (-) strand; PAM type: NRG; PAM sequence: CAG
gctaacatggatttggatcc

SEQ ID NO: 20938 - DNA, 20 bp, Artificial Sequence
  Description of Artificial Sequence: Synthetic oligonucleotide
  Target: SCNA; (-) strand; PAM type: NRG; PAM sequence: TGG
ggagatagctaacatggatt

SEQ ID NO: 20939 - DNA, 20 bp, Artificial Sequence
  Description of Artificial Sequence: Synthetic oligonucleotide
  Target: SCNA; (-) strand; PAM type: NRG; PAM sequence: TGG
atgtctggagatagctaaca

SEQ ID NO: 20940 - DNA, 20 bp, Artificial Sequence
  Description of Artificial Sequence: Synthetic oligonucleotide
  Target: SCNA; (-) strand; PAM type: NRG; PAM sequence: TAG
gagagatctatgtctggaga

SEQ ID NO: 20941 - DNA, 20 bp, Artificial Sequence
  Description of Artificial Sequence: Synthetic oligonucleotide
  Target: SCNA; (-) strand; PAM type: NRG; PAM sequence: GAG
tggagagagatctatgtctg

SEQ ID NO: 20942 - DNA, 20 bp, Artificial Sequence
  Description of Artificial Sequence: Synthetic oligonucleotide
  Target: SCNA; (-) strand; PAM type: NRG; PAM sequence: TGG
ggtggagagagatctatgtc

SEQ ID NO: 20943 - DNA, 20 bp, Artificial Sequence
  Description of Artificial Sequence: Synthetic oligonucleotide
  Target: SCNA; (-) strand; PAM type: NRG; PAM sequence: GAG
gaagtgtgttttggtggaga

SEQ ID NO: 20944 - DNA, 20 bp, Artificial Sequence
  Description of Artificial Sequence: Synthetic oligonucleotide
  Target: SCNA; (-) strand; PAM type: NRG; PAM sequence: GAG
ctgaagtgtgttttggtgga

SEQ ID NO: 20945 - DNA, 20 bp, Artificial Sequence
  Description of Artificial Sequence: Synthetic oligonucleotide
  Target: SCNA; (-) strand; PAM type: NRG; PAM sequence: GAG
gtctgaagtgtgttttggtg

SEQ ID NO: 20946 - DNA, 20 bp, Artificial Sequence
  Description of Artificial Sequence: Synthetic oligonucleotide
  Target: SCNA; (-) strand; PAM type: NRG; PAM sequence: TGG
tggtctgaagtgtgttttgg

SEQ ID NO: 20947 - DNA, 20 bp, Artificial Sequence
  Description of Artificial Sequence: Synthetic oligonucleotide
  Target: SCNA; (-) strand; PAM type: NRG; PAM sequence: TGG
gtgtggtctgaagtgtgttt

SEQ ID NO: 20948 - DNA, 20 bp, Artificial Sequence
  Description of Artificial Sequence: Synthetic oligonucleotide
  Target: SCNA; (-) strand; PAM type: NRG; PAM sequence: AAG
catagttggagtgtggtctg

SEQ ID NO: 20949 - DNA, 20 bp, Artificial Sequence
  Description of Artificial Sequence: Synthetic oligonucleotide
  Target: SCNA; (-) strand; PAM type: NRG; PAM sequence: TGG
ttggtcccatagttggagtg

SEQ ID NO: 20950 - DNA, 20 bp, Artificial Sequence
  Description of Artificial Sequence: Synthetic oligonucleotide
  Target: SCNA; (-) strand; PAM type: NRG; PAM sequence: GAG
aaccattggtcccatagttg

SEQ ID NO: 20951 - DNA, 20 bp, Artificial Sequence
  Description of Artificial Sequence: Synthetic oligonucleotide
  Target: SCNA; (-) strand; PAM type: NRG; PAM sequence: TGG
caaaccattggtcccatagt

SEQ ID NO: 20952 - DNA, 20 bp, Artificial Sequence
  Description of Artificial Sequence: Synthetic oligonucleotide
  Target: SCNA; (-) strand; PAM type: NRG; PAM sequence: TAG
ggggcaaaccattggtccca

SEQ ID NO: 20953 - DNA, 20 bp, Artificial Sequence
  Description of Artificial Sequence: Synthetic oligonucleotide
  Target: SCNA; (-) strand; PAM type: NRG; PAM sequence: TGG
taaacaatggggcaaaccat

SEQ ID NO: 20954 - DNA, 20 bp, Artificial Sequence
  Description of Artificial Sequence: Synthetic oligonucleotide
  Target: SCNA; (-) strand; PAM type: NRG; PAM sequence: GGG
accataggcaataaacaatg

SEQ ID NO: 20955 - DNA, 20 bp, Artificial Sequence
  Description of Artificial Sequence: Synthetic oligonucleotide
  Target: SCNA; (-) strand; PAM type: NRG; PAM sequence: GGG
taccataggcaataaacaat

SEQ ID NO: 20956 - DNA, 20 bp, Artificial Sequence
  Description of Artificial Sequence: Synthetic oligonucleotide
  Target: SCNA; (-) strand; PAM type: NRG; PAM sequence: TGG
ttaccataggcaataaacaa

SEQ ID NO: 20957 - DNA, 20 bp, Artificial Sequence
  Description of Artificial Sequence: Synthetic oligonucleotide
  Target: SCNA; (-) strand; PAM type: NRG; PAM sequence: AGG
atacataaacccattaccat

SEQ ID NO: 20958 - DNA, 20 bp, Artificial Sequence
  Description of Artificial Sequence: Synthetic oligonucleotide
  Target: SCNA; (-) strand; PAM type: NRG; PAM sequence: TAG
tatacataaacccattacca

SEQ ID NO: 20959 - DNA, 20 bp, Artificial Sequence
  Description of Artificial Sequence: Synthetic oligonucleotide
  Target: SCNA; (-) strand; PAM type: NRG; PAM sequence: TAG
atttaaaaggataatgattt

SEQ ID NO: 20960 - DNA, 20 bp, Artificial Sequence
  Description of Artificial Sequence: Synthetic oligonucleotide
  Target: SCNA; (-) strand; PAM type: NRG; PAM sequence: AGG
catctttctttcaatttaaa

SEQ ID NO: 20961 - DNA, 20 bp, Artificial Sequence
  Description of Artificial Sequence: Synthetic oligonucleotide
  Target: SCNA; (-) strand; PAM type: NRG; PAM sequence: AAG
ccatctttctttcaatttaa

SEQ ID NO: 20962 - DNA, 20 bp, Artificial Sequence
  Description of Artificial Sequence: Synthetic oligonucleotide
  Target: SCNA; (-) strand; PAM type: NRG; PAM sequence: TGG
caaaatagcaatctactgct

SEQ ID NO: 20963 - DNA, 20 bp, Artificial Sequence
  Description of Artificial Sequence: Synthetic oligonucleotide
  Target: SCNA; (-) strand; PAM type: NRG; PAM sequence: TAG
atttggtatgtgtggcaaaa

SEQ ID NO: 20964 - DNA, 20 bp, Artificial Sequence
  Description of Artificial Sequence: Synthetic oligonucleotide
  Target: SCNA; (-) strand; PAM type: NRG; PAM sequence: TGG
tatctaatatttggtatgtg

SEQ ID NO: 20965 - DNA, 20 bp, Artificial Sequence
  Description of Artificial Sequence: Synthetic oligonucleotide
  Target: SCNA; (-) strand; PAM type: NRG; PAM sequence: TGG
gaagttcattatctaatatt

SEQ ID NO: 20966 - DNA, 20 bp, Artificial Sequence
  Description of Artificial Sequence: Synthetic oligonucleotide
  Target: SCNA; (-) strand; PAM type: NRG; PAM sequence: AAG
tagagaagatatttaatatg

SEQ ID NO: 20967 - DNA, 20 bp, Artificial Sequence
  Description of Artificial Sequence: Synthetic oligonucleotide
  Target: SCNA; (-) strand; PAM type: NRG; PAM sequence: AAG
atgaagataaagacctagag

SEQ ID NO: 20968 - DNA, 20 bp, Artificial Sequence
  Description of Artificial Sequence: Synthetic oligonucleotide
  Target: SCNA; (-) strand; PAM type: NRG; PAM sequence: GAG
atgatgaagataaagaccta

SEQ ID NO: 20969 - DNA, 20 bp, Artificial Sequence
  Description of Artificial Sequence: Synthetic oligonucleotide
  Target: SCNA; (-) strand; PAM type: NRG; PAM sequence: TAG
ctatgatgaagataaagacc

SEQ ID NO: 20970 - DNA, 20 bp, Artificial Sequence
  Description of Artificial Sequence: Synthetic oligonucleotide
  Target: SCNA; (-) strand; PAM type: NRG; PAM sequence: AAG
tgtgagctatgatgaagata

SEQ ID NO: 20971 - DNA, 20 bp, Artificial Sequence
  Description of Artificial Sequence: Synthetic oligonucleotide
  Target: SCNA; (-) strand; PAM type: NRG; PAM sequence: AAG
caacattgtgagctatgatg

SEQ ID NO: 20972 - DNA, 20 bp, Artificial Sequence
  Description of Artificial Sequence: Synthetic oligonucleotide
  Target: SCNA; (-) strand; PAM type: NRG; PAM sequence: GAG
agagcatcatacaacattgt

SEQ ID NO: 20973 - DNA, 20 bp, Artificial Sequence
  Description of Artificial Sequence: Synthetic oligonucleotide
  Target: SCNA; (-) strand; PAM type: NRG; PAM sequence: GAG
atagtttttagtttctgcca

SEQ ID NO: 20974 - DNA, 20 bp, Artificial Sequence
  Description of Artificial Sequence: Synthetic oligonucleotide
  Target: SCNA; (-) strand; PAM type: NRG; PAM sequence: CAG
gcatagtttttagtttctgc

SEQ ID NO: 20975 - DNA, 20 bp, Artificial Sequence
  Description of Artificial Sequence: Synthetic oligonucleotide
  Target: SCNA; (-) strand; PAM type: NRG; PAM sequence: TAG
cattctacaagcatagtttt

SEQ ID NO: 20976 - DNA, 20 bp, Artificial Sequence
  Description of Artificial Sequence: Synthetic oligonucleotide
  Target: SCNA; (-) strand; PAM type: NRG; PAM sequence: TAG
aatgagacattctacaagca

SEQ ID NO: 20977 - DNA, 20 bp, Artificial Sequence
  Description of Artificial Sequence: Synthetic oligonucleotide
  Target: SCNA; (-) strand; PAM type: NRG; PAM sequence: AAG
atataaatgagacattctac

SEQ ID NO: 20978 - DNA, 20 bp, Artificial Sequence
  Description of Artificial Sequence: Synthetic oligonucleotide
  Target: SCNA; (-) strand; PAM type: NRG; PAM sequence: GAG
cgttctgttgtcatataaat

SEQ ID NO: 20979 - DNA, 20 bp, Artificial Sequence
  Description of Artificial Sequence: Synthetic oligonucleotide
  Target: SCNA; (-) strand; PAM type: NRG; PAM sequence: CAG
atattaagctccatttcact

SEQ ID NO: 20980 - DNA, 20 bp, Artificial Sequence
  Description of Artificial Sequence: Synthetic oligonucleotide
  Target: SCNA; (-) strand; PAM type: NRG; PAM sequence: AAG
ctcttaacagacttaatatt

SEQ ID NO: 20981 - DNA, 20 bp, Artificial Sequence
  Description of Artificial Sequence: Synthetic oligonucleotide
  Target: SCNA; (-) strand; PAM type: NRG; PAM sequence: CAG
gcttgtccctaacctcttaa

SEQ ID NO: 20982 - DNA, 20 bp, Artificial Sequence
  Description of Artificial Sequence: Synthetic oligonucleotide
  Target: SCNA; (-) strand; PAM type: NRG; PAM sequence: TGG
acagagtctcactctgtctt

SEQ ID NO: 20983 - DNA, 20 bp, Artificial Sequence
  Description of Artificial Sequence: Synthetic oligonucleotide
  Target: SCNA; (-) strand; PAM type: NRG; PAM sequence: GAG
ttttttttttttttgagaca

SEQ ID NO: 20984 - DNA, 20 bp, Artificial Sequence
  Description of Artificial Sequence: Synthetic oligonucleotide
  Target: SCNA; (-) strand; PAM type: NRG; PAM sequence: CAG
ttttttttttttttttgaga

SEQ ID NO: 20985 - DNA, 20 bp, Artificial Sequence
  Description of Artificial Sequence: Synthetic oligonucleotide
  Target: SCNA; (-) strand; PAM type: NRG; PAM sequence: GAG
actttttttttttttttttt

SEQ ID NO: 20986 - DNA, 20 bp, Artificial Sequence
  Description of Artificial Sequence: Synthetic oligonucleotide
  Target: SCNA; (-) strand; PAM type: NRG; PAM sequence: GAG
acttacttttatttatctct

SEQ ID NO: 20987 - DNA, 20 bp, Artificial Sequence
  Description of Artificial Sequence: Synthetic oligonucleotide
  Target: SCNA; (-) strand; PAM type: NRG; PAM sequence: CAG
agcatttatggatgtcagct

SEQ ID NO: 20988 - DNA, 20 bp, Artificial Sequence
  Description of Artificial Sequence: Synthetic oligonucleotide
  Target: SCNA; (-) strand; PAM type: NRG; PAM sequence: CAG
cacaaagcatttatggatgt

SEQ ID NO: 20989 - DNA, 20 bp, Artificial Sequence
  Description of Artificial Sequence: Synthetic oligonucleotide
  Target: SCNA; (-) strand; PAM type: NRG; PAM sequence: TGG
ctaatgccacaaagcattta

SEQ ID NO: 20990 - DNA, 20 bp, Artificial Sequence
  Description of Artificial Sequence: Synthetic oligonucleotide
  Target: SCNA; (-) strand; PAM type: NRG; PAM sequence: AAG
tagcagcatctaatgccaca

SEQ ID NO: 20991 - DNA, 20 bp, Artificial Sequence
  Description of Artificial Sequence: Synthetic oligonucleotide
  Target: SCNA; (-) strand; PAM type: NRG; PAM sequence: CAG
tggaaataattcactcttag

SEQ ID NO: 20992 - DNA, 20 bp, Artificial Sequence
  Description of Artificial Sequence: Synthetic oligonucleotide
  Target: SCNA; (-) strand; PAM type: NRG; PAM sequence: TAG
tcatggaaataattcactct

SEQ ID NO: 20993 - DNA, 20 bp, Artificial Sequence
  Description of Artificial Sequence: Synthetic oligonucleotide
  Target: SCNA; (-) strand; PAM type: NRG; PAM sequence: TGG
acagcttgatcttggcttca

SEQ ID NO: 20994 - DNA, 20 bp, Artificial Sequence
  Description of Artificial Sequence: Synthetic oligonucleotide
  Target: SCNA; (-) strand; PAM type: NRG; PAM sequence: TGG
cttgtgcaacagcttgatct

SEQ ID NO: 20995 - DNA, 20 bp, Artificial Sequence
  Description of Artificial Sequence: Synthetic oligonucleotide
  Target: SCNA; (-) strand; PAM type: NRG; PAM sequence: CAG
ttaatgtacagcttgtgcaa

SEQ ID NO: 20996 - DNA, 20 bp, Artificial Sequence
  Description of Artificial Sequence: Synthetic oligonucleotide
  Target: SCNA; (-) strand; PAM type: NRG; PAM sequence: CAG
tttttcaagtaattaatgta

SEQ ID NO: 20997 - DNA, 20 bp, Artificial Sequence
  Description of Artificial Sequence: Synthetic oligonucleotide
  Target: SCNA; (-) strand; PAM type: NRG; PAM sequence: AAG
ccctactgggaatttttttc

SEQ ID NO: 20998 - DNA, 20 bp, Artificial Sequence
  Description of Artificial Sequence: Synthetic oligonucleotide
  Target: SCNA; (-) strand; PAM type: NRG; PAM sequence: GGG
tatttagacattgccctact

SEQ ID NO: 20999 - DNA, 20 bp, Artificial Sequence
  Description of Artificial Sequence: Synthetic oligonucleotide
  Target: SCNA; (-) strand; PAM type: NRG; PAM sequence: TGG
atatttagacattgccctac

SEQ ID NO: 21000 - DNA, 20 bp, Artificial Sequence
  Description of Artificial Sequence: Synthetic oligonucleotide
  Target: SCNA; (-) strand; PAM type: NRG; PAM sequence: TAG
tattctcatggaaatatatt

SEQ ID NO: 21001 - DNA, 20 bp, Artificial Sequence
  Description of Artificial Sequence: Synthetic oligonucleotide
  Target: SCNA; (-) strand; PAM type: NRG; PAM sequence: TGG
aaatatatatactattctca

SEQ ID NO: 21002 - DNA, 20 bp, Artificial Sequence
  Description of Artificial Sequence: Synthetic oligonucleotide
  Target: SCNA; (-) strand; PAM type: NRG; PAM sequence: TAG
aggtcagacaccctcttggc

SEQ ID NO: 21003 - DNA, 20 bp, Artificial Sequence
  Description of Artificial Sequence: Synthetic oligonucleotide
  Target: SCNA; (-) strand; PAM type: NRG; PAM sequence: TGG
ttggaggtcagacaccctct

SEQ ID NO: 21004 - DNA, 20 bp, Artificial Sequence
  Description of Artificial Sequence: Synthetic oligonucleotide
  Target: SCNA; (-) strand; PAM type: NRG; PAM sequence: CAG
agtggatatattttggaggt

SEQ ID NO: 21005 - DNA, 20 bp, Artificial Sequence
  Description of Artificial Sequence: Synthetic oligonucleotide
  Target: SCNA; (-) strand; PAM type: NRG; PAM sequence: AGG
tattagtggatatattttgg

SEQ ID NO: 21006 - DNA, 20 bp, Artificial Sequence
  Description of Artificial Sequence: Synthetic oligonucleotide
  Target: SCNA; (-) strand; PAM type: NRG; PAM sequence: GAG
ttattagtggatatattttg

SEQ ID NO: 21007 - DNA, 20 bp, Artificial Sequence
  Description of Artificial Sequence: Synthetic oligonucleotide
  Target: SCNA; (-) strand; PAM type: NRG; PAM sequence: TGG
ttttattagtggatatattt

SEQ ID NO: 21008 - DNA, 20 bp, Artificial Sequence
  Description of Artificial Sequence: Synthetic oligonucleotide
  Target: SCNA; (-) strand; PAM type: NRG; PAM sequence: TGG
ccttggattttttttattag

SEQ ID NO: 21009 - DNA, 20 bp, Artificial Sequence
  Description of Artificial Sequence: Synthetic oligonucleotide
  Target: SCNA; (-) strand; PAM type: NRG; PAM sequence: TAG
gctccttggattttttttat

SEQ ID NO: 21010 - DNA, 20 bp, Artificial Sequence
  Description of Artificial Sequence: Synthetic oligonucleotide
  Target: SCNA; (-) strand; PAM type: NRG; PAM sequence: TGG
actgttatccaaatgctcct

SEQ ID NO: 21011 - DNA, 20 bp, Artificial Sequence
  Description of Artificial Sequence: Synthetic oligonucleotide
  Target: SCNA; (-) strand; PAM type: NRG; PAM sequence: AAG
gtagtcatgcccaaaatgtg

SEQ ID NO: 21012 - DNA, 20 bp, Artificial Sequence
  Description of Artificial Sequence: Synthetic oligonucleotide
  Target: SCNA; (-) strand; PAM type: NRG; PAM sequence: TAG
gattgatctggccacgtgtg

SEQ ID NO: 21013 - DNA, 20 bp, Artificial Sequence
  Description of Artificial Sequence: Synthetic oligonucleotide
  Target: SCNA; (-) strand; PAM type: NRG; PAM sequence: TGG
aagaatcactgggattgatc

SEQ ID NO: 21014 - DNA, 20 bp, Artificial Sequence
  Description of Artificial Sequence: Synthetic oligonucleotide
  Target: SCNA; (-) strand; PAM type: NRG; PAM sequence: GGG
atttgcatggaagaatcact

SEQ ID NO: 21015 - DNA, 20 bp, Artificial Sequence
  Description of Artificial Sequence: Synthetic oligonucleotide
  Target: SCNA; (-) strand; PAM type: NRG; PAM sequence: TGG
tatttgcatggaagaatcac

SEQ ID NO: 21016 - DNA, 20 bp, Artificial Sequence
  Description of Artificial Sequence: Synthetic oligonucleotide
  Target: SCNA; (-) strand; PAM type: NRG; PAM sequence: AAG
acactaacatatttgcatgg

SEQ ID NO: 21017 - DNA, 20 bp, Artificial Sequence
  Description of Artificial Sequence: Synthetic oligonucleotide
  Target: SCNA; (-) strand; PAM type: NRG; PAM sequence: TGG
atcacactaacatatttgca

SEQ ID NO: 21018 - DNA, 20 bp, Artificial Sequence
  Description of Artificial Sequence: Synthetic oligonucleotide
  Target: SCNA; (-) strand; PAM type: NRG; PAM sequence: TAG
atgacaagaacaaaacatat

SEQ ID NO: 21019 - DNA, 20 bp, Artificial Sequence
  Description of Artificial Sequence: Synthetic oligonucleotide
  Target: SCNA; (-) strand; PAM type: NRG; PAM sequence: AAG
actgtttttacaaccatgac

SEQ ID NO: 21020 - DNA, 20 bp, Artificial Sequence
  Description of Artificial Sequence: Synthetic oligonucleotide
  Target: SCNA; (-) strand; PAM type: NRG; PAM sequence: AAG
acatttatacttgctaagta

SEQ ID NO: 21021 - DNA, 20 bp, Artificial Sequence
  Description of Artificial Sequence: Synthetic oligonucleotide
  Target: SCNA; (-) strand; PAM type: NRG; PAM sequence: AAG
tgctaacatttatacttgct

SEQ ID NO: 21022 - DNA, 20 bp, Artificial Sequence
  Description of Artificial Sequence: Synthetic oligonucleotide
  Target: SCNA; (-) strand; PAM type: NRG; PAM sequence: TAG
aaacagtttttattcttgtt

SEQ ID NO: 21023 - DNA, 20 bp, Artificial Sequence
  Description of Artificial Sequence: Synthetic oligonucleotide
  Target: SCNA; (-) strand; PAM type: NRG; PAM sequence: CAG
ttgataattatagttaaaaa

SEQ ID NO: 21024 - DNA, 20 bp, Artificial Sequence
  Description of Artificial Sequence: Synthetic oligonucleotide
  Target: SCNA; (-) strand; PAM type: NRG; PAM sequence: TAG
ggttgtagacttgataatta

SEQ ID NO: 21025 - DNA, 20 bp, Artificial Sequence
  Description of Artificial Sequence: Synthetic oligonucleotide
  Target: SCNA; (-) strand; PAM type: NRG; PAM sequence: TAG
ggaaaaagacttttgggttg

SEQ ID NO: 21026 - DNA, 20 bp, Artificial Sequence
  Description of Artificial Sequence: Synthetic oligonucleotide
  Target: SCNA; (-) strand; PAM type: NRG; PAM sequence: GGG
aggatgggaaaaagactttt

SEQ ID NO: 21027 - DNA, 20 bp, Artificial Sequence
  Description of Artificial Sequence: Synthetic oligonucleotide
  Target: SCNA; (-) strand; PAM type: NRG; PAM sequence: TGG
aaggatgggaaaaagacttt

SEQ ID NO: 21028 - DNA, 20 bp, Artificial Sequence
  Description of Artificial Sequence: Synthetic oligonucleotide
  Target: SCNA; (-) strand; PAM type: NRG; PAM sequence: AAG
attgtgtcaaggatgggaaa

SEQ ID NO: 21029 - DNA, 20 bp, Artificial Sequence
  Description of Artificial Sequence: Synthetic oligonucleotide
  Target: SCNA; (-) strand; PAM type: NRG; PAM sequence: GGG
aatgttattgtgtcaaggat

SEQ ID NO: 21030 - DNA, 20 bp, Artificial Sequence
  Description of Artificial Sequence: Synthetic oligonucleotide
  Target: SCNA; (-) strand; PAM type: NRG; PAM sequence: TGG
gaatgttattgtgtcaagga

SEQ ID NO: 21031 - DNA, 20 bp, Artificial Sequence
  Description of Artificial Sequence: Synthetic oligonucleotide
  Target: SCNA; (-) strand; PAM type: NRG; PAM sequence: AGG
gtttgaatgttattgtgtca

SEQ ID NO: 21032 - DNA, 20 bp, Artificial Sequence
  Description of Artificial Sequence: Synthetic oligonucleotide
  Target: SCNA; (-) strand; PAM type: NRG; PAM sequence: AAG
tgtttgaatgttattgtgtc

SEQ ID NO: 21033 - DNA, 20 bp, Artificial Sequence
  Description of Artificial Sequence: Synthetic oligonucleotide
  Target: SCNA; (-) strand; PAM type: NRG; PAM sequence: GAG
tttagcaataaatgtactac

SEQ ID NO: 21034 - DNA, 20 bp, Artificial Sequence
  Description of Artificial Sequence: Synthetic oligonucleotide
  Target: SCNA; (-) strand; PAM type: NRG; PAM sequence: TAG
acattattttgagtacaatt

SEQ ID NO: 21035 - DNA, 20 bp, Artificial Sequence
  Description of Artificial Sequence: Synthetic oligonucleotide
  Target: SCNA; (-) strand; PAM type: NRG; PAM sequence: GAG
gtaaaatgaaacattatttt

SEQ ID NO: 21036 - DNA, 20 bp, Artificial Sequence
  Description of Artificial Sequence: Synthetic oligonucleotide
  Target: SCNA; (-) strand; PAM type: NRG; PAM sequence: AAG
acagggggcttgtgccactt

SEQ ID NO: 21037 - DNA, 20 bp, Artificial Sequence
  Description of Artificial Sequence: Synthetic oligonucleotide
  Target: SCNA; (-) strand; PAM type: NRG; PAM sequence: GGG
aatgtaatcatacctacagg

SEQ ID NO: 21038 - DNA, 20 bp, Artificial Sequence
  Description of Artificial Sequence: Synthetic oligonucleotide
  Target: SCNA; (-) strand; PAM type: NRG; PAM sequence: GGG
gaatgtaatcatacctacag

SEQ ID NO: 21039 - DNA, 20 bp, Artificial Sequence
  Description of Artificial Sequence: Synthetic oligonucleotide
  Target: SCNA; (-) strand; PAM type: NRG; PAM sequence: GGG
ggaatgtaatcatacctaca

SEQ ID NO: 21040 - DNA, 20 bp, Artificial Sequence
  Description of Artificial Sequence: Synthetic oligonucleotide
  Target: SCNA; (-) strand; PAM type: NRG; PAM sequence: AGG
cggaatgtaatcatacctac

SEQ ID NO: 21041 - DNA, 20 bp, Artificial Sequence
  Description of Artificial Sequence: Synthetic oligonucleotide
  Target: SCNA; (-) strand; PAM type: NRG; PAM sequence: CAG
gcggaatgtaatcataccta

SEQ ID NO: 21042 - DNA, 20 bp, Artificial Sequence
  Description of Artificial Sequence: Synthetic oligonucleotide
  Target: SCNA; (-) strand; PAM type: NRG; PAM sequence: CGG
gctcaagaagaattagtatg

SEQ ID NO: 21043 - DNA, 20 bp, Artificial Sequence
  Description of Artificial Sequence: Synthetic oligonucleotide
  Target: SCNA; (-) strand; PAM type: NRG; PAM sequence: TAG
tcagtgagctcaagaagaat

SEQ ID NO: 21044 - DNA, 20 bp, Artificial Sequence
  Description of Artificial Sequence: Synthetic oligonucleotide
  Target: SCNA; (-) strand; PAM type: NRG; PAM sequence: AAG
cttctgtcagtgagctcaag

SEQ ID NO: 21045 - DNA, 20 bp, Artificial Sequence
  Description of Artificial Sequence: Synthetic oligonucleotide
  Target: SCNA; (-) strand; PAM type: NRG; PAM sequence: AAG
tcacttctgtcagtgagctc

SEQ ID NO: 21046 - DNA, 20 bp, Artificial Sequence
  Description of Artificial Sequence: Synthetic oligonucleotide
  Target: SCNA; (-) strand; PAM type: NRG; PAM sequence: GAG
acatagtcacttctgtcagt

SEQ ID NO: 21047 - DNA, 20 bp, Artificial Sequence
  Description of Artificial Sequence: Synthetic oligonucleotide
  Target: SCNA; (-) strand; PAM type: NRG; PAM sequence: CAG
gaagacatagtcacttctgt

SEQ ID NO: 21048 - DNA, 20 bp, Artificial Sequence
  Description of Artificial Sequence: Synthetic oligonucleotide
  Target: SCNA; (-) strand; PAM type: NRG; PAM sequence: TAG
agaaattttataagaagaca

SEQ ID NO: 21049 - DNA, 20 bp, Artificial Sequence
  Description of Artificial Sequence: Synthetic oligonucleotide
  Target: SCNA; (-) strand; PAM type: NRG; PAM sequence: AAG
gagtatagaaattttataag

SEQ ID NO: 21050 - DNA, 20 bp, Artificial Sequence
  Description of Artificial Sequence: Synthetic oligonucleotide
  Target: SCNA; (-) strand; PAM type: NRG; PAM sequence: AAG
tgggagtatagaaattttat

SEQ ID NO: 21051 - DNA, 20 bp, Artificial Sequence
  Description of Artificial Sequence: Synthetic oligonucleotide
  Target: SCNA; (-) strand; PAM type: NRG; PAM sequence: TAG
taagctagatcatgggagta

SEQ ID NO: 21052 - DNA, 20 bp, Artificial Sequence
  Description of Artificial Sequence: Synthetic oligonucleotide
  Target: SCNA; (-) strand; PAM type: NRG; PAM sequence: GAG
gaaactaagctagatcatgg

SEQ ID NO: 21053 - DNA, 20 bp, Artificial Sequence
  Description of Artificial Sequence: Synthetic oligonucleotide
  Target: SCNA; (-) strand; PAM type: NRG; PAM sequence: GGG
ttgaaactaagctagatcat

SEQ ID NO: 21054 - DNA, 20 bp, Artificial Sequence
  Description of Artificial Sequence: Synthetic oligonucleotide
  Target: SCNA; (-) strand; PAM type: NRG; PAM sequence: TGG
gttgaaactaagctagatca

SEQ ID NO: 21055 - DNA, 20 bp, Artificial Sequence
  Description of Artificial Sequence: Synthetic oligonucleotide
  Target: SCNA; (-) strand; PAM type: NRG; PAM sequence: TAG
ttatttggttgaaactaagc

SEQ ID NO: 21056 - DNA, 20 bp, Artificial Sequence
  Description of Artificial Sequence: Synthetic oligonucleotide
  Target: SCNA; (-) strand; PAM type: NRG; PAM sequence: AAG
ccgtttatttggttgaaact

SEQ ID NO: 21057 - DNA, 20 bp, Artificial Sequence
  Description of Artificial Sequence: Synthetic oligonucleotide
  Target: SCNA; (-) strand; PAM type: NRG; PAM sequence: TGG
taaactgaatgccgtttatt

SEQ ID NO: 21058 - DNA, 20 bp, Artificial Sequence
  Description of Artificial Sequence: Synthetic oligonucleotide
  Target: SCNA; (-) strand; PAM type: NRG; PAM sequence: CAG
gaaggagattatcttccctt

SEQ ID NO: 21059 - DNA, 20 bp, Artificial Sequence
  Description of Artificial Sequence: Synthetic oligonucleotide
  Target: SCNA; (-) strand; PAM type: NRG; PAM sequence: GAG
ggatagatgctaactagaag

SEQ ID NO: 21060 - DNA, 20 bp, Artificial Sequence
  Description of Artificial Sequence: Synthetic oligonucleotide
  Target: SCNA; (-) strand; PAM type: NRG; PAM sequence: AGG
gtggatagatgctaactaga

SEQ ID NO: 21061 - DNA, 20 bp, Artificial Sequence
  Description of Artificial Sequence: Synthetic oligonucleotide
  Target: SCNA; (-) strand; PAM type: NRG; PAM sequence: AAG
tgtggatagatgctaactag

SEQ ID NO: 21062 - DNA, 20 bp, Artificial Sequence
  Description of Artificial Sequence: Synthetic oligonucleotide
  Target: SCNA; (-) strand; PAM type: NRG; PAM sequence: TAG
gtgtgtggatagatgctaac

SEQ ID NO: 21063 - DNA, 20 bp, Artificial Sequence
  Description of Artificial Sequence: Synthetic oligonucleotide
  Target: SCNA; (-) strand; PAM type: NRG; PAM sequence: TAG
tattaagcactgtgtgtgga

SEQ ID NO: 21064 - DNA, 20 bp, Artificial Sequence
  Description of Artificial Sequence: Synthetic oligonucleotide
  Target: SCNA; (-) strand; PAM type: NRG; PAM sequence: TGG
ctgttattaagcactgtgtg

SEQ ID NO: 21065 - DNA, 20 bp, Artificial Sequence
  Description of Artificial Sequence: Synthetic oligonucleotide
  Target: SCNA; (-) strand; PAM type: NRG; PAM sequence: AAG
ctctgatacaatctgttatt

SEQ ID NO: 21066 - DNA, 20 bp, Artificial Sequence
  Description of Artificial Sequence: Synthetic oligonucleotide
  Target: SCNA; (-) strand; PAM type: NRG; PAM sequence: TAG
aacagattttggtggacaac

SEQ ID NO: 21067 - DNA, 20 bp, Artificial Sequence
  Description of Artificial Sequence: Synthetic oligonucleotide
  Target: SCNA; (-) strand; PAM type: NRG; PAM sequence: TGG
gaagggagaacagattttgg

SEQ ID NO: 21068 - DNA, 20 bp, Artificial Sequence
  Description of Artificial Sequence: Synthetic oligonucleotide
  Target: SCNA; (-) strand; PAM type: NRG; PAM sequence: TGG
aaagaagggagaacagattt

SEQ ID NO: 21069 - DNA, 20 bp, Artificial Sequence
  Description of Artificial Sequence: Synthetic oligonucleotide
  Target: SCNA; (-) strand; PAM type: NRG; PAM sequence: CAG
ccctgacaaagaagggagaa

SEQ ID NO: 21070 - DNA, 20 bp, Artificial Sequence
  Description of Artificial Sequence: Synthetic oligonucleotide
  Target: SCNA; (-) strand; PAM type: NRG; PAM sequence: GAG
atatgccctgacaaagaagg

SEQ ID NO: 21071 - DNA, 20 bp, Artificial Sequence
  Description of Artificial Sequence: Synthetic oligonucleotide
  Target: SCNA; (-) strand; PAM type: NRG; PAM sequence: GGG
ccatatgccctgacaaagaa

SEQ ID NO: 21072 - DNA, 20 bp, Artificial Sequence
  Description of Artificial Sequence: Synthetic oligonucleotide
  Target: SCNA; (-) strand; PAM type: NRG; PAM sequence: AGG
gccatatgccctgacaaaga

SEQ ID NO: 21073 - DNA, 20 bp, Artificial Sequence
  Description of Artificial Sequence: Synthetic oligonucleotide
  Target: SCNA; (-) strand; PAM type: NRG; PAM sequence: AAG
agccatatgccctgacaaag

SEQ ID NO: 21074 - DNA, 20 bp, Artificial Sequence
  Description of Artificial Sequence: Synthetic oligonucleotide
  Target: SCNA; (-) strand; PAM type: NRG; PAM sequence: AAG
tatagccatatgccctgaca

SEQ ID NO: 21075 - DNA, 20 bp, Artificial Sequence
  Description of Artificial Sequence: Synthetic oligonucleotide
  Target: SCNA; (-) strand; PAM type: NRG; PAM sequence: TAG
agacagaaaattgtagtata

SEQ ID NO: 21076 - DNA, 20 bp, Artificial Sequence
  Description of Artificial Sequence: Synthetic oligonucleotide
  Target: SCNA; (-) strand; PAM type: NRG; PAM sequence: TAG
tcaaggtagacagaaaattg

SEQ ID NO: 21077 - DNA, 20 bp, Artificial Sequence
  Description of Artificial Sequence: Synthetic oligonucleotide
  Target: SCNA; (-) strand; PAM type: NRG; PAM sequence: CAG
cacaatttattcaaggtaga

SEQ ID NO: 21078 - DNA, 20 bp, Artificial Sequence
  Description of Artificial Sequence: Synthetic oligonucleotide
  Target: SCNA; (-) strand; PAM type: NRG; PAM sequence: TAG
cagccacaatttattcaagg

SEQ ID NO: 21079 - DNA, 20 bp, Artificial Sequence
  Description of Artificial Sequence: Synthetic oligonucleotide
  Target: SCNA; (-) strand; PAM type: NRG; PAM sequence: AGG
taccagccacaatttattca

SEQ ID NO: 21080 - DNA, 20 bp, Artificial Sequence
  Description of Artificial Sequence: Synthetic oligonucleotide
  Target: SCNA; (-) strand; PAM type: NRG; PAM sequence: AAG
ataccagccacaatttattc

SEQ ID NO: 21081 - DNA, 20 bp, Artificial Sequence
  Description of Artificial Sequence: Synthetic oligonucleotide
  Target: SCNA; (-) strand; PAM type: NRG; PAM sequence: CAG
tttctcattcctttggatac

SEQ ID NO: 21082 - DNA, 20 bp, Artificial Sequence
  Description of Artificial Sequence: Synthetic oligonucleotide
  Target: SCNA; (-) strand; PAM type: NRG; PAM sequence: TGG
tatttcctttctcattcctt

SEQ ID NO: 21083 - DNA, 20 bp, Artificial Sequence
  Description of Artificial Sequence: Synthetic oligonucleotide
  Target: SCNA; (-) strand; PAM type: NRG; PAM sequence: TAG
catccatacccacttcgaag

SEQ ID NO: 21084 - DNA, 20 bp, Artificial Sequence
  Description of Artificial Sequence: Synthetic oligonucleotide
  Target: SCNA; (-) strand; PAM type: NRG; PAM sequence: AAG
atgcatccatacccacttcg

SEQ ID NO: 21085 - DNA, 20 bp, Artificial Sequence
  Description of Artificial Sequence: Synthetic oligonucleotide
  Target: SCNA; (-) strand; PAM type: NRG; PAM sequence: GGG
cagccccaccgtcttctgag

SEQ ID NO: 21086 - DNA, 20 bp, Artificial Sequence
  Description of Artificial Sequence: Synthetic oligonucleotide
  Target: SCNA; (-) strand; PAM type: NRG; PAM sequence: GGG
gcagccccaccgtcttctga

SEQ ID NO: 21087 - DNA, 20 bp, Artificial Sequence
  Description of Artificial Sequence: Synthetic oligonucleotide
  Target: SCNA; (-) strand; PAM type: NRG; PAM sequence: AGG
tgcagccccaccgtcttctg

SEQ ID NO: 21088 - DNA, 20 bp, Artificial Sequence
  Description of Artificial Sequence: Synthetic oligonucleotide
  Target: SCNA; (-) strand; PAM type: NRG; PAM sequence: GAG
ttgcagccccaccgtcttct

SEQ ID NO: 21089 - DNA, 20 bp, Artificial Sequence
  Description of Artificial Sequence: Synthetic oligonucleotide
  Target: SCNA; (-) strand; PAM type: NRG; PAM sequence: CAG
cccagactcctcccaagttg

SEQ ID NO: 21090 - DNA, 20 bp, Artificial Sequence
  Description of Artificial Sequence: Synthetic oligonucleotide
  Target: SCNA; (-) strand; PAM type: NRG; PAM sequence: AAG
gaggaacccagactcctccc

SEQ ID NO: 21091 - DNA, 20 bp, Artificial Sequence
  Description of Artificial Sequence: Synthetic oligonucleotide
  Target: SCNA; (-) strand; PAM type: NRG; PAM sequence: CAG
cttagggagattgaggaacc

SEQ ID NO: 21092 - DNA, 20 bp, Artificial Sequence
  Description of Artificial Sequence: Synthetic oligonucleotide
  Target: SCNA; (-) strand; PAM type: NRG; PAM sequence: AGG
tttctcccttagggagattg

SEQ ID NO: 21093 - DNA, 20 bp, Artificial Sequence
  Description of Artificial Sequence: Synthetic oligonucleotide
  Target: SCNA; (-) strand; PAM type: NRG; PAM sequence: GAG
gtttctcccttagggagatt

SEQ ID NO: 21094 - DNA, 20 bp, Artificial Sequence
  Description of Artificial Sequence: Synthetic oligonucleotide
  Target: SCNA; (-) strand; PAM type: NRG; PAM sequence: GAG
gggtgagtttctcccttagg

SEQ ID NO: 21095 - DNA, 20 bp, Artificial Sequence
  Description of Artificial Sequence: Synthetic oligonucleotide
  Target: SCNA; (-) strand; PAM type: NRG; PAM sequence: GGG
gtgggtgagtttctccctta

SEQ ID NO: 21096 - DNA, 20 bp, Artificial Sequence
  Description of Artificial Sequence: Synthetic oligonucleotide
  Target: SCNA; (-) strand; PAM type: NRG; PAM sequence: AGG
ggtgggtgagtttctccctt

SEQ ID NO: 21097 - DNA, 20 bp, Artificial Sequence
  Description of Artificial Sequence: Synthetic oligonucleotide
  Target: SCNA; (-) strand; PAM type: NRG; PAM sequence: TAG
aggtgggtgagtttctccct

SEQ ID NO: 21098 - DNA, 20 bp, Artificial Sequence
  Description of Artificial Sequence: Synthetic oligonucleotide
  Target: SCNA; (-) strand; PAM type: NRG; PAM sequence: GAG
ggtgtttttggcaggtgggt

SEQ ID NO: 21099 - DNA, 20 bp, Artificial Sequence
  Description of Artificial Sequence: Synthetic oligonucleotide
  Target: SCNA; (-) strand; PAM type: NRG; PAM sequence: GGG
ggtaggtgtttttggcaggt

SEQ ID NO: 21100 - DNA, 20 bp, Artificial Sequence
  Description of Artificial Sequence: Synthetic oligonucleotide
  Target: SCNA; (-) strand; PAM type: NRG; PAM sequence: TGG
tggtaggtgtttttggcagg

SEQ ID NO: 21101 - DNA, 20 bp, Artificial Sequence
  Description of Artificial Sequence: Synthetic oligonucleotide
  Target: SCNA; (-) strand; PAM type: NRG; PAM sequence: AGG
ccatggtaggtgtttttggc

SEQ ID NO: 21102 - DNA, 20 bp, Artificial Sequence
  Description of Artificial Sequence: Synthetic oligonucleotide
  Target: SCNA; (-) strand; PAM type: NRG; PAM sequence: CAG
tccatggtaggtgtttttgg

SEQ ID NO: 21103 - DNA, 20 bp, Artificial Sequence
  Description of Artificial Sequence: Synthetic oligonucleotide
  Target: SCNA; (-) strand; PAM type: NRG; PAM sequence: TGG
aagtccatggtaggtgtttt

SEQ ID NO: 21104 - DNA, 20 bp, Artificial Sequence
  Description of Artificial Sequence: Synthetic oligonucleotide
  Target: SCNA; (-) strand; PAM type: NRG; PAM sequence: AGG
cattcacataagtccatggt

SEQ ID NO: 21105 - DNA, 20 bp, Artificial Sequence
  Description of Artificial Sequence: Synthetic oligonucleotide
  Target: SCNA; (-) strand; PAM type: NRG; PAM sequence: TAG
tcattcacataagtccatgg

SEQ ID NO: 21106 - DNA, 20 bp, Artificial Sequence
  Description of Artificial Sequence: Synthetic oligonucleotide
  Target: SCNA; (-) strand; PAM type: NRG; PAM sequence: TGG
ttctcattcacataagtcca

SEQ ID NO: 21107 - DNA, 20 bp, Artificial Sequence
  Description of Artificial Sequence: Synthetic oligonucleotide
  Target: SCNA; (-) strand; PAM type: NRG; PAM sequence: AAG
aggttgattctcattcacat

SEQ ID NO: 21108 - DNA, 20 bp, Artificial Sequence
  Description of Artificial Sequence: Synthetic oligonucleotide
  Target: SCNA; (-) strand; PAM type: NRG; PAM sequence: AGG
aaaatgctcaaacacagtag

SEQ ID NO: 21109 - DNA, 20 bp, Artificial Sequence
  Description of Artificial Sequence: Synthetic oligonucleotide
  Target: SCNA; (-) strand; PAM type: NRG; PAM sequence: GAG
taaaatgctcaaacacagta

SEQ ID NO: 21110 - DNA, 20 bp, Artificial Sequence
  Description of Artificial Sequence: Synthetic oligonucleotide
  Target: SCNA; (-) strand; PAM type: NRG; PAM sequence: TAG
attaaaatgctcaaacacag

SEQ ID NO: 21111 - DNA, 20 bp, Artificial Sequence
  Description of Artificial Sequence: Synthetic oligonucleotide
  Target: SCNA; (-) strand; PAM type: NRG; PAM sequence: CAG
tcaattaaaatgctcaaaca

SEQ ID NO: 21112 - DNA, 20 bp, Artificial Sequence
  Description of Artificial Sequence: Synthetic oligonucleotide
  Target: SCNA; (-) strand; PAM type: NRG; PAM sequence: TAG
ctgaacatctgtatattaaa

SEQ ID NO: 21113 - DNA, 20 bp, Artificial Sequence
  Description of Artificial Sequence: Synthetic oligonucleotide
  Target: SCNA; (-) strand; PAM type: NRG; PAM sequence: TAG
ctacaaaaacttaattcatt

SEQ ID NO: 21114 - DNA, 20 bp, Artificial Sequence
  Description of Artificial Sequence: Synthetic oligonucleotide
  Target: SCNA; (-) strand; PAM type: NRG; PAM sequence: CAG
ttgatctgtttcaaattctt

SEQ ID NO: 21115 - DNA, 20 bp, Artificial Sequence
  Description of Artificial Sequence: Synthetic oligonucleotide
  Target: SCNA; (-) strand; PAM type: NRG; PAM sequence: GGG
ttctgggtgaagtggataga

SEQ ID NO: 21116 - DNA, 20 bp, Artificial Sequence
  Description of Artificial Sequence: Synthetic oligonucleotide
  Target: SCNA; (-) strand; PAM type: NRG; PAM sequence: AGG
attctgggtgaagtggatag

SEQ ID NO: 21117 - DNA, 20 bp, Artificial Sequence
  Description of Artificial Sequence: Synthetic oligonucleotide
  Target: SCNA; (-) strand; PAM type: NRG; PAM sequence: GAG
aattctgggtgaagtggata

SEQ ID NO: 21118 - DNA, 20 bp, Artificial Sequence
  Description of Artificial Sequence: Synthetic oligonucleotide
  Target: SCNA; (-) strand; PAM type: NRG; PAM sequence: TAG
ggaattctgggtgaagtgga

SEQ ID NO: 21119 - DNA, 20 bp, Artificial Sequence
  Description of Artificial Sequence: Synthetic oligonucleotide
  Target: SCNA; (-) strand; PAM type: NRG; PAM sequence: TGG
attaggaattctgggtgaag

SEQ ID NO: 21120 - DNA, 20 bp, Artificial Sequence
  Description of Artificial Sequence: Synthetic oligonucleotide
  Target: SCNA; (-) strand; PAM type: NRG; PAM sequence: AAG
acaattaggaattctgggtg

SEQ ID NO: 21121 - DNA, 20 bp, Artificial Sequence
  Description of Artificial Sequence: Synthetic oligonucleotide
  Target: SCNA; (-) strand; PAM type: NRG; PAM sequence: GGG
tgttaacaattaggaattct

SEQ ID NO: 21122 - DNA, 20 bp, Artificial Sequence
  Description of Artificial Sequence: Synthetic oligonucleotide
  Target: SCNA; (-) strand; PAM type: NRG; PAM sequence: TGG
atgttaacaattaggaattc

SEQ ID NO: 21123 - DNA, 20 bp, Artificial Sequence
  Description of Artificial Sequence: Synthetic oligonucleotide
  Target: SCNA; (-) strand; PAM type: NRG; PAM sequence: AGG
gaggtaaaatgttaacaatt

SEQ ID NO: 21124 - DNA, 20 bp, Artificial Sequence
  Description of Artificial Sequence: Synthetic oligonucleotide
  Target: SCNA; (-) strand; PAM type: NRG; PAM sequence: TAG
tgaggtaaaatgttaacaat

SEQ ID NO: 21125 - DNA, 20 bp, Artificial Sequence
  Description of Artificial Sequence: Synthetic oligonucleotide
  Target: SCNA; (-) strand; PAM type: NRG; PAM sequence: AGG
ttaggcagagggagcaaatg

SEQ ID NO: 21126 - DNA, 20 bp, Artificial Sequence
  Description of Artificial Sequence: Synthetic oligonucleotide
  Target: SCNA; (-) strand; PAM type: NRG; PAM sequence: GAG
gttaggcagagggagcaaat

SEQ ID NO: 21127 - DNA, 20 bp, Artificial Sequence
  Description of Artificial Sequence: Synthetic oligonucleotide
  Target: SCNA; (-) strand; PAM type: NRG; PAM sequence: GAG
atccatgtgttaggcagagg

SEQ ID NO: 21128 - DNA, 20 bp, Artificial Sequence
  Description of Artificial Sequence: Synthetic oligonucleotide
  Target: SCNA; (-) strand; PAM type: NRG; PAM sequence: GGG
acatccatgtgttaggcaga

SEQ ID NO: 21129 - DNA, 20 bp, Artificial Sequence
  Description of Artificial Sequence: Synthetic oligonucleotide
  Target: SCNA; (-) strand; PAM type: NRG; PAM sequence: AGG
tacatccatgtgttaggcag

SEQ ID NO: 21130 - DNA, 20 bp, Artificial Sequence
  Description of Artificial Sequence: Synthetic oligonucleotide
  Target: SCNA; (-) strand; PAM type: NRG; PAM sequence: GAG
atacatccatgtgttaggca

SEQ ID NO: 21131 - DNA, 20 bp, Artificial Sequence
  Description of Artificial Sequence: Synthetic oligonucleotide
  Target: SCNA; (-) strand; PAM type: NRG; PAM sequence: CAG
aaatacatccatgtgttagg

SEQ ID NO: 21132 - DNA, 20 bp, Artificial Sequence
  Description of Artificial Sequence: Synthetic oligonucleotide
  Target: SCNA; (-) strand; PAM type: NRG; PAM sequence: AGG
cacaaatacatccatgtgtt

SEQ ID NO: 21133 - DNA, 20 bp, Artificial Sequence
  Description of Artificial Sequence: Synthetic oligonucleotide
  Target: SCNA; (-) strand; PAM type: NRG; PAM sequence: TAG
gcacaaatacatccatgtgt

SEQ ID NO: 21134 - DNA, 20 bp, Artificial Sequence
  Description of Artificial Sequence: Synthetic oligonucleotide
  Target: SCNA; (-) strand; PAM type: NRG; PAM sequence: AAG
atgcaccattgtgctggaaa

SEQ ID NO: 21135 - DNA, 20 bp, Artificial Sequence
  Description of Artificial Sequence: Synthetic oligonucleotide
  Target: SCNA; (-) strand; PAM type: NRG; PAM sequence: TGG
gggttaatgcaccattgtgc

SEQ ID NO: 21136 - DNA, 20 bp, Artificial Sequence
  Description of Artificial Sequence: Synthetic oligonucleotide
  Target: SCNA; (-) strand; PAM type: NRG; PAM sequence: GGG
ggtacttactgaagtactta

SEQ ID NO: 21137 - DNA, 20 bp, Artificial Sequence
  Description of Artificial Sequence: Synthetic oligonucleotide
  Target: SCNA; (-) strand; PAM type: NRG; PAM sequence: AGG
aggtacttactgaagtactt

SEQ ID NO: 21138 - DNA, 20 bp, Artificial Sequence
  Description of Artificial Sequence: Synthetic oligonucleotide
  Target: SCNA; (-) strand; PAM type: NRG; PAM sequence: TAG
gaggtacttactgaagtact

SEQ ID NO: 21139 - DNA, 20 bp, Artificial Sequence
  Description of Artificial Sequence: Synthetic oligonucleotide
  Target: SCNA; (-) strand; PAM type: NRG; PAM sequence: AAG
ctttagagaggtacttactg

SEQ ID NO: 21140 - DNA, 20 bp, Artificial Sequence
  Description of Artificial Sequence: Synthetic oligonucleotide
  Target: SCNA; (-) strand; PAM type: NRG; PAM sequence: AGG
agagaatccttgctttagag

SEQ ID NO: 21141 - DNA, 20 bp, Artificial Sequence
  Description of Artificial Sequence: Synthetic oligonucleotide
  Target: SCNA; (-) strand; PAM type: NRG; PAM sequence: GAG
aagagaatccttgctttaga

SEQ ID NO: 21142 - DNA, 20 bp, Artificial Sequence
  Description of Artificial Sequence: Synthetic oligonucleotide
  Target: SCNA; (-) strand; PAM type: NRG; PAM sequence: GAG
agaagagaatccttgcttta

SEQ ID NO: 21143 - DNA, 20 bp, Artificial Sequence
  Description of Artificial Sequence: Synthetic oligonucleotide
  Target: SCNA; (-) strand; PAM type: NRG; PAM sequence: TAG
gtagaagagaatccttgctt

SEQ ID NO: 21144 - DNA, 20 bp, Artificial Sequence
  Description of Artificial Sequence: Synthetic oligonucleotide
  Target: SCNA; (-) strand; PAM type: NRG; PAM sequence: GAG
tttacagtgttagtgtagaa

SEQ ID NO: 21145 - DNA, 20 bp, Artificial Sequence
  Description of Artificial Sequence: Synthetic oligonucleotide
  Target: SCNA; (-) strand; PAM type: NRG; PAM sequence: AAG
gttttacagtgttagtgtag

SEQ ID NO: 21146 - DNA, 20 bp, Artificial Sequence
  Description of Artificial Sequence: Synthetic oligonucleotide
  Target: SCNA; (-) strand; PAM type: NRG; PAM sequence: TAG
acagttttacagtgttagtg

SEQ ID NO: 21147 - DNA, 20 bp, Artificial Sequence
  Description of Artificial Sequence: Synthetic oligonucleotide
  Target: SCNA; (-) strand; PAM type: NRG; PAM sequence: TAG
ttgtgacagttttacagtgt

SEQ ID NO: 21148 - DNA, 20 bp, Artificial Sequence
  Description of Artificial Sequence: Synthetic oligonucleotide
  Target: SCNA; (-) strand; PAM type: NRG; PAM sequence: CAG
tcctggttgtgacagtttta

SEQ ID NO: 21149 - DNA, 20 bp, Artificial Sequence
  Description of Artificial Sequence: Synthetic oligonucleotide
  Target: SCNA; (-) strand; PAM type: NRG; PAM sequence: CAG
tgttgacttcctggttgtga

SEQ ID NO: 21150 - DNA, 20 bp, Artificial Sequence
  Description of Artificial Sequence: Synthetic oligonucleotide
  Target: SCNA; (-) strand; PAM type: NRG; PAM sequence: TGG
ttctatcagtgttgacttcc

SEQ ID NO: 21151 - DNA, 20 bp, Artificial Sequence
  Description of Artificial Sequence: Synthetic oligonucleotide
  Target: SCNA; (-) strand; PAM type: NRG; PAM sequence: CAG
cttggatggcagtgttctat

SEQ ID NO: 21152 - DNA, 20 bp, Artificial Sequence
  Description of Artificial Sequence: Synthetic oligonucleotide
  Target: SCNA; (-) strand; PAM type: NRG; PAM sequence: CAG
tcatcctctggcttggatgg

SEQ ID NO: 21153 - DNA, 20 bp, Artificial Sequence
  Description of Artificial Sequence: Synthetic oligonucleotide
  Target: SCNA; (-) strand; PAM type: NRG; PAM sequence: TGG
taatcatcctctggcttgga

SEQ ID NO: 21154 - DNA, 20 bp, Artificial Sequence
  Description of Artificial Sequence: Synthetic oligonucleotide
  Target: SCNA; (-) strand; PAM type: NRG; PAM sequence: TGG
aatttaatcatcctctggct

SEQ ID NO: 21155 - DNA, 20 bp, Artificial Sequence
  Description of Artificial Sequence: Synthetic oligonucleotide
  Target: SCNA; (-) strand; PAM type: NRG; PAM sequence: TGG
ataataatttaatcatcctc

SEQ ID NO: 21156 - DNA, 20 bp, Artificial Sequence
  Description of Artificial Sequence: Synthetic oligonucleotide
  Target: SCNA; (-) strand; PAM type: NRG; PAM sequence: AAG
cacccaattgagcacccaat

SEQ ID NO: 21157 - DNA, 20 bp, Artificial Sequence
  Description of Artificial Sequence: Synthetic oligonucleotide
  Target: SCNA; (-) strand; PAM type: NRG; PAM sequence: GAG
gtcatgctgaacacccaatt

SEQ ID NO: 21158 - DNA, 20 bp, Artificial Sequence
  Description of Artificial Sequence: Synthetic oligonucleotide
  Target: SCNA; (-) strand; PAM type: NRG; PAM sequence: TGG
gaaagccaggatgattatgg

SEQ ID NO: 21159 - DNA, 20 bp, Artificial Sequence
  Description of Artificial Sequence: Synthetic oligonucleotide
  Target: SCNA; (-) strand; PAM type: NRG; PAM sequence: TGG
agagaaagccaggatgatta

SEQ ID NO: 21160 - DNA, 20 bp, Artificial Sequence
  Description of Artificial Sequence: Synthetic oligonucleotide
  Target: SCNA; (-) strand; PAM type: NRG; PAM sequence: AGG
ggtggatgaaagagaaagcc

SEQ ID NO: 21161 - DNA, 20 bp, Artificial Sequence
  Description of Artificial Sequence: Synthetic oligonucleotide
  Target: SCNA; (-) strand; PAM type: NRG; PAM sequence: CAG
tggtggatgaaagagaaagc

SEQ ID NO: 21162 - DNA, 20 bp, Artificial Sequence
  Description of Artificial Sequence: Synthetic oligonucleotide
  Target: SCNA; (-) strand; PAM type: NRG; PAM sequence: AAG
gagatggtggatgaaagaga

SEQ ID NO: 21163 - DNA, 20 bp, Artificial Sequence
  Description of Artificial Sequence: Synthetic oligonucleotide
  Target: SCNA; (-) strand; PAM type: NRG; PAM sequence: GAG
gacagagatggtggatgaaa

SEQ ID NO: 21164 - DNA, 20 bp, Artificial Sequence
  Description of Artificial Sequence: Synthetic oligonucleotide
  Target: SCNA; (-) strand; PAM type: NRG; PAM sequence: AAG
gagacagagatggtggatga

SEQ ID NO: 21165 - DNA, 20 bp, Artificial Sequence
  Description of Artificial Sequence: Synthetic oligonucleotide
  Target: SCNA; (-) strand; PAM type: NRG; PAM sequence: TGG
agagagagagacagagatgg

SEQ ID NO: 21166 - DNA, 20 bp, Artificial Sequence
  Description of Artificial Sequence: Synthetic oligonucleotide
  Target: SCNA; (-) strand; PAM type: NRG; PAM sequence: TGG
aaaagagagagagacagaga

SEQ ID NO: 21167 - DNA, 20 bp, Artificial Sequence
  Description of Artificial Sequence: Synthetic oligonucleotide
  Target: SCNA; (-) strand; PAM type: NRG; PAM sequence: GAG
agggaaaagagagagagaca

SEQ ID NO: 21168 - DNA, 20 bp, Artificial Sequence
  Description of Artificial Sequence: Synthetic oligonucleotide
  Target: SCNA; (-) strand; PAM type: NRG; PAM sequence: CAG
ggagggaaaagagagagaga

SEQ ID NO: 21169 - DNA, 20 bp, Artificial Sequence
  Description of Artificial Sequence: Synthetic oligonucleotide
  Target: SCNA; (-) strand; PAM type: NRG; PAM sequence: GAG
agtaggagggaaaagagaga

SEQ ID NO: 21170 - DNA, 20 bp, Artificial Sequence
  Description of Artificial Sequence: Synthetic oligonucleotide
  Target: SCNA; (-) strand; PAM type: NRG; PAM sequence: GAG
gaagtaggagggaaaagaga

SEQ ID NO: 21171 - DNA, 20 bp, Artificial Sequence
  Description of Artificial Sequence: Synthetic oligonucleotide
  Target: SCNA; (-) strand; PAM type: NRG; PAM sequence: GAG
aggaagtaggagggaaaaga

SEQ ID NO: 21172 - DNA, 20 bp, Artificial Sequence
  Description of Artificial Sequence: Synthetic oligonucleotide
  Target: SCNA; (-) strand; PAM type: NRG; PAM sequence: GAG
ctaggaagtaggagggaaaa

SEQ ID NO: 21173 - DNA, 20 bp, Artificial Sequence
  Description of Artificial Sequence: Synthetic oligonucleotide
  Target: SCNA; (-) strand; PAM type: NRG; PAM sequence: AAG
gcctaggaagtaggagggaa

SEQ ID NO: 21174 - DNA, 20 bp, Artificial Sequence
  Description of Artificial Sequence: Synthetic oligonucleotide
  Target: SCNA; (-) strand; PAM type: NRG; PAM sequence: GGG
cagcagcctaggaagtagga

SEQ ID NO: 21175 - DNA, 20 bp, Artificial Sequence
  Description of Artificial Sequence: Synthetic oligonucleotide
  Target: SCNA; (-) strand; PAM type: NRG; PAM sequence: AGG
ccagcagcctaggaagtagg

SEQ ID NO: 21176 - DNA, 20 bp, Artificial Sequence
  Description of Artificial Sequence: Synthetic oligonucleotide
  Target: SCNA; (-) strand; PAM type: NRG; PAM sequence: GAG
cccagcagcctaggaagtag

SEQ ID NO: 21177 - DNA, 20 bp, Artificial Sequence
  Description of Artificial Sequence: Synthetic oligonucleotide
  Target: SCNA; (-) strand; PAM type: NRG; PAM sequence: AGG
tgcccagcagcctaggaagt

SEQ ID NO: 21178 - DNA, 20 bp, Artificial Sequence
  Description of Artificial Sequence: Synthetic oligonucleotide
  Target: SCNA; (-) strand; PAM type: NRG; PAM sequence: TAG
gtgcccagcagcctaggaag

SEQ ID NO: 21179 - DNA, 20 bp, Artificial Sequence
  Description of Artificial Sequence: Synthetic oligonucleotide
  Target: SCNA; (-) strand; PAM type: NRG; PAM sequence: AAG
agtgtgcccagcagcctagg

SEQ ID NO: 21180 - DNA, 20 bp, Artificial Sequence
  Description of Artificial Sequence: Synthetic oligonucleotide
  Target: SCNA; (-) strand; PAM type: NRG; PAM sequence: AGG
ggcagtgtgcccagcagcct

SEQ ID NO: 21181 - DNA, 20 bp, Artificial Sequence
  Description of Artificial Sequence: Synthetic oligonucleotide
  Target: SCNA; (-) strand; PAM type: NRG; PAM sequence: TAG
tggcagtgtgcccagcagcc

SEQ ID NO: 21182 - DNA, 20 bp, Artificial Sequence
  Description of Artificial Sequence: Synthetic oligonucleotide
  Target: SCNA; (-) strand; PAM type: NRG; PAM sequence: CAG
gtcaatggcagtgtgcccag

SEQ ID NO: 21183 - DNA, 20 bp, Artificial Sequence
  Description of Artificial Sequence: Synthetic oligonucleotide
  Target: SCNA; (-) strand; PAM type: NRG; PAM sequence: CAG
gaggtcaatggcagtgtgcc

SEQ ID NO: 21184 - DNA, 20 bp, Artificial Sequence
  Description of Artificial Sequence: Synthetic oligonucleotide
  Target: SCNA; (-) strand; PAM type: NRG; PAM sequence: CAG
tgtcaagcagaggtcaatgg

SEQ ID NO: 21185 - DNA, 20 bp, Artificial Sequence
  Description of Artificial Sequence: Synthetic oligonucleotide
  Target: SCNA; (-) strand; PAM type: NRG; PAM sequence: TGG
agatgtcaagcagaggtcaa

SEQ ID NO: 21186 - DNA, 20 bp, Artificial Sequence
  Description of Artificial Sequence: Synthetic oligonucleotide
  Target: SCNA; (-) strand; PAM type: NRG; PAM sequence: AGG
aggaaggagatgtcaagcag

SEQ ID NO: 21187 - DNA, 20 bp, Artificial Sequence
  Description of Artificial Sequence: Synthetic oligonucleotide
  Target: SCNA; (-) strand; PAM type: NRG; PAM sequence: GAG
gaggaaggagatgtcaagca

SEQ ID NO: 21188 - DNA, 20 bp, Artificial Sequence
  Description of Artificial Sequence: Synthetic oligonucleotide
  Target: SCNA; (-) strand; PAM type: NRG; PAM sequence: CAG
gggaggaaggagatgtcaag

SEQ ID NO: 21189 - DNA, 20 bp, Artificial Sequence
  Description of Artificial Sequence: Synthetic oligonucleotide
  Target: SCNA; (-) strand; PAM type: NRG; PAM sequence: AAG
agggggaggaaggagatgtc

SEQ ID NO: 21190 - DNA, 20 bp, Artificial Sequence
  Description of Artificial Sequence: Synthetic oligonucleotide
  Target: SCNA; (-) strand; PAM type: NRG; PAM sequence: GAG
ctgctgacagggggaggaag

SEQ ID NO: 21191 - DNA, 20 bp, Artificial Sequence
  Description of Artificial Sequence: Synthetic oligonucleotide
  Target: SCNA; (-) strand; PAM type: NRG; PAM sequence: AGG
ggctgctgacagggggagga

SEQ ID NO: 21192 - DNA, 20 bp, Artificial Sequence
  Description of Artificial Sequence: Synthetic oligonucleotide
  Target: SCNA; (-) strand; PAM type: NRG; PAM sequence: AAG
aggctgctgacagggggagg

SEQ ID NO: 21193 - DNA, 20 bp, Artificial Sequence
  Description of Artificial Sequence: Synthetic oligonucleotide
  Target: SCNA; (-) strand; PAM type: NRG; PAM sequence: AGG
gcaaggctgctgacaggggg

SEQ ID NO: 21194 - DNA, 20 bp, Artificial Sequence
  Description of Artificial Sequence: Synthetic oligonucleotide
  Target: SCNA; (-) strand; PAM type: NRG; PAM sequence: GAG
agcaaggctgctgacagggg

SEQ ID NO: 21195 - DNA, 20 bp, Artificial Sequence
  Description of Artificial Sequence: Synthetic oligonucleotide
  Target: SCNA; (-) strand; PAM type: NRG; PAM sequence: GGG
tgagcaaggctgctgacagg

SEQ ID NO: 21196 - DNA, 20 bp, Artificial Sequence
  Description of Artificial Sequence: Synthetic oligonucleotide
  Target: SCNA; (-) strand; PAM type: NRG; PAM sequence: GGG
ctgagcaaggctgctgacag

SEQ ID NO: 21197 - DNA, 20 bp, Artificial Sequence
  Description of Artificial Sequence: Synthetic oligonucleotide
  Target: SCNA; (-) strand; PAM type: NRG; PAM sequence: GGG
tctgagcaaggctgctgaca

SEQ ID NO: 21198 - DNA, 20 bp, Artificial Sequence
  Description of Artificial Sequence: Synthetic oligonucleotide
  Target: SCNA; (-) strand; PAM type: NRG; PAM sequence: AGG
gtctgagcaaggctgctgac

SEQ ID NO: 21199 - DNA, 20 bp, Artificial Sequence
  Description of Artificial Sequence: Synthetic oligonucleotide
  Target: SCNA; (-) strand; PAM type: NRG; PAM sequence: CAG
tgtctgagcaaggctgctga

SEQ ID NO: 21200 - DNA, 20 bp, Artificial Sequence
  Description of Artificial Sequence: Synthetic oligonucleotide
  Target: SCNA; (-) strand; PAM type: NRG; PAM sequence: AGG
tggtggttgatgtctgagca

SEQ ID NO: 21201 - DNA, 20 bp, Artificial Sequence
  Description of Artificial Sequence: Synthetic oligonucleotide
  Target: SCNA; (-) strand; PAM type: NRG; PAM sequence: AAG
ctggtggttgatgtctgagc

SEQ ID NO: 21202 - DNA, 20 bp, Artificial Sequence
  Description of Artificial Sequence: Synthetic oligonucleotide
  Target: SCNA; (-) strand; PAM type: NRG; PAM sequence: GAG
aacactggtggttgatgtct

SEQ ID NO: 21203 - DNA, 20 bp, Artificial Sequence
  Description of Artificial Sequence: Synthetic oligonucleotide
  Target: SCNA; (-) strand; PAM type: NRG; PAM sequence: TGG
tggggacatgcaaacactgg

SEQ ID NO: 21204 - DNA, 20 bp, Artificial Sequence
  Description of Artificial Sequence: Synthetic oligonucleotide
  Target: SCNA; (-) strand; PAM type: NRG; PAM sequence: TGG
ccatggggacatgcaaacac

SEQ ID NO: 21205 - DNA, 20 bp, Artificial Sequence
  Description of Artificial Sequence: Synthetic oligonucleotide
  Target: SCNA; (-) strand; PAM type: NRG; PAM sequence: GGG
tcccccttgttcttgccatg

SEQ ID NO: 21206 - DNA, 20 bp, Artificial Sequence
  Description of Artificial Sequence: Synthetic oligonucleotide
  Target: SCNA; (-) strand; PAM type: NRG; PAM sequence: GGG
ttcccccttgttcttgccat

SEQ ID NO: 21207 - DNA, 20 bp, Artificial Sequence
  Description of Artificial Sequence: Synthetic oligonucleotide
  Target: SCNA; (-) strand; PAM type: NRG; PAM sequence: TGG
cttcccccttgttcttgcca

SEQ ID NO: 21208 - DNA, 20 bp, Artificial Sequence
  Description of Artificial Sequence: Synthetic oligonucleotide
  Target: SCNA; (-) strand; PAM type: NRG; PAM sequence: TAG
ttctggcatttcttttcacg

SEQ ID NO: 21209 - DNA, 20 bp, Artificial Sequence
  Description of Artificial Sequence: Synthetic oligonucleotide
  Target: SCNA; (-) strand; PAM type: NRG; PAM sequence: TGG
attttcagaatgttactttc

SEQ ID NO: 21210 - DNA, 20 bp, Artificial Sequence
  Description of Artificial Sequence: Synthetic oligonucleotide
  Target: SCNA; (-) strand; PAM type: NRG; PAM sequence: CAG
atgcttttaccagtgatttt

SEQ ID NO: 21211 - DNA, 20 bp, Artificial Sequence
  Description of Artificial Sequence: Synthetic oligonucleotide
  Target: SCNA; (-) strand; PAM type: NRG; PAM sequence: CAG
gactttggggatgcttttac

SEQ ID NO: 21212 - DNA, 20 bp, Artificial Sequence
  Description of Artificial Sequence: Synthetic oligonucleotide
  Target: SCNA; (-) strand; PAM type: NRG; PAM sequence: GGG
tccatatcaggtagactttg

SEQ ID NO: 21213 - DNA, 20 bp, Artificial Sequence
  Description of Artificial Sequence: Synthetic oligonucleotide
  Target: SCNA; (-) strand; PAM type: NRG; PAM sequence: GGG
gtccatatcaggtagacttt

SEQ ID NO: 21214 - DNA, 20 bp, Artificial Sequence
  Description of Artificial Sequence: Synthetic oligonucleotide
  Target: SCNA; (-) strand; PAM type: NRG; PAM sequence: TGG
tgtccatatcaggtagactt

SEQ ID NO: 21215 - DNA, 20 bp, Artificial Sequence
  Description of Artificial Sequence: Synthetic oligonucleotide
  Target: SCNA; (-) strand; PAM type: NRG; PAM sequence: TAG
atttaaatgtccatatcagg

SEQ ID NO: 21216 - DNA, 20 bp, Artificial Sequence
  Description of Artificial Sequence: Synthetic oligonucleotide
  Target: SCNA; (-) strand; PAM type: NRG; PAM sequence: AGG
tgaatttaaatgtccatatc

SEQ ID NO: 21217 - DNA, 20 bp, Artificial Sequence
  Description of Artificial Sequence: Synthetic oligonucleotide
  Target: SCNA; (-) strand; PAM type: NRG; PAM sequence: CAG
atgaatttaaatgtccatat

SEQ ID NO: 21218 - DNA, 20 bp, Artificial Sequence
  Description of Artificial Sequence: Synthetic oligonucleotide
  Target: SCNA; (-) strand; PAM type: NRG; PAM sequence: CAG
cttagctgttttcttaaact

SEQ ID NO: 21219 - DNA, 20 bp, Artificial Sequence
  Description of Artificial Sequence: Synthetic oligonucleotide
  Target: SCNA; (-) strand; PAM type: NRG; PAM sequence: TAG
actctgatttctcaacctct

SEQ ID NO: 21220 - DNA, 20 bp, Artificial Sequence
  Description of Artificial Sequence: Synthetic oligonucleotide
  Target: SCNA; (-) strand; PAM type: NRG; PAM sequence: CAG
aaggagaattgtaagttggg

SEQ ID NO: 21221 - DNA, 20 bp, Artificial Sequence
  Description of Artificial Sequence: Synthetic oligonucleotide
  Target: SCNA; (-) strand; PAM type: NRG; PAM sequence: GGG
agcaaggagaattgtaagtt

SEQ ID NO: 21222 - DNA, 20 bp, Artificial Sequence
  Description of Artificial Sequence: Synthetic oligonucleotide
  Target: SCNA; (-) strand; PAM type: NRG; PAM sequence: TGG
cagcaaggagaattgtaagt

SEQ ID NO: 21223 - DNA, 20 bp, Artificial Sequence
  Description of Artificial Sequence: Synthetic oligonucleotide
  Target: SCNA; (-) strand; PAM type: NRG; PAM sequence: AAG
tggtcagcaaggagaattgt

SEQ ID NO: 21224 - DNA, 20 bp, Artificial Sequence
  Description of Artificial Sequence: Synthetic oligonucleotide
  Target: SCNA; (-) strand; PAM type: NRG; PAM sequence: GAG
aaaagatgctggtcagcaag

SEQ ID NO: 21225 - DNA, 20 bp, Artificial Sequence
  Description of Artificial Sequence: Synthetic oligonucleotide
  Target: SCNA; (-) strand; PAM type: NRG; PAM sequence: AGG
ccaaaagatgctggtcagca

SEQ ID NO: 21226 - DNA, 20 bp, Artificial Sequence
  Description of Artificial Sequence: Synthetic oligonucleotide
  Target: SCNA; (-) strand; PAM type: NRG; PAM sequence: AAG
gccaaaagatgctggtcagc

SEQ ID NO: 21227 - DNA, 20 bp, Artificial Sequence
  Description of Artificial Sequence: Synthetic oligonucleotide
  Target: SCNA; (-) strand; PAM type: NRG; PAM sequence: CAG
ggcagccaaaagatgctggt

SEQ ID NO: 21228 - DNA, 20 bp, Artificial Sequence
  Description of Artificial Sequence: Synthetic oligonucleotide
  Target: SCNA; (-) strand; PAM type: NRG; PAM sequence: TGG
gagaggcagccaaaagatgc

SEQ ID NO: 21229 - DNA, 20 bp, Artificial Sequence
  Description of Artificial Sequence: Synthetic oligonucleotide
  Target: SCNA; (-) strand; PAM type: NRG; PAM sequence: AAG
ttattttgagaggcagccaa

SEQ ID NO: 21230 - DNA, 20 bp, Artificial Sequence
  Description of Artificial Sequence: Synthetic oligonucleotide
  Target: SCNA; (-) strand; PAM type: NRG; PAM sequence: CAG
tatcctgttattttgagagg

SEQ ID NO: 21231 - DNA, 20 bp, Artificial Sequence
  Description of Artificial Sequence: Synthetic oligonucleotide
  Target: SCNA; (-) strand; PAM type: NRG; PAM sequence: AGG
ccttatcctgttattttgag

SEQ ID NO: 21232 - DNA, 20 bp, Artificial Sequence
  Description of Artificial Sequence: Synthetic oligonucleotide
  Target: SCNA; (-) strand; PAM type: NRG; PAM sequence: GAG
gccttatcctgttattttga

SEQ ID NO: 21233 - DNA, 20 bp, Artificial Sequence
  Description of Artificial Sequence: Synthetic oligonucleotide
  Target: SCNA; (-) strand; PAM type: NRG; PAM sequence: GAG
gtgccttatcctgttatttt

SEQ ID NO: 21234 - DNA, 20 bp, Artificial Sequence
  Description of Artificial Sequence: Synthetic oligonucleotide
  Target: SCNA; (-) strand; PAM type: NRG; PAM sequence: CAG
tttaatccaagtgaagaatt

SEQ ID NO: 21235 - DNA, 20 bp, Artificial Sequence
  Description of Artificial Sequence: Synthetic oligonucleotide
  Target: SCNA; (-) strand; PAM type: NRG; PAM sequence: AAG
attcagatttaatccaagtg

SEQ ID NO: 21236 - DNA, 20 bp, Artificial Sequence
  Description of Artificial Sequence: Synthetic oligonucleotide
  Target: SCNA; (-) strand; PAM type: NRG; PAM sequence: AAG
ggaagattcagatttaatcc

SEQ ID NO: 21237 - DNA, 20 bp, Artificial Sequence
  Description of Artificial Sequence: Synthetic oligonucleotide
  Target: SCNA; (-) strand; PAM type: NRG; PAM sequence: CAG
ggaataagagaaggaagatt

SEQ ID NO: 21238 - DNA, 20 bp, Artificial Sequence
  Description of Artificial Sequence: Synthetic oligonucleotide
  Target: SCNA; (-) strand; PAM type: NRG; PAM sequence: AAG
agcaaaggaataagagaagg

SEQ ID NO: 21239 - DNA, 20 bp, Artificial Sequence
  Description of Artificial Sequence: Synthetic oligonucleotide
  Target: SCNA; (-) strand; PAM type: NRG; PAM sequence: AGG
ataagcaaaggaataagaga

SEQ ID NO: 21240 - DNA, 20 bp, Artificial Sequence
  Description of Artificial Sequence: Synthetic oligonucleotide
  Target: SCNA; (-) strand; PAM type: NRG; PAM sequence: AAG
tataagcaaaggaataagag

SEQ ID NO: 21241 - DNA, 20 bp, Artificial Sequence
  Description of Artificial Sequence: Synthetic oligonucleotide
  Target: SCNA; (-) strand; PAM type: NRG; PAM sequence: GAG
ttttataagcaaaggaataa

SEQ ID NO: 21242 - DNA, 20 bp, Artificial Sequence
  Description of Artificial Sequence: Synthetic oligonucleotide
  Target: SCNA; (-) strand; PAM type: NRG; PAM sequence: AAG
tattttataagcaaaggaat

SEQ ID NO: 21243 - DNA, 20 bp, Artificial Sequence
  Description of Artificial Sequence: Synthetic oligonucleotide
  Target: SCNA; (-) strand; PAM type: NRG; PAM sequence: AGG
ggaagatattttataagcaa

SEQ ID NO: 21244 - DNA, 20 bp, Artificial Sequence
  Description of Artificial Sequence: Synthetic oligonucleotide
  Target: SCNA; (-) strand; PAM type: NRG; PAM sequence: AAG
aggaagatattttataagca

SEQ ID NO: 21245 - DNA, 20 bp, Artificial Sequence
  Description of Artificial Sequence: Synthetic oligonucleotide
  Target: SCNA; (-) strand; PAM type: NRG; PAM sequence: AAG
agcctaggaagatattttat

SEQ ID NO: 21246 - DNA, 20 bp, Artificial Sequence
  Description of Artificial Sequence: Synthetic oligonucleotide
  Target: SCNA; (-) strand; PAM type: NRG; PAM sequence: AAG
tagactgtctcaagcctagg

SEQ ID NO: 21247 - DNA, 20 bp, Artificial Sequence
  Description of Artificial Sequence: Synthetic oligonucleotide
  Target: SCNA; (-) strand; PAM type: NRG; PAM sequence: AGG
ctctagactgtctcaagcct

SEQ ID NO: 21248 - DNA, 20 bp, Artificial Sequence
  Description of Artificial Sequence: Synthetic oligonucleotide
  Target: SCNA; (-) strand; PAM type: NRG; PAM sequence: TAG
tctctagactgtctcaagcc

SEQ ID NO: 21249 - DNA, 20 bp, Artificial Sequence
  Description of Artificial Sequence: Synthetic oligonucleotide
  Target: SCNA; (-) strand; PAM type: NRG; PAM sequence: AAG
ggtggtctctagactgtctc

SEQ ID NO: 21250 - DNA, 20 bp, Artificial Sequence
  Description of Artificial Sequence: Synthetic oligonucleotide
  Target: SCNA; (-) strand; PAM type: NRG; PAM sequence: TAG
cagtgttctcaggtggtctc

SEQ ID NO: 21251 - DNA, 20 bp, Artificial Sequence
  Description of Artificial Sequence: Synthetic oligonucleotide
  Target: SCNA; (-) strand; PAM type: NRG; PAM sequence: TGG
gaacattcagtgttctcagg

SEQ ID NO: 21252 - DNA, 20 bp, Artificial Sequence
  Description of Artificial Sequence: Synthetic oligonucleotide
  Target: SCNA; (-) strand; PAM type: NRG; PAM sequence: AGG
aaggaacattcagtgttctc

SEQ ID NO: 21253 - DNA, 20 bp, Artificial Sequence
  Description of Artificial Sequence: Synthetic oligonucleotide
  Target: SCNA; (-) strand; PAM type: NRG; PAM sequence: CAG
aaaggaacattcagtgttct

SEQ ID NO: 21254 - DNA, 20 bp, Artificial Sequence
  Description of Artificial Sequence: Synthetic oligonucleotide
  Target: SCNA; (-) strand; PAM type: NRG; PAM sequence: CAG
ggatactcaaaaggaacatt

SEQ ID NO: 21255 - DNA, 20 bp, Artificial Sequence
  Description of Artificial Sequence: Synthetic oligonucleotide
  Target: SCNA; (-) strand; PAM type: NRG; PAM sequence: AGG
tatgctactggatactcaaa

SEQ ID NO: 21256 - DNA, 20 bp, Artificial Sequence
  Description of Artificial Sequence: Synthetic oligonucleotide
  Target: SCNA; (-) strand; PAM type: NRG; PAM sequence: AAG
ttatgctactggatactcaa

SEQ ID NO: 21257 - DNA, 20 bp, Artificial Sequence
  Description of Artificial Sequence: Synthetic oligonucleotide
  Target: SCNA; (-) strand; PAM type: NRG; PAM sequence: TGG
gacagtgtgagttatgctac

SEQ ID NO: 21258 - DNA, 20 bp, Artificial Sequence
  Description of Artificial Sequence: Synthetic oligonucleotide
  Target: SCNA; (-) strand; PAM type: NRG; PAM sequence: GAG
taaggccttgttgacagtgt

SEQ ID NO: 21259 - DNA, 20 bp, Artificial Sequence
  Description of Artificial Sequence: Synthetic oligonucleotide
  Target: SCNA; (-) strand; PAM type: NRG; PAM sequence: CAG
cgtaagtaaggccttgttga

SEQ ID NO: 21260 - DNA, 20 bp, Artificial Sequence
  Description of Artificial Sequence: Synthetic oligonucleotide
  Target: SCNA; (-) strand; PAM type: NRG; PAM sequence: AGG
atgttcagcacacgtaagta

SEQ ID NO: 21261 - DNA, 20 bp, Artificial Sequence
  Description of Artificial Sequence: Synthetic oligonucleotide
  Target: SCNA; (-) strand; PAM type: NRG; PAM sequence: AAG
aatgttcagcacacgtaagt

SEQ ID NO: 21262 - DNA, 20 bp, Artificial Sequence
  Description of Artificial Sequence: Synthetic oligonucleotide
  Target: SCNA; (-) strand; PAM type: NRG; PAM sequence: AAG
taaaaatgttcagcacacgt

SEQ ID NO: 21263 - DNA, 20 bp, Artificial Sequence
  Description of Artificial Sequence: Synthetic oligonucleotide
  Target: SCNA; (-) strand; PAM type: NRG; PAM sequence: CAG
tacaaaaatataaaaatgtt

SEQ ID NO: 21264 - DNA, 20 bp, Artificial Sequence
  Description of Artificial Sequence: Synthetic oligonucleotide
  Target: SCNA; (-) strand; PAM type: NRG; PAM sequence: AGG
cagtgtttggtttgtgataa

SEQ ID NO: 21265 - DNA, 20 bp, Artificial Sequence
  Description of Artificial Sequence: Synthetic oligonucleotide
  Target: SCNA; (-) strand; PAM type: NRG; PAM sequence: AAG
gcagtgtttggtttgtgata

SEQ ID NO: 21266 - DNA, 20 bp, Artificial Sequence
  Description of Artificial Sequence: Synthetic oligonucleotide
  Target: SCNA; (-) strand; PAM type: NRG; PAM sequence: TGG
ttttataactaagcagtgtt

SEQ ID NO: 21267 - DNA, 20 bp, Artificial Sequence
  Description of Artificial Sequence: Synthetic oligonucleotide
  Target: SCNA; (-) strand; PAM type: NRG; PAM sequence: CAG
acatatattttataactaag

SEQ ID NO: 21268 - DNA, 20 bp, Artificial Sequence
  Description of Artificial Sequence: Synthetic oligonucleotide
  Target: SCNA; (-) strand; PAM type: NRG; PAM sequence: AAG
tacacatatattttataact

SEQ ID NO: 21269 - DNA, 20 bp, Artificial Sequence
  Description of Artificial Sequence: Synthetic oligonucleotide
  Target: SCNA; (-) strand; PAM type: NRG; PAM sequence: GAG
tcttctgtagctatattttg

SEQ ID NO: 21270 - DNA, 20 bp, Artificial Sequence
  Description of Artificial Sequence: Synthetic oligonucleotide
  Target: SCNA; (-) strand; PAM type: NRG; PAM sequence: TGG
tttcttctgtagctatattt

SEQ ID NO: 21271 - DNA, 20 bp, Artificial Sequence
  Description of Artificial Sequence: Synthetic oligonucleotide
  Target: SCNA; (-) strand; PAM type: NRG; PAM sequence: TAG
tataagccccttttcttctg

SEQ ID NO: 21272 - DNA, 20 bp, Artificial Sequence
  Description of Artificial Sequence: Synthetic oligonucleotide
  Target: SCNA; (-) strand; PAM type: NRG; PAM sequence: AAG
gtgtactatacacttgttat

SEQ ID NO: 21273 - DNA, 20 bp, Artificial Sequence
  Description of Artificial Sequence: Synthetic oligonucleotide
  Target: SCNA; (-) strand; PAM type: NRG; PAM sequence: AAG
atacctcctacatagaaatg

SEQ ID NO: 21274 - DNA, 20 bp, Artificial Sequence
  Description of Artificial Sequence: Synthetic oligonucleotide
  Target: SCNA; (-) strand; PAM type: NRG; PAM sequence: TAG
ggaatcttatacctcctaca

SEQ ID NO: 21275 - DNA, 20 bp, Artificial Sequence
  Description of Artificial Sequence: Synthetic oligonucleotide
  Target: SCNA; (-) strand; PAM type: NRG; PAM sequence: AGG
gaagggaatgtatttttagc

SEQ ID NO: 21276 - DNA, 20 bp, Artificial Sequence
  Description of Artificial Sequence: Synthetic oligonucleotide
  Target: SCNA; (-) strand; PAM type: NRG; PAM sequence: CAG
ggaagggaatgtatttttag

SEQ ID NO: 21277 - DNA, 20 bp, Artificial Sequence
  Description of Artificial Sequence: Synthetic oligonucleotide
  Target: SCNA; (-) strand; PAM type: NRG; PAM sequence: TAG
cagggaagggaatgtatttt

SEQ ID NO: 21278 - DNA, 20 bp, Artificial Sequence
  Description of Artificial Sequence: Synthetic oligonucleotide
  Target: SCNA; (-) strand; PAM type: NRG; PAM sequence: GGG
tattgtgaatattcagggaa

SEQ ID NO: 21279 - DNA, 20 bp, Artificial Sequence
  Description of Artificial Sequence: Synthetic oligonucleotide
  Target: SCNA; (-) strand; PAM type: NRG; PAM sequence: AGG
ctattgtgaatattcaggga

SEQ ID NO: 21280 - DNA, 20 bp, Artificial Sequence
  Description of Artificial Sequence: Synthetic oligonucleotide
  Target: SCNA; (-) strand; PAM type: NRG; PAM sequence: AAG
gctattgtgaatattcaggg

SEQ ID NO: 21281 - DNA, 20 bp, Artificial Sequence
  Description of Artificial Sequence: Synthetic oligonucleotide
  Target: SCNA; (-) strand; PAM type: NRG; PAM sequence: GGG
caagctattgtgaatattca

SEQ ID NO: 21282 - DNA, 20 bp, Artificial Sequence
  Description of Artificial Sequence: Synthetic oligonucleotide
  Target: SCNA; (-) strand; PAM type: NRG; PAM sequence: AGG
gcaagctattgtgaatattc

SEQ ID NO: 21283 - DNA, 20 bp, Artificial Sequence
  Description of Artificial Sequence: Synthetic oligonucleotide
  Target: SCNA; (-) strand; PAM type: NRG; PAM sequence: CAG
ggcaagctattgtgaatatt

SEQ ID NO: 21284 - DNA, 20 bp, Artificial Sequence
  Description of Artificial Sequence: Synthetic oligonucleotide
  Target: SCNA; (-) strand; PAM type: NRG; PAM sequence: AAG
catttgtgagaatttttggc

SEQ ID NO: 21285 - DNA, 20 bp, Artificial Sequence
  Description of Artificial Sequence: Synthetic oligonucleotide
  Target: SCNA; (-) strand; PAM type: NRG; PAM sequence: TGG
tattcatttgtgagaatttt

SEQ ID NO: 21286 - DNA, 20 bp, Artificial Sequence
  Description of Artificial Sequence: Synthetic oligonucleotide
  Target: SCNA; (-) strand; PAM type: NRG; PAM sequence: GAG
ttctgtctttattcatttgt

SEQ ID NO: 21287 - DNA, 20 bp, Artificial Sequence
  Description of Artificial Sequence: Synthetic oligonucleotide
  Target: SCNA; (-) strand; PAM type: NRG; PAM sequence: CAG
ggacacttaatacagttaat

SEQ ID NO: 21288 - DNA, 20 bp, Artificial Sequence
  Description of Artificial Sequence: Synthetic oligonucleotide
  Target: SCNA; (-) strand; PAM type: NRG; PAM sequence: CAG
attaagtaggacacttaata

SEQ ID NO: 21289 - DNA, 20 bp, Artificial Sequence
  Description of Artificial Sequence: Synthetic oligonucleotide
  Target: SCNA; (-) strand; PAM type: NRG; PAM sequence: AGG
gaattattattgtattaagt

SEQ ID NO: 21290 - DNA, 20 bp, Artificial Sequence
  Description of Artificial Sequence: Synthetic oligonucleotide
  Target: SCNA; (-) strand; PAM type: NRG; PAM sequence: TAG
tgaattattattgtattaag

SEQ ID NO: 21291 - DNA, 20 bp, Artificial Sequence
  Description of Artificial Sequence: Synthetic oligonucleotide
  Target: SCNA; (-) strand; PAM type: NRG; PAM sequence: AAG
acctgaattattattgtatt

SEQ ID NO: 21292 - DNA, 20 bp, Artificial Sequence
  Description of Artificial Sequence: Synthetic oligonucleotide
  Target: SCNA; (-) strand; PAM type: NRG; PAM sequence: GAG
attaattgggaggtttttat

SEQ ID NO: 21293 - DNA, 20 bp, Artificial Sequence
  Description of Artificial Sequence: Synthetic oligonucleotide
  Target: SCNA; (-) strand; PAM type: NRG; PAM sequence: AGG
tacatagtacattaattggg

SEQ ID NO: 21294 - DNA, 20 bp, Artificial Sequence
  Description of Artificial Sequence: Synthetic oligonucleotide
  Target: SCNA; (-) strand; PAM type: NRG; PAM sequence: GAG
atacatagtacattaattgg

SEQ ID NO: 21295 - DNA, 20 bp, Artificial Sequence
  Description of Artificial Sequence: Synthetic oligonucleotide
  Target: SCNA; (-) strand; PAM type: NRG; PAM sequence: GGG
ttatacatagtacattaatt

SEQ ID NO: 21296 - DNA, 20 bp, Artificial Sequence
  Description of Artificial Sequence: Synthetic oligonucleotide
  Target: SCNA; (-) strand; PAM type: NRG; PAM sequence: TGG
tttatacatagtacattaat

SEQ ID NO: 21297 - DNA, 20 bp, Artificial Sequence
  Description of Artificial Sequence: Synthetic oligonucleotide
  Target: SCNA; (-) strand; PAM type: NRG; PAM sequence: TAG
tacttgataaaatttataca

SEQ ID NO: 21298 - DNA, 20 bp, Artificial Sequence
  Description of Artificial Sequence: Synthetic oligonucleotide
  Target: SCNA; (-) strand; PAM type: NRG; PAM sequence: AAG
accttcctcttaattcatca

SEQ ID NO: 21299 - DNA, 20 bp, Artificial Sequence
  Description of Artificial Sequence: Synthetic oligonucleotide
  Target: SCNA; (-) strand; PAM type: NRG; PAM sequence: CAG
ccaatttaataatattattg

SEQ ID NO: 21300 - DNA, 20 bp, Artificial Sequence
  Description of Artificial Sequence: Synthetic oligonucleotide
  Target: SCNA; (-) strand; PAM type: NRG; PAM sequence: TAG
tcatttgtcttggttccttt

SEQ ID NO: 21301 - DNA, 20 bp, Artificial Sequence
  Description of Artificial Sequence: Synthetic oligonucleotide
  Target: SCNA; (-) strand; PAM type: NRG; PAM sequence: TGG
ttatatatcttcatttgtct

SEQ ID NO: 21302 - DNA, 20 bp, Artificial Sequence
  Description of Artificial Sequence: Synthetic oligonucleotide
  Target: SCNA; (-) strand; PAM type: NRG; PAM sequence: TAG
ttttagtctaaaataatgat

SEQ ID NO: 21303 - DNA, 20 bp, Artificial Sequence
  Description of Artificial Sequence: Synthetic oligonucleotide
  Target: SCNA; (-) strand; PAM type: NRG; PAM sequence: TAG
actatgttcttttcctgttt

SEQ ID NO: 21304 - DNA, 20 bp, Artificial Sequence
  Description of Artificial Sequence: Synthetic oligonucleotide
  Target: SCNA; (-) strand; PAM type: NRG; PAM sequence: TAG
aaactaaggagacagtgtcc

SEQ ID NO: 21305 - DNA, 20 bp, Artificial Sequence
  Description of Artificial Sequence: Synthetic oligonucleotide
  Target: SCNA; (-) strand; PAM type: NRG; PAM sequence: CAG
aacattaaaaactaaggaga

SEQ ID NO: 21306 - DNA, 20 bp, Artificial Sequence
  Description of Artificial Sequence: Synthetic oligonucleotide
  Target: SCNA; (-) strand; PAM type: NRG; PAM sequence: GAG
aagaaacattaaaaactaag

SEQ ID NO: 21307 - DNA, 20 bp, Artificial Sequence
  Description of Artificial Sequence: Synthetic oligonucleotide
  Target: SCNA; (-) strand; PAM type: NRG; PAM sequence: AGG
ggaagaaacattaaaaacta

SEQ ID NO: 21308 - DNA, 20 bp, Artificial Sequence
  Description of Artificial Sequence: Synthetic oligonucleotide
  Target: SCNA; (-) strand; PAM type: NRG; PAM sequence: AAG
gggaagaaacattaaaaact

SEQ ID NO: 21309 - DNA, 20 bp, Artificial Sequence
  Description of Artificial Sequence: Synthetic oligonucleotide
  Target: SCNA; (-) strand; PAM type: NRG; PAM sequence: AAG
atgtgcaaacccatctgggg

SEQ ID NO: 21310 - DNA, 20 bp, Artificial Sequence
  Description of Artificial Sequence: Synthetic oligonucleotide
  Target: SCNA; (-) strand; PAM type: NRG; PAM sequence: GGG
aagatgtgcaaacccatctg

SEQ ID NO: 21311 - DNA, 20 bp, Artificial Sequence
  Description of Artificial Sequence: Synthetic oligonucleotide
  Target: SCNA; (-) strand; PAM type: NRG; PAM sequence: GGG
aaagatgtgcaaacccatct

SEQ ID NO: 21312 - DNA, 20 bp, Artificial Sequence
  Description of Artificial Sequence: Synthetic oligonucleotide
  Target: SCNA; (-) strand; PAM type: NRG; PAM sequence: TGG
aaaagatgtgcaaacccatc

SEQ ID NO: 21313 - DNA, 20 bp, Artificial Sequence
  Description of Artificial Sequence: Synthetic oligonucleotide
  Target: SCNA; (-) strand; PAM type: NRG; PAM sequence: AAG
taagttcttttttcaggcaa

SEQ ID NO: 21314 - DNA, 20 bp, Artificial Sequence
  Description of Artificial Sequence: Synthetic oligonucleotide
  Target: SCNA; (-) strand; PAM type: NRG; PAM sequence: AGG
tggaaataagttcttttttc

SEQ ID NO: 21315 - DNA, 20 bp, Artificial Sequence
  Description of Artificial Sequence: Synthetic oligonucleotide
  Target: SCNA; (-) strand; PAM type: NRG; PAM sequence: CAG
gtggaaataagttctttttt

SEQ ID NO: 21316 - DNA, 20 bp, Artificial Sequence
  Description of Artificial Sequence: Synthetic oligonucleotide
  Target: SCNA; (-) strand; PAM type: NRG; PAM sequence: AAG
gtaacttgtgtggtggaaat

SEQ ID NO: 21317 - DNA, 20 bp, Artificial Sequence
  Description of Artificial Sequence: Synthetic oligonucleotide
  Target: SCNA; (-) strand; PAM type: NRG; PAM sequence: TGG
atttaatgtaacttgtgtgg

SEQ ID NO: 21318 - DNA, 20 bp, Artificial Sequence
  Description of Artificial Sequence: Synthetic oligonucleotide
  Target: SCNA; (-) strand; PAM type: NRG; PAM sequence: TGG
cgtatttaatgtaacttgtg

SEQ ID NO: 21319 - DNA, 20 bp, Artificial Sequence
  Description of Artificial Sequence: Synthetic oligonucleotide
  Target: SCNA; (-) strand; PAM type: NRG; PAM sequence: AAG
ttcagctccctaggagctaa

SEQ ID NO: 21320 - DNA, 20 bp, Artificial Sequence
  Description of Artificial Sequence: Synthetic oligonucleotide
  Target: SCNA; (-) strand; PAM type: NRG; PAM sequence: GAG
cttgcctttcagctccctag

SEQ ID NO: 21321 - DNA, 20 bp, Artificial Sequence
  Description of Artificial Sequence: Synthetic oligonucleotide
  Target: SCNA; (-) strand; PAM type: NRG; PAM sequence: AGG
gacttgcctttcagctccct

SEQ ID NO: 21322 - DNA, 20 bp, Artificial Sequence
  Description of Artificial Sequence: Synthetic oligonucleotide
  Target: SCNA; (-) strand; PAM type: NRG; PAM sequence: TAG
ggacttgcctttcagctccc

SEQ ID NO: 21323 - DNA, 20 bp, Artificial Sequence
  Description of Artificial Sequence: Synthetic oligonucleotide
  Target: SCNA; (-) strand; PAM type: NRG; PAM sequence: CAG
ttcattttggacttgccttt

SEQ ID NO: 21324 - DNA, 20 bp, Artificial Sequence
  Description of Artificial Sequence: Synthetic oligonucleotide
  Target: SCNA; (-) strand; PAM type: NRG; PAM sequence: TGG
acgaataaaaaagttcattt

SEQ ID NO: 21325 - DNA, 20 bp, Artificial Sequence
  Description of Artificial Sequence: Synthetic oligonucleotide
  Target: SCNA; (-) strand; PAM type: NRG; PAM sequence: AAG
tcatgacataacgaataaaa

SEQ ID NO: 21326 - DNA, 20 bp, Artificial Sequence
  Description of Artificial Sequence: Synthetic oligonucleotide
  Target: SCNA; (-) strand; PAM type: NRG; PAM sequence: TAG
gtattaataatgcagtgtta

SEQ ID NO: 21327 - DNA, 20 bp, Artificial Sequence
  Description of Artificial Sequence: Synthetic oligonucleotide
  Target: SCNA; (-) strand; PAM type: NRG; PAM sequence: CAG
ttagaggtgtattaataatg

SEQ ID NO: 21328 - DNA, 20 bp, Artificial Sequence
  Description of Artificial Sequence: Synthetic oligonucleotide
  Target: SCNA; (-) strand; PAM type: NRG; PAM sequence: AGG
ttttaggctttattgattag

SEQ ID NO: 21329 - DNA, 20 bp, Artificial Sequence
  Description of Artificial Sequence: Synthetic oligonucleotide
  Target: SCNA; (-) strand; PAM type: NRG; PAM sequence: GAG
tttttaggctttattgatta

SEQ ID NO: 21330 - DNA, 20 bp, Artificial Sequence
  Description of Artificial Sequence: Synthetic oligonucleotide
  Target: SCNA; (-) strand; PAM type: NRG; PAM sequence: TAG
gatttttaggctttattgat

SEQ ID NO: 21331 - DNA, 20 bp, Artificial Sequence
  Description of Artificial Sequence: Synthetic oligonucleotide
  Target: SCNA; (-) strand; PAM type: NRG; PAM sequence: AGG
tctcttgggaatggattttt

SEQ ID NO: 21332 - DNA, 20 bp, Artificial Sequence
  Description of Artificial Sequence: Synthetic oligonucleotide
  Target: SCNA; (-) strand; PAM type: NRG; PAM sequence: TAG
gtctcttgggaatggatttt

SEQ ID NO: 21333 - DNA, 20 bp, Artificial Sequence
  Description of Artificial Sequence: Synthetic oligonucleotide
  Target: SCNA; (-) strand; PAM type: NRG; PAM sequence: TGG
aaatctgggtctcttgggaa

SEQ ID NO: 21334 - DNA, 20 bp, Artificial Sequence
  Description of Artificial Sequence: Synthetic oligonucleotide
  Target: SCNA; (-) strand; PAM type: NRG; PAM sequence: GGG
tagagaaatctgggtctctt

SEQ ID NO: 21335 - DNA, 20 bp, Artificial Sequence
  Description of Artificial Sequence: Synthetic oligonucleotide
  Target: SCNA; (-) strand; PAM type: NRG; PAM sequence: TGG
gtagagaaatctgggtctct

SEQ ID NO: 21336 - DNA, 20 bp, Artificial Sequence
  Description of Artificial Sequence: Synthetic oligonucleotide
  Target: SCNA; (-) strand; PAM type: NRG; PAM sequence: GGG
tagaactggtagagaaatct

SEQ ID NO: 21337 - DNA, 20 bp, Artificial Sequence
  Description of Artificial Sequence: Synthetic oligonucleotide
  Target: SCNA; (-) strand; PAM type: NRG; PAM sequence: TGG
ctagaactggtagagaaatc

SEQ ID NO: 21338 - DNA, 20 bp, Artificial Sequence
  Description of Artificial Sequence: Synthetic oligonucleotide
  Target: SCNA; (-) strand; PAM type: NRG; PAM sequence: GAG
tagtacaactagaactggta

SEQ ID NO: 21339 - DNA, 20 bp, Artificial Sequence
  Description of Artificial Sequence: Synthetic oligonucleotide
  Target: SCNA; (-) strand; PAM type: NRG; PAM sequence: TAG
actagtacaactagaactgg

SEQ ID NO: 21340 - DNA, 20 bp, Artificial Sequence
  Description of Artificial Sequence: Synthetic oligonucleotide
  Target: SCNA; (-) strand; PAM type: NRG; PAM sequence: TGG
ataactagtacaactagaac

SEQ ID NO: 21341 - DNA, 20 bp, Artificial Sequence
  Description of Artificial Sequence: Synthetic oligonucleotide
  Target: SCNA; (-) strand; PAM type: NRG; PAM sequence: TAG
ctgagaataactagtacaac

SEQ ID NO: 21342 - DNA, 20 bp, Artificial Sequence
  Description of Artificial Sequence: Synthetic oligonucleotide
  Target: SCNA; (-) strand; PAM type: NRG; PAM sequence: TAG
aacttaccgctgagaataac

SEQ ID NO: 21343 - DNA, 20 bp, Artificial Sequence
  Description of Artificial Sequence: Synthetic oligonucleotide
  Target: SCNA; (-) strand; PAM type: NRG; PAM sequence: GAG
aactaggaaaacttaccgct

SEQ ID NO: 21344 - DNA, 20 bp, Artificial Sequence
  Description of Artificial Sequence: Synthetic oligonucleotide
  Target: SCNA; (-) strand; PAM type: NRG; PAM sequence: AGG
tcattttaatattaagaact

SEQ ID NO: 21345 - DNA, 20 bp, Artificial Sequence
  Description of Artificial Sequence: Synthetic oligonucleotide
  Target: SCNA; (-) strand; PAM type: NRG; PAM sequence: TAG
ctcattttaatattaagaac

SEQ ID NO: 21346 - DNA, 20 bp, Artificial Sequence
  Description of Artificial Sequence: Synthetic oligonucleotide
  Target: SCNA; (-) strand; PAM type: NRG; PAM sequence: AAG
ggacctctcattttaatatt

SEQ ID NO: 21347 - DNA, 20 bp, Artificial Sequence
  Description of Artificial Sequence: Synthetic oligonucleotide
  Target: SCNA; (-) strand; PAM type: NRG; PAM sequence: TGG
cctccaccacctagagcctc

SEQ ID NO: 21348 - DNA, 20 bp, Artificial Sequence
  Description of Artificial Sequence: Synthetic oligonucleotide
  Target: SCNA; (-) strand; PAM type: NRG; PAM sequence: GAG
agcaacccctccaccaccta

SEQ ID NO: 21349 - DNA, 20 bp, Artificial Sequence
  Description of Artificial Sequence: Synthetic oligonucleotide
  Target: SCNA; (-) strand; PAM type: NRG; PAM sequence: TAG
ctagcaacccctccaccacc

SEQ ID NO: 21350 - DNA, 20 bp, Artificial Sequence
  Description of Artificial Sequence: Synthetic oligonucleotide
  Target: SCNA; (-) strand; PAM type: NRG; PAM sequence: TAG
taggacaccctccttttagc

SEQ ID NO: 21351 - DNA, 20 bp, Artificial Sequence
  Description of Artificial Sequence: Synthetic oligonucleotide
  Target: SCNA; (-) strand; PAM type: NRG; PAM sequence: TAG
tctgtaggacaccctccttt

SEQ ID NO: 21352 - DNA, 20 bp, Artificial Sequence
  Description of Artificial Sequence: Synthetic oligonucleotide
  Target: SCNA; (-) strand; PAM type: NRG; PAM sequence: AGG
gagactctgtccctttctgt

SEQ ID NO: 21353 - DNA, 20 bp, Artificial Sequence
  Description of Artificial Sequence: Synthetic oligonucleotide
  Target: SCNA; (-) strand; PAM type: NRG; PAM sequence: TAG
ggagactctgtccctttctg

SEQ ID NO: 21354 - DNA, 20 bp, Artificial Sequence
  Description of Artificial Sequence: Synthetic oligonucleotide
  Target: SCNA; (-) strand; PAM type: NRG; PAM sequence: GAG
accatccagcattgctcatg

SEQ ID NO: 21355 - DNA, 20 bp, Artificial Sequence
  Description of Artificial Sequence: Synthetic oligonucleotide
  Target: SCNA; (-) strand; PAM type: NRG; PAM sequence: TGG
gtaccatccagcattgctca

SEQ ID NO: 21356 - DNA, 20 bp, Artificial Sequence
  Description of Artificial Sequence: Synthetic oligonucleotide
  Target: SCNA; (-) strand; PAM type: NRG; PAM sequence: CAG
actggaccacaggtaccatc

SEQ ID NO: 21357 - DNA, 20 bp, Artificial Sequence
  Description of Artificial Sequence: Synthetic oligonucleotide
  Target: SCNA; (-) strand; PAM type: NRG; PAM sequence: AGG
tgtgccaagaactggaccac

SEQ ID NO: 21358 - DNA, 20 bp, Artificial Sequence
  Description of Artificial Sequence: Synthetic oligonucleotide
  Target: SCNA; (-) strand; PAM type: NRG; PAM sequence: CAG
atgtgccaagaactggacca

SEQ ID NO: 21359 - DNA, 20 bp, Artificial Sequence
  Description of Artificial Sequence: Synthetic oligonucleotide
  Target: SCNA; (-) strand; PAM type: NRG; PAM sequence: TGG
actcaccatgtgccaagaac

SEQ ID NO: 21360 - DNA, 20 bp, Artificial Sequence
  Description of Artificial Sequence: Synthetic oligonucleotide
  Target: SCNA; (-) strand; PAM type: NRG; PAM sequence: AAG
ggcagcactcaccatgtgcc

SEQ ID NO: 21361 - DNA, 20 bp, Artificial Sequence
  Description of Artificial Sequence: Synthetic oligonucleotide
  Target: SCNA; (-) strand; PAM type: NRG; PAM sequence: CAG
ctagggcaccaagacttagg

SEQ ID NO: 21362 - DNA, 20 bp, Artificial Sequence
  Description of Artificial Sequence: Synthetic oligonucleotide
  Target: SCNA; (-) strand; PAM type: NRG; PAM sequence: AGG
ggtctagggcaccaagactt

SEQ ID NO: 21363 - DNA, 20 bp, Artificial Sequence
  Description of Artificial Sequence: Synthetic oligonucleotide
  Target: SCNA; (-) strand; PAM type: NRG; PAM sequence: TAG
aggtctagggcaccaagact

SEQ ID NO: 21364 - DNA, 20 bp, Artificial Sequence
  Description of Artificial Sequence: Synthetic oligonucleotide
  Target: SCNA; (-) strand; PAM type: NRG; PAM sequence: AAG
tgctgcaggtctagggcacc

SEQ ID NO: 21365 - DNA, 20 bp, Artificial Sequence
  Description of Artificial Sequence: Synthetic oligonucleotide
  Target: SCNA; (-) strand; PAM type: NRG; PAM sequence: GGG
cgattgctgctgcaggtcta

SEQ ID NO: 21366 - DNA, 20 bp, Artificial Sequence
  Description of Artificial Sequence: Synthetic oligonucleotide
  Target: SCNA; (-) strand; PAM type: NRG; PAM sequence: AGG
ccgattgctgctgcaggtct

SEQ ID NO: 21367 - DNA, 20 bp, Artificial Sequence
  Description of Artificial Sequence: Synthetic oligonucleotide
  Target: SCNA; (-) strand; PAM type: NRG; PAM sequence: TAG
gccgattgctgctgcaggtc

SEQ ID NO: 21368 - DNA, 20 bp, Artificial Sequence
  Description of Artificial Sequence: Synthetic oligonucleotide
  Target: SCNA; (-) strand; PAM type: NRG; PAM sequence: AGG
tccccgccgattgctgctgc

SEQ ID NO: 21369 - DNA, 20 bp, Artificial Sequence
  Description of Artificial Sequence: Synthetic oligonucleotide
  Target: SCNA; (-) strand; PAM type: NRG; PAM sequence: CAG
ttccccgccgattgctgctg

SEQ ID NO: 21370 - DNA, 20 bp, Artificial Sequence
  Description of Artificial Sequence: Synthetic oligonucleotide
  Target: SCNA; (-) strand; PAM type: NRG; PAM sequence: TGG
cacttttgtcaccaaagtca

SEQ ID NO: 21371 - DNA, 20 bp, Artificial Sequence
  Description of Artificial Sequence: Synthetic oligonucleotide
  Target: SCNA; (-) strand; PAM type: NRG; PAM sequence: AAG
tgccatcacttttgtcacca

SEQ ID NO: 21372 - DNA, 20 bp, Artificial Sequence
  Description of Artificial Sequence: Synthetic oligonucleotide
  Target: SCNA; (-) strand; PAM type: NRG; PAM sequence: TAG
tacccttgtttctttgtcct

SEQ ID NO: 21373 - DNA, 20 bp, Artificial Sequence
  Description of Artificial Sequence: Synthetic oligonucleotide
  Target: SCNA; (-) strand; PAM type: NRG; PAM sequence: TGG
ttattcggataggctgctgc

SEQ ID NO: 21374 - DNA, 20 bp, Artificial Sequence
  Description of Artificial Sequence: Synthetic oligonucleotide
  Target: SCNA; (-) strand; PAM type: NRG; PAM sequence: AGG
aaggattttgttattcggat

SEQ ID NO: 21375 - DNA, 20 bp, Artificial Sequence
  Description of Artificial Sequence: Synthetic oligonucleotide
  Target: SCNA; (-) strand; PAM type: NRG; PAM sequence: TAG
taaggattttgttattcgga

SEQ ID NO: 21376 - DNA, 20 bp, Artificial Sequence
  Description of Artificial Sequence: Synthetic oligonucleotide
  Target: SCNA; (-) strand; PAM type: NRG; PAM sequence: CGG
gagataaggattttgttatt

SEQ ID NO: 21377 - DNA, 20 bp, Artificial Sequence
  Description of Artificial Sequence: Synthetic oligonucleotide
  Target: SCNA; (-) strand; PAM type: NRG; PAM sequence: AGG
gagatggttttcctgagata

SEQ ID NO: 21378 - DNA, 20 bp, Artificial Sequence
  Description of Artificial Sequence: Synthetic oligonucleotide
  Target: SCNA; (-) strand; PAM type: NRG; PAM sequence: AAG
agagatggttttcctgagat

SEQ ID NO: 21379 - DNA, 20 bp, Artificial Sequence
  Description of Artificial Sequence: Synthetic oligonucleotide
  Target: SCNA; (-) strand; PAM type: NRG; PAM sequence: GAG
atagcagagatggttttcct

SEQ ID NO: 21380 - DNA, 20 bp, Artificial Sequence
  Description of Artificial Sequence: Synthetic oligonucleotide
  Target: SCNA; (-) strand; PAM type: NRG; PAM sequence: TGG
gtatgtattcatagcagaga

SEQ ID NO: 21381 - DNA, 20 bp, Artificial Sequence
  Description of Artificial Sequence: Synthetic oligonucleotide
  Target: SCNA; (-) strand; PAM type: NRG; PAM sequence: GAG
gtgtgtatgtattcatagca

SEQ ID NO: 21382 - DNA, 20 bp, Artificial Sequence
  Description of Artificial Sequence: Synthetic oligonucleotide
  Target: SCNA; (-) strand; PAM type: NRG; PAM sequence: CAG
gtgtgtgtatgtattcatag

SEQ ID NO: 21383 - DNA, 20 bp, Artificial Sequence
  Description of Artificial Sequence: Synthetic oligonucleotide
  Target: SCNA; (-) strand; PAM type: NRG; PAM sequence: TAG
tatgtgtgtgtatgtattca

SEQ ID NO: 21384 - DNA, 20 bp, Artificial Sequence
  Description of Artificial Sequence: Synthetic oligonucleotide
  Target: SCNA; (-) strand; PAM type: NRG; PAM sequence: CAG
caagtttacagtgttccaat

SEQ ID NO: 21385 - DNA, 20 bp, Artificial Sequence
  Description of Artificial Sequence: Synthetic oligonucleotide
  Target: SCNA; (-) strand; PAM type: NRG; PAM sequence: CAG
ctctattttgaacaagttta

SEQ ID NO: 21386 - DNA, 20 bp, Artificial Sequence
  Description of Artificial Sequence: Synthetic oligonucleotide
  Target: SCNA; (-) strand; PAM type: NRG; PAM sequence: AAG
taataacctctattttgaac

SEQ ID NO: 21387 - DNA, 20 bp, Artificial Sequence
  Description of Artificial Sequence: Synthetic oligonucleotide
  Target: SCNA; (-) strand; PAM type: NRG; PAM sequence: AAG
atggtgaatccggacagctg

SEQ ID NO: 21388 - DNA, 20 bp, Artificial Sequence
  Description of Artificial Sequence: Synthetic oligonucleotide
  Target: SCNA; (-) strand; PAM type: NRG; PAM sequence: CAG
tataaaatggtgaatccgga

SEQ ID NO: 21389 - DNA, 20 bp, Artificial Sequence
  Description of Artificial Sequence: Synthetic oligonucleotide
  Target: SCNA; (-) strand; PAM type: NRG; PAM sequence: CGG
atgctataaaatggtgaatc

SEQ ID NO: 21390 - DNA, 20 bp, Artificial Sequence
  Description of Artificial Sequence: Synthetic oligonucleotide
  Target: SCNA; (-) strand; PAM type: NRG; PAM sequence: TGG
tcagagagcatgctataaaa

SEQ ID NO: 21391 - DNA, 20 bp, Artificial Sequence
  Description of Artificial Sequence: Synthetic oligonucleotide
  Target: SCNA; (-) strand; PAM type: NRG; PAM sequence: GAG
tcattctcactaatgtcaga

SEQ ID NO: 21392 - DNA, 20 bp, Artificial Sequence
  Description of Artificial Sequence: Synthetic oligonucleotide
  Target: SCNA; (-) strand; PAM type: NRG; PAM sequence: GAG
attcattctcactaatgtca

SEQ ID NO: 21393 - DNA, 20 bp, Artificial Sequence
  Description of Artificial Sequence: Synthetic oligonucleotide
  Target: SCNA; (-) strand; PAM type: NRG; PAM sequence: CAG
caattcattctcactaatgt

SEQ ID NO: 21394 - DNA, 20 bp, Artificial Sequence
  Description of Artificial Sequence: Synthetic oligonucleotide
  Target: SCNA; (-) strand; PAM type: NRG; PAM sequence: GAG
aaccattacctaaatatgta

SEQ ID NO: 21395 - DNA, 20 bp, Artificial Sequence
  Description of Artificial Sequence: Synthetic oligonucleotide
  Target: SCNA; (-) strand; PAM type: NRG; PAM sequence: TAG
caaaccattacctaaatatg

SEQ ID NO: 21396 - DNA, 20 bp, Artificial Sequence
  Description of Artificial Sequence: Synthetic oligonucleotide
  Target: SCNA; (-) strand; PAM type: NRG; PAM sequence: CAG
agcacacaaatcgttaatag

SEQ ID NO: 21397 - DNA, 20 bp, Artificial Sequence
  Description of Artificial Sequence: Synthetic oligonucleotide
  Target: SCNA; (-) strand; PAM type: NRG; PAM sequence: TAG
catagcacacaaatcgttaa

SEQ ID NO: 21398 - DNA, 20 bp, Artificial Sequence
  Description of Artificial Sequence: Synthetic oligonucleotide
  Target: SCNA; (-) strand; PAM type: NRG; PAM sequence: TAG
aggagaccacaaatattgca

SEQ ID NO: 21399 - DNA, 20 bp, Artificial Sequence
  Description of Artificial Sequence: Synthetic oligonucleotide
  Target: SCNA; (-) strand; PAM type: NRG; PAM sequence: GAG
tctcctgaggtgggtgacag

SEQ ID NO: 21400 - DNA, 20 bp, Artificial Sequence
  Description of Artificial Sequence: Synthetic oligonucleotide
  Target: SCNA; (-) strand; PAM type: NRG; PAM sequence: AGG
tgtctcctgaggtgggtgac

SEQ ID NO: 21401 - DNA, 20 bp, Artificial Sequence
  Description of Artificial Sequence: Synthetic oligonucleotide
  Target: SCNA; (-) strand; PAM type: NRG; PAM sequence: CAG
gtgtctcctgaggtgggtga

SEQ ID NO: 21402 - DNA, 20 bp, Artificial Sequence
  Description of Artificial Sequence: Synthetic oligonucleotide
  Target: SCNA; (-) strand; PAM type: NRG; PAM sequence: GGG
tcagttgtgtctcctgaggt

SEQ ID NO: 21403 - DNA, 20 bp, Artificial Sequence
  Description of Artificial Sequence: Synthetic oligonucleotide
  Target: SCNA; (-) strand; PAM type: NRG; PAM sequence: TGG
atcagttgtgtctcctgagg

SEQ ID NO: 21404 - DNA, 20 bp, Artificial Sequence
  Description of Artificial Sequence: Synthetic oligonucleotide
  Target: SCNA; (-) strand; PAM type: NRG; PAM sequence: AGG
tacatcagttgtgtctcctg

SEQ ID NO: 21405 - DNA, 20 bp, Artificial Sequence
  Description of Artificial Sequence: Synthetic oligonucleotide
  Target: SCNA; (-) strand; PAM type: NRG; PAM sequence: GAG
ttacatcagttgtgtctcct

SEQ ID NO: 21406 - DNA, 20 bp, Artificial Sequence
  Description of Artificial Sequence: Synthetic oligonucleotide
  Target: SCNA; (-) strand; PAM type: NRG; PAM sequence: CAG
ctgagctgtctcacttacat

SEQ ID NO: 21407 - DNA, 20 bp, Artificial Sequence
  Description of Artificial Sequence: Synthetic oligonucleotide
  Target: SCNA; (-) strand; PAM type: NRG; PAM sequence: GAG
atttttccataggatatgct

SEQ ID NO: 21408 - DNA, 20 bp, Artificial Sequence
  Description of Artificial Sequence: Synthetic oligonucleotide
  Target: SCNA; (-) strand; PAM type: NRG; PAM sequence: AGG
ttaataagagatttttccat

SEQ ID NO: 21409 - DNA, 20 bp, Artificial Sequence
  Description of Artificial Sequence: Synthetic oligonucleotide
  Target: SCNA; (-) strand; PAM type: NRG; PAM sequence: TAG
tttaataagagatttttcca

SEQ ID NO: 21410 - DNA, 20 bp, Artificial Sequence
  Description of Artificial Sequence: Synthetic oligonucleotide
  Target: SCNA; (-) strand; PAM type: NRG; PAM sequence: GAG
cattgacctttatttaataa

SEQ ID NO: 21411 - DNA, 20 bp, Artificial Sequence
  Description of Artificial Sequence: Synthetic oligonucleotide
  Target: SCNA; (-) strand; PAM type: NRG; PAM sequence: AAG
atcattgacctttatttaat

SEQ ID NO: 21412 - DNA, 20 bp, Artificial Sequence
  Description of Artificial Sequence: Synthetic oligonucleotide
  Target: SCNA; (-) strand; PAM type: NRG; PAM sequence: AGG
cctgaggagagctcctctta

SEQ ID NO: 21413 - DNA, 20 bp, Artificial Sequence
  Description of Artificial Sequence: Synthetic oligonucleotide
  Target: SCNA; (-) strand; PAM type: NRG; PAM sequence: AAG
acctgaggagagctcctctt

SEQ ID NO: 21414 - DNA, 20 bp, Artificial Sequence
  Description of Artificial Sequence: Synthetic oligonucleotide
  Target: SCNA; (-) strand; PAM type: NRG; PAM sequence: GAG
ctttaattttgacctgagga

SEQ ID NO: 21415 - DNA, 20 bp, Artificial Sequence
  Description of Artificial Sequence: Synthetic oligonucleotide
  Target: SCNA; (-) strand; PAM type: NRG; PAM sequence: GAG
gactttaattttgacctgag

SEQ ID NO: 21416 - DNA, 20 bp, Artificial Sequence
  Description of Artificial Sequence: Synthetic oligonucleotide
  Target: SCNA; (-) strand; PAM type: NRG; PAM sequence: AGG
ctgactttaattttgacctg

SEQ ID NO: 21417 - DNA, 20 bp, Artificial Sequence
  Description of Artificial Sequence: Synthetic oligonucleotide
  Target: SCNA; (-) strand; PAM type: NRG; PAM sequence: GAG
cctgactttaattttgacct

SEQ ID NO: 21418 - DNA, 20 bp, Artificial Sequence
  Description of Artificial Sequence: Synthetic oligonucleotide
  Target: SCNA; (-) strand; PAM type: NRG; PAM sequence: GAG
acactgggggaaccatatga

SEQ ID NO: 21419 - DNA, 20 bp, Artificial Sequence
  Description of Artificial Sequence: Synthetic oligonucleotide
  Target: SCNA; (-) strand; PAM type: NRG; PAM sequence: GAG
tcacactgggggaaccatat

SEQ ID NO: 21420 - DNA, 20 bp, Artificial Sequence
  Description of Artificial Sequence: Synthetic oligonucleotide
  Target: SCNA; (-) strand; PAM type: NRG; PAM sequence: GGG
gcttgctcctctcacactgg

SEQ ID NO: 21421 - DNA, 20 bp, Artificial Sequence
  Description of Artificial Sequence: Synthetic oligonucleotide
  Target: SCNA; (-) strand; PAM type: NRG; PAM sequence: GGG
agcttgctcctctcacactg

SEQ ID NO: 21422 - DNA, 20 bp, Artificial Sequence
  Description of Artificial Sequence: Synthetic oligonucleotide
  Target: SCNA; (-) strand; PAM type: NRG; PAM sequence: GGG
cagcttgctcctctcacact

SEQ ID NO: 21423 - DNA, 20 bp, Artificial Sequence
  Description of Artificial Sequence: Synthetic oligonucleotide
  Target: SCNA; (-) strand; PAM type: NRG; PAM sequence: TGG
acagcttgctcctctcacac

SEQ ID NO: 21424 - DNA, 20 bp, Artificial Sequence
  Description of Artificial Sequence: Synthetic oligonucleotide
  Target: SCNA; (-) strand; PAM type: NRG; PAM sequence: CAG
aagccaccaaaggaaaccaa

SEQ ID NO: 21425 - DNA, 20 bp, Artificial Sequence
  Description of Artificial Sequence: Synthetic oligonucleotide
  Target: SCNA; (-) strand; PAM type: NRG; PAM sequence: AGG
gacaagaaaaaagccaccaa

SEQ ID NO: 21426 - DNA, 20 bp, Artificial Sequence
  Description of Artificial Sequence: Synthetic oligonucleotide
  Target: SCNA; (-) strand; PAM type: NRG; PAM sequence: AAG
agacaagaaaaaagccacca

SEQ ID NO: 21427 - DNA, 20 bp, Artificial Sequence
  Description of Artificial Sequence: Synthetic oligonucleotide
  Target: SCNA; (-) strand; PAM type: NRG; PAM sequence: AAG
attcttctgagacaagaaaa

SEQ ID NO: 21428 - DNA, 20 bp, Artificial Sequence
  Description of Artificial Sequence: Synthetic oligonucleotide
  Target: SCNA; (-) strand; PAM type: NRG; PAM sequence: AAG
ttaatttattcttctgagac

SEQ ID NO: 21429 - DNA, 20 bp, Artificial Sequence
  Description of Artificial Sequence: Synthetic oligonucleotide
  Target: SCNA; (-) strand; PAM type: NRG; PAM sequence: GAG
atttattaatttattcttct

SEQ ID NO: 21430 - DNA, 20 bp, Artificial Sequence
  Description of Artificial Sequence: Synthetic oligonucleotide
  Target: SCNA; (-) strand; PAM type: NRG; PAM sequence: CAG
cacacaaaatcacagctatg

SEQ ID NO: 21431 - DNA, 20 bp, Artificial Sequence
  Description of Artificial Sequence: Synthetic oligonucleotide
  Target: SCNA; (-) strand; PAM type: NRG; PAM sequence: CAG
atttttgtcacacaaaatca

SEQ ID NO: 21432 - DNA, 20 bp, Artificial Sequence
  Description of Artificial Sequence: Synthetic oligonucleotide
  Target: SCNA; (-) strand; PAM type: NRG; PAM sequence: AGG
tgctttgtaaacagaggcac

SEQ ID NO: 21433 - DNA, 20 bp, Artificial Sequence
  Description of Artificial Sequence: Synthetic oligonucleotide
  Target: SCNA; (-) strand; PAM type: NRG; PAM sequence: CAG
ttgctttgtaaacagaggca

SEQ ID NO: 21434 - DNA, 20 bp, Artificial Sequence
  Description of Artificial Sequence: Synthetic oligonucleotide
  Target: SCNA; (-) strand; PAM type: NRG; PAM sequence: AGG
ttgcattgctttgtaaacag

SEQ ID NO: 21435 - DNA, 20 bp, Artificial Sequence
  Description of Artificial Sequence: Synthetic oligonucleotide
  Target: SCNA; (-) strand; PAM type: NRG; PAM sequence: GAG
attgcattgctttgtaaaca

SEQ ID NO: 21436 - DNA, 20 bp, Artificial Sequence
  Description of Artificial Sequence: Synthetic oligonucleotide
  Target: SCNA; (-) strand; PAM type: NRG; PAM sequence: CAG
ccattgcattgctttgtaaa

SEQ ID NO: 21437 - DNA, 20 bp, Artificial Sequence
  Description of Artificial Sequence: Synthetic oligonucleotide
  Target: SCNA; (-) strand; PAM type: NRG; PAM sequence: AGG
tggggaagagacaccagggg

SEQ ID NO: 21438 - DNA, 20 bp, Artificial Sequence
  Description of Artificial Sequence: Synthetic oligonucleotide
  Target: SCNA; (-) strand; PAM type: NRG; PAM sequence: GAG
atggggaagagacaccaggg

SEQ ID NO: 21439 - DNA, 20 bp, Artificial Sequence
  Description of Artificial Sequence: Synthetic oligonucleotide
  Target: SCNA; (-) strand; PAM type: NRG; PAM sequence: GGG
tgatggggaagagacaccag

SEQ ID NO: 21440 - DNA, 20 bp, Artificial Sequence
  Description of Artificial Sequence: Synthetic oligonucleotide
  Target: SCNA; (-) strand; PAM type: NRG; PAM sequence: GGG
gtgatggggaagagacacca

SEQ ID NO: 21441 - DNA, 20 bp, Artificial Sequence
  Description of Artificial Sequence: Synthetic oligonucleotide
  Target: SCNA; (-) strand; PAM type: NRG; PAM sequence: AGG
ggtgatggggaagagacacc

SEQ ID NO: 21442 - DNA, 20 bp, Artificial Sequence
  Description of Artificial Sequence: Synthetic oligonucleotide
  Target: SCNA; (-) strand; PAM type: NRG; PAM sequence: CAG
tggtgatggggaagagacac

SEQ ID NO: 21443 - DNA, 20 bp, Artificial Sequence
  Description of Artificial Sequence: Synthetic oligonucleotide
  Target: SCNA; (-) strand; PAM type: NRG; PAM sequence: GAG
aaagtggtggtgatggggaa

SEQ ID NO: 21444 - DNA, 20 bp, Artificial Sequence
  Description of Artificial Sequence: Synthetic oligonucleotide
  Target: SCNA; (-) strand; PAM type: NRG; PAM sequence: AAG
gcaaagtggtggtgatgggg

SEQ ID NO: 21445 - DNA, 20 bp, Artificial Sequence
  Description of Artificial Sequence: Synthetic oligonucleotide
  Target: SCNA; (-) strand; PAM type: NRG; PAM sequence: GGG
cgggcaaagtggtggtgatg

SEQ ID NO: 21446 - DNA, 20 bp, Artificial Sequence
  Description of Artificial Sequence: Synthetic oligonucleotide
  Target: SCNA; (-) strand; PAM type: NRG; PAM sequence: GGG
gcgggcaaagtggtggtgat

SEQ ID NO: 21447 - DNA, 20 bp, Artificial Sequence
  Description of Artificial Sequence: Synthetic oligonucleotide
  Target: SCNA; (-) strand; PAM type: NRG; PAM sequence: TGG
agcgggcaaagtggtggtga

SEQ ID NO: 21448 - DNA, 20 bp, Artificial Sequence
  Description of Artificial Sequence: Synthetic oligonucleotide
  Target: SCNA; (-) strand; PAM type: NRG; PAM sequence: TGG
catttcagcgggcaaagtgg

SEQ ID NO: 21449 - DNA, 20 bp, Artificial Sequence
  Description of Artificial Sequence: Synthetic oligonucleotide
  Target: SCNA; (-) strand; PAM type: NRG; PAM sequence: TGG
gaacatttcagcgggcaaag

SEQ ID NO: 21450 - DNA, 20 bp, Artificial Sequence
  Description of Artificial Sequence: Synthetic oligonucleotide
  Target: SCNA; (-) strand; PAM type: NRG; PAM sequence: AAG
taagaacatttcagcgggca

SEQ ID NO: 21451 - DNA, 20 bp, Artificial Sequence
  Description of Artificial Sequence: Synthetic oligonucleotide
  Target: SCNA; (-) strand; PAM type: NRG; PAM sequence: GGG
ggggttaagaacatttcagc

SEQ ID NO: 21452 - DNA, 20 bp, Artificial Sequence
  Description of Artificial Sequence: Synthetic oligonucleotide
  Target: SCNA; (-) strand; PAM type: NRG; PAM sequence: CGG
tggggttaagaacatttcag

SEQ ID NO: 21453 - DNA, 20 bp, Artificial Sequence
  Description of Artificial Sequence: Synthetic oligonucleotide
  Target: SCNA; (-) strand; PAM type: NRG; PAM sequence: CAG
gggtggggttaagaacattt

SEQ ID NO: 21454 - DNA, 20 bp, Artificial Sequence
  Description of Artificial Sequence: Synthetic oligonucleotide
  Target: SCNA; (-) strand; PAM type: NRG; PAM sequence: AAG
cttttatggtgggtggggtt

SEQ ID NO: 21455 - DNA, 20 bp, Artificial Sequence
  Description of Artificial Sequence: Synthetic oligonucleotide
  Target: SCNA; (-) strand; PAM type: NRG; PAM sequence: GGG
atcaccttttatggtgggtg

SEQ ID NO: 21456 - DNA, 20 bp, Artificial Sequence
  Description of Artificial Sequence: Synthetic oligonucleotide
  Target: SCNA; (-) strand; PAM type: NRG; PAM sequence: GGG
catcaccttttatggtgggt

SEQ ID NO: 21457 - DNA, 20 bp, Artificial Sequence
  Description of Artificial Sequence: Synthetic oligonucleotide
  Target: SCNA; (-) strand; PAM type: NRG; PAM sequence: TGG
tcatcaccttttatggtggg

SEQ ID NO: 21458 - DNA, 20 bp, Artificial Sequence
  Description of Artificial Sequence: Synthetic oligonucleotide
  Target: SCNA; (-) strand; PAM type: NRG; PAM sequence: GGG
ttatcatcaccttttatggt

SEQ ID NO: 21459 - DNA, 20 bp, Artificial Sequence
  Description of Artificial Sequence: Synthetic oligonucleotide
  Target: SCNA; (-) strand; PAM type: NRG; PAM sequence: TGG
tttatcatcaccttttatgg

SEQ ID NO: 21460 - DNA, 20 bp, Artificial Sequence
  Description of Artificial Sequence: Synthetic oligonucleotide
  Target: SCNA; (-) strand; PAM type: NRG; PAM sequence: TGG
caatttatcatcacctttta

SEQ ID NO: 21461 - DNA, 20 bp, Artificial Sequence
  Description of Artificial Sequence: Synthetic oligonucleotide
  Target: SCNA; (-) strand; PAM type: NRG; PAM sequence: AAG
tttcaatcagcatgagtttg

SEQ ID NO: 21462 - DNA, 20 bp, Artificial Sequence
  Description of Artificial Sequence: Synthetic oligonucleotide
  Target: SCNA; (-) strand; PAM type: NRG; PAM sequence: GAG
tggaaaatttcaatcagcat

SEQ ID NO: 21463 - DNA, 20 bp, Artificial Sequence
  Description of Artificial Sequence: Synthetic oligonucleotide
  Target: SCNA; (-) strand; PAM type: NRG; PAM sequence: CAG
aatagctggaaaatttcaat

SEQ ID NO: 21464 - DNA, 20 bp, Artificial Sequence
  Description of Artificial Sequence: Synthetic oligonucleotide
  Target: SCNA; (-) strand; PAM type: NRG; PAM sequence: TGG
gggggttatttaaaaatagc

SEQ ID NO: 21465 - DNA, 20 bp, Artificial Sequence
  Description of Artificial Sequence: Synthetic oligonucleotide
  Target: SCNA; (-) strand; PAM type: NRG; PAM sequence: TAG
tagtgggggttatttaaaaa

SEQ ID NO: 21466 - DNA, 20 bp, Artificial Sequence
  Description of Artificial Sequence: Synthetic oligonucleotide
  Target: SCNA; (-) strand; PAM type: NRG; PAM sequence: GGG
agcaagaaatccagtagtgg

SEQ ID NO: 21467 - DNA, 20 bp, Artificial Sequence
  Description of Artificial Sequence: Synthetic oligonucleotide
  Target: SCNA; (-) strand; PAM type: NRG; PAM sequence: GGG
aagcaagaaatccagtagtg

SEQ ID NO: 21468 - DNA, 20 bp, Artificial Sequence
  Description of Artificial Sequence: Synthetic oligonucleotide
  Target: SCNA; (-) strand; PAM type: NRG; PAM sequence: GGG
gaagcaagaaatccagtagt

SEQ ID NO: 21469 - DNA, 20 bp, Artificial Sequence
  Description of Artificial Sequence: Synthetic oligonucleotide
  Target: SCNA; (-) strand; PAM type: NRG; PAM sequence: TGG
agaagcaagaaatccagtag

SEQ ID NO: 21470 - DNA, 20 bp, Artificial Sequence
  Description of Artificial Sequence: Synthetic oligonucleotide
  Target: SCNA; (-) strand; PAM type: NRG; PAM sequence: TAG
catagaagcaagaaatccag

SEQ ID NO: 21471 - DNA, 20 bp, Artificial Sequence
  Description of Artificial Sequence: Synthetic oligonucleotide
  Target: SCNA; (-) strand; PAM type: NRG; PAM sequence: CAG
taacatagaagcaagaaatc

SEQ ID NO: 21472 - DNA, 20 bp, Artificial Sequence
  Description of Artificial Sequence: Synthetic oligonucleotide
  Target: SCNA; (-) strand; PAM type: NRG; PAM sequence: AAG
ttgtcatataacatagaagc

SEQ ID NO: 21473 - DNA, 20 bp, Artificial Sequence
  Description of Artificial Sequence: Synthetic oligonucleotide
  Target: SCNA; (-) strand; PAM type: NRG; PAM sequence: AAG
agcattgtcatataacatag

SEQ ID NO: 21474 - DNA, 20 bp, Artificial Sequence
  Description of Artificial Sequence: Synthetic oligonucleotide
  Target: SCNA; (-) strand; PAM type: NRG; PAM sequence: TAG
agaagcattgtcatataaca

SEQ ID NO: 21475 - DNA, 20 bp, Artificial Sequence
  Description of Artificial Sequence: Synthetic oligonucleotide
  Target: SCNA; (-) strand; PAM type: NRG; PAM sequence: AAG
aggacattttcacctgaaag

SEQ ID NO: 21476 - DNA, 20 bp, Artificial Sequence
  Description of Artificial Sequence: Synthetic oligonucleotide
  Target: SCNA; (-) strand; PAM type: NRG; PAM sequence: AAG
tccaggacattttcacctga

SEQ ID NO: 21477 - DNA, 20 bp, Artificial Sequence
  Description of Artificial Sequence: Synthetic oligonucleotide
  Target: SCNA; (-) strand; PAM type: NRG; PAM sequence: AGG
ggtaaaaattacttgtttcc

SEQ ID NO: 21478 - DNA, 20 bp, Artificial Sequence
  Description of Artificial Sequence: Synthetic oligonucleotide
  Target: SCNA; (-) strand; PAM type: NRG; PAM sequence: CAG
aggtaaaaattacttgtttc

SEQ ID NO: 21479 - DNA, 20 bp, Artificial Sequence
  Description of Artificial Sequence: Synthetic oligonucleotide
  Target: SCNA; (-) strand; PAM type: NRG; PAM sequence: AGG
aaaaaaaaaaaaaggtagcc

SEQ ID NO: 21480 - DNA, 20 bp, Artificial Sequence
  Description of Artificial Sequence: Synthetic oligonucleotide
  Target: SCNA; (-) strand; PAM type: NRG; PAM sequence: CAG
aaaaaaaaaaaaaaggtagc

SEQ ID NO: 21481 - DNA, 20 bp, Artificial Sequence
  Description of Artificial Sequence: Synthetic oligonucleotide
  Target: SCNA; (-) strand; PAM type: NRG; PAM sequence: TAG
aaaaaaaaaaaaaaaaaagg

SEQ ID NO: 21482 - DNA, 20 bp, Artificial Sequence
  Description of Artificial Sequence: Synthetic oligonucleotide
  Target: SCNA; (-) strand; PAM type: NRG; PAM sequence: AGG
aaaaaaaaaaaaaaaaaaaa

SEQ ID NO: 21483 - DNA, 20 bp, Artificial Sequence
  Description of Artificial Sequence: Synthetic oligonucleotide
  Target: SCNA; (-) strand; PAM type: NRG; PAM sequence: AAG
taaaaaaaaaaaaaaaaaaa

SEQ ID NO: 21484 - DNA, 20 bp, Artificial Sequence
  Description of Artificial Sequence: Synthetic oligonucleotide
  Target: SCNA; (-) strand; PAM type: NRG; PAM sequence: GAG
cctcagctatgcagaacggt

SEQ ID NO: 21485 - DNA, 20 bp, Artificial Sequence
  Description of Artificial Sequence: Synthetic oligonucleotide
  Target: SCNA; (-) strand; PAM type: NRG; PAM sequence: CGG
gcctcctcagctatgcagaa

SEQ ID NO: 21486 - DNA, 20 bp, Artificial Sequence
  Description of Artificial Sequence: Synthetic oligonucleotide
  Target: SCNA; (-) strand; PAM type: NRG; PAM sequence: CAG
ctgaggcctcctcagctatg

SEQ ID NO: 21487 - DNA, 20 bp, Artificial Sequence
  Description of Artificial Sequence: Synthetic oligonucleotide
  Target: SCNA; (-) strand; PAM type: NRG; PAM sequence: CAG
taagtttcctgaggcctcct

SEQ ID NO: 21488 - DNA, 20 bp, Artificial Sequence
  Description of Artificial Sequence: Synthetic oligonucleotide
  Target: SCNA; (-) strand; PAM type: NRG; PAM sequence: AGG
ctatgattgtaagtttcctg

SEQ ID NO: 21489 - DNA, 20 bp, Artificial Sequence
  Description of Artificial Sequence: Synthetic oligonucleotide
  Target: SCNA; (-) strand; PAM type: NRG; PAM sequence: GAG
gctatgattgtaagtttcct

SEQ ID NO: 21490 - DNA, 20 bp, Artificial Sequence
  Description of Artificial Sequence: Synthetic oligonucleotide
  Target: SCNA; (-) strand; PAM type: NRG; PAM sequence: AAG
tccccttctgctatgattgt

SEQ ID NO: 21491 - DNA, 20 bp, Artificial Sequence
  Description of Artificial Sequence: Synthetic oligonucleotide
  Target: SCNA; (-) strand; PAM type: NRG; PAM sequence: AGG
tctctttctcctgccatgtg

SEQ ID NO: 21492 - DNA, 20 bp, Artificial Sequence
  Description of Artificial Sequence: Synthetic oligonucleotide
  Target: SCNA; (-) strand; PAM type: NRG; PAM sequence: GAG
ctctctttctcctgccatgt

SEQ ID NO: 21493 - DNA, 20 bp, Artificial Sequence
  Description of Artificial Sequence: Synthetic oligonucleotide
  Target: SCNA; (-) strand; PAM type: NRG; PAM sequence: TGG
gatctaatggtttaaaatca

SEQ ID NO: 21494 - DNA, 20 bp, Artificial Sequence
  Description of Artificial Sequence: Synthetic oligonucleotide
  Target: SCNA; (-) strand; PAM type: NRG; PAM sequence: TGG
tgagttctcataagatctaa

SEQ ID NO: 21495 - DNA, 20 bp, Artificial Sequence
  Description of Artificial Sequence: Synthetic oligonucleotide
  Target: SCNA; (-) strand; PAM type: NRG; PAM sequence: AAG
gatagtgaatgagttctcat

SEQ ID NO: 21496 - DNA, 20 bp, Artificial Sequence
  Description of Artificial Sequence: Synthetic oligonucleotide
  Target: SCNA; (-) strand; PAM type: NRG; PAM sequence: GAG
ctgttctcatgatagtgaat

SEQ ID NO: 21497 - DNA, 20 bp, Artificial Sequence
  Description of Artificial Sequence: Synthetic oligonucleotide
  Target: SCNA; (-) strand; PAM type: NRG; PAM sequence: TAG
tctccatgctgttctcatga

SEQ ID NO: 21498 - DNA, 20 bp, Artificial Sequence
  Description of Artificial Sequence: Synthetic oligonucleotide
  Target: SCNA; (-) strand; PAM type: NRG; PAM sequence: TAG
aggtgattggatcatggggg

SEQ ID NO: 21499 - DNA, 20 bp, Artificial Sequence
  Description of Artificial Sequence: Synthetic oligonucleotide
  Target: SCNA; (-) strand; PAM type: NRG; PAM sequence: GGG
gggaggtgattggatcatgg

SEQ ID NO: 21500 - DNA, 20 bp, Artificial Sequence
  Description of Artificial Sequence: Synthetic oligonucleotide
  Target: SCNA; (-) strand; PAM type: NRG; PAM sequence: GGG
tgggaggtgattggatcatg

SEQ ID NO: 21501 - DNA, 20 bp, Artificial Sequence
  Description of Artificial Sequence: Synthetic oligonucleotide
  Target: SCNA; (-) strand; PAM type: NRG; PAM sequence: GGG
atgggaggtgattggatcat

SEQ ID NO: 21502 - DNA, 20 bp, Artificial Sequence
  Description of Artificial Sequence: Synthetic oligonucleotide
  Target: SCNA; (-) strand; PAM type: NRG; PAM sequence: TGG
tatgggaggtgattggatca

SEQ ID NO: 21503 - DNA, 20 bp, Artificial Sequence
  Description of Artificial Sequence: Synthetic oligonucleotide
  Target: SCNA; (-) strand; PAM type: NRG; PAM sequence: TGG
gggaccttatgggaggtgat

SEQ ID NO: 21504 - DNA, 20 bp, Artificial Sequence
  Description of Artificial Sequence: Synthetic oligonucleotide
  Target: SCNA; (-) strand; PAM type: NRG; PAM sequence: AGG
tgagggagggaccttatggg

SEQ ID NO: 21505 - DNA, 20 bp, Artificial Sequence
  Description of Artificial Sequence: Synthetic oligonucleotide
  Target: SCNA; (-) strand; PAM type: NRG; PAM sequence: GAG
ttgagggagggaccttatgg

SEQ ID NO: 21506 - DNA, 20 bp, Artificial Sequence
  Description of Artificial Sequence: Synthetic oligonucleotide
  Target: SCNA; (-) strand; PAM type: NRG; PAM sequence: GGG
tgttgagggagggaccttat

SEQ ID NO: 21507 - DNA, 20 bp, Artificial Sequence
  Description of Artificial Sequence: Synthetic oligonucleotide
  Target: SCNA; (-) strand; PAM type: NRG; PAM sequence: TGG
gtgttgagggagggacctta

SEQ ID NO: 21508 - DNA, 20 bp, Artificial Sequence
  Description of Artificial Sequence: Synthetic oligonucleotide
  Target: SCNA; (-) strand; PAM type: NRG; PAM sequence: GGG
aacccccatgtgttgaggga

SEQ ID NO: 21509 - DNA, 20 bp, Artificial Sequence
  Description of Artificial Sequence: Synthetic oligonucleotide
  Target: SCNA; (-) strand; PAM type: NRG; PAM sequence: AGG
taacccccatgtgttgaggg

SEQ ID NO: 21510 - DNA, 20 bp, Artificial Sequence
  Description of Artificial Sequence: Synthetic oligonucleotide
  Target: SCNA; (-) strand; PAM type: NRG; PAM sequence: GAG
gtaacccccatgtgttgagg

SEQ ID NO: 21511 - DNA, 20 bp, Artificial Sequence
  Description of Artificial Sequence: Synthetic oligonucleotide
  Target: SCNA; (-) strand; PAM type: NRG; PAM sequence: GGG
ttgtaacccccatgtgttga

SEQ ID NO: 21512 - DNA, 20 bp, Artificial Sequence
  Description of Artificial Sequence: Synthetic oligonucleotide
  Target: SCNA; (-) strand; PAM type: NRG; PAM sequence: AGG
attgtaacccccatgtgttg

SEQ ID NO: 21513 - DNA, 20 bp, Artificial Sequence
  Description of Artificial Sequence: Synthetic oligonucleotide
  Target: SCNA; (-) strand; PAM type: NRG; PAM sequence: GAG
aattgtaacccccatgtgtt

SEQ ID NO: 21514 - DNA, 20 bp, Artificial Sequence
  Description of Artificial Sequence: Synthetic oligonucleotide
  Target: SCNA; (-) strand; PAM type: NRG; PAM sequence: TGG
ccatccatagtgatacggtt

SEQ ID NO: 21515 - DNA, 20 bp, Artificial Sequence
  Description of Artificial Sequence: Synthetic oligonucleotide
  Target: SCNA; (-) strand; PAM type: NRG; PAM sequence: CGG
tactaccatccatagtgata

SEQ ID NO: 21516 - DNA, 20 bp, Artificial Sequence
  Description of Artificial Sequence: Synthetic oligonucleotide
  Target: SCNA; (-) strand; PAM type: NRG; PAM sequence: TAG
caccctgatactaccatcca

SEQ ID NO: 21517 - DNA, 20 bp, Artificial Sequence
  Description of Artificial Sequence: Synthetic oligonucleotide
  Target: SCNA; (-) strand; PAM type: NRG; PAM sequence: AAG
aaatcagagagaaaaaaaaa

SEQ ID NO: 21518 - DNA, 20 bp, Artificial Sequence
  Description of Artificial Sequence: Synthetic oligonucleotide
  Target: SCNA; (-) strand; PAM type: NRG; PAM sequence: GAG
aataaaaaaagaaaatcaga

SEQ ID NO: 21519 - DNA, 20 bp, Artificial Sequence
  Description of Artificial Sequence: Synthetic oligonucleotide
  Target: SCNA; (-) strand; PAM type: NRG; PAM sequence: GAG
taaataaaaaaagaaaatca

SEQ ID NO: 21520 - DNA, 20 bp, Artificial Sequence
  Description of Artificial Sequence: Synthetic oligonucleotide
  Target: SCNA; (-) strand; PAM type: NRG; PAM sequence: CAG
tttaaataaaaaaagaaaat

SEQ ID NO: 21521 - DNA, 20 bp, Artificial Sequence
  Description of Artificial Sequence: Synthetic oligonucleotide
  Target: SCNA; (-) strand; PAM type: NRG; PAM sequence: AAG
aaaaagaatttaaataaaaa

SEQ ID NO: 21522 - DNA, 20 bp, Artificial Sequence
  Description of Artificial Sequence: Synthetic oligonucleotide
  Target: SCNA; (-) strand; PAM type: NRG; PAM sequence: AAG
taaagtataatttaaaaaaa

SEQ ID NO: 21523 - DNA, 20 bp, Artificial Sequence
  Description of Artificial Sequence: Synthetic oligonucleotide
  Target: SCNA; (-) strand; PAM type: NRG; PAM sequence: AAG
cacatgtaccctaaaactta

SEQ ID NO: 21524 - DNA, 20 bp, Artificial Sequence
  Description of Artificial Sequence: Synthetic oligonucleotide
  Target: SCNA; (-) strand; PAM type: NRG; PAM sequence: AGG
atccatctttaaaggtagcc

SEQ ID NO: 21525 - DNA, 20 bp, Artificial Sequence
  Description of Artificial Sequence: Synthetic oligonucleotide
  Target: SCNA; (-) strand; PAM type: NRG; PAM sequence: CAG
tatccatctttaaaggtagc

SEQ ID NO: 21526 - DNA, 20 bp, Artificial Sequence
  Description of Artificial Sequence: Synthetic oligonucleotide
  Target: SCNA; (-) strand; PAM type: NRG; PAM sequence: TAG
tcaatatccatctttaaagg

SEQ ID NO: 21527 - DNA, 20 bp, Artificial Sequence
  Description of Artificial Sequence: Synthetic oligonucleotide
  Target: SCNA; (-) strand; PAM type: NRG; PAM sequence: AGG
gagtcaatatccatctttaa

SEQ ID NO: 21528 - DNA, 20 bp, Artificial Sequence
  Description of Artificial Sequence: Synthetic oligonucleotide
  Target: SCNA; (-) strand; PAM type: NRG; PAM sequence: AAG
ggagtcaatatccatcttta

SEQ ID NO: 21529 - DNA, 20 bp, Artificial Sequence
  Description of Artificial Sequence: Synthetic oligonucleotide
  Target: SCNA; (-) strand; PAM type: NRG; PAM sequence: GAG
caagtgaaagcattttggag

SEQ ID NO: 21530 - DNA, 20 bp, Artificial Sequence
  Description of Artificial Sequence: Synthetic oligonucleotide
  Target: SCNA; (-) strand; PAM type: NRG; PAM sequence: AGG
ttcaagtgaaagcattttgg

SEQ ID NO: 21531 - DNA, 20 bp, Artificial Sequence
  Description of Artificial Sequence: Synthetic oligonucleotide
  Target: SCNA; (-) strand; PAM type: NRG; PAM sequence: GAG
tttcaagtgaaagcattttg

SEQ ID NO: 21532 - DNA, 20 bp, Artificial Sequence
  Description of Artificial Sequence: Synthetic oligonucleotide
  Target: SCNA; (-) strand; PAM type: NRG; PAM sequence: TGG
tttttcaagtgaaagcattt

SEQ ID NO: 21533 - DNA, 20 bp, Artificial Sequence
  Description of Artificial Sequence: Synthetic oligonucleotide
  Target: SCNA; (-) strand; PAM type: NRG; PAM sequence: AAG
ttcttttttttttcaagtga

SEQ ID NO: 21534 - DNA, 20 bp, Artificial Sequence
  Description of Artificial Sequence: Synthetic oligonucleotide
  Target: SCNA; (-) strand; PAM type: NRG; PAM sequence: AAG
tttttcttcttttttttttc

SEQ ID NO: 21535 - DNA, 20 bp, Artificial Sequence
  Description of Artificial Sequence: Synthetic oligonucleotide
  Target: SCNA; (-) strand; PAM type: NRG; PAM sequence: AGG
gaaagcccttctcatttttg

SEQ ID NO: 21536 - DNA, 20 bp, Artificial Sequence
  Description of Artificial Sequence: Synthetic oligonucleotide
  Target: SCNA; (-) strand; PAM type: NRG; PAM sequence: GAG
ggaaagcccttctcattttt

SEQ ID NO: 21537 - DNA, 20 bp, Artificial Sequence
  Description of Artificial Sequence: Synthetic oligonucleotide
  Target: SCNA; (-) strand; PAM type: NRG; PAM sequence: AAG
tttgctttcctcaagtcgga

SEQ ID NO: 21538 - DNA, 20 bp, Artificial Sequence
  Description of Artificial Sequence: Synthetic oligonucleotide
  Target: SCNA; (-) strand; PAM type: NRG; PAM sequence: CGG
aagatttgctttcctcaagt

SEQ ID NO: 21539 - DNA, 20 bp, Artificial Sequence
  Description of Artificial Sequence: Synthetic oligonucleotide
  Target: SCNA; (-) strand; PAM type: NRG; PAM sequence: AAG
taaaaagatttgctttcctc

SEQ ID NO: 21540 - DNA, 20 bp, Artificial Sequence
  Description of Artificial Sequence: Synthetic oligonucleotide
  Target: SCNA; (-) strand; PAM type: NRG; PAM sequence: AAG
tgttcctagtgcaagttaaa

SEQ ID NO: 21541 - DNA, 20 bp, Artificial Sequence
  Description of Artificial Sequence: Synthetic oligonucleotide
  Target: SCNA; (-) strand; PAM type: NRG; PAM sequence: AAG
tgtcgtgatgttcctagtgc

SEQ ID NO: 21542 - DNA, 20 bp, Artificial Sequence
  Description of Artificial Sequence: Synthetic oligonucleotide
  Target: SCNA; (-) strand; PAM type: NRG; PAM sequence: TAG
agaaaatgtcgtgatgttcc

SEQ ID NO: 21543 - DNA, 20 bp, Artificial Sequence
  Description of Artificial Sequence: Synthetic oligonucleotide
  Target: SCNA; (-) strand; PAM type: NRG; PAM sequence: AAG
atacaaaccatctaagaggc

SEQ ID NO: 21544 - DNA, 20 bp, Artificial Sequence
  Description of Artificial Sequence: Synthetic oligonucleotide
  Target: SCNA; (-) strand; PAM type: NRG; PAM sequence: AGG
caaaatacaaaccatctaag

SEQ ID NO: 21545 - DNA, 20 bp, Artificial Sequence
  Description of Artificial Sequence: Synthetic oligonucleotide
  Target: SCNA; (-) strand; PAM type: NRG; PAM sequence: GAG
ccaaaatacaaaccatctaa

SEQ ID NO: 21546 - DNA, 20 bp, Artificial Sequence
  Description of Artificial Sequence: Synthetic oligonucleotide
  Target: SCNA; (-) strand; PAM type: NRG; PAM sequence: AAG
atccaaaatacaaaccatct

SEQ ID NO: 21547 - DNA, 20 bp, Artificial Sequence
  Description of Artificial Sequence: Synthetic oligonucleotide
  Target: SCNA; (-) strand; PAM type: NRG; PAM sequence: AAG
atgtctttgtttctcttcag

SEQ ID NO: 21548 - DNA, 20 bp, Artificial Sequence
  Description of Artificial Sequence: Synthetic oligonucleotide
  Target: SCNA; (-) strand; PAM type: NRG; PAM sequence: CAG
tatatgtctttgtttctctt

SEQ ID NO: 21549 - DNA, 20 bp, Artificial Sequence
  Description of Artificial Sequence: Synthetic oligonucleotide
  Target: SCNA; (-) strand; PAM type: NRG; PAM sequence: CAG
aagtattctacaaataaaca

SEQ ID NO: 21550 - DNA, 20 bp, Artificial Sequence
  Description of Artificial Sequence: Synthetic oligonucleotide
  Target: SCNA; (-) strand; PAM type: NRG; PAM sequence: AAG
aaaaacaaaatacaaaaaat

SEQ ID NO: 21551 - DNA, 20 bp, Artificial Sequence
  Description of Artificial Sequence: Synthetic oligonucleotide
  Target: SCNA; (-) strand; PAM type: NRG; PAM sequence: CAG
attctaaatgtatgagatat

SEQ ID NO: 21552 - DNA, 20 bp, Artificial Sequence
  Description of Artificial Sequence: Synthetic oligonucleotide
  Target: SCNA; (-) strand; PAM type: NRG; PAM sequence: GAG
tacaaatattctaaatgtat

SEQ ID NO: 21553 - DNA, 20 bp, Artificial Sequence
  Description of Artificial Sequence: Synthetic oligonucleotide
  Target: SCNA; (-) strand; PAM type: NRG; PAM sequence: TGG
gctctccactgattccatgg

SEQ ID NO: 21554 - DNA, 20 bp, Artificial Sequence
  Description of Artificial Sequence: Synthetic oligonucleotide
  Target: SCNA; (-) strand; PAM type: NRG; PAM sequence: TGG
atagctctccactgattcca

SEQ ID NO: 21555 - DNA, 20 bp, Artificial Sequence
  Description of Artificial Sequence: Synthetic oligonucleotide
  Target: SCNA; (-) strand; PAM type: NRG; PAM sequence: TAG
tttgcagttgttaaattgca

SEQ ID NO: 21556 - DNA, 20 bp, Artificial Sequence
  Description of Artificial Sequence: Synthetic oligonucleotide
  Target: SCNA; (-) strand; PAM type: NRG; PAM sequence: CAG
aggatctctaagattctttg

SEQ ID NO: 21557 - DNA, 20 bp, Artificial Sequence
  Description of Artificial Sequence: Synthetic oligonucleotide
  Target: SCNA; (-) strand; PAM type: NRG; PAM sequence: AAG
gtgttactctaaggatctct

SEQ ID NO: 21558 - DNA, 20 bp, Artificial Sequence
  Description of Artificial Sequence: Synthetic oligonucleotide
  Target: SCNA; (-) strand; PAM type: NRG; PAM sequence: AGG
taagaggatgtgttactcta

SEQ ID NO: 21559 - DNA, 20 bp, Artificial Sequence
  Description of Artificial Sequence: Synthetic oligonucleotide
  Target: SCNA; (-) strand; PAM type: NRG; PAM sequence: AAG
ataagaggatgtgttactct

SEQ ID NO: 21560 - DNA, 20 bp, Artificial Sequence
  Description of Artificial Sequence: Synthetic oligonucleotide
  Target: SCNA; (-) strand; PAM type: NRG; PAM sequence: AGG
tttccccatttgtaaataag

SEQ ID NO: 21561 - DNA, 20 bp, Artificial Sequence
  Description of Artificial Sequence: Synthetic oligonucleotide
  Target: SCNA; (-) strand; PAM type: NRG; PAM sequence: GAG
gtttccccatttgtaaataa

SEQ ID NO: 21562 - DNA, 20 bp, Artificial Sequence
  Description of Artificial Sequence: Synthetic oligonucleotide
  Target: SCNA; (-) strand; PAM type: NRG; PAM sequence: AAG
ctgtttccccatttgtaaat

SEQ ID NO: 21563 - DNA, 20 bp, Artificial Sequence
  Description of Artificial Sequence: Synthetic oligonucleotide
  Target: SCNA; (-) strand; PAM type: NRG; PAM sequence: AAG
ccctagcttatggattaggc

SEQ ID NO: 21564 - DNA, 20 bp, Artificial Sequence
  Description of Artificial Sequence: Synthetic oligonucleotide
  Target: SCNA; (-) strand; PAM type: NRG; PAM sequence: AGG
gtacccctagcttatggatt

SEQ ID NO: 21565 - DNA, 20 bp, Artificial Sequence
  Description of Artificial Sequence: Synthetic oligonucleotide
  Target: SCNA; (-) strand; PAM type: NRG; PAM sequence: TAG
tgtacccctagcttatggat

SEQ ID NO: 21566 - DNA, 20 bp, Artificial Sequence
  Description of Artificial Sequence: Synthetic oligonucleotide
  Target: SCNA; (-) strand; PAM type: NRG; PAM sequence: TGG
cctgttgtacccctagctta

SEQ ID NO: 21567 - DNA, 20 bp, Artificial Sequence
  Description of Artificial Sequence: Synthetic oligonucleotide
  Target: SCNA; (-) strand; PAM type: NRG; PAM sequence: TAG
taatgaccctgttgtacccc

SEQ ID NO: 21568 - DNA, 20 bp, Artificial Sequence
  Description of Artificial Sequence: Synthetic oligonucleotide
  Target: SCNA; (-) strand; PAM type: NRG; PAM sequence: TGG
cagggagaaattgaacagga

SEQ ID NO: 21569 - DNA, 20 bp, Artificial Sequence
  Description of Artificial Sequence: Synthetic oligonucleotide
  Target: SCNA; (-) strand; PAM type: NRG; PAM sequence: AGG
atatcagggagaaattgaac

SEQ ID NO: 21570 - DNA, 20 bp, Artificial Sequence
  Description of Artificial Sequence: Synthetic oligonucleotide
  Target: SCNA; (-) strand; PAM type: NRG; PAM sequence: CAG
catatcagggagaaattgaa

SEQ ID NO: 21571 - DNA, 20 bp, Artificial Sequence
  Description of Artificial Sequence: Synthetic oligonucleotide
  Target: SCNA; (-) strand; PAM type: NRG; PAM sequence: GAG
atcgctaggatcatatcagg

SEQ ID NO: 21572 - DNA, 20 bp, Artificial Sequence
  Description of Artificial Sequence: Synthetic oligonucleotide
  Target: SCNA; (-) strand; PAM type: NRG; PAM sequence: GGG
ccatcgctaggatcatatca

SEQ ID NO: 21573 - DNA, 20 bp, Artificial Sequence
  Description of Artificial Sequence: Synthetic oligonucleotide
  Target: SCNA; (-) strand; PAM type: NRG; PAM sequence: AGG
tccatcgctaggatcatatc

SEQ ID NO: 21574 - DNA, 20 bp, Artificial Sequence
  Description of Artificial Sequence: Synthetic oligonucleotide
  Target: SCNA; (-) strand; PAM type: NRG; PAM sequence: CAG
ctccatcgctaggatcatat

SEQ ID NO: 21575 - DNA, 20 bp, Artificial Sequence
  Description of Artificial Sequence: Synthetic oligonucleotide
  Target: SCNA; (-) strand; PAM type: NRG; PAM sequence: AGG
ttggtaggtactccatcgct

SEQ ID NO: 21576 - DNA, 20 bp, Artificial Sequence
  Description of Artificial Sequence: Synthetic oligonucleotide
  Target: SCNA; (-) strand; PAM type: NRG; PAM sequence: TAG
gttggtaggtactccatcgc

SEQ ID NO: 21577 - DNA, 20 bp, Artificial Sequence
  Description of Artificial Sequence: Synthetic oligonucleotide
  Target: SCNA; (-) strand; PAM type: NRG; PAM sequence: AGG
ctattgtaaagaaagttggt

SEQ ID NO: 21578 - DNA, 20 bp, Artificial Sequence
  Description of Artificial Sequence: Synthetic oligonucleotide
  Target: SCNA; (-) strand; PAM type: NRG; PAM sequence: TAG
gctattgtaaagaaagttgg

SEQ ID NO: 21579 - DNA, 20 bp, Artificial Sequence
  Description of Artificial Sequence: Synthetic oligonucleotide
  Target: SCNA; (-) strand; PAM type: NRG; PAM sequence: TGG
tgggctattgtaaagaaagt

SEQ ID NO: 21580 - DNA, 20 bp, Artificial Sequence
  Description of Artificial Sequence: Synthetic oligonucleotide
  Target: SCNA; (-) strand; PAM type: NRG; PAM sequence: AAG
acgttgggctattgtaaaga

SEQ ID NO: 21581 - DNA, 20 bp, Artificial Sequence
  Description of Artificial Sequence: Synthetic oligonucleotide
  Target: SCNA; (-) strand; PAM type: NRG; PAM sequence: AAG
ctagacgttgggctattgta

SEQ ID NO: 21582 - DNA, 20 bp, Artificial Sequence
  Description of Artificial Sequence: Synthetic oligonucleotide
  Target: SCNA; (-) strand; PAM type: NRG; PAM sequence: GGG
tgattctcatactagacgtt

SEQ ID NO: 21583 - DNA, 20 bp, Artificial Sequence
  Description of Artificial Sequence: Synthetic oligonucleotide
  Target: SCNA; (-) strand; PAM type: NRG; PAM sequence: TGG
atgattctcatactagacgt

SEQ ID NO: 21584 - DNA, 20 bp, Artificial Sequence
  Description of Artificial Sequence: Synthetic oligonucleotide
  Target: SCNA; (-) strand; PAM type: NRG; PAM sequence: TAG
ccacagaatgattctcatac

SEQ ID NO: 21585 - DNA, 20 bp, Artificial Sequence
  Description of Artificial Sequence: Synthetic oligonucleotide
  Target: SCNA; (-) strand; PAM type: NRG; PAM sequence: CAG
tcaatttggaagagtgtcca

SEQ ID NO: 21586 - DNA, 20 bp, Artificial Sequence
  Description of Artificial Sequence: Synthetic oligonucleotide
  Target: SCNA; (-) strand; PAM type: NRG; PAM sequence: GAG
gagattgtttcaatttggaa

SEQ ID NO: 21587 - DNA, 20 bp, Artificial Sequence
  Description of Artificial Sequence: Synthetic oligonucleotide
  Target: SCNA; (-) strand; PAM type: NRG; PAM sequence: AAG
aggagattgtttcaatttgg

SEQ ID NO: 21588 - DNA, 20 bp, Artificial Sequence
  Description of Artificial Sequence: Synthetic oligonucleotide
  Target: SCNA; (-) strand; PAM type: NRG; PAM sequence: TGG
ccaaggagattgtttcaatt

SEQ ID NO: 21589 - DNA, 20 bp, Artificial Sequence
  Description of Artificial Sequence: Synthetic oligonucleotide
  Target: SCNA; (-) strand; PAM type: NRG; PAM sequence: GAG
tgtgccaggagtaatccaag

SEQ ID NO: 21590 - DNA, 20 bp, Artificial Sequence
  Description of Artificial Sequence: Synthetic oligonucleotide
  Target: SCNA; (-) strand; PAM type: NRG; PAM sequence: AGG
gctgtgccaggagtaatcca

SEQ ID NO: 21591 - DNA, 20 bp, Artificial Sequence
  Description of Artificial Sequence: Synthetic oligonucleotide
  Target: SCNA; (-) strand; PAM type: NRG; PAM sequence: AAG
agctgtgccaggagtaatcc

SEQ ID NO: 21592 - DNA, 20 bp, Artificial Sequence
  Description of Artificial Sequence: Synthetic oligonucleotide
  Target: SCNA; (-) strand; PAM type: NRG; PAM sequence: GAG
gaatacataagctgtgccag

SEQ ID NO: 21593 - DNA, 20 bp, Artificial Sequence
  Description of Artificial Sequence: Synthetic oligonucleotide
  Target: SCNA; (-) strand; PAM type: NRG; PAM sequence: AGG
gagaatacataagctgtgcc

SEQ ID NO: 21594 - DNA, 20 bp, Artificial Sequence
  Description of Artificial Sequence: Synthetic oligonucleotide
  Target: SCNA; (-) strand; PAM type: NRG; PAM sequence: CAG
tgagaatacataagctgtgc

SEQ ID NO: 21595 - DNA, 20 bp, Artificial Sequence
  Description of Artificial Sequence: Synthetic oligonucleotide
  Target: SCNA; (-) strand; PAM type: NRG; PAM sequence: AAG
gattggctatgagaatacat

SEQ ID NO: 21596 - DNA, 20 bp, Artificial Sequence
  Description of Artificial Sequence: Synthetic oligonucleotide
  Target: SCNA; (-) strand; PAM type: NRG; PAM sequence: GAG
atgaccaggggattggctat

SEQ ID NO: 21597 - DNA, 20 bp, Artificial Sequence
  Description of Artificial Sequence: Synthetic oligonucleotide
  Target: SCNA; (-) strand; PAM type: NRG; PAM sequence: TGG
cagagtcatgaccaggggat

SEQ ID NO: 21598 - DNA, 20 bp, Artificial Sequence
  Description of Artificial Sequence: Synthetic oligonucleotide
  Target: SCNA; (-) strand; PAM type: NRG; PAM sequence: GGG
agtgtcagagtcatgaccag

SEQ ID NO: 21599 - DNA, 20 bp, Artificial Sequence
  Description of Artificial Sequence: Synthetic oligonucleotide
  Target: SCNA; (-) strand; PAM type: NRG; PAM sequence: GGG
tagtgtcagagtcatgacca

SEQ ID NO: 21600 - DNA, 20 bp, Artificial Sequence
  Description of Artificial Sequence: Synthetic oligonucleotide
  Target: SCNA; (-) strand; PAM type: NRG; PAM sequence: AGG
ctagtgtcagagtcatgacc

SEQ ID NO: 21601 - DNA, 20 bp, Artificial Sequence
  Description of Artificial Sequence: Synthetic oligonucleotide
  Target: SCNA; (-) strand; PAM type: NRG; PAM sequence: CAG
actagtgtcagagtcatgac

SEQ ID NO: 21602 - DNA, 20 bp, Artificial Sequence
  Description of Artificial Sequence: Synthetic oligonucleotide
  Target: SCNA; (-) strand; PAM type: NRG; PAM sequence: GAG
ctttttatctactagtgtca

SEQ ID NO: 21603 - DNA, 20 bp, Artificial Sequence
  Description of Artificial Sequence: Synthetic oligonucleotide
  Target: SCNA; (-) strand; PAM type: NRG; PAM sequence: CAG
tactttttatctactagtgt

SEQ ID NO: 21604 - DNA, 20 bp, Artificial Sequence
  Description of Artificial Sequence: Synthetic oligonucleotide
  Target: SCNA; (-) strand; PAM type: NRG; PAM sequence: TAG
gagtgatactttttatctac

SEQ ID NO: 21605 - DNA, 20 bp, Artificial Sequence
  Description of Artificial Sequence: Synthetic oligonucleotide
  Target: SCNA; (-) strand; PAM type: NRG; PAM sequence: GAG
atgaaaagatcaagagatta

SEQ ID NO: 21606 - DNA, 20 bp, Artificial Sequence
  Description of Artificial Sequence: Synthetic oligonucleotide
  Target: SCNA; (-) strand; PAM type: NRG; PAM sequence: TAG
tgatgaaaagatcaagagat

SEQ ID NO: 21607 - DNA, 20 bp, Artificial Sequence
  Description of Artificial Sequence: Synthetic oligonucleotide
  Target: SCNA; (-) strand; PAM type: NRG; PAM sequence: GAG
aggcatgatgaaaagatcaa

SEQ ID NO: 21608 - DNA, 20 bp, Artificial Sequence
  Description of Artificial Sequence: Synthetic oligonucleotide
  Target: SCNA; (-) strand; PAM type: NRG; PAM sequence: AAG
aaaggcatgatgaaaagatc

SEQ ID NO: 21609 - DNA, 20 bp, Artificial Sequence
  Description of Artificial Sequence: Synthetic oligonucleotide
  Target: SCNA; (-) strand; PAM type: NRG; PAM sequence: AAG
aaaaataaaggcatgatgaa

SEQ ID NO: 21610 - DNA, 20 bp, Artificial Sequence
  Description of Artificial Sequence: Synthetic oligonucleotide
  Target: SCNA; (-) strand; PAM type: NRG; PAM sequence: AGG
tactgcatgtgtaaaaataa

SEQ ID NO: 21611 - DNA, 20 bp, Artificial Sequence
  Description of Artificial Sequence: Synthetic oligonucleotide
  Target: SCNA; (-) strand; PAM type: NRG; PAM sequence: AAG
gtactgcatgtgtaaaaata

SEQ ID NO: 21612 - DNA, 20 bp, Artificial Sequence
  Description of Artificial Sequence: Synthetic oligonucleotide
  Target: SCNA; (-) strand; PAM type: NRG; PAM sequence: GAG
ctaaggtttgtttagactct

SEQ ID NO: 21613 - DNA, 20 bp, Artificial Sequence
  Description of Artificial Sequence: Synthetic oligonucleotide
  Target: SCNA; (-) strand; PAM type: NRG; PAM sequence: TAG
aatgcaagctaaggtttgtt

SEQ ID NO: 21614 - DNA, 20 bp, Artificial Sequence
  Description of Artificial Sequence: Synthetic oligonucleotide
  Target: SCNA; (-) strand; PAM type: NRG; PAM sequence: AGG
taagaggaaaatgcaagcta

SEQ ID NO: 21615 - DNA, 20 bp, Artificial Sequence
  Description of Artificial Sequence: Synthetic oligonucleotide
  Target: SCNA; (-) strand; PAM type: NRG; PAM sequence: AAG
ttaagaggaaaatgcaagct

SEQ ID NO: 21616 - DNA, 20 bp, Artificial Sequence
  Description of Artificial Sequence: Synthetic oligonucleotide
  Target: SCNA; (-) strand; PAM type: NRG; PAM sequence: AAG
ggcttttaagaggaaaatgc

SEQ ID NO: 21617 - DNA, 20 bp, Artificial Sequence
  Description of Artificial Sequence: Synthetic oligonucleotide
  Target: SCNA; (-) strand; PAM type: NRG; PAM sequence: AGG
atccatggtgggcttttaag

SEQ ID NO: 21618 - DNA, 20 bp, Artificial Sequence
  Description of Artificial Sequence: Synthetic oligonucleotide
  Target: SCNA; (-) strand; PAM type: NRG; PAM sequence: GAG
gatccatggtgggcttttaa

SEQ ID NO: 21619 - DNA, 20 bp, Artificial Sequence
  Description of Artificial Sequence: Synthetic oligonucleotide
  Target: SCNA; (-) strand; PAM type: NRG; PAM sequence: AAG
gagatccatggtgggctttt

SEQ ID NO: 21620 - DNA, 20 bp, Artificial Sequence
  Description of Artificial Sequence: Synthetic oligonucleotide
  Target: SCNA; (-) strand; PAM type: NRG; PAM sequence: GGG
aaaactgtgagatccatggt

SEQ ID NO: 21621 - DNA, 20 bp, Artificial Sequence
  Description of Artificial Sequence: Synthetic oligonucleotide
  Target: SCNA; (-) strand; PAM type: NRG; PAM sequence: TGG
caaaactgtgagatccatgg

SEQ ID NO: 21622 - DNA, 20 bp, Artificial Sequence
  Description of Artificial Sequence: Synthetic oligonucleotide
  Target: SCNA; (-) strand; PAM type: NRG; PAM sequence: TGG
caacaaaactgtgagatcca

SEQ ID NO: 21623 - DNA, 20 bp, Artificial Sequence
  Description of Artificial Sequence: Synthetic oligonucleotide
  Target: SCNA; (-) strand; PAM type: NRG; PAM sequence: GAG
aacaacaacaacaaaactgt

SEQ ID NO: 21624 - DNA, 20 bp, Artificial Sequence
  Description of Artificial Sequence: Synthetic oligonucleotide
  Target: SCNA; (-) strand; PAM type: NRG; PAM sequence: GAG
ctccagcctggcaacagagt

SEQ ID NO: 21625 - DNA, 20 bp, Artificial Sequence
  Description of Artificial Sequence: Synthetic oligonucleotide
  Target: SCNA; (-) strand; PAM type: NRG; PAM sequence: GAG
tgcactccagcctggcaaca

SEQ ID NO: 21626 - DNA, 20 bp, Artificial Sequence
  Description of Artificial Sequence: Synthetic oligonucleotide
  Target: SCNA; (-) strand; PAM type: NRG; PAM sequence: CAG
actgcactccagcctggcaa

SEQ ID NO: 21627 - DNA, 20 bp, Artificial Sequence
  Description of Artificial Sequence: Synthetic oligonucleotide
  Target: SCNA; (-) strand; PAM type: NRG; PAM sequence: TGG
tgtgccactgcactccagcc

SEQ ID NO: 21628 - DNA, 20 bp, Artificial Sequence
  Description of Artificial Sequence: Synthetic oligonucleotide
  Target: SCNA; (-) strand; PAM type: NRG; PAM sequence: CAG
aagattgtgccactgcactc

SEQ ID NO: 21629 - DNA, 20 bp, Artificial Sequence
  Description of Artificial Sequence: Synthetic oligonucleotide
  Target: SCNA; (-) strand; PAM type: NRG; PAM sequence: AAG
gtcggaggttgcagtgagcc

SEQ ID NO: 21630 - DNA, 20 bp, Artificial Sequence
  Description of Artificial Sequence: Synthetic oligonucleotide
  Target: SCNA; (-) strand; PAM type: NRG; PAM sequence: GAG
aaggagtcggaggttgcagt

SEQ ID NO: 21631 - DNA, 20 bp, Artificial Sequence
  Description of Artificial Sequence: Synthetic oligonucleotide
  Target: SCNA; (-) strand; PAM type: NRG; PAM sequence: CAG
aaccaaggagtcggaggttg

SEQ ID NO: 21632 - DNA, 20 bp, Artificial Sequence
  Description of Artificial Sequence: Synthetic oligonucleotide
  Target: SCNA; (-) strand; PAM type: NRG; PAM sequence: AGG
ttgaacaaccaaggagtcgg

SEQ ID NO: 21633 - DNA, 20 bp, Artificial Sequence
  Description of Artificial Sequence: Synthetic oligonucleotide
  Target: SCNA; (-) strand; PAM type: NRG; PAM sequence: GAG
cttgaacaaccaaggagtcg

SEQ ID NO: 21634 - DNA, 20 bp, Artificial Sequence
  Description of Artificial Sequence: Synthetic oligonucleotide
  Target: SCNA; (-) strand; PAM type: NRG; PAM sequence: CGG
cacttgaacaaccaaggagt

SEQ ID NO: 21635 - DNA, 20 bp, Artificial Sequence
  Description of Artificial Sequence: Synthetic oligonucleotide
  Target: SCNA; (-) strand; PAM type: NRG; PAM sequence: GAG
gaatcacttgaacaaccaag

SEQ ID NO: 21636 - DNA, 20 bp, Artificial Sequence
  Description of Artificial Sequence: Synthetic oligonucleotide
  Target: SCNA; (-) strand; PAM type: NRG; PAM sequence: AGG
gagaatcacttgaacaacca

SEQ ID NO: 21637 - DNA, 20 bp, Artificial Sequence
  Description of Artificial Sequence: Synthetic oligonucleotide
  Target: SCNA; (-) strand; PAM type: NRG; PAM sequence: AAG
agagaatcacttgaacaacc

SEQ ID NO: 21638 - DNA, 20 bp, Artificial Sequence
  Description of Artificial Sequence: Synthetic oligonucleotide
  Target: SCNA; (-) strand; PAM type: NRG; PAM sequence: GAG
tatttgggaggctgaggcaa

SEQ ID NO: 21639 - DNA, 20 bp, Artificial Sequence
  Description of Artificial Sequence: Synthetic oligonucleotide
  Target: SCNA; (-) strand; PAM type: NRG; PAM sequence: AAG
gctatttgggaggctgaggc

SEQ ID NO: 21640 - DNA, 20 bp, Artificial Sequence
  Description of Artificial Sequence: Synthetic oligonucleotide
  Target: SCNA; (-) strand; PAM type: NRG; PAM sequence: AGG
ctcagctatttgggaggctg

SEQ ID NO: 21641 - DNA, 20 bp, Artificial Sequence
  Description of Artificial Sequence: Synthetic oligonucleotide
  Target: SCNA; (-) strand; PAM type: NRG; PAM sequence: GAG
tctcagctatttgggaggct

SEQ ID NO: 21642 - DNA, 20 bp, Artificial Sequence
  Description of Artificial Sequence: Synthetic oligonucleotide
  Target: SCNA; (-) strand; PAM type: NRG; PAM sequence: AGG
tgtaatctcagctatttggg

SEQ ID NO: 21643 - DNA, 20 bp, Artificial Sequence
  Description of Artificial Sequence: Synthetic oligonucleotide
  Target: SCNA; (-) strand; PAM type: NRG; PAM sequence: GAG
ctgtaatctcagctatttgg

SEQ ID NO: 21644 - DNA, 20 bp, Artificial Sequence
  Description of Artificial Sequence: Synthetic oligonucleotide
  Target: SCNA; (-) strand; PAM type: NRG; PAM sequence: GGG
gcctgtaatctcagctattt

SEQ ID NO: 21645 - DNA, 20 bp, Artificial Sequence
  Description of Artificial Sequence: Synthetic oligonucleotide
  Target: SCNA; (-) strand; PAM type: NRG; PAM sequence: TGG
tgcctgtaatctcagctatt

SEQ ID NO: 21646 - DNA, 20 bp, Artificial Sequence
  Description of Artificial Sequence: Synthetic oligonucleotide
  Target: SCNA; (-) strand; PAM type: NRG; PAM sequence: CAG
gtggcgcgtgcctgtaatct

SEQ ID NO: 21647 - DNA, 20 bp, Artificial Sequence
  Description of Artificial Sequence: Synthetic oligonucleotide
  Target: SCNA; (-) strand; PAM type: NRG; PAM sequence: TGG
caaaaattagctgggcctgg

SEQ ID NO: 21648 - DNA, 20 bp, Artificial Sequence
  Description of Artificial Sequence: Synthetic oligonucleotide
  Target: SCNA; (-) strand; PAM type: NRG; PAM sequence: TGG
atacaaaaattagctgggcc

SEQ ID NO: 21649 - DNA, 20 bp, Artificial Sequence
  Description of Artificial Sequence: Synthetic oligonucleotide
  Target: SCNA; (-) strand; PAM type: NRG; PAM sequence: GGG
taaaaatacaaaaattagct

SEQ ID NO: 21650 - DNA, 20 bp, Artificial Sequence
  Description of Artificial Sequence: Synthetic oligonucleotide
  Target: SCNA; (-) strand; PAM type: NRG; PAM sequence: TGG
ctaaaaatacaaaaattagc

SEQ ID NO: 21651 - DNA, 20 bp, Artificial Sequence
  Description of Artificial Sequence: Synthetic oligonucleotide
  Target: SCNA; (-) strand; PAM type: NRG; PAM sequence: TAG
tctactaaaaatacaaaaat

SEQ ID NO: 21652 - DNA, 20 bp, Artificial Sequence
  Description of Artificial Sequence: Synthetic oligonucleotide
  Target: SCNA; (-) strand; PAM type: NRG; PAM sequence: TGG
cgagaccatcctggccaaca

SEQ ID NO: 21653 - DNA, 20 bp, Artificial Sequence
  Description of Artificial Sequence: Synthetic oligonucleotide
  Target: SCNA; (-) strand; PAM type: NRG; PAM sequence: TGG
tcaggagatcgagaccatcc

SEQ ID NO: 21654 - DNA, 20 bp, Artificial Sequence
  Description of Artificial Sequence: Synthetic oligonucleotide
  Target: SCNA; (-) strand; PAM type: NRG; PAM sequence: GAG
gatcacgaggtcaggagatc

SEQ ID NO: 21655 - DNA, 20 bp, Artificial Sequence
  Description of Artificial Sequence: Synthetic oligonucleotide
  Target: SCNA; (-) strand; PAM type: NRG; PAM sequence: GAG
tgggtggatcacgaggtcag

SEQ ID NO: 21656 - DNA, 20 bp, Artificial Sequence
  Description of Artificial Sequence: Synthetic oligonucleotide
  Target: SCNA; (-) strand; PAM type: NRG; PAM sequence: AGG
ggtgggtggatcacgaggtc

SEQ ID NO: 21657 - DNA, 20 bp, Artificial Sequence
  Description of Artificial Sequence: Synthetic oligonucleotide
  Target: SCNA; (-) strand; PAM type: NRG; PAM sequence: CAG
aggtgggtggatcacgaggt

SEQ ID NO: 21658 - DNA, 20 bp, Artificial Sequence
  Description of Artificial Sequence: Synthetic oligonucleotide
  Target: SCNA; (-) strand; PAM type: NRG; PAM sequence: AGG
gctgaggtgggtggatcacg

SEQ ID NO: 21659 - DNA, 20 bp, Artificial Sequence
  Description of Artificial Sequence: Synthetic oligonucleotide
  Target: SCNA; (-) strand; PAM type: NRG; PAM sequence: GAG
ggctgaggtgggtggatcac

SEQ ID NO: 21660 - DNA, 20 bp, Artificial Sequence
  Description of Artificial Sequence: Synthetic oligonucleotide
  Target: SCNA; (-) strand; PAM type: NRG; PAM sequence: TGG
ctttggaaggctgaggtggg

SEQ ID NO: 21661 - DNA, 20 bp, Artificial Sequence
  Description of Artificial Sequence: Synthetic oligonucleotide
  Target: SCNA; (-) strand; PAM type: NRG; PAM sequence: GGG
gcactttggaaggctgaggt

SEQ ID NO: 21662 - DNA, 20 bp, Artificial Sequence
  Description of Artificial Sequence: Synthetic oligonucleotide
  Target: SCNA; (-) strand; PAM type: NRG; PAM sequence: TGG
agcactttggaaggctgagg

SEQ ID NO: 21663 - DNA, 20 bp, Artificial Sequence
  Description of Artificial Sequence: Synthetic oligonucleotide
  Target: SCNA; (-) strand; PAM type: NRG; PAM sequence: AGG
cccagcactttggaaggctg

SEQ ID NO: 21664 - DNA, 20 bp, Artificial Sequence
  Description of Artificial Sequence: Synthetic oligonucleotide
  Target: SCNA; (-) strand; PAM type: NRG; PAM sequence: GAG
tcccagcactttggaaggct

SEQ ID NO: 21665 - DNA, 20 bp, Artificial Sequence
  Description of Artificial Sequence: Synthetic oligonucleotide
  Target: SCNA; (-) strand; PAM type: NRG; PAM sequence: AGG
tataatcccagcactttgga

SEQ ID NO: 21666 - DNA, 20 bp, Artificial Sequence
  Description of Artificial Sequence: Synthetic oligonucleotide
  Target: SCNA; (-) strand; PAM type: NRG; PAM sequence: AAG
ctataatcccagcactttgg

SEQ ID NO: 21667 - DNA, 20 bp, Artificial Sequence
  Description of Artificial Sequence: Synthetic oligonucleotide
  Target: SCNA; (-) strand; PAM type: NRG; PAM sequence: TGG
cgcctataatcccagcactt

SEQ ID NO: 21668 - DNA, 20 bp, Artificial Sequence
  Description of Artificial Sequence: Synthetic oligonucleotide
  Target: SCNA; (-) strand; PAM type: NRG; PAM sequence: CAG
gtggctcacgcctataatcc

SEQ ID NO: 21669 - DNA, 20 bp, Artificial Sequence
  Description of Artificial Sequence: Synthetic oligonucleotide
  Target: SCNA; (-) strand; PAM type: NRG; PAM sequence: TGG
ctacaagaggccgggcgcgg

SEQ ID NO: 21670 - DNA, 20 bp, Artificial Sequence
  Description of Artificial Sequence: Synthetic oligonucleotide
  Target: SCNA; (-) strand; PAM type: NRG; PAM sequence: CGG
aaactacaagaggccgggcg

SEQ ID NO: 21671 - DNA, 20 bp, Artificial Sequence
  Description of Artificial Sequence: Synthetic oligonucleotide
  Target: SCNA; (-) strand; PAM type: NRG; PAM sequence: GGG
tttaaaaactacaagaggcc

SEQ ID NO: 21672 - DNA, 20 bp, Artificial Sequence
  Description of Artificial Sequence: Synthetic oligonucleotide
  Target: SCNA; (-) strand; PAM type: NRG; PAM sequence: CGG
ttttaaaaactacaagaggc

SEQ ID NO: 21673 - DNA, 20 bp, Artificial Sequence
  Description of Artificial Sequence: Synthetic oligonucleotide
  Target: SCNA; (-) strand; PAM type: NRG; PAM sequence: AGG
ttaattttaaaaactacaag

SEQ ID NO: 21674 - DNA, 20 bp, Artificial Sequence
  Description of Artificial Sequence: Synthetic oligonucleotide
  Target: SCNA; (-) strand; PAM type: NRG; PAM sequence: GAG
tttaattttaaaaactacaa

SEQ ID NO: 21675 - DNA, 20 bp, Artificial Sequence
  Description of Artificial Sequence: Synthetic oligonucleotide
  Target: SCNA; (-) strand; PAM type: NRG; PAM sequence: AAG
aatttaattttaaaaactac

SEQ ID NO: 21676 - DNA, 20 bp, Artificial Sequence
  Description of Artificial Sequence: Synthetic oligonucleotide
  Target: SCNA; (-) strand; PAM type: NRG; PAM sequence: TGG
aggcaaactaaatgttttat

SEQ ID NO: 21677 - DNA, 20 bp, Artificial Sequence
  Description of Artificial Sequence: Synthetic oligonucleotide
  Target: SCNA; (-) strand; PAM type: NRG; PAM sequence: AGG
agataacaaattccaaataa

SEQ ID NO: 21678 - DNA, 20 bp, Artificial Sequence
  Description of Artificial Sequence: Synthetic oligonucleotide
  Target: SCNA; (-) strand; PAM type: NRG; PAM sequence: AAG
tagataacaaattccaaata

SEQ ID NO: 21679 - DNA, 20 bp, Artificial Sequence
  Description of Artificial Sequence: Synthetic oligonucleotide
  Target: SCNA; (-) strand; PAM type: NRG; PAM sequence: TAG
attaatagagtatataacaa

SEQ ID NO: 21680 - DNA, 20 bp, Artificial Sequence
  Description of Artificial Sequence: Synthetic oligonucleotide
  Target: SCNA; (-) strand; PAM type: NRG; PAM sequence: GAG
ctgaagaggaggtattaata

SEQ ID NO: 21681 - DNA, 20 bp, Artificial Sequence
  Description of Artificial Sequence: Synthetic oligonucleotide
  Target: SCNA; (-) strand; PAM type: NRG; PAM sequence: TAG
tgctgaagaggaggtattaa

SEQ ID NO: 21682 - DNA, 20 bp, Artificial Sequence
  Description of Artificial Sequence: Synthetic oligonucleotide
  Target: SCNA; (-) strand; PAM type: NRG; PAM sequence: AGG
aaatttccttgctgaagagg

SEQ ID NO: 21683 - DNA, 20 bp, Artificial Sequence
  Description of Artificial Sequence: Synthetic oligonucleotide
  Target: SCNA; (-) strand; PAM type: NRG; PAM sequence: GAG
aaaatttccttgctgaagag

SEQ ID NO: 21684 - DNA, 20 bp, Artificial Sequence
  Description of Artificial Sequence: Synthetic oligonucleotide
  Target: SCNA; (-) strand; PAM type: NRG; PAM sequence: AGG
agaaaatttccttgctgaag

SEQ ID NO: 21685 - DNA, 20 bp, Artificial Sequence
  Description of Artificial Sequence: Synthetic oligonucleotide
  Target: SCNA; (-) strand; PAM type: NRG; PAM sequence: GAG
aagaaaatttccttgctgaa

SEQ ID NO: 21686 - DNA, 20 bp, Artificial Sequence
  Description of Artificial Sequence: Synthetic oligonucleotide
  Target: SCNA; (-) strand; PAM type: NRG; PAM sequence: AAG
gtaagaaaatttccttgctg

SEQ ID NO: 21687 - DNA, 20 bp, Artificial Sequence
  Description of Artificial Sequence: Synthetic oligonucleotide
  Target: SCNA; (-) strand; PAM type: NRG; PAM sequence: AAG
atgtacgtgtaagcagatgt

SEQ ID NO: 21688 - DNA, 20 bp, Artificial Sequence
  Description of Artificial Sequence: Synthetic oligonucleotide
  Target: SCNA; (-) strand; PAM type: NRG; PAM sequence: CAG
acaaatgatgtacgtgtaag

SEQ ID NO: 21689 - DNA, 20 bp, Artificial Sequence
  Description of Artificial Sequence: Synthetic oligonucleotide
  Target: SCNA; (-) strand; PAM type: NRG; PAM sequence: AAG
ctaacaaatgatgtacgtgt

SEQ ID NO: 21690 - DNA, 20 bp, Artificial Sequence
  Description of Artificial Sequence: Synthetic oligonucleotide
  Target: SCNA; (-) strand; PAM type: NRG; PAM sequence: GGG
tcatcattaccaatatttag

SEQ ID NO: 21691 - DNA, 20 bp, Artificial Sequence
  Description of Artificial Sequence: Synthetic oligonucleotide
  Target: SCNA; (-) strand; PAM type: NRG; PAM sequence: GGG
atcatcattaccaatattta

SEQ ID NO: 21692 - DNA, 20 bp, Artificial Sequence
  Description of Artificial Sequence: Synthetic oligonucleotide
  Target: SCNA; (-) strand; PAM type: NRG; PAM sequence: AGG
catcatcattaccaatattt

SEQ ID NO: 21693 - DNA, 20 bp, Artificial Sequence
  Description of Artificial Sequence: Synthetic oligonucleotide
  Target: SCNA; (-) strand; PAM type: NRG; PAM sequence: TAG
tcatcatcattaccaatatt

SEQ ID NO: 21694 - DNA, 20 bp, Artificial Sequence
  Description of Artificial Sequence: Synthetic oligonucleotide
  Target: SCNA; (-) strand; PAM type: NRG; PAM sequence: AAG
ttaggccaatgttcaacgta

SEQ ID NO: 21695 - DNA, 20 bp, Artificial Sequence
  Description of Artificial Sequence: Synthetic oligonucleotide
  Target: SCNA; (-) strand; PAM type: NRG; PAM sequence: AGG
ataatgtgtttaaagcactt

SEQ ID NO: 21696 - DNA, 20 bp, Artificial Sequence
  Description of Artificial Sequence: Synthetic oligonucleotide
  Target: SCNA; (-) strand; PAM type: NRG; PAM sequence: TAG
aataatgtgtttaaagcact

SEQ ID NO: 21697 - DNA, 20 bp, Artificial Sequence
  Description of Artificial Sequence: Synthetic oligonucleotide
  Target: SCNA; (-) strand; PAM type: NRG; PAM sequence: AAG
ctaggcaaataatgtgttta

SEQ ID NO: 21698 - DNA, 20 bp, Artificial Sequence
  Description of Artificial Sequence: Synthetic oligonucleotide
  Target: SCNA; (-) strand; PAM type: NRG; PAM sequence: AGG
acaaaaatgttgtaaatgct

SEQ ID NO: 21699 - DNA, 20 bp, Artificial Sequence
  Description of Artificial Sequence: Synthetic oligonucleotide
  Target: SCNA; (-) strand; PAM type: NRG; PAM sequence: TAG
tacaaaaatgttgtaaatgc

SEQ ID NO: 21700 - DNA, 20 bp, Artificial Sequence
  Description of Artificial Sequence: Synthetic oligonucleotide
  Target: SCNA; (-) strand; PAM type: NRG; PAM sequence: AAG
aacaaattatatcatagaac

SEQ ID NO: 21701 - DNA, 20 bp, Artificial Sequence
  Description of Artificial Sequence: Synthetic oligonucleotide
  Target: SCNA; (-) strand; PAM type: NRG; PAM sequence: TAG
tatcaaaacaaattatatca

SEQ ID NO: 21702 - DNA, 20 bp, Artificial Sequence
  Description of Artificial Sequence: Synthetic oligonucleotide
  Target: SCNA; (-) strand; PAM type: NRG; PAM sequence: TAG
gtaattcagtaggggaacaa

SEQ ID NO: 21703 - DNA, 20 bp, Artificial Sequence
  Description of Artificial Sequence: Synthetic oligonucleotide
  Target: SCNA; (-) strand; PAM type: NRG; PAM sequence: GGG
aatttgtggtaattcagtag

SEQ ID NO: 21704 - DNA, 20 bp, Artificial Sequence
  Description of Artificial Sequence: Synthetic oligonucleotide
  Target: SCNA; (-) strand; PAM type: NRG; PAM sequence: GGG
aaatttgtggtaattcagta

SEQ ID NO: 21705 - DNA, 20 bp, Artificial Sequence
  Description of Artificial Sequence: Synthetic oligonucleotide
  Target: SCNA; (-) strand; PAM type: NRG; PAM sequence: AGG
taaatttgtggtaattcagt

SEQ ID NO: 21706 - DNA, 20 bp, Artificial Sequence
  Description of Artificial Sequence: Synthetic oligonucleotide
  Target: SCNA; (-) strand; PAM type: NRG; PAM sequence: TAG
ataaatttgtggtaattcag

SEQ ID NO: 21707 - DNA, 20 bp, Artificial Sequence
  Description of Artificial Sequence: Synthetic oligonucleotide
  Target: SCNA; (-) strand; PAM type: NRG; PAM sequence: CAG
gtaataaatttgtggtaatt

SEQ ID NO: 21708 - DNA, 20 bp, Artificial Sequence
  Description of Artificial Sequence: Synthetic oligonucleotide
  Target: SCNA; (-) strand; PAM type: NRG; PAM sequence: TGG
cccacaatgtaataaatttg

SEQ ID NO: 21709 - DNA, 20 bp, Artificial Sequence
  Description of Artificial Sequence: Synthetic oligonucleotide
  Target: SCNA; (-) strand; PAM type: NRG; PAM sequence: CAG
gtgagacccctattggactt

SEQ ID NO: 21710 - DNA, 20 bp, Artificial Sequence
  Description of Artificial Sequence: Synthetic oligonucleotide
  Target: SCNA; (-) strand; PAM type: NRG; PAM sequence: TGG
taggctagtgagacccctat

SEQ ID NO: 21711 - DNA, 20 bp, Artificial Sequence
  Description of Artificial Sequence: Synthetic oligonucleotide
  Target: SCNA; (-) strand; PAM type: NRG; PAM sequence: GAG
caccttaactttaggctagt

SEQ ID NO: 21712 - DNA, 20 bp, Artificial Sequence
  Description of Artificial Sequence: Synthetic oligonucleotide
  Target: SCNA; (-) strand; PAM type: NRG; PAM sequence: TAG
ccgacaccttaactttaggc

SEQ ID NO: 21713 - DNA, 20 bp, Artificial Sequence
  Description of Artificial Sequence: Synthetic oligonucleotide
  Target: SCNA; (-) strand; PAM type: NRG; PAM sequence: AGG
cctgccgacaccttaacttt

SEQ ID NO: 21714 - DNA, 20 bp, Artificial Sequence
  Description of Artificial Sequence: Synthetic oligonucleotide
  Target: SCNA; (-) strand; PAM type: NRG; PAM sequence: TAG
tcctgccgacaccttaactt

SEQ ID NO: 21715 - DNA, 20 bp, Artificial Sequence
  Description of Artificial Sequence: Synthetic oligonucleotide
  Target: SCNA; (-) strand; PAM type: NRG; PAM sequence: CAG
agagtctccaaaacagaaca

SEQ ID NO: 21716 - DNA, 20 bp, Artificial Sequence
  Description of Artificial Sequence: Synthetic oligonucleotide
  Target: SCNA; (-) strand; PAM type: NRG; PAM sequence: CAG
ttctcctagagtctccaaaa

SEQ ID NO: 21717 - DNA, 20 bp, Artificial Sequence
  Description of Artificial Sequence: Synthetic oligonucleotide
  Target: SCNA; (-) strand; PAM type: NRG; PAM sequence: GAG
aggagacagattttctccta

SEQ ID NO: 21718 - DNA, 20 bp, Artificial Sequence
  Description of Artificial Sequence: Synthetic oligonucleotide
  Target: SCNA; (-) strand; PAM type: NRG; PAM sequence: TAG
caaggagacagattttctcc

SEQ ID NO: 21719 - DNA, 20 bp, Artificial Sequence
  Description of Artificial Sequence: Synthetic oligonucleotide
  Target: SCNA; (-) strand; PAM type: NRG; PAM sequence: CAG
agctggaaaaggcaaggaga

SEQ ID NO: 21720 - DNA, 20 bp, Artificial Sequence
  Description of Artificial Sequence: Synthetic oligonucleotide
  Target: SCNA; (-) strand; PAM type: NRG; PAM sequence: GAG
aagaagctggaaaaggcaag

SEQ ID NO: 21721 - DNA, 20 bp, Artificial Sequence
  Description of Artificial Sequence: Synthetic oligonucleotide
  Target: SCNA; (-) strand; PAM type: NRG; PAM sequence: AGG
tcaagaagctggaaaaggca

SEQ ID NO: 21722 - DNA, 20 bp, Artificial Sequence
  Description of Artificial Sequence: Synthetic oligonucleotide
  Target: SCNA; (-) strand; PAM type: NRG; PAM sequence: AAG
atcaagaagctggaaaaggc

SEQ ID NO: 21723 - DNA, 20 bp, Artificial Sequence
  Description of Artificial Sequence: Synthetic oligonucleotide
  Target: SCNA; (-) strand; PAM type: NRG; PAM sequence: AGG
tggcatcaagaagctggaaa

SEQ ID NO: 21724 - DNA, 20 bp, Artificial Sequence
  Description of Artificial Sequence: Synthetic oligonucleotide
  Target: SCNA; (-) strand; PAM type: NRG; PAM sequence: AAG
atggcatcaagaagctggaa

SEQ ID NO: 21725 - DNA, 20 bp, Artificial Sequence
  Description of Artificial Sequence: Synthetic oligonucleotide
  Target: SCNA; (-) strand; PAM type: NRG; PAM sequence: TGG
tatgaatggcatcaagaagc

SEQ ID NO: 21726 - DNA, 20 bp, Artificial Sequence
  Description of Artificial Sequence: Synthetic oligonucleotide
  Target: SCNA; (-) strand; PAM type: NRG; PAM sequence: AAG
aagctatgaatggcatcaag

SEQ ID NO: 21727 - DNA, 20 bp, Artificial Sequence
  Description of Artificial Sequence: Synthetic oligonucleotide
  Target: SCNA; (-) strand; PAM type: NRG; PAM sequence: AAG
aagaagctatgaatggcatc

SEQ ID NO: 21728 - DNA, 20 bp, Artificial Sequence
  Description of Artificial Sequence: Synthetic oligonucleotide
  Target: SCNA; (-) strand; PAM type: NRG; PAM sequence: TGG
atcatgaaagaagctatgaa

SEQ ID NO: 21729 - DNA, 20 bp, Artificial Sequence
  Description of Artificial Sequence: Synthetic oligonucleotide
  Target: SCNA; (-) strand; PAM type: NRG; PAM sequence: AAG
aggatgccagatcatgaaag

SEQ ID NO: 21730 - DNA, 20 bp, Artificial Sequence
  Description of Artificial Sequence: Synthetic oligonucleotide
  Target: SCNA; (-) strand; PAM type: NRG; PAM sequence: AAG
tataggatgccagatcatga

SEQ ID NO: 21731 - DNA, 20 bp, Artificial Sequence
  Description of Artificial Sequence: Synthetic oligonucleotide
  Target: SCNA; (-) strand; PAM type: NRG; PAM sequence: CAG
aagtataacgtataggatgc

SEQ ID NO: 21732 - DNA, 20 bp, Artificial Sequence
  Description of Artificial Sequence: Synthetic oligonucleotide
  Target: SCNA; (-) strand; PAM type: NRG; PAM sequence: AGG
agaaaataagtataacgtat

SEQ ID NO: 21733 - DNA, 20 bp, Artificial Sequence
  Description of Artificial Sequence: Synthetic oligonucleotide
  Target: SCNA; (-) strand; PAM type: NRG; PAM sequence: TAG
cagaaaataagtataacgta

SEQ ID NO: 21734 - DNA, 20 bp, Artificial Sequence
  Description of Artificial Sequence: Synthetic oligonucleotide
  Target: SCNA; (-) strand; PAM type: NRG; PAM sequence: AAG
gcaaaatataatcagaaaat

SEQ ID NO: 21735 - DNA, 20 bp, Artificial Sequence
  Description of Artificial Sequence: Synthetic oligonucleotide
  Target: SCNA; (-) strand; PAM type: NRG; PAM sequence: CAG
gaggttaggcaaaatataat

SEQ ID NO: 21736 - DNA, 20 bp, Artificial Sequence
  Description of Artificial Sequence: Synthetic oligonucleotide
  Target: SCNA; (-) strand; PAM type: NRG; PAM sequence: AGG
attaatatctcacagaggtt

SEQ ID NO: 21737 - DNA, 20 bp, Artificial Sequence
  Description of Artificial Sequence: Synthetic oligonucleotide
  Target: SCNA; (-) strand; PAM type: NRG; PAM sequence: TAG
aattaatatctcacagaggt

SEQ ID NO: 21738 - DNA, 20 bp, Artificial Sequence
  Description of Artificial Sequence: Synthetic oligonucleotide
  Target: SCNA; (-) strand; PAM type: NRG; PAM sequence: AGG
aaataattaatatctcacag

SEQ ID NO: 21739 - DNA, 20 bp, Artificial Sequence
  Description of Artificial Sequence: Synthetic oligonucleotide
  Target: SCNA; (-) strand; PAM type: NRG; PAM sequence: GAG
caaataattaatatctcaca

SEQ ID NO: 21740 - DNA, 20 bp, Artificial Sequence
  Description of Artificial Sequence: Synthetic oligonucleotide
  Target: SCNA; (-) strand; PAM type: NRG; PAM sequence: CAG
ctcaaataattaatatctca

SEQ ID NO: 21741 - DNA, 20 bp, Artificial Sequence
  Description of Artificial Sequence: Synthetic oligonucleotide
  Target: SCNA; (-) strand; PAM type: NRG; PAM sequence: TAG
cattttaaggcacctggata

SEQ ID NO: 21742 - DNA, 20 bp, Artificial Sequence
  Description of Artificial Sequence: Synthetic oligonucleotide
  Target: SCNA; (-) strand; PAM type: NRG; PAM sequence: TGG
aggcatcattttaaggcacc

SEQ ID NO: 21743 - DNA, 20 bp, Artificial Sequence
  Description of Artificial Sequence: Synthetic oligonucleotide
  Target: SCNA; (-) strand; PAM type: NRG; PAM sequence: AGG
ttgtgtcaggcatcatttta

SEQ ID NO: 21744 - DNA, 20 bp, Artificial Sequence
  Description of Artificial Sequence: Synthetic oligonucleotide
  Target: SCNA; (-) strand; PAM type: NRG; PAM sequence: AAG
tttgtgtcaggcatcatttt

SEQ ID NO: 21745 - DNA, 20 bp, Artificial Sequence
  Description of Artificial Sequence: Synthetic oligonucleotide
  Target: SCNA; (-) strand; PAM type: NRG; PAM sequence: AGG
ttgagtacctattttgtgtc

SEQ ID NO: 21746 - DNA, 20 bp, Artificial Sequence
  Description of Artificial Sequence: Synthetic oligonucleotide
  Target: SCNA; (-) strand; PAM type: NRG; PAM sequence: CAG
attgagtacctattttgtgt

SEQ ID NO: 21747 - DNA, 20 bp, Artificial Sequence
  Description of Artificial Sequence: Synthetic oligonucleotide
  Target: SCNA; (-) strand; PAM type: NRG; PAM sequence: GAG
tttattaacctatgttgatt

SEQ ID NO: 21748 - DNA, 20 bp, Artificial Sequence
  Description of Artificial Sequence: Synthetic oligonucleotide
  Target: SCNA; (-) strand; PAM type: NRG; PAM sequence: AGG
atgtctgagtatattccccc

SEQ ID NO: 21749 - DNA, 20 bp, Artificial Sequence
  Description of Artificial Sequence: Synthetic oligonucleotide
  Target: SCNA; (-) strand; PAM type: NRG; PAM sequence: CAG
gatgtctgagtatattcccc

SEQ ID NO: 21750 - DNA, 20 bp, Artificial Sequence
  Description of Artificial Sequence: Synthetic oligonucleotide
  Target: SCNA; (-) strand; PAM type: NRG; PAM sequence: GAG
atatgagacttaagatgtct

SEQ ID NO: 21751 - DNA, 20 bp, Artificial Sequence
  Description of Artificial Sequence: Synthetic oligonucleotide
  Target: SCNA; (-) strand; PAM type: NRG; PAM sequence: AAG
caagtttacatatgagactt

SEQ ID NO: 21752 - DNA, 20 bp, Artificial Sequence
  Description of Artificial Sequence: Synthetic oligonucleotide
  Target: SCNA; (-) strand; PAM type: NRG; PAM sequence: GAG
aataccccaagtttacatat

SEQ ID NO: 21753 - DNA, 20 bp, Artificial Sequence
  Description of Artificial Sequence: Synthetic oligonucleotide
  Target: SCNA; (-) strand; PAM type: NRG; PAM sequence: AAG
catgttgatatcaatacccc

SEQ ID NO: 21754 - DNA, 20 bp, Artificial Sequence
  Description of Artificial Sequence: Synthetic oligonucleotide
  Target: SCNA; (-) strand; PAM type: NRG; PAM sequence: TGG
acctcaattaatcctcaaaa

SEQ ID NO: 21755 - DNA, 20 bp, Artificial Sequence
  Description of Artificial Sequence: Synthetic oligonucleotide
  Target: SCNA; (-) strand; PAM type: NRG; PAM sequence: TAG
actatgctagtaggtattta

SEQ ID NO: 21756 - DNA, 20 bp, Artificial Sequence
  Description of Artificial Sequence: Synthetic oligonucleotide
  Target: SCNA; (-) strand; PAM type: NRG; PAM sequence: AGG
gtgctagacactatgctagt

SEQ ID NO: 21757 - DNA, 20 bp, Artificial Sequence
  Description of Artificial Sequence: Synthetic oligonucleotide
  Target: SCNA; (-) strand; PAM type: NRG; PAM sequence: TAG
tgtgctagacactatgctag

SEQ ID NO: 21758 - DNA, 20 bp, Artificial Sequence
  Description of Artificial Sequence: Synthetic oligonucleotide
  Target: SCNA; (-) strand; PAM type: NRG; PAM sequence: TAG
ctatgtgctagacactatgc

SEQ ID NO: 21759 - DNA, 20 bp, Artificial Sequence
  Description of Artificial Sequence: Synthetic oligonucleotide
  Target: SCNA; (-) strand; PAM type: NRG; PAM sequence: TAG
aatgttttcatactatgtgc

SEQ ID NO: 21760 - DNA, 20 bp, Artificial Sequence
  Description of Artificial Sequence: Synthetic oligonucleotide
  Target: SCNA; (-) strand; PAM type: NRG; PAM sequence: AAG
ggatagtgtcaggtgctata

SEQ ID NO: 21761 - DNA, 20 bp, Artificial Sequence
  Description of Artificial Sequence: Synthetic oligonucleotide
  Target: SCNA; (-) strand; PAM type: NRG; PAM sequence: AGG
aaggcaatttggatagtgtc

SEQ ID NO: 21762 - DNA, 20 bp, Artificial Sequence
  Description of Artificial Sequence: Synthetic oligonucleotide
  Target: SCNA; (-) strand; PAM type: NRG; PAM sequence: CAG
aaaggcaatttggatagtgt

SEQ ID NO: 21763 - DNA, 20 bp, Artificial Sequence
  Description of Artificial Sequence: Synthetic oligonucleotide
  Target: SCNA; (-) strand; PAM type: NRG; PAM sequence: TAG
aacagaaaaggcaatttgga

SEQ ID NO: 21764 - DNA, 20 bp, Artificial Sequence
  Description of Artificial Sequence: Synthetic oligonucleotide
  Target: SCNA; (-) strand; PAM type: NRG; PAM sequence: TGG
aagaaacagaaaaggcaatt

SEQ ID NO: 21765 - DNA, 20 bp, Artificial Sequence
  Description of Artificial Sequence: Synthetic oligonucleotide
  Target: SCNA; (-) strand; PAM type: NRG; PAM sequence: AGG
aaaaagaaaagaaacagaaa

SEQ ID NO: 21766 - DNA, 20 bp, Artificial Sequence
  Description of Artificial Sequence: Synthetic oligonucleotide
  Target: SCNA; (-) strand; PAM type: NRG; PAM sequence: AAG
taaaaagaaaagaaacagaa

SEQ ID NO: 21767 - DNA, 20 bp, Artificial Sequence
  Description of Artificial Sequence: Synthetic oligonucleotide
  Target: SCNA; (-) strand; PAM type: NRG; PAM sequence: CAG
ataagtaaaaagaaaagaaa

SEQ ID NO: 21768 - DNA, 20 bp, Artificial Sequence
  Description of Artificial Sequence: Synthetic oligonucleotide
  Target: SCNA; (-) strand; PAM type: NRG; PAM sequence: AAG
taagaaataagtaaaaagaa

SEQ ID NO: 21769 - DNA, 20 bp, Artificial Sequence
  Description of Artificial Sequence: Synthetic oligonucleotide
  Target: SCNA; (-) strand; PAM type: NRG; PAM sequence: AAG
acaattaagaaataagtaaa

SEQ ID NO: 21770 - DNA, 20 bp, Artificial Sequence
  Description of Artificial Sequence: Synthetic oligonucleotide
  Target: SCNA; (-) strand; PAM type: NRG; PAM sequence: AAG
ttgtgaaacaattaagaaat

SEQ ID NO: 21771 - DNA, 20 bp, Artificial Sequence
  Description of Artificial Sequence: Synthetic oligonucleotide
  Target: SCNA; (-) strand; PAM type: NRG; PAM sequence: AAG
tctgcctttgtgaaacaatt

SEQ ID NO: 21772 - DNA, 20 bp, Artificial Sequence
  Description of Artificial Sequence: Synthetic oligonucleotide
  Target: SCNA; (-) strand; PAM type: NRG; PAM sequence: AAG
gacatagaggcaaagcatac

SEQ ID NO: 21773 - DNA, 20 bp, Artificial Sequence
  Description of Artificial Sequence: Synthetic oligonucleotide
  Target: SCNA; (-) strand; PAM type: NRG; PAM sequence: AAG
gtactaaagacatagaggca

SEQ ID NO: 21774 - DNA, 20 bp, Artificial Sequence
  Description of Artificial Sequence: Synthetic oligonucleotide
  Target: SCNA; (-) strand; PAM type: NRG; PAM sequence: AGG
tctaggtactaaagacatag

SEQ ID NO: 21775 - DNA, 20 bp, Artificial Sequence
  Description of Artificial Sequence: Synthetic oligonucleotide
  Target: SCNA; (-) strand; PAM type: NRG; PAM sequence: GAG
ttctaggtactaaagacata

SEQ ID NO: 21776 - DNA, 20 bp, Artificial Sequence
  Description of Artificial Sequence: Synthetic oligonucleotide
  Target: SCNA; (-) strand; PAM type: NRG; PAM sequence: TAG
tattctaggtactaaagaca

SEQ ID NO: 21777 - DNA, 20 bp, Artificial Sequence
  Description of Artificial Sequence: Synthetic oligonucleotide
  Target: SCNA; (-) strand; PAM type: NRG; PAM sequence: AAG
aggcactattctaggtacta

SEQ ID NO: 21778 - DNA, 20 bp, Artificial Sequence
  Description of Artificial Sequence: Synthetic oligonucleotide
  Target: SCNA; (-) strand; PAM type: NRG; PAM sequence: AGG
ttttaaacaggcactattct

SEQ ID NO: 21779 - DNA, 20 bp, Artificial Sequence
  Description of Artificial Sequence: Synthetic oligonucleotide
  Target: SCNA; (-) strand; PAM type: NRG; PAM sequence: TAG
cttttaaacaggcactattc

SEQ ID NO: 21780 - DNA, 20 bp, Artificial Sequence
  Description of Artificial Sequence: Synthetic oligonucleotide
  Target: SCNA; (-) strand; PAM type: NRG; PAM sequence: AGG
ttcagctcctacttttaaac

SEQ ID NO: 21781 - DNA, 20 bp, Artificial Sequence
  Description of Artificial Sequence: Synthetic oligonucleotide
  Target: SCNA; (-) strand; PAM type: NRG; PAM sequence: CAG
attcagctcctacttttaaa

SEQ ID NO: 21782 - DNA, 20 bp, Artificial Sequence
  Description of Artificial Sequence: Synthetic oligonucleotide
  Target: SCNA; (-) strand; PAM type: NRG; PAM sequence: CAG
taattcagcaaacatttatt

SEQ ID NO: 21783 - DNA, 20 bp, Artificial Sequence
  Description of Artificial Sequence: Synthetic oligonucleotide
  Target: SCNA; (-) strand; PAM type: NRG; PAM sequence: CAG
acacatgattaatattaatt

SEQ ID NO: 21784 - DNA, 20 bp, Artificial Sequence
  Description of Artificial Sequence: Synthetic oligonucleotide
  Target: SCNA; (-) strand; PAM type: NRG; PAM sequence: AAG
ggtggtagaataacattccc

SEQ ID NO: 21785 - DNA, 20 bp, Artificial Sequence
  Description of Artificial Sequence: Synthetic oligonucleotide
  Target: SCNA; (-) strand; PAM type: NRG; PAM sequence: TAG
gtgggcacagctgtgggtgg

SEQ ID NO: 21786 - DNA, 20 bp, Artificial Sequence
  Description of Artificial Sequence: Synthetic oligonucleotide
  Target: SCNA; (-) strand; PAM type: NRG; PAM sequence: TGG
atagtgggcacagctgtggg

SEQ ID NO: 21787 - DNA, 20 bp, Artificial Sequence
  Description of Artificial Sequence: Synthetic oligonucleotide
  Target: SCNA; (-) strand; PAM type: NRG; PAM sequence: GGG
ataatagtgggcacagctgt

SEQ ID NO: 21788 - DNA, 20 bp, Artificial Sequence
  Description of Artificial Sequence: Synthetic oligonucleotide
  Target: SCNA; (-) strand; PAM type: NRG; PAM sequence: TGG
cataatagtgggcacagctg

SEQ ID NO: 21789 - DNA, 20 bp, Artificial Sequence
  Description of Artificial Sequence: Synthetic oligonucleotide
  Target: SCNA; (-) strand; PAM type: NRG; PAM sequence: CAG
aaccatcataatagtgggca

SEQ ID NO: 21790 - DNA, 20 bp, Artificial Sequence
  Description of Artificial Sequence: Synthetic oligonucleotide
  Target: SCNA; (-) strand; PAM type: NRG; PAM sequence: GGG
aaaacaaccatcataatagt

SEQ ID NO: 21791 - DNA, 20 bp, Artificial Sequence
  Description of Artificial Sequence: Synthetic oligonucleotide
  Target: SCNA; (-) strand; PAM type: NRG; PAM sequence: TGG
caaaacaaccatcataatag

SEQ ID NO: 21792 - DNA, 20 bp, Artificial Sequence
  Description of Artificial Sequence: Synthetic oligonucleotide
  Target: SCNA; (-) strand; PAM type: NRG; PAM sequence: TAG
acacaaaacaaccatcataa

SEQ ID NO: 21793 - DNA, 20 bp, Artificial Sequence
  Description of Artificial Sequence: Synthetic oligonucleotide
  Target: SCNA; (-) strand; PAM type: NRG; PAM sequence: AAG
ctgaaagtgaatccttgaga

SEQ ID NO: 21794 - DNA, 20 bp, Artificial Sequence
  Description of Artificial Sequence: Synthetic oligonucleotide
  Target: SCNA; (-) strand; PAM type: NRG; PAM sequence: GAG
agttctgaaagtgaatcctt

SEQ ID NO: 21795 - DNA, 20 bp, Artificial Sequence
  Description of Artificial Sequence: Synthetic oligonucleotide
  Target: SCNA; (-) strand; PAM type: NRG; PAM sequence: AAG
caccccattttgagttctga

SEQ ID NO: 21796 - DNA, 20 bp, Artificial Sequence
  Description of Artificial Sequence: Synthetic oligonucleotide
  Target: SCNA; (-) strand; PAM type: NRG; PAM sequence: GAG
accaccctacaccccatttt

SEQ ID NO: 21797 - DNA, 20 bp, Artificial Sequence
  Description of Artificial Sequence: Synthetic oligonucleotide
  Target: SCNA; (-) strand; PAM type: NRG; PAM sequence: TGG
gcttctcccatccccactgc

SEQ ID NO: 21798 - DNA, 20 bp, Artificial Sequence
  Description of Artificial Sequence: Synthetic oligonucleotide
  Target: SCNA; (-) strand; PAM type: NRG; PAM sequence: GAG
ttctactgtagggagagatc

SEQ ID NO: 21799 - DNA, 20 bp, Artificial Sequence
  Description of Artificial Sequence: Synthetic oligonucleotide
  Target: SCNA; (-) strand; PAM type: NRG; PAM sequence: GAG
aagcacttctactgtaggga

SEQ ID NO: 21800 - DNA, 20 bp, Artificial Sequence
  Description of Artificial Sequence: Synthetic oligonucleotide
  Target: SCNA; (-) strand; PAM type: NRG; PAM sequence: GAG
gtaagcacttctactgtagg

SEQ ID NO: 21801 - DNA, 20 bp, Artificial Sequence
  Description of Artificial Sequence: Synthetic oligonucleotide
  Target: SCNA; (-) strand; PAM type: NRG; PAM sequence: GGG
cagtaagcacttctactgta

SEQ ID NO: 21802 - DNA, 20 bp, Artificial Sequence
  Description of Artificial Sequence: Synthetic oligonucleotide
  Target: SCNA; (-) strand; PAM type: NRG; PAM sequence: AGG
gcagtaagcacttctactgt

SEQ ID NO: 21803 - DNA, 20 bp, Artificial Sequence
  Description of Artificial Sequence: Synthetic oligonucleotide
  Target: SCNA; (-) strand; PAM type: NRG; PAM sequence: TAG
agcagtaagcacttctactg

SEQ ID NO: 21804 - DNA, 20 bp, Artificial Sequence
  Description of Artificial Sequence: Synthetic oligonucleotide
  Target: SCNA; (-) strand; PAM type: NRG; PAM sequence: AAG
tgaagaacacatagagcagt

SEQ ID NO: 21805 - DNA, 20 bp, Artificial Sequence
  Description of Artificial Sequence: Synthetic oligonucleotide
  Target: SCNA; (-) strand; PAM type: NRG; PAM sequence: CAG
gggctgaagaacacatagag

SEQ ID NO: 21806 - DNA, 20 bp, Artificial Sequence
  Description of Artificial Sequence: Synthetic oligonucleotide
  Target: SCNA; (-) strand; PAM type: NRG; PAM sequence: GAG
atagggctgaagaacacata

SEQ ID NO: 21807 - DNA, 20 bp, Artificial Sequence
  Description of Artificial Sequence: Synthetic oligonucleotide
  Target: SCNA; (-) strand; PAM type: NRG; PAM sequence: TAG
ttatagggctgaagaacaca

SEQ ID NO: 21808 - DNA, 20 bp, Artificial Sequence
  Description of Artificial Sequence: Synthetic oligonucleotide
  Target: SCNA; (-) strand; PAM type: NRG; PAM sequence: AAG
cattggttcttatagggctg

SEQ ID NO: 21809 - DNA, 20 bp, Artificial Sequence
  Description of Artificial Sequence: Synthetic oligonucleotide
  Target: SCNA; (-) strand; PAM type: NRG; PAM sequence: GGG
ggctttcattggttcttata

SEQ ID NO: 21810 - DNA, 20 bp, Artificial Sequence
  Description of Artificial Sequence: Synthetic oligonucleotide
  Target: SCNA; (-) strand; PAM type: NRG; PAM sequence: AGG
tggctttcattggttcttat

SEQ ID NO: 21811 - DNA, 20 bp, Artificial Sequence
  Description of Artificial Sequence: Synthetic oligonucleotide
  Target: SCNA; (-) strand; PAM type: NRG; PAM sequence: TAG
atggctttcattggttctta

SEQ ID NO: 21812 - DNA, 20 bp, Artificial Sequence
  Description of Artificial Sequence: Synthetic oligonucleotide
  Target: SCNA; (-) strand; PAM type: NRG; PAM sequence: TGG
gaagtgtggatggctttcat

SEQ ID NO: 21813 - DNA, 20 bp, Artificial Sequence
  Description of Artificial Sequence: Synthetic oligonucleotide
  Target: SCNA; (-) strand; PAM type: NRG; PAM sequence: TGG
agtatcgagggaagtgtgga

SEQ ID NO: 21814 - DNA, 20 bp, Artificial Sequence
  Description of Artificial Sequence: Synthetic oligonucleotide
  Target: SCNA; (-) strand; PAM type: NRG; PAM sequence: TGG
gtccagtatcgagggaagtg

SEQ ID NO: 21815 - DNA, 20 bp, Artificial Sequence
  Description of Artificial Sequence: Synthetic oligonucleotide
  Target: SCNA; (-) strand; PAM type: NRG; PAM sequence: AAG
gggatgtccagtatcgaggg

SEQ ID NO: 21816 - DNA, 20 bp, Artificial Sequence
  Description of Artificial Sequence: Synthetic oligonucleotide
  Target: SCNA; (-) strand; PAM type: NRG; PAM sequence: GGG
gtagggatgtccagtatcga

SEQ ID NO: 21817 - DNA, 20 bp, Artificial Sequence
  Description of Artificial Sequence: Synthetic oligonucleotide
  Target: SCNA; (-) strand; PAM type: NRG; PAM sequence: AGG
tgtagggatgtccagtatcg

SEQ ID NO: 21818 - DNA, 20 bp, Artificial Sequence
  Description of Artificial Sequence: Synthetic oligonucleotide
  Target: SCNA; (-) strand; PAM type: NRG; PAM sequence: GAG
atgtagggatgtccagtatc

SEQ ID NO: 21819 - DNA, 20 bp, Artificial Sequence
  Description of Artificial Sequence: Synthetic oligonucleotide
  Target: SCNA; (-) strand; PAM type: NRG; PAM sequence: CAG
tgtgagtatgtagggatgtc

SEQ ID NO: 21820 - DNA, 20 bp, Artificial Sequence
  Description of Artificial Sequence: Synthetic oligonucleotide
  Target: SCNA; (-) strand; PAM type: NRG; PAM sequence: GGG
cagactgctgtgagtatgta

SEQ ID NO: 21821 - DNA, 20 bp, Artificial Sequence
  Description of Artificial Sequence: Synthetic oligonucleotide
  Target: SCNA; (-) strand; PAM type: NRG; PAM sequence: AGG
gcagactgctgtgagtatgt

SEQ ID NO: 21822 - DNA, 20 bp, Artificial Sequence
  Description of Artificial Sequence: Synthetic oligonucleotide
  Target: SCNA; (-) strand; PAM type: NRG; PAM sequence: TAG
tgcagactgctgtgagtatg

SEQ ID NO: 21823 - DNA, 20 bp, Artificial Sequence
  Description of Artificial Sequence: Synthetic oligonucleotide
  Target: SCNA; (-) strand; PAM type: NRG; PAM sequence: GAG
tatgttttgcagactgctgt

SEQ ID NO: 21824 - DNA, 20 bp, Artificial Sequence
  Description of Artificial Sequence: Synthetic oligonucleotide
  Target: SCNA; (-) strand; PAM type: NRG; PAM sequence: CAG
gggcccttggatatgttttg

SEQ ID NO: 21825 - DNA, 20 bp, Artificial Sequence
  Description of Artificial Sequence: Synthetic oligonucleotide
  Target: SCNA; (-) strand; PAM type: NRG; PAM sequence: TGG
tcagtgtctcagtgggccct

SEQ ID NO: 21826 - DNA, 20 bp, Artificial Sequence
  Description of Artificial Sequence: Synthetic oligonucleotide
  Target: SCNA; (-) strand; PAM type: NRG; PAM sequence: GGG
gtcatcttcagtgtctcagt

SEQ ID NO: 21827 - DNA, 20 bp, Artificial Sequence
  Description of Artificial Sequence: Synthetic oligonucleotide
  Target: SCNA; (-) strand; PAM type: NRG; PAM sequence: TGG
ggtcatcttcagtgtctcag

SEQ ID NO: 21828 - DNA, 20 bp, Artificial Sequence
  Description of Artificial Sequence: Synthetic oligonucleotide
  Target: SCNA; (-) strand; PAM type: NRG; PAM sequence: CAG
atgggtcatcttcagtgtct

SEQ ID NO: 21829 - DNA, 20 bp, Artificial Sequence
  Description of Artificial Sequence: Synthetic oligonucleotide
  Target: SCNA; (-) strand; PAM type: NRG; PAM sequence: CAG
ttaaatcaatgggtcatctt

SEQ ID NO: 21830 - DNA, 20 bp, Artificial Sequence
  Description of Artificial Sequence: Synthetic oligonucleotide
  Target: SCNA; (-) strand; PAM type: NRG; PAM sequence: GGG
caaatatgtattaaatcaat

SEQ ID NO: 21831 - DNA, 20 bp, Artificial Sequence
  Description of Artificial Sequence: Synthetic oligonucleotide
  Target: SCNA; (-) strand; PAM type: NRG; PAM sequence: TGG
gcaaatatgtattaaatcaa

SEQ ID NO: 21832 - DNA, 20 bp, Artificial Sequence
  Description of Artificial Sequence: Synthetic oligonucleotide
  Target: SCNA; (-) strand; PAM type: NRG; PAM sequence: GAG
tgtccagaggttctcaatca

SEQ ID NO: 21833 - DNA, 20 bp, Artificial Sequence
  Description of Artificial Sequence: Synthetic oligonucleotide
  Target: SCNA; (-) strand; PAM type: NRG; PAM sequence: CAG
cctgtccagaggttctcaat

SEQ ID NO: 21834 - DNA, 20 bp, Artificial Sequence
  Description of Artificial Sequence: Synthetic oligonucleotide
  Target: SCNA; (-) strand; PAM type: NRG; PAM sequence: AGG
ctagataagcgcctgtccag

SEQ ID NO: 21835 - DNA, 20 bp, Artificial Sequence
  Description of Artificial Sequence: Synthetic oligonucleotide
  Target: SCNA; (-) strand; PAM type: NRG; PAM sequence: GAG
tctagataagcgcctgtcca

SEQ ID NO: 21836 - DNA, 20 bp, Artificial Sequence
  Description of Artificial Sequence: Synthetic oligonucleotide
  Target: SCNA; (-) strand; PAM type: NRG; PAM sequence: CAG
cctctagataagcgcctgtc

SEQ ID NO: 21837 - DNA, 20 bp, Artificial Sequence
  Description of Artificial Sequence: Synthetic oligonucleotide
  Target: SCNA; (-) strand; PAM type: NRG; PAM sequence: AAG
acacactgtaacctctagat

SEQ ID NO: 21838 - DNA, 20 bp, Artificial Sequence
  Description of Artificial Sequence: Synthetic oligonucleotide
  Target: SCNA; (-) strand; PAM type: NRG; PAM sequence: TAG
tagtcacacactgtaacctc

SEQ ID NO: 21839 - DNA, 20 bp, Artificial Sequence
  Description of Artificial Sequence: Synthetic oligonucleotide
  Target: SCNA; (-) strand; PAM type: NRG; PAM sequence: TAG
aatcctaaactgtgtcgtgt

SEQ ID NO: 21840 - DNA, 20 bp, Artificial Sequence
  Description of Artificial Sequence: Synthetic oligonucleotide
  Target: SCNA; (-) strand; PAM type: NRG; PAM sequence: TAG
ttctgttctttctctcccta

SEQ ID NO: 21841 - DNA, 20 bp, Artificial Sequence
  Description of Artificial Sequence: Synthetic oligonucleotide
  Target: SCNA; (-) strand; PAM type: NRG; PAM sequence: AGG
caattccaccgtgtcaactg

SEQ ID NO: 21842 - DNA, 20 bp, Artificial Sequence
  Description of Artificial Sequence: Synthetic oligonucleotide
  Target: SCNA; (-) strand; PAM type: NRG; PAM sequence: GAG
ccaattccaccgtgtcaact

SEQ ID NO: 21843 - DNA, 20 bp, Artificial Sequence
  Description of Artificial Sequence: Synthetic oligonucleotide
  Target: SCNA; (-) strand; PAM type: NRG; PAM sequence: TGG
atactatttacttggcttca

SEQ ID NO: 21844 - DNA, 20 bp, Artificial Sequence
  Description of Artificial Sequence: Synthetic oligonucleotide
  Target: SCNA; (-) strand; PAM type: NRG; PAM sequence: TGG
tctccaaaatactatttact

SEQ ID NO: 21845 - DNA, 20 bp, Artificial Sequence
  Description of Artificial Sequence: Synthetic oligonucleotide
  Target: SCNA; (-) strand; PAM type: NRG; PAM sequence: AGG
ggataataatattgaagtta

SEQ ID NO: 21846 - DNA, 20 bp, Artificial Sequence
  Description of Artificial Sequence: Synthetic oligonucleotide
  Target: SCNA; (-) strand; PAM type: NRG; PAM sequence: AAG
aggataataatattgaagtt

SEQ ID NO: 21847 - DNA, 20 bp, Artificial Sequence
  Description of Artificial Sequence: Synthetic oligonucleotide
  Target: SCNA; (-) strand; PAM type: NRG; PAM sequence: AAG
tacacaggataataatattg

SEQ ID NO: 21848 - DNA, 20 bp, Artificial Sequence
  Description of Artificial Sequence: Synthetic oligonucleotide
  Target: SCNA; (-) strand; PAM type: NRG; PAM sequence: AGG
cacaaagtatgaatctacac

SEQ ID NO: 21849 - DNA, 20 bp, Artificial Sequence
  Description of Artificial Sequence: Synthetic oligonucleotide
  Target: SCNA; (-) strand; PAM type: NRG; PAM sequence: CAG
acacaaagtatgaatctaca

SEQ ID NO: 21850 - DNA, 20 bp, Artificial Sequence
  Description of Artificial Sequence: Synthetic oligonucleotide
  Target: SCNA; (-) strand; PAM type: NRG; PAM sequence: AAG
tcttaagtaaaaaatacaca

SEQ ID NO: 21851 - DNA, 20 bp, Artificial Sequence
  Description of Artificial Sequence: Synthetic oligonucleotide
  Target: SCNA; (-) strand; PAM type: NRG; PAM sequence: AAG
ttattactattttttctctt

SEQ ID NO: 21852 - DNA, 20 bp, Artificial Sequence
  Description of Artificial Sequence: Synthetic oligonucleotide
  Target: SCNA; (-) strand; PAM type: NRG; PAM sequence: TAG
tttcttcaaagtgtttctcc

SEQ ID NO: 21853 - DNA, 20 bp, Artificial Sequence
  Description of Artificial Sequence: Synthetic oligonucleotide
  Target: SCNA; (-) strand; PAM type: NRG; PAM sequence: AAG
tggacttatttctttcttca

SEQ ID NO: 21854 - DNA, 20 bp, Artificial Sequence
  Description of Artificial Sequence: Synthetic oligonucleotide
  Target: SCNA; (-) strand; PAM type: NRG; PAM sequence: TGG
aaagtacattacagggctcc

SEQ ID NO: 21855 - DNA, 20 bp, Artificial Sequence
  Description of Artificial Sequence: Synthetic oligonucleotide
  Target: SCNA; (-) strand; PAM type: NRG; PAM sequence: GGG
tagaggaaaagtacattaca

SEQ ID NO: 21856 - DNA, 20 bp, Artificial Sequence
  Description of Artificial Sequence: Synthetic oligonucleotide
  Target: SCNA; (-) strand; PAM type: NRG; PAM sequence: AGG
atagaggaaaagtacattac

SEQ ID NO: 21857 - DNA, 20 bp, Artificial Sequence
  Description of Artificial Sequence: Synthetic oligonucleotide
  Target: SCNA; (-) strand; PAM type: NRG; PAM sequence: CAG
aatagaggaaaagtacatta

SEQ ID NO: 21858 - DNA, 20 bp, Artificial Sequence
  Description of Artificial Sequence: Synthetic oligonucleotide
  Target: SCNA; (-) strand; PAM type: NRG; PAM sequence: AAG
gtgggaaataaatagaggaa

SEQ ID NO: 21859 - DNA, 20 bp, Artificial Sequence
  Description of Artificial Sequence: Synthetic oligonucleotide
  Target: SCNA; (-) strand; PAM type: NRG; PAM sequence: AGG
tttatgtgggaaataaatag

SEQ ID NO: 21860 - DNA, 20 bp, Artificial Sequence
  Description of Artificial Sequence: Synthetic oligonucleotide
  Target: SCNA; (-) strand; PAM type: NRG; PAM sequence: GAG
ttttatgtgggaaataaata

SEQ ID NO: 21861 - DNA, 20 bp, Artificial Sequence
  Description of Artificial Sequence: Synthetic oligonucleotide
  Target: SCNA; (-) strand; PAM type: NRG; PAM sequence: TAG
aattttatgtgggaaataaa

SEQ ID NO: 21862 - DNA, 20 bp, Artificial Sequence
  Description of Artificial Sequence: Synthetic oligonucleotide
  Target: SCNA; (-) strand; PAM type: NRG; PAM sequence: GGG
aaacagctttaattttatgt

SEQ ID NO: 21863 - DNA, 20 bp, Artificial Sequence
  Description of Artificial Sequence: Synthetic oligonucleotide
  Target: SCNA; (-) strand; PAM type: NRG; PAM sequence: TGG
aaaacagctttaattttatg

SEQ ID NO: 21864 - DNA, 20 bp, Artificial Sequence
  Description of Artificial Sequence: Synthetic oligonucleotide
  Target: SCNA; (-) strand; PAM type: NRG; PAM sequence: CAG
aaatgcgatgagaactaaaa

SEQ ID NO: 21865 - DNA, 20 bp, Artificial Sequence
  Description of Artificial Sequence: Synthetic oligonucleotide
  Target: SCNA; (-) strand; PAM type: NRG; PAM sequence: GAG
ttcaagatgataaatgcgat

SEQ ID NO: 21866 - DNA, 20 bp, Artificial Sequence
  Description of Artificial Sequence: Synthetic oligonucleotide
  Target: SCNA; (-) strand; PAM type: NRG; PAM sequence: AAG
ataatgtggcaaatgagttc

SEQ ID NO: 21867 - DNA, 20 bp, Artificial Sequence
  Description of Artificial Sequence: Synthetic oligonucleotide
  Target: SCNA; (-) strand; PAM type: NRG; PAM sequence: GAG
aataaaataatgtggcaaat

SEQ ID NO: 21868 - DNA, 20 bp, Artificial Sequence
  Description of Artificial Sequence: Synthetic oligonucleotide
  Target: SCNA; (-) strand; PAM type: NRG; PAM sequence: TGG
aatatttaaataaaataatg

SEQ ID NO: 21869 - DNA, 20 bp, Artificial Sequence
  Description of Artificial Sequence: Synthetic oligonucleotide
  Target: SCNA; (-) strand; PAM type: NRG; PAM sequence: AGG
agtccactctctgtaggtta

SEQ ID NO: 21870 - DNA, 20 bp, Artificial Sequence
  Description of Artificial Sequence: Synthetic oligonucleotide
  Target: SCNA; (-) strand; PAM type: NRG; PAM sequence: AAG
aagtccactctctgtaggtt

SEQ ID NO: 21871 - DNA, 20 bp, Artificial Sequence
  Description of Artificial Sequence: Synthetic oligonucleotide
  Target: SCNA; (-) strand; PAM type: NRG; PAM sequence: AGG
cagttaagtccactctctgt

SEQ ID NO: 21872 - DNA, 20 bp, Artificial Sequence
  Description of Artificial Sequence: Synthetic oligonucleotide
  Target: SCNA; (-) strand; PAM type: NRG; PAM sequence: TAG
gcagttaagtccactctctg

SEQ ID NO: 21873 - DNA, 20 bp, Artificial Sequence
  Description of Artificial Sequence: Synthetic oligonucleotide
  Target: SCNA; (-) strand; PAM type: NRG; PAM sequence: AAG
ttaagtactttttagcagtt

SEQ ID NO: 21874 - DNA, 20 bp, Artificial Sequence
  Description of Artificial Sequence: Synthetic oligonucleotide
  Target: SCNA; (-) strand; PAM type: NRG; PAM sequence: CAG
atgtattaagtactttttag

SEQ ID NO: 21875 - DNA, 20 bp, Artificial Sequence
  Description of Artificial Sequence: Synthetic oligonucleotide
  Target: SCNA; (-) strand; PAM type: NRG; PAM sequence: TAG
aacatgtattaagtactttt

SEQ ID NO: 21876 - DNA, 20 bp, Artificial Sequence
  Description of Artificial Sequence: Synthetic oligonucleotide
  Target: SCNA; (-) strand; PAM type: NRG; PAM sequence: AAG
gttccttgggaacatgtatt

SEQ ID NO: 21877 - DNA, 20 bp, Artificial Sequence
  Description of Artificial Sequence: Synthetic oligonucleotide
  Target: SCNA; (-) strand; PAM type: NRG; PAM sequence: GGG
ggtaattgaagcagttcctt

SEQ ID NO: 21878 - DNA, 20 bp, Artificial Sequence
  Description of Artificial Sequence: Synthetic oligonucleotide
  Target: SCNA; (-) strand; PAM type: NRG; PAM sequence: TGG
tggtaattgaagcagttcct

SEQ ID NO: 21879 - DNA, 20 bp, Artificial Sequence
  Description of Artificial Sequence: Synthetic oligonucleotide
  Target: SCNA; (-) strand; PAM type: NRG; PAM sequence: CAG
ttgtgcagtggtaattgaag

SEQ ID NO: 21880 - DNA, 20 bp, Artificial Sequence
  Description of Artificial Sequence: Synthetic oligonucleotide
  Target: SCNA; (-) strand; PAM type: NRG; PAM sequence: AAG
cctttgtgcagtggtaattg

SEQ ID NO: 21881 - DNA, 20 bp, Artificial Sequence
  Description of Artificial Sequence: Synthetic oligonucleotide
  Target: SCNA; (-) strand; PAM type: NRG; PAM sequence: TGG
acaaacaaacctttgtgcag

SEQ ID NO: 21882 - DNA, 20 bp, Artificial Sequence
  Description of Artificial Sequence: Synthetic oligonucleotide
  Target: SCNA; (-) strand; PAM type: NRG; PAM sequence: CAG
aaaacaaacaaacctttgtg

SEQ ID NO: 21883 - DNA, 20 bp, Artificial Sequence
  Description of Artificial Sequence: Synthetic oligonucleotide
  Target: SCNA; (-) strand; PAM type: NRG; PAM sequence: TAG
ccatgacttgatgatacttc

SEQ ID NO: 21884 - DNA, 20 bp, Artificial Sequence
  Description of Artificial Sequence: Synthetic oligonucleotide
  Target: SCNA; (-) strand; PAM type: NRG; PAM sequence: AAG
aacaccctagcaatagaagt

SEQ ID NO: 21885 - DNA, 20 bp, Artificial Sequence
  Description of Artificial Sequence: Synthetic oligonucleotide
  Target: SCNA; (-) strand; PAM type: NRG; PAM sequence: AAG
ttctaacaccctagcaatag

SEQ ID NO: 21886 - DNA, 20 bp, Artificial Sequence
  Description of Artificial Sequence: Synthetic oligonucleotide
  Target: SCNA; (-) strand; PAM type: NRG; PAM sequence: TAG
cctttctaacaccctagcaa

SEQ ID NO: 21887 - DNA, 20 bp, Artificial Sequence
  Description of Artificial Sequence: Synthetic oligonucleotide
  Target: SCNA; (-) strand; PAM type: NRG; PAM sequence: TAG
cagagtcctttctaacaccc

SEQ ID NO: 21888 - DNA, 20 bp, Artificial Sequence
  Description of Artificial Sequence: Synthetic oligonucleotide
  Target: SCNA; (-) strand; PAM type: NRG; PAM sequence: GAG
tctagacatcaagtagtcca

SEQ ID NO: 21889 - DNA, 20 bp, Artificial Sequence
  Description of Artificial Sequence: Synthetic oligonucleotide
  Target: SCNA; (-) strand; PAM type: NRG; PAM sequence: CAG
catctagacatcaagtagtc

SEQ ID NO: 21890 - DNA, 20 bp, Artificial Sequence
  Description of Artificial Sequence: Synthetic oligonucleotide
  Target: SCNA; (-) strand; PAM type: NRG; PAM sequence: TAG
atctgcatctagacatcaag

SEQ ID NO: 21891 - DNA, 20 bp, Artificial Sequence
  Description of Artificial Sequence: Synthetic oligonucleotide
  Target: SCNA; (-) strand; PAM type: NRG; PAM sequence: AAG
tttatctgcatctagacatc

SEQ ID NO: 21892 - DNA, 20 bp, Artificial Sequence
  Description of Artificial Sequence: Synthetic oligonucleotide
  Target: SCNA; (-) strand; PAM type: NRG; PAM sequence: TAG
ctgctttttttatctgcatc

SEQ ID NO: 21893 - DNA, 20 bp, Artificial Sequence
  Description of Artificial Sequence: Synthetic oligonucleotide
  Target: SCNA; (-) strand; PAM type: NRG; PAM sequence: CAG
gctactttatgtgaagtgaa

SEQ ID NO: 21894 - DNA, 20 bp, Artificial Sequence
  Description of Artificial Sequence: Synthetic oligonucleotide
  Target: SCNA; (-) strand; PAM type: NRG; PAM sequence: AAG
agtagcggctactttatgtg

SEQ ID NO: 21895 - DNA, 20 bp, Artificial Sequence
  Description of Artificial Sequence: Synthetic oligonucleotide
  Target: SCNA; (-) strand; PAM type: NRG; PAM sequence: CGG
cccttacctttaagcagtag

SEQ ID NO: 21896 - DNA, 20 bp, Artificial Sequence
  Description of Artificial Sequence: Synthetic oligonucleotide
  Target: SCNA; (-) strand; PAM type: NRG; PAM sequence: TAG
ttacccttacctttaagcag

SEQ ID NO: 21897 - DNA, 20 bp, Artificial Sequence
  Description of Artificial Sequence: Synthetic oligonucleotide
  Target: SCNA; (-) strand; PAM type: NRG; PAM sequence: CAG
gatttacccttacctttaag

SEQ ID NO: 21898 - DNA, 20 bp, Artificial Sequence
  Description of Artificial Sequence: Synthetic oligonucleotide
  Target: SCNA; (-) strand; PAM type: NRG; PAM sequence: AAG
caagatttacccttaccttt

SEQ ID NO: 21899 - DNA, 20 bp, Artificial Sequence
  Description of Artificial Sequence: Synthetic oligonucleotide
  Target: SCNA; (-) strand; PAM type: NRG; PAM sequence: AAG
aaccttcatccacagtgaac

SEQ ID NO: 21900 - DNA, 20 bp, Artificial Sequence
  Description of Artificial Sequence: Synthetic oligonucleotide
  Target: SCNA; (-) strand; PAM type: NRG; PAM sequence: CAG
tctttagtaaccttcatcca

SEQ ID NO: 21901 - DNA, 20 bp, Artificial Sequence
  Description of Artificial Sequence: Synthetic oligonucleotide
  Target: SCNA; (-) strand; PAM type: NRG; PAM sequence: TAG
tatatgttagtccttctctt

SEQ ID NO: 21902 - DNA, 20 bp, Artificial Sequence
  Description of Artificial Sequence: Synthetic oligonucleotide
  Target: SCNA; (-) strand; PAM type: NRG; PAM sequence: TAG
tttgaacctattttatatgt

SEQ ID NO: 21903 - DNA, 20 bp, Artificial Sequence
  Description of Artificial Sequence: Synthetic oligonucleotide
  Target: SCNA; (-) strand; PAM type: NRG; PAM sequence: AAG
aggagaagtcttaatttttt

SEQ ID NO: 21904 - DNA, 20 bp, Artificial Sequence
  Description of Artificial Sequence: Synthetic oligonucleotide
  Target: SCNA; (-) strand; PAM type: NRG; PAM sequence: AAG
tggaatattaattgaaggag

SEQ ID NO: 21905 - DNA, 20 bp, Artificial Sequence
  Description of Artificial Sequence: Synthetic oligonucleotide
  Target: SCNA; (-) strand; PAM type: NRG; PAM sequence: GAG
tcttggaatattaattgaag

SEQ ID NO: 21906 - DNA, 20 bp, Artificial Sequence
  Description of Artificial Sequence: Synthetic oligonucleotide
  Target: SCNA; (-) strand; PAM type: NRG; PAM sequence: AGG
tttcttggaatattaattga

SEQ ID NO: 21907 - DNA, 20 bp, Artificial Sequence
  Description of Artificial Sequence: Synthetic oligonucleotide
  Target: SCNA; (-) strand; PAM type: NRG; PAM sequence: AAG
ttttcttggaatattaattg

SEQ ID NO: 21908 - DNA, 20 bp, Artificial Sequence
  Description of Artificial Sequence: Synthetic oligonucleotide
  Target: SCNA; (-) strand; PAM type: NRG; PAM sequence: TGG
caatatggagtttcttttct

SEQ ID NO: 21909 - DNA, 20 bp, Artificial Sequence
  Description of Artificial Sequence: Synthetic oligonucleotide
  Target: SCNA; (-) strand; PAM type: NRG; PAM sequence: GAG
tgtgtttagatggcaatatg

SEQ ID NO: 21910 - DNA, 20 bp, Artificial Sequence
  Description of Artificial Sequence: Synthetic oligonucleotide
  Target: SCNA; (-) strand; PAM type: NRG; PAM sequence: TGG
tctgtgtttagatggcaata

SEQ ID NO: 21911 - DNA, 20 bp, Artificial Sequence
  Description of Artificial Sequence: Synthetic oligonucleotide
  Target: SCNA; (-) strand; PAM type: NRG; PAM sequence: TGG
gaaaagcttctgtgtttaga

SEQ ID NO: 21912 - DNA, 20 bp, Artificial Sequence
  Description of Artificial Sequence: Synthetic oligonucleotide
  Target: SCNA; (-) strand; PAM type: NRG; PAM sequence: TAG
tacagaaaagcttctgtgtt

SEQ ID NO: 21913 - DNA, 20 bp, Artificial Sequence
  Description of Artificial Sequence: Synthetic oligonucleotide
  Target: SCNA; (-) strand; PAM type: NRG; PAM sequence: AAG
actggaataccattacagaa

SEQ ID NO: 21914 - DNA, 20 bp, Artificial Sequence
  Description of Artificial Sequence: Synthetic oligonucleotide
  Target: SCNA; (-) strand; PAM type: NRG; PAM sequence: CAG
ctttcactggaataccatta

SEQ ID NO: 21915 - DNA, 20 bp, Artificial Sequence
  Description of Artificial Sequence: Synthetic oligonucleotide
  Target: SCNA; (-) strand; PAM type: NRG; PAM sequence: TGG
cgaatttaaatgactttcac

SEQ ID NO: 21916 - DNA, 20 bp, Artificial Sequence
  Description of Artificial Sequence: Synthetic oligonucleotide
  Target: SCNA; (-) strand; PAM type: NRG; PAM sequence: AAG
ttttcataagggcagatctc

SEQ ID NO: 21917 - DNA, 20 bp, Artificial Sequence
  Description of Artificial Sequence: Synthetic oligonucleotide
  Target: SCNA; (-) strand; PAM type: NRG; PAM sequence: CAG
ctcaccacttttcataaggg

SEQ ID NO: 21918 - DNA, 20 bp, Artificial Sequence
  Description of Artificial Sequence: Synthetic oligonucleotide
  Target: SCNA; (-) strand; PAM type: NRG; PAM sequence: GGG
attctcaccacttttcataa

SEQ ID NO: 21919 - DNA, 20 bp, Artificial Sequence
  Description of Artificial Sequence: Synthetic oligonucleotide
  Target: SCNA; (-) strand; PAM type: NRG; PAM sequence: AGG
aattctcaccacttttcata

SEQ ID NO: 21920 - DNA, 20 bp, Artificial Sequence
  Description of Artificial Sequence: Synthetic oligonucleotide
  Target: SCNA; (-) strand; PAM type: NRG; PAM sequence: AAG
gaattctcaccacttttcat

SEQ ID NO: 21921 - DNA, 20 bp, Artificial Sequence
  Description of Artificial Sequence: Synthetic oligonucleotide
  Target: SCNA; (-) strand; PAM type: NRG; PAM sequence: GAG
tgatatgacaaatagggttc

SEQ ID NO: 21922 - DNA, 20 bp, Artificial Sequence
  Description of Artificial Sequence: Synthetic oligonucleotide
  Target: SCNA; (-) strand; PAM type: NRG; PAM sequence: GGG
aggaagtgatatgacaaata

SEQ ID NO: 21923 - DNA, 20 bp, Artificial Sequence
  Description of Artificial Sequence: Synthetic oligonucleotide
  Target: SCNA; (-) strand; PAM type: NRG; PAM sequence: AGG
caggaagtgatatgacaaat

SEQ ID NO: 21924 - DNA, 20 bp, Artificial Sequence
  Description of Artificial Sequence: Synthetic oligonucleotide
  Target: SCNA; (-) strand; PAM type: NRG; PAM sequence: TAG
tcaggaagtgatatgacaaa

SEQ ID NO: 21925 - DNA, 20 bp, Artificial Sequence
  Description of Artificial Sequence: Synthetic oligonucleotide
  Target: SCNA; (-) strand; PAM type: NRG; PAM sequence: AAG
agattgagtatcctttcagg

SEQ ID NO: 21926 - DNA, 20 bp, Artificial Sequence
  Description of Artificial Sequence: Synthetic oligonucleotide
  Target: SCNA; (-) strand; PAM type: NRG; PAM sequence: AGG
aagagattgagtatcctttc

SEQ ID NO: 21927 - DNA, 20 bp, Artificial Sequence
  Description of Artificial Sequence: Synthetic oligonucleotide
  Target: SCNA; (-) strand; PAM type: NRG; PAM sequence: CAG
taagagattgagtatccttt

SEQ ID NO: 21928 - DNA, 20 bp, Artificial Sequence
  Description of Artificial Sequence: Synthetic oligonucleotide
  Target: SCNA; (-) strand; PAM type: NRG; PAM sequence: GAG
tagaaaaaaattaagagatt

SEQ ID NO: 21929 - DNA, 20 bp, Artificial Sequence
  Description of Artificial Sequence: Synthetic oligonucleotide
  Target: SCNA; (-) strand; PAM type: NRG; PAM sequence: GAG
aaataatagaaaaaaattaa

SEQ ID NO: 21930 - DNA, 20 bp, Artificial Sequence
  Description of Artificial Sequence: Synthetic oligonucleotide
  Target: SCNA; (-) strand; PAM type: NRG; PAM sequence: AAG
caaaataatagaaaaaaatt

SEQ ID NO: 21931 - DNA, 20 bp, Artificial Sequence
  Description of Artificial Sequence: Synthetic oligonucleotide
  Target: SCNA; (-) strand; PAM type: NRG; PAM sequence: TAG
ttccataaagtacaaaataa

SEQ ID NO: 21932 - DNA, 20 bp, Artificial Sequence
  Description of Artificial Sequence: Synthetic oligonucleotide
  Target: SCNA; (-) strand; PAM type: NRG; PAM sequence: AAG
ttcctaaatatttttccata

SEQ ID NO: 21933 - DNA, 20 bp, Artificial Sequence
  Description of Artificial Sequence: Synthetic oligonucleotide
  Target: SCNA; (-) strand; PAM type: NRG; PAM sequence: GAG
cataaattttaggaaaacta

SEQ ID NO: 21934 - DNA, 20 bp, Artificial Sequence
  Description of Artificial Sequence: Synthetic oligonucleotide
  Target: SCNA; (-) strand; PAM type: NRG; PAM sequence: TAG
gacataaattttaggaaaac

SEQ ID NO: 21935 - DNA, 20 bp, Artificial Sequence
  Description of Artificial Sequence: Synthetic oligonucleotide
  Target: SCNA; (-) strand; PAM type: NRG; PAM sequence: AGG
ccgggtttgacataaatttt

SEQ ID NO: 21936 - DNA, 20 bp, Artificial Sequence
  Description of Artificial Sequence: Synthetic oligonucleotide
  Target: SCNA; (-) strand; PAM type: NRG; PAM sequence: TAG
gccgggtttgacataaattt

SEQ ID NO: 21937 - DNA, 20 bp, Artificial Sequence
  Description of Artificial Sequence: Synthetic oligonucleotide
  Target: SCNA; (-) strand; PAM type: NRG; PAM sequence: GGG
tatgtaaaataaataatgcc

SEQ ID NO: 21938 - DNA, 20 bp, Artificial Sequence
  Description of Artificial Sequence: Synthetic oligonucleotide
  Target: SCNA; (-) strand; PAM type: NRG; PAM sequence: CGG
atatgtaaaataaataatgc

SEQ ID NO: 21939 - DNA, 20 bp, Artificial Sequence
  Description of Artificial Sequence: Synthetic oligonucleotide
  Target: SCNA; (-) strand; PAM type: NRG; PAM sequence: AAG
atagttttaacaaagagtaa

SEQ ID NO: 21940 - DNA, 20 bp, Artificial Sequence
  Description of Artificial Sequence: Synthetic oligonucleotide
  Target: SCNA; (-) strand; PAM type: NRG; PAM sequence: GAG
tttaatatagttttaacaaa

SEQ ID NO: 21941 - DNA, 20 bp, Artificial Sequence
  Description of Artificial Sequence: Synthetic oligonucleotide
  Target: SCNA; (-) strand; PAM type: NRG; PAM sequence: AAG
gttttaatatagttttaaca

SEQ ID NO: 21942 - DNA, 20 bp, Artificial Sequence
  Description of Artificial Sequence: Synthetic oligonucleotide
  Target: SCNA; (-) strand; PAM type: NRG; PAM sequence: TAG
gcttctcttttgttttaata

SEQ ID NO: 21943 - DNA, 20 bp, Artificial Sequence
  Description of Artificial Sequence: Synthetic oligonucleotide
  Target: SCNA; (-) strand; PAM type: NRG; PAM sequence: GGG
ttaatcaattattatttagt

SEQ ID NO: 21944 - DNA, 20 bp, Artificial Sequence
  Description of Artificial Sequence: Synthetic oligonucleotide
  Target: SCNA; (-) strand; PAM type: NRG; PAM sequence: TGG
attaatcaattattatttag

SEQ ID NO: 21945 - DNA, 20 bp, Artificial Sequence
  Description of Artificial Sequence: Synthetic oligonucleotide
  Target: SCNA; (-) strand; PAM type: NRG; PAM sequence: TAG
gaaattaatcaattattatt

SEQ ID NO: 21946 - DNA, 20 bp, Artificial Sequence
  Description of Artificial Sequence: Synthetic oligonucleotide
  Target: SCNA; (-) strand; PAM type: NRG; PAM sequence: AAG
cataaacatactaaacatag

SEQ ID NO: 21947 - DNA, 20 bp, Artificial Sequence
  Description of Artificial Sequence: Synthetic oligonucleotide
  Target: SCNA; (-) strand; PAM type: NRG; PAM sequence: TAG
gtccataaacatactaaaca

SEQ ID NO: 21948 - DNA, 20 bp, Artificial Sequence
  Description of Artificial Sequence: Synthetic oligonucleotide
  Target: SCNA; (-) strand; PAM type: NRG; PAM sequence: AAG
gtgaatcctcagtgtttaaa

SEQ ID NO: 21949 - DNA, 20 bp, Artificial Sequence
  Description of Artificial Sequence: Synthetic oligonucleotide
  Target: SCNA; (-) strand; PAM type: NRG; PAM sequence: CAG
aaaaaaaattagtgaatcct

SEQ ID NO: 21950 - DNA, 20 bp, Artificial Sequence
  Description of Artificial Sequence: Synthetic oligonucleotide
  Target: SCNA; (-) strand; PAM type: NRG; PAM sequence: TAG
aaaaaaaaaaaaaaaaaaat

SEQ ID NO: 21951 - DNA, 20 bp, Artificial Sequence
  Description of Artificial Sequence: Synthetic oligonucleotide
  Target: SCNA; (-) strand; PAM type: NRG; PAM sequence: AAG
tccagcctgggcaaaaaagt

SEQ ID NO: 21952 - DNA, 20 bp, Artificial Sequence
  Description of Artificial Sequence: Synthetic oligonucleotide
  Target: SCNA; (-) strand; PAM type: NRG; PAM sequence: AAG
gcactccagcctgggcaaaa

SEQ ID NO: 21953 - DNA, 20 bp, Artificial Sequence
  Description of Artificial Sequence: Synthetic oligonucleotide
  Target: SCNA; (-) strand; PAM type: NRG; PAM sequence: GGG
gtatcactgcactccagcct

SEQ ID NO: 21954 - DNA, 20 bp, Artificial Sequence
  Description of Artificial Sequence: Synthetic oligonucleotide
  Target: SCNA; (-) strand; PAM type: NRG; PAM sequence: TGG
tgtatcactgcactccagcc

SEQ ID NO: 21955 - DNA, 20 bp, Artificial Sequence
  Description of Artificial Sequence: Synthetic oligonucleotide
  Target: SCNA; (-) strand; PAM type: NRG; PAM sequence: CAG
gtgattgtatcactgcactc

SEQ ID NO: 21956 - DNA, 20 bp, Artificial Sequence
  Description of Artificial Sequence: Synthetic oligonucleotide
  Target: SCNA; (-) strand; PAM type: NRG; PAM sequence: GAG
tggatggttgaggttgcagt

SEQ ID NO: 21957 - DNA, 20 bp, Artificial Sequence
  Description of Artificial Sequence: Synthetic oligonucleotide
  Target: SCNA; (-) strand; PAM type: NRG; PAM sequence: CAG
agcctggatggttgaggttg

SEQ ID NO: 21958 - DNA, 20 bp, Artificial Sequence
  Description of Artificial Sequence: Synthetic oligonucleotide
  Target: SCNA; (-) strand; PAM type: NRG; PAM sequence: AGG
cacttgagcctggatggttg

SEQ ID NO: 21959 - DNA, 20 bp, Artificial Sequence
  Description of Artificial Sequence: Synthetic oligonucleotide
  Target: SCNA; (-) strand; PAM type: NRG; PAM sequence: GAG
tcacttgagcctggatggtt

SEQ ID NO: 21960 - DNA, 20 bp, Artificial Sequence
  Description of Artificial Sequence: Synthetic oligonucleotide
  Target: SCNA; (-) strand; PAM type: NRG; PAM sequence: TGG
gaggatcacttgagcctgga

SEQ ID NO: 21961 - DNA, 20 bp, Artificial Sequence
  Description of Artificial Sequence: Synthetic oligonucleotide
  Target: SCNA; (-) strand; PAM type: NRG; PAM sequence: TGG
gtgagaggatcacttgagcc

SEQ ID NO: 21962 - DNA, 20 bp, Artificial Sequence
  Description of Artificial Sequence: Synthetic oligonucleotide
  Target: SCNA; (-) strand; PAM type: NRG; PAM sequence: GAG
ctgaggtgagaggatcactt

SEQ ID NO: 21963 - DNA, 20 bp, Artificial Sequence
  Description of Artificial Sequence: Synthetic oligonucleotide
  Target: SCNA; (-) strand; PAM type: NRG; PAM sequence: AGG
agtctggtagctgaggtgag

SEQ ID NO: 21964 - DNA, 20 bp, Artificial Sequence
  Description of Artificial Sequence: Synthetic oligonucleotide
  Target: SCNA; (-) strand; PAM type: NRG; PAM sequence: GAG
tagtctggtagctgaggtga

SEQ ID NO: 21965 - DNA, 20 bp, Artificial Sequence
  Description of Artificial Sequence: Synthetic oligonucleotide
  Target: SCNA; (-) strand; PAM type: NRG; PAM sequence: GAG
gctagtctggtagctgaggt

SEQ ID NO: 21966 - DNA, 20 bp, Artificial Sequence
  Description of Artificial Sequence: Synthetic oligonucleotide
  Target: SCNA; (-) strand; PAM type: NRG; PAM sequence: AGG
ctcagctagtctggtagctg

SEQ ID NO: 21967 - DNA, 20 bp, Artificial Sequence
  Description of Artificial Sequence: Synthetic oligonucleotide
  Target: SCNA; (-) strand; PAM type: NRG; PAM sequence: GAG
tctcagctagtctggtagct

SEQ ID NO: 21968 - DNA, 20 bp, Artificial Sequence
  Description of Artificial Sequence: Synthetic oligonucleotide
  Target: SCNA; (-) strand; PAM type: NRG; PAM sequence: TAG
cgtagtctcagctagtctgg

SEQ ID NO: 21969 - DNA, 20 bp, Artificial Sequence
  Description of Artificial Sequence: Synthetic oligonucleotide
  Target: SCNA; (-) strand; PAM type: NRG; PAM sequence: TGG
ccccgtagtctcagctagtc

SEQ ID NO: 21970 - DNA, 20 bp, Artificial Sequence
  Description of Artificial Sequence: Synthetic oligonucleotide
  Target: SCNA; (-) strand; PAM type: NRG; PAM sequence: TAG
cacacccccgtagtctcagc

SEQ ID NO: 21971 - DNA, 20 bp, Artificial Sequence
  Description of Artificial Sequence: Synthetic oligonucleotide
  Target: SCNA; (-) strand; PAM type: NRG; PAM sequence: CAG
gtggcacacccccgtagtct

SEQ ID NO: 21972 - DNA, 20 bp, Artificial Sequence
  Description of Artificial Sequence: Synthetic oligonucleotide
  Target: SCNA; (-) strand; PAM type: NRG; PAM sequence: TAG
ggcatggtggcacacccccg

SEQ ID NO: 21973 - DNA, 20 bp, Artificial Sequence
  Description of Artificial Sequence: Synthetic oligonucleotide
  Target: SCNA; (-) strand; PAM type: NRG; PAM sequence: TGG
cgaaaattagcctggcatgg

SEQ ID NO: 21974 - DNA, 20 bp, Artificial Sequence
  Description of Artificial Sequence: Synthetic oligonucleotide
  Target: SCNA; (-) strand; PAM type: NRG; PAM sequence: TGG
atacgaaaattagcctggca

SEQ ID NO: 21975 - DNA, 20 bp, Artificial Sequence
  Description of Artificial Sequence: Synthetic oligonucleotide
  Target: SCNA; (-) strand; PAM type: NRG; PAM sequence: TGG
aatatatacgaaaattagcc

SEQ ID NO: 21976 - DNA, 20 bp, Artificial Sequence
  Description of Artificial Sequence: Synthetic oligonucleotide
  Target: SCNA; (-) strand; PAM type: NRG; PAM sequence: TAG
aaaaaaatatatacgaaaat

SEQ ID NO: 21977 - DNA, 20 bp, Artificial Sequence
  Description of Artificial Sequence: Synthetic oligonucleotide
  Target: SCNA; (-) strand; PAM type: NRG; PAM sequence: TAG
accagcctgggcaacacagt

SEQ ID NO: 21978 - DNA, 20 bp, Artificial Sequence
  Description of Artificial Sequence: Synthetic oligonucleotide
  Target: SCNA; (-) strand; PAM type: NRG; PAM sequence: CAG
catgaccagcctgggcaaca

SEQ ID NO: 21979 - DNA, 20 bp, Artificial Sequence
  Description of Artificial Sequence: Synthetic oligonucleotide
  Target: SCNA; (-) strand; PAM type: NRG; PAM sequence: GGG
taggagttcatgaccagcct

SEQ ID NO: 21980 - DNA, 20 bp, Artificial Sequence
  Description of Artificial Sequence: Synthetic oligonucleotide
  Target: SCNA; (-) strand; PAM type: NRG; PAM sequence: TGG
ctaggagttcatgaccagcc

SEQ ID NO: 21981 - DNA, 20 bp, Artificial Sequence
  Description of Artificial Sequence: Synthetic oligonucleotide
  Target: SCNA; (-) strand; PAM type: NRG; PAM sequence: CAG
tgagcctaggagttcatgac

SEQ ID NO: 21982 - DNA, 20 bp, Artificial Sequence
  Description of Artificial Sequence: Synthetic oligonucleotide
  Target: SCNA; (-) strand; PAM type: NRG; PAM sequence: GAG
gacagatcacttgagcctag

SEQ ID NO: 21983 - DNA, 20 bp, Artificial Sequence
  Description of Artificial Sequence: Synthetic oligonucleotide
  Target: SCNA; (-) strand; PAM type: NRG; PAM sequence: AGG
tggacagatcacttgagcct

SEQ ID NO: 21984 - DNA, 20 bp, Artificial Sequence
  Description of Artificial Sequence: Synthetic oligonucleotide
  Target: SCNA; (-) strand; PAM type: NRG; PAM sequence: TAG
gtggacagatcacttgagcc

SEQ ID NO: 21985 - DNA, 20 bp, Artificial Sequence
  Description of Artificial Sequence: Synthetic oligonucleotide
  Target: SCNA; (-) strand; PAM type: NRG; PAM sequence: GAG
ctaaggtggacagatcactt

SEQ ID NO: 21986 - DNA, 20 bp, Artificial Sequence
  Description of Artificial Sequence: Synthetic oligonucleotide
  Target: SCNA; (-) strand; PAM type: NRG; PAM sequence: CAG
ctttgggaggctaaggtgga

SEQ ID NO: 21987 - DNA, 20 bp, Artificial Sequence
  Description of Artificial Sequence: Synthetic oligonucleotide
  Target: SCNA; (-) strand; PAM type: NRG; PAM sequence: TGG
cacactttgggaggctaagg

SEQ ID NO: 21988 - DNA, 20 bp, Artificial Sequence
  Description of Artificial Sequence: Synthetic oligonucleotide
  Target: SCNA; (-) strand; PAM type: NRG; PAM sequence: AGG
tcccacactttgggaggcta

SEQ ID NO: 21989 - DNA, 20 bp, Artificial Sequence
  Description of Artificial Sequence: Synthetic oligonucleotide
  Target: SCNA; (-) strand; PAM type: NRG; PAM sequence: AAG
atcccacactttgggaggct

SEQ ID NO: 21990 - DNA, 20 bp, Artificial Sequence
  Description of Artificial Sequence: Synthetic oligonucleotide
  Target: SCNA; (-) strand; PAM type: NRG; PAM sequence: AGG
ctgtaatcccacactttggg

SEQ ID NO: 21991 - DNA, 20 bp, Artificial Sequence
  Description of Artificial Sequence: Synthetic oligonucleotide
  Target: SCNA; (-) strand; PAM type: NRG; PAM sequence: GAG
cctgtaatcccacactttgg

SEQ ID NO: 21992 - DNA, 20 bp, Artificial Sequence
  Description of Artificial Sequence: Synthetic oligonucleotide
  Target: SCNA; (-) strand; PAM type: NRG; PAM sequence: GGG
tgcctgtaatcccacacttt

SEQ ID NO: 21993 - DNA, 20 bp, Artificial Sequence
  Description of Artificial Sequence: Synthetic oligonucleotide
  Target: SCNA; (-) strand; PAM type: NRG; PAM sequence: TGG
atgcctgtaatcccacactt

SEQ ID NO: 21994 - DNA, 20 bp, Artificial Sequence
  Description of Artificial Sequence: Synthetic oligonucleotide
  Target: SCNA; (-) strand; PAM type: NRG; PAM sequence: TGG
caaattctcgcctggcatgg

SEQ ID NO: 21995 - DNA, 20 bp, Artificial Sequence
  Description of Artificial Sequence: Synthetic oligonucleotide
  Target: SCNA; (-) strand; PAM type: NRG; PAM sequence: TGG
aagcaaattctcgcctggca

SEQ ID NO: 21996 - DNA, 20 bp, Artificial Sequence
  Description of Artificial Sequence: Synthetic oligonucleotide
  Target: SCNA; (-) strand; PAM type: NRG; PAM sequence: TGG
tttaaaagcaaattctcgcc

SEQ ID NO: 21997 - DNA, 20 bp, Artificial Sequence
  Description of Artificial Sequence: Synthetic oligonucleotide
  Target: SCNA; (-) strand; PAM type: NRG; PAM sequence: AAG
attgtgtctttctcatttaa

SEQ ID NO: 21998 - DNA, 20 bp, Artificial Sequence
  Description of Artificial Sequence: Synthetic oligonucleotide
  Target: SCNA; (-) strand; PAM type: NRG; PAM sequence: AGG
acagggaactttccgaaggc

SEQ ID NO: 21999 - DNA, 20 bp, Artificial Sequence
  Description of Artificial Sequence: Synthetic oligonucleotide
  Target: SCNA; (-) strand; PAM type: NRG; PAM sequence: CAG
gacagggaactttccgaagg

SEQ ID NO: 22000 - DNA, 20 bp, Artificial Sequence
  Description of Artificial Sequence: Synthetic oligonucleotide
  Target: SCNA; (-) strand; PAM type: NRG; PAM sequence: AGG
tttgacagggaactttccga

SEQ ID NO: 22001 - DNA, 20 bp, Artificial Sequence
  Description of Artificial Sequence: Synthetic oligonucleotide
  Target: SCNA; (-) strand; PAM type: NRG; PAM sequence: AAG
atttgacagggaactttccg

SEQ ID NO: 22002 - DNA, 20 bp, Artificial Sequence
  Description of Artificial Sequence: Synthetic oligonucleotide
  Target: SCNA; (-) strand; PAM type: NRG; PAM sequence: GGG
tttatttctaaaatttgaca

SEQ ID NO: 22003 - DNA, 20 bp, Artificial Sequence
  Description of Artificial Sequence: Synthetic oligonucleotide
  Target: SCNA; (-) strand; PAM type: NRG; PAM sequence: AGG
atttatttctaaaatttgac

SEQ ID NO: 22004 - DNA, 20 bp, Artificial Sequence
  Description of Artificial Sequence: Synthetic oligonucleotide
  Target: SCNA; (-) strand; PAM type: NRG; PAM sequence: CAG
tatttatttctaaaatttga

SEQ ID NO: 22005 - DNA, 20 bp, Artificial Sequence
  Description of Artificial Sequence: Synthetic oligonucleotide
  Target: SCNA; (-) strand; PAM type: NRG; PAM sequence: AAG
aaccctctgcatatcttttc

SEQ ID NO: 22006 - DNA, 20 bp, Artificial Sequence
  Description of Artificial Sequence: Synthetic oligonucleotide
  Target: SCNA; (-) strand; PAM type: NRG; PAM sequence: TGG
ctggttggttggtgctcctt

SEQ ID NO: 22007 - DNA, 20 bp, Artificial Sequence
  Description of Artificial Sequence: Synthetic oligonucleotide
  Target: SCNA; (-) strand; PAM type: NRG; PAM sequence: TGG
tattttcccctctggttggt

SEQ ID NO: 22008 - DNA, 20 bp, Artificial Sequence
  Description of Artificial Sequence: Synthetic oligonucleotide
  Target: SCNA; (-) strand; PAM type: NRG; PAM sequence: TGG
cccatattttcccctctggt

SEQ ID NO: 22009 - DNA, 20 bp, Artificial Sequence
  Description of Artificial Sequence: Synthetic oligonucleotide
  Target: SCNA; (-) strand; PAM type: NRG; PAM sequence: TGG
tgcccccatattttcccctc

SEQ ID NO: 22010 - DNA, 20 bp, Artificial Sequence
  Description of Artificial Sequence: Synthetic oligonucleotide
  Target: SCNA; (-) strand; PAM type: NRG; PAM sequence: AGG
ctggctctgtgttctagctc

SEQ ID NO: 22011 - DNA, 20 bp, Artificial Sequence
  Description of Artificial Sequence: Synthetic oligonucleotide
  Target: SCNA; (-) strand; PAM type: NRG; PAM sequence: CAG
cctggctctgtgttctagct

SEQ ID NO: 22012 - DNA, 20 bp, Artificial Sequence
  Description of Artificial Sequence: Synthetic oligonucleotide
  Target: SCNA; (-) strand; PAM type: NRG; PAM sequence: TAG
catgacctggctctgtgttc

SEQ ID NO: 22013 - DNA, 20 bp, Artificial Sequence
  Description of Artificial Sequence: Synthetic oligonucleotide
  Target: SCNA; (-) strand; PAM type: NRG; PAM sequence: TGG
ctgccttcagattcatgacc

SEQ ID NO: 22014 - DNA, 20 bp, Artificial Sequence
  Description of Artificial Sequence: Synthetic oligonucleotide
  Target: SCNA; (-) strand; PAM type: NRG; PAM sequence: CAG
gacagagttgttcctgcctt

SEQ ID NO: 22015 - DNA, 20 bp, Artificial Sequence
  Description of Artificial Sequence: Synthetic oligonucleotide
  Target: SCNA; (-) strand; PAM type: NRG; PAM sequence: GAG
ttcatgtctcacagctgaca

SEQ ID NO: 22016 - DNA, 20 bp, Artificial Sequence
  Description of Artificial Sequence: Synthetic oligonucleotide
  Target: SCNA; (-) strand; PAM type: NRG; PAM sequence: CAG
aattcatgtctcacagctga

SEQ ID NO: 22017 - DNA, 20 bp, Artificial Sequence
  Description of Artificial Sequence: Synthetic oligonucleotide
  Target: SCNA; (-) strand; PAM type: NRG; PAM sequence: CAG
ccttccaaattcatgtctca

SEQ ID NO: 22018 - DNA, 20 bp, Artificial Sequence
  Description of Artificial Sequence: Synthetic oligonucleotide
  Target: SCNA; (-) strand; PAM type: NRG; PAM sequence: CAG
tctctgcttttctctcccag

SEQ ID NO: 22019 - DNA, 20 bp, Artificial Sequence
  Description of Artificial Sequence: Synthetic oligonucleotide
  Target: SCNA; (-) strand; PAM type: NRG; PAM sequence: CAG
taatctctgcttttctctcc

SEQ ID NO: 22020 - DNA, 20 bp, Artificial Sequence
  Description of Artificial Sequence: Synthetic oligonucleotide
  Target: SCNA; (-) strand; PAM type: NRG; PAM sequence: TAG
ccagcccaaaatatcttaag

SEQ ID NO: 22021 - DNA, 20 bp, Artificial Sequence
  Description of Artificial Sequence: Synthetic oligonucleotide
  Target: SCNA; (-) strand; PAM type: NRG; PAM sequence: AAG
cttccagcccaaaatatctt

SEQ ID NO: 22022 - DNA, 20 bp, Artificial Sequence
  Description of Artificial Sequence: Synthetic oligonucleotide
  Target: SCNA; (-) strand; PAM type: NRG; PAM sequence: CAG
caggtgtgagccactgcttc

SEQ ID NO: 22023 - DNA, 20 bp, Artificial Sequence
  Description of Artificial Sequence: Synthetic oligonucleotide
  Target: SCNA; (-) strand; PAM type: NRG; PAM sequence: GAG
agtgctggaattacaggtgt

SEQ ID NO: 22024 - DNA, 20 bp, Artificial Sequence
  Description of Artificial Sequence: Synthetic oligonucleotide
  Target: SCNA; (-) strand; PAM type: NRG; PAM sequence: AGG
tcccaaagtgctggaattac

SEQ ID NO: 22025 - DNA, 20 bp, Artificial Sequence
  Description of Artificial Sequence: Synthetic oligonucleotide
  Target: SCNA; (-) strand; PAM type: NRG; PAM sequence: CAG
ctcccaaagtgctggaatta

SEQ ID NO: 22026 - DNA, 20 bp, Artificial Sequence
  Description of Artificial Sequence: Synthetic oligonucleotide
  Target: SCNA; (-) strand; PAM type: NRG; PAM sequence: TGG
gcgtcagcctcccaaagtgc

SEQ ID NO: 22027 - DNA, 20 bp, Artificial Sequence
  Description of Artificial Sequence: Synthetic oligonucleotide
  Target: SCNA; (-) strand; PAM type: NRG; PAM sequence: AAG
ccacccgcgtcagcctccca

SEQ ID NO: 22028 - DNA, 20 bp, Artificial Sequence
  Description of Artificial Sequence: Synthetic oligonucleotide
  Target: SCNA; (-) strand; PAM type: NRG; PAM sequence: CAG
ctcaggtgatccacccgcgt

SEQ ID NO: 22029 - DNA, 20 bp, Artificial Sequence
  Description of Artificial Sequence: Synthetic oligonucleotide
  Target: SCNA; (-) strand; PAM type: NRG; PAM sequence: AGG
gatctcgaactcctgacctc

SEQ ID NO: 22030 - DNA, 20 bp, Artificial Sequence
  Description of Artificial Sequence: Synthetic oligonucleotide
  Target: SCNA; (-) strand; PAM type: NRG; PAM sequence: CAG
tgatctcgaactcctgacct

SEQ ID NO: 22031 - DNA, 20 bp, Artificial Sequence
  Description of Artificial Sequence: Synthetic oligonucleotide
  Target: SCNA; (-) strand; PAM type: NRG; PAM sequence: AGG
ggggtttcgccatgttggcc

SEQ ID NO: 22032 - DNA, 20 bp, Artificial Sequence
  Description of Artificial Sequence: Synthetic oligonucleotide
  Target: SCNA; (-) strand; PAM type: NRG; PAM sequence: CAG
tggggtttcgccatgttggc

SEQ ID NO: 22033 - DNA, 20 bp, Artificial Sequence
  Description of Artificial Sequence: Synthetic oligonucleotide
  Target: SCNA; (-) strand; PAM type: NRG; PAM sequence: TGG
gagatggggtttcgccatgt

SEQ ID NO: 22034 - DNA, 20 bp, Artificial Sequence
  Description of Artificial Sequence: Synthetic oligonucleotide
  Target: SCNA; (-) strand; PAM type: NRG; PAM sequence: GGG
ttgtattttcagtagagatg

SEQ ID NO: 22035 - DNA, 20 bp, Artificial Sequence
  Description of Artificial Sequence: Synthetic oligonucleotide
  Target: SCNA; (-) strand; PAM type: NRG; PAM sequence: GGG
tttgtattttcagtagagat

SEQ ID NO: 22036 - DNA, 20 bp, Artificial Sequence
  Description of Artificial Sequence: Synthetic oligonucleotide
  Target: SCNA; (-) strand; PAM type: NRG; PAM sequence: TGG
ttttgtattttcagtagaga

SEQ ID NO: 22037 - DNA, 20 bp, Artificial Sequence
  Description of Artificial Sequence: Synthetic oligonucleotide
  Target: SCNA; (-) strand; PAM type: NRG; PAM sequence: GAG
taatttttgtattttcagta

SEQ ID NO: 22038 - DNA, 20 bp, Artificial Sequence
  Description of Artificial Sequence: Synthetic oligonucleotide
  Target: SCNA; (-) strand; PAM type: NRG; PAM sequence: TAG
gttaatttttgtattttcag

SEQ ID NO: 22039 - DNA, 20 bp, Artificial Sequence
  Description of Artificial Sequence: Synthetic oligonucleotide
  Target: SCNA; (-) strand; PAM type: NRG; PAM sequence: CAG
ctggttaatttttgtatttt

SEQ ID NO: 22040 - DNA, 20 bp, Artificial Sequence
  Description of Artificial Sequence: Synthetic oligonucleotide
  Target: SCNA; (-) strand; PAM type: NRG; PAM sequence: TGG
caggcatctgccaccacgcc

SEQ ID NO: 22041 - DNA, 20 bp, Artificial Sequence
  Description of Artificial Sequence: Synthetic oligonucleotide
  Target: SCNA; (-) strand; PAM type: NRG; PAM sequence: AGG
tcctgagtagctgggattac

SEQ ID NO: 22042 - DNA, 20 bp, Artificial Sequence
  Description of Artificial Sequence: Synthetic oligonucleotide
  Target: SCNA; (-) strand; PAM type: NRG; PAM sequence: CAG
ctcctgagtagctgggatta

SEQ ID NO: 22043 - DNA, 20 bp, Artificial Sequence
  Description of Artificial Sequence: Synthetic oligonucleotide
  Target: SCNA; (-) strand; PAM type: NRG; PAM sequence: GGG
gttcagcctcctgagtagct

SEQ ID NO: 22044 - DNA, 20 bp, Artificial Sequence
  Description of Artificial Sequence: Synthetic oligonucleotide
  Target: SCNA; (-) strand; PAM type: NRG; PAM sequence: TGG
agttcagcctcctgagtagc

SEQ ID NO: 22045 - DNA, 20 bp, Artificial Sequence
  Description of Artificial Sequence: Synthetic oligonucleotide
  Target: SCNA; (-) strand; PAM type: NRG; PAM sequence: TAG
tcctagttcagcctcctgag

SEQ ID NO: 22046 - DNA, 20 bp, Artificial Sequence
  Description of Artificial Sequence: Synthetic oligonucleotide
  Target: SCNA; (-) strand; PAM type: NRG; PAM sequence: GAG
ttctcctagttcagcctcct

SEQ ID NO: 22047 - DNA, 20 bp, Artificial Sequence
  Description of Artificial Sequence: Synthetic oligonucleotide
  Target: SCNA; (-) strand; PAM type: NRG; PAM sequence: CAG
ttcaagcgattctcctagtt

SEQ ID NO: 22048 - DNA, 20 bp, Artificial Sequence
  Description of Artificial Sequence: Synthetic oligonucleotide
  Target: SCNA; (-) strand; PAM type: NRG; PAM sequence: TAG
ccaggttcaagcgattctcc

SEQ ID NO: 22049 - DNA, 20 bp, Artificial Sequence
  Description of Artificial Sequence: Synthetic oligonucleotide
  Target: SCNA; (-) strand; PAM type: NRG; PAM sequence: AAG
agcctctgccacccaggttc

SEQ ID NO: 22050 - DNA, 20 bp, Artificial Sequence
  Description of Artificial Sequence: Synthetic oligonucleotide
  Target: SCNA; (-) strand; PAM type: NRG; PAM sequence: AGG
cacagcagcctctgccaccc

SEQ ID NO: 22051 - DNA, 20 bp, Artificial Sequence
  Description of Artificial Sequence: Synthetic oligonucleotide
  Target: SCNA; (-) strand; PAM type: NRG; PAM sequence: CAG
tcacagcagcctctgccacc

SEQ ID NO: 22052 - DNA, 20 bp, Artificial Sequence
  Description of Artificial Sequence: Synthetic oligonucleotide
  Target: SCNA; (-) strand; PAM type: NRG; PAM sequence: CAG
ggtgcaatctcagctcacag

SEQ ID NO: 22053 - DNA, 20 bp, Artificial Sequence
  Description of Artificial Sequence: Synthetic oligonucleotide
  Target: SCNA; (-) strand; PAM type: NRG; PAM sequence: CAG
cgtggtgcaatctcagctca

SEQ ID NO: 22054 - DNA, 20 bp, Artificial Sequence
  Description of Artificial Sequence: Synthetic oligonucleotide
  Target: SCNA; (-) strand; PAM type: NRG; PAM sequence: CAG
ggagtgccgtggtgcaatct

SEQ ID NO: 22055 - DNA, 20 bp, Artificial Sequence
  Description of Artificial Sequence: Synthetic oligonucleotide
  Target: SCNA; (-) strand; PAM type: NRG; PAM sequence: TGG
ttgcccaggctggagtgccg

SEQ ID NO: 22056 - DNA, 20 bp, Artificial Sequence
  Description of Artificial Sequence: Synthetic oligonucleotide
  Target: SCNA; (-) strand; PAM type: NRG; PAM sequence: GAG
tcgctctgttgcccaggctg

SEQ ID NO: 22057 - DNA, 20 bp, Artificial Sequence
  Description of Artificial Sequence: Synthetic oligonucleotide
  Target: SCNA; (-) strand; PAM type: NRG; PAM sequence: TGG
tctcgctctgttgcccaggc

SEQ ID NO: 22058 - DNA, 20 bp, Artificial Sequence
  Description of Artificial Sequence: Synthetic oligonucleotide
  Target: SCNA; (-) strand; PAM type: NRG; PAM sequence: AGG
ggagtctcgctctgttgccc

SEQ ID NO: 22059 - DNA, 20 bp, Artificial Sequence
  Description of Artificial Sequence: Synthetic oligonucleotide
  Target: SCNA; (-) strand; PAM type: NRG; PAM sequence: CAG
tggagtctcgctctgttgcc

SEQ ID NO: 22060 - DNA, 20 bp, Artificial Sequence
  Description of Artificial Sequence: Synthetic oligonucleotide
  Target: SCNA; (-) strand; PAM type: NRG; PAM sequence: GAG
atatttttttttttgagatg

SEQ ID NO: 22061 - DNA, 20 bp, Artificial Sequence
  Description of Artificial Sequence: Synthetic oligonucleotide
  Target: SCNA; (-) strand; PAM type: NRG; PAM sequence: TGG
atatatttttttttttgaga

SEQ ID NO: 22062 - DNA, 20 bp, Artificial Sequence
  Description of Artificial Sequence: Synthetic oligonucleotide
  Target: SCNA; (-) strand; PAM type: NRG; PAM sequence: GAG
atatatatattttttttttt

SEQ ID NO: 22063 - DNA, 20 bp, Artificial Sequence
  Description of Artificial Sequence: Synthetic oligonucleotide
  Target: SCNA; (-) strand; PAM type: NRG; PAM sequence: TAG
ttatttctggaattcatctc

SEQ ID NO: 22064 - DNA, 20 bp, Artificial Sequence
  Description of Artificial Sequence: Synthetic oligonucleotide
  Target: SCNA; (-) strand; PAM type: NRG; PAM sequence: TGG
ctttctgtataccttatttc

SEQ ID NO: 22065 - DNA, 20 bp, Artificial Sequence
  Description of Artificial Sequence: Synthetic oligonucleotide
  Target: SCNA; (-) strand; PAM type: NRG; PAM sequence: CAG
tagtcaatcacaaagtccta

SEQ ID NO: 22066 - DNA, 20 bp, Artificial Sequence
  Description of Artificial Sequence: Synthetic oligonucleotide
  Target: SCNA; (-) strand; PAM type: NRG; PAM sequence: AAG
ctcagttctagtcaatcaca

SEQ ID NO: 22067 - DNA, 20 bp, Artificial Sequence
  Description of Artificial Sequence: Synthetic oligonucleotide
  Target: SCNA; (-) strand; PAM type: NRG; PAM sequence: TAG
tctcccttgtccctcagttc

SEQ ID NO: 22068 - DNA, 20 bp, Artificial Sequence
  Description of Artificial Sequence: Synthetic oligonucleotide
  Target: SCNA; (-) strand; PAM type: NRG; PAM sequence: CAG
tttccctctcccttgtccct

SEQ ID NO: 22069 - DNA, 20 bp, Artificial Sequence
  Description of Artificial Sequence: Synthetic oligonucleotide
  Target: SCNA; (-) strand; PAM type: NRG; PAM sequence: AAG
ctttcagaacatgtggaatt

SEQ ID NO: 22070 - DNA, 20 bp, Artificial Sequence
  Description of Artificial Sequence: Synthetic oligonucleotide
  Target: SCNA; (-) strand; PAM type: NRG; PAM sequence: TGG
tatttaactttcagaacatg

SEQ ID NO: 22071 - DNA, 20 bp, Artificial Sequence
  Description of Artificial Sequence: Synthetic oligonucleotide
  Target: SCNA; (-) strand; PAM type: NRG; PAM sequence: CAG
tagaggagatatttaacttt

SEQ ID NO: 22072 - DNA, 20 bp, Artificial Sequence
  Description of Artificial Sequence: Synthetic oligonucleotide
  Target: SCNA; (-) strand; PAM type: NRG; PAM sequence: GAG
gaagggtcttttggctagag

SEQ ID NO: 22073 - DNA, 20 bp, Artificial Sequence
  Description of Artificial Sequence: Synthetic oligonucleotide
  Target: SCNA; (-) strand; PAM type: NRG; PAM sequence: AGG
aggaagggtcttttggctag

SEQ ID NO: 22074 - DNA, 20 bp, Artificial Sequence
  Description of Artificial Sequence: Synthetic oligonucleotide
  Target: SCNA; (-) strand; PAM type: NRG; PAM sequence: GAG
taggaagggtcttttggcta

SEQ ID NO: 22075 - DNA, 20 bp, Artificial Sequence
  Description of Artificial Sequence: Synthetic oligonucleotide
  Target: SCNA; (-) strand; PAM type: NRG; PAM sequence: TAG
aataggaagggtcttttggc

SEQ ID NO: 22076 - DNA, 20 bp, Artificial Sequence
  Description of Artificial Sequence: Synthetic oligonucleotide
  Target: SCNA; (-) strand; PAM type: NRG; PAM sequence: TGG
gtaaaataggaagggtcttt

SEQ ID NO: 22077 - DNA, 20 bp, Artificial Sequence
  Description of Artificial Sequence: Synthetic oligonucleotide
  Target: SCNA; (-) strand; PAM type: NRG; PAM sequence: GGG
ccagagaagtaaaataggaa

SEQ ID NO: 22078 - DNA, 20 bp, Artificial Sequence
  Description of Artificial Sequence: Synthetic oligonucleotide
  Target: SCNA; (-) strand; PAM type: NRG; PAM sequence: AGG
tccagagaagtaaaatagga

SEQ ID NO: 22079 - DNA, 20 bp, Artificial Sequence
  Description of Artificial Sequence: Synthetic oligonucleotide
  Target: SCNA; (-) strand; PAM type: NRG; PAM sequence: AAG
gtccagagaagtaaaatagg

SEQ ID NO: 22080 - DNA, 20 bp, Artificial Sequence
  Description of Artificial Sequence: Synthetic oligonucleotide
  Target: SCNA; (-) strand; PAM type: NRG; PAM sequence: AGG
gaggtccagagaagtaaaat

SEQ ID NO: 22081 - DNA, 20 bp, Artificial Sequence
  Description of Artificial Sequence: Synthetic oligonucleotide
  Target: SCNA; (-) strand; PAM type: NRG; PAM sequence: TAG
agaggtccagagaagtaaaa

SEQ ID NO: 22082 - DNA, 20 bp, Artificial Sequence
  Description of Artificial Sequence: Synthetic oligonucleotide
  Target: SCNA; (-) strand; PAM type: NRG; PAM sequence: AAG
aaacattaagaggtccagag

SEQ ID NO: 22083 - DNA, 20 bp, Artificial Sequence
  Description of Artificial Sequence: Synthetic oligonucleotide
  Target: SCNA; (-) strand; PAM type: NRG; PAM sequence: GAG
aagaaacattaagaggtcca

SEQ ID NO: 22084 - DNA, 20 bp, Artificial Sequence
  Description of Artificial Sequence: Synthetic oligonucleotide
  Target: SCNA; (-) strand; PAM type: NRG; PAM sequence: CAG
caaagaaacattaagaggtc

SEQ ID NO: 22085 - DNA, 20 bp, Artificial Sequence
  Description of Artificial Sequence: Synthetic oligonucleotide
  Target: SCNA; (-) strand; PAM type: NRG; PAM sequence: AGG
aacatcaaagaaacattaag

SEQ ID NO: 22086 - DNA, 20 bp, Artificial Sequence
  Description of Artificial Sequence: Synthetic oligonucleotide
  Target: SCNA; (-) strand; PAM type: NRG; PAM sequence: GAG
aaacatcaaagaaacattaa

SEQ ID NO: 22087 - DNA, 20 bp, Artificial Sequence
  Description of Artificial Sequence: Synthetic oligonucleotide
  Target: SCNA; (-) strand; PAM type: NRG; PAM sequence: AAG
ataaacatcaaagaaacatt

SEQ ID NO: 22088 - DNA, 20 bp, Artificial Sequence
  Description of Artificial Sequence: Synthetic oligonucleotide
  Target: SCNA; (-) strand; PAM type: NRG; PAM sequence: AAG
gtgcaggggaataaacatca

SEQ ID NO: 22089 - DNA, 20 bp, Artificial Sequence
  Description of Artificial Sequence: Synthetic oligonucleotide
  Target: SCNA; (-) strand; PAM type: NRG; PAM sequence: GGG
gggttaaattatttgtgcag

SEQ ID NO: 22090 - DNA, 20 bp, Artificial Sequence
  Description of Artificial Sequence: Synthetic oligonucleotide
  Target: SCNA; (-) strand; PAM type: NRG; PAM sequence: GGG
ggggttaaattatttgtgca

SEQ ID NO: 22091 - DNA, 20 bp, Artificial Sequence
  Description of Artificial Sequence: Synthetic oligonucleotide
  Target: SCNA; (-) strand; PAM type: NRG; PAM sequence: AGG
aggggttaaattatttgtgc

SEQ ID NO: 22092 - DNA, 20 bp, Artificial Sequence
  Description of Artificial Sequence: Synthetic oligonucleotide
  Target: SCNA; (-) strand; PAM type: NRG; PAM sequence: CAG
aaggggttaaattatttgtg

SEQ ID NO: 22093 - DNA, 20 bp, Artificial Sequence
  Description of Artificial Sequence: Synthetic oligonucleotide
  Target: SCNA; (-) strand; PAM type: NRG; PAM sequence: GGG
aaaattttggatctgtaaag

SEQ ID NO: 22094 - DNA, 20 bp, Artificial Sequence
  Description of Artificial Sequence: Synthetic oligonucleotide
  Target: SCNA; (-) strand; PAM type: NRG; PAM sequence: GGG
taaaattttggatctgtaaa

SEQ ID NO: 22095 - DNA, 20 bp, Artificial Sequence
  Description of Artificial Sequence: Synthetic oligonucleotide
  Target: SCNA; (-) strand; PAM type: NRG; PAM sequence: AGG
ataaaattttggatctgtaa

SEQ ID NO: 22096 - DNA, 20 bp, Artificial Sequence
  Description of Artificial Sequence: Synthetic oligonucleotide
  Target: SCNA; (-) strand; PAM type: NRG; PAM sequence: AAG
tataaaattttggatctgta

SEQ ID NO: 22097 - DNA, 20 bp, Artificial Sequence
  Description of Artificial Sequence: Synthetic oligonucleotide
  Target: SCNA; (-) strand; PAM type: NRG; PAM sequence: TGG
atttgcctactataaaattt

SEQ ID NO: 22098 - DNA, 20 bp, Artificial Sequence
  Description of Artificial Sequence: Synthetic oligonucleotide
  Target: SCNA; (-) strand; PAM type: NRG; PAM sequence: GGG
cataacatacattttcaagg

SEQ ID NO: 22099 - DNA, 20 bp, Artificial Sequence
  Description of Artificial Sequence: Synthetic oligonucleotide
  Target: SCNA; (-) strand; PAM type: NRG; PAM sequence: GGG
tcataacatacattttcaag

SEQ ID NO: 22100 - DNA, 20 bp, Artificial Sequence
  Description of Artificial Sequence: Synthetic oligonucleotide
  Target: SCNA; (-) strand; PAM type: NRG; PAM sequence: GGG
ttcataacatacattttcaa

SEQ ID NO: 22101 - DNA, 20 bp, Artificial Sequence
  Description of Artificial Sequence: Synthetic oligonucleotide
  Target: SCNA; (-) strand; PAM type: NRG; PAM sequence: AGG
attcataacatacattttca

SEQ ID NO: 22102 - DNA, 20 bp, Artificial Sequence
  Description of Artificial Sequence: Synthetic oligonucleotide
  Target: SCNA; (-) strand; PAM type: NRG; PAM sequence: AAG
tattcataacatacattttc

SEQ ID NO: 22103 - DNA, 20 bp, Artificial Sequence
  Description of Artificial Sequence: Synthetic oligonucleotide
  Target: SCNA; (-) strand; PAM type: NRG; PAM sequence: AGG
tgcaaaaatatcacctacaa

SEQ ID NO: 22104 - DNA, 20 bp, Artificial Sequence
  Description of Artificial Sequence: Synthetic oligonucleotide
  Target: SCNA; (-) strand; PAM type: NRG; PAM sequence: AAG
ctgcaaaaatatcacctaca

SEQ ID NO: 22105 - DNA, 20 bp, Artificial Sequence
  Description of Artificial Sequence: Synthetic oligonucleotide
  Target: SCNA; (-) strand; PAM type: NRG; PAM sequence: AAG
aggaaaatggaccttgtcct

SEQ ID NO: 22106 - DNA, 20 bp, Artificial Sequence
  Description of Artificial Sequence: Synthetic oligonucleotide
  Target: SCNA; (-) strand; PAM type: NRG; PAM sequence: TGG
tttaacaagggacaggaaaa

SEQ ID NO: 22107 - DNA, 20 bp, Artificial Sequence
  Description of Artificial Sequence: Synthetic oligonucleotide
  Target: SCNA; (-) strand; PAM type: NRG; PAM sequence: AGG
tgtgacatttaacaagggac

SEQ ID NO: 22108 - DNA, 20 bp, Artificial Sequence
  Description of Artificial Sequence: Synthetic oligonucleotide
  Target: SCNA; (-) strand; PAM type: NRG; PAM sequence: CAG
ttgtgacatttaacaaggga

SEQ ID NO: 22109 - DNA, 20 bp, Artificial Sequence
  Description of Artificial Sequence: Synthetic oligonucleotide
  Target: SCNA; (-) strand; PAM type: NRG; PAM sequence: GGG
agtcttgtgacatttaacaa

SEQ ID NO: 22110 - DNA, 20 bp, Artificial Sequence
  Description of Artificial Sequence: Synthetic oligonucleotide
  Target: SCNA; (-) strand; PAM type: NRG; PAM sequence: AGG
aagtcttgtgacatttaaca

SEQ ID NO: 22111 - DNA, 20 bp, Artificial Sequence
  Description of Artificial Sequence: Synthetic oligonucleotide
  Target: SCNA; (-) strand; PAM type: NRG; PAM sequence: AAG
gaagtcttgtgacatttaac

SEQ ID NO: 22112 - DNA, 20 bp, Artificial Sequence
  Description of Artificial Sequence: Synthetic oligonucleotide
  Target: SCNA; (-) strand; PAM type: NRG; PAM sequence: AAG
atatataggtagagaagatg

SEQ ID NO: 22113 - DNA, 20 bp, Artificial Sequence
  Description of Artificial Sequence: Synthetic oligonucleotide
  Target: SCNA; (-) strand; PAM type: NRG; PAM sequence: AAG
tttgtgatatataggtagag

SEQ ID NO: 22114 - DNA, 20 bp, Artificial Sequence
  Description of Artificial Sequence: Synthetic oligonucleotide
  Target: SCNA; (-) strand; PAM type: NRG; PAM sequence: GAG
tactttgtgatatataggta

SEQ ID NO: 22115 - DNA, 20 bp, Artificial Sequence
  Description of Artificial Sequence: Synthetic oligonucleotide
  Target: SCNA; (-) strand; PAM type: NRG; PAM sequence: TAG
ggtactttgtgatatatagg

SEQ ID NO: 22116 - DNA, 20 bp, Artificial Sequence
  Description of Artificial Sequence: Synthetic oligonucleotide
  Target: SCNA; (-) strand; PAM type: NRG; PAM sequence: AGG
gaaggtactttgtgatatat

SEQ ID NO: 22117 - DNA, 20 bp, Artificial Sequence
  Description of Artificial Sequence: Synthetic oligonucleotide
  Target: SCNA; (-) strand; PAM type: NRG; PAM sequence: TAG
agaaggtactttgtgatata

SEQ ID NO: 22118 - DNA, 20 bp, Artificial Sequence
  Description of Artificial Sequence: Synthetic oligonucleotide
  Target: SCNA; (-) strand; PAM type: NRG; PAM sequence: AGG
cttgtgatcagcagagcaga

SEQ ID NO: 22119 - DNA, 20 bp, Artificial Sequence
  Description of Artificial Sequence: Synthetic oligonucleotide
  Target: SCNA; (-) strand; PAM type: NRG; PAM sequence: AAG
ccttgtgatcagcagagcag

SEQ ID NO: 22120 - DNA, 20 bp, Artificial Sequence
  Description of Artificial Sequence: Synthetic oligonucleotide
  Target: SCNA; (-) strand; PAM type: NRG; PAM sequence: CAG
ttaccttgtgatcagcagag

SEQ ID NO: 22121 - DNA, 20 bp, Artificial Sequence
  Description of Artificial Sequence: Synthetic oligonucleotide
  Target: SCNA; (-) strand; PAM type: NRG; PAM sequence: GAG
taattaccttgtgatcagca

SEQ ID NO: 22122 - DNA, 20 bp, Artificial Sequence
  Description of Artificial Sequence: Synthetic oligonucleotide
  Target: SCNA; (-) strand; PAM type: NRG; PAM sequence: CAG
cttaattaccttgtgatcag

SEQ ID NO: 22123 - DNA, 20 bp, Artificial Sequence
  Description of Artificial Sequence: Synthetic oligonucleotide
  Target: SCNA; (-) strand; PAM type: NRG; PAM sequence: CAG
aaacttaattaccttgtgat

SEQ ID NO: 22124 - DNA, 20 bp, Artificial Sequence
  Description of Artificial Sequence: Synthetic oligonucleotide
  Target: SCNA; (-) strand; PAM type: NRG; PAM sequence: AAG
taatgcatgaacataaacct

SEQ ID NO: 22125 - DNA, 20 bp, Artificial Sequence
  Description of Artificial Sequence: Synthetic oligonucleotide
  Target: SCNA; (-) strand; PAM type: NRG; PAM sequence: TAG
agttaattttttaaaaatca

SEQ ID NO: 22126 - DNA, 20 bp, Artificial Sequence
  Description of Artificial Sequence: Synthetic oligonucleotide
  Target: SCNA; (-) strand; PAM type: NRG; PAM sequence: TAG
aagtgaattatacctcaata

SEQ ID NO: 22127 - DNA, 20 bp, Artificial Sequence
  Description of Artificial Sequence: Synthetic oligonucleotide
  Target: SCNA; (-) strand; PAM type: NRG; PAM sequence: AAG
aaatgagtgcatatgattgt

SEQ ID NO: 22128 - DNA, 20 bp, Artificial Sequence
  Description of Artificial Sequence: Synthetic oligonucleotide
  Target: SCNA; (-) strand; PAM type: NRG; PAM sequence: GAG
aagaaatgtacatttaaaat

SEQ ID NO: 22129 - DNA, 20 bp, Artificial Sequence
  Description of Artificial Sequence: Synthetic oligonucleotide
  Target: SCNA; (-) strand; PAM type: NRG; PAM sequence: AAG
ttattaatgcatcaaaactc

SEQ ID NO: 22130 - DNA, 20 bp, Artificial Sequence
  Description of Artificial Sequence: Synthetic oligonucleotide
  Target: SCNA; (-) strand; PAM type: NRG; PAM sequence: GGG
aattgtggtggtcgttacat

SEQ ID NO: 22131 - DNA, 20 bp, Artificial Sequence
  Description of Artificial Sequence: Synthetic oligonucleotide
  Target: SCNA; (-) strand; PAM type: NRG; PAM sequence: TGG
caattgtggtggtcgttaca

SEQ ID NO: 22132 - DNA, 20 bp, Artificial Sequence
  Description of Artificial Sequence: Synthetic oligonucleotide
  Target: SCNA; (-) strand; PAM type: NRG; PAM sequence: TGG
atatgatttctcaattgtgg

SEQ ID NO: 22133 - DNA, 20 bp, Artificial Sequence
  Description of Artificial Sequence: Synthetic oligonucleotide
  Target: SCNA; (-) strand; PAM type: NRG; PAM sequence: TGG
gatatatgatttctcaattg

SEQ ID NO: 22134 - DNA, 20 bp, Artificial Sequence
  Description of Artificial Sequence: Synthetic oligonucleotide
  Target: SCNA; (-) strand; PAM type: NRG; PAM sequence: AAG
gaaaattggggaaaataatg

SEQ ID NO: 22135 - DNA, 20 bp, Artificial Sequence
  Description of Artificial Sequence: Synthetic oligonucleotide
  Target: SCNA; (-) strand; PAM type: NRG; PAM sequence: GGG
aaaggcacaaaggaaaattg

SEQ ID NO: 22136 - DNA, 20 bp, Artificial Sequence
  Description of Artificial Sequence: Synthetic oligonucleotide
  Target: SCNA; (-) strand; PAM type: NRG; PAM sequence: GGG
aaaaggcacaaaggaaaatt

SEQ ID NO: 22137 - DNA, 20 bp, Artificial Sequence
  Description of Artificial Sequence: Synthetic oligonucleotide
  Target: SCNA; (-) strand; PAM type: NRG; PAM sequence: TGG
aaaaaggcacaaaggaaaat

SEQ ID NO: 22138 - DNA, 20 bp, Artificial Sequence
  Description of Artificial Sequence: Synthetic oligonucleotide
  Target: SCNA; (-) strand; PAM type: NRG; PAM sequence: AGG
ttaactagaaaaaggcacaa

SEQ ID NO: 22139 - DNA, 20 bp, Artificial Sequence
  Description of Artificial Sequence: Synthetic oligonucleotide
  Target: SCNA; (-) strand; PAM type: NRG; PAM sequence: AAG
attaactagaaaaaggcaca

SEQ ID NO: 22140 - DNA, 20 bp, Artificial Sequence
  Description of Artificial Sequence: Synthetic oligonucleotide
  Target: SCNA; (-) strand; PAM type: NRG; PAM sequence: AGG
agaaggaattaactagaaaa

SEQ ID NO: 22141 - DNA, 20 bp, Artificial Sequence
  Description of Artificial Sequence: Synthetic oligonucleotide
  Target: SCNA; (-) strand; PAM type: NRG; PAM sequence: AAG
gagaaggaattaactagaaa

SEQ ID NO: 22142 - DNA, 20 bp, Artificial Sequence
  Description of Artificial Sequence: Synthetic oligonucleotide
  Target: SCNA; (-) strand; PAM type: NRG; PAM sequence: TAG
gagaaggagaaggaattaac

SEQ ID NO: 22143 - DNA, 20 bp, Artificial Sequence
  Description of Artificial Sequence: Synthetic oligonucleotide
  Target: SCNA; (-) strand; PAM type: NRG; PAM sequence: AGG
ggaggtggaggagaaggaga

SEQ ID NO: 22144 - DNA, 20 bp, Artificial Sequence
  Description of Artificial Sequence: Synthetic oligonucleotide
  Target: SCNA; (-) strand; PAM type: NRG; PAM sequence: AAG
tggaggtggaggagaaggag

SEQ ID NO: 22145 - DNA, 20 bp, Artificial Sequence
  Description of Artificial Sequence: Synthetic oligonucleotide
  Target: SCNA; (-) strand; PAM type: NRG; PAM sequence: GAG
gggtggaggtggaggagaag

SEQ ID NO: 22146 - DNA, 20 bp, Artificial Sequence
  Description of Artificial Sequence: Synthetic oligonucleotide
  Target: SCNA; (-) strand; PAM type: NRG; PAM sequence: AGG
tggggtggaggtggaggaga

SEQ ID NO: 22147 - DNA, 20 bp, Artificial Sequence
  Description of Artificial Sequence: Synthetic oligonucleotide
  Target: SCNA; (-) strand; PAM type: NRG; PAM sequence: AAG
ctggggtggaggtggaggag

SEQ ID NO: 22148 - DNA, 20 bp, Artificial Sequence
  Description of Artificial Sequence: Synthetic oligonucleotide
  Target: SCNA; (-) strand; PAM type: NRG; PAM sequence: GAG
gggctggggtggaggtggag

SEQ ID NO: 22149 - DNA, 20 bp, Artificial Sequence
  Description of Artificial Sequence: Synthetic oligonucleotide
  Target: SCNA; (-) strand; PAM type: NRG; PAM sequence: AGG
tggggctggggtggaggtgg

SEQ ID NO: 22150 - DNA, 20 bp, Artificial Sequence
  Description of Artificial Sequence: Synthetic oligonucleotide
  Target: SCNA; (-) strand; PAM type: NRG; PAM sequence: GAG
atggggctggggtggaggtg

SEQ ID NO: 22151 - DNA, 20 bp, Artificial Sequence
  Description of Artificial Sequence: Synthetic oligonucleotide
  Target: SCNA; (-) strand; PAM type: NRG; PAM sequence: TGG
ccatggggctggggtggagg

SEQ ID NO: 22152 - DNA, 20 bp, Artificial Sequence
  Description of Artificial Sequence: Synthetic oligonucleotide
  Target: SCNA; (-) strand; PAM type: NRG; PAM sequence: AGG
cccccatggggctggggtgg

SEQ ID NO: 22153 - DNA, 20 bp, Artificial Sequence
  Description of Artificial Sequence: Synthetic oligonucleotide
  Target: SCNA; (-) strand; PAM type: NRG; PAM sequence: GAG
acccccatggggctggggtg

SEQ ID NO: 22154 - DNA, 20 bp, Artificial Sequence
  Description of Artificial Sequence: Synthetic oligonucleotide
  Target: SCNA; (-) strand; PAM type: NRG; PAM sequence: TGG
ctacccccatggggctgggg

SEQ ID NO: 22155 - DNA, 20 bp, Artificial Sequence
  Description of Artificial Sequence: Synthetic oligonucleotide
  Target: SCNA; (-) strand; PAM type: NRG; PAM sequence: GGG
tggctacccccatggggctg

SEQ ID NO: 22156 - DNA, 20 bp, Artificial Sequence
  Description of Artificial Sequence: Synthetic oligonucleotide
  Target: SCNA; (-) strand; PAM type: NRG; PAM sequence: GGG
atggctacccccatggggct

SEQ ID NO: 22157 - DNA, 20 bp, Artificial Sequence
  Description of Artificial Sequence: Synthetic oligonucleotide
  Target: SCNA; (-) strand; PAM type: NRG; PAM sequence: TGG
catggctacccccatggggc

SEQ ID NO: 22158 - DNA, 20 bp, Artificial Sequence
  Description of Artificial Sequence: Synthetic oligonucleotide
  Target: SCNA; (-) strand; PAM type: NRG; PAM sequence: GGG
ccttcatggctacccccatg

SEQ ID NO: 22159 - DNA, 20 bp, Artificial Sequence
  Description of Artificial Sequence: Synthetic oligonucleotide
  Target: SCNA; (-) strand; PAM type: NRG; PAM sequence: GGG
accttcatggctacccccat

SEQ ID NO: 22160 - DNA, 20 bp, Artificial Sequence
  Description of Artificial Sequence: Synthetic oligonucleotide
  Target: SCNA; (-) strand; PAM type: NRG; PAM sequence: TGG
taccttcatggctaccccca

SEQ ID NO: 22161 - DNA, 20 bp, Artificial Sequence
  Description of Artificial Sequence: Synthetic oligonucleotide
  Target: SCNA; (-) strand; PAM type: NRG; PAM sequence: TGG
atccaagaggtgtaccttca

SEQ ID NO: 22162 - DNA, 20 bp, Artificial Sequence
  Description of Artificial Sequence: Synthetic oligonucleotide
  Target: SCNA; (-) strand; PAM type: NRG; PAM sequence: AGG
ttggagagaaaagatccaag

SEQ ID NO: 22163 - DNA, 20 bp, Artificial Sequence
  Description of Artificial Sequence: Synthetic oligonucleotide
  Target: SCNA; (-) strand; PAM type: NRG; PAM sequence: GAG
attggagagaaaagatccaa

SEQ ID NO: 22164 - DNA, 20 bp, Artificial Sequence
  Description of Artificial Sequence: Synthetic oligonucleotide
  Target: SCNA; (-) strand; PAM type: NRG; PAM sequence: AAG
taattggagagaaaagatcc

SEQ ID NO: 22165 - DNA, 20 bp, Artificial Sequence
  Description of Artificial Sequence: Synthetic oligonucleotide
  Target: SCNA; (-) strand; PAM type: NRG; PAM sequence: AAG
tggcagctaattggagagaa

SEQ ID NO: 22166 - DNA, 20 bp, Artificial Sequence
  Description of Artificial Sequence: Synthetic oligonucleotide
  Target: SCNA; (-) strand; PAM type: NRG; PAM sequence: GAG
actcctggcagctaattgga

SEQ ID NO: 22167 - DNA, 20 bp, Artificial Sequence
  Description of Artificial Sequence: Synthetic oligonucleotide
  Target: SCNA; (-) strand; PAM type: NRG; PAM sequence: GAG
gcactcctggcagctaattg

SEQ ID NO: 22168 - DNA, 20 bp, Artificial Sequence
  Description of Artificial Sequence: Synthetic oligonucleotide
  Target: SCNA; (-) strand; PAM type: NRG; PAM sequence: TGG
tagcactcctggcagctaat

SEQ ID NO: 22169 - DNA, 20 bp, Artificial Sequence
  Description of Artificial Sequence: Synthetic oligonucleotide
  Target: SCNA; (-) strand; PAM type: NRG; PAM sequence: CAG
gaggccaatagcactcctgg

SEQ ID NO: 22170 - DNA, 20 bp, Artificial Sequence
  Description of Artificial Sequence: Synthetic oligonucleotide
  Target: SCNA; (-) strand; PAM type: NRG; PAM sequence: TGG
caggaggccaatagcactcc

SEQ ID NO: 22171 - DNA, 20 bp, Artificial Sequence
  Description of Artificial Sequence: Synthetic oligonucleotide
  Target: SCNA; (-) strand; PAM type: NRG; PAM sequence: TAG
ctgctgcagcaggaggccaa

SEQ ID NO: 22172 - DNA, 20 bp, Artificial Sequence
  Description of Artificial Sequence: Synthetic oligonucleotide
  Target: SCNA; (-) strand; PAM type: NRG; PAM sequence: AGG
cccattgctgctgcagcagg

SEQ ID NO: 22173 - DNA, 20 bp, Artificial Sequence
  Description of Artificial Sequence: Synthetic oligonucleotide
  Target: SCNA; (-) strand; PAM type: NRG; PAM sequence: GAG
tcccattgctgctgcagcag

SEQ ID NO: 22174 - DNA, 20 bp, Artificial Sequence
  Description of Artificial Sequence: Synthetic oligonucleotide
  Target: SCNA; (-) strand; PAM type: NRG; PAM sequence: AGG
gatcccattgctgctgcagc

SEQ ID NO: 22175 - DNA, 20 bp, Artificial Sequence
  Description of Artificial Sequence: Synthetic oligonucleotide
  Target: SCNA; (-) strand; PAM type: NRG; PAM sequence: CAG
ggatcccattgctgctgcag

SEQ ID NO: 22176 - DNA, 20 bp, Artificial Sequence
  Description of Artificial Sequence: Synthetic oligonucleotide
  Target: SCNA; (-) strand; PAM type: NRG; PAM sequence: CAG
ggtggatcccattgctgctg

SEQ ID NO: 22177 - DNA, 20 bp, Artificial Sequence
  Description of Artificial Sequence: Synthetic oligonucleotide
  Target: SCNA; (-) strand; PAM type: NRG; PAM sequence: TGG
tctgggttcctgtgctgtgg

SEQ ID NO: 22178 - DNA, 20 bp, Artificial Sequence
  Description of Artificial Sequence: Synthetic oligonucleotide
  Target: SCNA; (-) strand; PAM type: NRG; PAM sequence: TGG
cagtctgggttcctgtgctg

SEQ ID NO: 22179 - DNA, 20 bp, Artificial Sequence
  Description of Artificial Sequence: Synthetic oligonucleotide
  Target: SCNA; (-) strand; PAM type: NRG; PAM sequence: GGG
cattggctggaggccagtct

SEQ ID NO: 22180 - DNA, 20 bp, Artificial Sequence
  Description of Artificial Sequence: Synthetic oligonucleotide
  Target: SCNA; (-) strand; PAM type: NRG; PAM sequence: TGG
tcattggctggaggccagtc

SEQ ID NO: 22181 - DNA, 20 bp, Artificial Sequence
  Description of Artificial Sequence: Synthetic oligonucleotide
  Target: SCNA; (-) strand; PAM type: NRG; PAM sequence: CAG
cccagtcattggctggaggc

SEQ ID NO: 22182 - DNA, 20 bp, Artificial Sequence
  Description of Artificial Sequence: Synthetic oligonucleotide
  Target: SCNA; (-) strand; PAM type: NRG; PAM sequence: AGG
tgctcccagtcattggctgg

SEQ ID NO: 22183 - DNA, 20 bp, Artificial Sequence
  Description of Artificial Sequence: Synthetic oligonucleotide
  Target: SCNA; (-) strand; PAM type: NRG; PAM sequence: GAG
ctgctcccagtcattggctg

SEQ ID NO: 22184 - DNA, 20 bp, Artificial Sequence
  Description of Artificial Sequence: Synthetic oligonucleotide
  Target: SCNA; (-) strand; PAM type: NRG; PAM sequence: TGG
tgctgctcccagtcattggc

SEQ ID NO: 22185 - DNA, 20 bp, Artificial Sequence
  Description of Artificial Sequence: Synthetic oligonucleotide
  Target: SCNA; (-) strand; PAM type: NRG; PAM sequence: TGG
tccttgctgctcccagtcat

SEQ ID NO: 22186 - DNA, 20 bp, Artificial Sequence
  Description of Artificial Sequence: Synthetic oligonucleotide
  Target: SCNA; (-) strand; PAM type: NRG; PAM sequence: CAG
tgtagtttccttgctgctcc

SEQ ID NO: 22187 - DNA, 20 bp, Artificial Sequence
  Description of Artificial Sequence: Synthetic oligonucleotide
  Target: SCNA; (-) strand; PAM type: NRG; PAM sequence: TAG
aggcagacatgtctgggctg

SEQ ID NO: 22188 - DNA, 20 bp, Artificial Sequence
  Description of Artificial Sequence: Synthetic oligonucleotide
  Target: SCNA; (-) strand; PAM type: NRG; PAM sequence: GGG
tgcattaggcagacatgtct

SEQ ID NO: 22189 - DNA, 20 bp, Artificial Sequence
  Description of Artificial Sequence: Synthetic oligonucleotide
  Target: SCNA; (-) strand; PAM type: NRG; PAM sequence: TGG
atgcattaggcagacatgtc

SEQ ID NO: 22190 - DNA, 20 bp, Artificial Sequence
  Description of Artificial Sequence: Synthetic oligonucleotide
  Target: SCNA; (-) strand; PAM type: NRG; PAM sequence: CAG
ttgaggagtcatgcattagg

SEQ ID NO: 22191 - DNA, 20 bp, Artificial Sequence
  Description of Artificial Sequence: Synthetic oligonucleotide
  Target: SCNA; (-) strand; PAM type: NRG; PAM sequence: AGG
ttgttgaggagtcatgcatt

SEQ ID NO: 22192 - DNA, 20 bp, Artificial Sequence
  Description of Artificial Sequence: Synthetic oligonucleotide
  Target: SCNA; (-) strand; PAM type: NRG; PAM sequence: TAG
cttgttgaggagtcatgcat

SEQ ID NO: 22193 - DNA, 20 bp, Artificial Sequence
  Description of Artificial Sequence: Synthetic oligonucleotide
  Target: SCNA; (-) strand; PAM type: NRG; PAM sequence: GAG
aacaaaggttacttgttgag

SEQ ID NO: 22194 - DNA, 20 bp, Artificial Sequence
  Description of Artificial Sequence: Synthetic oligonucleotide
  Target: SCNA; (-) strand; PAM type: NRG; PAM sequence: AGG
ccaacaaaggttacttgttg

SEQ ID NO: 22195 - DNA, 20 bp, Artificial Sequence
  Description of Artificial Sequence: Synthetic oligonucleotide
  Target: SCNA; (-) strand; PAM type: NRG; PAM sequence: GAG
tccaacaaaggttacttgtt

SEQ ID NO: 22196 - DNA, 20 bp, Artificial Sequence
  Description of Artificial Sequence: Synthetic oligonucleotide
  Target: SCNA; (-) strand; PAM type: NRG; PAM sequence: AGG
aaagtcttggcttccaacaa

SEQ ID NO: 22197 - DNA, 20 bp, Artificial Sequence
  Description of Artificial Sequence: Synthetic oligonucleotide
  Target: SCNA; (-) strand; PAM type: NRG; PAM sequence: AAG
gaaagtcttggcttccaaca

SEQ ID NO: 22198 - DNA, 20 bp, Artificial Sequence
  Description of Artificial Sequence: Synthetic oligonucleotide
  Target: SCNA; (-) strand; PAM type: NRG; PAM sequence: TGG
gtgcagttacaagaaagtct

SEQ ID NO: 22199 - DNA, 20 bp, Artificial Sequence
  Description of Artificial Sequence: Synthetic oligonucleotide
  Target: SCNA; (-) strand; PAM type: NRG; PAM sequence: AAG
attacagtgcagttacaaga

SEQ ID NO: 22200 - DNA, 20 bp, Artificial Sequence
  Description of Artificial Sequence: Synthetic oligonucleotide
  Target: SCNA; (-) strand; PAM type: NRG; PAM sequence: AAG
acagattacagtgcagttac

SEQ ID NO: 22201 - DNA, 20 bp, Artificial Sequence
  Description of Artificial Sequence: Synthetic oligonucleotide
  Target: SCNA; (-) strand; PAM type: NRG; PAM sequence: CAG
aatagccacagattacagtg

SEQ ID NO: 22202 - DNA, 20 bp, Artificial Sequence
  Description of Artificial Sequence: Synthetic oligonucleotide
  Target: SCNA; (-) strand; PAM type: NRG; PAM sequence: CAG
gtaggaatagccacagatta

SEQ ID NO: 22203 - DNA, 20 bp, Artificial Sequence
  Description of Artificial Sequence: Synthetic oligonucleotide
  Target: SCNA; (-) strand; PAM type: NRG; PAM sequence: CAG
gaattgggtaggaatagcca

SEQ ID NO: 22204 - DNA, 20 bp, Artificial Sequence
  Description of Artificial Sequence: Synthetic oligonucleotide
  Target: SCNA; (-) strand; PAM type: NRG; PAM sequence: TAG
gaaggagaattgggtaggaa

SEQ ID NO: 22205 - DNA, 20 bp, Artificial Sequence
  Description of Artificial Sequence: Synthetic oligonucleotide
  Target: SCNA; (-) strand; PAM type: NRG; PAM sequence: AGG
agaaggaaggagaattgggt

SEQ ID NO: 22206 - DNA, 20 bp, Artificial Sequence
  Description of Artificial Sequence: Synthetic oligonucleotide
  Target: SCNA; (-) strand; PAM type: NRG; PAM sequence: TAG
cagaaggaaggagaattggg

SEQ ID NO: 22207 - DNA, 20 bp, Artificial Sequence
  Description of Artificial Sequence: Synthetic oligonucleotide
  Target: SCNA; (-) strand; PAM type: NRG; PAM sequence: GGG
aggcagaaggaaggagaatt

SEQ ID NO: 22208 - DNA, 20 bp, Artificial Sequence
  Description of Artificial Sequence: Synthetic oligonucleotide
  Target: SCNA; (-) strand; PAM type: NRG; PAM sequence: TGG
gaggcagaaggaaggagaat

SEQ ID NO: 22209 - DNA, 20 bp, Artificial Sequence
  Description of Artificial Sequence: Synthetic oligonucleotide
  Target: SCNA; (-) strand; PAM type: NRG; PAM sequence: GAG
caaagggaggcagaaggaag

SEQ ID NO: 22210 - DNA, 20 bp, Artificial Sequence
  Description of Artificial Sequence: Synthetic oligonucleotide
  Target: SCNA; (-) strand; PAM type: NRG; PAM sequence: AGG
ttcaaagggaggcagaagga

SEQ ID NO: 22211 - DNA, 20 bp, Artificial Sequence
  Description of Artificial Sequence: Synthetic oligonucleotide
  Target: SCNA; (-) strand; PAM type: NRG; PAM sequence: AAG
cttcaaagggaggcagaagg

SEQ ID NO: 22212 - DNA, 20 bp, Artificial Sequence
  Description of Artificial Sequence: Synthetic oligonucleotide
  Target: SCNA; (-) strand; PAM type: NRG; PAM sequence: AGG
tcacttcaaagggaggcaga

SEQ ID NO: 22213 - DNA, 20 bp, Artificial Sequence
  Description of Artificial Sequence: Synthetic oligonucleotide
  Target: SCNA; (-) strand; PAM type: NRG; PAM sequence: AAG
atcacttcaaagggaggcag

SEQ ID NO: 22214 - DNA, 20 bp, Artificial Sequence
  Description of Artificial Sequence: Synthetic oligonucleotide
  Target: SCNA; (-) strand; PAM type: NRG; PAM sequence: CAG
gatatcacttcaaagggagg

SEQ ID NO: 22215 - DNA, 20 bp, Artificial Sequence
  Description of Artificial Sequence: Synthetic oligonucleotide
  Target: SCNA; (-) strand; PAM type: NRG; PAM sequence: AGG
tgtgatatcacttcaaaggg

SEQ ID NO: 22216 - DNA, 20 bp, Artificial Sequence
  Description of Artificial Sequence: Synthetic oligonucleotide
  Target: SCNA; (-) strand; PAM type: NRG; PAM sequence: GAG
ttgtgatatcacttcaaagg

SEQ ID NO: 22217 - DNA, 20 bp, Artificial Sequence
  Description of Artificial Sequence: Synthetic oligonucleotide
  Target: SCNA; (-) strand; PAM type: NRG; PAM sequence: GGG
agttgtgatatcacttcaaa

SEQ ID NO: 22218 - DNA, 20 bp, Artificial Sequence
  Description of Artificial Sequence: Synthetic oligonucleotide
  Target: SCNA; (-) strand; PAM type: NRG; PAM sequence: AGG
tagttgtgatatcacttcaa

SEQ ID NO: 22219 - DNA, 20 bp, Artificial Sequence
  Description of Artificial Sequence: Synthetic oligonucleotide
  Target: SCNA; (-) strand; PAM type: NRG; PAM sequence: AAG
gtagttgtgatatcacttca

SEQ ID NO: 22220 - DNA, 20 bp, Artificial Sequence
  Description of Artificial Sequence: Synthetic oligonucleotide
  Target: SCNA; (-) strand; PAM type: NRG; PAM sequence: TAG
ggcaaggaaaaaccacaatg

SEQ ID NO: 22221 - DNA, 20 bp, Artificial Sequence
  Description of Artificial Sequence: Synthetic oligonucleotide
  Target: SCNA; (-) strand; PAM type: NRG; PAM sequence: AGG
aacaggagaaaaaccaggca

SEQ ID NO: 22222 - DNA, 20 bp, Artificial Sequence
  Description of Artificial Sequence: Synthetic oligonucleotide
  Target: SCNA; (-) strand; PAM type: NRG; PAM sequence: AAG
gaacaggagaaaaaccaggc

SEQ ID NO: 22223 - DNA, 20 bp, Artificial Sequence
  Description of Artificial Sequence: Synthetic oligonucleotide
  Target: SCNA; (-) strand; PAM type: NRG; PAM sequence: AGG
aagagaacaggagaaaaacc

SEQ ID NO: 22224 - DNA, 20 bp, Artificial Sequence
  Description of Artificial Sequence: Synthetic oligonucleotide
  Target: SCNA; (-) strand; PAM type: NRG; PAM sequence: CAG
aaagagaacaggagaaaaac

SEQ ID NO: 22225 - DNA, 20 bp, Artificial Sequence
  Description of Artificial Sequence: Synthetic oligonucleotide
  Target: SCNA; (-) strand; PAM type: NRG; PAM sequence: GAG
gaaaggtagaaagagaacag

SEQ ID NO: 22226 - DNA, 20 bp, Artificial Sequence
  Description of Artificial Sequence: Synthetic oligonucleotide
  Target: SCNA; (-) strand; PAM type: NRG; PAM sequence: AGG
atgaaaggtagaaagagaac

SEQ ID NO: 22227 - DNA, 20 bp, Artificial Sequence
  Description of Artificial Sequence: Synthetic oligonucleotide
  Target: SCNA; (-) strand; PAM type: NRG; PAM sequence: CAG
tatgaaaggtagaaagagaa

SEQ ID NO: 22228 - DNA, 20 bp, Artificial Sequence
  Description of Artificial Sequence: Synthetic oligonucleotide
  Target: SCNA; (-) strand; PAM type: NRG; PAM sequence: GAG
atagctatgaaaggtagaaa

SEQ ID NO: 22229 - DNA, 20 bp, Artificial Sequence
  Description of Artificial Sequence: Synthetic oligonucleotide
  Target: SCNA; (-) strand; PAM type: NRG; PAM sequence: AAG
caatagctatgaaaggtaga

SEQ ID NO: 22230 - DNA, 20 bp, Artificial Sequence
  Description of Artificial Sequence: Synthetic oligonucleotide
  Target: SCNA; (-) strand; PAM type: NRG; PAM sequence: TAG
caggcaatagctatgaaagg

SEQ ID NO: 22231 - DNA, 20 bp, Artificial Sequence
  Description of Artificial Sequence: Synthetic oligonucleotide
  Target: SCNA; (-) strand; PAM type: NRG; PAM sequence: AGG
ttgcaggcaatagctatgaa

SEQ ID NO: 22232 - DNA, 20 bp, Artificial Sequence
  Description of Artificial Sequence: Synthetic oligonucleotide
  Target: SCNA; (-) strand; PAM type: NRG; PAM sequence: AAG
attgcaggcaatagctatga

SEQ ID NO: 22233 - DNA, 20 bp, Artificial Sequence
  Description of Artificial Sequence: Synthetic oligonucleotide
  Target: SCNA; (-) strand; PAM type: NRG; PAM sequence: TAG
aagagatttattgcaggcaa

SEQ ID NO: 22234 - DNA, 20 bp, Artificial Sequence
  Description of Artificial Sequence: Synthetic oligonucleotide
  Target: SCNA; (-) strand; PAM type: NRG; PAM sequence: AGG
atccacaagagatttattgc

SEQ ID NO: 22235 - DNA, 20 bp, Artificial Sequence
  Description of Artificial Sequence: Synthetic oligonucleotide
  Target: SCNA; (-) strand; PAM type: NRG; PAM sequence: CAG
catccacaagagatttattg

SEQ ID NO: 22236 - DNA, 20 bp, Artificial Sequence
  Description of Artificial Sequence: Synthetic oligonucleotide
  Target: SCNA; (-) strand; PAM type: NRG; PAM sequence: GAG
agaattacaaccatccacaa

SEQ ID NO: 22237 - DNA, 20 bp, Artificial Sequence
  Description of Artificial Sequence: Synthetic oligonucleotide
  Target: SCNA; (-) strand; PAM type: NRG; PAM sequence: AAG
ttagaattacaaccatccac

SEQ ID NO: 22238 - DNA, 20 bp, Artificial Sequence
  Description of Artificial Sequence: Synthetic oligonucleotide
  Target: SCNA; (-) strand; PAM type: NRG; PAM sequence: TAG
agctgattccaagatggtgt

SEQ ID NO: 22239 - DNA, 20 bp, Artificial Sequence
  Description of Artificial Sequence: Synthetic oligonucleotide
  Target: SCNA; (-) strand; PAM type: NRG; PAM sequence: TGG
tcaggaagctgattccaaga

SEQ ID NO: 22240 - DNA, 20 bp, Artificial Sequence
  Description of Artificial Sequence: Synthetic oligonucleotide
  Target: SCNA; (-) strand; PAM type: NRG; PAM sequence: AAG
tcattcaggaagctgattcc

SEQ ID NO: 22241 - DNA, 20 bp, Artificial Sequence
  Description of Artificial Sequence: Synthetic oligonucleotide
  Target: SCNA; (-) strand; PAM type: NRG; PAM sequence: AAG
catcagttcagtcattcagg

SEQ ID NO: 22242 - DNA, 20 bp, Artificial Sequence
  Description of Artificial Sequence: Synthetic oligonucleotide
  Target: SCNA; (-) strand; PAM type: NRG; PAM sequence: AGG
aggcatcagttcagtcattc

SEQ ID NO: 22243 - DNA, 20 bp, Artificial Sequence
  Description of Artificial Sequence: Synthetic oligonucleotide
  Target: SCNA; (-) strand; PAM type: NRG; PAM sequence: CAG
gaggcatcagttcagtcatt

SEQ ID NO: 22244 - DNA, 20 bp, Artificial Sequence
  Description of Artificial Sequence: Synthetic oligonucleotide
  Target: SCNA; (-) strand; PAM type: NRG; PAM sequence: CAG
tggaggtagaggcatcagtt

SEQ ID NO: 22245 - DNA, 20 bp, Artificial Sequence
  Description of Artificial Sequence: Synthetic oligonucleotide
  Target: SCNA; (-) strand; PAM type: NRG; PAM sequence: CAG
cttgctggaggtagaggcat

SEQ ID NO: 22246 - DNA, 20 bp, Artificial Sequence
  Description of Artificial Sequence: Synthetic oligonucleotide
  Target: SCNA; (-) strand; PAM type: NRG; PAM sequence: AGG
tccatgcttgctggaggtag

SEQ ID NO: 22247 - DNA, 20 bp, Artificial Sequence
  Description of Artificial Sequence: Synthetic oligonucleotide
  Target: SCNA; (-) strand; PAM type: NRG; PAM sequence: GAG
atccatgcttgctggaggta

SEQ ID NO: 22248 - DNA, 20 bp, Artificial Sequence
  Description of Artificial Sequence: Synthetic oligonucleotide
  Target: SCNA; (-) strand; PAM type: NRG; PAM sequence: TAG
agatccatgcttgctggagg

SEQ ID NO: 22249 - DNA, 20 bp, Artificial Sequence
  Description of Artificial Sequence: Synthetic oligonucleotide
  Target: SCNA; (-) strand; PAM type: NRG; PAM sequence: AGG
acaagatccatgcttgctgg

SEQ ID NO: 22250 - DNA, 20 bp, Artificial Sequence
  Description of Artificial Sequence: Synthetic oligonucleotide
  Target: SCNA; (-) strand; PAM type: NRG; PAM sequence: GAG
aacaagatccatgcttgctg

SEQ ID NO: 22251 - DNA, 20 bp, Artificial Sequence
  Description of Artificial Sequence: Synthetic oligonucleotide
  Target: SCNA; (-) strand; PAM type: NRG; PAM sequence: TGG
acaacaagatccatgcttgc

SEQ ID NO: 22252 - DNA, 20 bp, Artificial Sequence
  Description of Artificial Sequence: Synthetic oligonucleotide
  Target: SCNA; (-) strand; PAM type: NRG; PAM sequence: AAG
atgtcatccatggtaacaac

SEQ ID NO: 22253 - DNA, 20 bp, Artificial Sequence
  Description of Artificial Sequence: Synthetic oligonucleotide
  Target: SCNA; (-) strand; PAM type: NRG; PAM sequence: TGG
gaaaagacaaatgtcatcca

SEQ ID NO: 22254 - DNA, 20 bp, Artificial Sequence
  Description of Artificial Sequence: Synthetic oligonucleotide
  Target: SCNA; (-) strand; PAM type: NRG; PAM sequence: AAG
tacatactataattccagaa

SEQ ID NO: 22255 - DNA, 20 bp, Artificial Sequence
  Description of Artificial Sequence: Synthetic oligonucleotide
  Target: SCNA; (-) strand; PAM type: NRG; PAM sequence: CAG
atcagtacatactataattc

SEQ ID NO: 22256 - DNA, 20 bp, Artificial Sequence
  Description of Artificial Sequence: Synthetic oligonucleotide
  Target: SCNA; (-) strand; PAM type: NRG; PAM sequence: CAG
gtgtgatgccaggcacaaat

SEQ ID NO: 22257 - DNA, 20 bp, Artificial Sequence
  Description of Artificial Sequence: Synthetic oligonucleotide
  Target: SCNA; (-) strand; PAM type: NRG; PAM sequence: AGG
ctatcatgctgtgtgatgcc

SEQ ID NO: 22258 - DNA, 20 bp, Artificial Sequence
  Description of Artificial Sequence: Synthetic oligonucleotide
  Target: SCNA; (-) strand; PAM type: NRG; PAM sequence: CAG
actatcatgctgtgtgatgc

SEQ ID NO: 22259 - DNA, 20 bp, Artificial Sequence
  Description of Artificial Sequence: Synthetic oligonucleotide
  Target: SCNA; (-) strand; PAM type: NRG; PAM sequence: TGG
tactgataacctcaacaaca

SEQ ID NO: 22260 - DNA, 20 bp, Artificial Sequence
  Description of Artificial Sequence: Synthetic oligonucleotide
  Target: SCNA; (-) strand; PAM type: NRG; PAM sequence: TGG
acttagcaacaaaaatggaa

SEQ ID NO: 22261 - DNA, 20 bp, Artificial Sequence
  Description of Artificial Sequence: Synthetic oligonucleotide
  Target: SCNA; (-) strand; PAM type: NRG; PAM sequence: TGG
atactacttagcaacaaaaa

SEQ ID NO: 22262 - DNA, 20 bp, Artificial Sequence
  Description of Artificial Sequence: Synthetic oligonucleotide
  Target: SCNA; (-) strand; PAM type: NRG; PAM sequence: TAG
tcatacagcagaatactact

SEQ ID NO: 22263 - DNA, 20 bp, Artificial Sequence
  Description of Artificial Sequence: Synthetic oligonucleotide
  Target: SCNA; (-) strand; PAM type: NRG; PAM sequence: CAG
attgtgctgtattcatacag

SEQ ID NO: 22264 - DNA, 20 bp, Artificial Sequence
  Description of Artificial Sequence: Synthetic oligonucleotide
  Target: SCNA; (-) strand; PAM type: NRG; PAM sequence: CAG
acaattgtgctgtattcata

SEQ ID NO: 22265 - DNA, 20 bp, Artificial Sequence
  Description of Artificial Sequence: Synthetic oligonucleotide
  Target: SCNA; (-) strand; PAM type: NRG; PAM sequence: TGG
ttactcttaatagctctaac

SEQ ID NO: 22266 - DNA, 20 bp, Artificial Sequence
  Description of Artificial Sequence: Synthetic oligonucleotide
  Target: SCNA; (-) strand; PAM type: NRG; PAM sequence: TAG
cacgatagcattactcttaa

SEQ ID NO: 22267 - DNA, 20 bp, Artificial Sequence
  Description of Artificial Sequence: Synthetic oligonucleotide
  Target: SCNA; (-) strand; PAM type: NRG; PAM sequence: TAG
ttgtacagaattattcacga

SEQ ID NO: 22268 - DNA, 20 bp, Artificial Sequence
  Description of Artificial Sequence: Synthetic oligonucleotide
  Target: SCNA; (-) strand; PAM type: NRG; PAM sequence: CAG
tgttcatacaatgacttgta

SEQ ID NO: 22269 - DNA, 20 bp, Artificial Sequence
  Description of Artificial Sequence: Synthetic oligonucleotide
  Target: SCNA; (-) strand; PAM type: NRG; PAM sequence: AAG
tatttacttaagattaatgg

SEQ ID NO: 22270 - DNA, 20 bp, Artificial Sequence
  Description of Artificial Sequence: Synthetic oligonucleotide
  Target: SCNA; (-) strand; PAM type: NRG; PAM sequence: TGG
aggtatttacttaagattaa

SEQ ID NO: 22271 - DNA, 20 bp, Artificial Sequence
  Description of Artificial Sequence: Synthetic oligonucleotide
  Target: SCNA; (-) strand; PAM type: NRG; PAM sequence: AAG
ctacccctaggtatttactt

SEQ ID NO: 22272 - DNA, 20 bp, Artificial Sequence
  Description of Artificial Sequence: Synthetic oligonucleotide
  Target: SCNA; (-) strand; PAM type: NRG; PAM sequence: AGG
catctgtaagttctacccct

SEQ ID NO: 22273 - DNA, 20 bp, Artificial Sequence
  Description of Artificial Sequence: Synthetic oligonucleotide
  Target: SCNA; (-) strand; PAM type: NRG; PAM sequence: TAG
tcatctgtaagttctacccc

SEQ ID NO: 22274 - DNA, 20 bp, Artificial Sequence
  Description of Artificial Sequence: Synthetic oligonucleotide
  Target: SCNA; (-) strand; PAM type: NRG; PAM sequence: AAG
acttctgtttcttcatctgt

SEQ ID NO: 22275 - DNA, 20 bp, Artificial Sequence
  Description of Artificial Sequence: Synthetic oligonucleotide
  Target: SCNA; (-) strand; PAM type: NRG; PAM sequence: AAG
ctgtgctgcctacttgtgca

SEQ ID NO: 22276 - DNA, 20 bp, Artificial Sequence
  Description of Artificial Sequence: Synthetic oligonucleotide
  Target: SCNA; (-) strand; PAM type: NRG; PAM sequence: CAG
taagagcatagatttaaagt

SEQ ID NO: 22277 - DNA, 20 bp, Artificial Sequence
  Description of Artificial Sequence: Synthetic oligonucleotide
  Target: SCNA; (-) strand; PAM type: NRG; PAM sequence: AAG
gagttaagagcatagattta

SEQ ID NO: 22278 - DNA, 20 bp, Artificial Sequence
  Description of Artificial Sequence: Synthetic oligonucleotide
  Target: SCNA; (-) strand; PAM type: NRG; PAM sequence: TAG
cggcataggagttaagagca

SEQ ID NO: 22279 - DNA, 20 bp, Artificial Sequence
  Description of Artificial Sequence: Synthetic oligonucleotide
  Target: SCNA; (-) strand; PAM type: NRG; PAM sequence: GAG
caatacggcataggagttaa

SEQ ID NO: 22280 - DNA, 20 bp, Artificial Sequence
  Description of Artificial Sequence: Synthetic oligonucleotide
  Target: SCNA; (-) strand; PAM type: NRG; PAM sequence: AAG
aacaatacggcataggagtt

SEQ ID NO: 22281 - DNA, 20 bp, Artificial Sequence
  Description of Artificial Sequence: Synthetic oligonucleotide
  Target: SCNA; (-) strand; PAM type: NRG; PAM sequence: GAG
tgaagaacaatacggcatag

SEQ ID NO: 22282 - DNA, 20 bp, Artificial Sequence
  Description of Artificial Sequence: Synthetic oligonucleotide
  Target: SCNA; (-) strand; PAM type: NRG; PAM sequence: AGG
catgaagaacaatacggcat

SEQ ID NO: 22283 - DNA, 20 bp, Artificial Sequence
  Description of Artificial Sequence: Synthetic oligonucleotide
  Target: SCNA; (-) strand; PAM type: NRG; PAM sequence: TAG
ccatgaagaacaatacggca

SEQ ID NO: 22284 - DNA, 20 bp, Artificial Sequence
  Description of Artificial Sequence: Synthetic oligonucleotide
  Target: SCNA; (-) strand; PAM type: NRG; PAM sequence: CGG
tcttcccatgaagaacaata

SEQ ID NO: 22285 - DNA, 20 bp, Artificial Sequence
  Description of Artificial Sequence: Synthetic oligonucleotide
  Target: SCNA; (-) strand; PAM type: NRG; PAM sequence: AAG
aaatagcttttcttcccatg

SEQ ID NO: 22286 - DNA, 20 bp, Artificial Sequence
  Description of Artificial Sequence: Synthetic oligonucleotide
  Target: SCNA; (-) strand; PAM type: NRG; PAM sequence: TAG
tttaaatgggtcaagaaaaa

SEQ ID NO: 22287 - DNA, 20 bp, Artificial Sequence
  Description of Artificial Sequence: Synthetic oligonucleotide
  Target: SCNA; (-) strand; PAM type: NRG; PAM sequence: AAG
atggaaagtttaaatgggtc

SEQ ID NO: 22288 - DNA, 20 bp, Artificial Sequence
  Description of Artificial Sequence: Synthetic oligonucleotide
  Target: SCNA; (-) strand; PAM type: NRG; PAM sequence: GGG
acattatggaaagtttaaat

SEQ ID NO: 22289 - DNA, 20 bp, Artificial Sequence
  Description of Artificial Sequence: Synthetic oligonucleotide
  Target: SCNA; (-) strand; PAM type: NRG; PAM sequence: TGG
aacattatggaaagtttaaa

SEQ ID NO: 22290 - DNA, 20 bp, Artificial Sequence
  Description of Artificial Sequence: Synthetic oligonucleotide
  Target: SCNA; (-) strand; PAM type: NRG; PAM sequence: AAG
ttttgattaaacattatgga

SEQ ID NO: 22291 - DNA, 20 bp, Artificial Sequence
  Description of Artificial Sequence: Synthetic oligonucleotide
  Target: SCNA; (-) strand; PAM type: NRG; PAM sequence: TGG
aatattttgattaaacatta

SEQ ID NO: 22292 - DNA, 20 bp, Artificial Sequence
  Description of Artificial Sequence: Synthetic oligonucleotide
  Target: SCNA; (-) strand; PAM type: NRG; PAM sequence: CAG
ggttggtacaccttgtatcc

SEQ ID NO: 22293 - DNA, 20 bp, Artificial Sequence
  Description of Artificial Sequence: Synthetic oligonucleotide
  Target: SCNA; (-) strand; PAM type: NRG; PAM sequence: TGG
ctggcatgtttacttgaggt

SEQ ID NO: 22294 - DNA, 20 bp, Artificial Sequence
  Description of Artificial Sequence: Synthetic oligonucleotide
  Target: SCNA; (-) strand; PAM type: NRG; PAM sequence: AGG
acacctggcatgtttacttg

SEQ ID NO: 22295 - DNA, 20 bp, Artificial Sequence
  Description of Artificial Sequence: Synthetic oligonucleotide
  Target: SCNA; (-) strand; PAM type: NRG; PAM sequence: GAG
aacacctggcatgtttactt

SEQ ID NO: 22296 - DNA, 20 bp, Artificial Sequence
  Description of Artificial Sequence: Synthetic oligonucleotide
  Target: SCNA; (-) strand; PAM type: NRG; PAM sequence: TGG
cttctacttttccaaacacc

SEQ ID NO: 22297 - DNA, 20 bp, Artificial Sequence
  Description of Artificial Sequence: Synthetic oligonucleotide
  Target: SCNA; (-) strand; PAM type: NRG; PAM sequence: AGG
tgcacagtttgcatgtagta

SEQ ID NO: 22298 - DNA, 20 bp, Artificial Sequence
  Description of Artificial Sequence: Synthetic oligonucleotide
  Target: SCNA; (-) strand; PAM type: NRG; PAM sequence: AAG
ttgcacagtttgcatgtagt

SEQ ID NO: 22299 - DNA, 20 bp, Artificial Sequence
  Description of Artificial Sequence: Synthetic oligonucleotide
  Target: SCNA; (-) strand; PAM type: NRG; PAM sequence: TAG
actattgcacagtttgcatg

SEQ ID NO: 22300 - DNA, 20 bp, Artificial Sequence
  Description of Artificial Sequence: Synthetic oligonucleotide
  Target: SCNA; (-) strand; PAM type: NRG; PAM sequence: CAG
ttctacatgtaactattgca

SEQ ID NO: 22301 - DNA, 20 bp, Artificial Sequence
  Description of Artificial Sequence: Synthetic oligonucleotide
  Target: SCNA; (-) strand; PAM type: NRG; PAM sequence: GAG
ccaggaaccttttttttttt

SEQ ID NO: 22302 - DNA, 20 bp, Artificial Sequence
  Description of Artificial Sequence: Synthetic oligonucleotide
  Target: SCNA; (-) strand; PAM type: NRG; PAM sequence: AGG
ttcatagcactgtggtttcc

SEQ ID NO: 22303 - DNA, 20 bp, Artificial Sequence
  Description of Artificial Sequence: Synthetic oligonucleotide
  Target: SCNA; (-) strand; PAM type: NRG; PAM sequence: CAG
tttcatagcactgtggtttc

SEQ ID NO: 22304 - DNA, 20 bp, Artificial Sequence
  Description of Artificial Sequence: Synthetic oligonucleotide
  Target: SCNA; (-) strand; PAM type: NRG; PAM sequence: TGG
attatcttttcatagcactg

SEQ ID NO: 22305 - DNA, 20 bp, Artificial Sequence
  Description of Artificial Sequence: Synthetic oligonucleotide
  Target: SCNA; (-) strand; PAM type: NRG; PAM sequence: TAG
tttctatgattatcttttca

SEQ ID NO: 22306 - DNA, 20 bp, Artificial Sequence
  Description of Artificial Sequence: Synthetic oligonucleotide
  Target: SCNA; (-) strand; PAM type: NRG; PAM sequence: TGG
tttttcttaaaatgagtatg

SEQ ID NO: 22307 - DNA, 20 bp, Artificial Sequence
  Description of Artificial Sequence: Synthetic oligonucleotide
  Target: SCNA; (-) strand; PAM type: NRG; PAM sequence: GAG
gtgaaaatttttcttaaaat

SEQ ID NO: 22308 - DNA, 20 bp, Artificial Sequence
  Description of Artificial Sequence: Synthetic oligonucleotide
  Target: SCNA; (-) strand; PAM type: NRG; PAM sequence: CAG
ttgctttaaattttttctct

SEQ ID NO: 22309 - DNA, 20 bp, Artificial Sequence
  Description of Artificial Sequence: Synthetic oligonucleotide
  Target: SCNA; (-) strand; PAM type: NRG; PAM sequence: AGG
tattcacttgaagaatttca

SEQ ID NO: 22310 - DNA, 20 bp, Artificial Sequence
  Description of Artificial Sequence: Synthetic oligonucleotide
  Target: SCNA; (-) strand; PAM type: NRG; PAM sequence: AAG
gtattcacttgaagaatttc

SEQ ID NO: 22311 - DNA, 20 bp, Artificial Sequence
  Description of Artificial Sequence: Synthetic oligonucleotide
  Target: SCNA; (-) strand; PAM type: NRG; PAM sequence: AAG
aactaatttgtattcacttg

SEQ ID NO: 22312 - DNA, 20 bp, Artificial Sequence
  Description of Artificial Sequence: Synthetic oligonucleotide
  Target: SCNA; (-) strand; PAM type: NRG; PAM sequence: AGG
acttgctaggccacctgaga

SEQ ID NO: 22313 - DNA, 20 bp, Artificial Sequence
  Description of Artificial Sequence: Synthetic oligonucleotide
  Target: SCNA; (-) strand; PAM type: NRG; PAM sequence: AAG
aacttgctaggccacctgag

SEQ ID NO: 22314 - DNA, 20 bp, Artificial Sequence
  Description of Artificial Sequence: Synthetic oligonucleotide
  Target: SCNA; (-) strand; PAM type: NRG; PAM sequence: GAG
actaacttgctaggccacct

SEQ ID NO: 22315 - DNA, 20 bp, Artificial Sequence
  Description of Artificial Sequence: Synthetic oligonucleotide
  Target: SCNA; (-) strand; PAM type: NRG; PAM sequence: AGG
tatcttttgactaacttgct

SEQ ID NO: 22316 - DNA, 20 bp, Artificial Sequence
  Description of Artificial Sequence: Synthetic oligonucleotide
  Target: SCNA; (-) strand; PAM type: NRG; PAM sequence: TAG
ttatcttttgactaacttgc

SEQ ID NO: 22317 - DNA, 20 bp, Artificial Sequence
  Description of Artificial Sequence: Synthetic oligonucleotide
  Target: SCNA; (-) strand; PAM type: NRG; PAM sequence: AGG
agagagggcagcttgattac

SEQ ID NO: 22318 - DNA, 20 bp, Artificial Sequence
  Description of Artificial Sequence: Synthetic oligonucleotide
  Target: SCNA; (-) strand; PAM type: NRG; PAM sequence: CAG
gagagagggcagcttgatta

SEQ ID NO: 22319 - DNA, 20 bp, Artificial Sequence
  Description of Artificial Sequence: Synthetic oligonucleotide
  Target: SCNA; (-) strand; PAM type: NRG; PAM sequence: CAG
acgacggtaatgagagaggg

SEQ ID NO: 22320 - DNA, 20 bp, Artificial Sequence
  Description of Artificial Sequence: Synthetic oligonucleotide
  Target: SCNA; (-) strand; PAM type: NRG; PAM sequence: GGG
ttaacgacggtaatgagaga

SEQ ID NO: 22321 - DNA, 20 bp, Artificial Sequence
  Description of Artificial Sequence: Synthetic oligonucleotide
  Target: SCNA; (-) strand; PAM type: NRG; PAM sequence: AGG
tttaacgacggtaatgagag

SEQ ID NO: 22322 - DNA, 20 bp, Artificial Sequence
  Description of Artificial Sequence: Synthetic oligonucleotide
  Target: SCNA; (-) strand; PAM type: NRG; PAM sequence: GAG
gtttaacgacggtaatgaga

SEQ ID NO: 22323 - DNA, 20 bp, Artificial Sequence
  Description of Artificial Sequence: Synthetic oligonucleotide
  Target: SCNA; (-) strand; PAM type: NRG; PAM sequence: GAG
cagtttaacgacggtaatga

SEQ ID NO: 22324 - DNA, 20 bp, Artificial Sequence
  Description of Artificial Sequence: Synthetic oligonucleotide
  Target: SCNA; (-) strand; PAM type: NRG; PAM sequence: GAG
tgcagtttaacgacggtaat

SEQ ID NO: 22325 - DNA, 20 bp, Artificial Sequence
  Description of Artificial Sequence: Synthetic oligonucleotide
  Target: SCNA; (-) strand; PAM type: NRG; PAM sequence: CGG
ctacctatgcagtttaacga

SEQ ID NO: 22326 - DNA, 20 bp, Artificial Sequence
  Description of Artificial Sequence: Synthetic oligonucleotide
  Target: SCNA; (-) strand; PAM type: NRG; PAM sequence: CAG
gattattatgtctacctatg

SEQ ID NO: 22327 - DNA, 20 bp, Artificial Sequence
  Description of Artificial Sequence: Synthetic oligonucleotide
  Target: SCNA; (-) strand; PAM type: NRG; PAM sequence: AAG
tgtttgatggtacattattc

SEQ ID NO: 22328 - DNA, 20 bp, Artificial Sequence
  Description of Artificial Sequence: Synthetic oligonucleotide
  Target: SCNA; (-) strand; PAM type: NRG; PAM sequence: TGG
gactatttaatgttgtttga

SEQ ID NO: 22329 - DNA, 20 bp, Artificial Sequence
  Description of Artificial Sequence: Synthetic oligonucleotide
  Target: SCNA; (-) strand; PAM type: NRG; PAM sequence: TAG
ctataagcagtgtgatctga

SEQ ID NO: 22330 - DNA, 20 bp, Artificial Sequence
  Description of Artificial Sequence: Synthetic oligonucleotide
  Target: SCNA; (-) strand; PAM type: NRG; PAM sequence: CAG
tagttaatgtgtactataag

SEQ ID NO: 22331 - DNA, 20 bp, Artificial Sequence
  Description of Artificial Sequence: Synthetic oligonucleotide
  Target: SCNA; (-) strand; PAM type: NRG; PAM sequence: AAG
gagtagttaatgtgtactat

SEQ ID NO: 22332 - DNA, 20 bp, Artificial Sequence
  Description of Artificial Sequence: Synthetic oligonucleotide
  Target: SCNA; (-) strand; PAM type: NRG; PAM sequence: TAG
tagatagtaaagcatatgag

SEQ ID NO: 22333 - DNA, 20 bp, Artificial Sequence
  Description of Artificial Sequence: Synthetic oligonucleotide
  Target: SCNA; (-) strand; PAM type: NRG; PAM sequence: GAG
ctttagatagtaaagcatat

SEQ ID NO: 22334 - DNA, 20 bp, Artificial Sequence
  Description of Artificial Sequence: Synthetic oligonucleotide
  Target: SCNA; (-) strand; PAM type: NRG; PAM sequence: AAG
caaccctgctttagatagta

SEQ ID NO: 22335 - DNA, 20 bp, Artificial Sequence
  Description of Artificial Sequence: Synthetic oligonucleotide
  Target: SCNA; (-) strand; PAM type: NRG; PAM sequence: TAG
ctggacaaccctgctttaga

SEQ ID NO: 22336 - DNA, 20 bp, Artificial Sequence
  Description of Artificial Sequence: Synthetic oligonucleotide
  Target: SCNA; (-) strand; PAM type: NRG; PAM sequence: TAG
aagactggacaaccctgctt

SEQ ID NO: 22337 - DNA, 20 bp, Artificial Sequence
  Description of Artificial Sequence: Synthetic oligonucleotide
  Target: SCNA; (-) strand; PAM type: NRG; PAM sequence: TGG
gcccagggaagccaaaagac

SEQ ID NO: 22338 - DNA, 20 bp, Artificial Sequence
  Description of Artificial Sequence: Synthetic oligonucleotide
  Target: SCNA; (-) strand; PAM type: NRG; PAM sequence: AAG
atatggcccagggaagccaa

SEQ ID NO: 22339 - DNA, 20 bp, Artificial Sequence
  Description of Artificial Sequence: Synthetic oligonucleotide
  Target: SCNA; (-) strand; PAM type: NRG; PAM sequence: AAG
tcttcaaatatggcccaggg

SEQ ID NO: 22340 - DNA, 20 bp, Artificial Sequence
  Description of Artificial Sequence: Synthetic oligonucleotide
  Target: SCNA; (-) strand; PAM type: NRG; PAM sequence: GGG
tcttcttcaaatatggccca

SEQ ID NO: 22341 - DNA, 20 bp, Artificial Sequence
  Description of Artificial Sequence: Synthetic oligonucleotide
  Target: SCNA; (-) strand; PAM type: NRG; PAM sequence: AGG
ttcttcttcaaatatggccc

SEQ ID NO: 22342 - DNA, 20 bp, Artificial Sequence
  Description of Artificial Sequence: Synthetic oligonucleotide
  Target: SCNA; (-) strand; PAM type: NRG; PAM sequence: CAG
attcttcttcaaatatggcc

SEQ ID NO: 22343 - DNA, 20 bp, Artificial Sequence
  Description of Artificial Sequence: Synthetic oligonucleotide
  Target: SCNA; (-) strand; PAM type: NRG; PAM sequence: TGG
aattaattcttcttcaaata

SEQ ID NO: 22344 - DNA, 20 bp, Artificial Sequence
  Description of Artificial Sequence: Synthetic oligonucleotide
  Target: SCNA; (-) strand; PAM type: NRG; PAM sequence: AAG
gtgtattttatgcatggctc

SEQ ID NO: 22345 - DNA, 20 bp, Artificial Sequence
  Description of Artificial Sequence: Synthetic oligonucleotide
  Target: SCNA; (-) strand; PAM type: NRG; PAM sequence: TGG
gtgttagtgtattttatgca

SEQ ID NO: 22346 - DNA, 20 bp, Artificial Sequence
  Description of Artificial Sequence: Synthetic oligonucleotide
  Target: SCNA; (-) strand; PAM type: NRG; PAM sequence: TAG
tcatcagctatcatgagtgt

SEQ ID NO: 22347 - DNA, 20 bp, Artificial Sequence
  Description of Artificial Sequence: Synthetic oligonucleotide
  Target: SCNA; (-) strand; PAM type: NRG; PAM sequence: GAG
tttttctcatcagctatcat

SEQ ID NO: 22348 - DNA, 20 bp, Artificial Sequence
  Description of Artificial Sequence: Synthetic oligonucleotide
  Target: SCNA; (-) strand; PAM type: NRG; PAM sequence: CAG
tgtttttgtttttttctcat

SEQ ID NO: 22349 - DNA, 20 bp, Artificial Sequence
  Description of Artificial Sequence: Synthetic oligonucleotide
  Target: SCNA; (-) strand; PAM type: NRG; PAM sequence: GAG
ggcccaggatggttttgaat

SEQ ID NO: 22350 - DNA, 20 bp, Artificial Sequence
  Description of Artificial Sequence: Synthetic oligonucleotide
  Target: SCNA; (-) strand; PAM type: NRG; PAM sequence: TGG
gggccacaagcggcccagga

SEQ ID NO: 22351 - DNA, 20 bp, Artificial Sequence
  Description of Artificial Sequence: Synthetic oligonucleotide
  Target: SCNA; (-) strand; PAM type: NRG; PAM sequence: AGG
ccatgggccacaagcggccc

SEQ ID NO: 22352 - DNA, 20 bp, Artificial Sequence
  Description of Artificial Sequence: Synthetic oligonucleotide
  Target: SCNA; (-) strand; PAM type: NRG; PAM sequence: CAG
cccatgggccacaagcggcc

SEQ ID NO: 22353 - DNA, 20 bp, Artificial Sequence
  Description of Artificial Sequence: Synthetic oligonucleotide
  Target: SCNA; (-) strand; PAM type: NRG; PAM sequence: CGG
cgtggcccatgggccacaag

SEQ ID NO: 22354 - DNA, 20 bp, Artificial Sequence
  Description of Artificial Sequence: Synthetic oligonucleotide
  Target: SCNA; (-) strand; PAM type: NRG; PAM sequence: AAG
acccgtggcccatgggccac

SEQ ID NO: 22355 - DNA, 20 bp, Artificial Sequence
  Description of Artificial Sequence: Synthetic oligonucleotide
  Target: SCNA; (-) strand; PAM type: NRG; PAM sequence: GGG
ttgtctaacccgtggcccat

SEQ ID NO: 22356 - DNA, 20 bp, Artificial Sequence
  Description of Artificial Sequence: Synthetic oligonucleotide
  Target: SCNA; (-) strand; PAM type: NRG; PAM sequence: TGG
tttgtctaacccgtggccca

SEQ ID NO: 22357 - DNA, 20 bp, Artificial Sequence
  Description of Artificial Sequence: Synthetic oligonucleotide
  Target: SCNA; (-) strand; PAM type: NRG; PAM sequence: TGG
gatcaagtttgtctaacccg

SEQ ID NO: 22358 - DNA, 20 bp, Artificial Sequence
  Description of Artificial Sequence: Synthetic oligonucleotide
  Target: SCNA; (-) strand; PAM type: NRG; PAM sequence: AAG
ggatggtattgctttagatc

SEQ ID NO: 22359 - DNA, 20 bp, Artificial Sequence
  Description of Artificial Sequence: Synthetic oligonucleotide
  Target: SCNA; (-) strand; PAM type: NRG; PAM sequence: TAG
tataatggatggtattgctt

SEQ ID NO: 22360 - DNA, 20 bp, Artificial Sequence
  Description of Artificial Sequence: Synthetic oligonucleotide
  Target: SCNA; (-) strand; PAM type: NRG; PAM sequence: TGG
cacagaataattataatgga

SEQ ID NO: 22361 - DNA, 20 bp, Artificial Sequence
  Description of Artificial Sequence: Synthetic oligonucleotide
  Target: SCNA; (-) strand; PAM type: NRG; PAM sequence: TGG
ggctcacagaataattataa

SEQ ID NO: 22362 - DNA, 20 bp, Artificial Sequence
  Description of Artificial Sequence: Synthetic oligonucleotide
  Target: SCNA; (-) strand; PAM type: NRG; PAM sequence: CAG
aaaattacataattggctca

SEQ ID NO: 22363 - DNA, 20 bp, Artificial Sequence
  Description of Artificial Sequence: Synthetic oligonucleotide
  Target: SCNA; (-) strand; PAM type: NRG; PAM sequence: TGG
aaaatttaaaattacataat

SEQ ID NO: 22364 - DNA, 20 bp, Artificial Sequence
  Description of Artificial Sequence: Synthetic oligonucleotide
  Target: SCNA; (-) strand; PAM type: NRG; PAM sequence: TAG
aatttgttaaatgtggtggc

SEQ ID NO: 22365 - DNA, 20 bp, Artificial Sequence
  Description of Artificial Sequence: Synthetic oligonucleotide
  Target: SCNA; (-) strand; PAM type: NRG; PAM sequence: TGG
ttttaatttgttaaatgtgg

SEQ ID NO: 22366 - DNA, 20 bp, Artificial Sequence
  Description of Artificial Sequence: Synthetic oligonucleotide
  Target: SCNA; (-) strand; PAM type: NRG; PAM sequence: TGG
tctttttaatttgttaaatg

SEQ ID NO: 22367 - DNA, 20 bp, Artificial Sequence
  Description of Artificial Sequence: Synthetic oligonucleotide
  Target: SCNA; (-) strand; PAM type: NRG; PAM sequence: CGG
aataaaatataaaattcacc

SEQ ID NO: 22368 - DNA, 20 bp, Artificial Sequence
  Description of Artificial Sequence: Synthetic oligonucleotide
  Target: SCNA; (-) strand; PAM type: NRG; PAM sequence: AAG
gaaactataacattttgaat

SEQ ID NO: 22369 - DNA, 20 bp, Artificial Sequence
  Description of Artificial Sequence: Synthetic oligonucleotide
  Target: SCNA; (-) strand; PAM type: NRG; PAM sequence: TAG
atttttttatagattacatg

SEQ ID NO: 22370 - DNA, 20 bp, Artificial Sequence
  Description of Artificial Sequence: Synthetic oligonucleotide
  Target: SCNA; (-) strand; PAM type: NRG; PAM sequence: TAG
atttctcagtaattttttta

SEQ ID NO: 22371 - DNA, 20 bp, Artificial Sequence
  Description of Artificial Sequence: Synthetic oligonucleotide
  Target: SCNA; (-) strand; PAM type: NRG; PAM sequence: CAG
aaaaaacccataaaatttct

SEQ ID NO: 22372 - DNA, 20 bp, Artificial Sequence
  Description of Artificial Sequence: Synthetic oligonucleotide
  Target: SCNA; (-) strand; PAM type: NRG; PAM sequence: AAG
taaaatacacaacagatttc

SEQ ID NO: 22373 - DNA, 20 bp, Artificial Sequence
  Description of Artificial Sequence: Synthetic oligonucleotide
  Target: SCNA; (-) strand; PAM type: NRG; PAM sequence: CAG
tataggggtaaaatacacaa

SEQ ID NO: 22374 - DNA, 20 bp, Artificial Sequence
  Description of Artificial Sequence: Synthetic oligonucleotide
  Target: SCNA; (-) strand; PAM type: NRG; PAM sequence: GGG
tagcctgagttgagatatag

SEQ ID NO: 22375 - DNA, 20 bp, Artificial Sequence
  Description of Artificial Sequence: Synthetic oligonucleotide
  Target: SCNA; (-) strand; PAM type: NRG; PAM sequence: GGG
ctagcctgagttgagatata

SEQ ID NO: 22376 - DNA, 20 bp, Artificial Sequence
  Description of Artificial Sequence: Synthetic oligonucleotide
  Target: SCNA; (-) strand; PAM type: NRG; PAM sequence: AGG
gctagcctgagttgagatat

SEQ ID NO: 22377 - DNA, 20 bp, Artificial Sequence
  Description of Artificial Sequence: Synthetic oligonucleotide
  Target: SCNA; (-) strand; PAM type: NRG; PAM sequence: TAG
agctagcctgagttgagata

SEQ ID NO: 22378 - DNA, 20 bp, Artificial Sequence
  Description of Artificial Sequence: Synthetic oligonucleotide
  Target: SCNA; (-) strand; PAM type: NRG; PAM sequence: GAG
aaaagtagctagcctgagtt

SEQ ID NO: 22379 - DNA, 20 bp, Artificial Sequence
  Description of Artificial Sequence: Synthetic oligonucleotide
  Target: SCNA; (-) strand; PAM type: NRG; PAM sequence: GAG
atttcaaaagtagctagcct

SEQ ID NO: 22380 - DNA, 20 bp, Artificial Sequence
  Description of Artificial Sequence: Synthetic oligonucleotide
  Target: SCNA; (-) strand; PAM type: NRG; PAM sequence: TAG
tcaagcatttcaaaagtagc

SEQ ID NO: 22381 - DNA, 20 bp, Artificial Sequence
  Description of Artificial Sequence: Synthetic oligonucleotide
  Target: SCNA; (-) strand; PAM type: NRG; PAM sequence: TAG
gctatcaagcatttcaaaag

SEQ ID NO: 22382 - DNA, 20 bp, Artificial Sequence
  Description of Artificial Sequence: Synthetic oligonucleotide
  Target: SCNA; (-) strand; PAM type: NRG; PAM sequence: AAG
gttgctatcaagcatttcaa

SEQ ID NO: 22383 - DNA, 20 bp, Artificial Sequence
  Description of Artificial Sequence: Synthetic oligonucleotide
  Target: SCNA; (-) strand; PAM type: NRG; PAM sequence: AAG
actagacacatgttgctatc

SEQ ID NO: 22384 - DNA, 20 bp, Artificial Sequence
  Description of Artificial Sequence: Synthetic oligonucleotide
  Target: SCNA; (-) strand; PAM type: NRG; PAM sequence: TAG
ctgtacaataccatagtgac

SEQ ID NO: 22385 - DNA, 20 bp, Artificial Sequence
  Description of Artificial Sequence: Synthetic oligonucleotide
  Target: SCNA; (-) strand; PAM type: NRG; PAM sequence: TAG
acctactctgtacaatacca

SEQ ID NO: 22386 - DNA, 20 bp, Artificial Sequence
  Description of Artificial Sequence: Synthetic oligonucleotide
  Target: SCNA; (-) strand; PAM type: NRG; PAM sequence: AGG
tctagtataatttcttatat

SEQ ID NO: 22387 - DNA, 20 bp, Artificial Sequence
  Description of Artificial Sequence: Synthetic oligonucleotide
  Target: SCNA; (-) strand; PAM type: NRG; PAM sequence: TAG
atctagtataatttcttata

SEQ ID NO: 22388 - DNA, 20 bp, Artificial Sequence
  Description of Artificial Sequence: Synthetic oligonucleotide
  Target: SCNA; (-) strand; PAM type: NRG; PAM sequence: TAG
tttttggtttccctggtatc

SEQ ID NO: 22389 - DNA, 20 bp, Artificial Sequence
  Description of Artificial Sequence: Synthetic oligonucleotide
  Target: SCNA; (-) strand; PAM type: NRG; PAM sequence: TGG
ttttttctttttggtttccc

SEQ ID NO: 22390 - DNA, 20 bp, Artificial Sequence
  Description of Artificial Sequence: Synthetic oligonucleotide
  Target: SCNA; (-) strand; PAM type: NRG; PAM sequence: TGG
cagatgactttttttctttt

SEQ ID NO: 22391 - DNA, 20 bp, Artificial Sequence
  Description of Artificial Sequence: Synthetic oligonucleotide
  Target: SCNA; (-) strand; PAM type: NRG; PAM sequence: CAG
tgctcctgctaaacttctta

SEQ ID NO: 22392 - DNA, 20 bp, Artificial Sequence
  Description of Artificial Sequence: Synthetic oligonucleotide
  Target: SCNA; (-) strand; PAM type: NRG; PAM sequence: TGG
atctctgccataatctctgc

SEQ ID NO: 22393 - DNA, 20 bp, Artificial Sequence
  Description of Artificial Sequence: Synthetic oligonucleotide
  Target: SCNA; (-) strand; PAM type: NRG; PAM sequence: CAG
cacacttttgcccaagatca

SEQ ID NO: 22394 - DNA, 20 bp, Artificial Sequence
  Description of Artificial Sequence: Synthetic oligonucleotide
  Target: SCNA; (-) strand; PAM type: NRG; PAM sequence: AAG
taagatacacacttttgccc

SEQ ID NO: 22395 - DNA, 20 bp, Artificial Sequence
  Description of Artificial Sequence: Synthetic oligonucleotide
  Target: SCNA; (-) strand; PAM type: NRG; PAM sequence: AAG
ttcttaaatcttaaattcct

SEQ ID NO: 22396 - DNA, 20 bp, Artificial Sequence
  Description of Artificial Sequence: Synthetic oligonucleotide
  Target: SCNA; (-) strand; PAM type: NRG; PAM sequence: TAG
ctttatgtatgtttgtcata

SEQ ID NO: 22397 - DNA, 20 bp, Artificial Sequence
  Description of Artificial Sequence: Synthetic oligonucleotide
  Target: SCNA; (-) strand; PAM type: NRG; PAM sequence: AGG
cattgtcaccagagcatagc

SEQ ID NO: 22398 - DNA, 20 bp, Artificial Sequence
  Description of Artificial Sequence: Synthetic oligonucleotide
  Target: SCNA; (-) strand; PAM type: NRG; PAM sequence: CAG
ccattgtcaccagagcatag

SEQ ID NO: 22399 - DNA, 20 bp, Artificial Sequence
  Description of Artificial Sequence: Synthetic oligonucleotide
  Target: SCNA; (-) strand; PAM type: NRG; PAM sequence: TAG
gatccattgtcaccagagca

SEQ ID NO: 22400 - DNA, 20 bp, Artificial Sequence
  Description of Artificial Sequence: Synthetic oligonucleotide
  Target: SCNA; (-) strand; PAM type: NRG; PAM sequence: GAG
tggttgatccattgtcacca

SEQ ID NO: 22401 - DNA, 20 bp, Artificial Sequence
  Description of Artificial Sequence: Synthetic oligonucleotide
  Target: SCNA; (-) strand; PAM type: NRG; PAM sequence: CAG
actggttgatccattgtcac

SEQ ID NO: 22402 - DNA, 20 bp, Artificial Sequence
  Description of Artificial Sequence: Synthetic oligonucleotide
  Target: SCNA; (-) strand; PAM type: NRG; PAM sequence: TGG
tcatgtgaattctctaatac

SEQ ID NO: 22403 - DNA, 20 bp, Artificial Sequence
  Description of Artificial Sequence: Synthetic oligonucleotide
  Target: SCNA; (-) strand; PAM type: NRG; PAM sequence: CAG
cactgagcatccaggaaatt

SEQ ID NO: 22404 - DNA, 20 bp, Artificial Sequence
  Description of Artificial Sequence: Synthetic oligonucleotide
  Target: SCNA; (-) strand; PAM type: NRG; PAM sequence: AGG
tagctaaccactgagcatcc

SEQ ID NO: 22405 - DNA, 20 bp, Artificial Sequence
  Description of Artificial Sequence: Synthetic oligonucleotide
  Target: SCNA; (-) strand; PAM type: NRG; PAM sequence: CAG
ttagctaaccactgagcatc

SEQ ID NO: 22406 - DNA, 20 bp, Artificial Sequence
  Description of Artificial Sequence: Synthetic oligonucleotide
  Target: SCNA; (-) strand; PAM type: NRG; PAM sequence: GAG
ttaagacttagctaaccact

SEQ ID NO: 22407 - DNA, 20 bp, Artificial Sequence
  Description of Artificial Sequence: Synthetic oligonucleotide
  Target: SCNA; (-) strand; PAM type: NRG; PAM sequence: TAG
tcattcataaacttaagact

SEQ ID NO: 22408 - DNA, 20 bp, Artificial Sequence
  Description of Artificial Sequence: Synthetic oligonucleotide
  Target: SCNA; (-) strand; PAM type: NRG; PAM sequence: AAG
atttgttcattcataaactt

SEQ ID NO: 22409 - DNA, 20 bp, Artificial Sequence
  Description of Artificial Sequence: Synthetic oligonucleotide
  Target: SCNA; (-) strand; PAM type: NRG; PAM sequence: AAG
gtcgtttgactgatatttta

SEQ ID NO: 22410 - DNA, 20 bp, Artificial Sequence
  Description of Artificial Sequence: Synthetic oligonucleotide
  Target: SCNA; (-) strand; PAM type: NRG; PAM sequence: TGG
gctcttcattcataagaagc

SEQ ID NO: 22411 - DNA, 20 bp, Artificial Sequence
  Description of Artificial Sequence: Synthetic oligonucleotide
  Target: SCNA; (-) strand; PAM type: NRG; PAM sequence: AAG
actggctcttcattcataag

SEQ ID NO: 22412 - DNA, 20 bp, Artificial Sequence
  Description of Artificial Sequence: Synthetic oligonucleotide
  Target: SCNA; (-) strand; PAM type: NRG; PAM sequence: AAG
ttaactggctcttcattcat

SEQ ID NO: 22413 - DNA, 20 bp, Artificial Sequence
  Description of Artificial Sequence: Synthetic oligonucleotide
  Target: SCNA; (-) strand; PAM type: NRG; PAM sequence: TGG
ttcattcaaacgtatttaac

SEQ ID NO: 22414 - DNA, 20 bp, Artificial Sequence
  Description of Artificial Sequence: Synthetic oligonucleotide
  Target: SCNA; (-) strand; PAM type: NRG; PAM sequence: TGG
ggtagtttagctttctctcc

SEQ ID NO: 22415 - DNA, 20 bp, Artificial Sequence
  Description of Artificial Sequence: Synthetic oligonucleotide
  Target: SCNA; (-) strand; PAM type: NRG; PAM sequence: TAG
gagcctgtgcagcggtagtt

SEQ ID NO: 22416 - DNA, 20 bp, Artificial Sequence
  Description of Artificial Sequence: Synthetic oligonucleotide
  Target: SCNA; (-) strand; PAM type: NRG; PAM sequence: TAG
atgctgagcctgtgcagcgg

SEQ ID NO: 22417 - DNA, 20 bp, Artificial Sequence
  Description of Artificial Sequence: Synthetic oligonucleotide
  Target: SCNA; (-) strand; PAM type: NRG; PAM sequence: CGG
tagatgctgagcctgtgcag

SEQ ID NO: 22418 - DNA, 20 bp, Artificial Sequence
  Description of Artificial Sequence: Synthetic oligonucleotide
  Target: SCNA; (-) strand; PAM type: NRG; PAM sequence: CAG
caatagatgctgagcctgtg

SEQ ID NO: 22419 - DNA, 20 bp, Artificial Sequence
  Description of Artificial Sequence: Synthetic oligonucleotide
  Target: SCNA; (-) strand; PAM type: NRG; PAM sequence: GAG
agattagtgcaatagatgct

SEQ ID NO: 22420 - DNA, 20 bp, Artificial Sequence
  Description of Artificial Sequence: Synthetic oligonucleotide
  Target: SCNA; (-) strand; PAM type: NRG; PAM sequence: TAG
tcatgcctagattagtgcaa

SEQ ID NO: 22421 - DNA, 20 bp, Artificial Sequence
  Description of Artificial Sequence: Synthetic oligonucleotide
  Target: SCNA; (-) strand; PAM type: NRG; PAM sequence: TAG
gacacaactcatgcctagat

SEQ ID NO: 22422 - DNA, 20 bp, Artificial Sequence
  Description of Artificial Sequence: Synthetic oligonucleotide
  Target: SCNA; (-) strand; PAM type: NRG; PAM sequence: TAG
gataggacacaactcatgcc

SEQ ID NO: 22423 - DNA, 20 bp, Artificial Sequence
  Description of Artificial Sequence: Synthetic oligonucleotide
  Target: SCNA; (-) strand; PAM type: NRG; PAM sequence: AGG
tccattatgaaggtttggat

SEQ ID NO: 22424 - DNA, 20 bp, Artificial Sequence
  Description of Artificial Sequence: Synthetic oligonucleotide
  Target: SCNA; (-) strand; PAM type: NRG; PAM sequence: TAG
ttccattatgaaggtttgga

SEQ ID NO: 22425 - DNA, 20 bp, Artificial Sequence
  Description of Artificial Sequence: Synthetic oligonucleotide
  Target: SCNA; (-) strand; PAM type: NRG; PAM sequence: TGG
tctcttccattatgaaggtt

SEQ ID NO: 22426 - DNA, 20 bp, Artificial Sequence
  Description of Artificial Sequence: Synthetic oligonucleotide
  Target: SCNA; (-) strand; PAM type: NRG; PAM sequence: AGG
ccccatctcttccattatga

SEQ ID NO: 22427 - DNA, 20 bp, Artificial Sequence
  Description of Artificial Sequence: Synthetic oligonucleotide
  Target: SCNA; (-) strand; PAM type: NRG; PAM sequence: AAG
cccccatctcttccattatg

SEQ ID NO: 22428 - DNA, 20 bp, Artificial Sequence
  Description of Artificial Sequence: Synthetic oligonucleotide
  Target: SCNA; (-) strand; PAM type: NRG; PAM sequence: AGG
tttagccataagatgatttt

SEQ ID NO: 22429 - DNA, 20 bp, Artificial Sequence
  Description of Artificial Sequence: Synthetic oligonucleotide
  Target: SCNA; (-) strand; PAM type: NRG; PAM sequence: TAG
atttagccataagatgattt

SEQ ID NO: 22430 - DNA, 20 bp, Artificial Sequence
  Description of Artificial Sequence: Synthetic oligonucleotide
  Target: SCNA; (-) strand; PAM type: NRG; PAM sequence: AAG
tccctctcaaatttagccat

SEQ ID NO: 22431 - DNA, 20 bp, Artificial Sequence
  Description of Artificial Sequence: Synthetic oligonucleotide
  Target: SCNA; (-) strand; PAM type: NRG; PAM sequence: TAG
agttccctccctctcaaatt

SEQ ID NO: 22432 - DNA, 20 bp, Artificial Sequence
  Description of Artificial Sequence: Synthetic oligonucleotide
  Target: SCNA; (-) strand; PAM type: NRG; PAM sequence: TAG
ataaatcactgatgcctcca

SEQ ID NO: 22433 - DNA, 20 bp, Artificial Sequence
  Description of Artificial Sequence: Synthetic oligonucleotide
  Target: SCNA; (-) strand; PAM type: NRG; PAM sequence: CAG
tcagttatcaccattggcac

SEQ ID NO: 22434 - DNA, 20 bp, Artificial Sequence
  Description of Artificial Sequence: Synthetic oligonucleotide
  Target: SCNA; (-) strand; PAM type: NRG; PAM sequence: TGG
ttcatatcagttatcaccat

SEQ ID NO: 22435 - DNA, 20 bp, Artificial Sequence
  Description of Artificial Sequence: Synthetic oligonucleotide
  Target: SCNA; (-) strand; PAM type: NRG; PAM sequence: CAG
agcaaggagtcccttcatat

SEQ ID NO: 22436 - DNA, 20 bp, Artificial Sequence
  Description of Artificial Sequence: Synthetic oligonucleotide
  Target: SCNA; (-) strand; PAM type: NRG; PAM sequence: GAG
taatttttccttcaagcaag

SEQ ID NO: 22437 - DNA, 20 bp, Artificial Sequence
  Description of Artificial Sequence: Synthetic oligonucleotide
  Target: SCNA; (-) strand; PAM type: NRG; PAM sequence: AGG
cttaatttttccttcaagca

SEQ ID NO: 22438 - DNA, 20 bp, Artificial Sequence
  Description of Artificial Sequence: Synthetic oligonucleotide
  Target: SCNA; (-) strand; PAM type: NRG; PAM sequence: AAG
acttaatttttccttcaagc

SEQ ID NO: 22439 - DNA, 20 bp, Artificial Sequence
  Description of Artificial Sequence: Synthetic oligonucleotide
  Target: SCNA; (-) strand; PAM type: NRG; PAM sequence: AAG
tttaacttaatttttccttc

SEQ ID NO: 22440 - DNA, 20 bp, Artificial Sequence
  Description of Artificial Sequence: Synthetic oligonucleotide
  Target: SCNA; (-) strand; PAM type: NRG; PAM sequence: CAG
actttgatttcaacaggtct

SEQ ID NO: 22441 - DNA, 20 bp, Artificial Sequence
  Description of Artificial Sequence: Synthetic oligonucleotide
  Target: SCNA; (-) strand; PAM type: NRG; PAM sequence: AGG
actactactttgatttcaac

SEQ ID NO: 22442 - DNA, 20 bp, Artificial Sequence
  Description of Artificial Sequence: Synthetic oligonucleotide
  Target: SCNA; (-) strand; PAM type: NRG; PAM sequence: CAG
cactactactttgatttcaa

SEQ ID NO: 22443 - DNA, 20 bp, Artificial Sequence
  Description of Artificial Sequence: Synthetic oligonucleotide
  Target: SCNA; (-) strand; PAM type: NRG; PAM sequence: TAG
gcacgctacacatttttatt

SEQ ID NO: 22444 - DNA, 20 bp, Artificial Sequence
  Description of Artificial Sequence: Synthetic oligonucleotide
  Target: SCNA; (-) strand; PAM type: NRG; PAM sequence: CAG
cctttgcctacatttctagc

SEQ ID NO: 22445 - DNA, 20 bp, Artificial Sequence
  Description of Artificial Sequence: Synthetic oligonucleotide
  Target: SCNA; (-) strand; PAM type: NRG; PAM sequence: TAG
tatccctttgcctacatttc

SEQ ID NO: 22446 - DNA, 20 bp, Artificial Sequence
  Description of Artificial Sequence: Synthetic oligonucleotide
  Target: SCNA; (-) strand; PAM type: NRG; PAM sequence: TAG
cttccctccgcaatgcctta

SEQ ID NO: 22447 - DNA, 20 bp, Artificial Sequence
  Description of Artificial Sequence: Synthetic oligonucleotide
  Target: SCNA; (-) strand; PAM type: NRG; PAM sequence: AAG
ggatttctgactcattctcc

SEQ ID NO: 22448 - DNA, 20 bp, Artificial Sequence
  Description of Artificial Sequence: Synthetic oligonucleotide
  Target: SCNA; (-) strand; PAM type: NRG; PAM sequence: TGG
taaatctttaatctattgtg

SEQ ID NO: 22449 - DNA, 20 bp, Artificial Sequence
  Description of Artificial Sequence: Synthetic oligonucleotide
  Target: SCNA; (-) strand; PAM type: NRG; PAM sequence: CAG
ttaatctctaatttattccc

SEQ ID NO: 22450 - DNA, 20 bp, Artificial Sequence
  Description of Artificial Sequence: Synthetic oligonucleotide
  Target: SCNA; (-) strand; PAM type: NRG; PAM sequence: TGG
ggatgcatgccctttctacc

SEQ ID NO: 22451 - DNA, 20 bp, Artificial Sequence
  Description of Artificial Sequence: Synthetic oligonucleotide
  Target: SCNA; (-) strand; PAM type: NRG; PAM sequence: AGG
tatacatgtttgcacacacc

SEQ ID NO: 22452 - DNA, 20 bp, Artificial Sequence
  Description of Artificial Sequence: Synthetic oligonucleotide
  Target: SCNA; (-) strand; PAM type: NRG; PAM sequence: CAG
ctatacatgtttgcacacac

SEQ ID NO: 22453 - DNA, 20 bp, Artificial Sequence
  Description of Artificial Sequence: Synthetic oligonucleotide
  Target: SCNA; (-) strand; PAM type: NRG; PAM sequence: CAG
tagtaaacttgacattcatg

SEQ ID NO: 22454 - DNA, 20 bp, Artificial Sequence
  Description of Artificial Sequence: Synthetic oligonucleotide
  Target: SCNA; (-) strand; PAM type: NRG; PAM sequence: TAG
agtgatatagccacgtaaga

SEQ ID NO: 22455 - DNA, 20 bp, Artificial Sequence
  Description of Artificial Sequence: Synthetic oligonucleotide
  Target: SCNA; (-) strand; PAM type: NRG; PAM sequence: AAG
gcatagtgatatagccacgt

SEQ ID NO: 22456 - DNA, 20 bp, Artificial Sequence
  Description of Artificial Sequence: Synthetic oligonucleotide
  Target: SCNA; (-) strand; PAM type: NRG; PAM sequence: TAG
ctatagtttgcatagtgata

SEQ ID NO: 22457 - DNA, 20 bp, Artificial Sequence
  Description of Artificial Sequence: Synthetic oligonucleotide
  Target: SCNA; (-) strand; PAM type: NRG; PAM sequence: TAG
atgaaaggctatagtttgca

SEQ ID NO: 22458 - DNA, 20 bp, Artificial Sequence
  Description of Artificial Sequence: Synthetic oligonucleotide
  Target: SCNA; (-) strand; PAM type: NRG; PAM sequence: TAG
ttacgtactatgaaaggcta

SEQ ID NO: 22459 - DNA, 20 bp, Artificial Sequence
  Description of Artificial Sequence: Synthetic oligonucleotide
  Target: SCNA; (-) strand; PAM type: NRG; PAM sequence: AGG
tttcacttacgtactatgaa

SEQ ID NO: 22460 - DNA, 20 bp, Artificial Sequence
  Description of Artificial Sequence: Synthetic oligonucleotide
  Target: SCNA; (-) strand; PAM type: NRG; PAM sequence: AAG
ctttcacttacgtactatga

SEQ ID NO: 22461 - DNA, 20 bp, Artificial Sequence
  Description of Artificial Sequence: Synthetic oligonucleotide
  Target: SCNA; (-) strand; PAM type: NRG; PAM sequence: CAG
caaaggattttaggactaca

SEQ ID NO: 22462 - DNA, 20 bp, Artificial Sequence
  Description of Artificial Sequence: Synthetic oligonucleotide
  Target: SCNA; (-) strand; PAM type: NRG; PAM sequence: AGG
atgtattcacaaaggatttt

SEQ ID NO: 22463 - DNA, 20 bp, Artificial Sequence
  Description of Artificial Sequence: Synthetic oligonucleotide
  Target: SCNA; (-) strand; PAM type: NRG; PAM sequence: TAG
gatgtattcacaaaggattt

SEQ ID NO: 22464 - DNA, 20 bp, Artificial Sequence
  Description of Artificial Sequence: Synthetic oligonucleotide
  Target: SCNA; (-) strand; PAM type: NRG; PAM sequence: AGG
acaatgtgatgtattcacaa

SEQ ID NO: 22465 - DNA, 20 bp, Artificial Sequence
  Description of Artificial Sequence: Synthetic oligonucleotide
  Target: SCNA; (-) strand; PAM type: NRG; PAM sequence: AAG
gacaatgtgatgtattcaca

SEQ ID NO: 22466 - DNA, 20 bp, Artificial Sequence
  Description of Artificial Sequence: Synthetic oligonucleotide
  Target: SCNA; (-) strand; PAM type: NRG; PAM sequence: AGG
aacatgggcaagaatgtaat

SEQ ID NO: 22467 - DNA, 20 bp, Artificial Sequence
  Description of Artificial Sequence: Synthetic oligonucleotide
  Target: SCNA; (-) strand; PAM type: NRG; PAM sequence: TAG
aaacatgggcaagaatgtaa

SEQ ID NO: 22468 - DNA, 20 bp, Artificial Sequence
  Description of Artificial Sequence: Synthetic oligonucleotide
  Target: SCNA; (-) strand; PAM type: NRG; PAM sequence: AAG
tggttatgtaaaacatgggc

SEQ ID NO: 22469 - DNA, 20 bp, Artificial Sequence
  Description of Artificial Sequence: Synthetic oligonucleotide
  Target: SCNA; (-) strand; PAM type: NRG; PAM sequence: GGG
agtctggttatgtaaaacat

SEQ ID NO: 22470 - DNA, 20 bp, Artificial Sequence
  Description of Artificial Sequence: Synthetic oligonucleotide
  Target: SCNA; (-) strand; PAM type: NRG; PAM sequence: TGG
cagtctggttatgtaaaaca

SEQ ID NO: 22471 - DNA, 20 bp, Artificial Sequence
  Description of Artificial Sequence: Synthetic oligonucleotide
  Target: SCNA; (-) strand; PAM type: NRG; PAM sequence: TGG
tactcatattacagtcagtc

SEQ ID NO: 22472 - DNA, 20 bp, Artificial Sequence
  Description of Artificial Sequence: Synthetic oligonucleotide
  Target: SCNA; (-) strand; PAM type: NRG; PAM sequence: CAG
cacaatactcatattacagt

SEQ ID NO: 22473 - DNA, 20 bp, Artificial Sequence
  Description of Artificial Sequence: Synthetic oligonucleotide
  Target: SCNA; (-) strand; PAM type: NRG; PAM sequence: CAG
cacacacaatactcatatta

SEQ ID NO: 22474 - DNA, 20 bp, Artificial Sequence
  Description of Artificial Sequence: Synthetic oligonucleotide
  Target: SCNA; (-) strand; PAM type: NRG; PAM sequence: GGG
tacaaggatttattaacaaa

SEQ ID NO: 22475 - DNA, 20 bp, Artificial Sequence
  Description of Artificial Sequence: Synthetic oligonucleotide
  Target: SCNA; (-) strand; PAM type: NRG; PAM sequence: AGG
atacaaggatttattaacaa

SEQ ID NO: 22476 - DNA, 20 bp, Artificial Sequence
  Description of Artificial Sequence: Synthetic oligonucleotide
  Target: SCNA; (-) strand; PAM type: NRG; PAM sequence: AAG
tatacaaggatttattaaca

SEQ ID NO: 22477 - DNA, 20 bp, Artificial Sequence
  Description of Artificial Sequence: Synthetic oligonucleotide
  Target: SCNA; (-) strand; PAM type: NRG; PAM sequence: AGG
atccttgtggggtttataca

SEQ ID NO: 22478 - DNA, 20 bp, Artificial Sequence
  Description of Artificial Sequence: Synthetic oligonucleotide
  Target: SCNA; (-) strand; PAM type: NRG; PAM sequence: AAG
aatccttgtggggtttatac

SEQ ID NO: 22479 - DNA, 20 bp, Artificial Sequence
  Description of Artificial Sequence: Synthetic oligonucleotide
  Target: SCNA; (-) strand; PAM type: NRG; PAM sequence: GGG
tctttagagaaatccttgtg

SEQ ID NO: 22480 - DNA, 20 bp, Artificial Sequence
  Description of Artificial Sequence: Synthetic oligonucleotide
  Target: SCNA; (-) strand; PAM type: NRG; PAM sequence: GGG
gtctttagagaaatccttgt

SEQ ID NO: 22481 - DNA, 20 bp, Artificial Sequence
  Description of Artificial Sequence: Synthetic oligonucleotide
  Target: SCNA; (-) strand; PAM type: NRG; PAM sequence: TGG
tgtctttagagaaatccttg

SEQ ID NO: 22482 - DNA, 20 bp, Artificial Sequence
  Description of Artificial Sequence: Synthetic oligonucleotide
  Target: SCNA; (-) strand; PAM type: NRG; PAM sequence: GAG
gcaagccaggtttgtcttta

SEQ ID NO: 22483 - DNA, 20 bp, Artificial Sequence
  Description of Artificial Sequence: Synthetic oligonucleotide
  Target: SCNA; (-) strand; PAM type: NRG; PAM sequence: TAG
tagcaagccaggtttgtctt

SEQ ID NO: 22484 - DNA, 20 bp, Artificial Sequence
  Description of Artificial Sequence: Synthetic oligonucleotide
  Target: SCNA; (-) strand; PAM type: NRG; PAM sequence: AGG
tgagtaatatttagcaagcc

SEQ ID NO: 22485 - DNA, 20 bp, Artificial Sequence
  Description of Artificial Sequence: Synthetic oligonucleotide
  Target: SCNA; (-) strand; PAM type: NRG; PAM sequence: CAG
gtgagtaatatttagcaagc

SEQ ID NO: 22486 - DNA, 20 bp, Artificial Sequence
  Description of Artificial Sequence: Synthetic oligonucleotide
  Target: SCNA; (-) strand; PAM type: NRG; PAM sequence: AAG
tggagtgagtaatatttagc

SEQ ID NO: 22487 - DNA, 20 bp, Artificial Sequence
  Description of Artificial Sequence: Synthetic oligonucleotide
  Target: SCNA; (-) strand; PAM type: NRG; PAM sequence: TAG
agcctggagtgagtaatatt

SEQ ID NO: 22488 - DNA, 20 bp, Artificial Sequence
  Description of Artificial Sequence: Synthetic oligonucleotide
  Target: SCNA; (-) strand; PAM type: NRG; PAM sequence: GAG
attaaaatttagcctggagt

SEQ ID NO: 22489 - DNA, 20 bp, Artificial Sequence
  Description of Artificial Sequence: Synthetic oligonucleotide
  Target: SCNA; (-) strand; PAM type: NRG; PAM sequence: GAG
atttattaaaatttagcctg

SEQ ID NO: 22490 - DNA, 20 bp, Artificial Sequence
  Description of Artificial Sequence: Synthetic oligonucleotide
  Target: SCNA; (-) strand; PAM type: NRG; PAM sequence: TGG
gaatttattaaaatttagcc

SEQ ID NO: 22491 - DNA, 20 bp, Artificial Sequence
  Description of Artificial Sequence: Synthetic oligonucleotide
  Target: SCNA; (-) strand; PAM type: NRG; PAM sequence: TAG
ttatggaatttattaaaatt

SEQ ID NO: 22492 - DNA, 20 bp, Artificial Sequence
  Description of Artificial Sequence: Synthetic oligonucleotide
  Target: SCNA; (-) strand; PAM type: NRG; PAM sequence: TGG
atatatctgatagtgtttta

SEQ ID NO: 22493 - DNA, 20 bp, Artificial Sequence
  Description of Artificial Sequence: Synthetic oligonucleotide
  Target: SCNA; (-) strand; PAM type: NRG; PAM sequence: TAG
agtctcaggaatatatctga

SEQ ID NO: 22494 - DNA, 20 bp, Artificial Sequence
  Description of Artificial Sequence: Synthetic oligonucleotide
  Target: SCNA; (-) strand; PAM type: NRG; PAM sequence: AGG
acttaaaatacaaaagtctc

SEQ ID NO: 22495 - DNA, 20 bp, Artificial Sequence
  Description of Artificial Sequence: Synthetic oligonucleotide
  Target: SCNA; (-) strand; PAM type: NRG; PAM sequence: CAG
cacttaaaatacaaaagtct

SEQ ID NO: 22496 - DNA, 20 bp, Artificial Sequence
  Description of Artificial Sequence: Synthetic oligonucleotide
  Target: SCNA; (-) strand; PAM type: NRG; PAM sequence: AAG
agacagcacttaaaatacaa

SEQ ID NO: 22497 - DNA, 20 bp, Artificial Sequence
  Description of Artificial Sequence: Synthetic oligonucleotide
  Target: SCNA; (-) strand; PAM type: NRG; PAM sequence: CAG
aaataccaaataggaaaaga

SEQ ID NO: 22498 - DNA, 20 bp, Artificial Sequence
  Description of Artificial Sequence: Synthetic oligonucleotide
  Target: SCNA; (-) strand; PAM type: NRG; PAM sequence: AAG
atgcaaataccaaataggaa

SEQ ID NO: 22499 - DNA, 20 bp, Artificial Sequence
  Description of Artificial Sequence: Synthetic oligonucleotide
  Target: SCNA; (-) strand; PAM type: NRG; PAM sequence: AGG
aaccaatgcaaataccaaat

SEQ ID NO: 22500 - DNA, 20 bp, Artificial Sequence
  Description of Artificial Sequence: Synthetic oligonucleotide
  Target: SCNA; (-) strand; PAM type: NRG; PAM sequence: TAG
taaccaatgcaaataccaaa

SEQ ID NO: 22501 - DNA, 20 bp, Artificial Sequence
  Description of Artificial Sequence: Synthetic oligonucleotide
  Target: SCNA; (-) strand; PAM type: NRG; PAM sequence: AAG
gaaaccagcacaccccacaa

SEQ ID NO: 22502 - DNA, 20 bp, Artificial Sequence
  Description of Artificial Sequence: Synthetic oligonucleotide
  Target: SCNA; (-) strand; PAM type: NRG; PAM sequence: CAG
aaggggaagaaggaagaaac

SEQ ID NO: 22503 - DNA, 20 bp, Artificial Sequence
  Description of Artificial Sequence: Synthetic oligonucleotide
  Target: SCNA; (-) strand; PAM type: NRG; PAM sequence: AAG
gtgtctgaaggggaagaagg

SEQ ID NO: 22504 - DNA, 20 bp, Artificial Sequence
  Description of Artificial Sequence: Synthetic oligonucleotide
  Target: SCNA; (-) strand; PAM type: NRG; PAM sequence: AGG
ggagtgtctgaaggggaaga

SEQ ID NO: 22505 - DNA, 20 bp, Artificial Sequence
  Description of Artificial Sequence: Synthetic oligonucleotide
  Target: SCNA; (-) strand; PAM type: NRG; PAM sequence: AAG
tggagtgtctgaaggggaag

SEQ ID NO: 22506 - DNA, 20 bp, Artificial Sequence
  Description of Artificial Sequence: Synthetic oligonucleotide
  Target: SCNA; (-) strand; PAM type: NRG; PAM sequence: AAG
gggtggagtgtctgaagggg

SEQ ID NO: 22507 - DNA, 20 bp, Artificial Sequence
  Description of Artificial Sequence: Synthetic oligonucleotide
  Target: SCNA; (-) strand; PAM type: NRG; PAM sequence: GGG
gtggggtggagtgtctgaag

SEQ ID NO: 22508 - DNA, 20 bp, Artificial Sequence
  Description of Artificial Sequence: Synthetic oligonucleotide
  Target: SCNA; (-) strand; PAM type: NRG; PAM sequence: GGG
agtggggtggagtgtctgaa

SEQ ID NO: 22509 - DNA, 20 bp, Artificial Sequence
  Description of Artificial Sequence: Synthetic oligonucleotide
  Target: SCNA; (-) strand; PAM type: NRG; PAM sequence: AGG
gagtggggtggagtgtctga

SEQ ID NO: 22510 - DNA, 20 bp, Artificial Sequence
  Description of Artificial Sequence: Synthetic oligonucleotide
  Target: SCNA; (-) strand; PAM type: NRG; PAM sequence: AAG
ggagtggggtggagtgtctg

SEQ ID NO: 22511 - DNA, 20 bp, Artificial Sequence
  Description of Artificial Sequence: Synthetic oligonucleotide
  Target: SCNA; (-) strand; PAM type: NRG; PAM sequence: GAG
cacagtgcaggagtggggtg

SEQ ID NO: 22512 - DNA, 20 bp, Artificial Sequence
  Description of Artificial Sequence: Synthetic oligonucleotide
  Target: SCNA; (-) strand; PAM type: NRG; PAM sequence: TGG
ggcacagtgcaggagtgggg

SEQ ID NO: 22513 - DNA, 20 bp, Artificial Sequence
  Description of Artificial Sequence: Synthetic oligonucleotide
  Target: SCNA; (-) strand; PAM type: NRG; PAM sequence: GGG
ccaggcacagtgcaggagtg

SEQ ID NO: 22514 - DNA, 20 bp, Artificial Sequence
  Description of Artificial Sequence: Synthetic oligonucleotide
  Target: SCNA; (-) strand; PAM type: NRG; PAM sequence: GGG
tccaggcacagtgcaggagt

SEQ ID NO: 22515 - DNA, 20 bp, Artificial Sequence
  Description of Artificial Sequence: Synthetic oligonucleotide
  Target: SCNA; (-) strand; PAM type: NRG; PAM sequence: TGG
ctccaggcacagtgcaggag

SEQ ID NO: 22516 - DNA, 20 bp, Artificial Sequence
  Description of Artificial Sequence: Synthetic oligonucleotide
  Target: SCNA; (-) strand; PAM type: NRG; PAM sequence: GAG
cttctccaggcacagtgcag

SEQ ID NO: 22517 - DNA, 20 bp, Artificial Sequence
  Description of Artificial Sequence: Synthetic oligonucleotide
  Target: SCNA; (-) strand; PAM type: NRG; PAM sequence: AGG
atcttctccaggcacagtgc

SEQ ID NO: 22518 - DNA, 20 bp, Artificial Sequence
  Description of Artificial Sequence: Synthetic oligonucleotide
  Target: SCNA; (-) strand; PAM type: NRG; PAM sequence: CAG
catcttctccaggcacagtg

SEQ ID NO: 22519 - DNA, 20 bp, Artificial Sequence
  Description of Artificial Sequence: Synthetic oligonucleotide
  Target: SCNA; (-) strand; PAM type: NRG; PAM sequence: CAG
caattcatcttctccaggca

SEQ ID NO: 22520 - DNA, 20 bp, Artificial Sequence
  Description of Artificial Sequence: Synthetic oligonucleotide
  Target: SCNA; (-) strand; PAM type: NRG; PAM sequence: AGG
cagtacaattcatcttctcc

SEQ ID NO: 22521 - DNA, 20 bp, Artificial Sequence
  Description of Artificial Sequence: Synthetic oligonucleotide
  Target: SCNA; (-) strand; PAM type: NRG; PAM sequence: CAG
tcagtacaattcatcttctc

SEQ ID NO: 22522 - DNA, 20 bp, Artificial Sequence
  Description of Artificial Sequence: Synthetic oligonucleotide
  Target: SCNA; (-) strand; PAM type: NRG; PAM sequence: CAG
ttgaaaaaccgtggtgtagt

SEQ ID NO: 22523 - DNA, 20 bp, Artificial Sequence
  Description of Artificial Sequence: Synthetic oligonucleotide
  Target: SCNA; (-) strand; PAM type: NRG; PAM sequence: TAG
aaggttgaaaaaccgtggtg

SEQ ID NO: 22524 - DNA, 20 bp, Artificial Sequence
  Description of Artificial Sequence: Synthetic oligonucleotide
  Target: SCNA; (-) strand; PAM type: NRG; PAM sequence: TGG
ctgccaaggttgaaaaaccg

SEQ ID NO: 22525 - DNA, 20 bp, Artificial Sequence
  Description of Artificial Sequence: Synthetic oligonucleotide
  Target: SCNA; (-) strand; PAM type: NRG; PAM sequence: AGG
aaaaaatgtcattactgcca

SEQ ID NO: 22526 - DNA, 20 bp, Artificial Sequence
  Description of Artificial Sequence: Synthetic oligonucleotide
  Target: SCNA; (-) strand; PAM type: NRG; PAM sequence: AAG
taaaaaatgtcattactgcc

SEQ ID NO: 22527 - DNA, 20 bp, Artificial Sequence
  Description of Artificial Sequence: Synthetic oligonucleotide
  Target: SCNA; (-) strand; PAM type: NRG; PAM sequence: CAG
tccttccacaacaaagtatc

SEQ ID NO: 22528 - DNA, 20 bp, Artificial Sequence
  Description of Artificial Sequence: Synthetic oligonucleotide
  Target: SCNA; (-) strand; PAM type: NRG; PAM sequence: AAG
caggacatccttccacaaca

SEQ ID NO: 22529 - DNA, 20 bp, Artificial Sequence
  Description of Artificial Sequence: Synthetic oligonucleotide
  Target: SCNA; (-) strand; PAM type: NRG; PAM sequence: AGG
tttaaacatctacaatgcac

SEQ ID NO: 22530 - DNA, 20 bp, Artificial Sequence
  Description of Artificial Sequence: Synthetic oligonucleotide
  Target: SCNA; (-) strand; PAM type: NRG; PAM sequence: CAG
ttttaaacatctacaatgca

SEQ ID NO: 22531 - DNA, 20 bp, Artificial Sequence
  Description of Artificial Sequence: Synthetic oligonucleotide
  Target: SCNA; (-) strand; PAM type: NRG; PAM sequence: GGG
gtgctactatgattcactga

SEQ ID NO: 22532 - DNA, 20 bp, Artificial Sequence
  Description of Artificial Sequence: Synthetic oligonucleotide
  Target: SCNA; (-) strand; PAM type: NRG; PAM sequence: AGG
agtgctactatgattcactg

SEQ ID NO: 22533 - DNA, 20 bp, Artificial Sequence
  Description of Artificial Sequence: Synthetic oligonucleotide
  Target: SCNA; (-) strand; PAM type: NRG; PAM sequence: GAG
gagtgctactatgattcact

SEQ ID NO: 22534 - DNA, 20 bp, Artificial Sequence
  Description of Artificial Sequence: Synthetic oligonucleotide
  Target: SCNA; (-) strand; PAM type: NRG; PAM sequence: GAG
gggaggaagggagaggagtg

SEQ ID NO: 22535 - DNA, 20 bp, Artificial Sequence
  Description of Artificial Sequence: Synthetic oligonucleotide
  Target: SCNA; (-) strand; PAM type: NRG; PAM sequence: TGG
aggggaggaagggagaggag

SEQ ID NO: 22536 - DNA, 20 bp, Artificial Sequence
  Description of Artificial Sequence: Synthetic oligonucleotide
  Target: SCNA; (-) strand; PAM type: NRG; PAM sequence: GAG
ctcaggggaggaagggagag

SEQ ID NO: 22537 - DNA, 20 bp, Artificial Sequence
  Description of Artificial Sequence: Synthetic oligonucleotide
  Target: SCNA; (-) strand; PAM type: NRG; PAM sequence: AGG
agctcaggggaggaagggag

SEQ ID NO: 22538 - DNA, 20 bp, Artificial Sequence
  Description of Artificial Sequence: Synthetic oligonucleotide
  Target: SCNA; (-) strand; PAM type: NRG; PAM sequence: GAG
cagctcaggggaggaaggga

SEQ ID NO: 22539 - DNA, 20 bp, Artificial Sequence
  Description of Artificial Sequence: Synthetic oligonucleotide
  Target: SCNA; (-) strand; PAM type: NRG; PAM sequence: GAG
cacagctcaggggaggaagg

SEQ ID NO: 22540 - DNA, 20 bp, Artificial Sequence
  Description of Artificial Sequence: Synthetic oligonucleotide
  Target: SCNA; (-) strand; PAM type: NRG; PAM sequence: GGG
atcacagctcaggggaggaa

SEQ ID NO: 22541 - DNA, 20 bp, Artificial Sequence
  Description of Artificial Sequence: Synthetic oligonucleotide
  Target: SCNA; (-) strand; PAM type: NRG; PAM sequence: AGG
tatcacagctcaggggagga

SEQ ID NO: 22542 - DNA, 20 bp, Artificial Sequence
  Description of Artificial Sequence: Synthetic oligonucleotide
  Target: SCNA; (-) strand; PAM type: NRG; PAM sequence: AAG
ttatcacagctcaggggagg

SEQ ID NO: 22543 - DNA, 20 bp, Artificial Sequence
  Description of Artificial Sequence: Synthetic oligonucleotide
  Target: SCNA; (-) strand; PAM type: NRG; PAM sequence: AGG
tggttatcacagctcagggg

SEQ ID NO: 22544 - DNA, 20 bp, Artificial Sequence
  Description of Artificial Sequence: Synthetic oligonucleotide
  Target: SCNA; (-) strand; PAM type: NRG; PAM sequence: GAG
gtggttatcacagctcaggg

SEQ ID NO: 22545 - DNA, 20 bp, Artificial Sequence
  Description of Artificial Sequence: Synthetic oligonucleotide
  Target: SCNA; (-) strand; PAM type: NRG; PAM sequence: GGG
tagtggttatcacagctcag

SEQ ID NO: 22546 - DNA, 20 bp, Artificial Sequence
  Description of Artificial Sequence: Synthetic oligonucleotide
  Target: SCNA; (-) strand; PAM type: NRG; PAM sequence: GGG
ttagtggttatcacagctca

SEQ ID NO: 22547 - DNA, 20 bp, Artificial Sequence
  Description of Artificial Sequence: Synthetic oligonucleotide
  Target: SCNA; (-) strand; PAM type: NRG; PAM sequence: AGG
attagtggttatcacagctc

SEQ ID NO: 22548 - DNA, 20 bp, Artificial Sequence
  Description of Artificial Sequence: Synthetic oligonucleotide
  Target: SCNA; (-) strand; PAM type: NRG; PAM sequence: CAG
cattagtggttatcacagct

SEQ ID NO: 22549 - DNA, 20 bp, Artificial Sequence
  Description of Artificial Sequence: Synthetic oligonucleotide
  Target: SCNA; (-) strand; PAM type: NRG; PAM sequence: CAG
gggaacattagtggttatca

SEQ ID NO: 22550 - DNA, 20 bp, Artificial Sequence
  Description of Artificial Sequence: Synthetic oligonucleotide
  Target: SCNA; (-) strand; PAM type: NRG; PAM sequence: TGG
gtgctcccagggaacattag

SEQ ID NO: 22551 - DNA, 20 bp, Artificial Sequence
  Description of Artificial Sequence: Synthetic oligonucleotide
  Target: SCNA; (-) strand; PAM type: NRG; PAM sequence: TAG
attgtgctcccagggaacat

SEQ ID NO: 22552 - DNA, 20 bp, Artificial Sequence
  Description of Artificial Sequence: Synthetic oligonucleotide
  Target: SCNA; (-) strand; PAM type: NRG; PAM sequence: GGG
cagggccaattgtgctccca

SEQ ID NO: 22553 - DNA, 20 bp, Artificial Sequence
  Description of Artificial Sequence: Synthetic oligonucleotide
  Target: SCNA; (-) strand; PAM type: NRG; PAM sequence: AGG
ccagggccaattgtgctccc

SEQ ID NO: 22554 - DNA, 20 bp, Artificial Sequence
  Description of Artificial Sequence: Synthetic oligonucleotide
  Target: SCNA; (-) strand; PAM type: NRG; PAM sequence: CAG
tccagggccaattgtgctcc

SEQ ID NO: 22555 - DNA, 20 bp, Artificial Sequence
  Description of Artificial Sequence: Synthetic oligonucleotide
  Target: SCNA; (-) strand; PAM type: NRG; PAM sequence: GGG
gtagcagtggttctaatcca

SEQ ID NO: 22556 - DNA, 20 bp, Artificial Sequence
  Description of Artificial Sequence: Synthetic oligonucleotide
  Target: SCNA; (-) strand; PAM type: NRG; PAM sequence: AGG
tgtagcagtggttctaatcc

SEQ ID NO: 22557 - DNA, 20 bp, Artificial Sequence
  Description of Artificial Sequence: Synthetic oligonucleotide
  Target: SCNA; (-) strand; PAM type: NRG; PAM sequence: CAG
atgtagcagtggttctaatc

SEQ ID NO: 22558 - DNA, 20 bp, Artificial Sequence
  Description of Artificial Sequence: Synthetic oligonucleotide
  Target: SCNA; (-) strand; PAM type: NRG; PAM sequence: TGG
ggagtgcattgatgtagcag

SEQ ID NO: 22559 - DNA, 20 bp, Artificial Sequence
  Description of Artificial Sequence: Synthetic oligonucleotide
  Target: SCNA; (-) strand; PAM type: NRG; PAM sequence: CAG
aaaggagtgcattgatgtag

SEQ ID NO: 22560 - DNA, 20 bp, Artificial Sequence
  Description of Artificial Sequence: Synthetic oligonucleotide
  Target: SCNA; (-) strand; PAM type: NRG; PAM sequence: TAG
acaaaaggagtgcattgatg

SEQ ID NO: 22561 - DNA, 20 bp, Artificial Sequence
  Description of Artificial Sequence: Synthetic oligonucleotide
  Target: SCNA; (-) strand; PAM type: NRG; PAM sequence: GAG
actcacagcgtagacaaaag

SEQ ID NO: 22562 - DNA, 20 bp, Artificial Sequence
  Description of Artificial Sequence: Synthetic oligonucleotide
  Target: SCNA; (-) strand; PAM type: NRG; PAM sequence: AGG
aaactcacagcgtagacaaa

SEQ ID NO: 22563 - DNA, 20 bp, Artificial Sequence
  Description of Artificial Sequence: Synthetic oligonucleotide
  Target: SCNA; (-) strand; PAM type: NRG; PAM sequence: AAG
caaactcacagcgtagacaa

SEQ ID NO: 22564 - DNA, 20 bp, Artificial Sequence
  Description of Artificial Sequence: Synthetic oligonucleotide
  Target: SCNA; (-) strand; PAM type: NRG; PAM sequence: TAG
cactggccaaactcacagcg

SEQ ID NO: 22565 - DNA, 20 bp, Artificial Sequence
  Description of Artificial Sequence: Synthetic oligonucleotide
  Target: SCNA; (-) strand; PAM type: NRG; PAM sequence: CAG
gtttccactggccaaactca

SEQ ID NO: 22566 - DNA, 20 bp, Artificial Sequence
  Description of Artificial Sequence: Synthetic oligonucleotide
  Target: SCNA; (-) strand; PAM type: NRG; PAM sequence: TGG
cctctttgtggtgtttccac

SEQ ID NO: 22567 - DNA, 20 bp, Artificial Sequence
  Description of Artificial Sequence: Synthetic oligonucleotide
  Target: SCNA; (-) strand; PAM type: NRG; PAM sequence: TGG
ccctccctgtttcctctttg

SEQ ID NO: 22568 - DNA, 20 bp, Artificial Sequence
  Description of Artificial Sequence: Synthetic oligonucleotide
  Target: SCNA; (-) strand; PAM type: NRG; PAM sequence: TGG
aatagtcaatatctggaaaa

SEQ ID NO: 22569 - DNA, 20 bp, Artificial Sequence
  Description of Artificial Sequence: Synthetic oligonucleotide
  Target: SCNA; (-) strand; PAM type: NRG; PAM sequence: TGG
gggcgagaatagtcaatatc

SEQ ID NO: 22570 - DNA, 20 bp, Artificial Sequence
  Description of Artificial Sequence: Synthetic oligonucleotide
  Target: SCNA; (-) strand; PAM type: NRG; PAM sequence: TAG
ctggcctagcagggcgagaa

SEQ ID NO: 22571 - DNA, 20 bp, Artificial Sequence
  Description of Artificial Sequence: Synthetic oligonucleotide
  Target: SCNA; (-) strand; PAM type: NRG; PAM sequence: GAG
ctgcactggcctagcagggc

SEQ ID NO: 22572 - DNA, 20 bp, Artificial Sequence
  Description of Artificial Sequence: Synthetic oligonucleotide
  Target: SCNA; (-) strand; PAM type: NRG; PAM sequence: GGG
ctgcctgcactggcctagca

SEQ ID NO: 22573 - DNA, 20 bp, Artificial Sequence
  Description of Artificial Sequence: Synthetic oligonucleotide
  Target: SCNA; (-) strand; PAM type: NRG; PAM sequence: AGG
cctgcctgcactggcctagc

SEQ ID NO: 22574 - DNA, 20 bp, Artificial Sequence
  Description of Artificial Sequence: Synthetic oligonucleotide
  Target: SCNA; (-) strand; PAM type: NRG; PAM sequence: CAG
acctgcctgcactggcctag

SEQ ID NO: 22575 - DNA, 20 bp, Artificial Sequence
  Description of Artificial Sequence: Synthetic oligonucleotide
  Target: SCNA; (-) strand; PAM type: NRG; PAM sequence: TAG
accacctgcctgcactggcc

SEQ ID NO: 22576 - DNA, 20 bp, Artificial Sequence
  Description of Artificial Sequence: Synthetic oligonucleotide
  Target: SCNA; (-) strand; PAM type: NRG; PAM sequence: TGG
ctgataccacctgcctgcac

SEQ ID NO: 22577 - DNA, 20 bp, Artificial Sequence
  Description of Artificial Sequence: Synthetic oligonucleotide
  Target: SCNA; (-) strand; PAM type: NRG; PAM sequence: TGG
gacttgagctgtgtgatctt

SEQ ID NO: 22578 - DNA, 20 bp, Artificial Sequence
  Description of Artificial Sequence: Synthetic oligonucleotide
  Target: SCNA; (-) strand; PAM type: NRG; PAM sequence: GAG
tgaagacggctgcctgactt

SEQ ID NO: 22579 - DNA, 20 bp, Artificial Sequence
  Description of Artificial Sequence: Synthetic oligonucleotide
  Target: SCNA; (-) strand; PAM type: NRG; PAM sequence: CGG
aagcaagtcctatgtgaaga

SEQ ID NO: 22580 - DNA, 20 bp, Artificial Sequence
  Description of Artificial Sequence: Synthetic oligonucleotide
  Target: SCNA; (-) strand; PAM type: NRG; PAM sequence: AAG
gaccaagcaagtcctatgtg

SEQ ID NO: 22581 - DNA, 20 bp, Artificial Sequence
  Description of Artificial Sequence: Synthetic oligonucleotide
  Target: SCNA; (-) strand; PAM type: NRG; PAM sequence: AAG
ggaaggagagatgaccaagc

SEQ ID NO: 22582 - DNA, 20 bp, Artificial Sequence
  Description of Artificial Sequence: Synthetic oligonucleotide
  Target: SCNA; (-) strand; PAM type: NRG; PAM sequence: AAG
gaaaggaaggagagatgacc

SEQ ID NO: 22583 - DNA, 20 bp, Artificial Sequence
  Description of Artificial Sequence: Synthetic oligonucleotide
  Target: SCNA; (-) strand; PAM type: NRG; PAM sequence: GAG
aaagagggagaaaggaagga

SEQ ID NO: 22584 - DNA, 20 bp, Artificial Sequence
  Description of Artificial Sequence: Synthetic oligonucleotide
  Target: SCNA; (-) strand; PAM type: NRG; PAM sequence: GAG
aaaaagagggagaaaggaag

SEQ ID NO: 22585 - DNA, 20 bp, Artificial Sequence
  Description of Artificial Sequence: Synthetic oligonucleotide
  Target: SCNA; (-) strand; PAM type: NRG; PAM sequence: AGG
agaaaaagagggagaaagga

SEQ ID NO: 22586 - DNA, 20 bp, Artificial Sequence
  Description of Artificial Sequence: Synthetic oligonucleotide
  Target: SCNA; (-) strand; PAM type: NRG; PAM sequence: AAG
cagaaaaagagggagaaagg

SEQ ID NO: 22587 - DNA, 20 bp, Artificial Sequence
  Description of Artificial Sequence: Synthetic oligonucleotide
  Target: SCNA; (-) strand; PAM type: NRG; PAM sequence: AGG
tatcagaaaaagagggagaa

SEQ ID NO: 22588 - DNA, 20 bp, Artificial Sequence
  Description of Artificial Sequence: Synthetic oligonucleotide
  Target: SCNA; (-) strand; PAM type: NRG; PAM sequence: AAG
ttatcagaaaaagagggaga

SEQ ID NO: 22589 - DNA, 20 bp, Artificial Sequence
  Description of Artificial Sequence: Synthetic oligonucleotide
  Target: SCNA; (-) strand; PAM type: NRG; PAM sequence: GAG
ccatttatcagaaaaagagg

SEQ ID NO: 22590 - DNA, 20 bp, Artificial Sequence
  Description of Artificial Sequence: Synthetic oligonucleotide
  Target: SCNA; (-) strand; PAM type: NRG; PAM sequence: GGG
taccatttatcagaaaaaga

SEQ ID NO: 22591 - DNA, 20 bp, Artificial Sequence
  Description of Artificial Sequence: Synthetic oligonucleotide
  Target: SCNA; (-) strand; PAM type: NRG; PAM sequence: AGG
ttaccatttatcagaaaaag

SEQ ID NO: 22592 - DNA, 20 bp, Artificial Sequence
  Description of Artificial Sequence: Synthetic oligonucleotide
  Target: SCNA; (-) strand; PAM type: NRG; PAM sequence: GAG
attaccatttatcagaaaaa

SEQ ID NO: 22593 - DNA, 20 bp, Artificial Sequence
  Description of Artificial Sequence: Synthetic oligonucleotide
  Target: SCNA; (-) strand; PAM type: NRG; PAM sequence: AAG
agattaccatttatcagaaa

SEQ ID NO: 22594 - DNA, 20 bp, Artificial Sequence
  Description of Artificial Sequence: Synthetic oligonucleotide
  Target: SCNA; (-) strand; PAM type: NRG; PAM sequence: CAG
acagggagattaccatttat

SEQ ID NO: 22595 - DNA, 20 bp, Artificial Sequence
  Description of Artificial Sequence: Synthetic oligonucleotide
  Target: SCNA; (-) strand; PAM type: NRG; PAM sequence: GAG
aaatgaactaaatgaacagg

SEQ ID NO: 22596 - DNA, 20 bp, Artificial Sequence
  Description of Artificial Sequence: Synthetic oligonucleotide
  Target: SCNA; (-) strand; PAM type: NRG; PAM sequence: GGG
caaaatgaactaaatgaaca

SEQ ID NO: 22597 - DNA, 20 bp, Artificial Sequence
  Description of Artificial Sequence: Synthetic oligonucleotide
  Target: SCNA; (-) strand; PAM type: NRG; PAM sequence: AGG
ccaaaatgaactaaatgaac

SEQ ID NO: 22598 - DNA, 20 bp, Artificial Sequence
  Description of Artificial Sequence: Synthetic oligonucleotide
  Target: SCNA; (-) strand; PAM type: NRG; PAM sequence: CAG
gccaaaatgaactaaatgaa

SEQ ID NO: 22599 - DNA, 20 bp, Artificial Sequence
  Description of Artificial Sequence: Synthetic oligonucleotide
  Target: SCNA; (-) strand; PAM type: NRG; PAM sequence: AGG
cgagcaccgttataaccact

SEQ ID NO: 22600 - DNA, 20 bp, Artificial Sequence
  Description of Artificial Sequence: Synthetic oligonucleotide
  Target: SCNA; (-) strand; PAM type: NRG; PAM sequence: TAG
gcgagcaccgttataaccac

SEQ ID NO: 22601 - DNA, 20 bp, Artificial Sequence
  Description of Artificial Sequence: Synthetic oligonucleotide
  Target: SCNA; (-) strand; PAM type: NRG; PAM sequence: GAG
tactttaggatggcaacagc

SEQ ID NO: 22602 - DNA, 20 bp, Artificial Sequence
  Description of Artificial Sequence: Synthetic oligonucleotide
  Target: SCNA; (-) strand; PAM type: NRG; PAM sequence: CAG
gcaatactttaggatggcaa

SEQ ID NO: 22603 - DNA, 20 bp, Artificial Sequence
  Description of Artificial Sequence: Synthetic oligonucleotide
  Target: SCNA; (-) strand; PAM type: NRG; PAM sequence: TGG
aatagtgcaatactttagga

SEQ ID NO: 22604 - DNA, 20 bp, Artificial Sequence
  Description of Artificial Sequence: Synthetic oligonucleotide
  Target: SCNA; (-) strand; PAM type: NRG; PAM sequence: AGG
acggaatagtgcaatacttt

SEQ ID NO: 22605 - DNA, 20 bp, Artificial Sequence
  Description of Artificial Sequence: Synthetic oligonucleotide
  Target: SCNA; (-) strand; PAM type: NRG; PAM sequence: TAG
cacggaatagtgcaatactt

SEQ ID NO: 22606 - DNA, 20 bp, Artificial Sequence
  Description of Artificial Sequence: Synthetic oligonucleotide
  Target: SCNA; (-) strand; PAM type: NRG; PAM sequence: TAG
gttaggaaaaacacacggaa

SEQ ID NO: 22607 - DNA, 20 bp, Artificial Sequence
  Description of Artificial Sequence: Synthetic oligonucleotide
  Target: SCNA; (-) strand; PAM type: NRG; PAM sequence: CGG
accgggttaggaaaaacaca

SEQ ID NO: 22608 - DNA, 20 bp, Artificial Sequence
  Description of Artificial Sequence: Synthetic oligonucleotide
  Target: SCNA; (-) strand; PAM type: NRG; PAM sequence: AGG
acgaaggtttagaccgggtt

SEQ ID NO: 22609 - DNA, 20 bp, Artificial Sequence
  Description of Artificial Sequence: Synthetic oligonucleotide
  Target: SCNA; (-) strand; PAM type: NRG; PAM sequence: TAG
tacgaaggtttagaccgggt

SEQ ID NO: 22610 - DNA, 20 bp, Artificial Sequence
  Description of Artificial Sequence: Synthetic oligonucleotide
  Target: SCNA; (-) strand; PAM type: NRG; PAM sequence: GGG
taattacgaaggtttagacc

SEQ ID NO: 22611 - DNA, 20 bp, Artificial Sequence
  Description of Artificial Sequence: Synthetic oligonucleotide
  Target: SCNA; (-) strand; PAM type: NRG; PAM sequence: CGG
ctaattacgaaggtttagac

SEQ ID NO: 22612 - DNA, 20 bp, Artificial Sequence
  Description of Artificial Sequence: Synthetic oligonucleotide
  Target: SCNA; (-) strand; PAM type: NRG; PAM sequence: TAG
agggactaattacgaaggtt

SEQ ID NO: 22613 - DNA, 20 bp, Artificial Sequence
  Description of Artificial Sequence: Synthetic oligonucleotide
  Target: SCNA; (-) strand; PAM type: NRG; PAM sequence: AGG
tataaagggactaattacga

SEQ ID NO: 22614 - DNA, 20 bp, Artificial Sequence
  Description of Artificial Sequence: Synthetic oligonucleotide
  Target: SCNA; (-) strand; PAM type: NRG; PAM sequence: AAG
ttataaagggactaattacg

SEQ ID NO: 22615 - DNA, 20 bp, Artificial Sequence
  Description of Artificial Sequence: Synthetic oligonucleotide
  Target: SCNA; (-) strand; PAM type: NRG; PAM sequence: GGG
gttggaggagactttataaa

SEQ ID NO: 22616 - DNA, 20 bp, Artificial Sequence
  Description of Artificial Sequence: Synthetic oligonucleotide
  Target: SCNA; (-) strand; PAM type: NRG; PAM sequence: AGG
agttggaggagactttataa

SEQ ID NO: 22617 - DNA, 20 bp, Artificial Sequence
  Description of Artificial Sequence: Synthetic oligonucleotide
  Target: SCNA; (-) strand; PAM type: NRG; PAM sequence: AAG
tagttggaggagactttata

SEQ ID NO: 22618 - DNA, 20 bp, Artificial Sequence
  Description of Artificial Sequence: Synthetic oligonucleotide
  Target: SCNA; (-) strand; PAM type: NRG; PAM sequence: GAG
cacaaatttggtagttggag

SEQ ID NO: 22619 - DNA, 20 bp, Artificial Sequence
  Description of Artificial Sequence: Synthetic oligonucleotide
  Target: SCNA; (-) strand; PAM type: NRG; PAM sequence: AGG
cacacaaatttggtagttgg

SEQ ID NO: 22620 - DNA, 20 bp, Artificial Sequence
  Description of Artificial Sequence: Synthetic oligonucleotide
  Target: SCNA; (-) strand; PAM type: NRG; PAM sequence: GAG
gcacacaaatttggtagttg

SEQ ID NO: 22621 - DNA, 20 bp, Artificial Sequence
  Description of Artificial Sequence: Synthetic oligonucleotide
  Target: SCNA; (-) strand; PAM type: NRG; PAM sequence: TGG
gtgcacacaaatttggtagt

SEQ ID NO: 22622 - DNA, 20 bp, Artificial Sequence
  Description of Artificial Sequence: Synthetic oligonucleotide
  Target: SCNA; (-) strand; PAM type: NRG; PAM sequence: TAG
aacagtgcacacaaatttgg

SEQ ID NO: 22623 - DNA, 20 bp, Artificial Sequence
  Description of Artificial Sequence: Synthetic oligonucleotide
  Target: SCNA; (-) strand; PAM type: NRG; PAM sequence: TGG
acaaacagtgcacacaaatt

SEQ ID NO: 22624 - DNA, 20 bp, Artificial Sequence
  Description of Artificial Sequence: Synthetic oligonucleotide
  Target: SCNA; (-) strand; PAM type: NRG; PAM sequence: CAG
taactcctgctgaaaacaaa

SEQ ID NO: 22625 - DNA, 20 bp, Artificial Sequence
  Description of Artificial Sequence: Synthetic oligonucleotide
  Target: SCNA; (-) strand; PAM type: NRG; PAM sequence: TGG
agagaaaacatctcaatatt

SEQ ID NO: 22626 - DNA, 20 bp, Artificial Sequence
  Description of Artificial Sequence: Synthetic oligonucleotide
  Target: SCNA; (-) strand; PAM type: NRG; PAM sequence: GAG
caatgattggggccaataca

SEQ ID NO: 22627 - DNA, 20 bp, Artificial Sequence
  Description of Artificial Sequence: Synthetic oligonucleotide
  Target: SCNA; (-) strand; PAM type: NRG; PAM sequence: CAG
tccaatgattggggccaata

SEQ ID NO: 22628 - DNA, 20 bp, Artificial Sequence
  Description of Artificial Sequence: Synthetic oligonucleotide
  Target: SCNA; (-) strand; PAM type: NRG; PAM sequence: GGG
acaaaacattccaatgattg

SEQ ID NO: 22629 - DNA, 20 bp, Artificial Sequence
  Description of Artificial Sequence: Synthetic oligonucleotide
  Target: SCNA; (-) strand; PAM type: NRG; PAM sequence: GGG
cacaaaacattccaatgatt

SEQ ID NO: 22630 - DNA, 20 bp, Artificial Sequence
  Description of Artificial Sequence: Synthetic oligonucleotide
  Target: SCNA; (-) strand; PAM type: NRG; PAM sequence: TGG
gcacaaaacattccaatgat

SEQ ID NO: 22631 - DNA, 20 bp, Artificial Sequence
  Description of Artificial Sequence: Synthetic oligonucleotide
  Target: SCNA; (-) strand; PAM type: NRG; PAM sequence: AAG
aggtgtcagtgattattata

SEQ ID NO: 22632 - DNA, 20 bp, Artificial Sequence
  Description of Artificial Sequence: Synthetic oligonucleotide
  Target: SCNA; (-) strand; PAM type: NRG; PAM sequence: CAG
tatgaaaataatataggtgt

SEQ ID NO: 22633 - DNA, 20 bp, Artificial Sequence
  Description of Artificial Sequence: Synthetic oligonucleotide
  Target: SCNA; (-) strand; PAM type: NRG; PAM sequence: AGG
tcaaagtatgaaaataatat

SEQ ID NO: 22634 - DNA, 20 bp, Artificial Sequence
  Description of Artificial Sequence: Synthetic oligonucleotide
  Target: SCNA; (-) strand; PAM type: NRG; PAM sequence: TAG
atcaaagtatgaaaataata

SEQ ID NO: 22635 - DNA, 20 bp, Artificial Sequence
  Description of Artificial Sequence: Synthetic oligonucleotide
  Target: SCNA; (-) strand; PAM type: NRG; PAM sequence: AAG
agcattcattgagcaaatca

SEQ ID NO: 22636 - DNA, 20 bp, Artificial Sequence
  Description of Artificial Sequence: Synthetic oligonucleotide
  Target: SCNA; (-) strand; PAM type: NRG; PAM sequence: GAG
ttttataactagcattcatt

SEQ ID NO: 22637 - DNA, 20 bp, Artificial Sequence
  Description of Artificial Sequence: Synthetic oligonucleotide
  Target: SCNA; (-) strand; PAM type: NRG; PAM sequence: TAG
atgatcttgttttttataac

SEQ ID NO: 22638 - DNA, 20 bp, Artificial Sequence
  Description of Artificial Sequence: Synthetic oligonucleotide
  Target: SCNA; (-) strand; PAM type: NRG; PAM sequence: AAG
tgagaataataaaggcaagg

SEQ ID NO: 22639 - DNA, 20 bp, Artificial Sequence
  Description of Artificial Sequence: Synthetic oligonucleotide
  Target: SCNA; (-) strand; PAM type: NRG; PAM sequence: AGG
acctgagaataataaaggca

SEQ ID NO: 22640 - DNA, 20 bp, Artificial Sequence
  Description of Artificial Sequence: Synthetic oligonucleotide
  Target: SCNA; (-) strand; PAM type: NRG; PAM sequence: AAG
cacctgagaataataaaggc

SEQ ID NO: 22641 - DNA, 20 bp, Artificial Sequence
  Description of Artificial Sequence: Synthetic oligonucleotide
  Target: SCNA; (-) strand; PAM type: NRG; PAM sequence: AGG
atttcacctgagaataataa

SEQ ID NO: 22642 - DNA, 20 bp, Artificial Sequence
  Description of Artificial Sequence: Synthetic oligonucleotide
  Target: SCNA; (-) strand; PAM type: NRG; PAM sequence: AAG
catttcacctgagaataata

SEQ ID NO: 22643 - DNA, 20 bp, Artificial Sequence
  Description of Artificial Sequence: Synthetic oligonucleotide
  Target: SCNA; (-) strand; PAM type: NRG; PAM sequence: GAG
ttcatatctccatttcacct

SEQ ID NO: 22644 - DNA, 20 bp, Artificial Sequence
  Description of Artificial Sequence: Synthetic oligonucleotide
  Target: SCNA; (-) strand; PAM type: NRG; PAM sequence: GAG
aatctctattcttctttttt

SEQ ID NO: 22645 - DNA, 20 bp, Artificial Sequence
  Description of Artificial Sequence: Synthetic oligonucleotide
  Target: SCNA; (-) strand; PAM type: NRG; PAM sequence: CGG
agacagttatacattactta

SEQ ID NO: 22646 - DNA, 20 bp, Artificial Sequence
  Description of Artificial Sequence: Synthetic oligonucleotide
  Target: SCNA; (-) strand; PAM type: NRG; PAM sequence: CAG
atgacaatgaaatactgaga

SEQ ID NO: 22647 - DNA, 20 bp, Artificial Sequence
  Description of Artificial Sequence: Synthetic oligonucleotide
  Target: SCNA; (-) strand; PAM type: NRG; PAM sequence: GAG
aggtatgacaatgaaatact

SEQ ID NO: 22648 - DNA, 20 bp, Artificial Sequence
  Description of Artificial Sequence: Synthetic oligonucleotide
  Target: SCNA; (-) strand; PAM type: NRG; PAM sequence: AGG
tacttccctgcttacttata

SEQ ID NO: 22649 - DNA, 20 bp, Artificial Sequence
  Description of Artificial Sequence: Synthetic oligonucleotide
  Target: SCNA; (-) strand; PAM type: NRG; PAM sequence: AAG
gtacttccctgcttacttat

SEQ ID NO: 22650 - DNA, 20 bp, Artificial Sequence
  Description of Artificial Sequence: Synthetic oligonucleotide
  Target: SCNA; (-) strand; PAM type: NRG; PAM sequence: AAG
gactgaaagactaaattaat

SEQ ID NO: 22651 - DNA, 20 bp, Artificial Sequence
  Description of Artificial Sequence: Synthetic oligonucleotide
  Target: SCNA; (-) strand; PAM type: NRG; PAM sequence: AAG
ttgactcaatgagtgactga

SEQ ID NO: 22652 - DNA, 20 bp, Artificial Sequence
  Description of Artificial Sequence: Synthetic oligonucleotide
  Target: SCNA; (-) strand; PAM type: NRG; PAM sequence: GAG
caagaattgattgactcaat

SEQ ID NO: 22653 - DNA, 20 bp, Artificial Sequence
  Description of Artificial Sequence: Synthetic oligonucleotide
  Target: SCNA; (-) strand; PAM type: NRG; PAM sequence: AAG
cttcaaaaacaattggcctc

SEQ ID NO: 22654 - DNA, 20 bp, Artificial Sequence
  Description of Artificial Sequence: Synthetic oligonucleotide
  Target: SCNA; (-) strand; PAM type: NRG; PAM sequence: TGG
tcagtgccttcaaaaacaat

SEQ ID NO: 22655 - DNA, 20 bp, Artificial Sequence
  Description of Artificial Sequence: Synthetic oligonucleotide
  Target: SCNA; (-) strand; PAM type: NRG; PAM sequence: CAG
tccacagtatctagcacaat

SEQ ID NO: 22656 - DNA, 20 bp, Artificial Sequence
  Description of Artificial Sequence: Synthetic oligonucleotide
  Target: SCNA; (-) strand; PAM type: NRG; PAM sequence: TAG
tttgtaacatccacagtatc

SEQ ID NO: 22657 - DNA, 20 bp, Artificial Sequence
  Description of Artificial Sequence: Synthetic oligonucleotide
  Target: SCNA; (-) strand; PAM type: NRG; PAM sequence: CAG
attcacctttgtaacatcca

SEQ ID NO: 22658 - DNA, 20 bp, Artificial Sequence
  Description of Artificial Sequence: Synthetic oligonucleotide
  Target: SCNA; (-) strand; PAM type: NRG; PAM sequence: AAG
tgtaaattcttcctcagatt

SEQ ID NO: 22659 - DNA, 20 bp, Artificial Sequence
  Description of Artificial Sequence: Synthetic oligonucleotide
  Target: SCNA; (-) strand; PAM type: NRG; PAM sequence: CAG
gtagattgtaaattcttcct

SEQ ID NO: 22660 - DNA, 20 bp, Artificial Sequence
  Description of Artificial Sequence: Synthetic oligonucleotide
  Target: SCNA; (-) strand; PAM type: NRG; PAM sequence: TAG
cttgttttttcatgcctgtg

SEQ ID NO: 22661 - DNA, 20 bp, Artificial Sequence
  Description of Artificial Sequence: Synthetic oligonucleotide
  Target: SCNA; (-) strand; PAM type: NRG; PAM sequence: TGG
ggagacatgctttgtgacct

SEQ ID NO: 22662 - DNA, 20 bp, Artificial Sequence
  Description of Artificial Sequence: Synthetic oligonucleotide
  Target: SCNA; (-) strand; PAM type: NRG; PAM sequence: GAG
agtccttcgctagcactgag

SEQ ID NO: 22663 - DNA, 20 bp, Artificial Sequence
  Description of Artificial Sequence: Synthetic oligonucleotide
  Target: SCNA; (-) strand; PAM type: NRG; PAM sequence: AGG
atagtccttcgctagcactg

SEQ ID NO: 22664 - DNA, 20 bp, Artificial Sequence
  Description of Artificial Sequence: Synthetic oligonucleotide
  Target: SCNA; (-) strand; PAM type: NRG; PAM sequence: GAG
tatagtccttcgctagcact

SEQ ID NO: 22665 - DNA, 20 bp, Artificial Sequence
  Description of Artificial Sequence: Synthetic oligonucleotide
  Target: SCNA; (-) strand; PAM type: NRG; PAM sequence: TAG
cctattatatagtccttcgc

SEQ ID NO: 22666 - DNA, 20 bp, Artificial Sequence
  Description of Artificial Sequence: Synthetic oligonucleotide
  Target: SCNA; (-) strand; PAM type: NRG; PAM sequence: TAG
atttttgtgagcctattata

SEQ ID NO: 22667 - DNA, 20 bp, Artificial Sequence
  Description of Artificial Sequence: Synthetic oligonucleotide
  Target: SCNA; (-) strand; PAM type: NRG; PAM sequence: GAG
ttttaaacaaatatttttgt

SEQ ID NO: 22668 - DNA, 20 bp, Artificial Sequence
  Description of Artificial Sequence: Synthetic oligonucleotide
  Target: SCNA; (-) strand; PAM type: NRG; PAM sequence: GAG
taacttccacatagcattgt

SEQ ID NO: 22669 - DNA, 20 bp, Artificial Sequence
  Description of Artificial Sequence: Synthetic oligonucleotide
  Target: SCNA; (-) strand; PAM type: NRG; PAM sequence: TAG
ttattctaataacttccaca

SEQ ID NO: 22670 - DNA, 20 bp, Artificial Sequence
  Description of Artificial Sequence: Synthetic oligonucleotide
  Target: SCNA; (-) strand; PAM type: NRG; PAM sequence: GGG
gcaattaggaactgggaagg

SEQ ID NO: 22671 - DNA, 20 bp, Artificial Sequence
  Description of Artificial Sequence: Synthetic oligonucleotide
  Target: SCNA; (-) strand; PAM type: NRG; PAM sequence: GGG
tgcaattaggaactgggaag

SEQ ID NO: 22672 - DNA, 20 bp, Artificial Sequence
  Description of Artificial Sequence: Synthetic oligonucleotide
  Target: SCNA; (-) strand; PAM type: NRG; PAM sequence: GGG
atgcaattaggaactgggaa

SEQ ID NO: 22673 - DNA, 20 bp, Artificial Sequence
  Description of Artificial Sequence: Synthetic oligonucleotide
  Target: SCNA; (-) strand; PAM type: NRG; PAM sequence: AGG
aatgcaattaggaactggga

SEQ ID NO: 22674 - DNA, 20 bp, Artificial Sequence
  Description of Artificial Sequence: Synthetic oligonucleotide
  Target: SCNA; (-) strand; PAM type: NRG; PAM sequence: AAG
gaatgcaattaggaactggg

SEQ ID NO: 22675 - DNA, 20 bp, Artificial Sequence
  Description of Artificial Sequence: Synthetic oligonucleotide
  Target: SCNA; (-) strand; PAM type: NRG; PAM sequence: GGG
caggaatgcaattaggaact

SEQ ID NO: 22676 - DNA, 20 bp, Artificial Sequence
  Description of Artificial Sequence: Synthetic oligonucleotide
  Target: SCNA; (-) strand; PAM type: NRG; PAM sequence: TGG
ccaggaatgcaattaggaac

SEQ ID NO: 22677 - DNA, 20 bp, Artificial Sequence
  Description of Artificial Sequence: Synthetic oligonucleotide
  Target: SCNA; (-) strand; PAM type: NRG; PAM sequence: AGG
gatatgccaggaatgcaatt

SEQ ID NO: 22678 - DNA, 20 bp, Artificial Sequence
  Description of Artificial Sequence: Synthetic oligonucleotide
  Target: SCNA; (-) strand; PAM type: NRG; PAM sequence: TAG
agatatgccaggaatgcaat

SEQ ID NO: 22679 - DNA, 20 bp, Artificial Sequence
  Description of Artificial Sequence: Synthetic oligonucleotide
  Target: SCNA; (-) strand; PAM type: NRG; PAM sequence: AGG
taatgtacataagatatgcc

SEQ ID NO: 22680 - DNA, 20 bp, Artificial Sequence
  Description of Artificial Sequence: Synthetic oligonucleotide
  Target: SCNA; (-) strand; PAM type: NRG; PAM sequence: CAG
ttaatgtacataagatatgc

SEQ ID NO: 22681 - DNA, 20 bp, Artificial Sequence
  Description of Artificial Sequence: Synthetic oligonucleotide
  Target: SCNA; (-) strand; PAM type: NRG; PAM sequence: AAG
aattatagattaatgtacat

SEQ ID NO: 22682 - DNA, 20 bp, Artificial Sequence
  Description of Artificial Sequence: Synthetic oligonucleotide
  Target: SCNA; (-) strand; PAM type: NRG; PAM sequence: TAG
gttaatgtttcatttaatta

SEQ ID NO: 22683 - DNA, 20 bp, Artificial Sequence
  Description of Artificial Sequence: Synthetic oligonucleotide
  Target: SCNA; (-) strand; PAM type: NRG; PAM sequence: CAG
taaagtagccattaataaag

SEQ ID NO: 22684 - DNA, 20 bp, Artificial Sequence
  Description of Artificial Sequence: Synthetic oligonucleotide
  Target: SCNA; (-) strand; PAM type: NRG; PAM sequence: AAG
ttctaaagtagccattaata

SEQ ID NO: 22685 - DNA, 20 bp, Artificial Sequence
  Description of Artificial Sequence: Synthetic oligonucleotide
  Target: SCNA; (-) strand; PAM type: NRG; PAM sequence: TAG
tgaatgcactccttctaaag

SEQ ID NO: 22686 - DNA, 20 bp, Artificial Sequence
  Description of Artificial Sequence: Synthetic oligonucleotide
  Target: SCNA; (-) strand; PAM type: NRG; PAM sequence: AAG
taatgaatgcactccttcta

SEQ ID NO: 22687 - DNA, 20 bp, Artificial Sequence
  Description of Artificial Sequence: Synthetic oligonucleotide
  Target: SCNA; (-) strand; PAM type: NRG; PAM sequence: GGG
atgtgaatgtaagatttatg

SEQ ID NO: 22688 - DNA, 20 bp, Artificial Sequence
  Description of Artificial Sequence: Synthetic oligonucleotide
  Target: SCNA; (-) strand; PAM type: NRG; PAM sequence: GGG
tatgtgaatgtaagatttat

SEQ ID NO: 22689 - DNA, 20 bp, Artificial Sequence
  Description of Artificial Sequence: Synthetic oligonucleotide
  Target: SCNA; (-) strand; PAM type: NRG; PAM sequence: TGG
atatgtgaatgtaagattta

SEQ ID NO: 22690 - DNA, 20 bp, Artificial Sequence
  Description of Artificial Sequence: Synthetic oligonucleotide
  Target: SCNA; (-) strand; PAM type: NRG; PAM sequence: AAG
gaatccaaatatgtgaatgt

SEQ ID NO: 22691 - DNA, 20 bp, Artificial Sequence
  Description of Artificial Sequence: Synthetic oligonucleotide
  Target: SCNA; (-) strand; PAM type: NRG; PAM sequence: CAG
tgtgccacttgggtaaaact

SEQ ID NO: 22692 - DNA, 20 bp, Artificial Sequence
  Description of Artificial Sequence: Synthetic oligonucleotide
  Target: SCNA; (-) strand; PAM type: NRG; PAM sequence: GGG
attatggttgtgtgccactt

SEQ ID NO: 22693 - DNA, 20 bp, Artificial Sequence
  Description of Artificial Sequence: Synthetic oligonucleotide
  Target: SCNA; (-) strand; PAM type: NRG; PAM sequence: TGG
aattatggttgtgtgccact

SEQ ID NO: 22694 - DNA, 20 bp, Artificial Sequence
  Description of Artificial Sequence: Synthetic oligonucleotide
  Target: SCNA; (-) strand; PAM type: NRG; PAM sequence: TGG
ttcacctgtcctacaaatta

SEQ ID NO: 22695 - DNA, 20 bp, Artificial Sequence
  Description of Artificial Sequence: Synthetic oligonucleotide
  Target: SCNA; (-) strand; PAM type: NRG; PAM sequence: AGG
agatacagtaccagaatagt

SEQ ID NO: 22696 - DNA, 20 bp, Artificial Sequence
  Description of Artificial Sequence: Synthetic oligonucleotide
  Target: SCNA; (-) strand; PAM type: NRG; PAM sequence: TAG
tagatacagtaccagaatag

SEQ ID NO: 22697 - DNA, 20 bp, Artificial Sequence
  Description of Artificial Sequence: Synthetic oligonucleotide
  Target: SCNA; (-) strand; PAM type: NRG; PAM sequence: TAG
gtctagatacagtaccagaa

SEQ ID NO: 22698 - DNA, 20 bp, Artificial Sequence
  Description of Artificial Sequence: Synthetic oligonucleotide
  Target: SCNA; (-) strand; PAM type: NRG; PAM sequence: CAG
gctcagtctagatacagtac

SEQ ID NO: 22699 - DNA, 20 bp, Artificial Sequence
  Description of Artificial Sequence: Synthetic oligonucleotide
  Target: SCNA; (-) strand; PAM type: NRG; PAM sequence: CAG
tgtaaagctcagtctagata

SEQ ID NO: 22700 - DNA, 20 bp, Artificial Sequence
  Description of Artificial Sequence: Synthetic oligonucleotide
  Target: SCNA; (-) strand; PAM type: NRG; PAM sequence: TAG
aaaatatgtaaagctcagtc

SEQ ID NO: 22701 - DNA, 20 bp, Artificial Sequence
  Description of Artificial Sequence: Synthetic oligonucleotide
  Target: SCNA; (-) strand; PAM type: NRG; PAM sequence: CAG
tattaaaaatatgtaaagct

SEQ ID NO: 22702 - DNA, 20 bp, Artificial Sequence
  Description of Artificial Sequence: Synthetic oligonucleotide
  Target: SCNA; (-) strand; PAM type: NRG; PAM sequence: AAG
aaagctattaaaaatatgta

SEQ ID NO: 22703 - DNA, 20 bp, Artificial Sequence
  Description of Artificial Sequence: Synthetic oligonucleotide
  Target: SCNA; (-) strand; PAM type: NRG; PAM sequence: AAG
gtctcaaaaaaaaaaaaaaa

SEQ ID NO: 22704 - DNA, 20 bp, Artificial Sequence
  Description of Artificial Sequence: Synthetic oligonucleotide
  Target: SCNA; (-) strand; PAM type: NRG; PAM sequence: AGG
ccagcctgggtgacagagca

SEQ ID NO: 22705 - DNA, 20 bp, Artificial Sequence
  Description of Artificial Sequence: Synthetic oligonucleotide
  Target: SCNA; (-) strand; PAM type: NRG; PAM sequence: AAG
tccagcctgggtgacagagc

SEQ ID NO: 22706 - DNA, 20 bp, Artificial Sequence
  Description of Artificial Sequence: Synthetic oligonucleotide
  Target: SCNA; (-) strand; PAM type: NRG; PAM sequence: GAG
gcactccagcctgggtgaca

SEQ ID NO: 22707 - DNA, 20 bp, Artificial Sequence
  Description of Artificial Sequence: Synthetic oligonucleotide
  Target: SCNA; (-) strand; PAM type: NRG; PAM sequence: CAG
ctgcactccagcctgggtga

SEQ ID NO: 22708 - DNA, 20 bp, Artificial Sequence
  Description of Artificial Sequence: Synthetic oligonucleotide
  Target: SCNA; (-) strand; PAM type: NRG; PAM sequence: GGG
acgccactgcactccagcct

SEQ ID NO: 22709 - DNA, 20 bp, Artificial Sequence
  Description of Artificial Sequence: Synthetic oligonucleotide
  Target: SCNA; (-) strand; PAM type: NRG; PAM sequence: TGG
tacgccactgcactccagcc

SEQ ID NO: 22710 - DNA, 20 bp, Artificial Sequence
  Description of Artificial Sequence: Synthetic oligonucleotide
  Target: SCNA; (-) strand; PAM type: NRG; PAM sequence: CAG
gagattacgccactgcactc

SEQ ID NO: 22711 - DNA, 20 bp, Artificial Sequence
  Description of Artificial Sequence: Synthetic oligonucleotide
  Target: SCNA; (-) strand; PAM type: NRG; PAM sequence: GAG
ggtggaggttgcagtagggt

SEQ ID NO: 22712 - DNA, 20 bp, Artificial Sequence
  Description of Artificial Sequence: Synthetic oligonucleotide
  Target: SCNA; (-) strand; PAM type: NRG; PAM sequence: GGG
agaaggtggaggttgcagta

SEQ ID NO: 22713 - DNA, 20 bp, Artificial Sequence
  Description of Artificial Sequence: Synthetic oligonucleotide
  Target: SCNA; (-) strand; PAM type: NRG; PAM sequence: AGG
cagaaggtggaggttgcagt

SEQ ID NO: 22714 - DNA, 20 bp, Artificial Sequence
  Description of Artificial Sequence: Synthetic oligonucleotide
  Target: SCNA; (-) strand; PAM type: NRG; PAM sequence: TAG
tcagaaggtggaggttgcag

SEQ ID NO: 22715 - DNA, 20 bp, Artificial Sequence
  Description of Artificial Sequence: Synthetic oligonucleotide
  Target: SCNA; (-) strand; PAM type: NRG; PAM sequence: CAG
aactcagaaggtggaggttg

SEQ ID NO: 22716 - DNA, 20 bp, Artificial Sequence
  Description of Artificial Sequence: Synthetic oligonucleotide
  Target: SCNA; (-) strand; PAM type: NRG; PAM sequence: AGG
cgcctgaactcagaaggtgg

SEQ ID NO: 22717 - DNA, 20 bp, Artificial Sequence
  Description of Artificial Sequence: Synthetic oligonucleotide
  Target: SCNA; (-) strand; PAM type: NRG; PAM sequence: GAG
tcgcctgaactcagaaggtg

SEQ ID NO: 22718 - DNA, 20 bp, Artificial Sequence
  Description of Artificial Sequence: Synthetic oligonucleotide
  Target: SCNA; (-) strand; PAM type: NRG; PAM sequence: TGG
aatcgcctgaactcagaagg

SEQ ID NO: 22719 - DNA, 20 bp, Artificial Sequence
  Description of Artificial Sequence: Synthetic oligonucleotide
  Target: SCNA; (-) strand; PAM type: NRG; PAM sequence: AGG
gagaatcgcctgaactcaga

SEQ ID NO: 22720 - DNA, 20 bp, Artificial Sequence
  Description of Artificial Sequence: Synthetic oligonucleotide
  Target: SCNA; (-) strand; PAM type: NRG; PAM sequence: AAG
tgagaatcgcctgaactcag

SEQ ID NO: 22721 - DNA, 20 bp, Artificial Sequence
  Description of Artificial Sequence: Synthetic oligonucleotide
  Target: SCNA; (-) strand; PAM type: NRG; PAM sequence: CAG
gcatgagaatcgcctgaact

SEQ ID NO: 22722 - DNA, 20 bp, Artificial Sequence
  Description of Artificial Sequence: Synthetic oligonucleotide
  Target: SCNA; (-) strand; PAM type: NRG; PAM sequence: GAG
tactcgggagactgaggcat

SEQ ID NO: 22723 - DNA, 20 bp, Artificial Sequence
  Description of Artificial Sequence: Synthetic oligonucleotide
  Target: SCNA; (-) strand; PAM type: NRG; PAM sequence: AGG
cacaactactcgggagactg

SEQ ID NO: 22724 - DNA, 20 bp, Artificial Sequence
  Description of Artificial Sequence: Synthetic oligonucleotide
  Target: SCNA; (-) strand; PAM type: NRG; PAM sequence: GAG
tcacaactactcgggagact

SEQ ID NO: 22725 - DNA, 20 bp, Artificial Sequence
  Description of Artificial Sequence: Synthetic oligonucleotide
  Target: SCNA; (-) strand; PAM type: NRG; PAM sequence: GAG
ttgtaatcacaactactcgg

SEQ ID NO: 22726 - DNA, 20 bp, Artificial Sequence
  Description of Artificial Sequence: Synthetic oligonucleotide
  Target: SCNA; (-) strand; PAM type: NRG; PAM sequence: GGG
gcttgtaatcacaactactc

SEQ ID NO: 22727 - DNA, 20 bp, Artificial Sequence
  Description of Artificial Sequence: Synthetic oligonucleotide
  Target: SCNA; (-) strand; PAM type: NRG; PAM sequence: CGG
tgcttgtaatcacaactact

SEQ ID NO: 22728 - DNA, 20 bp, Artificial Sequence
  Description of Artificial Sequence: Synthetic oligonucleotide
  Target: SCNA; (-) strand; PAM type: NRG; PAM sequence: CGG
aaagaaaagaaagacagatg

SEQ ID NO: 22729 - DNA, 20 bp, Artificial Sequence
  Description of Artificial Sequence: Synthetic oligonucleotide
  Target: SCNA; (-) strand; PAM type: NRG; PAM sequence: CAG
agaaagaaagaaaagaaaga

SEQ ID NO: 22730 - DNA, 20 bp, Artificial Sequence
  Description of Artificial Sequence: Synthetic oligonucleotide
  Target: SCNA; (-) strand; PAM type: NRG; PAM sequence: AAG
agaaagaaagaaagaaaaga

SEQ ID NO: 22731 - DNA, 20 bp, Artificial Sequence
  Description of Artificial Sequence: Synthetic oligonucleotide
  Target: SCNA; (-) strand; PAM type: NRG; PAM sequence: AAG
agaaagaaagaaagaaagaa

SEQ ID NO: 22732 - DNA, 20 bp, Artificial Sequence
  Description of Artificial Sequence: Synthetic oligonucleotide
  Target: SCNA; (-) strand; PAM type: NRG; PAM sequence: AAG
aagaaagaaagaaagaaaga

SEQ ID NO: 22733 - DNA, 20 bp, Artificial Sequence
  Description of Artificial Sequence: Synthetic oligonucleotide
  Target: SCNA; (-) strand; PAM type: NRG; PAM sequence: AAG
gaaaaagaaagaaagaaaga

SEQ ID NO: 22734 - DNA, 20 bp, Artificial Sequence
  Description of Artificial Sequence: Synthetic oligonucleotide
  Target: SCNA; (-) strand; PAM type: NRG; PAM sequence: AAG
gaaagaaaaagaaagaaaga

SEQ ID NO: 22735 - DNA, 20 bp, Artificial Sequence
  Description of Artificial Sequence: Synthetic oligonucleotide
  Target: SCNA; (-) strand; PAM type: NRG; PAM sequence: AAG
gaaagaaagaaaaagaaaga

SEQ ID NO: 22736 - DNA, 20 bp, Artificial Sequence
  Description of Artificial Sequence: Synthetic oligonucleotide
  Target: SCNA; (-) strand; PAM type: NRG; PAM sequence: AAG
gaaagaaagaaagaaaaaga

SEQ ID NO: 22737 - DNA, 20 bp, Artificial Sequence
  Description of Artificial Sequence: Synthetic oligonucleotide
  Target: SCNA; (-) strand; PAM type: NRG; PAM sequence: AAG
gagagaaagaaagaaagaaa

SEQ ID NO: 22738 - DNA, 20 bp, Artificial Sequence
  Description of Artificial Sequence: Synthetic oligonucleotide
  Target: SCNA; (-) strand; PAM type: NRG; PAM sequence: AAG
cagaaagagagaaagaaaga

SEQ ID NO: 22739 - DNA, 20 bp, Artificial Sequence
  Description of Artificial Sequence: Synthetic oligonucleotide
  Target: SCNA; (-) strand; PAM type: NRG; PAM sequence: AAG
gaaacagaaagagagaaaga

SEQ ID NO: 22740 - DNA, 20 bp, Artificial Sequence
  Description of Artificial Sequence: Synthetic oligonucleotide
  Target: SCNA; (-) strand; PAM type: NRG; PAM sequence: AAG
gaaagaaacagaaagagaga

SEQ ID NO: 22741 - DNA, 20 bp, Artificial Sequence
  Description of Artificial Sequence: Synthetic oligonucleotide
  Target: SCNA; (-) strand; PAM type: NRG; PAM sequence: GAG
gaaagaaagaaacagaaaga

SEQ ID NO: 22742 - DNA, 20 bp, Artificial Sequence
  Description of Artificial Sequence: Synthetic oligonucleotide
  Target: SCNA; (-) strand; PAM type: NRG; PAM sequence: GAG
aggaaagaaagaaacagaaa

SEQ ID NO: 22743 - DNA, 20 bp, Artificial Sequence
  Description of Artificial Sequence: Synthetic oligonucleotide
  Target: SCNA; (-) strand; PAM type: NRG; PAM sequence: AAG
gaaggaaagaaagaaacaga

SEQ ID NO: 22744 - DNA, 20 bp, Artificial Sequence
  Description of Artificial Sequence: Synthetic oligonucleotide
  Target: SCNA; (-) strand; PAM type: NRG; PAM sequence: CAG
gaaagaaggaaagaaagaaa

SEQ ID NO: 22745 - DNA, 20 bp, Artificial Sequence
  Description of Artificial Sequence: Synthetic oligonucleotide
  Target: SCNA; (-) strand; PAM type: NRG; PAM sequence: AAG
gagaaagaaagaaggaaaga

SEQ ID NO: 22746 - DNA, 20 bp, Artificial Sequence
  Description of Artificial Sequence: Synthetic oligonucleotide
  Target: SCNA; (-) strand; PAM type: NRG; PAM sequence: AAG
aagagagaaagaaagaagga

SEQ ID NO: 22747 - DNA, 20 bp, Artificial Sequence
  Description of Artificial Sequence: Synthetic oligonucleotide
  Target: SCNA; (-) strand; PAM type: NRG; PAM sequence: AGG
gagaaagagagaaagaaaga

SEQ ID NO: 22748 - DNA, 20 bp, Artificial Sequence
  Description of Artificial Sequence: Synthetic oligonucleotide
  Target: SCNA; (-) strand; PAM type: NRG; PAM sequence: AAG
agagaaagagagaaagaaag

SEQ ID NO: 22749 - DNA, 20 bp, Artificial Sequence
  Description of Artificial Sequence: Synthetic oligonucleotide
  Target: SCNA; (-) strand; PAM type: NRG; PAM sequence: AAG
gaaagagaaagagagaaaga

SEQ ID NO: 22750 - DNA, 20 bp, Artificial Sequence
  Description of Artificial Sequence: Synthetic oligonucleotide
  Target: SCNA; (-) strand; PAM type: NRG; PAM sequence: AAG
gaaagaaagagaaagagaga

SEQ ID NO: 22751 - DNA, 20 bp, Artificial Sequence
  Description of Artificial Sequence: Synthetic oligonucleotide
  Target: SCNA; (-) strand; PAM type: NRG; PAM sequence: GAG
aaaagaaagaaagagaaaga

SEQ ID NO: 22752 - DNA, 20 bp, Artificial Sequence
  Description of Artificial Sequence: Synthetic oligonucleotide
  Target: SCNA; (-) strand; PAM type: NRG; PAM sequence: GAG
agaaaagaaagaaagagaaa

SEQ ID NO: 22753 - DNA, 20 bp, Artificial Sequence
  Description of Artificial Sequence: Synthetic oligonucleotide
  Target: SCNA; (-) strand; PAM type: NRG; PAM sequence: AAG
gaagaaaagaaagaaagaga

SEQ ID NO: 22754 - DNA, 20 bp, Artificial Sequence
  Description of Artificial Sequence: Synthetic oligonucleotide
  Target: SCNA; (-) strand; PAM type: NRG; PAM sequence: GAG
gaaagaagaaaagaaagaaa

SEQ ID NO: 22755 - DNA, 20 bp, Artificial Sequence
  Description of Artificial Sequence: Synthetic oligonucleotide
  Target: SCNA; (-) strand; PAM type: NRG; PAM sequence: AAG
aagaaagaagaaaagaaaga

SEQ ID NO: 22756 - DNA, 20 bp, Artificial Sequence
  Description of Artificial Sequence: Synthetic oligonucleotide
  Target: SCNA; (-) strand; PAM type: NRG; PAM sequence: AAG
aagaaagaaagaagaaaaga

SEQ ID NO: 22757 - DNA, 20 bp, Artificial Sequence
  Description of Artificial Sequence: Synthetic oligonucleotide
  Target: SCNA; (-) strand; PAM type: NRG; PAM sequence: AAG
aggaaagaaagaaagaagaa

SEQ ID NO: 22758 - DNA, 20 bp, Artificial Sequence
  Description of Artificial Sequence: Synthetic oligonucleotide
  Target: SCNA; (-) strand; PAM type: NRG; PAM sequence: AAG
aagaaaggaaagaaagaaag

SEQ ID NO: 22759 - DNA, 20 bp, Artificial Sequence
  Description of Artificial Sequence: Synthetic oligonucleotide
  Target: SCNA; (-) strand; PAM type: NRG; PAM sequence: AAG
agaaagaaaggaaagaaaga

SEQ ID NO: 22760 - DNA, 20 bp, Artificial Sequence
  Description of Artificial Sequence: Synthetic oligonucleotide
  Target: SCNA; (-) strand; PAM type: NRG; PAM sequence: AAG
taaaagaaagaaaggaaaga

SEQ ID NO: 22761 - DNA, 20 bp, Artificial Sequence
  Description of Artificial Sequence: Synthetic oligonucleotide
  Target: SCNA; (-) strand; PAM type: NRG; PAM sequence: AAG
gaaataaaagaaagaaagga

SEQ ID NO: 22762 - DNA, 20 bp, Artificial Sequence
  Description of Artificial Sequence: Synthetic oligonucleotide
  Target: SCNA; (-) strand; PAM type: NRG; PAM sequence: AGG
agaagaaataaaagaaagaa

SEQ ID NO: 22763 - DNA, 20 bp, Artificial Sequence
  Description of Artificial Sequence: Synthetic oligonucleotide
  Target: SCNA; (-) strand; PAM type: NRG; PAM sequence: AAG
cagaagaaataaaagaaaga

SEQ ID NO: 22764 - DNA, 20 bp, Artificial Sequence
  Description of Artificial Sequence: Synthetic oligonucleotide
  Target: SCNA; (-) strand; PAM type: NRG; PAM sequence: AAG
agaacagaagaaataaaaga

SEQ ID NO: 22765 - DNA, 20 bp, Artificial Sequence
  Description of Artificial Sequence: Synthetic oligonucleotide
  Target: SCNA; (-) strand; PAM type: NRG; PAM sequence: AAG
agaaagaacagaagaaataa

SEQ ID NO: 22766 - DNA, 20 bp, Artificial Sequence
  Description of Artificial Sequence: Synthetic oligonucleotide
  Target: SCNA; (-) strand; PAM type: NRG; PAM sequence: AAG
agaaaagaaagaaagaacag

SEQ ID NO: 22767 - DNA, 20 bp, Artificial Sequence
  Description of Artificial Sequence: Synthetic oligonucleotide
  Target: SCNA; (-) strand; PAM type: NRG; PAM sequence: CAG
gaaagaaaagaaagaaagaa

SEQ ID NO: 22768 - DNA, 20 bp, Artificial Sequence
  Description of Artificial Sequence: Synthetic oligonucleotide
  Target: SCNA; (-) strand; PAM type: NRG; PAM sequence: AAG
agaaagaaagaaaagaaaga

SEQ ID NO: 22769 - DNA, 20 bp, Artificial Sequence
  Description of Artificial Sequence: Synthetic oligonucleotide
  Target: SCNA; (-) strand; PAM type: NRG; PAM sequence: AAG
aaaaagaaagaaagaaaaga

SEQ ID NO: 22770 - DNA, 20 bp, Artificial Sequence
  Description of Artificial Sequence: Synthetic oligonucleotide
  Target: SCNA; (-) strand; PAM type: NRG; PAM sequence: AAG
aaaaaaaaagaaagaaagaa

SEQ ID NO: 22771 - DNA, 20 bp, Artificial Sequence
  Description of Artificial Sequence: Synthetic oligonucleotide
  Target: SCNA; (-) strand; PAM type: NRG; PAM sequence: AAG
caaaaaaaaaaaaagaaaga

SEQ ID NO: 22772 - DNA, 20 bp, Artificial Sequence
  Description of Artificial Sequence: Synthetic oligonucleotide
  Target: SCNA; (-) strand; PAM type: NRG; PAM sequence: AAG
aatacaaaaaaaaaaaaaga

SEQ ID NO: 22773 - DNA, 20 bp, Artificial Sequence
  Description of Artificial Sequence: Synthetic oligonucleotide
  Target: SCNA; (-) strand; PAM type: NRG; PAM sequence: AAG
taaaaatacaaaaaaaaaaa

SEQ ID NO: 22774 - DNA, 20 bp, Artificial Sequence
  Description of Artificial Sequence: Synthetic oligonucleotide
  Target: SCNA; (-) strand; PAM type: NRG; PAM sequence: TGG
cgagaccagcctggccaaca

SEQ ID NO: 22775 - DNA, 20 bp, Artificial Sequence
  Description of Artificial Sequence: Synthetic oligonucleotide
  Target: SCNA; (-) strand; PAM type: NRG; PAM sequence: TGG
ccaggagttcgagaccagcc

SEQ ID NO: 22776 - DNA, 20 bp, Artificial Sequence
  Description of Artificial Sequence: Synthetic oligonucleotide
  Target: SCNA; (-) strand; PAM type: NRG; PAM sequence: CAG
tgaggccaggagttcgagac

SEQ ID NO: 22777 - DNA, 20 bp, Artificial Sequence
  Description of Artificial Sequence: Synthetic oligonucleotide
  Target: SCNA; (-) strand; PAM type: NRG; PAM sequence: GAG
tcacttgaggccaggagttc

SEQ ID NO: 22778 - DNA, 20 bp, Artificial Sequence
  Description of Artificial Sequence: Synthetic oligonucleotide
  Target: SCNA; (-) strand; PAM type: NRG; PAM sequence: GAG
ctcagatcacttgaggccag

SEQ ID NO: 22779 - DNA, 20 bp, Artificial Sequence
  Description of Artificial Sequence: Synthetic oligonucleotide
  Target: SCNA; (-) strand; PAM type: NRG; PAM sequence: AGG
ccctcagatcacttgaggcc

SEQ ID NO: 22780 - DNA, 20 bp, Artificial Sequence
  Description of Artificial Sequence: Synthetic oligonucleotide
  Target: SCNA; (-) strand; PAM type: NRG; PAM sequence: CAG
accctcagatcacttgaggc

SEQ ID NO: 22781 - DNA, 20 bp, Artificial Sequence
  Description of Artificial Sequence: Synthetic oligonucleotide
  Target: SCNA; (-) strand; PAM type: NRG; PAM sequence: AGG
caagaccctcagatcacttg

SEQ ID NO: 22782 - DNA, 20 bp, Artificial Sequence
  Description of Artificial Sequence: Synthetic oligonucleotide
  Target: SCNA; (-) strand; PAM type: NRG; PAM sequence: GAG
tcaagaccctcagatcactt

SEQ ID NO: 22783 - DNA, 20 bp, Artificial Sequence
  Description of Artificial Sequence: Synthetic oligonucleotide
  Target: SCNA; (-) strand; PAM type: NRG; PAM sequence: CAG
ctttgggaagtcaagaccct

SEQ ID NO: 22784 - DNA, 20 bp, Artificial Sequence
  Description of Artificial Sequence: Synthetic oligonucleotide
  Target: SCNA; (-) strand; PAM type: NRG; PAM sequence: AAG
tctcagcactttgggaagtc

SEQ ID NO: 22785 - DNA, 20 bp, Artificial Sequence
  Description of Artificial Sequence: Synthetic oligonucleotide
  Target: SCNA; (-) strand; PAM type: NRG; PAM sequence: AAG
agtaatctcagcactttggg

SEQ ID NO: 22786 - DNA, 20 bp, Artificial Sequence
  Description of Artificial Sequence: Synthetic oligonucleotide
  Target: SCNA; (-) strand; PAM type: NRG; PAM sequence: GGG
accagtaatctcagcacttt

SEQ ID NO: 22787 - DNA, 20 bp, Artificial Sequence
  Description of Artificial Sequence: Synthetic oligonucleotide
  Target: SCNA; (-) strand; PAM type: NRG; PAM sequence: TGG
taccagtaatctcagcactt

SEQ ID NO: 22788 - DNA, 20 bp, Artificial Sequence
  Description of Artificial Sequence: Synthetic oligonucleotide
  Target: SCNA; (-) strand; PAM type: NRG; PAM sequence: CAG
atggcttataccagtaatct

SEQ ID NO: 22789 - DNA, 20 bp, Artificial Sequence
  Description of Artificial Sequence: Synthetic oligonucleotide
  Target: SCNA; (-) strand; PAM type: NRG; PAM sequence: CAG
tcaggtgtgatggcttatac

SEQ ID NO: 22790 - DNA, 20 bp, Artificial Sequence
  Description of Artificial Sequence: Synthetic oligonucleotide
  Target: SCNA; (-) strand; PAM type: NRG; PAM sequence: TGG
aagctattggtcaggtgtga

SEQ ID NO: 22791 - DNA, 20 bp, Artificial Sequence
  Description of Artificial Sequence: Synthetic oligonucleotide
  Target: SCNA; (-) strand; PAM type: NRG; PAM sequence: AGG
aaaaatacaagctattggtc

SEQ ID NO: 22792 - DNA, 20 bp, Artificial Sequence
  Description of Artificial Sequence: Synthetic oligonucleotide
  Target: SCNA; (-) strand; PAM type: NRG; PAM sequence: CAG
caaaaatacaagctattggt

SEQ ID NO: 22793 - DNA, 20 bp, Artificial Sequence
  Description of Artificial Sequence: Synthetic oligonucleotide
  Target: SCNA; (-) strand; PAM type: NRG; PAM sequence: TGG
ctttcaaaaatacaagctat

SEQ ID NO: 22794 - DNA, 20 bp, Artificial Sequence
  Description of Artificial Sequence: Synthetic oligonucleotide
  Target: SCNA; (-) strand; PAM type: NRG; PAM sequence: AAG
aaaacttctttcaaaaatac

SEQ ID NO: 22795 - DNA, 20 bp, Artificial Sequence
  Description of Artificial Sequence: Synthetic oligonucleotide
  Target: SCNA; (-) strand; PAM type: NRG; PAM sequence: CAG
atgggaatgcactgtaatct

SEQ ID NO: 22796 - DNA, 20 bp, Artificial Sequence
  Description of Artificial Sequence: Synthetic oligonucleotide
  Target: SCNA; (-) strand; PAM type: NRG; PAM sequence: GGG
ggaagggtaatggagtatat

SEQ ID NO: 22797 - DNA, 20 bp, Artificial Sequence
  Description of Artificial Sequence: Synthetic oligonucleotide
  Target: SCNA; (-) strand; PAM type: NRG; PAM sequence: TGG
gggaagggtaatggagtata

SEQ ID NO: 22798 - DNA, 20 bp, Artificial Sequence
  Description of Artificial Sequence: Synthetic oligonucleotide
  Target: SCNA; (-) strand; PAM type: NRG; PAM sequence: GAG
gaattgggggaagggtaatg

SEQ ID NO: 22799 - DNA, 20 bp, Artificial Sequence
  Description of Artificial Sequence: Synthetic oligonucleotide
  Target: SCNA; (-) strand; PAM type: NRG; PAM sequence: TGG
gggaattgggggaagggtaa

SEQ ID NO: 22800 - DNA, 20 bp, Artificial Sequence
  Description of Artificial Sequence: Synthetic oligonucleotide
  Target: SCNA; (-) strand; PAM type: NRG; PAM sequence: GGG
taataggggaattgggggaa

SEQ ID NO: 22801 - DNA, 20 bp, Artificial Sequence
  Description of Artificial Sequence: Synthetic oligonucleotide
  Target: SCNA; (-) strand; PAM type: NRG; PAM sequence: AGG
ataataggggaattggggga

SEQ ID NO: 22802 - DNA, 20 bp, Artificial Sequence
  Description of Artificial Sequence: Synthetic oligonucleotide
  Target: SCNA; (-) strand; PAM type: NRG; PAM sequence: AAG
aataataggggaattggggg

SEQ ID NO: 22803 - DNA, 20 bp, Artificial Sequence
  Description of Artificial Sequence: Synthetic oligonucleotide
  Target: SCNA; (-) strand; PAM type: NRG; PAM sequence: GGG
tataataataggggaattgg

SEQ ID NO: 22804 - DNA, 20 bp, Artificial Sequence
  Description of Artificial Sequence: Synthetic oligonucleotide
  Target: SCNA; (-) strand; PAM type: NRG; PAM sequence: GGG
ttataataataggggaattg

SEQ ID NO: 22805 - DNA, 20 bp, Artificial Sequence
  Description of Artificial Sequence: Synthetic oligonucleotide
  Target: SCNA; (-) strand; PAM type: NRG; PAM sequence: GGG
attataataataggggaatt

SEQ ID NO: 22806 - DNA, 20 bp, Artificial Sequence
  Description of Artificial Sequence: Synthetic oligonucleotide
  Target: SCNA; (-) strand; PAM type: NRG; PAM sequence: TGG
aattataataataggggaat

SEQ ID NO: 22807 - DNA, 20 bp, Artificial Sequence
  Description of Artificial Sequence: Synthetic oligonucleotide
  Target: SCNA; (-) strand; PAM type: NRG; PAM sequence: GGG
atgcaaaattataataatag

SEQ ID NO: 22808 - DNA, 20 bp, Artificial Sequence
  Description of Artificial Sequence: Synthetic oligonucleotide
  Target: SCNA; (-) strand; PAM type: NRG; PAM sequence: GGG
aatgcaaaattataataata

SEQ ID NO: 22809 - DNA, 20 bp, Artificial Sequence
  Description of Artificial Sequence: Synthetic oligonucleotide
  Target: SCNA; (-) strand; PAM type: NRG; PAM sequence: AGG
taatgcaaaattataataat

SEQ ID NO: 22810 - DNA, 20 bp, Artificial Sequence
  Description of Artificial Sequence: Synthetic oligonucleotide
  Target: SCNA; (-) strand; PAM type: NRG; PAM sequence: TAG
ctaatgcaaaattataataa

SEQ ID NO: 22811 - DNA, 20 bp, Artificial Sequence
  Description of Artificial Sequence: Synthetic oligonucleotide
  Target: SCNA; (-) strand; PAM type: NRG; PAM sequence: AAG
aggtatcaatgttatttcat

SEQ ID NO: 22812 - DNA, 20 bp, Artificial Sequence
  Description of Artificial Sequence: Synthetic oligonucleotide
  Target: SCNA; (-) strand; PAM type: NRG; PAM sequence: AGG
tatggactttagttgtaata

SEQ ID NO: 22813 - DNA, 20 bp, Artificial Sequence
  Description of Artificial Sequence: Synthetic oligonucleotide
  Target: SCNA; (-) strand; PAM type: NRG; PAM sequence: AAG
ctatggactttagttgtaat

SEQ ID NO: 22814 - DNA, 20 bp, Artificial Sequence
  Description of Artificial Sequence: Synthetic oligonucleotide
  Target: SCNA; (-) strand; PAM type: NRG; PAM sequence: TAG
ctaatataaactatggactt

SEQ ID NO: 22815 - DNA, 20 bp, Artificial Sequence
  Description of Artificial Sequence: Synthetic oligonucleotide
  Target: SCNA; (-) strand; PAM type: NRG; PAM sequence: TGG
gtgaattctaatataaacta

SEQ ID NO: 22816 - DNA, 20 bp, Artificial Sequence
  Description of Artificial Sequence: Synthetic oligonucleotide
  Target: SCNA; (-) strand; PAM type: NRG; PAM sequence: GAG
actcagaattttacaataca

SEQ ID NO: 22817 - DNA, 20 bp, Artificial Sequence
  Description of Artificial Sequence: Synthetic oligonucleotide
  Target: SCNA; (-) strand; PAM type: NRG; PAM sequence: CAG
aaactcagaattttacaata

SEQ ID NO: 22818 - DNA, 20 bp, Artificial Sequence
  Description of Artificial Sequence: Synthetic oligonucleotide
  Target: SCNA; (-) strand; PAM type: NRG; PAM sequence: CAG
cttatacctttgttaaaact

SEQ ID NO: 22819 - DNA, 20 bp, Artificial Sequence
  Description of Artificial Sequence: Synthetic oligonucleotide
  Target: SCNA; (-) strand; PAM type: NRG; PAM sequence: TGG
tctctatgatactgtcatgg

SEQ ID NO: 22820 - DNA, 20 bp, Artificial Sequence
  Description of Artificial Sequence: Synthetic oligonucleotide
  Target: SCNA; (-) strand; PAM type: NRG; PAM sequence: TGG
tattctctatgatactgtca

SEQ ID NO: 22821 - DNA, 20 bp, Artificial Sequence
  Description of Artificial Sequence: Synthetic oligonucleotide
  Target: SCNA; (-) strand; PAM type: NRG; PAM sequence: CAG
agcacatggcatgtttagga

SEQ ID NO: 22822 - DNA, 20 bp, Artificial Sequence
  Description of Artificial Sequence: Synthetic oligonucleotide
  Target: SCNA; (-) strand; PAM type: NRG; PAM sequence: AGG
gtgaagcacatggcatgttt

SEQ ID NO: 22823 - DNA, 20 bp, Artificial Sequence
  Description of Artificial Sequence: Synthetic oligonucleotide
  Target: SCNA; (-) strand; PAM type: NRG; PAM sequence: TAG
ggtgaagcacatggcatgtt

SEQ ID NO: 22824 - DNA, 20 bp, Artificial Sequence
  Description of Artificial Sequence: Synthetic oligonucleotide
  Target: SCNA; (-) strand; PAM type: NRG; PAM sequence: TGG
ggatgaatgggtgaagcaca

SEQ ID NO: 22825 - DNA, 20 bp, Artificial Sequence
  Description of Artificial Sequence: Synthetic oligonucleotide
  Target: SCNA; (-) strand; PAM type: NRG; PAM sequence: AAG
tgcagagggatgaatgggtg

SEQ ID NO: 22826 - DNA, 20 bp, Artificial Sequence
  Description of Artificial Sequence: Synthetic oligonucleotide
  Target: SCNA; (-) strand; PAM type: NRG; PAM sequence: GGG
gaaagtgcagagggatgaat

SEQ ID NO: 22827 - DNA, 20 bp, Artificial Sequence
  Description of Artificial Sequence: Synthetic oligonucleotide
  Target: SCNA; (-) strand; PAM type: NRG; PAM sequence: TGG
agaaagtgcagagggatgaa

SEQ ID NO: 22828 - DNA, 20 bp, Artificial Sequence
  Description of Artificial Sequence: Synthetic oligonucleotide
  Target: SCNA; (-) strand; PAM type: NRG; PAM sequence: GGG
gggctctgagaaagtgcaga

SEQ ID NO: 22829 - DNA, 20 bp, Artificial Sequence
  Description of Artificial Sequence: Synthetic oligonucleotide
  Target: SCNA; (-) strand; PAM type: NRG; PAM sequence: AGG
ggggctctgagaaagtgcag

SEQ ID NO: 22830 - DNA, 20 bp, Artificial Sequence
  Description of Artificial Sequence: Synthetic oligonucleotide
  Target: SCNA; (-) strand; PAM type: NRG; PAM sequence: GAG
tggggctctgagaaagtgca

SEQ ID NO: 22831 - DNA, 20 bp, Artificial Sequence
  Description of Artificial Sequence: Synthetic oligonucleotide
  Target: SCNA; (-) strand; PAM type: NRG; PAM sequence: CAG
cctggggctctgagaaagtg

SEQ ID NO: 22832 - DNA, 20 bp, Artificial Sequence
  Description of Artificial Sequence: Synthetic oligonucleotide
  Target: SCNA; (-) strand; PAM type: NRG; PAM sequence: AAG
gattgcctggggctctgaga

SEQ ID NO: 22833 - DNA, 20 bp, Artificial Sequence
  Description of Artificial Sequence: Synthetic oligonucleotide
  Target: SCNA; (-) strand; PAM type: NRG; PAM sequence: GAG
cagtgattgcctggggctct

SEQ ID NO: 22834 - DNA, 20 bp, Artificial Sequence
  Description of Artificial Sequence: Synthetic oligonucleotide
  Target: SCNA; (-) strand; PAM type: NRG; PAM sequence: GGG
aaaagatcagtgattgcctg

SEQ ID NO: 22835 - DNA, 20 bp, Artificial Sequence
  Description of Artificial Sequence: Synthetic oligonucleotide
  Target: SCNA; (-) strand; PAM type: NRG; PAM sequence: GGG
aaaaagatcagtgattgcct

SEQ ID NO: 22836 - DNA, 20 bp, Artificial Sequence
  Description of Artificial Sequence: Synthetic oligonucleotide
  Target: SCNA; (-) strand; PAM type: NRG; PAM sequence: TGG
taaaaagatcagtgattgcc

SEQ ID NO: 22837 - DNA, 20 bp, Artificial Sequence
  Description of Artificial Sequence: Synthetic oligonucleotide
  Target: SCNA; (-) strand; PAM type: NRG; PAM sequence: CAG
tctggagacagtaaaaagat

SEQ ID NO: 22838 - DNA, 20 bp, Artificial Sequence
  Description of Artificial Sequence: Synthetic oligonucleotide
  Target: SCNA; (-) strand; PAM type: NRG; PAM sequence: AAG
aaaattctggagacagtaaa

SEQ ID NO: 22839 - DNA, 20 bp, Artificial Sequence
  Description of Artificial Sequence: Synthetic oligonucleotide
  Target: SCNA; (-) strand; PAM type: NRG; PAM sequence: CAG
aagagacaaaattctggaga

SEQ ID NO: 22840 - DNA, 20 bp, Artificial Sequence
  Description of Artificial Sequence: Synthetic oligonucleotide
  Target: SCNA; (-) strand; PAM type: NRG; PAM sequence: GAG
ctgaaagagacaaaattctg

SEQ ID NO: 22841 - DNA, 20 bp, Artificial Sequence
  Description of Artificial Sequence: Synthetic oligonucleotide
  Target: SCNA; (-) strand; PAM type: NRG; PAM sequence: TGG
ttctgaaagagacaaaattc

SEQ ID NO: 22842 - DNA, 20 bp, Artificial Sequence
  Description of Artificial Sequence: Synthetic oligonucleotide
  Target: SCNA; (-) strand; PAM type: NRG; PAM sequence: GAG
caatatatgacattctgaaa

SEQ ID NO: 22843 - DNA, 20 bp, Artificial Sequence
  Description of Artificial Sequence: Synthetic oligonucleotide
  Target: SCNA; (-) strand; PAM type: NRG; PAM sequence: AAG
tccaatatatgacattctga

SEQ ID NO: 22844 - DNA, 20 bp, Artificial Sequence
  Description of Artificial Sequence: Synthetic oligonucleotide
  Target: SCNA; (-) strand; PAM type: NRG; PAM sequence: AGG
ggtacgtaagccagtttgaa

SEQ ID NO: 22845 - DNA, 20 bp, Artificial Sequence
  Description of Artificial Sequence: Synthetic oligonucleotide
  Target: SCNA; (-) strand; PAM type: NRG; PAM sequence: AAG
aggtacgtaagccagtttga

SEQ ID NO: 22846 - DNA, 20 bp, Artificial Sequence
  Description of Artificial Sequence: Synthetic oligonucleotide
  Target: SCNA; (-) strand; PAM type: NRG; PAM sequence: CAG
gaaaacttaggtacgtaagc

SEQ ID NO: 22847 - DNA, 20 bp, Artificial Sequence
  Description of Artificial Sequence: Synthetic oligonucleotide
  Target: SCNA; (-) strand; PAM type: NRG; PAM sequence: AAG
tggagaaaacttaggtacgt

SEQ ID NO: 22848 - DNA, 20 bp, Artificial Sequence
  Description of Artificial Sequence: Synthetic oligonucleotide
  Target: SCNA; (-) strand; PAM type: NRG; PAM sequence: AGG
aaaacacatggagaaaactt

SEQ ID NO: 22849 - DNA, 20 bp, Artificial Sequence
  Description of Artificial Sequence: Synthetic oligonucleotide
  Target: SCNA; (-) strand; PAM type: NRG; PAM sequence: TAG
aaaaacacatggagaaaact

SEQ ID NO: 22850 - DNA, 20 bp, Artificial Sequence
  Description of Artificial Sequence: Synthetic oligonucleotide
  Target: SCNA; (-) strand; PAM type: NRG; PAM sequence: GAG
tcaagccacaaaaacacatg

SEQ ID NO: 22851 - DNA, 20 bp, Artificial Sequence
  Description of Artificial Sequence: Synthetic oligonucleotide
  Target: SCNA; (-) strand; PAM type: NRG; PAM sequence: TGG
tatcaagccacaaaaacaca

SEQ ID NO: 22852 - DNA, 20 bp, Artificial Sequence
  Description of Artificial Sequence: Synthetic oligonucleotide
  Target: SCNA; (-) strand; PAM type: NRG; PAM sequence: AAG
ataaaaagaaatgagctatc

SEQ ID NO: 22853 - DNA, 20 bp, Artificial Sequence
  Description of Artificial Sequence: Synthetic oligonucleotide
  Target: SCNA; (-) strand; PAM type: NRG; PAM sequence: GAG
attcagtgataaaaagaaat

SEQ ID NO: 22854 - DNA, 20 bp, Artificial Sequence
  Description of Artificial Sequence: Synthetic oligonucleotide
  Target: SCNA; (-) strand; PAM type: NRG; PAM sequence: AAG
gaatattattcagtgataaa

SEQ ID NO: 22855 - DNA, 20 bp, Artificial Sequence
  Description of Artificial Sequence: Synthetic oligonucleotide
  Target: SCNA; (-) strand; PAM type: NRG; PAM sequence: CAG
gtactcaatggaatattatt

SEQ ID NO: 22856 - DNA, 20 bp, Artificial Sequence
  Description of Artificial Sequence: Synthetic oligonucleotide
  Target: SCNA; (-) strand; PAM type: NRG; PAM sequence: TGG
agactggcacatgtactcaa

SEQ ID NO: 22857 - DNA, 20 bp, Artificial Sequence
  Description of Artificial Sequence: Synthetic oligonucleotide
  Target: SCNA; (-) strand; PAM type: NRG; PAM sequence: TGG
aggtgaatgaacaaaaagac

SEQ ID NO: 22858 - DNA, 20 bp, Artificial Sequence
  Description of Artificial Sequence: Synthetic oligonucleotide
  Target: SCNA; (-) strand; PAM type: NRG; PAM sequence: AAG
tcaataggtgaatgaacaaa

SEQ ID NO: 22859 - DNA, 20 bp, Artificial Sequence
  Description of Artificial Sequence: Synthetic oligonucleotide
  Target: SCNA; (-) strand; PAM type: NRG; PAM sequence: AGG
caaccaagatgttcctcaat

SEQ ID NO: 22860 - DNA, 20 bp, Artificial Sequence
  Description of Artificial Sequence: Synthetic oligonucleotide
  Target: SCNA; (-) strand; PAM type: NRG; PAM sequence: TAG
gcaaccaagatgttcctcaa

SEQ ID NO: 22861 - DNA, 20 bp, Artificial Sequence
  Description of Artificial Sequence: Synthetic oligonucleotide
  Target: SCNA; (-) strand; PAM type: NRG; PAM sequence: AAG
gccaaaacttggaagcaacc

SEQ ID NO: 22862 - DNA, 20 bp, Artificial Sequence
  Description of Artificial Sequence: Synthetic oligonucleotide
  Target: SCNA; (-) strand; PAM type: NRG; PAM sequence: AAG
tcataattgccaaaacttgg

SEQ ID NO: 22863 - DNA, 20 bp, Artificial Sequence
  Description of Artificial Sequence: Synthetic oligonucleotide
  Target: SCNA; (-) strand; PAM type: NRG; PAM sequence: TGG
tattcataattgccaaaact

SEQ ID NO: 22864 - DNA, 20 bp, Artificial Sequence
  Description of Artificial Sequence: Synthetic oligonucleotide
  Target: SCNA; (-) strand; PAM type: NRG; PAM sequence: CAG
ctgcacatgcacgtttatag

SEQ ID NO: 22865 - DNA, 20 bp, Artificial Sequence
  Description of Artificial Sequence: Synthetic oligonucleotide
  Target: SCNA; (-) strand; PAM type: NRG; PAM sequence: TAG
aacctgcacatgcacgttta

SEQ ID NO: 22866 - DNA, 20 bp, Artificial Sequence
  Description of Artificial Sequence: Synthetic oligonucleotide
  Target: SCNA; (-) strand; PAM type: NRG; PAM sequence: AGG
gctacatgatattcacccaa

SEQ ID NO: 22867 - DNA, 20 bp, Artificial Sequence
  Description of Artificial Sequence: Synthetic oligonucleotide
  Target: SCNA; (-) strand; PAM type: NRG; PAM sequence: AAG
tgctacatgatattcaccca

SEQ ID NO: 22868 - DNA, 20 bp, Artificial Sequence
  Description of Artificial Sequence: Synthetic oligonucleotide
  Target: SCNA; (-) strand; PAM type: NRG; PAM sequence: AAG
gagatttgggtggggacaca

SEQ ID NO: 22869 - DNA, 20 bp, Artificial Sequence
  Description of Artificial Sequence: Synthetic oligonucleotide
  Target: SCNA; (-) strand; PAM type: NRG; PAM sequence: GGG
ttcaagatgagatttgggtg

SEQ ID NO: 22870 - DNA, 20 bp, Artificial Sequence
  Description of Artificial Sequence: Synthetic oligonucleotide
  Target: SCNA; (-) strand; PAM type: NRG; PAM sequence: GGG
attcaagatgagatttgggt

SEQ ID NO: 22871 - DNA, 20 bp, Artificial Sequence
  Description of Artificial Sequence: Synthetic oligonucleotide
  Target: SCNA; (-) strand; PAM type: NRG; PAM sequence: TGG
aattcaagatgagatttggg

SEQ ID NO: 22872 - DNA, 20 bp, Artificial Sequence
  Description of Artificial Sequence: Synthetic oligonucleotide
  Target: SCNA; (-) strand; PAM type: NRG; PAM sequence: GGG
tataattcaagatgagattt

SEQ ID NO: 22873 - DNA, 20 bp, Artificial Sequence
  Description of Artificial Sequence: Synthetic oligonucleotide
  Target: SCNA; (-) strand; PAM type: NRG; PAM sequence: TGG
ttataattcaagatgagatt

SEQ ID NO: 22874 - DNA, 20 bp, Artificial Sequence
  Description of Artificial Sequence: Synthetic oligonucleotide
  Target: SCNA; (-) strand; PAM type: NRG; PAM sequence: GAG
tggggattataattcaagat

SEQ ID NO: 22875 - DNA, 20 bp, Artificial Sequence
  Description of Artificial Sequence: Synthetic oligonucleotide
  Target: SCNA; (-) strand; PAM type: NRG; PAM sequence: AAG
gattatggggattataattc

SEQ ID NO: 22876 - DNA, 20 bp, Artificial Sequence
  Description of Artificial Sequence: Synthetic oligonucleotide
  Target: SCNA; (-) strand; PAM type: NRG; PAM sequence: GGG
cttgacatgtggggattatg

SEQ ID NO: 22877 - DNA, 20 bp, Artificial Sequence
  Description of Artificial Sequence: Synthetic oligonucleotide
  Target: SCNA; (-) strand; PAM type: NRG; PAM sequence: GGG
ccttgacatgtggggattat

SEQ ID NO: 22878 - DNA, 20 bp, Artificial Sequence
  Description of Artificial Sequence: Synthetic oligonucleotide
  Target: SCNA; (-) strand; PAM type: NRG; PAM sequence: TGG
cccttgacatgtggggatta

SEQ ID NO: 22879 - DNA, 20 bp, Artificial Sequence
  Description of Artificial Sequence: Synthetic oligonucleotide
  Target: SCNA; (-) strand; PAM type: NRG; PAM sequence: GGG
ggtctctcccttgacatgtg

SEQ ID NO: 22880 - DNA, 20 bp, Artificial Sequence
  Description of Artificial Sequence: Synthetic oligonucleotide
  Target: SCNA; (-) strand; PAM type: NRG; PAM sequence: GGG
tggtctctcccttgacatgt

SEQ ID NO: 22881 - DNA, 20 bp, Artificial Sequence
  Description of Artificial Sequence: Synthetic oligonucleotide
  Target: SCNA; (-) strand; PAM type: NRG; PAM sequence: TGG
ctggtctctcccttgacatg

SEQ ID NO: 22882 - DNA, 20 bp, Artificial Sequence
  Description of Artificial Sequence: Synthetic oligonucleotide
  Target: SCNA; (-) strand; PAM type: NRG; PAM sequence: TGG
atgatctagttacctccacc

SEQ ID NO: 22883 - DNA, 20 bp, Artificial Sequence
  Description of Artificial Sequence: Synthetic oligonucleotide
  Target: SCNA; (-) strand; PAM type: NRG; PAM sequence: TAG
gggaaacagctctcatgatc

SEQ ID NO: 22884 - DNA, 20 bp, Artificial Sequence
  Description of Artificial Sequence: Synthetic oligonucleotide
  Target: SCNA; (-) strand; PAM type: NRG; PAM sequence: CAG
tgagaacagcatgggggaaa

SEQ ID NO: 22885 - DNA, 20 bp, Artificial Sequence
  Description of Artificial Sequence: Synthetic oligonucleotide
  Target: SCNA; (-) strand; PAM type: NRG; PAM sequence: GGG
ctatcatgagaacagcatgg

SEQ ID NO: 22886 - DNA, 20 bp, Artificial Sequence
  Description of Artificial Sequence: Synthetic oligonucleotide
  Target: SCNA; (-) strand; PAM type: NRG; PAM sequence: GGG
gctatcatgagaacagcatg

SEQ ID NO: 22887 - DNA, 20 bp, Artificial Sequence
  Description of Artificial Sequence: Synthetic oligonucleotide
  Target: SCNA; (-) strand; PAM type: NRG; PAM sequence: GGG
cgctatcatgagaacagcat

SEQ ID NO: 22888 - DNA, 20 bp, Artificial Sequence
  Description of Artificial Sequence: Synthetic oligonucleotide
  Target: SCNA; (-) strand; PAM type: NRG; PAM sequence: TGG
tcgctatcatgagaacagca

SEQ ID NO: 22889 - DNA, 20 bp, Artificial Sequence
  Description of Artificial Sequence: Synthetic oligonucleotide
  Target: SCNA; (-) strand; PAM type: NRG; PAM sequence: CAG
ctcactcgctatcatgagaa

SEQ ID NO: 22890 - DNA, 20 bp, Artificial Sequence
  Description of Artificial Sequence: Synthetic oligonucleotide
  Target: SCNA; (-) strand; PAM type: NRG; PAM sequence: GAG
gagaactcactcgctatcat

SEQ ID NO: 22891 - DNA, 20 bp, Artificial Sequence
  Description of Artificial Sequence: Synthetic oligonucleotide
  Target: SCNA; (-) strand; PAM type: NRG; PAM sequence: GAG
ataaaaccattagctctcgt

SEQ ID NO: 22892 - DNA, 20 bp, Artificial Sequence
  Description of Artificial Sequence: Synthetic oligonucleotide
  Target: SCNA; (-) strand; PAM type: NRG; PAM sequence: TAG
taccaaacacataaaaccat

SEQ ID NO: 22893 - DNA, 20 bp, Artificial Sequence
  Description of Artificial Sequence: Synthetic oligonucleotide
  Target: SCNA; (-) strand; PAM type: NRG; PAM sequence: AGG
ggaaggagaatgaatgcagg

SEQ ID NO: 22894 - DNA, 20 bp, Artificial Sequence
  Description of Artificial Sequence: Synthetic oligonucleotide
  Target: SCNA; (-) strand; PAM type: NRG; PAM sequence: GAG
aggaaggagaatgaatgcag

SEQ ID NO: 22895 - DNA, 20 bp, Artificial Sequence
  Description of Artificial Sequence: Synthetic oligonucleotide
  Target: SCNA; (-) strand; PAM type: NRG; PAM sequence: AGG
acaggaaggagaatgaatgc

SEQ ID NO: 22896 - DNA, 20 bp, Artificial Sequence
  Description of Artificial Sequence: Synthetic oligonucleotide
  Target: SCNA; (-) strand; PAM type: NRG; PAM sequence: CAG
gacaggaaggagaatgaatg

SEQ ID NO: 22897 - DNA, 20 bp, Artificial Sequence
  Description of Artificial Sequence: Synthetic oligonucleotide
  Target: SCNA; (-) strand; PAM type: NRG; PAM sequence: GAG
cttcacaaggtgacaggaag

SEQ ID NO: 22898 - DNA, 20 bp, Artificial Sequence
  Description of Artificial Sequence: Synthetic oligonucleotide
  Target: SCNA; (-) strand; PAM type: NRG; PAM sequence: AGG
tacttcacaaggtgacagga

SEQ ID NO: 22899 - DNA, 20 bp, Artificial Sequence
  Description of Artificial Sequence: Synthetic oligonucleotide
  Target: SCNA; (-) strand; PAM type: NRG; PAM sequence: AAG
ctacttcacaaggtgacagg

SEQ ID NO: 22900 - DNA, 20 bp, Artificial Sequence
  Description of Artificial Sequence: Synthetic oligonucleotide
  Target: SCNA; (-) strand; PAM type: NRG; PAM sequence: AGG
cacctacttcacaaggtgac

SEQ ID NO: 22901 - DNA, 20 bp, Artificial Sequence
  Description of Artificial Sequence: Synthetic oligonucleotide
  Target: SCNA; (-) strand; PAM type: NRG; PAM sequence: CAG
gcacctacttcacaaggtga

SEQ ID NO: 22902 - DNA, 20 bp, Artificial Sequence
  Description of Artificial Sequence: Synthetic oligonucleotide
  Target: SCNA; (-) strand; PAM type: NRG; PAM sequence: AGG
agcaaggcacctacttcaca

SEQ ID NO: 22903 - DNA, 20 bp, Artificial Sequence
  Description of Artificial Sequence: Synthetic oligonucleotide
  Target: SCNA; (-) strand; PAM type: NRG; PAM sequence: AAG
aagcaaggcacctacttcac

SEQ ID NO: 22904 - DNA, 20 bp, Artificial Sequence
  Description of Artificial Sequence: Synthetic oligonucleotide
  Target: SCNA; (-) strand; PAM type: NRG; PAM sequence: AGG
tggaaggagaaggggaagca

SEQ ID NO: 22905 - DNA, 20 bp, Artificial Sequence
  Description of Artificial Sequence: Synthetic oligonucleotide
  Target: SCNA; (-) strand; PAM type: NRG; PAM sequence: AAG
gtggaaggagaaggggaagc

SEQ ID NO: 22906 - DNA, 20 bp, Artificial Sequence
  Description of Artificial Sequence: Synthetic oligonucleotide
  Target: SCNA; (-) strand; PAM type: NRG; PAM sequence: AAG
catggtggaaggagaagggg

SEQ ID NO: 22907 - DNA, 20 bp, Artificial Sequence
  Description of Artificial Sequence: Synthetic oligonucleotide
  Target: SCNA; (-) strand; PAM type: NRG; PAM sequence: GGG
aatcatggtggaaggagaag

SEQ ID NO: 22908 - DNA, 20 bp, Artificial Sequence
  Description of Artificial Sequence: Synthetic oligonucleotide
  Target: SCNA; (-) strand; PAM type: NRG; PAM sequence: GGG
taatcatggtggaaggagaa

SEQ ID NO: 22909 - DNA, 20 bp, Artificial Sequence
  Description of Artificial Sequence: Synthetic oligonucleotide
  Target: SCNA; (-) strand; PAM type: NRG; PAM sequence: AGG
ataatcatggtggaaggaga

SEQ ID NO: 22910 - DNA, 20 bp, Artificial Sequence
  Description of Artificial Sequence: Synthetic oligonucleotide
  Target: SCNA; (-) strand; PAM type: NRG; PAM sequence: AAG
tataatcatggtggaaggag

SEQ ID NO: 22911 - DNA, 20 bp, Artificial Sequence
  Description of Artificial Sequence: Synthetic oligonucleotide
  Target: SCNA; (-) strand; PAM type: NRG; PAM sequence: GAG
gcttataatcatggtggaag

SEQ ID NO: 22912 - DNA, 20 bp, Artificial Sequence
  Description of Artificial Sequence: Synthetic oligonucleotide
  Target: SCNA; (-) strand; PAM type: NRG; PAM sequence: AGG
aagcttataatcatggtgga

SEQ ID NO: 22913 - DNA, 20 bp, Artificial Sequence
  Description of Artificial Sequence: Synthetic oligonucleotide
  Target: SCNA; (-) strand; PAM type: NRG; PAM sequence: AAG
aaagcttataatcatggtgg

SEQ ID NO: 22914 - DNA, 20 bp, Artificial Sequence
  Description of Artificial Sequence: Synthetic oligonucleotide
  Target: SCNA; (-) strand; PAM type: NRG; PAM sequence: TGG
cagaaagcttataatcatgg

SEQ ID NO: 22915 - DNA, 20 bp, Artificial Sequence
  Description of Artificial Sequence: Synthetic oligonucleotide
  Target: SCNA; (-) strand; PAM type: NRG; PAM sequence: TGG
cctcagaaagcttataatca

SEQ ID NO: 22916 - DNA, 20 bp, Artificial Sequence
  Description of Artificial Sequence: Synthetic oligonucleotide
  Target: SCNA; (-) strand; PAM type: NRG; PAM sequence: AAG
atggctgaggaggcctcaga

SEQ ID NO: 22917 - DNA, 20 bp, Artificial Sequence
  Description of Artificial Sequence: Synthetic oligonucleotide
  Target: SCNA; (-) strand; PAM type: NRG; PAM sequence: CAG
cagcatggctgaggaggcct

SEQ ID NO: 22918 - DNA, 20 bp, Artificial Sequence
  Description of Artificial Sequence: Synthetic oligonucleotide
  Target: SCNA; (-) strand; PAM type: NRG; PAM sequence: AGG
acagctcagcatggctgagg

SEQ ID NO: 22919 - DNA, 20 bp, Artificial Sequence
  Description of Artificial Sequence: Synthetic oligonucleotide
  Target: SCNA; (-) strand; PAM type: NRG; PAM sequence: GAG
cacagctcagcatggctgag

SEQ ID NO: 22920 - DNA, 20 bp, Artificial Sequence
  Description of Artificial Sequence: Synthetic oligonucleotide
  Target: SCNA; (-) strand; PAM type: NRG; PAM sequence: AGG
ctcacagctcagcatggctg

SEQ ID NO: 22921 - DNA, 20 bp, Artificial Sequence
  Description of Artificial Sequence: Synthetic oligonucleotide
  Target: SCNA; (-) strand; PAM type: NRG; PAM sequence: GAG
actcacagctcagcatggct

SEQ ID NO: 22922 - DNA, 20 bp, Artificial Sequence
  Description of Artificial Sequence: Synthetic oligonucleotide
  Target: SCNA; (-) strand; PAM type: NRG; PAM sequence: TGG
aattgactcacagctcagca

SEQ ID NO: 22923 - DNA, 20 bp, Artificial Sequence
  Description of Artificial Sequence: Synthetic oligonucleotide
  Target: SCNA; (-) strand; PAM type: NRG; PAM sequence: CAG
tatttaattgactcacagct

SEQ ID NO: 22924 - DNA, 20 bp, Artificial Sequence
  Description of Artificial Sequence: Synthetic oligonucleotide
  Target: SCNA; (-) strand; PAM type: NRG; PAM sequence: CAG
aggtttatttaattgactca

SEQ ID NO: 22925 - DNA, 20 bp, Artificial Sequence
  Description of Artificial Sequence: Synthetic oligonucleotide
  Target: SCNA; (-) strand; PAM type: NRG; PAM sequence: AGG
gggaaatttataaaggaaag

SEQ ID NO: 22926 - DNA, 20 bp, Artificial Sequence
  Description of Artificial Sequence: Synthetic oligonucleotide
  Target: SCNA; (-) strand; PAM type: NRG; PAM sequence: GAG
tgggaaatttataaaggaaa

SEQ ID NO: 22927 - DNA, 20 bp, Artificial Sequence
  Description of Artificial Sequence: Synthetic oligonucleotide
  Target: SCNA; (-) strand; PAM type: NRG; PAM sequence: AAG
actgggaaatttataaagga

SEQ ID NO: 22928 - DNA, 20 bp, Artificial Sequence
  Description of Artificial Sequence: Synthetic oligonucleotide
  Target: SCNA; (-) strand; PAM type: NRG; PAM sequence: AGG
cgagactgggaaatttataa

SEQ ID NO: 22929 - DNA, 20 bp, Artificial Sequence
  Description of Artificial Sequence: Synthetic oligonucleotide
  Target: SCNA; (-) strand; PAM type: NRG; PAM sequence: AAG
ccgagactgggaaatttata

SEQ ID NO: 22930 - DNA, 20 bp, Artificial Sequence
  Description of Artificial Sequence: Synthetic oligonucleotide
  Target: SCNA; (-) strand; PAM type: NRG; PAM sequence: GGG
aaaaagaagttcccgagact

SEQ ID NO: 22931 - DNA, 20 bp, Artificial Sequence
  Description of Artificial Sequence: Synthetic oligonucleotide
  Target: SCNA; (-) strand; PAM type: NRG; PAM sequence: TGG
taaaaagaagttcccgagac

SEQ ID NO: 22932 - DNA, 20 bp, Artificial Sequence
  Description of Artificial Sequence: Synthetic oligonucleotide
  Target: SCNA; (-) strand; PAM type: NRG; PAM sequence: GAG
agtgctaaaaagaagttccc

SEQ ID NO: 22933 - DNA, 20 bp, Artificial Sequence
  Description of Artificial Sequence: Synthetic oligonucleotide
  Target: SCNA; (-) strand; PAM type: NRG; PAM sequence: AAG
attttcacagtgctaaaaag

SEQ ID NO: 22934 - DNA, 20 bp, Artificial Sequence
  Description of Artificial Sequence: Synthetic oligonucleotide
  Target: SCNA; (-) strand; PAM type: NRG; PAM sequence: AAG
tccattttcacagtgctaaa

SEQ ID NO: 22935 - DNA, 20 bp, Artificial Sequence
  Description of Artificial Sequence: Synthetic oligonucleotide
  Target: SCNA; (-) strand; PAM type: NRG; PAM sequence: CAG
tatatatttgtccattttca

SEQ ID NO: 22936 - DNA, 20 bp, Artificial Sequence
  Description of Artificial Sequence: Synthetic oligonucleotide
  Target: SCNA; (-) strand; PAM type: NRG; PAM sequence: AAG
taggttgacaatttcttacg

SEQ ID NO: 22937 - DNA, 20 bp, Artificial Sequence
  Description of Artificial Sequence: Synthetic oligonucleotide
  Target: SCNA; (-) strand; PAM type: NRG; PAM sequence: AGG
gtacagtaactttggaagat

SEQ ID NO: 22938 - DNA, 20 bp, Artificial Sequence
  Description of Artificial Sequence: Synthetic oligonucleotide
  Target: SCNA; (-) strand; PAM type: NRG; PAM sequence: TAG
ggtacagtaactttggaaga

SEQ ID NO: 22939 - DNA, 20 bp, Artificial Sequence
  Description of Artificial Sequence: Synthetic oligonucleotide
  Target: SCNA; (-) strand; PAM type: NRG; PAM sequence: AAG
aaatggtacagtaactttgg

SEQ ID NO: 22940 - DNA, 20 bp, Artificial Sequence
  Description of Artificial Sequence: Synthetic oligonucleotide
  Target: SCNA; (-) strand; PAM type: NRG; PAM sequence: TGG
acaaaatggtacagtaactt

SEQ ID NO: 22941 - DNA, 20 bp, Artificial Sequence
  Description of Artificial Sequence: Synthetic oligonucleotide
  Target: SCNA; (-) strand; PAM type: NRG; PAM sequence: CAG
gctggcaatacaaaatggta

SEQ ID NO: 22942 - DNA, 20 bp, Artificial Sequence
  Description of Artificial Sequence: Synthetic oligonucleotide
  Target: SCNA; (-) strand; PAM type: NRG; PAM sequence: TGG
ctaatgctggcaatacaaaa

SEQ ID NO: 22943 - DNA, 20 bp, Artificial Sequence
  Description of Artificial Sequence: Synthetic oligonucleotide
  Target: SCNA; (-) strand; PAM type: NRG; PAM sequence: TGG
tttcattcattcactaatgc

SEQ ID NO: 22944 - DNA, 20 bp, Artificial Sequence
  Description of Artificial Sequence: Synthetic oligonucleotide
  Target: SCNA; (-) strand; PAM type: NRG; PAM sequence: AAG
ctggtgagatgtggagcaac

SEQ ID NO: 22945 - DNA, 20 bp, Artificial Sequence
  Description of Artificial Sequence: Synthetic oligonucleotide
  Target: SCNA; (-) strand; PAM type: NRG; PAM sequence: GAG
cagcatgctggtgagatgtg

SEQ ID NO: 22946 - DNA, 20 bp, Artificial Sequence
  Description of Artificial Sequence: Synthetic oligonucleotide
  Target: SCNA; (-) strand; PAM type: NRG; PAM sequence: TGG
cacagcatgctggtgagatg

SEQ ID NO: 22947 - DNA, 20 bp, Artificial Sequence
  Description of Artificial Sequence: Synthetic oligonucleotide
  Target: SCNA; (-) strand; PAM type: NRG; PAM sequence: GAG
caagagcacagcatgctggt

SEQ ID NO: 22948 - DNA, 20 bp, Artificial Sequence
  Description of Artificial Sequence: Synthetic oligonucleotide
  Target: SCNA; (-) strand; PAM type: NRG; PAM sequence: TGG
acaccaagagcacagcatgc

SEQ ID NO: 22949 - DNA, 20 bp, Artificial Sequence
  Description of Artificial Sequence: Synthetic oligonucleotide
  Target: SCNA; (-) strand; PAM type: NRG; PAM sequence: CAG
aatccaaaacaccaagagca

SEQ ID NO: 22950 - DNA, 20 bp, Artificial Sequence
  Description of Artificial Sequence: Synthetic oligonucleotide
  Target: SCNA; (-) strand; PAM type: NRG; PAM sequence: GAG
actaaaatccaaaacaccaa

SEQ ID NO: 22951 - DNA, 20 bp, Artificial Sequence
  Description of Artificial Sequence: Synthetic oligonucleotide
  Target: SCNA; (-) strand; PAM type: NRG; PAM sequence: AAG
tgactaaaatccaaaacacc

SEQ ID NO: 22952 - DNA, 20 bp, Artificial Sequence
  Description of Artificial Sequence: Synthetic oligonucleotide
  Target: SCNA; (-) strand; PAM type: NRG; PAM sequence: AAG
aactcagctatcaaacagta

SEQ ID NO: 22953 - DNA, 20 bp, Artificial Sequence
  Description of Artificial Sequence: Synthetic oligonucleotide
  Target: SCNA; (-) strand; PAM type: NRG; PAM sequence: CAG
tttgtaactcagctatcaaa

SEQ ID NO: 22954 - DNA, 20 bp, Artificial Sequence
  Description of Artificial Sequence: Synthetic oligonucleotide
  Target: SCNA; (-) strand; PAM type: NRG; PAM sequence: CAG
atacttgccagtttgtaact

SEQ ID NO: 22955 - DNA, 20 bp, Artificial Sequence
  Description of Artificial Sequence: Synthetic oligonucleotide
  Target: SCNA; (-) strand; PAM type: NRG; PAM sequence: CAG
ttctttgcttggatacttgc

SEQ ID NO: 22956 - DNA, 20 bp, Artificial Sequence
  Description of Artificial Sequence: Synthetic oligonucleotide
  Target: SCNA; (-) strand; PAM type: NRG; PAM sequence: TGG
ccagttctctgttctttgct

SEQ ID NO: 22957 - DNA, 20 bp, Artificial Sequence
  Description of Artificial Sequence: Synthetic oligonucleotide
  Target: SCNA; (-) strand; PAM type: NRG; PAM sequence: CAG
tcggtagaaaagcaaacctc

SEQ ID NO: 22958 - DNA, 20 bp, Artificial Sequence
  Description of Artificial Sequence: Synthetic oligonucleotide
  Target: SCNA; (-) strand; PAM type: NRG; PAM sequence: AAG
acatatttccttcggtagaa

SEQ ID NO: 22959 - DNA, 20 bp, Artificial Sequence
  Description of Artificial Sequence: Synthetic oligonucleotide
  Target: SCNA; (-) strand; PAM type: NRG; PAM sequence: TAG
tctcaacatatttccttcgg

SEQ ID NO: 22960 - DNA, 20 bp, Artificial Sequence
  Description of Artificial Sequence: Synthetic oligonucleotide
  Target: SCNA; (-) strand; PAM type: NRG; PAM sequence: CGG
tattctcaacatatttcctt

SEQ ID NO: 22961 - DNA, 20 bp, Artificial Sequence
  Description of Artificial Sequence: Synthetic oligonucleotide
  Target: SCNA; (-) strand; PAM type: NRG; PAM sequence: TAG
tgtaaaaaattatttacatt

SEQ ID NO: 22962 - DNA, 20 bp, Artificial Sequence
  Description of Artificial Sequence: Synthetic oligonucleotide
  Target: SCNA; (-) strand; PAM type: NRG; PAM sequence: TAG
ttttttcaatcactcattat

SEQ ID NO: 22963 - DNA, 20 bp, Artificial Sequence
  Description of Artificial Sequence: Synthetic oligonucleotide
  Target: SCNA; (-) strand; PAM type: NRG; PAM sequence: AAG
ttgtatcatttgtatgtcac

SEQ ID NO: 22964 - DNA, 20 bp, Artificial Sequence
  Description of Artificial Sequence: Synthetic oligonucleotide
  Target: SCNA; (-) strand; PAM type: NRG; PAM sequence: AGG
atgaaagagaggacaatgaa

SEQ ID NO: 22965 - DNA, 20 bp, Artificial Sequence
  Description of Artificial Sequence: Synthetic oligonucleotide
  Target: SCNA; (-) strand; PAM type: NRG; PAM sequence: AAG
catgaaagagaggacaatga

SEQ ID NO: 22966 - DNA, 20 bp, Artificial Sequence
  Description of Artificial Sequence: Synthetic oligonucleotide
  Target: SCNA; (-) strand; PAM type: NRG; PAM sequence: AGG
tattaatacccatgaaagag

SEQ ID NO: 22967 - DNA, 20 bp, Artificial Sequence
  Description of Artificial Sequence: Synthetic oligonucleotide
  Target: SCNA; (-) strand; PAM type: NRG; PAM sequence: GAG
atattaatacccatgaaaga

SEQ ID NO: 22968 - DNA, 20 bp, Artificial Sequence
  Description of Artificial Sequence: Synthetic oligonucleotide
  Target: SCNA; (-) strand; PAM type: NRG; PAM sequence: GAG
aaatattaatacccatgaaa

SEQ ID NO: 22969 - DNA, 20 bp, Artificial Sequence
  Description of Artificial Sequence: Synthetic oligonucleotide
  Target: SCNA; (-) strand; PAM type: NRG; PAM sequence: AAG
tgaaatattaatacccatga

SEQ ID NO: 22970 - DNA, 20 bp, Artificial Sequence
  Description of Artificial Sequence: Synthetic oligonucleotide
  Target: SCNA; (-) strand; PAM type: NRG; PAM sequence: TAG
caacagatactgatagtcat

SEQ ID NO: 22971 - DNA, 20 bp, Artificial Sequence
  Description of Artificial Sequence: Synthetic oligonucleotide
  Target: SCNA; (-) strand; PAM type: NRG; PAM sequence: TAG
tagcaatcaacagatactga

SEQ ID NO: 22972 - DNA, 20 bp, Artificial Sequence
  Description of Artificial Sequence: Synthetic oligonucleotide
  Target: SCNA; (-) strand; PAM type: NRG; PAM sequence: CAG
tcaaaattgctagcaatcaa

SEQ ID NO: 22973 - DNA, 20 bp, Artificial Sequence
  Description of Artificial Sequence: Synthetic oligonucleotide
  Target: SCNA; (-) strand; PAM type: NRG; PAM sequence: TAG
agtgttctactcaaaattgc

SEQ ID NO: 22974 - DNA, 20 bp, Artificial Sequence
  Description of Artificial Sequence: Synthetic oligonucleotide
  Target: SCNA; (-) strand; PAM type: NRG; PAM sequence: AAG
atattcatacatatcagaaa

SEQ ID NO: 22975 - DNA, 20 bp, Artificial Sequence
  Description of Artificial Sequence: Synthetic oligonucleotide
  Target: SCNA; (-) strand; PAM type: NRG; PAM sequence: CAG
gtctatatattcatacatat

SEQ ID NO: 22976 - DNA, 20 bp, Artificial Sequence
  Description of Artificial Sequence: Synthetic oligonucleotide
  Target: SCNA; (-) strand; PAM type: NRG; PAM sequence: AGG
taaaggctattacacaatcc

SEQ ID NO: 22977 - DNA, 20 bp, Artificial Sequence
  Description of Artificial Sequence: Synthetic oligonucleotide
  Target: SCNA; (-) strand; PAM type: NRG; PAM sequence: CAG
ataaaggctattacacaatc

SEQ ID NO: 22978 - DNA, 20 bp, Artificial Sequence
  Description of Artificial Sequence: Synthetic oligonucleotide
  Target: SCNA; (-) strand; PAM type: NRG; PAM sequence: AGG
gttgccttactgcatcataa

SEQ ID NO: 22979 - DNA, 20 bp, Artificial Sequence
  Description of Artificial Sequence: Synthetic oligonucleotide
  Target: SCNA; (-) strand; PAM type: NRG; PAM sequence: AAG
ggttgccttactgcatcata

SEQ ID NO: 22980 - DNA, 20 bp, Artificial Sequence
  Description of Artificial Sequence: Synthetic oligonucleotide
  Target: SCNA; (-) strand; PAM type: NRG; PAM sequence: TGG
ttcactgattccaagttcag

SEQ ID NO: 22981 - DNA, 20 bp, Artificial Sequence
  Description of Artificial Sequence: Synthetic oligonucleotide
  Target: SCNA; (-) strand; PAM type: NRG; PAM sequence: CAG
taattcactgattccaagtt

SEQ ID NO: 22982 - DNA, 20 bp, Artificial Sequence
  Description of Artificial Sequence: Synthetic oligonucleotide
  Target: SCNA; (-) strand; PAM type: NRG; PAM sequence: AAG
aattgtaattcactgattcc

SEQ ID NO: 22983 - DNA, 20 bp, Artificial Sequence
  Description of Artificial Sequence: Synthetic oligonucleotide
  Target: SCNA; (-) strand; PAM type: NRG; PAM sequence: AAG
agggctagtgagggacccag

SEQ ID NO: 22984 - DNA, 20 bp, Artificial Sequence
  Description of Artificial Sequence: Synthetic oligonucleotide
  Target: SCNA; (-) strand; PAM type: NRG; PAM sequence: CAG
cacagggctagtgagggacc

SEQ ID NO: 22985 - DNA, 20 bp, Artificial Sequence
  Description of Artificial Sequence: Synthetic oligonucleotide
  Target: SCNA; (-) strand; PAM type: NRG; PAM sequence: GGG
caaagtcacagggctagtga

SEQ ID NO: 22986 - DNA, 20 bp, Artificial Sequence
  Description of Artificial Sequence: Synthetic oligonucleotide
  Target: SCNA; (-) strand; PAM type: NRG; PAM sequence: AGG
ccaaagtcacagggctagtg

SEQ ID NO: 22987 - DNA, 20 bp, Artificial Sequence
  Description of Artificial Sequence: Synthetic oligonucleotide
  Target: SCNA; (-) strand; PAM type: NRG; PAM sequence: GAG
accaaagtcacagggctagt

SEQ ID NO: 22988 - DNA, 20 bp, Artificial Sequence
  Description of Artificial Sequence: Synthetic oligonucleotide
  Target: SCNA; (-) strand; PAM type: NRG; PAM sequence: TAG
atagaccaaagtcacagggc

SEQ ID NO: 22989 - DNA, 20 bp, Artificial Sequence
  Description of Artificial Sequence: Synthetic oligonucleotide
  Target: SCNA; (-) strand; PAM type: NRG; PAM sequence: GGG
tcaaatagaccaaagtcaca

SEQ ID NO: 22990 - DNA, 20 bp, Artificial Sequence
  Description of Artificial Sequence: Synthetic oligonucleotide
  Target: SCNA; (-) strand; PAM type: NRG; PAM sequence: AGG
gtcaaatagaccaaagtcac

SEQ ID NO: 22991 - DNA, 20 bp, Artificial Sequence
  Description of Artificial Sequence: Synthetic oligonucleotide
  Target: SCNA; (-) strand; PAM type: NRG; PAM sequence: CAG
agtcaaatagaccaaagtca

SEQ ID NO: 22992 - DNA, 20 bp, Artificial Sequence
  Description of Artificial Sequence: Synthetic oligonucleotide
  Target: SCNA; (-) strand; PAM type: NRG; PAM sequence: AAG
cacagaagtcaaatagacca

SEQ ID NO: 22993 - DNA, 20 bp, Artificial Sequence
  Description of Artificial Sequence: Synthetic oligonucleotide
  Target: SCNA; (-) strand; PAM type: NRG; PAM sequence: TAG
tgaggctcacagaagtcaaa

SEQ ID NO: 22994 - DNA, 20 bp, Artificial Sequence
  Description of Artificial Sequence: Synthetic oligonucleotide
  Target: SCNA; (-) strand; PAM type: NRG; PAM sequence: AAG
tgcacttttgaggctcacag

SEQ ID NO: 22995 - DNA, 20 bp, Artificial Sequence
  Description of Artificial Sequence: Synthetic oligonucleotide
  Target: SCNA; (-) strand; PAM type: NRG; PAM sequence: CAG
aaatgcacttttgaggctca

SEQ ID NO: 22996 - DNA, 20 bp, Artificial Sequence
  Description of Artificial Sequence: Synthetic oligonucleotide
  Target: SCNA; (-) strand; PAM type: NRG; PAM sequence: AGG
attttacaaatgcacttttg

SEQ ID NO: 22997 - DNA, 20 bp, Artificial Sequence
  Description of Artificial Sequence: Synthetic oligonucleotide
  Target: SCNA; (-) strand; PAM type: NRG; PAM sequence: GAG
cattttacaaatgcactttt

SEQ ID NO: 22998 - DNA, 20 bp, Artificial Sequence
  Description of Artificial Sequence: Synthetic oligonucleotide
  Target: SCNA; (-) strand; PAM type: NRG; PAM sequence: CAG
cagcttcacagtaagatggg

SEQ ID NO: 22999 - DNA, 20 bp, Artificial Sequence
  Description of Artificial Sequence: Synthetic oligonucleotide
  Target: SCNA; (-) strand; PAM type: NRG; PAM sequence: GGG
caacagcttcacagtaagat

SEQ ID NO: 23000 - DNA, 20 bp, Artificial Sequence
  Description of Artificial Sequence: Synthetic oligonucleotide
  Target: SCNA; (-) strand; PAM type: NRG; PAM sequence: TGG
acaacagcttcacagtaaga

SEQ ID NO: 23001 - DNA, 20 bp, Artificial Sequence
  Description of Artificial Sequence: Synthetic oligonucleotide
  Target: SCNA; (-) strand; PAM type: NRG; PAM sequence: AAG
tattacaacagcttcacagt

SEQ ID NO: 23002 - DNA, 20 bp, Artificial Sequence
  Description of Artificial Sequence: Synthetic oligonucleotide
  Target: SCNA; (-) strand; PAM type: NRG; PAM sequence: CAG
ttattattacaacagcttca

SEQ ID NO: 23003 - DNA, 20 bp, Artificial Sequence
  Description of Artificial Sequence: Synthetic oligonucleotide
  Target: SCNA; (-) strand; PAM type: NRG; PAM sequence: CAG
tgtcaatattattattacaa

SEQ ID NO: 23004 - DNA, 20 bp, Artificial Sequence
  Description of Artificial Sequence: Synthetic oligonucleotide
  Target: SCNA; (-) strand; PAM type: NRG; PAM sequence: TAG
cacagtaaattgctttttat

SEQ ID NO: 23005 - DNA, 20 bp, Artificial Sequence
  Description of Artificial Sequence: Synthetic oligonucleotide
  Target: SCNA; (-) strand; PAM type: NRG; PAM sequence: CAG
tttgcataatttcaaataca

SEQ ID NO: 23006 - DNA, 20 bp, Artificial Sequence
  Description of Artificial Sequence: Synthetic oligonucleotide
  Target: SCNA; (-) strand; PAM type: NRG; PAM sequence: TAG
atgtgacgttacattttata

SEQ ID NO: 23007 - DNA, 20 bp, Artificial Sequence
  Description of Artificial Sequence: Synthetic oligonucleotide
  Target: SCNA; (-) strand; PAM type: NRG; PAM sequence: CAG
ttgtgccgtggttagttgta

SEQ ID NO: 23008 - DNA, 20 bp, Artificial Sequence
  Description of Artificial Sequence: Synthetic oligonucleotide
  Target: SCNA; (-) strand; PAM type: NRG; PAM sequence: TAG
ttatcaaattgtgccgtggt

SEQ ID NO: 23009 - DNA, 20 bp, Artificial Sequence
  Description of Artificial Sequence: Synthetic oligonucleotide
  Target: SCNA; (-) strand; PAM type: NRG; PAM sequence: TGG
ttgcttatcaaattgtgccg

SEQ ID NO: 23010 - DNA, 20 bp, Artificial Sequence
  Description of Artificial Sequence: Synthetic oligonucleotide
  Target: SCNA; (-) strand; PAM type: NRG; PAM sequence: AAG
ttctccgtatactctaaagg

SEQ ID NO: 23011 - DNA, 20 bp, Artificial Sequence
  Description of Artificial Sequence: Synthetic oligonucleotide
  Target: SCNA; (-) strand; PAM type: NRG; PAM sequence: AGG
catttctccgtatactctaa

SEQ ID NO: 23012 - DNA, 20 bp, Artificial Sequence
  Description of Artificial Sequence: Synthetic oligonucleotide
  Target: SCNA; (-) strand; PAM type: NRG; PAM sequence: AAG
ccatttctccgtatactcta

SEQ ID NO: 23013 - DNA, 20 bp, Artificial Sequence
  Description of Artificial Sequence: Synthetic oligonucleotide
  Target: SCNA; (-) strand; PAM type: NRG; PAM sequence: GGG
tcccagagcctggcacaaaa

SEQ ID NO: 23014 - DNA, 20 bp, Artificial Sequence
  Description of Artificial Sequence: Synthetic oligonucleotide
  Target: SCNA; (-) strand; PAM type: NRG; PAM sequence: AGG
gtcccagagcctggcacaaa

SEQ ID NO: 23015 - DNA, 20 bp, Artificial Sequence
  Description of Artificial Sequence: Synthetic oligonucleotide
  Target: SCNA; (-) strand; PAM type: NRG; PAM sequence: AAG
ggtcccagagcctggcacaa

SEQ ID NO: 23016 - DNA, 20 bp, Artificial Sequence
  Description of Artificial Sequence: Synthetic oligonucleotide
  Target: SCNA; (-) strand; PAM type: NRG; PAM sequence: TGG
ataattgtggtcccagagcc

SEQ ID NO: 23017 - DNA, 20 bp, Artificial Sequence
  Description of Artificial Sequence: Synthetic oligonucleotide
  Target: SCNA; (-) strand; PAM type: NRG; PAM sequence: GAG
atgggataattgtggtccca

SEQ ID NO: 23018 - DNA, 20 bp, Artificial Sequence
  Description of Artificial Sequence: Synthetic oligonucleotide
  Target: SCNA; (-) strand; PAM type: NRG; PAM sequence: CAG
acatgggataattgtggtcc

SEQ ID NO: 23019 - DNA, 20 bp, Artificial Sequence
  Description of Artificial Sequence: Synthetic oligonucleotide
  Target: SCNA; (-) strand; PAM type: NRG; PAM sequence: TGG
gagatcacatgggataattg

SEQ ID NO: 23020 - DNA, 20 bp, Artificial Sequence
  Description of Artificial Sequence: Synthetic oligonucleotide
  Target: SCNA; (-) strand; PAM type: NRG; PAM sequence: GGG
aggtgtgatggagatcacat

SEQ ID NO: 23021 - DNA, 20 bp, Artificial Sequence
  Description of Artificial Sequence: Synthetic oligonucleotide
  Target: SCNA; (-) strand; PAM type: NRG; PAM sequence: TGG
aaggtgtgatggagatcaca

SEQ ID NO: 23022 - DNA, 20 bp, Artificial Sequence
  Description of Artificial Sequence: Synthetic oligonucleotide
  Target: SCNA; (-) strand; PAM type: NRG; PAM sequence: GAG
tacatctgcaaggtgtgatg

SEQ ID NO: 23023 - DNA, 20 bp, Artificial Sequence
  Description of Artificial Sequence: Synthetic oligonucleotide
  Target: SCNA; (-) strand; PAM type: NRG; PAM sequence: TGG
tttacatctgcaaggtgtga

SEQ ID NO: 23024 - DNA, 20 bp, Artificial Sequence
  Description of Artificial Sequence: Synthetic oligonucleotide
  Target: SCNA; (-) strand; PAM type: NRG; PAM sequence: AGG
taagaaaatttacatctgca

SEQ ID NO: 23025 - DNA, 20 bp, Artificial Sequence
  Description of Artificial Sequence: Synthetic oligonucleotide
  Target: SCNA; (-) strand; PAM type: NRG; PAM sequence: AAG
ataagaaaatttacatctgc

SEQ ID NO: 23026 - DNA, 20 bp, Artificial Sequence
  Description of Artificial Sequence: Synthetic oligonucleotide
  Target: SCNA; (-) strand; PAM type: NRG; PAM sequence: AAG
catctgtataaaataagaat

SEQ ID NO: 23027 - DNA, 20 bp, Artificial Sequence
  Description of Artificial Sequence: Synthetic oligonucleotide
  Target: SCNA; (-) strand; PAM type: NRG; PAM sequence: AAG
ttgcatcatctgtataaaat

SEQ ID NO: 23028 - DNA, 20 bp, Artificial Sequence
  Description of Artificial Sequence: Synthetic oligonucleotide
  Target: SCNA; (-) strand; PAM type: NRG; PAM sequence: CAG
ggacaacttgcttcgttctt

SEQ ID NO: 23029 - DNA, 20 bp, Artificial Sequence
  Description of Artificial Sequence: Synthetic oligonucleotide
  Target: SCNA; (-) strand; PAM type: NRG; PAM sequence: TGG
cattattagctgtgtgacca

SEQ ID NO: 23030 - DNA, 20 bp, Artificial Sequence
  Description of Artificial Sequence: Synthetic oligonucleotide
  Target: SCNA; (-) strand; PAM type: NRG; PAM sequence: TAG
taggaaaatactatcattat

SEQ ID NO: 23031 - DNA, 20 bp, Artificial Sequence
  Description of Artificial Sequence: Synthetic oligonucleotide
  Target: SCNA; (-) strand; PAM type: NRG; PAM sequence: AGG
tccagttttctatgaggaat

SEQ ID NO: 23032 - DNA, 20 bp, Artificial Sequence
  Description of Artificial Sequence: Synthetic oligonucleotide
  Target: SCNA; (-) strand; PAM type: NRG; PAM sequence: TAG
ctccagttttctatgaggaa

SEQ ID NO: 23033 - DNA, 20 bp, Artificial Sequence
  Description of Artificial Sequence: Synthetic oligonucleotide
  Target: SCNA; (-) strand; PAM type: NRG; PAM sequence: AGG
gccgtctccagttttctatg

SEQ ID NO: 23034 - DNA, 20 bp, Artificial Sequence
  Description of Artificial Sequence: Synthetic oligonucleotide
  Target: SCNA; (-) strand; PAM type: NRG; PAM sequence: GAG
ggccgtctccagttttctat

SEQ ID NO: 23035 - DNA, 20 bp, Artificial Sequence
  Description of Artificial Sequence: Synthetic oligonucleotide
  Target: SCNA; (-) strand; PAM type: NRG; PAM sequence: CAG
atatataatgtggccgtctc

SEQ ID NO: 23036 - DNA, 20 bp, Artificial Sequence
  Description of Artificial Sequence: Synthetic oligonucleotide
  Target: SCNA; (-) strand; PAM type: NRG; PAM sequence: TGG
gtagttaaggatatataatg

SEQ ID NO: 23037 - DNA, 20 bp, Artificial Sequence
  Description of Artificial Sequence: Synthetic oligonucleotide
  Target: SCNA; (-) strand; PAM type: NRG; PAM sequence: AGG
agaaatggtccctgtagtta

SEQ ID NO: 23038 - DNA, 20 bp, Artificial Sequence
  Description of Artificial Sequence: Synthetic oligonucleotide
  Target: SCNA; (-) strand; PAM type: NRG; PAM sequence: AAG
tagaaatggtccctgtagtt

SEQ ID NO: 23039 - DNA, 20 bp, Artificial Sequence
  Description of Artificial Sequence: Synthetic oligonucleotide
  Target: SCNA; (-) strand; PAM type: NRG; PAM sequence: TAG
atttctagaaatggtccctg

SEQ ID NO: 23040 - DNA, 20 bp, Artificial Sequence
  Description of Artificial Sequence: Synthetic oligonucleotide
  Target: SCNA; (-) strand; PAM type: NRG; PAM sequence: TGG
agaaatttgatttctagaaa

SEQ ID NO: 23041 - DNA, 20 bp, Artificial Sequence
  Description of Artificial Sequence: Synthetic oligonucleotide
  Target: SCNA; (-) strand; PAM type: NRG; PAM sequence: TAG
aattctagaaatttgatttc

SEQ ID NO: 23042 - DNA, 20 bp, Artificial Sequence
  Description of Artificial Sequence: Synthetic oligonucleotide
  Target: SCNA; (-) strand; PAM type: NRG; PAM sequence: TAG
atgtggtgtggcttgaattc

SEQ ID NO: 23043 - DNA, 20 bp, Artificial Sequence
  Description of Artificial Sequence: Synthetic oligonucleotide
  Target: SCNA; (-) strand; PAM type: NRG; PAM sequence: TGG
gtaatatattgtatgtggtg

SEQ ID NO: 23044 - DNA, 20 bp, Artificial Sequence
  Description of Artificial Sequence: Synthetic oligonucleotide
  Target: SCNA; (-) strand; PAM type: NRG; PAM sequence: TGG
atggggtaatatattgtatg

SEQ ID NO: 23045 - DNA, 20 bp, Artificial Sequence
  Description of Artificial Sequence: Synthetic oligonucleotide
  Target: SCNA; (-) strand; PAM type: NRG; PAM sequence: GGG
agcattatcaataagctatg

SEQ ID NO: 23046 - DNA, 20 bp, Artificial Sequence
  Description of Artificial Sequence: Synthetic oligonucleotide
  Target: SCNA; (-) strand; PAM type: NRG; PAM sequence: GGG
tagcattatcaataagctat

SEQ ID NO: 23047 - DNA, 20 bp, Artificial Sequence
  Description of Artificial Sequence: Synthetic oligonucleotide
  Target: SCNA; (-) strand; PAM type: NRG; PAM sequence: TGG
ttagcattatcaataagcta

SEQ ID NO: 23048 - DNA, 20 bp, Artificial Sequence
  Description of Artificial Sequence: Synthetic oligonucleotide
  Target: SCNA; (-) strand; PAM type: NRG; PAM sequence: AAG
catattttagcattatcaat

SEQ ID NO: 23049 - DNA, 20 bp, Artificial Sequence
  Description of Artificial Sequence: Synthetic oligonucleotide
  Target: SCNA; (-) strand; PAM type: NRG; PAM sequence: TAG
tgcaaagatatcccatattt

SEQ ID NO: 23050 - DNA, 20 bp, Artificial Sequence
  Description of Artificial Sequence: Synthetic oligonucleotide
  Target: SCNA; (-) strand; PAM type: NRG; PAM sequence: AAG
aatttaaggatctctatgca

SEQ ID NO: 23051 - DNA, 20 bp, Artificial Sequence
  Description of Artificial Sequence: Synthetic oligonucleotide
  Target: SCNA; (-) strand; PAM type: NRG; PAM sequence: AGG
tcatattctagcacaattta

SEQ ID NO: 23052 - DNA, 20 bp, Artificial Sequence
  Description of Artificial Sequence: Synthetic oligonucleotide
  Target: SCNA; (-) strand; PAM type: NRG; PAM sequence: AAG
ctcatattctagcacaattt

SEQ ID NO: 23053 - DNA, 20 bp, Artificial Sequence
  Description of Artificial Sequence: Synthetic oligonucleotide
  Target: SCNA; (-) strand; PAM type: NRG; PAM sequence: TAG
tgcaaaaagatctcatattc

SEQ ID NO: 23054 - DNA, 20 bp, Artificial Sequence
  Description of Artificial Sequence: Synthetic oligonucleotide
  Target: SCNA; (-) strand; PAM type: NRG; PAM sequence: AAG
cgagaggatctctatgcaaa

SEQ ID NO: 23055 - DNA, 20 bp, Artificial Sequence
  Description of Artificial Sequence: Synthetic oligonucleotide
  Target: SCNA; (-) strand; PAM type: NRG; PAM sequence: AGG
gcaggaattctctatgcgag

SEQ ID NO: 23056 - DNA, 20 bp, Artificial Sequence
  Description of Artificial Sequence: Synthetic oligonucleotide
  Target: SCNA; (-) strand; PAM type: NRG; PAM sequence: GAG
agcaggaattctctatgcga

SEQ ID NO: 23057 - DNA, 20 bp, Artificial Sequence
  Description of Artificial Sequence: Synthetic oligonucleotide
  Target: SCNA; (-) strand; PAM type: NRG; PAM sequence: GAG
gtagcaggaattctctatgc

SEQ ID NO: 23058 - DNA, 20 bp, Artificial Sequence
  Description of Artificial Sequence: Synthetic oligonucleotide
  Target: SCNA; (-) strand; PAM type: NRG; PAM sequence: AGG
aacattgattcttgagtagc

SEQ ID NO: 23059 - DNA, 20 bp, Artificial Sequence
  Description of Artificial Sequence: Synthetic oligonucleotide
  Target: SCNA; (-) strand; PAM type: NRG; PAM sequence: CAG
taacattgattcttgagtag

SEQ ID NO: 23060 - DNA, 20 bp, Artificial Sequence
  Description of Artificial Sequence: Synthetic oligonucleotide
  Target: SCNA; (-) strand; PAM type: NRG; PAM sequence: TAG
gtctaacattgattcttgag

SEQ ID NO: 23061 - DNA, 20 bp, Artificial Sequence
  Description of Artificial Sequence: Synthetic oligonucleotide
  Target: SCNA; (-) strand; PAM type: NRG; PAM sequence: GAG
aatgtctaacattgattctt

SEQ ID NO: 23062 - DNA, 20 bp, Artificial Sequence
  Description of Artificial Sequence: Synthetic oligonucleotide
  Target: SCNA; (-) strand; PAM type: NRG; PAM sequence: GAG
aaaagaacactgtgagcaca

SEQ ID NO: 23063 - DNA, 20 bp, Artificial Sequence
  Description of Artificial Sequence: Synthetic oligonucleotide
  Target: SCNA; (-) strand; PAM type: NRG; PAM sequence: CAG
agaaaagaacactgtgagca

SEQ ID NO: 23064 - DNA, 20 bp, Artificial Sequence
  Description of Artificial Sequence: Synthetic oligonucleotide
  Target: SCNA; (-) strand; PAM type: NRG; PAM sequence: GAG
agaagagaaaagaacactgt

SEQ ID NO: 23065 - DNA, 20 bp, Artificial Sequence
  Description of Artificial Sequence: Synthetic oligonucleotide
  Target: SCNA; (-) strand; PAM type: NRG; PAM sequence: AAG
ttttttttgacagaagagaa

SEQ ID NO: 23066 - DNA, 20 bp, Artificial Sequence
  Description of Artificial Sequence: Synthetic oligonucleotide
  Target: SCNA; (-) strand; PAM type: NRG; PAM sequence: GAG
tttttttttttttgacagaa

SEQ ID NO: 23067 - DNA, 20 bp, Artificial Sequence
  Description of Artificial Sequence: Synthetic oligonucleotide
  Target: SCNA; (-) strand; PAM type: NRG; PAM sequence: AAG
tgtttttttttttttgacag

SEQ ID NO: 23068 - DNA, 20 bp, Artificial Sequence
  Description of Artificial Sequence: Synthetic oligonucleotide
  Target: SCNA; (-) strand; PAM type: NRG; PAM sequence: CAG
gtttgtttttttttttttga

SEQ ID NO: 23069 - DNA, 20 bp, Artificial Sequence
  Description of Artificial Sequence: Synthetic oligonucleotide
  Target: SCNA; (-) strand; PAM type: NRG; PAM sequence: TGG
aggtcacaagtaaaataagg

SEQ ID NO: 23070 - DNA, 20 bp, Artificial Sequence
  Description of Artificial Sequence: Synthetic oligonucleotide
  Target: SCNA; (-) strand; PAM type: NRG; PAM sequence: AGG
tgaaggtcacaagtaaaata

SEQ ID NO: 23071 - DNA, 20 bp, Artificial Sequence
  Description of Artificial Sequence: Synthetic oligonucleotide
  Target: SCNA; (-) strand; PAM type: NRG; PAM sequence: AAG
ctgaaggtcacaagtaaaat

SEQ ID NO: 23072 - DNA, 20 bp, Artificial Sequence
  Description of Artificial Sequence: Synthetic oligonucleotide
  Target: SCNA; (-) strand; PAM type: NRG; PAM sequence: AAG
tacttggtactgaaggtcac

SEQ ID NO: 23073 - DNA, 20 bp, Artificial Sequence
  Description of Artificial Sequence: Synthetic oligonucleotide
  Target: SCNA; (-) strand; PAM type: NRG; PAM sequence: AGG
ccagtcttacttggtactga

SEQ ID NO: 23074 - DNA, 20 bp, Artificial Sequence
  Description of Artificial Sequence: Synthetic oligonucleotide
  Target: SCNA; (-) strand; PAM type: NRG; PAM sequence: AAG
tccagtcttacttggtactg

SEQ ID NO: 23075 - DNA, 20 bp, Artificial Sequence
  Description of Artificial Sequence: Synthetic oligonucleotide
  Target: SCNA; (-) strand; PAM type: NRG; PAM sequence: TGG
atattctatccagtcttact

SEQ ID NO: 23076 - DNA, 20 bp, Artificial Sequence
  Description of Artificial Sequence: Synthetic oligonucleotide
  Target: SCNA; (-) strand; PAM type: NRG; PAM sequence: CAG
atttatcttgatattctatc

SEQ ID NO: 23077 - DNA, 20 bp, Artificial Sequence
  Description of Artificial Sequence: Synthetic oligonucleotide
  Target: SCNA; (-) strand; PAM type: NRG; PAM sequence: AGG
accatgataatgcgacagaa

SEQ ID NO: 23078 - DNA, 20 bp, Artificial Sequence
  Description of Artificial Sequence: Synthetic oligonucleotide
  Target: SCNA; (-) strand; PAM type: NRG; PAM sequence: AAG
aaccatgataatgcgacaga

SEQ ID NO: 23079 - DNA, 20 bp, Artificial Sequence
  Description of Artificial Sequence: Synthetic oligonucleotide
  Target: SCNA; (-) strand; PAM type: NRG; PAM sequence: CAG
gggcaaccatgataatgcga

SEQ ID NO: 23080 - DNA, 20 bp, Artificial Sequence
  Description of Artificial Sequence: Synthetic oligonucleotide
  Target: SCNA; (-) strand; PAM type: NRG; PAM sequence: GGG
ttccaaacctcttaacttct

SEQ ID NO: 23081 - DNA, 20 bp, Artificial Sequence
  Description of Artificial Sequence: Synthetic oligonucleotide
  Target: SCNA; (-) strand; PAM type: NRG; PAM sequence: TGG
attccaaacctcttaacttc

SEQ ID NO: 23082 - DNA, 20 bp, Artificial Sequence
  Description of Artificial Sequence: Synthetic oligonucleotide
  Target: SCNA; (-) strand; PAM type: NRG; PAM sequence: TGG
tcttgttctccttatcagac

SEQ ID NO: 23083 - DNA, 20 bp, Artificial Sequence
  Description of Artificial Sequence: Synthetic oligonucleotide
  Target: SCNA; (-) strand; PAM type: NRG; PAM sequence: CAG
caatgtcttgttctccttat

SEQ ID NO: 23084 - DNA, 20 bp, Artificial Sequence
  Description of Artificial Sequence: Synthetic oligonucleotide
  Target: SCNA; (-) strand; PAM type: NRG; PAM sequence: CAG
cccagatctattttagactc

SEQ ID NO: 23085 - DNA, 20 bp, Artificial Sequence
  Description of Artificial Sequence: Synthetic oligonucleotide
  Target: SCNA; (-) strand; PAM type: NRG; PAM sequence: TAG
tagctatcccagatctattt

SEQ ID NO: 23086 - DNA, 20 bp, Artificial Sequence
  Description of Artificial Sequence: Synthetic oligonucleotide
  Target: SCNA; (-) strand; PAM type: NRG; PAM sequence: CAG
agctaaagtaatagctatcc

SEQ ID NO: 23087 - DNA, 20 bp, Artificial Sequence
  Description of Artificial Sequence: Synthetic oligonucleotide
  Target: SCNA; (-) strand; PAM type: NRG; PAM sequence: TAG
tctcagaaaagctaaagtaa

SEQ ID NO: 23088 - DNA, 20 bp, Artificial Sequence
  Description of Artificial Sequence: Synthetic oligonucleotide
  Target: SCNA; (-) strand; PAM type: NRG; PAM sequence: AAG
attaaatctcagaaaagcta

SEQ ID NO: 23089 - DNA, 20 bp, Artificial Sequence
  Description of Artificial Sequence: Synthetic oligonucleotide
  Target: SCNA; (-) strand; PAM type: NRG; PAM sequence: AAG
tcccatattaaatctcagaa

SEQ ID NO: 23090 - DNA, 20 bp, Artificial Sequence
  Description of Artificial Sequence: Synthetic oligonucleotide
  Target: SCNA; (-) strand; PAM type: NRG; PAM sequence: CAG
ctcattcccatattaaatct

SEQ ID NO: 23091 - DNA, 20 bp, Artificial Sequence
  Description of Artificial Sequence: Synthetic oligonucleotide
  Target: SCNA; (-) strand; PAM type: NRG; PAM sequence: TAG
gaacaagcatctctgtgtaa

SEQ ID NO: 23092 - DNA, 20 bp, Artificial Sequence
  Description of Artificial Sequence: Synthetic oligonucleotide
  Target: SCNA; (-) strand; PAM type: NRG; PAM sequence: AAG
aggccttaggaagaaggaac

SEQ ID NO: 23093 - DNA, 20 bp, Artificial Sequence
  Description of Artificial Sequence: Synthetic oligonucleotide
  Target: SCNA; (-) strand; PAM type: NRG; PAM sequence: AGG
gttcttaggccttaggaaga

SEQ ID NO: 23094 - DNA, 20 bp, Artificial Sequence
  Description of Artificial Sequence: Synthetic oligonucleotide
  Target: SCNA; (-) strand; PAM type: NRG; PAM sequence: AAG
tgttcttaggccttaggaag

SEQ ID NO: 23095 - DNA, 20 bp, Artificial Sequence
  Description of Artificial Sequence: Synthetic oligonucleotide
  Target: SCNA; (-) strand; PAM type: NRG; PAM sequence: AAG
aaatgttcttaggccttagg

SEQ ID NO: 23096 - DNA, 20 bp, Artificial Sequence
  Description of Artificial Sequence: Synthetic oligonucleotide
  Target: SCNA; (-) strand; PAM type: NRG; PAM sequence: AGG
gagaaatgttcttaggcctt

SEQ ID NO: 23097 - DNA, 20 bp, Artificial Sequence
  Description of Artificial Sequence: Synthetic oligonucleotide
  Target: SCNA; (-) strand; PAM type: NRG; PAM sequence: TAG
tgagaaatgttcttaggcct

SEQ ID NO: 23098 - DNA, 20 bp, Artificial Sequence
  Description of Artificial Sequence: Synthetic oligonucleotide
  Target: SCNA; (-) strand; PAM type: NRG; PAM sequence: AGG
aatgagtgagaaatgttctt

SEQ ID NO: 23099 - DNA, 20 bp, Artificial Sequence
  Description of Artificial Sequence: Synthetic oligonucleotide
  Target: SCNA; (-) strand; PAM type: NRG; PAM sequence: TAG
gaatgagtgagaaatgttct

SEQ ID NO: 23100 - DNA, 20 bp, Artificial Sequence
  Description of Artificial Sequence: Synthetic oligonucleotide
  Target: SCNA; (-) strand; PAM type: NRG; PAM sequence: GAG
tctaggatagaagaatgagt

SEQ ID NO: 23101 - DNA, 20 bp, Artificial Sequence
  Description of Artificial Sequence: Synthetic oligonucleotide
  Target: SCNA; (-) strand; PAM type: NRG; PAM sequence: GAG
gaattctaggatagaagaat

SEQ ID NO: 23102 - DNA, 20 bp, Artificial Sequence
  Description of Artificial Sequence: Synthetic oligonucleotide
  Target: SCNA; (-) strand; PAM type: NRG; PAM sequence: AAG
cattatgaattctaggatag

SEQ ID NO: 23103 - DNA, 20 bp, Artificial Sequence
  Description of Artificial Sequence: Synthetic oligonucleotide
  Target: SCNA; (-) strand; PAM type: NRG; PAM sequence: TAG
taccattatgaattctagga

SEQ ID NO: 23104 - DNA, 20 bp, Artificial Sequence
  Description of Artificial Sequence: Synthetic oligonucleotide
  Target: SCNA; (-) strand; PAM type: NRG; PAM sequence: AGG
catataccattatgaattct

SEQ ID NO: 23105 - DNA, 20 bp, Artificial Sequence
  Description of Artificial Sequence: Synthetic oligonucleotide
  Target: SCNA; (-) strand; PAM type: NRG; PAM sequence: TAG
ccatataccattatgaattc

SEQ ID NO: 23106 - DNA, 20 bp, Artificial Sequence
  Description of Artificial Sequence: Synthetic oligonucleotide
  Target: SCNA; (-) strand; PAM type: NRG; PAM sequence: CAG
acatttaatgaatttctgtg

SEQ ID NO: 23107 - DNA, 20 bp, Artificial Sequence
  Description of Artificial Sequence: Synthetic oligonucleotide
  Target: SCNA; (-) strand; PAM type: NRG; PAM sequence: AGG
agcccataaaaaattatatt

SEQ ID NO: 23108 - DNA, 20 bp, Artificial Sequence
  Description of Artificial Sequence: Synthetic oligonucleotide
  Target: SCNA; (-) strand; PAM type: NRG; PAM sequence: TAG
gagcccataaaaaattatat

SEQ ID NO: 23109 - DNA, 20 bp, Artificial Sequence
  Description of Artificial Sequence: Synthetic oligonucleotide
  Target: SCNA; (-) strand; PAM type: NRG; PAM sequence: GAG
agaaaatgcagaacataaat

SEQ ID NO: 23110 - DNA, 20 bp, Artificial Sequence
  Description of Artificial Sequence: Synthetic oligonucleotide
  Target: SCNA; (-) strand; PAM type: NRG; PAM sequence: CAG
agtaattttataagaaaatg

SEQ ID NO: 23111 - DNA, 20 bp, Artificial Sequence
  Description of Artificial Sequence: Synthetic oligonucleotide
  Target: SCNA; (-) strand; PAM type: NRG; PAM sequence: AAG
aatctaaaaagtaattttat

SEQ ID NO: 23112 - DNA, 20 bp, Artificial Sequence
  Description of Artificial Sequence: Synthetic oligonucleotide
  Target: SCNA; (-) strand; PAM type: NRG; PAM sequence: AAG
gagcagcaaaacaatctaaa

SEQ ID NO: 23113 - DNA, 20 bp, Artificial Sequence
  Description of Artificial Sequence: Synthetic oligonucleotide
  Target: SCNA; (-) strand; PAM type: NRG; PAM sequence: CAG
gcaaccagtaatgattcgag

SEQ ID NO: 23114 - DNA, 20 bp, Artificial Sequence
  Description of Artificial Sequence: Synthetic oligonucleotide
  Target: SCNA; (-) strand; PAM type: NRG; PAM sequence: GAG
atagcaaccagtaatgattc

SEQ ID NO: 23115 - DNA, 20 bp, Artificial Sequence
  Description of Artificial Sequence: Synthetic oligonucleotide
  Target: SCNA; (-) strand; PAM type: NRG; PAM sequence: CAG
ggtgatccctagatagcaac

SEQ ID NO: 23116 - DNA, 20 bp, Artificial Sequence
  Description of Artificial Sequence: Synthetic oligonucleotide
  Target: SCNA; (-) strand; PAM type: NRG; PAM sequence: TAG
gtttgaaggtgatccctaga

SEQ ID NO: 23117 - DNA, 20 bp, Artificial Sequence
  Description of Artificial Sequence: Synthetic oligonucleotide
  Target: SCNA; (-) strand; PAM type: NRG; PAM sequence: TAG
aggggtttgaaggtgatccc

SEQ ID NO: 23118 - DNA, 20 bp, Artificial Sequence
  Description of Artificial Sequence: Synthetic oligonucleotide
  Target: SCNA; (-) strand; PAM type: NRG; PAM sequence: AGG
gtattttgaaaggggtttga

SEQ ID NO: 23119 - DNA, 20 bp, Artificial Sequence
  Description of Artificial Sequence: Synthetic oligonucleotide
  Target: SCNA; (-) strand; PAM type: NRG; PAM sequence: AAG
tgtattttgaaaggggtttg

SEQ ID NO: 23120 - DNA, 20 bp, Artificial Sequence
  Description of Artificial Sequence: Synthetic oligonucleotide
  Target: SCNA; (-) strand; PAM type: NRG; PAM sequence: GGG
tgaacattgtattttgaaag

SEQ ID NO: 23121 - DNA, 20 bp, Artificial Sequence
  Description of Artificial Sequence: Synthetic oligonucleotide
  Target: SCNA; (-) strand; PAM type: NRG; PAM sequence: GGG
ttgaacattgtattttgaaa

SEQ ID NO: 23122 - DNA, 20 bp, Artificial Sequence
  Description of Artificial Sequence: Synthetic oligonucleotide
  Target: SCNA; (-) strand; PAM type: NRG; PAM sequence: AGG
tttgaacattgtattttgaa

SEQ ID NO: 23123 - DNA, 20 bp, Artificial Sequence
  Description of Artificial Sequence: Synthetic oligonucleotide
  Target: SCNA; (-) strand; PAM type: NRG; PAM sequence: AAG
ttttgaacattgtattttga

SEQ ID NO: 23124 - DNA, 20 bp, Artificial Sequence
  Description of Artificial Sequence: Synthetic oligonucleotide
  Target: SCNA; (-) strand; PAM type: NRG; PAM sequence: AGG
caggtgtgagccattgtgcc

SEQ ID NO: 23125 - DNA, 20 bp, Artificial Sequence
  Description of Artificial Sequence: Synthetic oligonucleotide
  Target: SCNA; (-) strand; PAM type: NRG; PAM sequence: CAG
acaggtgtgagccattgtgc

SEQ ID NO: 23126 - DNA, 20 bp, Artificial Sequence
  Description of Artificial Sequence: Synthetic oligonucleotide
  Target: SCNA; (-) strand; PAM type: NRG; PAM sequence: GAG
cagtgctgggatacaggtgt

SEQ ID NO: 23127 - DNA, 20 bp, Artificial Sequence
  Description of Artificial Sequence: Synthetic oligonucleotide
  Target: SCNA; (-) strand; PAM type: NRG; PAM sequence: AGG
tcccaacagtgctgggatac

SEQ ID NO: 23128 - DNA, 20 bp, Artificial Sequence
  Description of Artificial Sequence: Synthetic oligonucleotide
  Target: SCNA; (-) strand; PAM type: NRG; PAM sequence: CAG
ctcccaacagtgctgggata

SEQ ID NO: 23129 - DNA, 20 bp, Artificial Sequence
  Description of Artificial Sequence: Synthetic oligonucleotide
  Target: SCNA; (-) strand; PAM type: NRG; PAM sequence: GGG
ctcggcctcccaacagtgct

SEQ ID NO: 23130 - DNA, 20 bp, Artificial Sequence
  Description of Artificial Sequence: Synthetic oligonucleotide
  Target: SCNA; (-) strand; PAM type: NRG; PAM sequence: TGG
cctcggcctcccaacagtgc

SEQ ID NO: 23131 - DNA, 20 bp, Artificial Sequence
  Description of Artificial Sequence: Synthetic oligonucleotide
  Target: SCNA; (-) strand; PAM type: NRG; PAM sequence: CAG
ctcctgcctcggcctcccaa

SEQ ID NO: 23132 - DNA, 20 bp, Artificial Sequence
  Description of Artificial Sequence: Synthetic oligonucleotide
  Target: SCNA; (-) strand; PAM type: NRG; PAM sequence: CGG
ctcaagcaattctcctgcct

SEQ ID NO: 23133 - DNA, 20 bp, Artificial Sequence
  Description of Artificial Sequence: Synthetic oligonucleotide
  Target: SCNA; (-) strand; PAM type: NRG; PAM sequence: AAG
ggcctcgaactcctgggctc

SEQ ID NO: 23134 - DNA, 20 bp, Artificial Sequence
  Description of Artificial Sequence: Synthetic oligonucleotide
  Target: SCNA; (-) strand; PAM type: NRG; PAM sequence: GGG
caggctggcctcgaactcct

SEQ ID NO: 23135 - DNA, 20 bp, Artificial Sequence
  Description of Artificial Sequence: Synthetic oligonucleotide
  Target: SCNA; (-) strand; PAM type: NRG; PAM sequence: TGG
ccaggctggcctcgaactcc

SEQ ID NO: 23136 - DNA, 20 bp, Artificial Sequence
  Description of Artificial Sequence: Synthetic oligonucleotide
  Target: SCNA; (-) strand; PAM type: NRG; PAM sequence: TGG
tctctctatgttgcccaggc

SEQ ID NO: 23137 - DNA, 20 bp, Artificial Sequence
  Description of Artificial Sequence: Synthetic oligonucleotide
  Target: SCNA; (-) strand; PAM type: NRG; PAM sequence: AGG
agcgtctctctatgttgccc

SEQ ID NO: 23138 - DNA, 20 bp, Artificial Sequence
  Description of Artificial Sequence: Synthetic oligonucleotide
  Target: SCNA; (-) strand; PAM type: NRG; PAM sequence: CAG
tagcgtctctctatgttgcc

SEQ ID NO: 23139 - DNA, 20 bp, Artificial Sequence
  Description of Artificial Sequence: Synthetic oligonucleotide
  Target: SCNA; (-) strand; PAM type: NRG; PAM sequence: TAG
ttatttatttattatagaga

SEQ ID NO: 23140 - DNA, 20 bp, Artificial Sequence
  Description of Artificial Sequence: Synthetic oligonucleotide
  Target: SCNA; (-) strand; PAM type: NRG; PAM sequence: GAG
ttatttatttatttattata

SEQ ID NO: 23141 - DNA, 20 bp, Artificial Sequence
  Description of Artificial Sequence: Synthetic oligonucleotide
  Target: SCNA; (-) strand; PAM type: NRG; PAM sequence: TAG
atttatttatttatttatta

SEQ ID NO: 23142 - DNA, 20 bp, Artificial Sequence
  Description of Artificial Sequence: Synthetic oligonucleotide
  Target: SCNA; (-) strand; PAM type: NRG; PAM sequence: CAG
aagctagaaatgcattttaa

SEQ ID NO: 23143 - DNA, 20 bp, Artificial Sequence
  Description of Artificial Sequence: Synthetic oligonucleotide
  Target: SCNA; (-) strand; PAM type: NRG; PAM sequence: TAG
atcctttatgtgacctaagc

SEQ ID NO: 23144 - DNA, 20 bp, Artificial Sequence
  Description of Artificial Sequence: Synthetic oligonucleotide
  Target: SCNA; (-) strand; PAM type: NRG; PAM sequence: AAG
tcagatcctttatgtgacct

SEQ ID NO: 23145 - DNA, 20 bp, Artificial Sequence
  Description of Artificial Sequence: Synthetic oligonucleotide
  Target: SCNA; (-) strand; PAM type: NRG; PAM sequence: CAG
cattgtttacatgcccattt

SEQ ID NO: 23146 - DNA, 20 bp, Artificial Sequence
  Description of Artificial Sequence: Synthetic oligonucleotide
  Target: SCNA; (-) strand; PAM type: NRG; PAM sequence: AAG
gtagagtcaatacttttttc

SEQ ID NO: 23147 - DNA, 20 bp, Artificial Sequence
  Description of Artificial Sequence: Synthetic oligonucleotide
  Target: SCNA; (-) strand; PAM type: NRG; PAM sequence: GAG
aaatttcacacaagccagta

SEQ ID NO: 23148 - DNA, 20 bp, Artificial Sequence
  Description of Artificial Sequence: Synthetic oligonucleotide
  Target: SCNA; (-) strand; PAM type: NRG; PAM sequence: TAG
ggaaatttcacacaagccag

SEQ ID NO: 23149 - DNA, 20 bp, Artificial Sequence
  Description of Artificial Sequence: Synthetic oligonucleotide
  Target: SCNA; (-) strand; PAM type: NRG; PAM sequence: CAG
cagggaaatttcacacaagc

SEQ ID NO: 23150 - DNA, 20 bp, Artificial Sequence
  Description of Artificial Sequence: Synthetic oligonucleotide
  Target: SCNA; (-) strand; PAM type: NRG; PAM sequence: AAG
cattcagggaaatttcacac

SEQ ID NO: 23151 - DNA, 20 bp, Artificial Sequence
  Description of Artificial Sequence: Synthetic oligonucleotide
  Target: SCNA; (-) strand; PAM type: NRG; PAM sequence: GGG
ccattgtctgatttcattca

SEQ ID NO: 23152 - DNA, 20 bp, Artificial Sequence
  Description of Artificial Sequence: Synthetic oligonucleotide
  Target: SCNA; (-) strand; PAM type: NRG; PAM sequence: AGG
accattgtctgatttcattc

SEQ ID NO: 23153 - DNA, 20 bp, Artificial Sequence
  Description of Artificial Sequence: Synthetic oligonucleotide
  Target: SCNA; (-) strand; PAM type: NRG; PAM sequence: CAG
caccattgtctgatttcatt

SEQ ID NO: 23154 - DNA, 20 bp, Artificial Sequence
  Description of Artificial Sequence: Synthetic oligonucleotide
  Target: SCNA; (-) strand; PAM type: NRG; PAM sequence: GAG
ttctaagatgcattgtttct

SEQ ID NO: 23155 - DNA, 20 bp, Artificial Sequence
  Description of Artificial Sequence: Synthetic oligonucleotide
  Target: SCNA; (-) strand; PAM type: NRG; PAM sequence: AAG
tggctgatattaactcttct

SEQ ID NO: 23156 - DNA, 20 bp, Artificial Sequence
  Description of Artificial Sequence: Synthetic oligonucleotide
  Target: SCNA; (-) strand; PAM type: NRG; PAM sequence: TGG
ttagtatgatataatgtctt

SEQ ID NO: 23157 - DNA, 20 bp, Artificial Sequence
  Description of Artificial Sequence: Synthetic oligonucleotide
  Target: SCNA; (-) strand; PAM type: NRG; PAM sequence: TAG
cattttattgggagagaagt

SEQ ID NO: 23158 - DNA, 20 bp, Artificial Sequence
  Description of Artificial Sequence: Synthetic oligonucleotide
  Target: SCNA; (-) strand; PAM type: NRG; PAM sequence: AAG
taggcattttattgggagag

SEQ ID NO: 23159 - DNA, 20 bp, Artificial Sequence
  Description of Artificial Sequence: Synthetic oligonucleotide
  Target: SCNA; (-) strand; PAM type: NRG; PAM sequence: GAG
ttctaggcattttattggga

SEQ ID NO: 23160 - DNA, 20 bp, Artificial Sequence
  Description of Artificial Sequence: Synthetic oligonucleotide
  Target: SCNA; (-) strand; PAM type: NRG; PAM sequence: GAG
ttttctaggcattttattgg

SEQ ID NO: 23161 - DNA, 20 bp, Artificial Sequence
  Description of Artificial Sequence: Synthetic oligonucleotide
  Target: SCNA; (-) strand; PAM type: NRG; PAM sequence: GGG
tgttttctaggcattttatt

SEQ ID NO: 23162 - DNA, 20 bp, Artificial Sequence
  Description of Artificial Sequence: Synthetic oligonucleotide
  Target: SCNA; (-) strand; PAM type: NRG; PAM sequence: TGG
ttgttttctaggcattttat

SEQ ID NO: 23163 - DNA, 20 bp, Artificial Sequence
  Description of Artificial Sequence: Synthetic oligonucleotide
  Target: SCNA; (-) strand; PAM type: NRG; PAM sequence: AGG
ttagagatacattgttttct

SEQ ID NO: 23164 - DNA, 20 bp, Artificial Sequence
  Description of Artificial Sequence: Synthetic oligonucleotide
  Target: SCNA; (-) strand; PAM type: NRG; PAM sequence: TAG
gttagagatacattgttttc

SEQ ID NO: 23165 - DNA, 20 bp, Artificial Sequence
  Description of Artificial Sequence: Synthetic oligonucleotide
  Target: SCNA; (-) strand; PAM type: NRG; PAM sequence: GAG
cattgaactttttcttgtta

SEQ ID NO: 23166 - DNA, 20 bp, Artificial Sequence
  Description of Artificial Sequence: Synthetic oligonucleotide
  Target: SCNA; (-) strand; PAM type: NRG; PAM sequence: TAG
agcattgaactttttcttgt

SEQ ID NO: 23167 - DNA, 20 bp, Artificial Sequence
  Description of Artificial Sequence: Synthetic oligonucleotide
  Target: SCNA; (-) strand; PAM type: NRG; PAM sequence: CAG
aatggaattgccagttaaca

SEQ ID NO: 23168 - DNA, 20 bp, Artificial Sequence
  Description of Artificial Sequence: Synthetic oligonucleotide
  Target: SCNA; (-) strand; PAM type: NRG; PAM sequence: CAG
aatattttaaatggaattgc

SEQ ID NO: 23169 - DNA, 20 bp, Artificial Sequence
  Description of Artificial Sequence: Synthetic oligonucleotide
  Target: SCNA; (-) strand; PAM type: NRG; PAM sequence: TGG
gtgtttgaaaatattttaaa

SEQ ID NO: 23170 - DNA, 20 bp, Artificial Sequence
  Description of Artificial Sequence: Synthetic oligonucleotide
  Target: SCNA; (-) strand; PAM type: NRG; PAM sequence: GGG
taattatatttgttacctta

SEQ ID NO: 23171 - DNA, 20 bp, Artificial Sequence
  Description of Artificial Sequence: Synthetic oligonucleotide
  Target: SCNA; (-) strand; PAM type: NRG; PAM sequence: AGG
ataattatatttgttacctt

SEQ ID NO: 23172 - DNA, 20 bp, Artificial Sequence
  Description of Artificial Sequence: Synthetic oligonucleotide
  Target: SCNA; (-) strand; PAM type: NRG; PAM sequence: TAG
aataattatatttgttacct

SEQ ID NO: 23173 - DNA, 20 bp, Artificial Sequence
  Description of Artificial Sequence: Synthetic oligonucleotide
  Target: SCNA; (-) strand; PAM type: NRG; PAM sequence: AGG
ggattattaaaagatttatt

SEQ ID NO: 23174 - DNA, 20 bp, Artificial Sequence
  Description of Artificial Sequence: Synthetic oligonucleotide
  Target: SCNA; (-) strand; PAM type: NRG; PAM sequence: TAG
tggattattaaaagatttat

SEQ ID NO: 23175 - DNA, 20 bp, Artificial Sequence
  Description of Artificial Sequence: Synthetic oligonucleotide
  Target: SCNA; (-) strand; PAM type: NRG; PAM sequence: AAG
gtttctttctggattattaa

SEQ ID NO: 23176 - DNA, 20 bp, Artificial Sequence
  Description of Artificial Sequence: Synthetic oligonucleotide
  Target: SCNA; (-) strand; PAM type: NRG; PAM sequence: TGG
gtcttctaaatgtttctttc

SEQ ID NO: 23177 - DNA, 20 bp, Artificial Sequence
  Description of Artificial Sequence: Synthetic oligonucleotide
  Target: SCNA; (-) strand; PAM type: NRG; PAM sequence: GAG
ctttttatgttagcttttat

SEQ ID NO: 23178 - DNA, 20 bp, Artificial Sequence
  Description of Artificial Sequence: Synthetic oligonucleotide
  Target: SCNA; (-) strand; PAM type: NRG; PAM sequence: TAG
ttttaacctgctttttatgt

SEQ ID NO: 23179 - DNA, 20 bp, Artificial Sequence
  Description of Artificial Sequence: Synthetic oligonucleotide
  Target: SCNA; (-) strand; PAM type: NRG; PAM sequence: TAG
atatgtctatatttttcttg

SEQ ID NO: 23180 - DNA, 20 bp, Artificial Sequence
  Description of Artificial Sequence: Synthetic oligonucleotide
  Target: SCNA; (-) strand; PAM type: NRG; PAM sequence: TAG
tttgaaaatttgcattcgtc

SEQ ID NO: 23181 - DNA, 20 bp, Artificial Sequence
  Description of Artificial Sequence: Synthetic oligonucleotide
  Target: SCNA; (-) strand; PAM type: NRG; PAM sequence: TAG
ttttaaaatttggtaaaata

SEQ ID NO: 23182 - DNA, 20 bp, Artificial Sequence
  Description of Artificial Sequence: Synthetic oligonucleotide
  Target: SCNA; (-) strand; PAM type: NRG; PAM sequence: TGG
taaagttaacttttaaaatt

SEQ ID NO: 23183 - DNA, 20 bp, Artificial Sequence
  Description of Artificial Sequence: Synthetic oligonucleotide
  Target: SCNA; (-) strand; PAM type: NRG; PAM sequence: AAG
caaggttaattcttctttta

SEQ ID NO: 23184 - DNA, 20 bp, Artificial Sequence
  Description of Artificial Sequence: Synthetic oligonucleotide
  Target: SCNA; (-) strand; PAM type: NRG; PAM sequence: AGG
catggattttgctgccacca

SEQ ID NO: 23185 - DNA, 20 bp, Artificial Sequence
  Description of Artificial Sequence: Synthetic oligonucleotide
  Target: SCNA; (-) strand; PAM type: NRG; PAM sequence: AAG
acatggattttgctgccacc

SEQ ID NO: 23186 - DNA, 20 bp, Artificial Sequence
  Description of Artificial Sequence: Synthetic oligonucleotide
  Target: SCNA; (-) strand; PAM type: NRG; PAM sequence: TGG
atcagccagacacacagaca

SEQ ID NO: 23187 - DNA, 20 bp, Artificial Sequence
  Description of Artificial Sequence: Synthetic oligonucleotide
  Target: SCNA; (-) strand; PAM type: NRG; PAM sequence: CAG
acccaaatcagccagacaca

SEQ ID NO: 23188 - DNA, 20 bp, Artificial Sequence
  Description of Artificial Sequence: Synthetic oligonucleotide
  Target: SCNA; (-) strand; PAM type: NRG; PAM sequence: CAG
ttaattgaacccaaatcagc

SEQ ID NO: 23189 - DNA, 20 bp, Artificial Sequence
  Description of Artificial Sequence: Synthetic oligonucleotide
  Target: SCNA; (-) strand; PAM type: NRG; PAM sequence: CAG
gattttaattgaacccaaat

SEQ ID NO: 23190 - DNA, 20 bp, Artificial Sequence
  Description of Artificial Sequence: Synthetic oligonucleotide
  Target: SCNA; (-) strand; PAM type: NRG; PAM sequence: AAG
cacttaagtgttctctaccc

SEQ ID NO: 23191 - DNA, 20 bp, Artificial Sequence
  Description of Artificial Sequence: Synthetic oligonucleotide
  Target: SCNA; (-) strand; PAM type: NRG; PAM sequence: AAG
tttgccctatattttcactt

SEQ ID NO: 23192 - DNA, 20 bp, Artificial Sequence
  Description of Artificial Sequence: Synthetic oligonucleotide
  Target: SCNA; (-) strand; PAM type: NRG; PAM sequence: TGG
tttattcattatattttgta

SEQ ID NO: 23193 - DNA, 20 bp, Artificial Sequence
  Description of Artificial Sequence: Synthetic oligonucleotide
  Target: SCNA; (-) strand; PAM type: NRG; PAM sequence: TGG
ttccttaaaatgttggaatt

SEQ ID NO: 23194 - DNA, 20 bp, Artificial Sequence
  Description of Artificial Sequence: Synthetic oligonucleotide
  Target: SCNA; (-) strand; PAM type: NRG; PAM sequence: TGG
taataccttccttaaaatgt

SEQ ID NO: 23195 - DNA, 20 bp, Artificial Sequence
  Description of Artificial Sequence: Synthetic oligonucleotide
  Target: SCNA; (-) strand; PAM type: NRG; PAM sequence: TAG
taccagacaaatttggatat

SEQ ID NO: 23196 - DNA, 20 bp, Artificial Sequence
  Description of Artificial Sequence: Synthetic oligonucleotide
  Target: SCNA; (-) strand; PAM type: NRG; PAM sequence: TGG
tttttcttaccagacaaatt

SEQ ID NO: 23197 - DNA, 20 bp, Artificial Sequence
  Description of Artificial Sequence: Synthetic oligonucleotide
  Target: SCNA; (-) strand; PAM type: NRG; PAM sequence: CAG
catgctcacctttttcttac

SEQ ID NO: 23198 - DNA, 20 bp, Artificial Sequence
  Description of Artificial Sequence: Synthetic oligonucleotide
  Target: SCNA; (-) strand; PAM type: NRG; PAM sequence: GGG
taatggcaaccactatcata

SEQ ID NO: 23199 - DNA, 20 bp, Artificial Sequence
  Description of Artificial Sequence: Synthetic oligonucleotide
  Target: SCNA; (-) strand; PAM type: NRG; PAM sequence: AGG
gtaatggcaaccactatcat

SEQ ID NO: 23200 - DNA, 20 bp, Artificial Sequence
  Description of Artificial Sequence: Synthetic oligonucleotide
  Target: SCNA; (-) strand; PAM type: NRG; PAM sequence: TAG
agtaatggcaaccactatca

SEQ ID NO: 23201 - DNA, 20 bp, Artificial Sequence
  Description of Artificial Sequence: Synthetic oligonucleotide
  Target: SCNA; (-) strand; PAM type: NRG; PAM sequence: TGG
cctcacaaaagtagaagtaa

SEQ ID NO: 23202 - DNA, 20 bp, Artificial Sequence
  Description of Artificial Sequence: Synthetic oligonucleotide
  Target: SCNA; (-) strand; PAM type: NRG; PAM sequence: AAG
attctgcctcacaaaagtag

SEQ ID NO: 23203 - DNA, 20 bp, Artificial Sequence
  Description of Artificial Sequence: Synthetic oligonucleotide
  Target: SCNA; (-) strand; PAM type: NRG; PAM sequence: TAG
cctattctgcctcacaaaag

SEQ ID NO: 23204 - DNA, 20 bp, Artificial Sequence
  Description of Artificial Sequence: Synthetic oligonucleotide
  Target: SCNA; (-) strand; PAM type: NRG; PAM sequence: AAG
ccacctattctgcctcacaa

SEQ ID NO: 23205 - DNA, 20 bp, Artificial Sequence
  Description of Artificial Sequence: Synthetic oligonucleotide
  Target: SCNA; (-) strand; PAM type: NRG; PAM sequence: GAG
ataaaatcagaagagcccta

SEQ ID NO: 23206 - DNA, 20 bp, Artificial Sequence
  Description of Artificial Sequence: Synthetic oligonucleotide
  Target: SCNA; (-) strand; PAM type: NRG; PAM sequence: TAG
gaataaaatcagaagagccc

SEQ ID NO: 23207 - DNA, 20 bp, Artificial Sequence
  Description of Artificial Sequence: Synthetic oligonucleotide
  Target: SCNA; (-) strand; PAM type: NRG; PAM sequence: GAG
ttgatagaataaaatcagaa

SEQ ID NO: 23208 - DNA, 20 bp, Artificial Sequence
  Description of Artificial Sequence: Synthetic oligonucleotide
  Target: SCNA; (-) strand; PAM type: NRG; PAM sequence: AAG
aattgatagaataaaatcag

SEQ ID NO: 23209 - DNA, 20 bp, Artificial Sequence
  Description of Artificial Sequence: Synthetic oligonucleotide
  Target: SCNA; (-) strand; PAM type: NRG; PAM sequence: CAG
tataattgatagaataaaat

SEQ ID NO: 23210 - DNA, 20 bp, Artificial Sequence
  Description of Artificial Sequence: Synthetic oligonucleotide
  Target: SCNA; (-) strand; PAM type: NRG; PAM sequence: TAG
ctcagacctcttataattga

SEQ ID NO: 23211 - DNA, 20 bp, Artificial Sequence
  Description of Artificial Sequence: Synthetic oligonucleotide
  Target: SCNA; (-) strand; PAM type: NRG; PAM sequence: CAG
cttttttcatttcctgttct

SEQ ID NO: 23212 - DNA, 20 bp, Artificial Sequence
  Description of Artificial Sequence: Synthetic oligonucleotide
  Target: SCNA; (-) strand; PAM type: NRG; PAM sequence: TAG
gctagatggcttgagggtca

SEQ ID NO: 23213 - DNA, 20 bp, Artificial Sequence
  Description of Artificial Sequence: Synthetic oligonucleotide
  Target: SCNA; (-) strand; PAM type: NRG; PAM sequence: GGG
gtttgagctagatggcttga

SEQ ID NO: 23214 - DNA, 20 bp, Artificial Sequence
  Description of Artificial Sequence: Synthetic oligonucleotide
  Target: SCNA; (-) strand; PAM type: NRG; PAM sequence: AGG
cgtttgagctagatggcttg

SEQ ID NO: 23215 - DNA, 20 bp, Artificial Sequence
  Description of Artificial Sequence: Synthetic oligonucleotide
  Target: SCNA; (-) strand; PAM type: NRG; PAM sequence: GAG
tcgtttgagctagatggctt

SEQ ID NO: 23216 - DNA, 20 bp, Artificial Sequence
  Description of Artificial Sequence: Synthetic oligonucleotide
  Target: SCNA; (-) strand; PAM type: NRG; PAM sequence: TGG
gtgaaatcgtttgagctaga

SEQ ID NO: 23217 - DNA, 20 bp, Artificial Sequence
  Description of Artificial Sequence: Synthetic oligonucleotide
  Target: SCNA; (-) strand; PAM type: NRG; PAM sequence: TAG
gccagtgaaatcgtttgagc

SEQ ID NO: 23218 - DNA, 20 bp, Artificial Sequence
  Description of Artificial Sequence: Synthetic oligonucleotide
  Target: SCNA; (-) strand; PAM type: NRG; PAM sequence: GAG
agatgccagtgaaatcgttt

SEQ ID NO: 23219 - DNA, 20 bp, Artificial Sequence
  Description of Artificial Sequence: Synthetic oligonucleotide
  Target: SCNA; (-) strand; PAM type: NRG; PAM sequence: CAG
atatatcagatcctagatgc

SEQ ID NO: 23220 - DNA, 20 bp, Artificial Sequence
  Description of Artificial Sequence: Synthetic oligonucleotide
  Target: SCNA; (-) strand; PAM type: NRG; PAM sequence: TAG
atccaaaatatatcagatcc

SEQ ID NO: 23221 - DNA, 20 bp, Artificial Sequence
  Description of Artificial Sequence: Synthetic oligonucleotide
  Target: SCNA; (-) strand; PAM type: NRG; PAM sequence: CAG
ttccccaatccaaaatatat

SEQ ID NO: 23222 - DNA, 20 bp, Artificial Sequence
  Description of Artificial Sequence: Synthetic oligonucleotide
  Target: SCNA; (-) strand; PAM type: NRG; PAM sequence: TAG
aaattatgtggaagggccat

SEQ ID NO: 23223 - DNA, 20 bp, Artificial Sequence
  Description of Artificial Sequence: Synthetic oligonucleotide
  Target: SCNA; (-) strand; PAM type: NRG; PAM sequence: GGG
tacagcaaaattatgtggaa

SEQ ID NO: 23224 - DNA, 20 bp, Artificial Sequence
  Description of Artificial Sequence: Synthetic oligonucleotide
  Target: SCNA; (-) strand; PAM type: NRG; PAM sequence: AGG
ctacagcaaaattatgtgga

SEQ ID NO: 23225 - DNA, 20 bp, Artificial Sequence
  Description of Artificial Sequence: Synthetic oligonucleotide
  Target: SCNA; (-) strand; PAM type: NRG; PAM sequence: AAG
cctacagcaaaattatgtgg

SEQ ID NO: 23226 - DNA, 20 bp, Artificial Sequence
  Description of Artificial Sequence: Synthetic oligonucleotide
  Target: SCNA; (-) strand; PAM type: NRG; PAM sequence: TGG
tatcctacagcaaaattatg

SEQ ID NO: 23227 - DNA, 20 bp, Artificial Sequence
  Description of Artificial Sequence: Synthetic oligonucleotide
  Target: SCNA; (-) strand; PAM type: NRG; PAM sequence: CAG
gggaatcaattgatatccta

SEQ ID NO: 23228 - DNA, 20 bp, Artificial Sequence
  Description of Artificial Sequence: Synthetic oligonucleotide
  Target: SCNA; (-) strand; PAM type: NRG; PAM sequence: GGG
acaatccttcctctgaaaca

SEQ ID NO: 23229 - DNA, 20 bp, Artificial Sequence
  Description of Artificial Sequence: Synthetic oligonucleotide
  Target: SCNA; (-) strand; PAM type: NRG; PAM sequence: AGG
aacaatccttcctctgaaac

SEQ ID NO: 23230 - DNA, 20 bp, Artificial Sequence
  Description of Artificial Sequence: Synthetic oligonucleotide
  Target: SCNA; (-) strand; PAM type: NRG; PAM sequence: CAG
taacaatccttcctctgaaa

SEQ ID NO: 23231 - DNA, 20 bp, Artificial Sequence
  Description of Artificial Sequence: Synthetic oligonucleotide
  Target: SCNA; (-) strand; PAM type: NRG; PAM sequence: TAG
tgatctggttgaaaccattt

SEQ ID NO: 23232 - DNA, 20 bp, Artificial Sequence
  Description of Artificial Sequence: Synthetic oligonucleotide
  Target: SCNA; (-) strand; PAM type: NRG; PAM sequence: TGG
gcttactttaatgtttgatc

SEQ ID NO: 23233 - DNA, 20 bp, Artificial Sequence
  Description of Artificial Sequence: Synthetic oligonucleotide
  Target: SCNA; (-) strand; PAM type: NRG; PAM sequence: TAG
tttatagtaaatgaagaatc

SEQ ID NO: 23234 - DNA, 20 bp, Artificial Sequence
  Description of Artificial Sequence: Synthetic oligonucleotide
  Target: SCNA; (-) strand; PAM type: NRG; PAM sequence: AAG
gcagatctttatagtaaatg

SEQ ID NO: 23235 - DNA, 20 bp, Artificial Sequence
  Description of Artificial Sequence: Synthetic oligonucleotide
  Target: SCNA; (-) strand; PAM type: NRG; PAM sequence: TAG
tcgggtgtggcagatcttta

SEQ ID NO: 23236 - DNA, 20 bp, Artificial Sequence
  Description of Artificial Sequence: Synthetic oligonucleotide
  Target: SCNA; (-) strand; PAM type: NRG; PAM sequence: CAG
aggtggtatttcgggtgtgg

SEQ ID NO: 23237 - DNA, 20 bp, Artificial Sequence
  Description of Artificial Sequence: Synthetic oligonucleotide
  Target: SCNA; (-) strand; PAM type: NRG; PAM sequence: TGG
ttcaggtggtatttcgggtg

SEQ ID NO: 23238 - DNA, 20 bp, Artificial Sequence
  Description of Artificial Sequence: Synthetic oligonucleotide
  Target: SCNA; (-) strand; PAM type: NRG; PAM sequence: GGG
ctaatttcaggtggtatttc

SEQ ID NO: 23239 - DNA, 20 bp, Artificial Sequence
  Description of Artificial Sequence: Synthetic oligonucleotide
  Target: SCNA; (-) strand; PAM type: NRG; PAM sequence: CGG
actaatttcaggtggtattt

SEQ ID NO: 23240 - DNA, 20 bp, Artificial Sequence
  Description of Artificial Sequence: Synthetic oligonucleotide
  Target: SCNA; (-) strand; PAM type: NRG; PAM sequence: TGG
actagaaaactaatttcagg

SEQ ID NO: 23241 - DNA, 20 bp, Artificial Sequence
  Description of Artificial Sequence: Synthetic oligonucleotide
  Target: SCNA; (-) strand; PAM type: NRG; PAM sequence: AGG
ttaactagaaaactaatttc

SEQ ID NO: 23242 - DNA, 20 bp, Artificial Sequence
  Description of Artificial Sequence: Synthetic oligonucleotide
  Target: SCNA; (-) strand; PAM type: NRG; PAM sequence: CAG
tttaactagaaaactaattt

SEQ ID NO: 23243 - DNA, 20 bp, Artificial Sequence
  Description of Artificial Sequence: Synthetic oligonucleotide
  Target: SCNA; (-) strand; PAM type: NRG; PAM sequence: TAG
atagtctatactgatttaac

SEQ ID NO: 23244 - DNA, 20 bp, Artificial Sequence
  Description of Artificial Sequence: Synthetic oligonucleotide
  Target: SCNA; (-) strand; PAM type: NRG; PAM sequence: TAG
ttcgtaacttcttttatcca

SEQ ID NO: 23245 - DNA, 20 bp, Artificial Sequence
  Description of Artificial Sequence: Synthetic oligonucleotide
  Target: SCNA; (-) strand; PAM type: NRG; PAM sequence: GGG
aatattgatcaagattaaga

SEQ ID NO: 23246 - DNA, 20 bp, Artificial Sequence
  Description of Artificial Sequence: Synthetic oligonucleotide
  Target: SCNA; (-) strand; PAM type: NRG; PAM sequence: AGG
gaatattgatcaagattaag

SEQ ID NO: 23247 - DNA, 20 bp, Artificial Sequence
  Description of Artificial Sequence: Synthetic oligonucleotide
  Target: SCNA; (-) strand; PAM type: NRG; PAM sequence: GAG
tgaatattgatcaagattaa

SEQ ID NO: 23248 - DNA, 20 bp, Artificial Sequence
  Description of Artificial Sequence: Synthetic oligonucleotide
  Target: SCNA; (-) strand; PAM type: NRG; PAM sequence: AAG
tctgaatattgatcaagatt

SEQ ID NO: 23249 - DNA, 20 bp, Artificial Sequence
  Description of Artificial Sequence: Synthetic oligonucleotide
  Target: SCNA; (-) strand; PAM type: NRG; PAM sequence: AAG
gtcatctctgaatattgatc

SEQ ID NO: 23250 - DNA, 20 bp, Artificial Sequence
  Description of Artificial Sequence: Synthetic oligonucleotide
  Target: SCNA; (-) strand; PAM type: NRG; PAM sequence: TAG
ttagcttttgtgatggggag

SEQ ID NO: 23251 - DNA, 20 bp, Artificial Sequence
  Description of Artificial Sequence: Synthetic oligonucleotide
  Target: SCNA; (-) strand; PAM type: NRG; PAM sequence: GAG
gaattagcttttgtgatggg

SEQ ID NO: 23252 - DNA, 20 bp, Artificial Sequence
  Description of Artificial Sequence: Synthetic oligonucleotide
  Target: SCNA; (-) strand; PAM type: NRG; PAM sequence: GGG
acgaattagcttttgtgatg

SEQ ID NO: 23253 - DNA, 20 bp, Artificial Sequence
  Description of Artificial Sequence: Synthetic oligonucleotide
  Target: SCNA; (-) strand; PAM type: NRG; PAM sequence: GGG
aacgaattagcttttgtgat

SEQ ID NO: 23254 - DNA, 20 bp, Artificial Sequence
  Description of Artificial Sequence: Synthetic oligonucleotide
  Target: SCNA; (-) strand; PAM type: NRG; PAM sequence: TGG
aaacgaattagcttttgtga

SEQ ID NO: 23255 - DNA, 20 bp, Artificial Sequence
  Description of Artificial Sequence: Synthetic oligonucleotide
  Target: SCNA; (-) strand; PAM type: NRG; PAM sequence: TAG
gaaaaatgtgaaaaacgaat

SEQ ID NO: 23256 - DNA, 20 bp, Artificial Sequence
  Description of Artificial Sequence: Synthetic oligonucleotide
  Target: SCNA; (-) strand; PAM type: NRG; PAM sequence: GAG
aaaagatttcattaggagca

SEQ ID NO: 23257 - DNA, 20 bp, Artificial Sequence
  Description of Artificial Sequence: Synthetic oligonucleotide
  Target: SCNA; (-) strand; PAM type: NRG; PAM sequence: CAG
aaaaaagatttcattaggag

SEQ ID NO: 23258 - DNA, 20 bp, Artificial Sequence
  Description of Artificial Sequence: Synthetic oligonucleotide
  Target: SCNA; (-) strand; PAM type: NRG; PAM sequence: GAG
agcaaaaaagatttcattag

SEQ ID NO: 23259 - DNA, 20 bp, Artificial Sequence
  Description of Artificial Sequence: Synthetic oligonucleotide
  Target: SCNA; (-) strand; PAM type: NRG; PAM sequence: AGG
tcagcaaaaaagatttcatt

SEQ ID NO: 23260 - DNA, 20 bp, Artificial Sequence
  Description of Artificial Sequence: Synthetic oligonucleotide
  Target: SCNA; (-) strand; PAM type: NRG; PAM sequence: TAG
ttcagcaaaaaagatttcat

SEQ ID NO: 23261 - DNA, 20 bp, Artificial Sequence
  Description of Artificial Sequence: Synthetic oligonucleotide
  Target: SCNA; (-) strand; PAM type: NRG; PAM sequence: AAG
cttcagaaacttcagcaaaa

SEQ ID NO: 23262 - DNA, 20 bp, Artificial Sequence
  Description of Artificial Sequence: Synthetic oligonucleotide
  Target: SCNA; (-) strand; PAM type: NRG; PAM sequence: CAG
atttatttcttcagaaactt

SEQ ID NO: 23263 - DNA, 20 bp, Artificial Sequence
  Description of Artificial Sequence: Synthetic oligonucleotide
  Target: SCNA; (-) strand; PAM type: NRG; PAM sequence: CAG
ggcttctttatttatttctt

SEQ ID NO: 23264 - DNA, 20 bp, Artificial Sequence
  Description of Artificial Sequence: Synthetic oligonucleotide
  Target: SCNA; (-) strand; PAM type: NRG; PAM sequence: AGG
gtggaactctgagaggcacc

SEQ ID NO: 23265 - DNA, 20 bp, Artificial Sequence
  Description of Artificial Sequence: Synthetic oligonucleotide
  Target: SCNA; (-) strand; PAM type: NRG; PAM sequence: CAG
tgtggaactctgagaggcac

SEQ ID NO: 23266 - DNA, 20 bp, Artificial Sequence
  Description of Artificial Sequence: Synthetic oligonucleotide
  Target: SCNA; (-) strand; PAM type: NRG; PAM sequence: AGG
cagctgtgtggaactctgag

SEQ ID NO: 23267 - DNA, 20 bp, Artificial Sequence
  Description of Artificial Sequence: Synthetic oligonucleotide
  Target: SCNA; (-) strand; PAM type: NRG; PAM sequence: GAG
tcagctgtgtggaactctga

SEQ ID NO: 23268 - DNA, 20 bp, Artificial Sequence
  Description of Artificial Sequence: Synthetic oligonucleotide
  Target: SCNA; (-) strand; PAM type: NRG; PAM sequence: GAG
catcagctgtgtggaactct

SEQ ID NO: 23269 - DNA, 20 bp, Artificial Sequence
  Description of Artificial Sequence: Synthetic oligonucleotide
  Target: SCNA; (-) strand; PAM type: NRG; PAM sequence: TGG
gcctagactcatcagctgtg

SEQ ID NO: 23270 - DNA, 20 bp, Artificial Sequence
  Description of Artificial Sequence: Synthetic oligonucleotide
  Target: SCNA; (-) strand; PAM type: NRG; PAM sequence: CAG
ttgtcactgcctagactcat

SEQ ID NO: 23271 - DNA, 20 bp, Artificial Sequence
  Description of Artificial Sequence: Synthetic oligonucleotide
  Target: SCNA; (-) strand; PAM type: NRG; PAM sequence: TAG
tagtgtcatttgtcactgcc

SEQ ID NO: 23272 - DNA, 20 bp, Artificial Sequence
  Description of Artificial Sequence: Synthetic oligonucleotide
  Target: SCNA; (-) strand; PAM type: NRG; PAM sequence: TAG
aggttgcacgctgaggaata

SEQ ID NO: 23273 - DNA, 20 bp, Artificial Sequence
  Description of Artificial Sequence: Synthetic oligonucleotide
  Target: SCNA; (-) strand; PAM type: NRG; PAM sequence: AGG
gagagaaaggttgcacgctg

SEQ ID NO: 23274 - DNA, 20 bp, Artificial Sequence
  Description of Artificial Sequence: Synthetic oligonucleotide
  Target: SCNA; (-) strand; PAM type: NRG; PAM sequence: GAG
ggagagaaaggttgcacgct

SEQ ID NO: 23275 - DNA, 20 bp, Artificial Sequence
  Description of Artificial Sequence: Synthetic oligonucleotide
  Target: SCNA; (-) strand; PAM type: NRG; PAM sequence: AGG
agaagatgagagggagagaa

SEQ ID NO: 23276 - DNA, 20 bp, Artificial Sequence
  Description of Artificial Sequence: Synthetic oligonucleotide
  Target: SCNA; (-) strand; PAM type: NRG; PAM sequence: AAG
aagaagatgagagggagaga

SEQ ID NO: 23277 - DNA, 20 bp, Artificial Sequence
  Description of Artificial Sequence: Synthetic oligonucleotide
  Target: SCNA; (-) strand; PAM type: NRG; PAM sequence: GAG
ttgcaagaagatgagaggga

SEQ ID NO: 23278 - DNA, 20 bp, Artificial Sequence
  Description of Artificial Sequence: Synthetic oligonucleotide
  Target: SCNA; (-) strand; PAM type: NRG; PAM sequence: GAG
cattgcaagaagatgagagg

SEQ ID NO: 23279 - DNA, 20 bp, Artificial Sequence
  Description of Artificial Sequence: Synthetic oligonucleotide
  Target: SCNA; (-) strand; PAM type: NRG; PAM sequence: GGG
tccattgcaagaagatgaga

SEQ ID NO: 23280 - DNA, 20 bp, Artificial Sequence
  Description of Artificial Sequence: Synthetic oligonucleotide
  Target: SCNA; (-) strand; PAM type: NRG; PAM sequence: AGG
ttccattgcaagaagatgag

SEQ ID NO: 23281 - DNA, 20 bp, Artificial Sequence
  Description of Artificial Sequence: Synthetic oligonucleotide
  Target: SCNA; (-) strand; PAM type: NRG; PAM sequence: GAG
gttccattgcaagaagatga

SEQ ID NO: 23282 - DNA, 20 bp, Artificial Sequence
  Description of Artificial Sequence: Synthetic oligonucleotide
  Target: SCNA; (-) strand; PAM type: NRG; PAM sequence: GAG
gtgttccattgcaagaagat

SEQ ID NO: 23283 - DNA, 20 bp, Artificial Sequence
  Description of Artificial Sequence: Synthetic oligonucleotide
  Target: SCNA; (-) strand; PAM type: NRG; PAM sequence: AAG
tagcagtgttccattgcaag

SEQ ID NO: 23284 - DNA, 20 bp, Artificial Sequence
  Description of Artificial Sequence: Synthetic oligonucleotide
  Target: SCNA; (-) strand; PAM type: NRG; PAM sequence: AAG
atgtagcagtgttccattgc

SEQ ID NO: 23285 - DNA, 20 bp, Artificial Sequence
  Description of Artificial Sequence: Synthetic oligonucleotide
  Target: SCNA; (-) strand; PAM type: NRG; PAM sequence: CAG
ttcctctgcaaggaatgtag

SEQ ID NO: 23286 - DNA, 20 bp, Artificial Sequence
  Description of Artificial Sequence: Synthetic oligonucleotide
  Target: SCNA; (-) strand; PAM type: NRG; PAM sequence: TAG
cgtttcctctgcaaggaatg

SEQ ID NO: 23287 - DNA, 20 bp, Artificial Sequence
  Description of Artificial Sequence: Synthetic oligonucleotide
  Target: SCNA; (-) strand; PAM type: NRG; PAM sequence: AGG
tacagtacgtttcctctgca

SEQ ID NO: 23288 - DNA, 20 bp, Artificial Sequence
  Description of Artificial Sequence: Synthetic oligonucleotide
  Target: SCNA; (-) strand; PAM type: NRG; PAM sequence: AAG
gtacagtacgtttcctctgc

SEQ ID NO: 23289 - DNA, 20 bp, Artificial Sequence
  Description of Artificial Sequence: Synthetic oligonucleotide
  Target: SCNA; (-) strand; PAM type: NRG; PAM sequence: CAG
ggtgacagctatgaaatgta

SEQ ID NO: 23290 - DNA, 20 bp, Artificial Sequence
  Description of Artificial Sequence: Synthetic oligonucleotide
  Target: SCNA; (-) strand; PAM type: NRG; PAM sequence: CAG
tgccttttatgccaaggtga

SEQ ID NO: 23291 - DNA, 20 bp, Artificial Sequence
  Description of Artificial Sequence: Synthetic oligonucleotide
  Target: SCNA; (-) strand; PAM type: NRG; PAM sequence: AGG
tccctctgccttttatgcca

SEQ ID NO: 23292 - DNA, 20 bp, Artificial Sequence
  Description of Artificial Sequence: Synthetic oligonucleotide
  Target: SCNA; (-) strand; PAM type: NRG; PAM sequence: AAG
ctccctctgccttttatgcc

SEQ ID NO: 23293 - DNA, 20 bp, Artificial Sequence
  Description of Artificial Sequence: Synthetic oligonucleotide
  Target: SCNA; (-) strand; PAM type: NRG; PAM sequence: AAG
atgtttaggcagaccaaaag

SEQ ID NO: 23294 - DNA, 20 bp, Artificial Sequence
  Description of Artificial Sequence: Synthetic oligonucleotide
  Target: SCNA; (-) strand; PAM type: NRG; PAM sequence: AAG
aaaatgtttaggcagaccaa

SEQ ID NO: 23295 - DNA, 20 bp, Artificial Sequence
  Description of Artificial Sequence: Synthetic oligonucleotide
  Target: SCNA; (-) strand; PAM type: NRG; PAM sequence: CAG
aataaagtaaaatgtttagg

SEQ ID NO: 23296 - DNA, 20 bp, Artificial Sequence
  Description of Artificial Sequence: Synthetic oligonucleotide
  Target: SCNA; (-) strand; PAM type: NRG; PAM sequence: AGG
aaaaataaagtaaaatgttt

SEQ ID NO: 23297 - DNA, 20 bp, Artificial Sequence
  Description of Artificial Sequence: Synthetic oligonucleotide
  Target: SCNA; (-) strand; PAM type: NRG; PAM sequence: TAG
aaaaaataaagtaaaatgtt

SEQ ID NO: 23298 - DNA, 20 bp, Artificial Sequence
  Description of Artificial Sequence: Synthetic oligonucleotide
  Target: SCNA; (-) strand; PAM type: NRG; PAM sequence: AAG
ttattgatatataaaaaata

SEQ ID NO: 23299 - DNA, 20 bp, Artificial Sequence
  Description of Artificial Sequence: Synthetic oligonucleotide
  Target: SCNA; (-) strand; PAM type: NRG; PAM sequence: TGG
acttactcaatagtttctca

SEQ ID NO: 23300 - DNA, 20 bp, Artificial Sequence
  Description of Artificial Sequence: Synthetic oligonucleotide
  Target: SCNA; (-) strand; PAM type: NRG; PAM sequence: TAG
ttatatctaaacttactcaa

SEQ ID NO: 23301 - DNA, 20 bp, Artificial Sequence
  Description of Artificial Sequence: Synthetic oligonucleotide
  Target: SCNA; (-) strand; PAM type: NRG; PAM sequence: AAG
aagtaatgccttccaaaaca

SEQ ID NO: 23302 - DNA, 20 bp, Artificial Sequence
  Description of Artificial Sequence: Synthetic oligonucleotide
  Target: SCNA; (-) strand; PAM type: NRG; PAM sequence: AAG
cacgatgcatttcctttgaa

SEQ ID NO: 23303 - DNA, 20 bp, Artificial Sequence
  Description of Artificial Sequence: Synthetic oligonucleotide
  Target: SCNA; (-) strand; PAM type: NRG; PAM sequence: GAG
attaggaatatcaaggcagg

SEQ ID NO: 23304 - DNA, 20 bp, Artificial Sequence
  Description of Artificial Sequence: Synthetic oligonucleotide
  Target: SCNA; (-) strand; PAM type: NRG; PAM sequence: GGG
agattaggaatatcaaggca

SEQ ID NO: 23305 - DNA, 20 bp, Artificial Sequence
  Description of Artificial Sequence: Synthetic oligonucleotide
  Target: SCNA; (-) strand; PAM type: NRG; PAM sequence: AGG
aagattaggaatatcaaggc

SEQ ID NO: 23306 - DNA, 20 bp, Artificial Sequence
  Description of Artificial Sequence: Synthetic oligonucleotide
  Target: SCNA; (-) strand; PAM type: NRG; PAM sequence: CAG
gaagattaggaatatcaagg

SEQ ID NO: 23307 - DNA, 20 bp, Artificial Sequence
  Description of Artificial Sequence: Synthetic oligonucleotide
  Target: SCNA; (-) strand; PAM type: NRG; PAM sequence: AGG
aaagaagattaggaatatca

SEQ ID NO: 23308 - DNA, 20 bp, Artificial Sequence
  Description of Artificial Sequence: Synthetic oligonucleotide
  Target: SCNA; (-) strand; PAM type: NRG; PAM sequence: AAG
gaaagaagattaggaatatc

SEQ ID NO: 23309 - DNA, 20 bp, Artificial Sequence
  Description of Artificial Sequence: Synthetic oligonucleotide
  Target: SCNA; (-) strand; PAM type: NRG; PAM sequence: AGG
aagatgccagaaagaagatt

SEQ ID NO: 23310 - DNA, 20 bp, Artificial Sequence
  Description of Artificial Sequence: Synthetic oligonucleotide
  Target: SCNA; (-) strand; PAM type: NRG; PAM sequence: TAG
taagatgccagaaagaagat

SEQ ID NO: 23311 - DNA, 20 bp, Artificial Sequence
  Description of Artificial Sequence: Synthetic oligonucleotide
  Target: SCNA; (-) strand; PAM type: NRG; PAM sequence: AAG
gagcataagatgccagaaag

SEQ ID NO: 23312 - DNA, 20 bp, Artificial Sequence
  Description of Artificial Sequence: Synthetic oligonucleotide
  Target: SCNA; (-) strand; PAM type: NRG; PAM sequence: AAG
ggtgagcataagatgccaga

SEQ ID NO: 23313 - DNA, 20 bp, Artificial Sequence
  Description of Artificial Sequence: Synthetic oligonucleotide
  Target: SCNA; (-) strand; PAM type: NRG; PAM sequence: CAG
agttggtgagcataagatgc

SEQ ID NO: 23314 - DNA, 20 bp, Artificial Sequence
  Description of Artificial Sequence: Synthetic oligonucleotide
  Target: SCNA; (-) strand; PAM type: NRG; PAM sequence: AAG
attaggcagttggtgagcat

SEQ ID NO: 23315 - DNA, 20 bp, Artificial Sequence
  Description of Artificial Sequence: Synthetic oligonucleotide
  Target: SCNA; (-) strand; PAM type: NRG; PAM sequence: GAG
tccactattaggcagttggt

SEQ ID NO: 23316 - DNA, 20 bp, Artificial Sequence
  Description of Artificial Sequence: Synthetic oligonucleotide
  Target: SCNA; (-) strand; PAM type: NRG; PAM sequence: TGG
tgcatccactattaggcagt

SEQ ID NO: 23317 - DNA, 20 bp, Artificial Sequence
  Description of Artificial Sequence: Synthetic oligonucleotide
  Target: SCNA; (-) strand; PAM type: NRG; PAM sequence: CAG
cacatgcatccactattagg

SEQ ID NO: 23318 - DNA, 20 bp, Artificial Sequence
  Description of Artificial Sequence: Synthetic oligonucleotide
  Target: SCNA; (-) strand; PAM type: NRG; PAM sequence: AGG
aaccacatgcatccactatt

SEQ ID NO: 23319 - DNA, 20 bp, Artificial Sequence
  Description of Artificial Sequence: Synthetic oligonucleotide
  Target: SCNA; (-) strand; PAM type: NRG; PAM sequence: TAG
gaaccacatgcatccactat

SEQ ID NO: 23320 - DNA, 20 bp, Artificial Sequence
  Description of Artificial Sequence: Synthetic oligonucleotide
  Target: SCNA; (-) strand; PAM type: NRG; PAM sequence: CAG
atggcaattggacagatggg

SEQ ID NO: 23321 - DNA, 20 bp, Artificial Sequence
  Description of Artificial Sequence: Synthetic oligonucleotide
  Target: SCNA; (-) strand; PAM type: NRG; PAM sequence: GGG
agaatggcaattggacagat

SEQ ID NO: 23322 - DNA, 20 bp, Artificial Sequence
  Description of Artificial Sequence: Synthetic oligonucleotide
  Target: SCNA; (-) strand; PAM type: NRG; PAM sequence: TGG
tagaatggcaattggacaga

SEQ ID NO: 23323 - DNA, 20 bp, Artificial Sequence
  Description of Artificial Sequence: Synthetic oligonucleotide
  Target: SCNA; (-) strand; PAM type: NRG; PAM sequence: CAG
aatttagaatggcaattgga

SEQ ID NO: 23324 - DNA, 20 bp, Artificial Sequence
  Description of Artificial Sequence: Synthetic oligonucleotide
  Target: SCNA; (-) strand; PAM type: NRG; PAM sequence: TGG
acataatttagaatggcaat

SEQ ID NO: 23325 - DNA, 20 bp, Artificial Sequence
  Description of Artificial Sequence: Synthetic oligonucleotide
  Target: SCNA; (-) strand; PAM type: NRG; PAM sequence: TGG
gtaaaccacataatttagaa

SEQ ID NO: 23326 - DNA, 20 bp, Artificial Sequence
  Description of Artificial Sequence: Synthetic oligonucleotide
  Target: SCNA; (-) strand; PAM type: NRG; PAM sequence: TAG
tcttagtaaaccacataatt

SEQ ID NO: 23327 - DNA, 20 bp, Artificial Sequence
  Description of Artificial Sequence: Synthetic oligonucleotide
  Target: SCNA; (-) strand; PAM type: NRG; PAM sequence: TAG
tataatgttaagtattttct

SEQ ID NO: 23328 - DNA, 20 bp, Artificial Sequence
  Description of Artificial Sequence: Synthetic oligonucleotide
  Target: SCNA; (-) strand; PAM type: NRG; PAM sequence: AAG
tacattattcatataatgtt

SEQ ID NO: 23329 - DNA, 20 bp, Artificial Sequence
  Description of Artificial Sequence: Synthetic oligonucleotide
  Target: SCNA; (-) strand; PAM type: NRG; PAM sequence: AAG
cactcatgagataaatcttg

SEQ ID NO: 23330 - DNA, 20 bp, Artificial Sequence
  Description of Artificial Sequence: Synthetic oligonucleotide
  Target: SCNA; (-) strand; PAM type: NRG; PAM sequence: GAG
aaagcaaccatttcactcat

SEQ ID NO: 23331 - DNA, 20 bp, Artificial Sequence
  Description of Artificial Sequence: Synthetic oligonucleotide
  Target: SCNA; (-) strand; PAM type: NRG; PAM sequence: AAG
taattttctccttaagaaca

SEQ ID NO: 23332 - DNA, 20 bp, Artificial Sequence
  Description of Artificial Sequence: Synthetic oligonucleotide
  Target: SCNA; (-) strand; PAM type: NRG; PAM sequence: AAG
aataaattaattttctcctt

SEQ ID NO: 23333 - DNA, 20 bp, Artificial Sequence
  Description of Artificial Sequence: Synthetic oligonucleotide
  Target: SCNA; (-) strand; PAM type: NRG; PAM sequence: GGG
cttattgtacatggatacgt

SEQ ID NO: 23334 - DNA, 20 bp, Artificial Sequence
  Description of Artificial Sequence: Synthetic oligonucleotide
  Target: SCNA; (-) strand; PAM type: NRG; PAM sequence: TGG
acttattgtacatggatacg

SEQ ID NO: 23335 - DNA, 20 bp, Artificial Sequence
  Description of Artificial Sequence: Synthetic oligonucleotide
  Target: SCNA; (-) strand; PAM type: NRG; PAM sequence: TGG
acagcactacttattgtaca

SEQ ID NO: 23336 - DNA, 20 bp, Artificial Sequence
  Description of Artificial Sequence: Synthetic oligonucleotide
  Target: SCNA; (-) strand; PAM type: NRG; PAM sequence: CAG
attttcttatatgtttataa

SEQ ID NO: 23337 - DNA, 20 bp, Artificial Sequence
  Description of Artificial Sequence: Synthetic oligonucleotide
  Target: SCNA; (-) strand; PAM type: NRG; PAM sequence: TAG
atgctgtatacttatcatga

SEQ ID NO: 23338 - DNA, 20 bp, Artificial Sequence
  Description of Artificial Sequence: Synthetic oligonucleotide
  Target: SCNA; (-) strand; PAM type: NRG; PAM sequence: GGG
ttgtatattatagaatatga

SEQ ID NO: 23339 - DNA, 20 bp, Artificial Sequence
  Description of Artificial Sequence: Synthetic oligonucleotide
  Target: SCNA; (-) strand; PAM type: NRG; PAM sequence: AGG
tttgtatattatagaatatg

SEQ ID NO: 23340 - DNA, 20 bp, Artificial Sequence
  Description of Artificial Sequence: Synthetic oligonucleotide
  Target: SCNA; (-) strand; PAM type: NRG; PAM sequence: GAG
ttttgtatattatagaatat

SEQ ID NO: 23341 - DNA, 20 bp, Artificial Sequence
  Description of Artificial Sequence: Synthetic oligonucleotide
  Target: SCNA; (-) strand; PAM type: NRG; PAM sequence: TAG
gttagtaattttgtatatta

SEQ ID NO: 23342 - DNA, 20 bp, Artificial Sequence
  Description of Artificial Sequence: Synthetic oligonucleotide
  Target: SCNA; (-) strand; PAM type: NRG; PAM sequence: TAG
tatatgatttcactgcacgt

SEQ ID NO: 23343 - DNA, 20 bp, Artificial Sequence
  Description of Artificial Sequence: Synthetic oligonucleotide
  Target: SCNA; (-) strand; PAM type: NRG; PAM sequence: CAG
aaggaaacaattcactactt

SEQ ID NO: 23344 - DNA, 20 bp, Artificial Sequence
  Description of Artificial Sequence: Synthetic oligonucleotide
  Target: SCNA; (-) strand; PAM type: NRG; PAM sequence: AGG
caagaatgtgttaaacagta

SEQ ID NO: 23345 - DNA, 20 bp, Artificial Sequence
  Description of Artificial Sequence: Synthetic oligonucleotide
  Target: SCNA; (-) strand; PAM type: NRG; PAM sequence: AAG
gcaagaatgtgttaaacagt

SEQ ID NO: 23346 - DNA, 20 bp, Artificial Sequence
  Description of Artificial Sequence: Synthetic oligonucleotide
  Target: SCNA; (-) strand; PAM type: NRG; PAM sequence: CAG
aactgcaagaatgtgttaaa

SEQ ID NO: 23347 - DNA, 20 bp, Artificial Sequence
  Description of Artificial Sequence: Synthetic oligonucleotide
  Target: SCNA; (-) strand; PAM type: NRG; PAM sequence: AAG
attttaaaaagacaaactgc

SEQ ID NO: 23348 - DNA, 20 bp, Artificial Sequence
  Description of Artificial Sequence: Synthetic oligonucleotide
  Target: SCNA; (-) strand; PAM type: NRG; PAM sequence: AAG
ttcctgattttaattttaaa

SEQ ID NO: 23349 - DNA, 20 bp, Artificial Sequence
  Description of Artificial Sequence: Synthetic oligonucleotide
  Target: SCNA; (-) strand; PAM type: NRG; PAM sequence: CAG
ttcaaaaacaactaactgcc

SEQ ID NO: 23350 - DNA, 20 bp, Artificial Sequence
  Description of Artificial Sequence: Synthetic oligonucleotide
  Target: SCNA; (-) strand; PAM type: NRG; PAM sequence: AAG
actgtttccttcttaaagca

SEQ ID NO: 23351 - DNA, 20 bp, Artificial Sequence
  Description of Artificial Sequence: Synthetic oligonucleotide
  Target: SCNA; (-) strand; PAM type: NRG; PAM sequence: AAG
tgtagactgtttccttctta

SEQ ID NO: 23352 - DNA, 20 bp, Artificial Sequence
  Description of Artificial Sequence: Synthetic oligonucleotide
  Target: SCNA; (-) strand; PAM type: NRG; PAM sequence: TAG
aatgaattgtttgttaaatg

SEQ ID NO: 23353 - DNA, 20 bp, Artificial Sequence
  Description of Artificial Sequence: Synthetic oligonucleotide
  Target: SCNA; (-) strand; PAM type: NRG; PAM sequence: TAG
ttcactgctcaattaatatg

SEQ ID NO: 23354 - DNA, 20 bp, Artificial Sequence
  Description of Artificial Sequence: Synthetic oligonucleotide
  Target: SCNA; (-) strand; PAM type: NRG; PAM sequence: CAG
ctgtctttttccctgttctt

SEQ ID NO: 23355 - DNA, 20 bp, Artificial Sequence
  Description of Artificial Sequence: Synthetic oligonucleotide
  Target: SCNA; (-) strand; PAM type: NRG; PAM sequence: CAG
gccctacattatctggacct

SEQ ID NO: 23356 - DNA, 20 bp, Artificial Sequence
  Description of Artificial Sequence: Synthetic oligonucleotide
  Target: SCNA; (-) strand; PAM type: NRG; PAM sequence: TGG
tttaaaggccctacattatc

SEQ ID NO: 23357 - DNA, 20 bp, Artificial Sequence
  Description of Artificial Sequence: Synthetic oligonucleotide
  Target: SCNA; (-) strand; PAM type: NRG; PAM sequence: AGG
aaatctttactgtgttttaa

SEQ ID NO: 23358 - DNA, 20 bp, Artificial Sequence
  Description of Artificial Sequence: Synthetic oligonucleotide
  Target: SCNA; (-) strand; PAM type: NRG; PAM sequence: AAG
caaatctttactgtgtttta

SEQ ID NO: 23359 - DNA, 20 bp, Artificial Sequence
  Description of Artificial Sequence: Synthetic oligonucleotide
  Target: SCNA; (-) strand; PAM type: NRG; PAM sequence: TAG
cagtgacctcttatcataca

SEQ ID NO: 23360 - DNA, 20 bp, Artificial Sequence
  Description of Artificial Sequence: Synthetic oligonucleotide
  Target: SCNA; (-) strand; PAM type: NRG; PAM sequence: CAG
cccctctgctcccaaccatc

SEQ ID NO: 23361 - DNA, 20 bp, Artificial Sequence
  Description of Artificial Sequence: Synthetic oligonucleotide
  Target: SCNA; (-) strand; PAM type: NRG; PAM sequence: CAG
aattcttttaagaaagaaac

SEQ ID NO: 23362 - DNA, 20 bp, Artificial Sequence
  Description of Artificial Sequence: Synthetic oligonucleotide
  Target: SCNA; (-) strand; PAM type: NRG; PAM sequence: AAG
tcggaataattcttttaaga

SEQ ID NO: 23363 - DNA, 20 bp, Artificial Sequence
  Description of Artificial Sequence: Synthetic oligonucleotide
  Target: SCNA; (-) strand; PAM type: NRG; PAM sequence: AAG
gcagtcggaataattctttt

SEQ ID NO: 23364 - DNA, 20 bp, Artificial Sequence
  Description of Artificial Sequence: Synthetic oligonucleotide
  Target: SCNA; (-) strand; PAM type: NRG; PAM sequence: CGG
ctagtccattcttgagcagt

SEQ ID NO: 23365 - DNA, 20 bp, Artificial Sequence
  Description of Artificial Sequence: Synthetic oligonucleotide
  Target: SCNA; (-) strand; PAM type: NRG; PAM sequence: CAG
caacctagtccattcttgag

SEQ ID NO: 23366 - DNA, 20 bp, Artificial Sequence
  Description of Artificial Sequence: Synthetic oligonucleotide
  Target: SCNA; (-) strand; PAM type: NRG; PAM sequence: GAG
acccaacctagtccattctt

SEQ ID NO: 23367 - DNA, 20 bp, Artificial Sequence
  Description of Artificial Sequence: Synthetic oligonucleotide
  Target: SCNA; (-) strand; PAM type: NRG; PAM sequence: TAG
ttccacttagacacccaacc

SEQ ID NO: 23368 - DNA, 20 bp, Artificial Sequence
  Description of Artificial Sequence: Synthetic oligonucleotide
  Target: SCNA; (-) strand; PAM type: NRG; PAM sequence: TAG
ctgatctgcctgcttccact

SEQ ID NO: 23369 - DNA, 20 bp, Artificial Sequence
  Description of Artificial Sequence: Synthetic oligonucleotide
  Target: SCNA; (-) strand; PAM type: NRG; PAM sequence: TGG
ggccttcatcatttctcacc

SEQ ID NO: 23370 - DNA, 20 bp, Artificial Sequence
  Description of Artificial Sequence: Synthetic oligonucleotide
  Target: SCNA; (-) strand; PAM type: NRG; PAM sequence: AGG
tactgttaccaccctaggct

SEQ ID NO: 23371 - DNA, 20 bp, Artificial Sequence
  Description of Artificial Sequence: Synthetic oligonucleotide
  Target: SCNA; (-) strand; PAM type: NRG; PAM sequence: TAG
ctactgttaccaccctaggc

SEQ ID NO: 23372 - DNA, 20 bp, Artificial Sequence
  Description of Artificial Sequence: Synthetic oligonucleotide
  Target: SCNA; (-) strand; PAM type: NRG; PAM sequence: AGG
ttctctactgttaccaccct

SEQ ID NO: 23373 - DNA, 20 bp, Artificial Sequence
  Description of Artificial Sequence: Synthetic oligonucleotide
  Target: SCNA; (-) strand; PAM type: NRG; PAM sequence: TAG
cttctctactgttaccaccc

SEQ ID NO: 23374 - DNA, 20 bp, Artificial Sequence
  Description of Artificial Sequence: Synthetic oligonucleotide
  Target: SCNA; (-) strand; PAM type: NRG; PAM sequence: CAG
tgtaattcaaaatgtatccc

SEQ ID NO: 23375 - DNA, 20 bp, Artificial Sequence
  Description of Artificial Sequence: Synthetic oligonucleotide
  Target: SCNA; (-) strand; PAM type: NRG; PAM sequence: AAG
accttttatatctaaccctt

SEQ ID NO: 23376 - DNA, 20 bp, Artificial Sequence
  Description of Artificial Sequence: Synthetic oligonucleotide
  Target: SCNA; (-) strand; PAM type: NRG; PAM sequence: CAG
ctttggtctcctagcatttg

SEQ ID NO: 23377 - DNA, 20 bp, Artificial Sequence
  Description of Artificial Sequence: Synthetic oligonucleotide
  Target: SCNA; (-) strand; PAM type: NRG; PAM sequence: TAG
gaaatttcactttggtctcc

SEQ ID NO: 23378 - DNA, 20 bp, Artificial Sequence
  Description of Artificial Sequence: Synthetic oligonucleotide
  Target: SCNA; (-) strand; PAM type: NRG; PAM sequence: TGG
cactatgtgaaatttcactt

SEQ ID NO: 23379 - DNA, 20 bp, Artificial Sequence
  Description of Artificial Sequence: Synthetic oligonucleotide
  Target: SCNA; (-) strand; PAM type: NRG; PAM sequence: CAG
tatccctaactgctgaaaca

SEQ ID NO: 23380 - DNA, 20 bp, Artificial Sequence
  Description of Artificial Sequence: Synthetic oligonucleotide
  Target: SCNA; (-) strand; PAM type: NRG; PAM sequence: AAG
caagcctccagaactccaaa

SEQ ID NO: 23381 - DNA, 20 bp, Artificial Sequence
  Description of Artificial Sequence: Synthetic oligonucleotide
  Target: SCNA; (-) strand; PAM type: NRG; PAM sequence: CAG
aaaagtccagcccaagcctc

SEQ ID NO: 23382 - DNA, 20 bp, Artificial Sequence
  Description of Artificial Sequence: Synthetic oligonucleotide
  Target: SCNA; (-) strand; PAM type: NRG; PAM sequence: AAG
catgcaaaaaagtccagccc

SEQ ID NO: 23383 - DNA, 20 bp, Artificial Sequence
  Description of Artificial Sequence: Synthetic oligonucleotide
  Target: SCNA; (-) strand; PAM type: NRG; PAM sequence: CAG
tttatccatgcaaaaaagtc

SEQ ID NO: 23384 - DNA, 20 bp, Artificial Sequence
  Description of Artificial Sequence: Synthetic oligonucleotide
  Target: SCNA; (-) strand; PAM type: NRG; PAM sequence: AAG
tgaattttatccatgcaaaa

SEQ ID NO: 23385 - DNA, 20 bp, Artificial Sequence
  Description of Artificial Sequence: Synthetic oligonucleotide
  Target: SCNA; (-) strand; PAM type: NRG; PAM sequence: AGG
taactgtcttaccactaaga

SEQ ID NO: 23386 - DNA, 20 bp, Artificial Sequence
  Description of Artificial Sequence: Synthetic oligonucleotide
  Target: SCNA; (-) strand; PAM type: NRG; PAM sequence: AAG
ataactgtcttaccactaag

SEQ ID NO: 23387 - DNA, 20 bp, Artificial Sequence
  Description of Artificial Sequence: Synthetic oligonucleotide
  Target: SCNA; (-) strand; PAM type: NRG; PAM sequence: AAG
ctaataactgtcttaccact

SEQ ID NO: 23388 - DNA, 20 bp, Artificial Sequence
  Description of Artificial Sequence: Synthetic oligonucleotide
  Target: SCNA; (-) strand; PAM type: NRG; PAM sequence: AAG
attcttcattctaggtagac

SEQ ID NO: 23389 - DNA, 20 bp, Artificial Sequence
  Description of Artificial Sequence: Synthetic oligonucleotide
  Target: SCNA; (-) strand; PAM type: NRG; PAM sequence: TAG
acaaaattcttcattctagg

SEQ ID NO: 23390 - DNA, 20 bp, Artificial Sequence
  Description of Artificial Sequence: Synthetic oligonucleotide
  Target: SCNA; (-) strand; PAM type: NRG; PAM sequence: AGG
tcaacaaaattcttcattct

SEQ ID NO: 23391 - DNA, 20 bp, Artificial Sequence
  Description of Artificial Sequence: Synthetic oligonucleotide
  Target: SCNA; (-) strand; PAM type: NRG; PAM sequence: TAG
ctcaacaaaattcttcattc

SEQ ID NO: 23392 - DNA, 20 bp, Artificial Sequence
  Description of Artificial Sequence: Synthetic oligonucleotide
  Target: SCNA; (-) strand; PAM type: NRG; PAM sequence: TAG
cctctttcttttcagccata

SEQ ID NO: 23393 - DNA, 20 bp, Artificial Sequence
  Description of Artificial Sequence: Synthetic oligonucleotide
  Target: SCNA; (-) strand; PAM type: NRG; PAM sequence: CAG
ttatctggcctctttctttt

SEQ ID NO: 23394 - DNA, 20 bp, Artificial Sequence
  Description of Artificial Sequence: Synthetic oligonucleotide
  Target: SCNA; (-) strand; PAM type: NRG; PAM sequence: TGG
actcagggccttgttttatc

SEQ ID NO: 23395 - DNA, 20 bp, Artificial Sequence
  Description of Artificial Sequence: Synthetic oligonucleotide
  Target: SCNA; (-) strand; PAM type: NRG; PAM sequence: GGG
aggcctactcttgttactca

SEQ ID NO: 23396 - DNA, 20 bp, Artificial Sequence
  Description of Artificial Sequence: Synthetic oligonucleotide
  Target: SCNA; (-) strand; PAM type: NRG; PAM sequence: AGG
aaggcctactcttgttactc

SEQ ID NO: 23397 - DNA, 20 bp, Artificial Sequence
  Description of Artificial Sequence: Synthetic oligonucleotide
  Target: SCNA; (-) strand; PAM type: NRG; PAM sequence: CAG
caaggcctactcttgttact

SEQ ID NO: 23398 - DNA, 20 bp, Artificial Sequence
  Description of Artificial Sequence: Synthetic oligonucleotide
  Target: SCNA; (-) strand; PAM type: NRG; PAM sequence: AGG
ctctatagaatcaaggccca

SEQ ID NO: 23399 - DNA, 20 bp, Artificial Sequence
  Description of Artificial Sequence: Synthetic oligonucleotide
  Target: SCNA; (-) strand; PAM type: NRG; PAM sequence: AAG
tctctatagaatcaaggccc

SEQ ID NO: 23400 - DNA, 20 bp, Artificial Sequence
  Description of Artificial Sequence: Synthetic oligonucleotide
  Target: SCNA; (-) strand; PAM type: NRG; PAM sequence: AGG
ttgcactctctatagaatca

SEQ ID NO: 23401 - DNA, 20 bp, Artificial Sequence
  Description of Artificial Sequence: Synthetic oligonucleotide
  Target: SCNA; (-) strand; PAM type: NRG; PAM sequence: AAG
tttgcactctctatagaatc

SEQ ID NO: 23402 - DNA, 20 bp, Artificial Sequence
  Description of Artificial Sequence: Synthetic oligonucleotide
  Target: SCNA; (-) strand; PAM type: NRG; PAM sequence: TAG
cagtggttttgcactctcta

SEQ ID NO: 23403 - DNA, 20 bp, Artificial Sequence
  Description of Artificial Sequence: Synthetic oligonucleotide
  Target: SCNA; (-) strand; PAM type: NRG; PAM sequence: TGG
agttacaaaaaattagccag

SEQ ID NO: 23404 - DNA, 20 bp, Artificial Sequence
  Description of Artificial Sequence: Synthetic oligonucleotide
  Target: SCNA; (-) strand; PAM type: NRG; PAM sequence: CAG
attagttacaaaaaattagc

SEQ ID NO: 23405 - DNA, 20 bp, Artificial Sequence
  Description of Artificial Sequence: Synthetic oligonucleotide
  Target: SCNA; (-) strand; PAM type: NRG; PAM sequence: TAG
ccagattagttacaaaaaat

SEQ ID NO: 23406 - DNA, 20 bp, Artificial Sequence
  Description of Artificial Sequence: Synthetic oligonucleotide
  Target: SCNA; (-) strand; PAM type: NRG; PAM sequence: TAG
ctggaaatttctagccagat

SEQ ID NO: 23407 - DNA, 20 bp, Artificial Sequence
  Description of Artificial Sequence: Synthetic oligonucleotide
  Target: SCNA; (-) strand; PAM type: NRG; PAM sequence: CAG
gaaatctggaaatttctagc

SEQ ID NO: 23408 - DNA, 20 bp, Artificial Sequence
  Description of Artificial Sequence: Synthetic oligonucleotide
  Target: SCNA; (-) strand; PAM type: NRG; PAM sequence: TAG
gctggaaatctggaaatttc

SEQ ID NO: 23409 - DNA, 20 bp, Artificial Sequence
  Description of Artificial Sequence: Synthetic oligonucleotide
  Target: SCNA; (-) strand; PAM type: NRG; PAM sequence: TGG
aatatagtgtgctggaaatc

SEQ ID NO: 23410 - DNA, 20 bp, Artificial Sequence
  Description of Artificial Sequence: Synthetic oligonucleotide
  Target: SCNA; (-) strand; PAM type: NRG; PAM sequence: TGG
cttcctttaatatagtgtgc

SEQ ID NO: 23411 - DNA, 20 bp, Artificial Sequence
  Description of Artificial Sequence: Synthetic oligonucleotide
  Target: SCNA; (-) strand; PAM type: NRG; PAM sequence: TAG
tggcagtacttcctttaata

SEQ ID NO: 23412 - DNA, 20 bp, Artificial Sequence
  Description of Artificial Sequence: Synthetic oligonucleotide
  Target: SCNA; (-) strand; PAM type: NRG; PAM sequence: CAG
atccatgaaatgttttttgg

SEQ ID NO: 23413 - DNA, 20 bp, Artificial Sequence
  Description of Artificial Sequence: Synthetic oligonucleotide
  Target: SCNA; (-) strand; PAM type: NRG; PAM sequence: TGG
ggaatccatgaaatgttttt

SEQ ID NO: 23414 - DNA, 20 bp, Artificial Sequence
  Description of Artificial Sequence: Synthetic oligonucleotide
  Target: SCNA; (-) strand; PAM type: NRG; PAM sequence: TGG
tctacattgatctctatttt

SEQ ID NO: 23415 - DNA, 20 bp, Artificial Sequence
  Description of Artificial Sequence: Synthetic oligonucleotide
  Target: SCNA; (-) strand; PAM type: NRG; PAM sequence: GAG
aaatctgcttggtcttccca

SEQ ID NO: 23416 - DNA, 20 bp, Artificial Sequence
  Description of Artificial Sequence: Synthetic oligonucleotide
  Target: SCNA; (-) strand; PAM type: NRG; PAM sequence: CAG
agaaatctgcttggtcttcc

SEQ ID NO: 23417 - DNA, 20 bp, Artificial Sequence
  Description of Artificial Sequence: Synthetic oligonucleotide
  Target: SCNA; (-) strand; PAM type: NRG; PAM sequence: TGG
tgttgtttcagaaatctgct

SEQ ID NO: 23418 - DNA, 20 bp, Artificial Sequence
  Description of Artificial Sequence: Synthetic oligonucleotide
  Target: SCNA; (-) strand; PAM type: NRG; PAM sequence: CAG
aatatatggtagtgttgttt

SEQ ID NO: 23419 - DNA, 20 bp, Artificial Sequence
  Description of Artificial Sequence: Synthetic oligonucleotide
  Target: SCNA; (-) strand; PAM type: NRG; PAM sequence: TAG
gtatataatgaaatatatgg

SEQ ID NO: 23420 - DNA, 20 bp, Artificial Sequence
  Description of Artificial Sequence: Synthetic oligonucleotide
  Target: SCNA; (-) strand; PAM type: NRG; PAM sequence: TGG
tgtgtatataatgaaatata

SEQ ID NO: 23421 - DNA, 20 bp, Artificial Sequence
  Description of Artificial Sequence: Synthetic oligonucleotide
  Target: SCNA; (-) strand; PAM type: NRG; PAM sequence: TAG
tgtgtgtgtgtgtgtgtgtg

SEQ ID NO: 23422 - DNA, 20 bp, Artificial Sequence
  Description of Artificial Sequence: Synthetic oligonucleotide
  Target: SCNA; (-) strand; PAM type: NRG; PAM sequence: TGG
tgtagggtatgttcagggta

SEQ ID NO: 23423 - DNA, 20 bp, Artificial Sequence
  Description of Artificial Sequence: Synthetic oligonucleotide
  Target: SCNA; (-) strand; PAM type: NRG; PAM sequence: GGG
tagggtgtagggtatgttca

SEQ ID NO: 23424 - DNA, 20 bp, Artificial Sequence
  Description of Artificial Sequence: Synthetic oligonucleotide
  Target: SCNA; (-) strand; PAM type: NRG; PAM sequence: AGG
gtagggtgtagggtatgttc

SEQ ID NO: 23425 - DNA, 20 bp, Artificial Sequence
  Description of Artificial Sequence: Synthetic oligonucleotide
  Target: SCNA; (-) strand; PAM type: NRG; PAM sequence: CAG
tgtagggtgtagggtatgtt

SEQ ID NO: 23426 - DNA, 20 bp, Artificial Sequence
  Description of Artificial Sequence: Synthetic oligonucleotide
  Target: SCNA; (-) strand; PAM type: NRG; PAM sequence: GGG
taagtattatgtagggtgta

SEQ ID NO: 23427 - DNA, 20 bp, Artificial Sequence
  Description of Artificial Sequence: Synthetic oligonucleotide
  Target: SCNA; (-) strand; PAM type: NRG; PAM sequence: AGG
ataagtattatgtagggtgt

SEQ ID NO: 23428 - DNA, 20 bp, Artificial Sequence
  Description of Artificial Sequence: Synthetic oligonucleotide
  Target: SCNA; (-) strand; PAM type: NRG; PAM sequence: TAG
tataagtattatgtagggtg

SEQ ID NO: 23429 - DNA, 20 bp, Artificial Sequence
  Description of Artificial Sequence: Synthetic oligonucleotide
  Target: SCNA; (-) strand; PAM type: NRG; PAM sequence: GGG
gtatatataagtattatgta

SEQ ID NO: 23430 - DNA, 20 bp, Artificial Sequence
  Description of Artificial Sequence: Synthetic oligonucleotide
  Target: SCNA; (-) strand; PAM type: NRG; PAM sequence: AGG
tgtatatataagtattatgt

SEQ ID NO: 23431 - DNA, 20 bp, Artificial Sequence
  Description of Artificial Sequence: Synthetic oligonucleotide
  Target: SCNA; (-) strand; PAM type: NRG; PAM sequence: TAG
gtgtatatataagtattatg

SEQ ID NO: 23432 - DNA, 20 bp, Artificial Sequence
  Description of Artificial Sequence: Synthetic oligonucleotide
  Target: SCNA; (-) strand; PAM type: NRG; PAM sequence: AAG
gagcactaacgtgtatatat

SEQ ID NO: 23433 - DNA, 20 bp, Artificial Sequence
  Description of Artificial Sequence: Synthetic oligonucleotide
  Target: SCNA; (-) strand; PAM type: NRG; PAM sequence: GAG
ctttataaaaattaactgca

SEQ ID NO: 23434 - DNA, 20 bp, Artificial Sequence
  Description of Artificial Sequence: Synthetic oligonucleotide
  Target: SCNA; (-) strand; PAM type: NRG; PAM sequence: CAG
gcctttataaaaattaactg

SEQ ID NO: 23435 - DNA, 20 bp, Artificial Sequence
  Description of Artificial Sequence: Synthetic oligonucleotide
  Target: SCNA; (-) strand; PAM type: NRG; PAM sequence: TGG
ttttcttattagaaactaat

SEQ ID NO: 23436 - DNA, 20 bp, Artificial Sequence
  Description of Artificial Sequence: Synthetic oligonucleotide
  Target: SCNA; (-) strand; PAM type: NRG; PAM sequence: TAG
tacacatttctttttcttat

SEQ ID NO: 23437 - DNA, 20 bp, Artificial Sequence
  Description of Artificial Sequence: Synthetic oligonucleotide
  Target: SCNA; (-) strand; PAM type: NRG; PAM sequence: GAG
tgttttttattcttcatgga

SEQ ID NO: 23438 - DNA, 20 bp, Artificial Sequence
  Description of Artificial Sequence: Synthetic oligonucleotide
  Target: SCNA; (-) strand; PAM type: NRG; PAM sequence: GAG
tgtgttttttattcttcatg

SEQ ID NO: 23439 - DNA, 20 bp, Artificial Sequence
  Description of Artificial Sequence: Synthetic oligonucleotide
  Target: SCNA; (-) strand; PAM type: NRG; PAM sequence: TGG
tttgtgttttttattcttca

SEQ ID NO: 23440 - DNA, 20 bp, Artificial Sequence
  Description of Artificial Sequence: Synthetic oligonucleotide
  Target: SCNA; (-) strand; PAM type: NRG; PAM sequence: CAG
aaaaaaatgtatatttgtta

SEQ ID NO: 23441 - DNA, 20 bp, Artificial Sequence
  Description of Artificial Sequence: Synthetic oligonucleotide
  Target: SCNA; (-) strand; PAM type: NRG; PAM sequence: GAG
taaatatcatgaaatgattt

SEQ ID NO: 23442 - DNA, 20 bp, Artificial Sequence
  Description of Artificial Sequence: Synthetic oligonucleotide
  Target: SCNA; (-) strand; PAM type: NRG; PAM sequence: AAG
tttaggagaaaatctcccca

SEQ ID NO: 23443 - DNA, 20 bp, Artificial Sequence
  Description of Artificial Sequence: Synthetic oligonucleotide
  Target: SCNA; (-) strand; PAM type: NRG; PAM sequence: GAG
tgaaaaaatgaaggctttag

SEQ ID NO: 23444 - DNA, 20 bp, Artificial Sequence
  Description of Artificial Sequence: Synthetic oligonucleotide
  Target: SCNA; (-) strand; PAM type: NRG; PAM sequence: AGG
tatgaaaaaatgaaggcttt

SEQ ID NO: 23445 - DNA, 20 bp, Artificial Sequence
  Description of Artificial Sequence: Synthetic oligonucleotide
  Target: SCNA; (-) strand; PAM type: NRG; PAM sequence: TAG
atatgaaaaaatgaaggctt

SEQ ID NO: 23446 - DNA, 20 bp, Artificial Sequence
  Description of Artificial Sequence: Synthetic oligonucleotide
  Target: SCNA; (-) strand; PAM type: NRG; PAM sequence: AGG
cactatatatgaaaaaatga

SEQ ID NO: 23447 - DNA, 20 bp, Artificial Sequence
  Description of Artificial Sequence: Synthetic oligonucleotide
  Target: SCNA; (-) strand; PAM type: NRG; PAM sequence: AAG
tcactatatatgaaaaaatg

SEQ ID NO: 23448 - DNA, 20 bp, Artificial Sequence
  Description of Artificial Sequence: Synthetic oligonucleotide
  Target: SCNA; (-) strand; PAM type: NRG; PAM sequence: TAG
gtaaatagaaattggttgtt

SEQ ID NO: 23449 - DNA, 20 bp, Artificial Sequence
  Description of Artificial Sequence: Synthetic oligonucleotide
  Target: SCNA; (-) strand; PAM type: NRG; PAM sequence: TGG
attcaactgtaaatagaaat

SEQ ID NO: 23450 - DNA, 20 bp, Artificial Sequence
  Description of Artificial Sequence: Synthetic oligonucleotide
  Target: SCNA; (-) strand; PAM type: NRG; PAM sequence: TAG
aagtagaattcaactgtaaa

SEQ ID NO: 23451 - DNA, 20 bp, Artificial Sequence
  Description of Artificial Sequence: Synthetic oligonucleotide
  Target: SCNA; (-) strand; PAM type: NRG; PAM sequence: TAG
tagttgtatgtttttggaag

SEQ ID NO: 23452 - DNA, 20 bp, Artificial Sequence
  Description of Artificial Sequence: Synthetic oligonucleotide
  Target: SCNA; (-) strand; PAM type: NRG; PAM sequence: AAG
tcatagttgtatgtttttgg

SEQ ID NO: 23453 - DNA, 20 bp, Artificial Sequence
  Description of Artificial Sequence: Synthetic oligonucleotide
  Target: SCNA; (-) strand; PAM type: NRG; PAM sequence: TGG
gagtcatagttgtatgtttt

SEQ ID NO: 23454 - DNA, 20 bp, Artificial Sequence
  Description of Artificial Sequence: Synthetic oligonucleotide
  Target: SCNA; (-) strand; PAM type: NRG; PAM sequence: TAG
aggtaacaaggattgagtca

SEQ ID NO: 23455 - DNA, 20 bp, Artificial Sequence
  Description of Artificial Sequence: Synthetic oligonucleotide
  Target: SCNA; (-) strand; PAM type: NRG; PAM sequence: GAG
attgaaaggtaacaaggatt

SEQ ID NO: 23456 - DNA, 20 bp, Artificial Sequence
  Description of Artificial Sequence: Synthetic oligonucleotide
  Target: SCNA; (-) strand; PAM type: NRG; PAM sequence: AGG
cagtttattgaaaggtaaca

SEQ ID NO: 23457 - DNA, 20 bp, Artificial Sequence
  Description of Artificial Sequence: Synthetic oligonucleotide
  Target: SCNA; (-) strand; PAM type: NRG; PAM sequence: AAG
acagtttattgaaaggtaac

SEQ ID NO: 23458 - DNA, 20 bp, Artificial Sequence
  Description of Artificial Sequence: Synthetic oligonucleotide
  Target: SCNA; (-) strand; PAM type: NRG; PAM sequence: AGG
gggcttaacagtttattgaa

SEQ ID NO: 23459 - DNA, 20 bp, Artificial Sequence
  Description of Artificial Sequence: Synthetic oligonucleotide
  Target: SCNA; (-) strand; PAM type: NRG; PAM sequence: AAG
tgggcttaacagtttattga

SEQ ID NO: 23460 - DNA, 20 bp, Artificial Sequence
  Description of Artificial Sequence: Synthetic oligonucleotide
  Target: SCNA; (-) strand; PAM type: NRG; PAM sequence: CAG
agttatatctttgggcttaa

SEQ ID NO: 23461 - DNA, 20 bp, Artificial Sequence
  Description of Artificial Sequence: Synthetic oligonucleotide
  Target: SCNA; (-) strand; PAM type: NRG; PAM sequence: GGG
ttaaaataagttatatcttt

SEQ ID NO: 23462 - DNA, 20 bp, Artificial Sequence
  Description of Artificial Sequence: Synthetic oligonucleotide
  Target: SCNA; (-) strand; PAM type: NRG; PAM sequence: TGG
tttaaaataagttatatctt

SEQ ID NO: 23463 - DNA, 20 bp, Artificial Sequence
  Description of Artificial Sequence: Synthetic oligonucleotide
  Target: SCNA; (-) strand; PAM type: NRG; PAM sequence: AAG
ctaggttcacattttaaaat

SEQ ID NO: 23464 - DNA, 20 bp, Artificial Sequence
  Description of Artificial Sequence: Synthetic oligonucleotide
  Target: SCNA; (-) strand; PAM type: NRG; PAM sequence: AGG
cctgatcatcccaaatgtct

SEQ ID NO: 23465 - DNA, 20 bp, Artificial Sequence
  Description of Artificial Sequence: Synthetic oligonucleotide
  Target: SCNA; (-) strand; PAM type: NRG; PAM sequence: TAG
gcctgatcatcccaaatgtc

SEQ ID NO: 23466 - DNA, 20 bp, Artificial Sequence
  Description of Artificial Sequence: Synthetic oligonucleotide
  Target: SCNA; (-) strand; PAM type: NRG; PAM sequence: TAG
ctgctattcttaatagtaac

SEQ ID NO: 23467 - DNA, 20 bp, Artificial Sequence
  Description of Artificial Sequence: Synthetic oligonucleotide
  Target: SCNA; (-) strand; PAM type: NRG; PAM sequence: TAG
gtacatactgctattcttaa

SEQ ID NO: 23468 - DNA, 20 bp, Artificial Sequence
  Description of Artificial Sequence: Synthetic oligonucleotide
  Target: SCNA; (-) strand; PAM type: NRG; PAM sequence: TAG
atctctgaataccattttat

SEQ ID NO: 23469 - DNA, 20 bp, Artificial Sequence
  Description of Artificial Sequence: Synthetic oligonucleotide
  Target: SCNA; (-) strand; PAM type: NRG; PAM sequence: TAG
tttgggtcatttttattcat

SEQ ID NO: 23470 - DNA, 20 bp, Artificial Sequence
  Description of Artificial Sequence: Synthetic oligonucleotide
  Target: SCNA; (-) strand; PAM type: NRG; PAM sequence: GGG
aaagactttatatatagttt

SEQ ID NO: 23471 - DNA, 20 bp, Artificial Sequence
  Description of Artificial Sequence: Synthetic oligonucleotide
  Target: SCNA; (-) strand; PAM type: NRG; PAM sequence: TGG
caaagactttatatatagtt

SEQ ID NO: 23472 - DNA, 20 bp, Artificial Sequence
  Description of Artificial Sequence: Synthetic oligonucleotide
  Target: SCNA; (-) strand; PAM type: NRG; PAM sequence: TAG
atgaacaaagactttatata

SEQ ID NO: 23473 - DNA, 20 bp, Artificial Sequence
  Description of Artificial Sequence: Synthetic oligonucleotide
  Target: SCNA; (-) strand; PAM type: NRG; PAM sequence: AAG
gtttattttgtgtatgaaca

SEQ ID NO: 23474 - DNA, 20 bp, Artificial Sequence
  Description of Artificial Sequence: Synthetic oligonucleotide
  Target: SCNA; (-) strand; PAM type: NRG; PAM sequence: TAG
tcgttagagaaccccatcca

SEQ ID NO: 23475 - DNA, 20 bp, Artificial Sequence
  Description of Artificial Sequence: Synthetic oligonucleotide
  Target: SCNA; (-) strand; PAM type: NRG; PAM sequence: GAG
gtttacttctactgtcgtta

SEQ ID NO: 23476 - DNA, 20 bp, Artificial Sequence
  Description of Artificial Sequence: Synthetic oligonucleotide
  Target: SCNA; (-) strand; PAM type: NRG; PAM sequence: TAG
ccgtttacttctactgtcgt

SEQ ID NO: 23477 - DNA, 20 bp, Artificial Sequence
  Description of Artificial Sequence: Synthetic oligonucleotide
  Target: SCNA; (-) strand; PAM type: NRG; PAM sequence: TAG
gcagtttttgatacactctt

SEQ ID NO: 23478 - DNA, 20 bp, Artificial Sequence
  Description of Artificial Sequence: Synthetic oligonucleotide
  Target: SCNA; (-) strand; PAM type: NRG; PAM sequence: CAG
tataggaaactgtaaaagtg

SEQ ID NO: 23479 - DNA, 20 bp, Artificial Sequence
  Description of Artificial Sequence: Synthetic oligonucleotide
  Target: SCNA; (-) strand; PAM type: NRG; PAM sequence: AAG
cgatatataggaaactgtaa

SEQ ID NO: 23480 - DNA, 20 bp, Artificial Sequence
  Description of Artificial Sequence: Synthetic oligonucleotide
  Target: SCNA; (-) strand; PAM type: NRG; PAM sequence: AGG
taacctgtctgacgatatat

SEQ ID NO: 23481 - DNA, 20 bp, Artificial Sequence
  Description of Artificial Sequence: Synthetic oligonucleotide
  Target: SCNA; (-) strand; PAM type: NRG; PAM sequence: TAG
ttaacctgtctgacgatata

SEQ ID NO: 23482 - DNA, 20 bp, Artificial Sequence
  Description of Artificial Sequence: Synthetic oligonucleotide
  Target: SCNA; (-) strand; PAM type: NRG; PAM sequence: CAG
attttaatgtactttatcca

SEQ ID NO: 23483 - DNA, 20 bp, Artificial Sequence
  Description of Artificial Sequence: Synthetic oligonucleotide
  Target: SCNA; (-) strand; PAM type: NRG; PAM sequence: TAG
cacatgaatttcgaccatac

SEQ ID NO: 23484 - DNA, 20 bp, Artificial Sequence
  Description of Artificial Sequence: Synthetic oligonucleotide
  Target: SCNA; (-) strand; PAM type: NRG; PAM sequence: TGG
accacttaatactatcacgt

SEQ ID NO: 23485 - DNA, 20 bp, Artificial Sequence
  Description of Artificial Sequence: Synthetic oligonucleotide
  Target: SCNA; (-) strand; PAM type: NRG; PAM sequence: AGG
gtgactttattacctctgca

SEQ ID NO: 23486 - DNA, 20 bp, Artificial Sequence
  Description of Artificial Sequence: Synthetic oligonucleotide
  Target: SCNA; (-) strand; PAM type: NRG; PAM sequence: AAG
cgtgactttattacctctgc

SEQ ID NO: 23487 - DNA, 20 bp, Artificial Sequence
  Description of Artificial Sequence: Synthetic oligonucleotide
  Target: SCNA; (-) strand; PAM type: NRG; PAM sequence: GGG
gttaccaattccacttgtca

SEQ ID NO: 23488 - DNA, 20 bp, Artificial Sequence
  Description of Artificial Sequence: Synthetic oligonucleotide
  Target: SCNA; (-) strand; PAM type: NRG; PAM sequence: AGG
tgttaccaattccacttgtc

SEQ ID NO: 23489 - DNA, 20 bp, Artificial Sequence
  Description of Artificial Sequence: Synthetic oligonucleotide
  Target: SCNA; (-) strand; PAM type: NRG; PAM sequence: CAG
atgttaccaattccacttgt

SEQ ID NO: 23490 - DNA, 20 bp, Artificial Sequence
  Description of Artificial Sequence: Synthetic oligonucleotide
  Target: SCNA; (-) strand; PAM type: NRG; PAM sequence: AGG
agggccaactcactccctca

SEQ ID NO: 23491 - DNA, 20 bp, Artificial Sequence
  Description of Artificial Sequence: Synthetic oligonucleotide
  Target: SCNA; (-) strand; PAM type: NRG; PAM sequence: AAG
aagggccaactcactccctc

SEQ ID NO: 23492 - DNA, 20 bp, Artificial Sequence
  Description of Artificial Sequence: Synthetic oligonucleotide
  Target: SCNA; (-) strand; PAM type: NRG; PAM sequence: GGG
acatggtagagagatagaaa

SEQ ID NO: 23493 - DNA, 20 bp, Artificial Sequence
  Description of Artificial Sequence: Synthetic oligonucleotide
  Target: SCNA; (-) strand; PAM type: NRG; PAM sequence: AGG
cacatggtagagagatagaa

SEQ ID NO: 23494 - DNA, 20 bp, Artificial Sequence
  Description of Artificial Sequence: Synthetic oligonucleotide
  Target: SCNA; (-) strand; PAM type: NRG; PAM sequence: AAG
tcacatggtagagagataga

SEQ ID NO: 23495 - DNA, 20 bp, Artificial Sequence
  Description of Artificial Sequence: Synthetic oligonucleotide
  Target: SCNA; (-) strand; PAM type: NRG; PAM sequence: TAG
gttctcacatggtagagaga

SEQ ID NO: 23496 - DNA, 20 bp, Artificial Sequence
  Description of Artificial Sequence: Synthetic oligonucleotide
  Target: SCNA; (-) strand; PAM type: NRG; PAM sequence: GAG
ctgtgttctcacatggtaga

SEQ ID NO: 23497 - DNA, 20 bp, Artificial Sequence
  Description of Artificial Sequence: Synthetic oligonucleotide
  Target: SCNA; (-) strand; PAM type: NRG; PAM sequence: GAG
tgctgtgttctcacatggta

SEQ ID NO: 23498 - DNA, 20 bp, Artificial Sequence
  Description of Artificial Sequence: Synthetic oligonucleotide
  Target: SCNA; (-) strand; PAM type: NRG; PAM sequence: TAG
aatgctgtgttctcacatgg

SEQ ID NO: 23499 - DNA, 20 bp, Artificial Sequence
  Description of Artificial Sequence: Synthetic oligonucleotide
  Target: SCNA; (-) strand; PAM type: NRG; PAM sequence: TGG
ccaaatgctgtgttctcaca

SEQ ID NO: 23500 - DNA, 20 bp, Artificial Sequence
  Description of Artificial Sequence: Synthetic oligonucleotide
  Target: SCNA; (-) strand; PAM type: NRG; PAM sequence: GGG
ttgtcactgtatcctccaga

SEQ ID NO: 23501 - DNA, 20 bp, Artificial Sequence
  Description of Artificial Sequence: Synthetic oligonucleotide
  Target: SCNA; (-) strand; PAM type: NRG; PAM sequence: AGG
cttgtcactgtatcctccag

SEQ ID NO: 23502 - DNA, 20 bp, Artificial Sequence
  Description of Artificial Sequence: Synthetic oligonucleotide
  Target: SCNA; (-) strand; PAM type: NRG; PAM sequence: GAG
tcttgtcactgtatcctcca

SEQ ID NO: 23503 - DNA, 20 bp, Artificial Sequence
  Description of Artificial Sequence: Synthetic oligonucleotide
  Target: SCNA; (-) strand; PAM type: NRG; PAM sequence: CAG
tgtcttgtcactgtatcctc

SEQ ID NO: 23504 - DNA, 20 bp, Artificial Sequence
  Description of Artificial Sequence: Synthetic oligonucleotide
  Target: SCNA; (-) strand; PAM type: NRG; PAM sequence: TGG
ccggttctctactcccaaga

SEQ ID NO: 23505 - DNA, 20 bp, Artificial Sequence
  Description of Artificial Sequence: Synthetic oligonucleotide
  Target: SCNA; (-) strand; PAM type: NRG; PAM sequence: AAG
agggccggttctctactccc

SEQ ID NO: 23506 - DNA, 20 bp, Artificial Sequence
  Description of Artificial Sequence: Synthetic oligonucleotide
  Target: SCNA; (-) strand; PAM type: NRG; PAM sequence: CGG
gttcagtatctggcgagggc

SEQ ID NO: 23507 - DNA, 20 bp, Artificial Sequence
  Description of Artificial Sequence: Synthetic oligonucleotide
  Target: SCNA; (-) strand; PAM type: NRG; PAM sequence: GGG
tcaggttcagtatctggcga

SEQ ID NO: 23508 - DNA, 20 bp, Artificial Sequence
  Description of Artificial Sequence: Synthetic oligonucleotide
  Target: SCNA; (-) strand; PAM type: NRG; PAM sequence: AGG
ttcaggttcagtatctggcg

SEQ ID NO: 23509 - DNA, 20 bp, Artificial Sequence
  Description of Artificial Sequence: Synthetic oligonucleotide
  Target: SCNA; (-) strand; PAM type: NRG; PAM sequence: GAG
cttcaggttcagtatctggc

SEQ ID NO: 23510 - DNA, 20 bp, Artificial Sequence
  Description of Artificial Sequence: Synthetic oligonucleotide
  Target: SCNA; (-) strand; PAM type: NRG; PAM sequence: TGG
ttgtcttcaggttcagtatc

SEQ ID NO: 23511 - DNA, 20 bp, Artificial Sequence
  Description of Artificial Sequence: Synthetic oligonucleotide
  Target: SCNA; (-) strand; PAM type: NRG; PAM sequence: CAG
aaggcatttgtcttcaggtt

SEQ ID NO: 23512 - DNA, 20 bp, Artificial Sequence
  Description of Artificial Sequence: Synthetic oligonucleotide
  Target: SCNA; (-) strand; PAM type: NRG; PAM sequence: AGG
agatcaaggcatttgtcttc

SEQ ID NO: 23513 - DNA, 20 bp, Artificial Sequence
  Description of Artificial Sequence: Synthetic oligonucleotide
  Target: SCNA; (-) strand; PAM type: NRG; PAM sequence: CAG
aagatcaaggcatttgtctt

SEQ ID NO: 23514 - DNA, 20 bp, Artificial Sequence
  Description of Artificial Sequence: Synthetic oligonucleotide
  Target: SCNA; (-) strand; PAM type: NRG; PAM sequence: AGG
ggctgggaactccaagatca

SEQ ID NO: 23515 - DNA, 20 bp, Artificial Sequence
  Description of Artificial Sequence: Synthetic oligonucleotide
  Target: SCNA; (-) strand; PAM type: NRG; PAM sequence: AAG
aggctgggaactccaagatc

SEQ ID NO: 23516 - DNA, 20 bp, Artificial Sequence
  Description of Artificial Sequence: Synthetic oligonucleotide
  Target: SCNA; (-) strand; PAM type: NRG; PAM sequence: AAG
ctctggaggctgggaactcc

SEQ ID NO: 23517 - DNA, 20 bp, Artificial Sequence
  Description of Artificial Sequence: Synthetic oligonucleotide
  Target: SCNA; (-) strand; PAM type: NRG; PAM sequence: GGG
ttctcatagctctggaggct

SEQ ID NO: 23518 - DNA, 20 bp, Artificial Sequence
  Description of Artificial Sequence: Synthetic oligonucleotide
  Target: SCNA; (-) strand; PAM type: NRG; PAM sequence: TGG
tttctcatagctctggaggc

SEQ ID NO: 23519 - DNA, 20 bp, Artificial Sequence
  Description of Artificial Sequence: Synthetic oligonucleotide
  Target: SCNA; (-) strand; PAM type: NRG; PAM sequence: AGG
tttatttctcatagctctgg

SEQ ID NO: 23520 - DNA, 20 bp, Artificial Sequence
  Description of Artificial Sequence: Synthetic oligonucleotide
  Target: SCNA; (-) strand; PAM type: NRG; PAM sequence: GAG
atttatttctcatagctctg

SEQ ID NO: 23521 - DNA, 20 bp, Artificial Sequence
  Description of Artificial Sequence: Synthetic oligonucleotide
  Target: SCNA; (-) strand; PAM type: NRG; PAM sequence: TGG
aaatttatttctcatagctc

SEQ ID NO: 23522 - DNA, 20 bp, Artificial Sequence
  Description of Artificial Sequence: Synthetic oligonucleotide
  Target: SCNA; (-) strand; PAM type: NRG; PAM sequence: TAG
caacagaaatttatttctca

SEQ ID NO: 23523 - DNA, 20 bp, Artificial Sequence
  Description of Artificial Sequence: Synthetic oligonucleotide
  Target: SCNA; (-) strand; PAM type: NRG; PAM sequence: CAG
actgggtaatttacaaacaa

SEQ ID NO: 23524 - DNA, 20 bp, Artificial Sequence
  Description of Artificial Sequence: Synthetic oligonucleotide
  Target: SCNA; (-) strand; PAM type: NRG; PAM sequence: GGG
ataacaaaatacatgagact

SEQ ID NO: 23525 - DNA, 20 bp, Artificial Sequence
  Description of Artificial Sequence: Synthetic oligonucleotide
  Target: SCNA; (-) strand; PAM type: NRG; PAM sequence: TGG
tataacaaaatacatgagac

SEQ ID NO: 23526 - DNA, 20 bp, Artificial Sequence
  Description of Artificial Sequence: Synthetic oligonucleotide
  Target: SCNA; (-) strand; PAM type: NRG; PAM sequence: GAG
gctgttataacaaaatacat

SEQ ID NO: 23527 - DNA, 20 bp, Artificial Sequence
  Description of Artificial Sequence: Synthetic oligonucleotide
  Target: SCNA; (-) strand; PAM type: NRG; PAM sequence: AAG
aaatgttttgggctctgaga

SEQ ID NO: 23528 - DNA, 20 bp, Artificial Sequence
  Description of Artificial Sequence: Synthetic oligonucleotide
  Target: SCNA; (-) strand; PAM type: NRG; PAM sequence: GAG
ttataaatgttttgggctct

SEQ ID NO: 23529 - DNA, 20 bp, Artificial Sequence
  Description of Artificial Sequence: Synthetic oligonucleotide
  Target: SCNA; (-) strand; PAM type: NRG; PAM sequence: GGG
cttactattataaatgtttt

SEQ ID NO: 23530 - DNA, 20 bp, Artificial Sequence
  Description of Artificial Sequence: Synthetic oligonucleotide
  Target: SCNA; (-) strand; PAM type: NRG; PAM sequence: TGG
tcttactattataaatgttt

SEQ ID NO: 23531 - DNA, 20 bp, Artificial Sequence
  Description of Artificial Sequence: Synthetic oligonucleotide
  Target: SCNA; (-) strand; PAM type: NRG; PAM sequence: AGG
caagtacagctgatcatttg

SEQ ID NO: 23532 - DNA, 20 bp, Artificial Sequence
  Description of Artificial Sequence: Synthetic oligonucleotide
  Target: SCNA; (-) strand; PAM type: NRG; PAM sequence: GAG
gcaagtacagctgatcattt

SEQ ID NO: 23533 - DNA, 20 bp, Artificial Sequence
  Description of Artificial Sequence: Synthetic oligonucleotide
  Target: SCNA; (-) strand; PAM type: NRG; PAM sequence: CAG
tctttcatttttagcaagta

SEQ ID NO: 23534 - DNA, 20 bp, Artificial Sequence
  Description of Artificial Sequence: Synthetic oligonucleotide
  Target: SCNA; (-) strand; PAM type: NRG; PAM sequence: AAG
gttgttctttcatttttagc

SEQ ID NO: 23535 - DNA, 20 bp, Artificial Sequence
  Description of Artificial Sequence: Synthetic oligonucleotide
  Target: SCNA; (-) strand; PAM type: NRG; PAM sequence: TAG
tttagttgttctttcatttt

SEQ ID NO: 23536 - DNA, 20 bp, Artificial Sequence
  Description of Artificial Sequence: Synthetic oligonucleotide
  Target: SCNA; (-) strand; PAM type: NRG; PAM sequence: TAG
cccaagtgaattgagtgatt

SEQ ID NO: 23537 - DNA, 20 bp, Artificial Sequence
  Description of Artificial Sequence: Synthetic oligonucleotide
  Target: SCNA; (-) strand; PAM type: NRG; PAM sequence: GAG
ttgtcttgcccaagtgaatt

SEQ ID NO: 23538 - DNA, 20 bp, Artificial Sequence
  Description of Artificial Sequence: Synthetic oligonucleotide
  Target: SCNA; (-) strand; PAM type: NRG; PAM sequence: AAG
aataatggattgtcttgccc

SEQ ID NO: 23539 - DNA, 20 bp, Artificial Sequence
  Description of Artificial Sequence: Synthetic oligonucleotide
  Target: SCNA; (-) strand; PAM type: NRG; PAM sequence: TGG
caaaaattttagacgaataa

SEQ ID NO: 23540 - DNA, 20 bp, Artificial Sequence
  Description of Artificial Sequence: Synthetic oligonucleotide
  Target: SCNA; (-) strand; PAM type: NRG; PAM sequence: TAG
aaaattattaacaaaaattt

SEQ ID NO: 23541 - DNA, 20 bp, Artificial Sequence
  Description of Artificial Sequence: Synthetic oligonucleotide
  Target: SCNA; (-) strand; PAM type: NRG; PAM sequence: CAG
agtactattagatagtaaat

SEQ ID NO: 23542 - DNA, 20 bp, Artificial Sequence
  Description of Artificial Sequence: Synthetic oligonucleotide
  Target: SCNA; (-) strand; PAM type: NRG; PAM sequence: TAG
tggtatccagtactattaga

SEQ ID NO: 23543 - DNA, 20 bp, Artificial Sequence
  Description of Artificial Sequence: Synthetic oligonucleotide
  Target: SCNA; (-) strand; PAM type: NRG; PAM sequence: TAG
tgtatggtatccagtactat

SEQ ID NO: 23544 - DNA, 20 bp, Artificial Sequence
  Description of Artificial Sequence: Synthetic oligonucleotide
  Target: SCNA; (-) strand; PAM type: NRG; PAM sequence: CAG
gtaattggttgtatggtatc

SEQ ID NO: 23545 - DNA, 20 bp, Artificial Sequence
  Description of Artificial Sequence: Synthetic oligonucleotide
  Target: SCNA; (-) strand; PAM type: NRG; PAM sequence: TGG
tgtaggagtaattggttgta

SEQ ID NO: 23546 - DNA, 20 bp, Artificial Sequence
  Description of Artificial Sequence: Synthetic oligonucleotide
  Target: SCNA; (-) strand; PAM type: NRG; PAM sequence: TGG
aaaaaatttgtaggagtaat

SEQ ID NO: 23547 - DNA, 20 bp, Artificial Sequence
  Description of Artificial Sequence: Synthetic oligonucleotide
  Target: SCNA; (-) strand; PAM type: NRG; PAM sequence: GAG
attaacaaaaaaatttgtag

SEQ ID NO: 23548 - DNA, 20 bp, Artificial Sequence
  Description of Artificial Sequence: Synthetic oligonucleotide
  Target: SCNA; (-) strand; PAM type: NRG; PAM sequence: AGG
ctattaacaaaaaaatttgt

SEQ ID NO: 23549 - DNA, 20 bp, Artificial Sequence
  Description of Artificial Sequence: Synthetic oligonucleotide
  Target: SCNA; (-) strand; PAM type: NRG; PAM sequence: TAG
actattaacaaaaaaatttg

SEQ ID NO: 23550 - DNA, 20 bp, Artificial Sequence
  Description of Artificial Sequence: Synthetic oligonucleotide
  Target: SCNA; (-) strand; PAM type: NRG; PAM sequence: GAG
tattattaaaaagcaaaaca

SEQ ID NO: 23551 - DNA, 20 bp, Artificial Sequence
  Description of Artificial Sequence: Synthetic oligonucleotide
  Target: SCNA; (-) strand; PAM type: NRG; PAM sequence: CAG
agtattattaaaaagcaaaa

SEQ ID NO: 23552 - DNA, 20 bp, Artificial Sequence
  Description of Artificial Sequence: Synthetic oligonucleotide
  Target: SCNA; (-) strand; PAM type: NRG; PAM sequence: AAG
tggtatccagtattattaaa

SEQ ID NO: 23553 - DNA, 20 bp, Artificial Sequence
  Description of Artificial Sequence: Synthetic oligonucleotide
  Target: SCNA; (-) strand; PAM type: NRG; PAM sequence: CAG
ggatatccagtattggtatc

SEQ ID NO: 23554 - DNA, 20 bp, Artificial Sequence
  Description of Artificial Sequence: Synthetic oligonucleotide
  Target: SCNA; (-) strand; PAM type: NRG; PAM sequence: TGG
ccattttggatatccagtat

SEQ ID NO: 23555 - DNA, 20 bp, Artificial Sequence
  Description of Artificial Sequence: Synthetic oligonucleotide
  Target: SCNA; (-) strand; PAM type: NRG; PAM sequence: CAG
atcaaaccattttggatatc

SEQ ID NO: 23556 - DNA, 20 bp, Artificial Sequence
  Description of Artificial Sequence: Synthetic oligonucleotide
  Target: SCNA; (-) strand; PAM type: NRG; PAM sequence: TGG
tcccaactatcaaaccattt

SEQ ID NO: 23557 - DNA, 20 bp, Artificial Sequence
  Description of Artificial Sequence: Synthetic oligonucleotide
  Target: SCNA; (-) strand; PAM type: NRG; PAM sequence: TAG
ttttcaaaaatctctggtta

SEQ ID NO: 23558 - DNA, 20 bp, Artificial Sequence
  Description of Artificial Sequence: Synthetic oligonucleotide
  Target: SCNA; (-) strand; PAM type: NRG; PAM sequence: TGG
cattatttttcaaaaatctc

SEQ ID NO: 23559 - DNA, 20 bp, Artificial Sequence
  Description of Artificial Sequence: Synthetic oligonucleotide
  Target: SCNA; (-) strand; PAM type: NRG; PAM sequence: CAG
gtgaagtatcatagtacata

SEQ ID NO: 23560 - DNA, 20 bp, Artificial Sequence
  Description of Artificial Sequence: Synthetic oligonucleotide
  Target: SCNA; (-) strand; PAM type: NRG; PAM sequence: TAG
gttttctgagtgaagtatca

SEQ ID NO: 23561 - DNA, 20 bp, Artificial Sequence
  Description of Artificial Sequence: Synthetic oligonucleotide
  Target: SCNA; (-) strand; PAM type: NRG; PAM sequence: AAG
gaagtgaggttttctgagtg

SEQ ID NO: 23562 - DNA, 20 bp, Artificial Sequence
  Description of Artificial Sequence: Synthetic oligonucleotide
  Target: SCNA; (-) strand; PAM type: NRG; PAM sequence: GAG
agtttgaagtgaggttttct

SEQ ID NO: 23563 - DNA, 20 bp, Artificial Sequence
  Description of Artificial Sequence: Synthetic oligonucleotide
  Target: SCNA; (-) strand; PAM type: NRG; PAM sequence: AGG
ttcccattaagtttgaagtg

SEQ ID NO: 23564 - DNA, 20 bp, Artificial Sequence
  Description of Artificial Sequence: Synthetic oligonucleotide
  Target: SCNA; (-) strand; PAM type: NRG; PAM sequence: GAG
cttcccattaagtttgaagt

SEQ ID NO: 23565 - DNA, 20 bp, Artificial Sequence
  Description of Artificial Sequence: Synthetic oligonucleotide
  Target: SCNA; (-) strand; PAM type: NRG; PAM sequence: AAG
ttctcttcccattaagtttg

SEQ ID NO: 23566 - DNA, 20 bp, Artificial Sequence
  Description of Artificial Sequence: Synthetic oligonucleotide
  Target: SCNA; (-) strand; PAM type: NRG; PAM sequence: AAG
aatctttttctcttcccatt

SEQ ID NO: 23567 - DNA, 20 bp, Artificial Sequence
  Description of Artificial Sequence: Synthetic oligonucleotide
  Target: SCNA; (-) strand; PAM type: NRG; PAM sequence: AAG
aatattatggactgtgcttg

SEQ ID NO: 23568 - DNA, 20 bp, Artificial Sequence
  Description of Artificial Sequence: Synthetic oligonucleotide
  Target: SCNA; (-) strand; PAM type: NRG; PAM sequence: TGG
gagtctatctatcaatatta

SEQ ID NO: 23569 - DNA, 20 bp, Artificial Sequence
  Description of Artificial Sequence: Synthetic oligonucleotide
  Target: SCNA; (-) strand; PAM type: NRG; PAM sequence: GAG
tcaaccattaatatgtgtag

SEQ ID NO: 23570 - DNA, 20 bp, Artificial Sequence
  Description of Artificial Sequence: Synthetic oligonucleotide
  Target: SCNA; (-) strand; PAM type: NRG; PAM sequence: AGG
tgtcaaccattaatatgtgt

SEQ ID NO: 23571 - DNA, 20 bp, Artificial Sequence
  Description of Artificial Sequence: Synthetic oligonucleotide
  Target: SCNA; (-) strand; PAM type: NRG; PAM sequence: TAG
ctgtcaaccattaatatgtg

SEQ ID NO: 23572 - DNA, 20 bp, Artificial Sequence
  Description of Artificial Sequence: Synthetic oligonucleotide
  Target: SCNA; (-) strand; PAM type: NRG; PAM sequence: TAG
gtgctctaggcattgacatc

SEQ ID NO: 23573 - DNA, 20 bp, Artificial Sequence
  Description of Artificial Sequence: Synthetic oligonucleotide
  Target: SCNA; (-) strand; PAM type: NRG; PAM sequence: AGG
agacctatttgttgtgctct

SEQ ID NO: 23574 - DNA, 20 bp, Artificial Sequence
  Description of Artificial Sequence: Synthetic oligonucleotide
  Target: SCNA; (-) strand; PAM type: NRG; PAM sequence: TAG
aagacctatttgttgtgctc

SEQ ID NO: 23575 - DNA, 20 bp, Artificial Sequence
  Description of Artificial Sequence: Synthetic oligonucleotide
  Target: SCNA; (-) strand; PAM type: NRG; PAM sequence: AAG
taaaaaatatagtgatatat

SEQ ID NO: 23576 - DNA, 20 bp, Artificial Sequence
  Description of Artificial Sequence: Synthetic oligonucleotide
  Target: SCNA; (-) strand; PAM type: NRG; PAM sequence: TAG
gccaagcatcataaaaaata

SEQ ID NO: 23577 - DNA, 20 bp, Artificial Sequence
  Description of Artificial Sequence: Synthetic oligonucleotide
  Target: SCNA; (-) strand; PAM type: NRG; PAM sequence: AAG
aacaaaaaaaatacaatgcc

SEQ ID NO: 23578 - DNA, 20 bp, Artificial Sequence
  Description of Artificial Sequence: Synthetic oligonucleotide
  Target: SCNA; (-) strand; PAM type: NRG; PAM sequence: AAG
tccagcctgggtgacagagc

SEQ ID NO: 23579 - DNA, 20 bp, Artificial Sequence
  Description of Artificial Sequence: Synthetic oligonucleotide
  Target: SCNA; (-) strand; PAM type: NRG; PAM sequence: GAG
acactccagcctgggtgaca

SEQ ID NO: 23580 - DNA, 20 bp, Artificial Sequence
  Description of Artificial Sequence: Synthetic oligonucleotide
  Target: SCNA; (-) strand; PAM type: NRG; PAM sequence: CAG
atacactccagcctgggtga

SEQ ID NO: 23581 - DNA, 20 bp, Artificial Sequence
  Description of Artificial Sequence: Synthetic oligonucleotide
  Target: SCNA; (-) strand; PAM type: NRG; PAM sequence: GGG
atgccaatacactccagcct

SEQ ID NO: 23582 - DNA, 20 bp, Artificial Sequence
  Description of Artificial Sequence: Synthetic oligonucleotide
  Target: SCNA; (-) strand; PAM type: NRG; PAM sequence: TGG
catgccaatacactccagcc

SEQ ID NO: 23583 - DNA, 20 bp, Artificial Sequence
  Description of Artificial Sequence: Synthetic oligonucleotide
  Target: SCNA; (-) strand; PAM type: NRG; PAM sequence: CAG
gagatcatgccaatacactc

SEQ ID NO: 23584 - DNA, 20 bp, Artificial Sequence
  Description of Artificial Sequence: Synthetic oligonucleotide
  Target: SCNA; (-) strand; PAM type: NRG; PAM sequence: GAG
gatggagtttgcagtgagct

SEQ ID NO: 23585 - DNA, 20 bp, Artificial Sequence
  Description of Artificial Sequence: Synthetic oligonucleotide
  Target: SCNA; (-) strand; PAM type: NRG; PAM sequence: GAG
caggagatggagtttgcagt

SEQ ID NO: 23586 - DNA, 20 bp, Artificial Sequence
  Description of Artificial Sequence: Synthetic oligonucleotide
  Target: SCNA; (-) strand; PAM type: NRG; PAM sequence: CAG
aacccaggagatggagtttg

SEQ ID NO: 23587 - DNA, 20 bp, Artificial Sequence
  Description of Artificial Sequence: Synthetic oligonucleotide
  Target: SCNA; (-) strand; PAM type: NRG; PAM sequence: GAG
tcgctcgaacccaggagatg

SEQ ID NO: 23588 - DNA, 20 bp, Artificial Sequence
  Description of Artificial Sequence: Synthetic oligonucleotide
  Target: SCNA; (-) strand; PAM type: NRG; PAM sequence: TGG
aatcgctcgaacccaggaga

SEQ ID NO: 23589 - DNA, 20 bp, Artificial Sequence
  Description of Artificial Sequence: Synthetic oligonucleotide
  Target: SCNA; (-) strand; PAM type: NRG; PAM sequence: GAG
ggagaatcgctcgaacccag

SEQ ID NO: 23590 - DNA, 20 bp, Artificial Sequence
  Description of Artificial Sequence: Synthetic oligonucleotide
  Target: SCNA; (-) strand; PAM type: NRG; PAM sequence: AGG
caggagaatcgctcgaaccc

SEQ ID NO: 23591 - DNA, 20 bp, Artificial Sequence
  Description of Artificial Sequence: Synthetic oligonucleotide
  Target: SCNA; (-) strand; PAM type: NRG; PAM sequence: CAG
ccaggagaatcgctcgaacc

SEQ ID NO: 23592 - DNA, 20 bp, Artificial Sequence
  Description of Artificial Sequence: Synthetic oligonucleotide
  Target: SCNA; (-) strand; PAM type: NRG; PAM sequence: GAG
tacttaggaggctgaaccag

SEQ ID NO: 23593 - DNA, 20 bp, Artificial Sequence
  Description of Artificial Sequence: Synthetic oligonucleotide
  Target: SCNA; (-) strand; PAM type: NRG; PAM sequence: AGG
gctacttaggaggctgaacc

SEQ ID NO: 23594 - DNA, 20 bp, Artificial Sequence
  Description of Artificial Sequence: Synthetic oligonucleotide
  Target: SCNA; (-) strand; PAM type: NRG; PAM sequence: CAG
agctacttaggaggctgaac

SEQ ID NO: 23595 - DNA, 20 bp, Artificial Sequence
  Description of Artificial Sequence: Synthetic oligonucleotide
  Target: SCNA; (-) strand; PAM type: NRG; PAM sequence: AGG
tctaatcccagctacttagg

SEQ ID NO: 23596 - DNA, 20 bp, Artificial Sequence
  Description of Artificial Sequence: Synthetic oligonucleotide
  Target: SCNA; (-) strand; PAM type: NRG; PAM sequence: GAG
ctctaatcccagctacttag

SEQ ID NO: 23597 - DNA, 20 bp, Artificial Sequence
  Description of Artificial Sequence: Synthetic oligonucleotide
  Target: SCNA; (-) strand; PAM type: NRG; PAM sequence: AGG
gactctaatcccagctactt

SEQ ID NO: 23598 - DNA, 20 bp, Artificial Sequence
  Description of Artificial Sequence: Synthetic oligonucleotide
  Target: SCNA; (-) strand; PAM type: NRG; PAM sequence: TAG
cgactctaatcccagctact

SEQ ID NO: 23599 - DNA, 20 bp, Artificial Sequence
  Description of Artificial Sequence: Synthetic oligonucleotide
  Target: SCNA; (-) strand; PAM type: NRG; PAM sequence: CAG
gtggcagacgactctaatcc

SEQ ID NO: 23600 - DNA, 20 bp, Artificial Sequence
  Description of Artificial Sequence: Synthetic oligonucleotide
  Target: SCNA; (-) strand; PAM type: NRG; PAM sequence: CAG
aaattagccaggcatggtgg

SEQ ID NO: 23601 - DNA, 20 bp, Artificial Sequence
  Description of Artificial Sequence: Synthetic oligonucleotide
  Target: SCNA; (-) strand; PAM type: NRG; PAM sequence: TGG
caaaaattagccaggcatgg

SEQ ID NO: 23602 - DNA, 20 bp, Artificial Sequence
  Description of Artificial Sequence: Synthetic oligonucleotide
  Target: SCNA; (-) strand; PAM type: NRG; PAM sequence: TGG
atacaaaaattagccaggca

SEQ ID NO: 23603 - DNA, 20 bp, Artificial Sequence
  Description of Artificial Sequence: Synthetic oligonucleotide
  Target: SCNA; (-) strand; PAM type: NRG; PAM sequence: AGG
taaaaatacaaaaattagcc

SEQ ID NO: 23604 - DNA, 20 bp, Artificial Sequence
  Description of Artificial Sequence: Synthetic oligonucleotide
  Target: SCNA; (-) strand; PAM type: NRG; PAM sequence: CAG
ctaaaaatacaaaaattagc

SEQ ID NO: 23605 - DNA, 20 bp, Artificial Sequence
  Description of Artificial Sequence: Synthetic oligonucleotide
  Target: SCNA; (-) strand; PAM type: NRG; PAM sequence: TAG
tctactaaaaatacaaaaat

SEQ ID NO: 23606 - DNA, 20 bp, Artificial Sequence
  Description of Artificial Sequence: Synthetic oligonucleotide
  Target: SCNA; (-) strand; PAM type: NRG; PAM sequence: TGG
tgagaccagcctggccaacg

SEQ ID NO: 23607 - DNA, 20 bp, Artificial Sequence
  Description of Artificial Sequence: Synthetic oligonucleotide
  Target: SCNA; (-) strand; PAM type: NRG; PAM sequence: TGG
tcaggtgtttgagaccagcc

SEQ ID NO: 23608 - DNA, 20 bp, Artificial Sequence
  Description of Artificial Sequence: Synthetic oligonucleotide
  Target: SCNA; (-) strand; PAM type: NRG; PAM sequence: CAG
tgaagtcaggtgtttgagac

SEQ ID NO: 23609 - DNA, 20 bp, Artificial Sequence
  Description of Artificial Sequence: Synthetic oligonucleotide
  Target: SCNA; (-) strand; PAM type: NRG; PAM sequence: GAG
tcacctgaagtcaggtgttt

SEQ ID NO: 23610 - DNA, 20 bp, Artificial Sequence
  Description of Artificial Sequence: Synthetic oligonucleotide
  Target: SCNA; (-) strand; PAM type: NRG; PAM sequence: AGG
cgggtggatcacctgaagtc

SEQ ID NO: 23611 - DNA, 20 bp, Artificial Sequence
  Description of Artificial Sequence: Synthetic oligonucleotide
  Target: SCNA; (-) strand; PAM type: NRG; PAM sequence: CAG
gcgggtggatcacctgaagt

SEQ ID NO: 23612 - DNA, 20 bp, Artificial Sequence
  Description of Artificial Sequence: Synthetic oligonucleotide
  Target: SCNA; (-) strand; PAM type: NRG; PAM sequence: AAG
caaggcgggtggatcacctg

SEQ ID NO: 23613 - DNA, 20 bp, Artificial Sequence
  Description of Artificial Sequence: Synthetic oligonucleotide
  Target: SCNA; (-) strand; PAM type: NRG; PAM sequence: TGG
ctttgggaggccaaggcggg

SEQ ID NO: 23614 - DNA, 20 bp, Artificial Sequence
  Description of Artificial Sequence: Synthetic oligonucleotide
  Target: SCNA; (-) strand; PAM type: NRG; PAM sequence: GGG
ggactttgggaggccaaggc

SEQ ID NO: 23615 - DNA, 20 bp, Artificial Sequence
  Description of Artificial Sequence: Synthetic oligonucleotide
  Target: SCNA; (-) strand; PAM type: NRG; PAM sequence: CGG
aggactttgggaggccaagg

SEQ ID NO: 23616 - DNA, 20 bp, Artificial Sequence
  Description of Artificial Sequence: Synthetic oligonucleotide
  Target: SCNA; (-) strand; PAM type: NRG; PAM sequence: AGG
tccaggactttgggaggcca

SEQ ID NO: 23617 - DNA, 20 bp, Artificial Sequence
  Description of Artificial Sequence: Synthetic oligonucleotide
  Target: SCNA; (-) strand; PAM type: NRG; PAM sequence: AAG
ttccaggactttgggaggcc

SEQ ID NO: 23618 - DNA, 20 bp, Artificial Sequence
  Description of Artificial Sequence: Synthetic oligonucleotide
  Target: SCNA; (-) strand; PAM type: NRG; PAM sequence: AGG
tgtaattccaggactttggg

SEQ ID NO: 23619 - DNA, 20 bp, Artificial Sequence
  Description of Artificial Sequence: Synthetic oligonucleotide
  Target: SCNA; (-) strand; PAM type: NRG; PAM sequence: GAG
ctgtaattccaggactttgg

SEQ ID NO: 23620 - DNA, 20 bp, Artificial Sequence
  Description of Artificial Sequence: Synthetic oligonucleotide
  Target: SCNA; (-) strand; PAM type: NRG; PAM sequence: GGG
gcctgtaattccaggacttt

SEQ ID NO: 23621 - DNA, 20 bp, Artificial Sequence
  Description of Artificial Sequence: Synthetic oligonucleotide
  Target: SCNA; (-) strand; PAM type: NRG; PAM sequence: TGG
cgcctgtaattccaggactt

SEQ ID NO: 23622 - DNA, 20 bp, Artificial Sequence
  Description of Artificial Sequence: Synthetic oligonucleotide
  Target: SCNA; (-) strand; PAM type: NRG; PAM sequence: AGG
tggctcacgcctgtaattcc

SEQ ID NO: 23623 - DNA, 20 bp, Artificial Sequence
  Description of Artificial Sequence: Synthetic oligonucleotide
  Target: SCNA; (-) strand; PAM type: NRG; PAM sequence: CAG
gtggctcacgcctgtaattc

SEQ ID NO: 23624 - DNA, 20 bp, Artificial Sequence
  Description of Artificial Sequence: Synthetic oligonucleotide
  Target: SCNA; (-) strand; PAM type: NRG; PAM sequence: TGG
actacaccagcctggtgcgg

SEQ ID NO: 23625 - DNA, 20 bp, Artificial Sequence
  Description of Artificial Sequence: Synthetic oligonucleotide
  Target: SCNA; (-) strand; PAM type: NRG; PAM sequence: CGG
aatactacaccagcctggtg

SEQ ID NO: 23626 - DNA, 20 bp, Artificial Sequence
  Description of Artificial Sequence: Synthetic oligonucleotide
  Target: SCNA; (-) strand; PAM type: NRG; PAM sequence: TGG
tataaaatactacaccagcc

SEQ ID NO: 23627 - DNA, 20 bp, Artificial Sequence
  Description of Artificial Sequence: Synthetic oligonucleotide
  Target: SCNA; (-) strand; PAM type: NRG; PAM sequence: CAG
ctgtgtataaaatactacac

SEQ ID NO: 23628 - DNA, 20 bp, Artificial Sequence
  Description of Artificial Sequence: Synthetic oligonucleotide
  Target: SCNA; (-) strand; PAM type: NRG; PAM sequence: GAG
tgatagactcttaaaagtta

SEQ ID NO: 23629 - DNA, 20 bp, Artificial Sequence
  Description of Artificial Sequence: Synthetic oligonucleotide
  Target: SCNA; (-) strand; PAM type: NRG; PAM sequence: TAG
cttgatagactcttaaaagt

SEQ ID NO: 23630 - DNA, 20 bp, Artificial Sequence
  Description of Artificial Sequence: Synthetic oligonucleotide
  Target: SCNA; (-) strand; PAM type: NRG; PAM sequence: AAG
ttagcttgatagactcttaa

SEQ ID NO: 23631 - DNA, 20 bp, Artificial Sequence
  Description of Artificial Sequence: Synthetic oligonucleotide
  Target: SCNA; (-) strand; PAM type: NRG; PAM sequence: TAG
caaaagtcattttagcttga

SEQ ID NO: 23632 - DNA, 20 bp, Artificial Sequence
  Description of Artificial Sequence: Synthetic oligonucleotide
  Target: SCNA; (-) strand; PAM type: NRG; PAM sequence: TAG
gactgattcaaaagtcattt

SEQ ID NO: 23633 - DNA, 20 bp, Artificial Sequence
  Description of Artificial Sequence: Synthetic oligonucleotide
  Target: SCNA; (-) strand; PAM type: NRG; PAM sequence: AAG
cattcattcgactgattcaa

SEQ ID NO: 23634 - DNA, 20 bp, Artificial Sequence
  Description of Artificial Sequence: Synthetic oligonucleotide
  Target: SCNA; (-) strand; PAM type: NRG; PAM sequence: CAG
ccttctctttcttaagttcc

SEQ ID NO: 23635 - DNA, 20 bp, Artificial Sequence
  Description of Artificial Sequence: Synthetic oligonucleotide
  Target: SCNA; (-) strand; PAM type: NRG; PAM sequence: AAG
ttatgctccttctctttctt

SEQ ID NO: 23636 - DNA, 20 bp, Artificial Sequence
  Description of Artificial Sequence: Synthetic oligonucleotide
  Target: SCNA; (-) strand; PAM type: NRG; PAM sequence: TAG
aaataagcattctgctgctt

SEQ ID NO: 23637 - DNA, 20 bp, Artificial Sequence
  Description of Artificial Sequence: Synthetic oligonucleotide
  Target: SCNA; (-) strand; PAM type: NRG; PAM sequence: AAG
tggttaaaacttatgtaaat

SEQ ID NO: 23638 - DNA, 20 bp, Artificial Sequence
  Description of Artificial Sequence: Synthetic oligonucleotide
  Target: SCNA; (-) strand; PAM type: NRG; PAM sequence: TGG
gtaattacaatattccgcac

SEQ ID NO: 23639 - DNA, 20 bp, Artificial Sequence
  Description of Artificial Sequence: Synthetic oligonucleotide
  Target: SCNA; (-) strand; PAM type: NRG; PAM sequence: TGG
tcataaaaaaacaacataaa

SEQ ID NO: 23640 - DNA, 20 bp, Artificial Sequence
  Description of Artificial Sequence: Synthetic oligonucleotide
  Target: SCNA; (-) strand; PAM type: NRG; PAM sequence: TGG
tccctttaataagcatgtac

SEQ ID NO: 23641 - DNA, 20 bp, Artificial Sequence
  Description of Artificial Sequence: Synthetic oligonucleotide
  Target: SCNA; (-) strand; PAM type: NRG; PAM sequence: AAG
tttctccaattccctttaat

SEQ ID NO: 23642 - DNA, 20 bp, Artificial Sequence
  Description of Artificial Sequence: Synthetic oligonucleotide
  Target: SCNA; (-) strand; PAM type: NRG; PAM sequence: TGG
ctgggtcctagattacagtc

SEQ ID NO: 23643 - DNA, 20 bp, Artificial Sequence
  Description of Artificial Sequence: Synthetic oligonucleotide
  Target: SCNA; (-) strand; PAM type: NRG; PAM sequence: CAG
tattactgggtcctagatta

SEQ ID NO: 23644 - DNA, 20 bp, Artificial Sequence
  Description of Artificial Sequence: Synthetic oligonucleotide
  Target: SCNA; (-) strand; PAM type: NRG; PAM sequence: TAG
aagtaactattactgggtcc

SEQ ID NO: 23645 - DNA, 20 bp, Artificial Sequence
  Description of Artificial Sequence: Synthetic oligonucleotide
  Target: SCNA; (-) strand; PAM type: NRG; PAM sequence: GGG
gcaactaagtaactattact

SEQ ID NO: 23646 - DNA, 20 bp, Artificial Sequence
  Description of Artificial Sequence: Synthetic oligonucleotide
  Target: SCNA; (-) strand; PAM type: NRG; PAM sequence: TGG
tgcaactaagtaactattac

SEQ ID NO: 23647 - DNA, 20 bp, Artificial Sequence
  Description of Artificial Sequence: Synthetic oligonucleotide
  Target: SCNA; (-) strand; PAM type: NRG; PAM sequence: AAG
cttgaggaaattttgcaact

SEQ ID NO: 23648 - DNA, 20 bp, Artificial Sequence
  Description of Artificial Sequence: Synthetic oligonucleotide
  Target: SCNA; (-) strand; PAM type: NRG; PAM sequence: AGG
tctctctcatattgcccttg

SEQ ID NO: 23649 - DNA, 20 bp, Artificial Sequence
  Description of Artificial Sequence: Synthetic oligonucleotide
  Target: SCNA; (-) strand; PAM type: NRG; PAM sequence: GAG
gtctctctcatattgccctt

SEQ ID NO: 23650 - DNA, 20 bp, Artificial Sequence
  Description of Artificial Sequence: Synthetic oligonucleotide
  Target: SCNA; (-) strand; PAM type: NRG; PAM sequence: TGG
gcatggcaacaagcacaaaa

SEQ ID NO: 23651 - DNA, 20 bp, Artificial Sequence
  Description of Artificial Sequence: Synthetic oligonucleotide
  Target: SCNA; (-) strand; PAM type: NRG; PAM sequence: AAG
ggcacccccagcatggcaac

SEQ ID NO: 23652 - DNA, 20 bp, Artificial Sequence
  Description of Artificial Sequence: Synthetic oligonucleotide
  Target: SCNA; (-) strand; PAM type: NRG; PAM sequence: TGG
gccagtaggcacccccagca

SEQ ID NO: 23653 - DNA, 20 bp, Artificial Sequence
  Description of Artificial Sequence: Synthetic oligonucleotide
  Target: SCNA; (-) strand; PAM type: NRG; PAM sequence: CAG
ttaacgccagtaggcacccc

SEQ ID NO: 23654 - DNA, 20 bp, Artificial Sequence
  Description of Artificial Sequence: Synthetic oligonucleotide
  Target: SCNA; (-) strand; PAM type: NRG; PAM sequence: AGG
cttacctctttaacgccagt

SEQ ID NO: 23655 - DNA, 20 bp, Artificial Sequence
  Description of Artificial Sequence: Synthetic oligonucleotide
  Target: SCNA; (-) strand; PAM type: NRG; PAM sequence: TAG
ccttacctctttaacgccag

SEQ ID NO: 23656 - DNA, 20 bp, Artificial Sequence
  Description of Artificial Sequence: Synthetic oligonucleotide
  Target: SCNA; (-) strand; PAM type: NRG; PAM sequence: CAG
gggccttacctctttaacgc

SEQ ID NO: 23657 - DNA, 20 bp, Artificial Sequence
  Description of Artificial Sequence: Synthetic oligonucleotide
  Target: SCNA; (-) strand; PAM type: NRG; PAM sequence: GGG
gtaggatgtttacaagccct

SEQ ID NO: 23658 - DNA, 20 bp, Artificial Sequence
  Description of Artificial Sequence: Synthetic oligonucleotide
  Target: SCNA; (-) strand; PAM type: NRG; PAM sequence: TGG
tgtaggatgtttacaagccc

SEQ ID NO: 23659 - DNA, 20 bp, Artificial Sequence
  Description of Artificial Sequence: Synthetic oligonucleotide
  Target: SCNA; (-) strand; PAM type: NRG; PAM sequence: AAG
attcattgtaggatgtttac

SEQ ID NO: 23660 - DNA, 20 bp, Artificial Sequence
  Description of Artificial Sequence: Synthetic oligonucleotide
  Target: SCNA; (-) strand; PAM type: NRG; PAM sequence: AGG
ggagaactctcattcattgt

SEQ ID NO: 23661 - DNA, 20 bp, Artificial Sequence
  Description of Artificial Sequence: Synthetic oligonucleotide
  Target: SCNA; (-) strand; PAM type: NRG; PAM sequence: TAG
tggagaactctcattcattg

SEQ ID NO: 23662 - DNA, 20 bp, Artificial Sequence
  Description of Artificial Sequence: Synthetic oligonucleotide
  Target: SCNA; (-) strand; PAM type: NRG; PAM sequence: GAG
ctgggtaattcttcgctgtg

SEQ ID NO: 23663 - DNA, 20 bp, Artificial Sequence
  Description of Artificial Sequence: Synthetic oligonucleotide
  Target: SCNA; (-) strand; PAM type: NRG; PAM sequence: TGG
ggctgggtaattcttcgctg

SEQ ID NO: 23664 - DNA, 20 bp, Artificial Sequence
  Description of Artificial Sequence: Synthetic oligonucleotide
  Target: SCNA; (-) strand; PAM type: NRG; PAM sequence: GGG
cccattttgcattttgggct

SEQ ID NO: 23665 - DNA, 20 bp, Artificial Sequence
  Description of Artificial Sequence: Synthetic oligonucleotide
  Target: SCNA; (-) strand; PAM type: NRG; PAM sequence: TGG
gcccattttgcattttgggc

SEQ ID NO: 23666 - DNA, 20 bp, Artificial Sequence
  Description of Artificial Sequence: Synthetic oligonucleotide
  Target: SCNA; (-) strand; PAM type: NRG; PAM sequence: GGG
tgaagcccattttgcatttt

SEQ ID NO: 23667 - DNA, 20 bp, Artificial Sequence
  Description of Artificial Sequence: Synthetic oligonucleotide
  Target: SCNA; (-) strand; PAM type: NRG; PAM sequence: TGG
gtgaagcccattttgcattt

SEQ ID NO: 23668 - DNA, 20 bp, Artificial Sequence
  Description of Artificial Sequence: Synthetic oligonucleotide
  Target: SCNA; (-) strand; PAM type: NRG; PAM sequence: AAG
gtactcagtttttctcagtg

SEQ ID NO: 23669 - DNA, 20 bp, Artificial Sequence
  Description of Artificial Sequence: Synthetic oligonucleotide
  Target: SCNA; (-) strand; PAM type: NRG; PAM sequence: CAG
acaaggtactcagtttttct

SEQ ID NO: 23670 - DNA, 20 bp, Artificial Sequence
  Description of Artificial Sequence: Synthetic oligonucleotide
  Target: SCNA; (-) strand; PAM type: NRG; PAM sequence: CAG
gaataaatgcacaaggtact

SEQ ID NO: 23671 - DNA, 20 bp, Artificial Sequence
  Description of Artificial Sequence: Synthetic oligonucleotide
  Target: SCNA; (-) strand; PAM type: NRG; PAM sequence: AGG
agacgtggaataaatgcaca

SEQ ID NO: 23672 - DNA, 20 bp, Artificial Sequence
  Description of Artificial Sequence: Synthetic oligonucleotide
  Target: SCNA; (-) strand; PAM type: NRG; PAM sequence: AAG
aagacgtggaataaatgcac

SEQ ID NO: 23673 - DNA, 20 bp, Artificial Sequence
  Description of Artificial Sequence: Synthetic oligonucleotide
  Target: SCNA; (-) strand; PAM type: NRG; PAM sequence: TGG
cttatgtacatataaagacg

SEQ ID NO: 23674 - DNA, 20 bp, Artificial Sequence
  Description of Artificial Sequence: Synthetic oligonucleotide
  Target: SCNA; (-) strand; PAM type: NRG; PAM sequence: AAG
atgtggcttatgtacatata

SEQ ID NO: 23675 - DNA, 20 bp, Artificial Sequence
  Description of Artificial Sequence: Synthetic oligonucleotide
  Target: SCNA; (-) strand; PAM type: NRG; PAM sequence: TGG
attttttaaaaacctgtatg

SEQ ID NO: 23676 - DNA, 20 bp, Artificial Sequence
  Description of Artificial Sequence: Synthetic oligonucleotide
  Target: SCNA; (-) strand; PAM type: NRG; PAM sequence: CAG
aaattacaaagcagtttgtg

SEQ ID NO: 23677 - DNA, 20 bp, Artificial Sequence
  Description of Artificial Sequence: Synthetic oligonucleotide
  Target: SCNA; (-) strand; PAM type: NRG; PAM sequence: CAG
gaaaagaacaaattacaaag

SEQ ID NO: 23678 - DNA, 20 bp, Artificial Sequence
  Description of Artificial Sequence: Synthetic oligonucleotide
  Target: SCNA; (-) strand; PAM type: NRG; PAM sequence: AAG
tgtgaaaagaacaaattaca

SEQ ID NO: 23679 - DNA, 20 bp, Artificial Sequence
  Description of Artificial Sequence: Synthetic oligonucleotide
  Target: SCNA; (-) strand; PAM type: NRG; PAM sequence: AAG
ctattgttgcagtatgtgaa

SEQ ID NO: 23680 - DNA, 20 bp, Artificial Sequence
  Description of Artificial Sequence: Synthetic oligonucleotide
  Target: SCNA; (-) strand; PAM type: NRG; PAM sequence: CAG
gtggaaggatgctattgttg

SEQ ID NO: 23681 - DNA, 20 bp, Artificial Sequence
  Description of Artificial Sequence: Synthetic oligonucleotide
  Target: SCNA; (-) strand; PAM type: NRG; PAM sequence: AGG
ataattattaatggtgtgga

SEQ ID NO: 23682 - DNA, 20 bp, Artificial Sequence
  Description of Artificial Sequence: Synthetic oligonucleotide
  Target: SCNA; (-) strand; PAM type: NRG; PAM sequence: AAG
aataattattaatggtgtgg

SEQ ID NO: 23683 - DNA, 20 bp, Artificial Sequence
  Description of Artificial Sequence: Synthetic oligonucleotide
  Target: SCNA; (-) strand; PAM type: NRG; PAM sequence: TGG
tagaataattattaatggtg

SEQ ID NO: 23684 - DNA, 20 bp, Artificial Sequence
  Description of Artificial Sequence: Synthetic oligonucleotide
  Target: SCNA; (-) strand; PAM type: NRG; PAM sequence: TGG
tgttgtagaataattattaa

SEQ ID NO: 23685 - DNA, 20 bp, Artificial Sequence
  Description of Artificial Sequence: Synthetic oligonucleotide
  Target: SCNA; (-) strand; PAM type: NRG; PAM sequence: TAG
gaacagccattaaaatgttg

SEQ ID NO: 23686 - DNA, 20 bp, Artificial Sequence
  Description of Artificial Sequence: Synthetic oligonucleotide
  Target: SCNA; (-) strand; PAM type: NRG; PAM sequence: CAG
ccatgcagtggtttgctgaa

SEQ ID NO: 23687 - DNA, 20 bp, Artificial Sequence
  Description of Artificial Sequence: Synthetic oligonucleotide
  Target: SCNA; (-) strand; PAM type: NRG; PAM sequence: TGG
attatggttgatccatgcag

SEQ ID NO: 23688 - DNA, 20 bp, Artificial Sequence
  Description of Artificial Sequence: Synthetic oligonucleotide
  Target: SCNA; (-) strand; PAM type: NRG; PAM sequence: CAG
tgcattatggttgatccatg

SEQ ID NO: 23689 - DNA, 20 bp, Artificial Sequence
  Description of Artificial Sequence: Synthetic oligonucleotide
  Target: SCNA; (-) strand; PAM type: NRG; PAM sequence: TGG
ggacctcattaaatgcatta

SEQ ID NO: 23690 - DNA, 20 bp, Artificial Sequence
  Description of Artificial Sequence: Synthetic oligonucleotide
  Target: SCNA; (-) strand; PAM type: NRG; PAM sequence: GGG
gtgctagaagtttgatcata

SEQ ID NO: 23691 - DNA, 20 bp, Artificial Sequence
  Description of Artificial Sequence: Synthetic oligonucleotide
  Target: SCNA; (-) strand; PAM type: NRG; PAM sequence: AGG
agtgctagaagtttgatcat

SEQ ID NO: 23692 - DNA, 20 bp, Artificial Sequence
  Description of Artificial Sequence: Synthetic oligonucleotide
  Target: SCNA; (-) strand; PAM type: NRG; PAM sequence: TAG
tagtgctagaagtttgatca

SEQ ID NO: 23693 - DNA, 20 bp, Artificial Sequence
  Description of Artificial Sequence: Synthetic oligonucleotide
  Target: SCNA; (-) strand; PAM type: NRG; PAM sequence: AAG
attgaaaaaaatagtgctag

SEQ ID NO: 23694 - DNA, 20 bp, Artificial Sequence
  Description of Artificial Sequence: Synthetic oligonucleotide
  Target: SCNA; (-) strand; PAM type: NRG; PAM sequence: TAG
aaaattgaaaaaaatagtgc

SEQ ID NO: 23695 - DNA, 20 bp, Artificial Sequence
  Description of Artificial Sequence: Synthetic oligonucleotide
  Target: SCNA; (-) strand; PAM type: NRG; PAM sequence: TAG
taaaacaaaattgaaaaaaa

SEQ ID NO: 23696 - DNA, 20 bp, Artificial Sequence
  Description of Artificial Sequence: Synthetic oligonucleotide
  Target: SCNA; (-) strand; PAM type: NRG; PAM sequence: CAG
aaatatgaagatgtttatca

SEQ ID NO: 23697 - DNA, 20 bp, Artificial Sequence
  Description of Artificial Sequence: Synthetic oligonucleotide
  Target: SCNA; (-) strand; PAM type: NRG; PAM sequence: AAG
tgatcataagtttaaatatg

SEQ ID NO: 23698 - DNA, 20 bp, Artificial Sequence
  Description of Artificial Sequence: Synthetic oligonucleotide
  Target: SCNA; (-) strand; PAM type: NRG; PAM sequence: AAG
aagaatttaaatatgatcat

SEQ ID NO: 23699 - DNA, 20 bp, Artificial Sequence
  Description of Artificial Sequence: Synthetic oligonucleotide
  Target: SCNA; (-) strand; PAM type: NRG; PAM sequence: AAG
ctctgaccagtcgcatgtct

SEQ ID NO: 23700 - DNA, 20 bp, Artificial Sequence
  Description of Artificial Sequence: Synthetic oligonucleotide
  Target: SCNA; (-) strand; PAM type: NRG; PAM sequence: CAG
gaaattatgcatgctctgac

SEQ ID NO: 23701 - DNA, 20 bp, Artificial Sequence
  Description of Artificial Sequence: Synthetic oligonucleotide
  Target: SCNA; (-) strand; PAM type: NRG; PAM sequence: AAG
acatgttggaagtctatcaa

SEQ ID NO: 23702 - DNA, 20 bp, Artificial Sequence
  Description of Artificial Sequence: Synthetic oligonucleotide
  Target: SCNA; (-) strand; PAM type: NRG; PAM sequence: AAG
catttttgaggacatgttgg

SEQ ID NO: 23703 - DNA, 20 bp, Artificial Sequence
  Description of Artificial Sequence: Synthetic oligonucleotide
  Target: SCNA; (-) strand; PAM type: NRG; PAM sequence: TGG
agtcatttttgaggacatgt

SEQ ID NO: 23704 - DNA, 20 bp, Artificial Sequence
  Description of Artificial Sequence: Synthetic oligonucleotide
  Target: SCNA; (-) strand; PAM type: NRG; PAM sequence: AGG
actaataaaagtcatttttg

SEQ ID NO: 23705 - DNA, 20 bp, Artificial Sequence
  Description of Artificial Sequence: Synthetic oligonucleotide
  Target: SCNA; (-) strand; PAM type: NRG; PAM sequence: GAG
aactaataaaagtcattttt

SEQ ID NO: 23706 - DNA, 20 bp, Artificial Sequence
  Description of Artificial Sequence: Synthetic oligonucleotide
  Target: SCNA; (-) strand; PAM type: NRG; PAM sequence: AAG
gttagagaataaactaataa

SEQ ID NO: 23707 - DNA, 20 bp, Artificial Sequence
  Description of Artificial Sequence: Synthetic oligonucleotide
  Target: SCNA; (-) strand; PAM type: NRG; PAM sequence: GAG
caatcagaacaatatggtta

SEQ ID NO: 23708 - DNA, 20 bp, Artificial Sequence
  Description of Artificial Sequence: Synthetic oligonucleotide
  Target: SCNA; (-) strand; PAM type: NRG; PAM sequence: TAG
atcaatcagaacaatatggt

SEQ ID NO: 23709 - DNA, 20 bp, Artificial Sequence
  Description of Artificial Sequence: Synthetic oligonucleotide
  Target: SCNA; (-) strand; PAM type: NRG; PAM sequence: TGG
gtccatcaatcagaacaata

SEQ ID NO: 23710 - DNA, 20 bp, Artificial Sequence
  Description of Artificial Sequence: Synthetic oligonucleotide
  Target: SCNA; (-) strand; PAM type: NRG; PAM sequence: CAG
tgttagagatgtccatcaat

SEQ ID NO: 23711 - DNA, 20 bp, Artificial Sequence
  Description of Artificial Sequence: Synthetic oligonucleotide
  Target: SCNA; (-) strand; PAM type: NRG; PAM sequence: GAG
ttttcagcaactttatgtta

SEQ ID NO: 23712 - DNA, 20 bp, Artificial Sequence
  Description of Artificial Sequence: Synthetic oligonucleotide
  Target: SCNA; (-) strand; PAM type: NRG; PAM sequence: TAG
tattttcagcaactttatgt

SEQ ID NO: 23713 - DNA, 20 bp, Artificial Sequence
  Description of Artificial Sequence: Synthetic oligonucleotide
  Target: SCNA; (-) strand; PAM type: NRG; PAM sequence: CAG
cagctgatgtttcatatttt

SEQ ID NO: 23714 - DNA, 20 bp, Artificial Sequence
  Description of Artificial Sequence: Synthetic oligonucleotide
  Target: SCNA; (-) strand; PAM type: NRG; PAM sequence: CAG
ttcccagggtcacagtgcct

SEQ ID NO: 23715 - DNA, 20 bp, Artificial Sequence
  Description of Artificial Sequence: Synthetic oligonucleotide
  Target: SCNA; (-) strand; PAM type: NRG; PAM sequence: CAG
ccagccagttcccagggtca

SEQ ID NO: 23716 - DNA, 20 bp, Artificial Sequence
  Description of Artificial Sequence: Synthetic oligonucleotide
  Target: SCNA; (-) strand; PAM type: NRG; PAM sequence: GGG
aagggaccagccagttccca

SEQ ID NO: 23717 - DNA, 20 bp, Artificial Sequence
  Description of Artificial Sequence: Synthetic oligonucleotide
  Target: SCNA; (-) strand; PAM type: NRG; PAM sequence: AGG
gaagggaccagccagttccc

SEQ ID NO: 23718 - DNA, 20 bp, Artificial Sequence
  Description of Artificial Sequence: Synthetic oligonucleotide
  Target: SCNA; (-) strand; PAM type: NRG; PAM sequence: CAG
ggaagggaccagccagttcc

SEQ ID NO: 23719 - DNA, 20 bp, Artificial Sequence
  Description of Artificial Sequence: Synthetic oligonucleotide
  Target: SCNA; (-) strand; PAM type: NRG; PAM sequence: CAG
tgggctaggaagggaccagc

SEQ ID NO: 23720 - DNA, 20 bp, Artificial Sequence
  Description of Artificial Sequence: Synthetic oligonucleotide
  Target: SCNA; (-) strand; PAM type: NRG; PAM sequence: CAG
gatgtgggctaggaagggac

SEQ ID NO: 23721 - DNA, 20 bp, Artificial Sequence
  Description of Artificial Sequence: Synthetic oligonucleotide
  Target: SCNA; (-) strand; PAM type: NRG; PAM sequence: GGG
actaagatgtgggctaggaa

SEQ ID NO: 23722 - DNA, 20 bp, Artificial Sequence
  Description of Artificial Sequence: Synthetic oligonucleotide
  Target: SCNA; (-) strand; PAM type: NRG; PAM sequence: AGG
tactaagatgtgggctagga

SEQ ID NO: 23723 - DNA, 20 bp, Artificial Sequence
  Description of Artificial Sequence: Synthetic oligonucleotide
  Target: SCNA; (-) strand; PAM type: NRG; PAM sequence: AAG
ctactaagatgtgggctagg

SEQ ID NO: 23724 - DNA, 20 bp, Artificial Sequence
  Description of Artificial Sequence: Synthetic oligonucleotide
  Target: SCNA; (-) strand; PAM type: NRG; PAM sequence: AGG
cttctactaagatgtgggct

SEQ ID NO: 23725 - DNA, 20 bp, Artificial Sequence
  Description of Artificial Sequence: Synthetic oligonucleotide
  Target: SCNA; (-) strand; PAM type: NRG; PAM sequence: TAG
tcttctactaagatgtgggc

SEQ ID NO: 23726 - DNA, 20 bp, Artificial Sequence
  Description of Artificial Sequence: Synthetic oligonucleotide
  Target: SCNA; (-) strand; PAM type: NRG; PAM sequence: GGG
tgcatcttctactaagatgt

SEQ ID NO: 23727 - DNA, 20 bp, Artificial Sequence
  Description of Artificial Sequence: Synthetic oligonucleotide
  Target: SCNA; (-) strand; PAM type: NRG; PAM sequence: TGG
ttgcatcttctactaagatg

SEQ ID NO: 23728 - DNA, 20 bp, Artificial Sequence
  Description of Artificial Sequence: Synthetic oligonucleotide
  Target: SCNA; (-) strand; PAM type: NRG; PAM sequence: AAG
taacccttgcatcttctact

SEQ ID NO: 23729 - DNA, 20 bp, Artificial Sequence
  Description of Artificial Sequence: Synthetic oligonucleotide
  Target: SCNA; (-) strand; PAM type: NRG; PAM sequence: CGG
gatacatggtttttaacccg

SEQ ID NO: 23730 - DNA, 20 bp, Artificial Sequence
  Description of Artificial Sequence: Synthetic oligonucleotide
  Target: SCNA; (-) strand; PAM type: NRG; PAM sequence: TGG
tggaatttagaattgataca

SEQ ID NO: 23731 - DNA, 20 bp, Artificial Sequence
  Description of Artificial Sequence: Synthetic oligonucleotide
  Target: SCNA; (-) strand; PAM type: NRG; PAM sequence: TAG
agggtctggcacttggaatt

SEQ ID NO: 23732 - DNA, 20 bp, Artificial Sequence
  Description of Artificial Sequence: Synthetic oligonucleotide
  Target: SCNA; (-) strand; PAM type: NRG; PAM sequence: TGG
taatgaaagggtctggcact

SEQ ID NO: 23733 - DNA, 20 bp, Artificial Sequence
  Description of Artificial Sequence: Synthetic oligonucleotide
  Target: SCNA; (-) strand; PAM type: NRG; PAM sequence: TGG
tgaaaggtaatgaaagggtc

SEQ ID NO: 23734 - DNA, 20 bp, Artificial Sequence
  Description of Artificial Sequence: Synthetic oligonucleotide
  Target: SCNA; (-) strand; PAM type: NRG; PAM sequence: GGG
gctaatgaaaggtaatgaaa

SEQ ID NO: 23735 - DNA, 20 bp, Artificial Sequence
  Description of Artificial Sequence: Synthetic oligonucleotide
  Target: SCNA; (-) strand; PAM type: NRG; PAM sequence: AGG
cgctaatgaaaggtaatgaa

SEQ ID NO: 23736 - DNA, 20 bp, Artificial Sequence
  Description of Artificial Sequence: Synthetic oligonucleotide
  Target: SCNA; (-) strand; PAM type: NRG; PAM sequence: AAG
tcgctaatgaaaggtaatga

SEQ ID NO: 23737 - DNA, 20 bp, Artificial Sequence
  Description of Artificial Sequence: Synthetic oligonucleotide
  Target: SCNA; (-) strand; PAM type: NRG; PAM sequence: AGG
ttttatacttcgctaatgaa

SEQ ID NO: 23738 - DNA, 20 bp, Artificial Sequence
  Description of Artificial Sequence: Synthetic oligonucleotide
  Target: SCNA; (-) strand; PAM type: NRG; PAM sequence: AAG
tttttatacttcgctaatga

SEQ ID NO: 23739 - DNA, 20 bp, Artificial Sequence
  Description of Artificial Sequence: Synthetic oligonucleotide
  Target: SCNA; (-) strand; PAM type: NRG; PAM sequence: GAG
cccactcagaggaaggacca

SEQ ID NO: 23740 - DNA, 20 bp, Artificial Sequence
  Description of Artificial Sequence: Synthetic oligonucleotide
  Target: SCNA; (-) strand; PAM type: NRG; PAM sequence: CAG
tccccactcagaggaaggac

SEQ ID NO: 23741 - DNA, 20 bp, Artificial Sequence
  Description of Artificial Sequence: Synthetic oligonucleotide
  Target: SCNA; (-) strand; PAM type: NRG; PAM sequence: AGG
atgagtccccactcagagga

SEQ ID NO: 23742 - DNA, 20 bp, Artificial Sequence
  Description of Artificial Sequence: Synthetic oligonucleotide
  Target: SCNA; (-) strand; PAM type: NRG; PAM sequence: AAG
catgagtccccactcagagg

SEQ ID NO: 23743 - DNA, 20 bp, Artificial Sequence
  Description of Artificial Sequence: Synthetic oligonucleotide
  Target: SCNA; (-) strand; PAM type: NRG; PAM sequence: AGG
cctcatgagtccccactcag

SEQ ID NO: 23744 - DNA, 20 bp, Artificial Sequence
  Description of Artificial Sequence: Synthetic oligonucleotide
  Target: SCNA; (-) strand; PAM type: NRG; PAM sequence: GAG
gcctcatgagtccccactca

SEQ ID NO: 23745 - DNA, 20 bp, Artificial Sequence
  Description of Artificial Sequence: Synthetic oligonucleotide
  Target: SCNA; (-) strand; PAM type: NRG; PAM sequence: CAG
aagcctcatgagtccccact

SEQ ID NO: 23746 - DNA, 20 bp, Artificial Sequence
  Description of Artificial Sequence: Synthetic oligonucleotide
  Target: SCNA; (-) strand; PAM type: NRG; PAM sequence: GAG
cagacaacaccaagcctcat

SEQ ID NO: 23747 - DNA, 20 bp, Artificial Sequence
  Description of Artificial Sequence: Synthetic oligonucleotide
  Target: SCNA; (-) strand; PAM type: NRG; PAM sequence: AAG
tcctgctttcagacaacacc

SEQ ID NO: 23748 - DNA, 20 bp, Artificial Sequence
  Description of Artificial Sequence: Synthetic oligonucleotide
  Target: SCNA; (-) strand; PAM type: NRG; PAM sequence: CAG
acccaagtccttcctgcttt

SEQ ID NO: 23749 - DNA, 20 bp, Artificial Sequence
  Description of Artificial Sequence: Synthetic oligonucleotide
  Target: SCNA; (-) strand; PAM type: NRG; PAM sequence: AAG
cctaccagggagtaagaccc

SEQ ID NO: 23750 - DNA, 20 bp, Artificial Sequence
  Description of Artificial Sequence: Synthetic oligonucleotide
  Target: SCNA; (-) strand; PAM type: NRG; PAM sequence: AAG
gctgcatcctaccagggagt

SEQ ID NO: 23751 - DNA, 20 bp, Artificial Sequence
  Description of Artificial Sequence: Synthetic oligonucleotide
  Target: SCNA; (-) strand; PAM type: NRG; PAM sequence: GAG
tcaggctgcatcctaccagg

SEQ ID NO: 23752 - DNA, 20 bp, Artificial Sequence
  Description of Artificial Sequence: Synthetic oligonucleotide
  Target: SCNA; (-) strand; PAM type: NRG; PAM sequence: GGG
cctcaggctgcatcctacca

SEQ ID NO: 23753 - DNA, 20 bp, Artificial Sequence
  Description of Artificial Sequence: Synthetic oligonucleotide
  Target: SCNA; (-) strand; PAM type: NRG; PAM sequence: AGG
tcctcaggctgcatcctacc

SEQ ID NO: 23754 - DNA, 20 bp, Artificial Sequence
  Description of Artificial Sequence: Synthetic oligonucleotide
  Target: SCNA; (-) strand; PAM type: NRG; PAM sequence: CAG
ctcctcaggctgcatcctac

SEQ ID NO: 23755 - DNA, 20 bp, Artificial Sequence
  Description of Artificial Sequence: Synthetic oligonucleotide
  Target: SCNA; (-) strand; PAM type: NRG; PAM sequence: AGG
gactgccggccttgctcctc

SEQ ID NO: 23756 - DNA, 20 bp, Artificial Sequence
  Description of Artificial Sequence: Synthetic oligonucleotide
  Target: SCNA; (-) strand; PAM type: NRG; PAM sequence: CAG
tgactgccggccttgctcct

SEQ ID NO: 23757 - DNA, 20 bp, Artificial Sequence
  Description of Artificial Sequence: Synthetic oligonucleotide
  Target: SCNA; (-) strand; PAM type: NRG; PAM sequence: CGG
tttgctcacactgtgactgc

SEQ ID NO: 23758 - DNA, 20 bp, Artificial Sequence
  Description of Artificial Sequence: Synthetic oligonucleotide
  Target: SCNA; (-) strand; PAM type: NRG; PAM sequence: CAG
cattctccaacttgatatgt

SEQ ID NO: 23759 - DNA, 20 bp, Artificial Sequence
  Description of Artificial Sequence: Synthetic oligonucleotide
  Target: SCNA; (-) strand; PAM type: NRG; PAM sequence: GAG
gtatgggggtgacaggaagt

SEQ ID NO: 23760 - DNA, 20 bp, Artificial Sequence
  Description of Artificial Sequence: Synthetic oligonucleotide
  Target: SCNA; (-) strand; PAM type: NRG; PAM sequence: AAG
gggtgtatgggggtgacagg

SEQ ID NO: 23761 - DNA, 20 bp, Artificial Sequence
  Description of Artificial Sequence: Synthetic oligonucleotide
  Target: SCNA; (-) strand; PAM type: NRG; PAM sequence: AGG
tcagggtgtatgggggtgac

SEQ ID NO: 23762 - DNA, 20 bp, Artificial Sequence
  Description of Artificial Sequence: Synthetic oligonucleotide
  Target: SCNA; (-) strand; PAM type: NRG; PAM sequence: CAG
atcagggtgtatgggggtga

SEQ ID NO: 23763 - DNA, 20 bp, Artificial Sequence
  Description of Artificial Sequence: Synthetic oligonucleotide
  Target: SCNA; (-) strand; PAM type: NRG; PAM sequence: GGG
ttgggaatcagggtgtatgg

SEQ ID NO: 23764 - DNA, 20 bp, Artificial Sequence
  Description of Artificial Sequence: Synthetic oligonucleotide
  Target: SCNA; (-) strand; PAM type: NRG; PAM sequence: GGG
cttgggaatcagggtgtatg

SEQ ID NO: 23765 - DNA, 20 bp, Artificial Sequence
  Description of Artificial Sequence: Synthetic oligonucleotide
  Target: SCNA; (-) strand; PAM type: NRG; PAM sequence: GGG
tcttgggaatcagggtgtat

SEQ ID NO: 23766 - DNA, 20 bp, Artificial Sequence
  Description of Artificial Sequence: Synthetic oligonucleotide
  Target: SCNA; (-) strand; PAM type: NRG; PAM sequence: TGG
ctcttgggaatcagggtgta

SEQ ID NO: 23767 - DNA, 20 bp, Artificial Sequence
  Description of Artificial Sequence: Synthetic oligonucleotide
  Target: SCNA; (-) strand; PAM type: NRG; PAM sequence: GGG
gcctcaactcttgggaatca

SEQ ID NO: 23768 - DNA, 20 bp, Artificial Sequence
  Description of Artificial Sequence: Synthetic oligonucleotide
  Target: SCNA; (-) strand; PAM type: NRG; PAM sequence: AGG
tgcctcaactcttgggaatc

SEQ ID NO: 23769 - DNA, 20 bp, Artificial Sequence
  Description of Artificial Sequence: Synthetic oligonucleotide
  Target: SCNA; (-) strand; PAM type: NRG; PAM sequence: CAG
ctgcctcaactcttgggaat

SEQ ID NO: 23770 - DNA, 20 bp, Artificial Sequence
  Description of Artificial Sequence: Synthetic oligonucleotide
  Target: SCNA; (-) strand; PAM type: NRG; PAM sequence: GGG
ccacaactgcctcaactctt

SEQ ID NO: 23771 - DNA, 20 bp, Artificial Sequence
  Description of Artificial Sequence: Synthetic oligonucleotide
  Target: SCNA; (-) strand; PAM type: NRG; PAM sequence: TGG
accacaactgcctcaactct

SEQ ID NO: 23772 - DNA, 20 bp, Artificial Sequence
  Description of Artificial Sequence: Synthetic oligonucleotide
  Target: SCNA; (-) strand; PAM type: NRG; PAM sequence: AAG
tctgagcccatgggaaacct

SEQ ID NO: 23773 - DNA, 20 bp, Artificial Sequence
  Description of Artificial Sequence: Synthetic oligonucleotide
  Target: SCNA; (-) strand; PAM type: NRG; PAM sequence: GGG
gaggcctaatctgagcccat

SEQ ID NO: 23774 - DNA, 20 bp, Artificial Sequence
  Description of Artificial Sequence: Synthetic oligonucleotide
  Target: SCNA; (-) strand; PAM type: NRG; PAM sequence: TGG
cgaggcctaatctgagccca

SEQ ID NO: 23775 - DNA, 20 bp, Artificial Sequence
  Description of Artificial Sequence: Synthetic oligonucleotide
  Target: SCNA; (-) strand; PAM type: NRG; PAM sequence: GAG
ttccgtccgaggcctaatct

SEQ ID NO: 23776 - DNA, 20 bp, Artificial Sequence
  Description of Artificial Sequence: Synthetic oligonucleotide
  Target: SCNA; (-) strand; PAM type: NRG; PAM sequence: AGG
actgccttcacttccgtccg

SEQ ID NO: 23777 - DNA, 20 bp, Artificial Sequence
  Description of Artificial Sequence: Synthetic oligonucleotide
  Target: SCNA; (-) strand; PAM type: NRG; PAM sequence: GAG
cactgccttcacttccgtcc

SEQ ID NO: 23778 - DNA, 20 bp, Artificial Sequence
  Description of Artificial Sequence: Synthetic oligonucleotide
  Target: SCNA; (-) strand; PAM type: NRG; PAM sequence: CAG
tccgccatatttcacccagc

SEQ ID NO: 23779 - DNA, 20 bp, Artificial Sequence
  Description of Artificial Sequence: Synthetic oligonucleotide
  Target: SCNA; (-) strand; PAM type: NRG; PAM sequence: CAG
tctgtccgccatatttcacc

SEQ ID NO: 23780 - DNA, 20 bp, Artificial Sequence
  Description of Artificial Sequence: Synthetic oligonucleotide
  Target: SCNA; (-) strand; PAM type: NRG; PAM sequence: GGG
aatacttcaggggtctaaaa

SEQ ID NO: 23781 - DNA, 20 bp, Artificial Sequence
  Description of Artificial Sequence: Synthetic oligonucleotide
  Target: SCNA; (-) strand; PAM type: NRG; PAM sequence: AGG
taatacttcaggggtctaaa

SEQ ID NO: 23782 - DNA, 20 bp, Artificial Sequence
  Description of Artificial Sequence: Synthetic oligonucleotide
  Target: SCNA; (-) strand; PAM type: NRG; PAM sequence: AAG
ctaatacttcaggggtctaa

SEQ ID NO: 23783 - DNA, 20 bp, Artificial Sequence
  Description of Artificial Sequence: Synthetic oligonucleotide
  Target: SCNA; (-) strand; PAM type: NRG; PAM sequence: GGG
gatcctctctaatacttcag

SEQ ID NO: 23784 - DNA, 20 bp, Artificial Sequence
  Description of Artificial Sequence: Synthetic oligonucleotide
  Target: SCNA; (-) strand; PAM type: NRG; PAM sequence: GGG
tgatcctctctaatacttca

SEQ ID NO: 23785 - DNA, 20 bp, Artificial Sequence
  Description of Artificial Sequence: Synthetic oligonucleotide
  Target: SCNA; (-) strand; PAM type: NRG; PAM sequence: AGG
ctgatcctctctaatacttc

SEQ ID NO: 23786 - DNA, 20 bp, Artificial Sequence
  Description of Artificial Sequence: Synthetic oligonucleotide
  Target: SCNA; (-) strand; PAM type: NRG; PAM sequence: CAG
gctgatcctctctaatactt

SEQ ID NO: 23787 - DNA, 20 bp, Artificial Sequence
  Description of Artificial Sequence: Synthetic oligonucleotide
  Target: SCNA; (-) strand; PAM type: NRG; PAM sequence: TGG
tcatatggtctaaacgtgcc

SEQ ID NO: 23788 - DNA, 20 bp, Artificial Sequence
  Description of Artificial Sequence: Synthetic oligonucleotide
  Target: SCNA; (-) strand; PAM type: NRG; PAM sequence: TGG
ctacaatatgatacatcata

SEQ ID NO: 23789 - DNA, 20 bp, Artificial Sequence
  Description of Artificial Sequence: Synthetic oligonucleotide
  Target: SCNA; (-) strand; PAM type: NRG; PAM sequence: GGG
gcacagccacaaatgccttg

SEQ ID NO: 23790 - DNA, 20 bp, Artificial Sequence
  Description of Artificial Sequence: Synthetic oligonucleotide
  Target: SCNA; (-) strand; PAM type: NRG; PAM sequence: GGG
tgcacagccacaaatgcctt

SEQ ID NO: 23791 - DNA, 20 bp, Artificial Sequence
  Description of Artificial Sequence: Synthetic oligonucleotide
  Target: SCNA; (-) strand; PAM type: NRG; PAM sequence: TGG
ctgcacagccacaaatgcct

SEQ ID NO: 23792 - DNA, 20 bp, Artificial Sequence
  Description of Artificial Sequence: Synthetic oligonucleotide
  Target: SCNA; (-) strand; PAM type: NRG; PAM sequence: CAG
catcctgcacttttactgca

SEQ ID NO: 23793 - DNA, 20 bp, Artificial Sequence
  Description of Artificial Sequence: Synthetic oligonucleotide
  Target: SCNA; (-) strand; PAM type: NRG; PAM sequence: TGG
tccctacccttcagagagtc

SEQ ID NO: 23794 - DNA, 20 bp, Artificial Sequence
  Description of Artificial Sequence: Synthetic oligonucleotide
  Target: SCNA; (-) strand; PAM type: NRG; PAM sequence: GAG
gaatatccctacccttcaga

SEQ ID NO: 23795 - DNA, 20 bp, Artificial Sequence
  Description of Artificial Sequence: Synthetic oligonucleotide
  Target: SCNA; (-) strand; PAM type: NRG; PAM sequence: GAG
gggaatatccctacccttca

SEQ ID NO: 23796 - DNA, 20 bp, Artificial Sequence
  Description of Artificial Sequence: Synthetic oligonucleotide
  Target: SCNA; (-) strand; PAM type: NRG; PAM sequence: CAG
acgggaatatccctaccctt

SEQ ID NO: 23797 - DNA, 20 bp, Artificial Sequence
  Description of Artificial Sequence: Synthetic oligonucleotide
  Target: SCNA; (-) strand; PAM type: NRG; PAM sequence: GGG
aaaagatgagggatagggac

SEQ ID NO: 23798 - DNA, 20 bp, Artificial Sequence
  Description of Artificial Sequence: Synthetic oligonucleotide
  Target: SCNA; (-) strand; PAM type: NRG; PAM sequence: CGG
gaaaagatgagggataggga

SEQ ID NO: 23799 - DNA, 20 bp, Artificial Sequence
  Description of Artificial Sequence: Synthetic oligonucleotide
  Target: SCNA; (-) strand; PAM type: NRG; PAM sequence: GGG
gggggaaaagatgagggata

SEQ ID NO: 23800 - DNA, 20 bp, Artificial Sequence
  Description of Artificial Sequence: Synthetic oligonucleotide
  Target: SCNA; (-) strand; PAM type: NRG; PAM sequence: AGG
agggggaaaagatgagggat

SEQ ID NO: 23801 - DNA, 20 bp, Artificial Sequence
  Description of Artificial Sequence: Synthetic oligonucleotide
  Target: SCNA; (-) strand; PAM type: NRG; PAM sequence: TAG
aagggggaaaagatgaggga

SEQ ID NO: 23802 - DNA, 20 bp, Artificial Sequence
  Description of Artificial Sequence: Synthetic oligonucleotide
  Target: SCNA; (-) strand; PAM type: NRG; PAM sequence: GGG
tgcaaagggggaaaagatga

SEQ ID NO: 23803 - DNA, 20 bp, Artificial Sequence
  Description of Artificial Sequence: Synthetic oligonucleotide
  Target: SCNA; (-) strand; PAM type: NRG; PAM sequence: AGG
ctgcaaagggggaaaagatg

SEQ ID NO: 23804 - DNA, 20 bp, Artificial Sequence
  Description of Artificial Sequence: Synthetic oligonucleotide
  Target: SCNA; (-) strand; PAM type: NRG; PAM sequence: GAG
tctgcaaagggggaaaagat

SEQ ID NO: 23805 - DNA, 20 bp, Artificial Sequence
  Description of Artificial Sequence: Synthetic oligonucleotide
  Target: SCNA; (-) strand; PAM type: NRG; PAM sequence: AAG
gtttatctgcaaagggggaa

SEQ ID NO: 23806 - DNA, 20 bp, Artificial Sequence
  Description of Artificial Sequence: Synthetic oligonucleotide
  Target: SCNA; (-) strand; PAM type: NRG; PAM sequence: GGG
ggatggtttatctgcaaagg

SEQ ID NO: 23807 - DNA, 20 bp, Artificial Sequence
  Description of Artificial Sequence: Synthetic oligonucleotide
  Target: SCNA; (-) strand; PAM type: NRG; PAM sequence: GGG
gggatggtttatctgcaaag

SEQ ID NO: 23808 - DNA, 20 bp, Artificial Sequence
  Description of Artificial Sequence: Synthetic oligonucleotide
  Target: SCNA; (-) strand; PAM type: NRG; PAM sequence: GGG
tgggatggtttatctgcaaa

SEQ ID NO: 23809 - DNA, 20 bp, Artificial Sequence
  Description of Artificial Sequence: Synthetic oligonucleotide
  Target: SCNA; (-) strand; PAM type: NRG; PAM sequence: AGG
gtgggatggtttatctgcaa

SEQ ID NO: 23810 - DNA, 20 bp, Artificial Sequence
  Description of Artificial Sequence: Synthetic oligonucleotide
  Target: SCNA; (-) strand; PAM type: NRG; PAM sequence: AAG
agtgggatggtttatctgca

SEQ ID NO: 23811 - DNA, 20 bp, Artificial Sequence
  Description of Artificial Sequence: Synthetic oligonucleotide
  Target: SCNA; (-) strand; PAM type: NRG; PAM sequence: TGG
aagttcatttgaaagtggga

SEQ ID NO: 23812 - DNA, 20 bp, Artificial Sequence
  Description of Artificial Sequence: Synthetic oligonucleotide
  Target: SCNA; (-) strand; PAM type: NRG; PAM sequence: GGG
tcccaagttcatttgaaagt

SEQ ID NO: 23813 - DNA, 20 bp, Artificial Sequence
  Description of Artificial Sequence: Synthetic oligonucleotide
  Target: SCNA; (-) strand; PAM type: NRG; PAM sequence: TGG
ctcccaagttcatttgaaag

SEQ ID NO: 23814 - DNA, 20 bp, Artificial Sequence
  Description of Artificial Sequence: Synthetic oligonucleotide
  Target: SCNA; (-) strand; PAM type: NRG; PAM sequence: AAG
ctcctcccaagttcatttga

SEQ ID NO: 23815 - DNA, 20 bp, Artificial Sequence
  Description of Artificial Sequence: Synthetic oligonucleotide
  Target: SCNA; (-) strand; PAM type: NRG; PAM sequence: AAG
gttcaaagccccctcctccc

SEQ ID NO: 23816 - DNA, 20 bp, Artificial Sequence
  Description of Artificial Sequence: Synthetic oligonucleotide
  Target: SCNA; (-) strand; PAM type: NRG; PAM sequence: AAG
acaaccccaagcacagttca

SEQ ID NO: 23817 - DNA, 20 bp, Artificial Sequence
  Description of Artificial Sequence: Synthetic oligonucleotide
  Target: SCNA; (-) strand; PAM type: NRG; PAM sequence: CAG
aggagaaacaaccccaagca

SEQ ID NO: 23818 - DNA, 20 bp, Artificial Sequence
  Description of Artificial Sequence: Synthetic oligonucleotide
  Target: SCNA; (-) strand; PAM type: NRG; PAM sequence: AAG
tccagaggagaaacaacccc

SEQ ID NO: 23819 - DNA, 20 bp, Artificial Sequence
  Description of Artificial Sequence: Synthetic oligonucleotide
  Target: SCNA; (-) strand; PAM type: NRG; PAM sequence: GAG
gaatggaagcatttccagag

SEQ ID NO: 23820 - DNA, 20 bp, Artificial Sequence
  Description of Artificial Sequence: Synthetic oligonucleotide
  Target: SCNA; (-) strand; PAM type: NRG; PAM sequence: AGG
tagaatggaagcatttccag

SEQ ID NO: 23821 - DNA, 20 bp, Artificial Sequence
  Description of Artificial Sequence: Synthetic oligonucleotide
  Target: SCNA; (-) strand; PAM type: NRG; PAM sequence: GAG
ttagaatggaagcatttcca

SEQ ID NO: 23822 - DNA, 20 bp, Artificial Sequence
  Description of Artificial Sequence: Synthetic oligonucleotide
  Target: SCNA; (-) strand; PAM type: NRG; PAM sequence: CAG
ttttagaatggaagcatttc

SEQ ID NO: 23823 - DNA, 20 bp, Artificial Sequence
  Description of Artificial Sequence: Synthetic oligonucleotide
  Target: SCNA; (-) strand; PAM type: NRG; PAM sequence: AAG
gccagaactttttagaatgg

SEQ ID NO: 23824 - DNA, 20 bp, Artificial Sequence
  Description of Artificial Sequence: Synthetic oligonucleotide
  Target: SCNA; (-) strand; PAM type: NRG; PAM sequence: TGG
tatgccagaactttttagaa

SEQ ID NO: 23825 - DNA, 20 bp, Artificial Sequence
  Description of Artificial Sequence: Synthetic oligonucleotide
  Target: SCNA; (-) strand; PAM type: NRG; PAM sequence: TAG
ttccctatgccagaactttt

SEQ ID NO: 23826 - DNA, 20 bp, Artificial Sequence
  Description of Artificial Sequence: Synthetic oligonucleotide
  Target: SCNA; (-) strand; PAM type: NRG; PAM sequence: CAG
cttaggccaattccctatgc

SEQ ID NO: 23827 - DNA, 20 bp, Artificial Sequence
  Description of Artificial Sequence: Synthetic oligonucleotide
  Target: SCNA; (-) strand; PAM type: NRG; PAM sequence: AGG
ggagggcagagtttttcctt

SEQ ID NO: 23828 - DNA, 20 bp, Artificial Sequence
  Description of Artificial Sequence: Synthetic oligonucleotide
  Target: SCNA; (-) strand; PAM type: NRG; PAM sequence: TAG
aggagggcagagtttttcct

SEQ ID NO: 23829 - DNA, 20 bp, Artificial Sequence
  Description of Artificial Sequence: Synthetic oligonucleotide
  Target: SCNA; (-) strand; PAM type: NRG; PAM sequence: GAG
cattaaggggaaggagggca

SEQ ID NO: 23830 - DNA, 20 bp, Artificial Sequence
  Description of Artificial Sequence: Synthetic oligonucleotide
  Target: SCNA; (-) strand; PAM type: NRG; PAM sequence: CAG
tccattaaggggaaggaggg

SEQ ID NO: 23831 - DNA, 20 bp, Artificial Sequence
  Description of Artificial Sequence: Synthetic oligonucleotide
  Target: SCNA; (-) strand; PAM type: NRG; PAM sequence: GGG
cagtccattaaggggaagga

SEQ ID NO: 23832 - DNA, 20 bp, Artificial Sequence
  Description of Artificial Sequence: Synthetic oligonucleotide
  Target: SCNA; (-) strand; PAM type: NRG; PAM sequence: AGG
acagtccattaaggggaagg

SEQ ID NO: 23833 - DNA, 20 bp, Artificial Sequence
  Description of Artificial Sequence: Synthetic oligonucleotide
  Target: SCNA; (-) strand; PAM type: NRG; PAM sequence: GAG
gacagtccattaaggggaag

SEQ ID NO: 23834 - DNA, 20 bp, Artificial Sequence
  Description of Artificial Sequence: Synthetic oligonucleotide
  Target: SCNA; (-) strand; PAM type: NRG; PAM sequence: AGG
aggacagtccattaagggga

SEQ ID NO: 23835 - DNA, 20 bp, Artificial Sequence
  Description of Artificial Sequence: Synthetic oligonucleotide
  Target: SCNA; (-) strand; PAM type: NRG; PAM sequence: AAG
caggacagtccattaagggg

SEQ ID NO: 23836 - DNA, 20 bp, Artificial Sequence
  Description of Artificial Sequence: Synthetic oligonucleotide
  Target: SCNA; (-) strand; PAM type: NRG; PAM sequence: GGG
aggcaggacagtccattaag

SEQ ID NO: 23837 - DNA, 20 bp, Artificial Sequence
  Description of Artificial Sequence: Synthetic oligonucleotide
  Target: SCNA; (-) strand; PAM type: NRG; PAM sequence: GGG
aaggcaggacagtccattaa

SEQ ID NO: 23838 - DNA, 20 bp, Artificial Sequence
  Description of Artificial Sequence: Synthetic oligonucleotide
  Target: SCNA; (-) strand; PAM type: NRG; PAM sequence: AGG
aaaggcaggacagtccatta

SEQ ID NO: 23839 - DNA, 20 bp, Artificial Sequence
  Description of Artificial Sequence: Synthetic oligonucleotide
  Target: SCNA; (-) strand; PAM type: NRG; PAM sequence: AAG
caaaggcaggacagtccatt

SEQ ID NO: 23840 - DNA, 20 bp, Artificial Sequence
  Description of Artificial Sequence: Synthetic oligonucleotide
  Target: SCNA; (-) strand; PAM type: NRG; PAM sequence: CAG
actcacactcaaaggcagga

SEQ ID NO: 23841 - DNA, 20 bp, Artificial Sequence
  Description of Artificial Sequence: Synthetic oligonucleotide
  Target: SCNA; (-) strand; PAM type: NRG; PAM sequence: AGG
ttttactcacactcaaaggc

SEQ ID NO: 23842 - DNA, 20 bp, Artificial Sequence
  Description of Artificial Sequence: Synthetic oligonucleotide
  Target: SCNA; (-) strand; PAM type: NRG; PAM sequence: CAG
cttttactcacactcaaagg

SEQ ID NO: 23843 - DNA, 20 bp, Artificial Sequence
  Description of Artificial Sequence: Synthetic oligonucleotide
  Target: SCNA; (-) strand; PAM type: NRG; PAM sequence: AGG
ccccttttactcacactcaa

SEQ ID NO: 23844 - DNA, 20 bp, Artificial Sequence
  Description of Artificial Sequence: Synthetic oligonucleotide
  Target: SCNA; (-) strand; PAM type: NRG; PAM sequence: AAG
gccccttttactcacactca

SEQ ID NO: 23845 - DNA, 20 bp, Artificial Sequence
  Description of Artificial Sequence: Synthetic oligonucleotide
  Target: SCNA; (-) strand; PAM type: NRG; PAM sequence: CAG
aattggctgatgaatgatct

SEQ ID NO: 23846 - DNA, 20 bp, Artificial Sequence
  Description of Artificial Sequence: Synthetic oligonucleotide
  Target: SCNA; (-) strand; PAM type: NRG; PAM sequence: TGG
gtagattgcagctgtaaaat

SEQ ID NO: 23847 - DNA, 20 bp, Artificial Sequence
  Description of Artificial Sequence: Synthetic oligonucleotide
  Target: SCNA; (-) strand; PAM type: NRG; PAM sequence: CAG
gggcaggtctaagtagattg

SEQ ID NO: 23848 - DNA, 20 bp, Artificial Sequence
  Description of Artificial Sequence: Synthetic oligonucleotide
  Target: SCNA; (-) strand; PAM type: NRG; PAM sequence: TAG
tagatgggggcaggtctaag

SEQ ID NO: 23849 - DNA, 20 bp, Artificial Sequence
  Description of Artificial Sequence: Synthetic oligonucleotide
  Target: SCNA; (-) strand; PAM type: NRG; PAM sequence: AAG
acctagatgggggcaggtct

SEQ ID NO: 23850 - DNA, 20 bp, Artificial Sequence
  Description of Artificial Sequence: Synthetic oligonucleotide
  Target: SCNA; (-) strand; PAM type: NRG; PAM sequence: AGG
ttggtgacctagatgggggc

SEQ ID NO: 23851 - DNA, 20 bp, Artificial Sequence
  Description of Artificial Sequence: Synthetic oligonucleotide
  Target: SCNA; (-) strand; PAM type: NRG; PAM sequence: CAG
cttggtgacctagatggggg

SEQ ID NO: 23852 - DNA, 20 bp, Artificial Sequence
  Description of Artificial Sequence: Synthetic oligonucleotide
  Target: SCNA; (-) strand; PAM type: NRG; PAM sequence: GGG
atccttggtgacctagatgg

SEQ ID NO: 23853 - DNA, 20 bp, Artificial Sequence
  Description of Artificial Sequence: Synthetic oligonucleotide
  Target: SCNA; (-) strand; PAM type: NRG; PAM sequence: GGG
gatccttggtgacctagatg

SEQ ID NO: 23854 - DNA, 20 bp, Artificial Sequence
  Description of Artificial Sequence: Synthetic oligonucleotide
  Target: SCNA; (-) strand; PAM type: NRG; PAM sequence: GGG
agatccttggtgacctagat

SEQ ID NO: 23855 - DNA, 20 bp, Artificial Sequence
  Description of Artificial Sequence: Synthetic oligonucleotide
  Target: SCNA; (-) strand; PAM type: NRG; PAM sequence: TGG
aagatccttggtgacctaga

SEQ ID NO: 23856 - DNA, 20 bp, Artificial Sequence
  Description of Artificial Sequence: Synthetic oligonucleotide
  Target: SCNA; (-) strand; PAM type: NRG; PAM sequence: TAG
gacaaagatccttggtgacc

SEQ ID NO: 23857 - DNA, 20 bp, Artificial Sequence
  Description of Artificial Sequence: Synthetic oligonucleotide
  Target: SCNA; (-) strand; PAM type: NRG; PAM sequence: TGG
caaatgctgacaaagatcct

SEQ ID NO: 23858 - DNA, 20 bp, Artificial Sequence
  Description of Artificial Sequence: Synthetic oligonucleotide
  Target: SCNA; (-) strand; PAM type: NRG; PAM sequence: AAG
ctttgtaccaaatgctgaca

SEQ ID NO: 23859 - DNA, 20 bp, Artificial Sequence
  Description of Artificial Sequence: Synthetic oligonucleotide
  Target: SCNA; (-) strand; PAM type: NRG; PAM sequence: AGG
atgaccatcttcattcacat

SEQ ID NO: 23860 - DNA, 20 bp, Artificial Sequence
  Description of Artificial Sequence: Synthetic oligonucleotide
  Target: SCNA; (-) strand; PAM type: NRG; PAM sequence: TAG
aatgaccatcttcattcaca

SEQ ID NO: 23861 - DNA, 20 bp, Artificial Sequence
  Description of Artificial Sequence: Synthetic oligonucleotide
  Target: SCNA; (-) strand; PAM type: NRG; PAM sequence: AAG
catttcttgggacaacacca

SEQ ID NO: 23862 - DNA, 20 bp, Artificial Sequence
  Description of Artificial Sequence: Synthetic oligonucleotide
  Target: SCNA; (-) strand; PAM type: NRG; PAM sequence: GGG
cattttctgttacatttctt

SEQ ID NO: 23863 - DNA, 20 bp, Artificial Sequence
  Description of Artificial Sequence: Synthetic oligonucleotide
  Target: SCNA; (-) strand; PAM type: NRG; PAM sequence: TGG
tcattttctgttacatttct

SEQ ID NO: 23864 - DNA, 20 bp, Artificial Sequence
  Description of Artificial Sequence: Synthetic oligonucleotide
  Target: SCNA; (-) strand; PAM type: NRG; PAM sequence: TAG
tatcagaatccattctttta

SEQ ID NO: 23865 - DNA, 20 bp, Artificial Sequence
  Description of Artificial Sequence: Synthetic oligonucleotide
  Target: SCNA; (-) strand; PAM type: NRG; PAM sequence: CAG
caggactcagcatcccatat

SEQ ID NO: 23866 - DNA, 20 bp, Artificial Sequence
  Description of Artificial Sequence: Synthetic oligonucleotide
  Target: SCNA; (-) strand; PAM type: NRG; PAM sequence: CAG
ttagagagattatcaggact

SEQ ID NO: 23867 - DNA, 20 bp, Artificial Sequence
  Description of Artificial Sequence: Synthetic oligonucleotide
  Target: SCNA; (-) strand; PAM type: NRG; PAM sequence: AGG
agacatttagagagattatc

SEQ ID NO: 23868 - DNA, 20 bp, Artificial Sequence
  Description of Artificial Sequence: Synthetic oligonucleotide
  Target: SCNA; (-) strand; PAM type: NRG; PAM sequence: CAG
aagacatttagagagattat

SEQ ID NO: 23869 - DNA, 20 bp, Artificial Sequence
  Description of Artificial Sequence: Synthetic oligonucleotide
  Target: SCNA; (-) strand; PAM type: NRG; PAM sequence: GAG
ctagatgaaagacatttaga

SEQ ID NO: 23870 - DNA, 20 bp, Artificial Sequence
  Description of Artificial Sequence: Synthetic oligonucleotide
  Target: SCNA; (-) strand; PAM type: NRG; PAM sequence: GAG
tcctagatgaaagacattta

SEQ ID NO: 23871 - DNA, 20 bp, Artificial Sequence
  Description of Artificial Sequence: Synthetic oligonucleotide
  Target: SCNA; (-) strand; PAM type: NRG; PAM sequence: TAG
ggtcctagatgaaagacatt

SEQ ID NO: 23872 - DNA, 20 bp, Artificial Sequence
  Description of Artificial Sequence: Synthetic oligonucleotide
  Target: SCNA; (-) strand; PAM type: NRG; PAM sequence: AAG
tgattgcaggtcctagatga

SEQ ID NO: 23873 - DNA, 20 bp, Artificial Sequence
  Description of Artificial Sequence: Synthetic oligonucleotide
  Target: SCNA; (-) strand; PAM type: NRG; PAM sequence: TAG
taatggctgattgcaggtcc

SEQ ID NO: 23874 - DNA, 20 bp, Artificial Sequence
  Description of Artificial Sequence: Synthetic oligonucleotide
  Target: SCNA; (-) strand; PAM type: NRG; PAM sequence: AGG
tcttaataatggctgattgc

SEQ ID NO: 23875 - DNA, 20 bp, Artificial Sequence
  Description of Artificial Sequence: Synthetic oligonucleotide
  Target: SCNA; (-) strand; PAM type: NRG; PAM sequence: CAG
ttcttaataatggctgattg

SEQ ID NO: 23876 - DNA, 20 bp, Artificial Sequence
  Description of Artificial Sequence: Synthetic oligonucleotide
  Target: SCNA; (-) strand; PAM type: NRG; PAM sequence: TGG
ttttctctttttcttaataa

SEQ ID NO: 23877 - DNA, 20 bp, Artificial Sequence
  Description of Artificial Sequence: Synthetic oligonucleotide
  Target: SCNA; (-) strand; PAM type: NRG; PAM sequence: TGG
ttgggatgccacaggttaat

SEQ ID NO: 23878 - DNA, 20 bp, Artificial Sequence
  Description of Artificial Sequence: Synthetic oligonucleotide
  Target: SCNA; (-) strand; PAM type: NRG; PAM sequence: AGG
acacagatttgggatgccac

SEQ ID NO: 23879 - DNA, 20 bp, Artificial Sequence
  Description of Artificial Sequence: Synthetic oligonucleotide
  Target: SCNA; (-) strand; PAM type: NRG; PAM sequence: CAG
aacacagatttgggatgcca

SEQ ID NO: 23880 - DNA, 20 bp, Artificial Sequence
  Description of Artificial Sequence: Synthetic oligonucleotide
  Target: SCNA; (-) strand; PAM type: NRG; PAM sequence: GGG
gttcagtaaaacacagattt

SEQ ID NO: 23881 - DNA, 20 bp, Artificial Sequence
  Description of Artificial Sequence: Synthetic oligonucleotide
  Target: SCNA; (-) strand; PAM type: NRG; PAM sequence: TGG
tgttcagtaaaacacagatt

SEQ ID NO: 23882 - DNA, 20 bp, Artificial Sequence
  Description of Artificial Sequence: Synthetic oligonucleotide
  Target: SCNA; (-) strand; PAM type: NRG; PAM sequence: CAG
tctaggtgttcagtaaaaca

SEQ ID NO: 23883 - DNA, 20 bp, Artificial Sequence
  Description of Artificial Sequence: Synthetic oligonucleotide
  Target: SCNA; (-) strand; PAM type: NRG; PAM sequence: CAG
ggagaatagttctaggtgtt

SEQ ID NO: 23884 - DNA, 20 bp, Artificial Sequence
  Description of Artificial Sequence: Synthetic oligonucleotide
  Target: SCNA; (-) strand; PAM type: NRG; PAM sequence: AGG
aacccatggagaatagttct

SEQ ID NO: 23885 - DNA, 20 bp, Artificial Sequence
  Description of Artificial Sequence: Synthetic oligonucleotide
  Target: SCNA; (-) strand; PAM type: NRG; PAM sequence: TAG
aaacccatggagaatagttc

SEQ ID NO: 23886 - DNA, 20 bp, Artificial Sequence
  Description of Artificial Sequence: Synthetic oligonucleotide
  Target: SCNA; (-) strand; PAM type: NRG; PAM sequence: TAG
gacgccaaacccatggagaa

SEQ ID NO: 23887 - DNA, 20 bp, Artificial Sequence
  Description of Artificial Sequence: Synthetic oligonucleotide
  Target: SCNA; (-) strand; PAM type: NRG; PAM sequence: GAG
tctttgacgccaaacccatg

SEQ ID NO: 23888 - DNA, 20 bp, Artificial Sequence
  Description of Artificial Sequence: Synthetic oligonucleotide
  Target: SCNA; (-) strand; PAM type: NRG; PAM sequence: TGG
cctctttgacgccaaaccca

SEQ ID NO: 23889 - DNA, 20 bp, Artificial Sequence
  Description of Artificial Sequence: Synthetic oligonucleotide
  Target: SCNA; (-) strand; PAM type: NRG; PAM sequence: TAG
aatattgtatgtaagaggaa

SEQ ID NO: 23890 - DNA, 20 bp, Artificial Sequence
  Description of Artificial Sequence: Synthetic oligonucleotide
  Target: SCNA; (-) strand; PAM type: NRG; PAM sequence: AGG
gccttaatattgtatgtaag

SEQ ID NO: 23891 - DNA, 20 bp, Artificial Sequence
  Description of Artificial Sequence: Synthetic oligonucleotide
  Target: SCNA; (-) strand; PAM type: NRG; PAM sequence: GAG
ggccttaatattgtatgtaa

SEQ ID NO: 23892 - DNA, 20 bp, Artificial Sequence
  Description of Artificial Sequence: Synthetic oligonucleotide
  Target: SCNA; (-) strand; PAM type: NRG; PAM sequence: AAG
aaggccttaatattgtatgt
